United States Patent Application Publication US 2025/0084491 A1 - sequence listing, part 16

SEQ ID NO: 293746 - DNA, 75 bp, synthetic construct
  source 1..75: mol_type = other DNA
ccgttctgtgtggcgggtgggattaaatcgctggatgacgccgccaaaattctttcctttggcgcggataaaatc

SEQ ID NO: 293747 - DNA, 75 bp, synthetic construct
  source 1..75: mol_type = other DNA
ctgcttcgcggaagagaacggttcaatcgttaactctggtcgctggttgcagtggcactggaaaggtgcggacgc

SEQ ID NO: 293748 - DNA, 75 bp, synthetic construct
  source 1..75: mol_type = other DNA
cgaggcgtttcgccacattgcgcaagaaatgccggaaaaaatccggcaaatcgaagagaaagttgcccgcatggg

SEQ ID NO: 293749 - DNA, 75 bp, synthetic construct
  source 1..75: mol_type = other DNA
tcggggaggggaattatcagcgatggattactgcacaacgccctgcggcaattcctctggatcaaaaactcaccc

SEQ ID NO: 293750 - DNA, 75 bp, synthetic construct
  source 1..75: mol_type = other DNA
ccggctggtttgatttgcagttaaaacaacgtgtctacaacgaaaacggcaaacgggttgatgccgttgtgatga

SEQ ID NO: 293751 - DNA, 75 bp, synthetic construct
  source 1..75: mol_type = other DNA
ttattacagcacggcacgttctcgcaggagtttcactcgccggtcaatgtggatgagctgatgtccgccattctg

SEQ ID NO: 293752 - DNA, 75 bp, synthetic construct
  source 1..75: mol_type = other DNA
tgacgcccgtctacgacatgctgccgatggcctatgcaccaaacagcgccggaatgctgcgtgatgctgccattg

SEQ ID NO: 293753 - DNA, 75 bp, synthetic construct
  source 1..75: mol_type = other DNA
atcctgcgtgacggcgggatccacgccatcgagtcaacggtgcttgtaacaagtaacaggcaggtattcctggaa

SEQ ID NO: 293754 - DNA, 75 bp, synthetic construct
  source 1..75: mol_type = other DNA
caacgtgaagcgccacgacgcgcaccgtttctatctgcgagaaggctacgagcagagtcacttccgcttcaccaa

SEQ ID NO: 293755 - DNA, 75 bp, synthetic construct
  source 1..75: mol_type = other DNA
tgaccaaaatccagcagaagcatggcctgccgctctacggctgcaacgaagtaccaccgcgcccactgacaggac

SEQ ID NO: 293756 - DNA, 75 bp, synthetic construct
  source 1..75: mol_type = other DNA
gtgaagctgttacagaaatggcttttttgtccagtgaagagattacgcggctgttatccatgcttgatgatgatg

SEQ ID NO: 293757 - DNA, 75 bp, synthetic construct
  source 1..75: mol_type = other DNA
tctccttcctggttgcgaataactctatcgccagtaactttggtcgttatgctggtgcaagtccatttactacct

SEQ ID NO: 293758 - DNA, 75 bp, synthetic construct
  source 1..75: mol_type = other DNA
acctaaatcatgggcgattggttctcttggccgctttggtaacgaatactccggctggtttgatttgcagttaaa

SEQ ID NO: 293759 - DNA, 75 bp, synthetic construct
  source 1..75: mol_type = other DNA
tgttatgaaaggggacttaaaatacaagactatagtgtatattttgaaaataaacctgggcatattgatagattt

SEQ ID NO: 293760 - DNA, 75 bp, synthetic construct
  source 1..75: mol_type = other DNA
ttatctccagtgaagtggaggagttgccgctggtgtgcgaccgcatcctgttgttacagcacggtacgttctcgc

SEQ ID NO: 293761 - DNA, 75 bp, synthetic construct
  source 1..75: mol_type = other DNA
gggtggactggtataacaatcgacgattgctgggaaggctgggtcatatccctccggcagaagcagaaaaagctt

SEQ ID NO: 293762 - DNA, 75 bp, synthetic construct
  source 1..75: mol_type = other DNA
gggtggactggtataacaatcgacgattgctgggaaggctgggtcatatccctcggcagaagcagaaaaagctat

SEQ ID NO: 293763 - DNA, 75 bp, synthetic construct
  source 1..75: mol_type = other DNA
ggtaaaaaggtccgtacgaccatcagccggaaagccgttgccgcaggcgaccgcgtaaaccgtcagttcgtagca

SEQ ID NO: 293764 - DNA, 75 bp, synthetic construct
  source 1..75: mol_type = other DNA
agccgcaagccaaataagccagtcaggaagccactaaaaagcatgatcattgatcactctaatgatcaacatgca

SEQ ID NO: 293765 - DNA, 75 bp, synthetic construct
  source 1..75: mol_type = other DNA
aaaagaaagccgggaggcggaaaagcacgctttgtctatggggcaagctggcattgttaagctggcatacgaacg

SEQ ID NO: 293766 - DNA, 75 bp, synthetic construct
  source 1..75: mol_type = other DNA
tggacatagcgatatcgtgaaagttattcttgaagcattgcccagcctagcccaggaaattaacatttcagcttc

SEQ ID NO: 293767 - DNA, 75 bp, synthetic construct
  source 1..75: mol_type = other DNA
cgtgtatgaagattcccgacccggtacgctgaatgattttcttggtgccatgacggaggatgatgcccgtccgga

SEQ ID NO: 293768 - DNA, 75 bp, synthetic construct
  source 1..75: mol_type = other DNA
tggttgttcctctcattcaccatattcagaaactgacaaaaagggttgaggagcttgaagcgaagttatccgggt

SEQ ID NO: 293769 - DNA, 75 bp, synthetic construct
  source 1..75: mol_type = other DNA
gctgaagcacattgatttttcgactgccagcccgactgtccgactggctcttcagaagggaccggtgcaggaaat

SEQ ID NO: 293770 - DNA, 75 bp, synthetic construct
  source 1..75: mol_type = other DNA
aataagatccgcgaaggtaaagtacccggtgtaaccgatcccgcagaagcgtcccggctgattcgtcggggacat

SEQ ID NO: 293771 - DNA, 75 bp, synthetic construct
  source 1..75: mol_type = other DNA
atggcgtgttctgcatgcgcaccattgatcgcgttacagtacgatatttcaccgtcactgatgtggtggggcggg

SEQ ID NO: 293772 - DNA, 75 bp, synthetic construct
  source 1..75: mol_type = other DNA
ataaattaatcaatgagctaaaagaaaaaagagagcacttcgatctactgctaaaagaactacttgaagccaaaa

SEQ ID NO: 293773 - DNA, 75 bp, synthetic construct
  source 1..75: mol_type = other DNA
actcgaccaaacaatcccgtgaaaaaggtatcgcttccgtgaaaaccaacggaacaacaacaacgattaaagata

SEQ ID NO: 293774 - DNA, 75 bp, synthetic construct
  source 1..75: mol_type = other DNA
agagcagtaatgaacagtataaatttgttctgaaagccggtaatggagaaattatcctcaccagcgagctttaca

SEQ ID NO: 293775 - DNA, 75 bp, synthetic construct
  source 1..75: mol_type = other DNA
gctattgaggcaatatcaaaatcgggaggtgatgatactgatagaccatttaatgatcttgaagttcaggggaat

SEQ ID NO: 293776 - DNA, 75 bp, synthetic construct
  source 1..75: mol_type = other DNA
gcgttatatgccgcattacaaaatgaagtgctgaacgcggttaaccaacatgctttgttctttgccgctgccttg

SEQ ID NO: 293777 - DNA, 75 bp, synthetic construct
  source 1..75: mol_type = other DNA
caatattcagtcgctgaaaagccgctacggcgaaagtgaagagatcctgtcgctgcttaatctttatcataatct

SEQ ID NO: 293778 - DNA, 75 bp, synthetic construct
  source 1..75: mol_type = other DNA
acctgaatggcgataacgtacgtctgtattgtttcggtcgggacggcgcgcagctggcggcgctacgcccggaag

SEQ ID NO: 293779 - DNA, 75 bp, synthetic construct
  source 1..75: mol_type = other DNA
gcataactacaccaatgcgctggcagcactggcactggcagacgcagctggtttgccgcgcgccagcagcctgaa

SEQ ID NO: 293780 - DNA, 75 bp, synthetic construct
  source 1..75: mol_type = other DNA
cgatcaccggttctaacggcaaaagcacggtcaccacgctagtgggtgaaatggcgaaagcggcgggggttaacg

SEQ ID NO: 293781 - DNA, 75 bp, synthetic construct
  source 1..75: mol_type = other DNA
agtacggaagcggcgctgaatggcctgcacgtagacggcacgctgcatttgttgctgggcggcgatggtaaatcg

SEQ ID NO: 293782 - DNA, 75 bp, synthetic construct
  source 1..75: mol_type = other DNA
gtgaaaggcgagaaagtgttgaacgtgaaagagatgaaactttccgggcagcataactacaccaatgcgctggca

SEQ ID NO: 293783 - DNA, 75 bp, synthetic construct
  source 1..75: mol_type = other DNA
gcctgcgttgatgctactggatgatgagtgtgaactgtacgtgctggaactgtcgagcttccagctggaaaccac

SEQ ID NO: 293784 - DNA, 75 bp, synthetic construct
  source 1..75: mol_type = other DNA
aatcccgctttccagaaataaccatgtgtcatgtatggatgttgataaaaaactacaggaactaaaaaacatgat

SEQ ID NO: 293785 - DNA, 75 bp, synthetic construct
  source 1..75: mol_type = other DNA
aaagaagaacatgacgccaagttgctcaaagttcgtggtgcgataactgatattcgggcaagcatcaaagctaca

SEQ ID NO: 293786 - DNA, 75 bp, synthetic construct
  source 1..75: mol_type = other DNA
aaaacctcaaaaccatcgtagaagaagccgctggcgttgacagactgacacgcgcctacgctattgctcgtgagc

SEQ ID NO: 293787 - DNA, 75 bp, synthetic construct
  source 1..75: mol_type = other DNA
gcccgccaggtttactccccagcaggcgtgcgttcacacatcctgacctccgttacgcctttcctgaacatcagg

SEQ ID NO: 293788 - DNA, 75 bp, synthetic construct
  source 1..75: mol_type = other DNA
cctggcaggaactggctaacccgcgtgatctgaccaaaattgtgacccaaaacctcgaatacgcaccgtggaact

SEQ ID NO: 293789 - DNA, 75 bp, synthetic construct
  source 1..75: mol_type = other DNA
gattcgctgctggataaagccttccgtcccaagacacctcaagcagcaaaggctgttgaggctgcagttcagaca

SEQ ID NO: 293790 - DNA, 75 bp, synthetic construct
  source 1..75: mol_type = other DNA
caggcactgacaaccggtcacgtggagctgccgcgccgacgcatccacgccggattgtggtttcgacttcttcgc

SEQ ID NO: 293791 - DNA, 75 bp, synthetic construct
  source 1..75: mol_type = other DNA
gggtagggctggtgacgctttatgtcagactgttggggttctcgcttccgtattagggccggatgtactgctgaa

SEQ ID NO: 293792 - DNA, 75 bp, synthetic construct
  source 1..75: mol_type = other DNA
tacggtgtccaaaccaatactcgaagttacaaacagcgcaacaaaaaaagcggcagatattgcaaaaaatatagt

SEQ ID NO: 293793 - DNA, 75 bp, synthetic construct
  source 1..75: mol_type = other DNA
tattgtggtgtgcctttttctggcgacacatatgaagggagcttttcgggctgccgggcaccctgaaatcggctt

SEQ ID NO: 293794 - DNA, 75 bp, synthetic construct
  source 1..75: mol_type = other DNA
tgaaggtgcgcagtgctattactgagatccgctcaagcatccgtacttcagaagcggcacagaacgagtcgataa

SEQ ID NO: 293795 - DNA, 75 bp, synthetic construct
  source 1..75: mol_type = other DNA
ctaattgccaccggcgtctgctttctgccgattgttctctactccggcgcgttggcgctcaacagcctgtttcac

SEQ ID NO: 293796 - DNA, 75 bp, synthetic construct
  source 1..75: mol_type = other DNA
gctcagacaattaaaaataaggtcgcaacgtttcgtgaggatattatcgaaagcaataaaggtaaagtccgtgaa

SEQ ID NO: 293797 - DNA, 75 bp, synthetic construct
  source 1..75: mol_type = other DNA
ctcgctcattctcgatggctccggaaaaatgattcacagtctggtcactatcgacatgaccaccattctggcgtt

SEQ ID NO: 293798 - DNA, 75 bp, synthetic construct
  source 1..75: mol_type = other DNA
agcggcgagtattttctctgttgggtatggtggcgctgacactgttgtatggtgcccggcaaacaggaatagata

SEQ ID NO: 293799 - DNA, 75 bp, synthetic construct
  source 1..75: mol_type = other DNA
atcacgcatcagaaagaagactttcccgcaggtgatgcgcgtggtgtcgtttctgcgatgggattccgaccaaaa

SEQ ID NO: 293800 - DNA, 75 bp, synthetic construct
  source 1..75: mol_type = other DNA
ggggcgcgttgggttggctgagtgcgcgtttagttgggcaaaatcggctcgttacggaaggcgggattattgttg

SEQ ID NO: 293801 - DNA, 75 bp, synthetic construct
  source 1..75: mol_type = other DNA
atggcactttccccggatgaaaaaacattactggttccgggagcaggcagaggtaacatcgtgcggatcaatacc

SEQ ID NO: 293802 - DNA, 75 bp, synthetic construct
  source 1..75: mol_type = other DNA
tgaaaaaacattgttgatacccggtatggtcagaggtgacattgtacgcatcaataccatcacgcatcagaaaga

SEQ ID NO: 293803 - DNA, 75 bp, synthetic construct
  source 1..75: mol_type = other DNA
taagcctggatgaaaagttgatttatgcgacttcatttgaagcgaatgcagtatcggtcattaacgtggcgacgg

SEQ ID NO: 293804 - DNA, 75 bp, synthetic construct
  source 1..75: mol_type = other DNA
agtgctttttgaagatgtcgccagagaatggcatcgcaggaaaaagggctggagcgaactacacgcacaaaaagt

SEQ ID NO: 293805 - DNA, 75 bp, synthetic construct
  source 1..75: mol_type = other DNA
gcgagcctggctaaaggcattgacccactgcacacgccaaaacctcaaatagtgctttttgaagacgttgccaga

SEQ ID NO: 293806 - DNA, 75 bp, synthetic construct
  source 1..75: mol_type = other DNA
agaaaggccgtcaggaagagagaaaaaagacgcttgaggcagcccgtcggatgcagaagatggggatgtcgcctg

SEQ ID NO: 293807 - DNA, 75 bp, synthetic construct
  source 1..75: mol_type = other DNA
ctacaatggggattctcgatggccattgataatcggttatgcacaggatgcatccggtggcgctcccaatgtgcc

SEQ ID NO: 293808 - DNA, 75 bp, synthetic construct
  source 1..75: mol_type = other DNA
ccctaaaggtctgatgcgtacacaaatacgcgttgtcggcatgatggatgggttaccagatgcctcattgccgtg

SEQ ID NO: 293809 - DNA, 75 bp, synthetic construct
  source 1..75: mol_type = other DNA
taatacccgcagagcgcgaaaaaatagaaggcgttaaatattcatatcgtggaacgaaaatgggaacccctcacg

SEQ ID NO: 293810 - DNA, 75 bp, synthetic construct
  source 1..75: mol_type = other DNA
tgcgacttcatttgaagcgaatgcagtatcggttattaacgtggcgacgggggaagattattcagtcgattacca

SEQ ID NO: 293811 - DNA, 75 bp, synthetic construct
  source 1..75: mol_type = other DNA
ctcgctcattctcgatggttccgcaacaatgattcacagcctggtcactatcgacgtgaccaccattttgtctct

SEQ ID NO: 293812 - DNA, 75 bp, synthetic construct
  source 1..75: mol_type = other DNA
cgatggttccgcatccatgattcacagtctggttactattgatatgaccaccatcttgtcgctgatgtatctggc

SEQ ID NO: 293813 - DNA, 75 bp, synthetic construct
  source 1..75: mol_type = other DNA
tccggcggtgatgtcgctggtaatctggagcgctttaatcccaatcattcccttctttgttgcctcgctgattct

SEQ ID NO: 293814 - DNA, 75 bp, synthetic construct
  source 1..75: mol_type = other DNA
gcttaattttgtggtcatcaaagtggggcttcataacatgccaccgctgatgctggccggtttgcgctttatgct

SEQ ID NO: 293815 - DNA, 75 bp, synthetic construct
  source 1..75: mol_type = other DNA
aacgggtctgcaatttttcggtgcggtgctgataatgggcgggctgtatatcaatgtgtttggtttgcggtggcg

SEQ ID NO: 293816 - DNA, 75 bp, synthetic construct
  source 1..75: mol_type = other DNA
attgtcggctatgggctctggggtacgctgcttgggcgttatgaaacctggcgcgtggcaccgttatcgttactt

SEQ ID NO: 293817 - DNA, 75 bp, synthetic construct
  source 1..75: mol_type = other DNA
gttttgatgttgatgaactgaagcgcattaaaaatgagctggaacccaaaatgggcatggacctcaatctggtac

SEQ ID NO: 293818 - DNA, 75 bp, synthetic construct
  source 1..75: mol_type = other DNA
tgtataataaagccggtgttaatgggttatttaccgacttccctgacaaggcagtaaaattcctcaacaaagagt

SEQ ID NO: 293819 - DNA, 75 bp, synthetic construct
  source 1..75: mol_type = other DNA
caagatgcgcagcagaataagctggtggtgcacccttatactgtacggtcggataagctgccggaatatacgaca

SEQ ID NO: 293820 - DNA, 75 bp, synthetic construct
  source 1..75: mol_type = other DNA
gcgaattactgcgcgagtttcccgactacacatggcaggtggcgattgctgaccttgagcagagcgaagccatcg

SEQ ID NO: 293821 - DNA, 75 bp, synthetic construct
  source 1..75: mol_type = other DNA
cgttgtggcagcgtatgctggcgcgcggctggacacctgtcacagaatccagccttgatgactggttatcgcagg

SEQ ID NO: 293822 - DNA, 75 bp, synthetic construct
  source 1..75: mol_type = other DNA
gcgaattactgcgcgaatttccagactatgtttggcaggtggcggtagccgatcttgcacagagcgaagccatcg

SEQ ID NO: 293823 - DNA, 75 bp, synthetic construct
  source 1..75: mol_type = other DNA
cgcagtgaattgctgaaagcgattgttggactggaagcgtttgagcagggcgaaattgttatcaacggcgagaaa

SEQ ID NO: 293824 - DNA, 75 bp, synthetic construct
  source 1..75: mol_type = other DNA
taagcgttaccccggcgtcgttgcgctggataacgttaacttcacgctcaataaaggcgaagttcgcgcgctgtt

SEQ ID NO: 293825 - DNA, 75 bp, synthetic construct
  source 1..75: mol_type = other DNA
gaagtgctcggcattgctggtctgctgggggcagggcgcagtgaattgctgaaggcgattgttgggctggagacg

SEQ ID NO: 293826 - DNA, 75 bp, synthetic construct
  source 1..75: mol_type = other DNA
tggcgcgttgcatggcgttaacgctatcgatcctgcattaaaggcggagctggatgcggtaaatcagcttgattt

SEQ ID NO: 293827 - DNA, 75 bp, synthetic construct
  source 1..75: mol_type = other DNA
tggatgcggtaaatcagcttgatttcaaccgctatgccacagcgttggcgaaatatcgtcaacaacgggaggtgg

SEQ ID NO: 293828 - DNA, 75 bp, synthetic construct
  source 1..75: mol_type = other DNA
atcgatcctgcgttaaaggcggaactggatgcggtaaatcagcttgatttcaaccgctatgccacagcgctggcg

SEQ ID NO: 293829 - DNA, 75 bp, synthetic construct
  source 1..75: mol_type = other DNA
atgcagttgatgatcgaagaaaacgacatcatcagccagcaagtgccagggtttgatgagtggctgtgggtgctg

SEQ ID NO: 293830 - DNA, 75 bp, synthetic construct
  source 1..75: mol_type = other DNA
cgatgaatgaacactgcggcaagccgcttaatgacactcgtttgctggctttgatgggcgagctggaaggccgta

SEQ ID NO: 293831 - DNA, 75 bp, synthetic construct
  source 1..75: mol_type = other DNA
atgtcaatgggcaaaaatatcgcacaacaaaccgtaatggagtggtggtatacgacggaatgacaccttatcggg

SEQ ID NO: 293832 - DNA, 75 bp, synthetic construct
  source 1..75: mol_type = other DNA
caacggcatgattgattacctgcaaatggcgcaggatgcccaacgttgcttacaggcgctgggtgttgatgttag

SEQ ID NO: 293833 - DNA, 75 bp, synthetic construct
  source 1..75: mol_type = other DNA
tttcagtgtattttcagtatgtgccgaaacggtatgaaagatatttagaacgggatcatgagatgcttccaagag

SEQ ID NO: 293834 - DNA, 75 bp, synthetic construct
  source 1..75: mol_type = other DNA
aatcttattatcaacaaacgtttcaacgccgggaaacgccacggctatttacttacgcgtgccgaagggtggcca

SEQ ID NO: 293835 - DNA, 75 bp, synthetic construct
  source 1..75: mol_type = other DNA
ctttgcgcaagccgtaacccaggggttgggcaaaaatcaggggctgttttttccgcacgacctgccggaattcag

SEQ ID NO: 293836 - DNA, 75 bp, synthetic construct
  source 1..75: mol_type = other DNA
gacggcacgccgtggtccaccgacaaagacggcatcattatgtgtctgctggcggcggaaatcaccgctgtcacc

SEQ ID NO: 293837 - DNA, 75 bp, synthetic construct
  source 1..75: mol_type = other DNA
gtaaagatactcacgccctgtccgaacctgcatttatttccgttctggaagtgctggcagcgaacggcgtagatg

SEQ ID NO: 293838 - DNA, 75 bp, synthetic construct
  source 1..75: mol_type = other DNA
atgaagtgatggattatcaatggtgtgatttagcagatgtattacacggtattgatgccacaccgtgggcgttca

SEQ ID NO: 293839 - DNA, 75 bp, synthetic construct
  source 1..75: mol_type = other DNA
atcgccgctatgcagaaattggcggcattgtgcatacccactcgcgccatgccactatctggtcgcaggcaggga

SEQ ID NO: 293840 - DNA, 75 bp, synthetic construct
  source 1..75: mol_type = other DNA
ggtgcattctcacggcccgttcgcatggggtgaaaacgccgccgatgcggtgcataatgccgtagtactggaaga

SEQ ID NO: 293841 - DNA, 75 bp, synthetic construct
  source 1..75: mol_type = other DNA
catgtgaaagagcaggatctggtgcagccgtttgtggaaggtctggcggatatcgttgatatggcggcgattcag

SEQ ID NO: 293842 - DNA, 75 bp, synthetic construct
  source 1..75: mol_type = other DNA
gtaagaactacctgcaaaatcaggaaggttttgttcatatttgccggctggatacggcgggggggcggggactgg

SEQ ID NO: 293843 - DNA, 75 bp, synthetic construct
  source 1..75: mol_type = other DNA
accgtgaacggttactgcctggcttccggcaggcgcggcaggcggtcgcggaaatcggcgcggtagcgagcggta

SEQ ID NO: 293844 - DNA, 75 bp, synthetic construct
  source 1..75: mol_type = other DNA
gcttcattcacgcctgctattcccgtcagcctgagcttgccgcgaagctgatgaaagatgttatcgcagaaccct

SEQ ID NO: 293845 - DNA, 75 bp, synthetic construct
  source 1..75: mol_type = other DNA
tacgcctcctgaatctatctatcctgactttcgctatcgcgccaccgatccgaatggcattgtggaaaatgaagt

SEQ ID NO: 293846 - DNA, 75 bp, synthetic construct
  source 1..75: mol_type = other DNA
gggaaaatcacctgatgctggatgtgtcgcaaagcgatagcgaagcagaattacgtggcaaccggaaaattgccg

SEQ ID NO: 293847 - DNA, 75 bp, synthetic construct
  source 1..75: mol_type = other DNA
atgcagttgatgatcgaagaaaacggcatcatcagccagcaagtgccggggtttgatgagtggctgtgggtgctg

SEQ ID NO: 293848 - DNA, 75 bp, synthetic construct
  source 1..75: mol_type = other DNA
aactgtgccttttatggttccggaaaagttgaggggcgtgtaattggaggaaatctaaatactttgacaggtata

SEQ ID NO: 293849 - DNA, 75 bp, synthetic construct
  source 1..75: mol_type = other DNA
ggaatggcatagcccactttatctggtcatcgatgactatcatctgatcactaatccagtgatccacgagtcaat

SEQ ID NO: 293850 - DNA, 75 bp, synthetic construct
  source 1..75: mol_type = other DNA
tcgcccagcttttcattgagctggcggaatggcatagcccactttatctggtcatcgatgactatcatctgatca

SEQ ID NO: 293851 - DNA, 75 bp, synthetic construct
  source 1..75: mol_type = other DNA
acggcaaacaatattctctgaacgctgcccaacgcgagcaggcgaaggattatcaggcagaattgcgcagtacgt

SEQ ID NO: 293852 - DNA, 75 bp, synthetic construct
  source 1..75: mol_type = other DNA
cagtgaaacaatgacgcaaaaacggcagtatgccagcctgacgtcactgtttgcccagcttttcattgagctggc

SEQ ID NO: 293853 - DNA, 75 bp, synthetic construct
  source 1..75: mol_type = other DNA
tggatggcacaaggttttcccagcgaggctattcaccatgctctggcagcaggcgatgcgctaatgctgcgcgat

SEQ ID NO: 293854 - DNA, 75 bp, synthetic construct
  source 1..75: mol_type = other DNA
attctgcttaatcacgcctggagtttgttcaaccatagcgaactgtcgctgctggaagagtcgcttaaggccctg

SEQ ID NO: 293855 - DNA, 75 bp, synthetic construct
  source 1..75: mol_type = other DNA
atggtggtcatttcagcctatttttccggctccgaaaccggaatgatgacactcaaccgctatcgtctgcggcat

SEQ ID NO: 293856 - DNA, 75 bp, synthetic construct
  source 1..75: mol_type = other DNA
gtatggttatgtctggcgaccctgcacagatgcagcgggcggttcagtacctgcaagaacgtatggctgctggtt

SEQ ID NO: 293857 - DNA, 75 bp, synthetic construct
  source 1..75: mol_type = other DNA
ggatggttatgtctggcgaccctgcgcagatgcagcgggcggttcattatctgcaagagcgtatggtcgcaggca

SEQ ID NO: 293858 - DNA, 75 bp, synthetic construct
  source 1..75: mol_type = other DNA
agagcctggtcgttcttttggcgataaggtaaaagtacaggattttctgtgtgtggcggttgaaggtgaaaaagt

SEQ ID NO: 293859 - DNA, 75 bp, synthetic construct
  source 1..75: mol_type = other DNA
aaaagaaagtcggcctggtcgtcaacgaatacggagacattcaggggctggtgacggttgaagatattctggaag

SEQ ID NO: 293860 - DNA, 75 bp, synthetic construct
  source 1..75: mol_type = other DNA
ggacgacgccatcagtatgctgcgtgtgcgtgaagcctggcgactcatgtcggagaaaaaagagttcaccaaaga

SEQ ID NO: 293861 - DNA, 75 bp, synthetic construct
  source 1..75: mol_type = other DNA
agccgaacgactggcaaaactggcactggaagaactgcctccgggctggttctacagccgcattgtcgcgacctc

SEQ ID NO: 293862 - DNA, 75 bp, synthetic construct
  source 1..75: mol_type = other DNA
actttcagtggaaaaatcggtaatgactccaacttattgatagtgttttatattcagataatgcccgatgacttt

SEQ ID NO: 293863 - DNA, 75 bp, synthetic construct
  source 1..75: mol_type = other DNA
agatatgtgtatccaagatgctagagtaaatggtaaggaaattatccctgttgtttctcccgcatattcaacaaa

SEQ ID NO: 293864 - DNA, 75 bp, synthetic construct
  source 1..75: mol_type = other DNA
agctgaacggctggcaaaactggcactggaagaactgcctcccggctggttctacagccgcattgtagcaacttc

SEQ ID NO: 293865 - DNA, 75 bp, synthetic construct
  source 1..75: mol_type = other DNA
gtcgaccagcacggtaacgtcggcgtgcataaattcaatggtaaaatcatgggcaccggtggatttattgatatc

SEQ ID NO: 293866 - DNA, 75 bp, synthetic construct
  source 1..75: mol_type = other DNA
tgtatggcggtgcgccggttaaccgttttatttctggtgacttcacccttgatgacagcacaaacttagcctgcc

SEQ ID NO: 293867 - DNA, 75 bp, synthetic construct
  source 1..75: mol_type = other DNA
acaaggtgtacttacacaaaccttacgcgccgccgcagcccaccagcctggtattattagtgatattggcatcgg

SEQ ID NO: 293868 - DNA, 75 bp, synthetic construct
  source 1..75: mol_type = other DNA
aaaggtgagctgacccgctcgctggcattaatgcaacaaactgagcagatggcgcgtcagcacgatgtctggcac

SEQ ID NO: 293869 - DNA, 75 bp, synthetic construct
  source 1..75: mol_type = other DNA
gttcctgcaaactgcgtgggaaacgcaggaaaaagcattccagttgattaacgaacagcatctggaacagttgcc

SEQ ID NO: 293870 - DNA, 75 bp, synthetic construct
  source 1..75: mol_type = other DNA
aaaggtgaactaactcgctcgctggcgcttatgcagcaaaccgagcaaatggcgcgccagcatgatgtctggcac

SEQ ID NO: 293871 - DNA, 75 bp, synthetic construct
  source 1..75: mol_type = other DNA
tacagcaatgaacaaattgcgggcgaactggaagtggcagcgaccaccatcaaaacgcatatccgcaatctgtat

SEQ ID NO: 293872 - DNA, 75 bp, synthetic construct
  source 1..75: mol_type = other DNA
gatctgaaccgcaacctgcttttactcaatcagttgtactggcaggcagggcggaaaagtgacgcccagcgcgta

SEQ ID NO: 293873 - DNA, 75 bp, synthetic construct
  source 1..75: mol_type = other DNA
caaaaactcggcgttgctcaccgtcaggctgcggtacagcacgcgcagaaactgctgaaaatgatgggatatggg

SEQ ID NO: 293874 - DNA, 75 bp, synthetic construct
  source 1..75: mol_type = other DNA
attacctgccgctccccctgatggaaaattacagttttcaggcggcatcacctttgctgagaacagaaatggcat

SEQ ID NO: 293875 - DNA, 75 bp, synthetic construct
  source 1..75: mol_type = other DNA
cctattctgccgcctggctggggtaatttccctgagttcatcgtggggcagagcattatcgattacgcgctcaac

SEQ ID NO: 293876 - DNA, 75 bp, synthetic construct
  source 1..75: mol_type = other DNA
ccaattctgccgcctggctggggtaatttccctgagttcatcgtcgggcagagcattattgattacgcgctcaac

SEQ ID NO: 293877 - DNA, 75 bp, synthetic construct
  source 1..75: mol_type = other DNA
ggcgtatttctgacgattgccggaatgatcatcagcttcatgtggggacttgatggtaaacatatcgcgctggag

SEQ ID NO: 293878 - DNA, 75 bp, synthetic construct
  source 1..75: mol_type = other DNA
acggtgaactggacgttcactacccaccctcaggcaatgctgtttgaagcgtggtaccgggatgttctgaaggac

SEQ ID NO: 293879 - DNA, 75 bp, synthetic construct
  source 1..75: mol_type = other DNA
acagtttaaatgccggtttactgatatttatcagggacccacgctggtagctccccgctactggcactattcggc

SEQ ID NO: 293880 - DNA, 75 bp, synthetic construct
  source 1..75: mol_type = other DNA
tattgatgccacgccgtgggcgttcagtccgtggatggtgatgcaggcgacaaatcgcgaagccagaaaacgatt

SEQ ID NO: 293881 - DNA, 75 bp, synthetic construct
  source 1..75: mol_type = other DNA
tgggcacccacaactgggagaaagcaacgaagacgcagtgatccgccgttgccgttatgagcttggcgtggaaat

SEQ ID NO: 293882 - DNA, 75 bp, synthetic construct
  source 1..75: mol_type = other DNA
gtggttggcggtgttctggggggaatgattgcctccgctgtatcaggaaaaattgccggagcgctggttgaagaa

SEQ ID NO: 293883 - DNA, 75 bp, synthetic construct
  source 1..75: mol_type = other DNA
ggccccatgcaactggaagtcccccgtgatcagtatgccggcgctgttgaaaccatgaggaataagatccgcgaa

SEQ ID NO: 293884 - DNA, 75 bp, synthetic construct
  source 1..75: mol_type = other DNA
ctgccagcccgactgtccgactggctcttcagaaggggaccggtgcaggaaatatcagtgccctgaacaaagtaa

SEQ ID NO: 293885 - DNA, 75 bp, synthetic construct
  source 1..75: mol_type = other DNA
cgatgctgccctgcagacagctgctgtccaggcaggaaaaaccttcacccgcacactggctgtctacgtcacaac

SEQ ID NO: 293886 - DNA, 75 bp, synthetic construct
  source 1..75: mol_type = other DNA
aaccagacttggtacaatatactccgacaattcgtgggattgcaaactcaccttcacgggtggttgttaaacaaa

SEQ ID NO: 293887 - DNA, 75 bp, synthetic construct
  source 1..75: mol_type = other DNA
caacgtgaagcgccacgacgcgcaccgattttacctgcgcgaaggctacgagcagagccacttccgcttcaccaa

SEQ ID NO: 293888 - DNA, 75 bp, synthetic construct
  source 1..75: mol_type = other DNA
tgggtcgaaaagcccattgaacgtaaagcgttaagcgatcttctggaattatggtgggcgtatcatggcaagaat

SEQ ID NO: 293889 - DNA, 75 bp, synthetic construct
  source 1..75: mol_type = other DNA
ctaaatctgtccgtattccgggttatctggtggatattgtggtggtcgatccggatcaaacccaactgtatggcg

SEQ ID NO: 293890 - DNA, 75 bp, synthetic construct
  source 1..75: mol_type = other DNA
agaaactgctcacttccctgcccgcacaccatttccagattgtgctggaaattaccgagcgcgatatgctgaaag

SEQ ID NO: 293891 - DNA, 75 bp, synthetic construct
  source 1..75: mol_type = other DNA
acatgccggtccgtgaaactaaaattgcgggcattcctctgaccgttcggctttatgcagatgactggacatgga

SEQ ID NO: 293892 - DNA, 75 bp, synthetic construct
  source 1..75: mol_type = other DNA
atctatcttgagcgttttacgctcgattatctgaaaattgaccgtggatttatcaacgccatcggtacggaaacg

SEQ ID NO: 293893 - DNA, 75 bp, synthetic construct
  source 1..75: mol_type = other DNA
cctgaccccgggatgattcgtgattgccagggctcttacaccccggcacaacatctgcgttttcagcaacgcctg

SEQ ID NO: 293894 - DNA, 75 bp, synthetic construct
  source 1..75: mol_type = other DNA
tatgcaggcgaatggagcagccctgacatctgcactggctccgttcctgaaggggcgcggaggggttgacgttgc

SEQ ID NO: 293895 - DNA, 75 bp, synthetic construct
  source 1..75: mol_type = other DNA
ttatcaggggcgtaattaatgaccctcgcctttttccaggaataaagcgctcaagagcaggagcatctcagctct

SEQ ID NO: 293896 - DNA, 75 bp, synthetic construct
  source 1..75: mol_type = other DNA
acggtaacgtcggcgtgcataaattcaatggtaaaatcatgggcaccggtggattggtgatgctgccaacttact

SEQ ID NO: 293897 - DNA, 75 bp, synthetic construct
  source 1..75: mol_type = other DNA
gacatttgtcgacccacgccaacaaggcggcaaactgaatgatgtgaccaaagaagacctgattaaactggtcga

SEQ ID NO: 293898 - DNA, 75 bp, synthetic construct
  source 1..75: mol_type = other DNA
acgtcaacgtgcgtataactggtgacgatgttgatatttctcagcttgagcctttcatcgttccagatccaggcg

SEQ ID NO: 293899 - DNA, 75 bp, synthetic construct
  source 1..75: mol_type = other DNA
tttttgaaaagggaaatgtcaccgtttatgcggactccgccgacgggtgccgacgtttgtgcgagtgggtaaaag

SEQ ID NO: 293900 - DNA, 75 bp, synthetic construct
  source 1..75: mol_type = other DNA
ttagccaatattattttcgtcgacttccagcaacaaggtgaaagaggactgacgaacgcgcctgatgaagatccg

SEQ ID NO: 293901 - DNA, 75 bp, synthetic construct
  source 1..75: mol_type = other DNA
ctgccgatggcgcagacttaagattctaccgtcttacctgctatagctctctctttttaccatcacccaacgcct

SEQ ID NO: 293902 - DNA, 75 bp, synthetic construct
  source 1..75: mol_type = other DNA
gtatccggtcagtgcgctggtgcttctccttctctggtgccctggatttgtggtgacactgcgtattaccgtgaa

SEQ ID NO: 293903 - DNA, 75 bp, synthetic construct
  source 1..75: mol_type = other DNA
tcaacgcttgtattatatctgatttactacagcaaaaaaaaactattaaactttactgctctgattctcaatata

SEQ ID NO: 293904 - DNA, 75 bp, synthetic construct
  source 1..75: mol_type = other DNA
attaccgactgcgcgcgtcgttttatggcacatcctcaggtcaaaggacgtcgggtttatggacaggttgggttc

SEQ ID NO: 293905 - DNA, 75 bp, synthetic construct
  source 1..75: mol_type = other DNA
ttatccatgttgcccggcgagagctgcgactggatgaggctacgtatcgacaattacttaaaacacactgcggca

SEQ ID NO: 293906 - DNA, 75 bp, synthetic construct
  source 1..75: mol_type = other DNA
cgaatactatgagatgattgagcaatatgatacgcatctggcaaaagaaaatttctcaaaaaactcatcctcatg

SEQ ID NO: 293907 - DNA, 75 bp, synthetic construct
  source 1..75: mol_type = other DNA
gtttattgcacaggacgtattgaaactgtgtgagaaattaggtgttgagttcggtgggctacagcatcacttgaa

SEQ ID NO: 293908 - DNA, 75 bp, synthetic construct
  source 1..75: mol_type = other DNA
agacctggcatcacagggctggcgctattatcacaaaccggcgggcggagacagtgttaacaaaaacattgctga

SEQ ID NO: 293909 - DNA, 75 bp, synthetic construct
  source 1..75: mol_type = other DNA
gatggcaaacatttcttctatgtgaatccgctggaagtgcatccaaaaacgttaaaattcaaccatatctacgat

SEQ ID NO: 293910 - DNA, 75 bp, synthetic construct
  source 1..75: mol_type = other DNA
agaagcggaacccagccatgcgattgaaaactttcgcattgccgcaggactgcaagacggtgaattttacgggat

SEQ ID NO: 293911 - DNA, 75 bp, synthetic construct
  source 1..75: mol_type = other DNA
atatgcccatggtctctcgacttgcccagttgaccgtgatagatgtgctggcaacaggatttactttgcgacgcg

SEQ ID NO: 293912 - DNA, 75 bp, synthetic construct
  source 1..75: mol_type = other DNA
tgctctattctggtttccttcacactggatcatctgatacatttttctctctttattggatattttctgcaattt

SEQ ID NO: 293913 - DNA, 75 bp, synthetic construct
  source 1..75: mol_type = other DNA
gagcgctggttgaagaagatcgcgtcaaaattctggcaatgattcaggagcaggtgacatggcttgccggcagtt

SEQ ID NO: 293914 - DNA, 75 bp, synthetic construct
  source 1..75: mol_type = other DNA
aggtggtgctgtcgggtcagtggcgggcgggatactgttcagtccactgggaccatttggtgcactgacagggcg

SEQ ID NO: 293915 - DNA, 75 bp, synthetic construct
  source 1..75: mol_type = other DNA
tcttcgccttttgttcagagcattaaccagcacagcgtctgcgctggcagggttcgtattgctgtgtctgttcgg

SEQ ID NO: 293916 - DNA, 75 bp, synthetic construct
  source 1..75: mol_type = other DNA
cacatatcgtttatatctgggccgatgccaacttctatcgtcctattactatgcagcgcgccaacttgccgctgt

SEQ ID NO: 293917 - DNA, 75 bp, synthetic construct
  source 1..75: mol_type = other DNA
ctcgtttccatctccatcttaatcccatcgtctggcaactggttatcaacccagacgaaaatgagatggcgcgcg

SEQ ID NO: 293918 - DNA, 75 bp, synthetic construct
  source 1..75: mol_type = other DNA
cacctacttgctgatcctcttcccgctgacctttatcgtcggctcccagaggctgatgaggtttttgtccgtcat

SEQ ID NO: 293919 - DNA, 75 bp, synthetic construct
  source 1..75: mol_type = other DNA
ctttgactctgtaaaatttattctgaccaccgctctcgccgctggtctgctggctcttcccgtgcagataagaac

SEQ ID NO: 293920 - DNA, 75 bp, synthetic construct
  source 1..75: mol_type = other DNA
gctgcattagtgacgctgctatgggcggccagccaaatccaggcgctgaaaaaactgacctgtgccatcagccag

SEQ ID NO: 293921 - DNA, 75 bp, synthetic construct
  source 1..75: mol_type = other DNA
tgtcgggtcagtggcgggcgggatactgttcagtccactgggaccatttggtgcactgacagggcgtgtggttgg

SEQ ID NO: 293922 - DNA, 75 bp, synthetic construct
  source 1..75: mol_type = other DNA
tttggtatcccctctgatcgtttttatacccagtttgtaaaagaagcgctctacacacagaatgaagtcttgctg

SEQ ID NO: 293923 - DNA, 75 bp, synthetic construct
  source 1..75: mol_type = other DNA
gatgaactgaaaacactcttccggaaccgcctgaatttatcaccggaagcgaatgacgattttctcgatcgttgc

SEQ ID NO: 293924 - DNA, 75 bp, synthetic construct
  source 1..75: mol_type = other DNA
gcttgccggcagtttcctgctgaccggacatgagattgaaaatctgaacgagaatctggcccgtgttatcgatca

SEQ ID NO: 293925 - DNA, 75 bp, synthetic construct
  source 1..75: mol_type = other DNA
gcagtggtaaacgaatggctgaaaaccaatccgcaactgggcgttgctactgaaaaagtgaccgatccgcaatac

SEQ ID NO: 293926 - DNA, 75 bp, synthetic construct
  source 1..75: mol_type = other DNA
tacttgcttcttttactttcggtgcttctgccgcagagaaaatcaattttggcgtttcagccacctatccaccct

SEQ ID NO: 293927 - DNA, 75 bp, synthetic construct
  source 1..75: mol_type = other DNA
cccttgctgcatttattctggtgagtgaacttttgtctgcccggggggataaataccttgatatttgccttgttg

SEQ ID NO: 293928 - DNA, 75 bp, synthetic construct
  source 1..75: mol_type = other DNA
tgggacgcattctgaagatgcttgaagatcagaacctgatctccgcacacggtaaaaccatcgtcgtttacggca

SEQ ID NO: 293929 - DNA, 75 bp, synthetic construct
  source 1..75: mol_type = other DNA
aaaatgcactggggattgaggtgccgcaacgagcgcataccattcgctcgattctgctggaagtcgaacggctac

SEQ ID NO: 293930 - DNA, 75 bp, synthetic construct
  source 1..75: mol_type = other DNA
atcagcgtcgcctggtgttgcccgatgactggccggaagatatgcatccgctacgcaaagatgcgatggattatc

SEQ ID NO: 293931 - DNA, 75 bp, synthetic construct
  source 1..75: mol_type = other DNA
cagttgcagggtaatcagggcgcggcttgcctgtttgcgggttcccccaccgatggcctgatgggcggcggcttc

SEQ ID NO: 293932 - DNA, 75 bp, synthetic construct
  source 1..75: mol_type = other DNA
cacccggtacggaagcggcgcactggcttcaatgctcggaccggtggctggcctggtcgatgacgttatcaaaat

SEQ ID NO: 293933 - DNA, 75 bp, synthetic construct
  source 1..75: mol_type = other DNA
tcaaggcgcagatggaaaattgggtgcgctcaatcgaactatcgctttcagtgctgatggtaaatcgaatttttt

SEQ ID NO: 293934 - DNA, 75 bp, synthetic construct
  source 1..75: mol_type = other DNA
gtctggaagcgattccgacgctatttatcctcattactatttcgttctttatgatgcgtctcgctccgggaagtc

SEQ ID NO: 293935 - DNA, 75 bp, synthetic construct
  source 1..75: mol_type = other DNA
aaacctgctctgttacccgtgctctcctatatgggccccgcatttgtcggcattattaccggttctatggtcatc

SEQ ID NO: 293936 - DNA, 75 bp, synthetic construct
  source 1..75: mol_type = other DNA
tccggggtgtgcgccgtctgcagcatcatggacagtgttgcgatcgtcgtttgatcaatggctaatgggaaaagc

SEQ ID NO: 293937 - DNA, 75 bp, synthetic construct
  source 1..75: mol_type = other DNA
taaacccggacattctgatgcgtctgtctgcacagatggcgcgtcgtctgcaagtcacttcagagaaagtgggca

SEQ ID NO: 293938 - DNA, 75 bp, synthetic construct
  source 1..75: mol_type = other DNA
tcggaggcgagatggtttgaaaataataaagagtatgaaaaatccatcaataaatggcgcgatgtgttcgggcca

SEQ ID NO: 293939 - DNA, 75 bp, synthetic construct
  source 1..75: mol_type = other DNA
atgttcgaacaacgcgtaaattctgacgtactgaccgtttctaccgttaactctcaggatcaggtaacccaaaaa

SEQ ID NO: 293940 - DNA, 75 bp, synthetic construct
  source 1..75: mol_type = other DNA
ttcgtgaaaatcggaaaggcgatgtctgaagatggcatggtcaccggtggtaatgaaggccagcgtagtgcggcc

SEQ ID NO: 293941 - DNA, 75 bp, synthetic construct
  source 1..75: mol_type = other DNA
tcgtcccctgctttattaccagcgaagatgcctttggacggacttactacctgatccccgatggcaacggccact

SEQ ID NO: 293942 - DNA, 75 bp, synthetic construct
  source 1..75: mol_type = other DNA
cgtcaacgatcccaaaggcatacagggagatatcaactctctttcagccgaggcgcgtaaggcgatttctgacag

SEQ ID NO: 293943 - DNA, 75 bp, synthetic construct
  source 1..75: mol_type = other DNA
tttccagcgatccatattgcctttggctcctttgccagaagaaccaaaatccgtccgcttgatgatatcgatctg

SEQ ID NO: 293944 - DNA, 75 bp, synthetic construct
  source 1..75: mol_type = other DNA
tctcgacgaaccgactaacgatctggatatcgaaacgctgcgtgcgctcgaaaacgccctgttagagttcccggg

SEQ ID NO: 293945 - DNA, 75 bp, synthetic construct
  source 1..75: mol_type = other DNA
ataccgtaaaaatcgcctccgttgatcagttccgtgacagtatggacaatagcaaaacggtttgggaagaagttt

SEQ ID NO: 293946 - DNA, 75 bp, synthetic construct
  source 1..75: mol_type = other DNA
atcgtagcctttgcaacgaacaacctgctgatggtggcgctgctcctgctgcatctgaaccagcagcatcaactg

SEQ ID NO: 293947 - DNA, 75 bp, synthetic construct
  source 1..75: mol_type = other DNA
agggcggtgtaggcaaaagtacgctagcagtttccattgctgcgtatctcatgacgctcggcaagcgagttctta

SEQ ID NO: 293948 - DNA, 75 bp, synthetic construct
  source 1..75: mol_type = other DNA
caggacggcacgacgggtaagctgaaaattgatgatgataaactcaaaaaagtcctgaatgaaaatacagcatcc

SEQ ID NO: 293949 - DNA, 75 bp, synthetic construct
  source 1..75: mol_type = other DNA
tgatgacgttcggggaactgaatgtatttagcacggcagatgcgcgctcgctcgtcagccgatgcgcgctgtggc

SEQ ID NO: 293950 - DNA, 75 bp, synthetic construct
  source 1..75: mol_type = other DNA
ttcagcagttaaacatcttggtgagcctgaacgcgtgaaatttgaggcaatgcgtaaactgctcggtgccgtaac

SEQ ID NO: 293951 - DNA, 75 bp, synthetic construct
  source 1..75: mol_type = other DNA
atctttgtgtctcctgaacctcaagaaatgcctgatatctgcaagggtgaagcattacttgagcttgaaaagaaa

SEQ ID NO: 293952 - DNA, 75 bp, synthetic construct
  source 1..75: mol_type = other DNA
atgacaaacgatttatatattaatggtaaaaagattgacagcttcggtgactggtcgccacagactgaacatcca

SEQ ID NO: 293953 - DNA, 75 bp, synthetic construct
  source 1..75: mol_type = other DNA
atggcaaatgacatttatattagtggaagaaaaattgatagtttcggggactggtcaccacagactgaacatcca

SEQ ID NO: 293954 - DNA, 75 bp, synthetic construct
  source 1..75: mol_type = other DNA
tgctggaaaacgaggtggtacacggttctctggagatgcaggacggcgaaatccgcgcctttgccgaaagccaga

SEQ ID NO: 293955 - DNA, 75 bp, synthetic construct
  source 1..75: mol_type = other DNA
ctggtcaccacagactgagcatccactacatattattcagcgcaaagaacacgatgaaagaattgcacttgagca

SEQ ID NO: 293956 - DNA, 75 bp, synthetic construct
  source 1..75: mol_type = other DNA
gaatattacccacagttaaaagaacagcgtattcgacttgatattgcttacgatgctgttaagaacttcgaagaa

SEQ ID NO: 293957 - DNA, 75 bp, synthetic construct
  source 1..75: mol_type = other DNA
aggagtgagcattgaggcagcacctcatggtgtatgtcgttggcgctggccgttgccagcgcaattgccattggt

SEQ ID NO: 293958 - DNA, 75 bp, synthetic construct
  source 1..75: mol_type = other DNA
ttttgcctttttaccgacgcttaacaacgtcccgacgcagaaggttaggcctttcatggcatttgtggctcacag

SEQ ID NO: 293959 - DNA, 75 bp, synthetic construct
  source 1..75: mol_type = other DNA
gaccggaacggtcgctgcaagcccggggtttcgcgtcagggatggaagcccgccagggggacgcccggaaaagac

SEQ ID NO: 293960 - DNA, 75 bp, synthetic construct
  source 1..75: mol_type = other DNA
tcggtctttcctgctgttacgttgagatggtgacctcgtttactgcggtgcatgacgtggcgcgttttggcgcag

SEQ ID NO: 293961 - DNA, 75 bp, synthetic construct
  source 1..75: mol_type = other DNA
catgacgtggcgcgttttggcgcagaagtattgcgtgcttcgccgcgtcaggctgacctgatggtggttgcagga

SEQ ID NO: 293962 - DNA, 75 bp, synthetic construct
  source 1..75: mol_type = other DNA
agatgtatcaaaacaacagcagatacgagcgaaatctgagttgcgctatatgaaaaaacgatgggcatgtgcact

SEQ ID NO: 293963 - DNA, 75 bp, synthetic construct
  source 1..75: mol_type = other DNA
agggccagaacaaaaggtaaggttgagcggatggtgaaatacctcaaggagaacttcttcgtccggtaccacagg

SEQ ID NO: 293964 - DNA, 75 bp, synthetic construct
  source 1..75: mol_type = other DNA
tgaccgaacgctacggtgattttgttcgctacaacccaccgttaaccggtcagacactggtgttatgggcgctgc

SEQ ID NO: 293965 - DNA, 75 bp, synthetic construct
  source 1..75: mol_type = other DNA
ataacgggaaaagcaagagtctgatgaaacaatatatcatgtctatcaaaaatgaatataaaaaggattatcggg

SEQ ID NO: 293966 - DNA, 75 bp, synthetic construct
  source 1..75: mol_type = other DNA
aatctcaggaatatatttcccgtctgaaagatcttgtatttaatattaatgataagaatggttgtgatgacgcat

SEQ ID NO: 293967 - DNA, 75 bp, synthetic construct
  source 1..75: mol_type = other DNA
ggataatatgggaccgtctgtctcccggtgggctgcaactgcggttatgcgcgccagtggattaactgcgtggtc

SEQ ID NO: 293968 - DNA, 75 bp, synthetic construct
  source 1..75: mol_type = other DNA
gtgccagtgggcttacagcatggtcagatgcgcacaagcgcgcctatggcgtaaccatgatgggaagcctgggag

SEQ ID NO: 293969 - DNA, 75 bp, synthetic construct
  source 1..75: mol_type = other DNA
cgctcaggttgtagacacctggcaattcgccaatccgcaacaacaggaacaggcgttaaatattgccagccagtt

SEQ ID NO: 293970 - DNA, 75 bp, synthetic construct
  source 1..75: mol_type = other DNA
atgtaatatcaccggttgatgatattaaaaatgtcatgatgttgtatggaaataatgctgaaaacaagaacagac

SEQ ID NO: 293971 - DNA, 75 bp, synthetic construct
  source 1..75: mol_type = other DNA
agaatgagattatattgaaaggaattaaaaaagctactttttataagaaaataaagttgggcaaagacattataa

SEQ ID NO: 293972 - DNA, 75 bp, synthetic construct
  source 1..75: mol_type = other DNA
agaatgagattctaatgaaaggggttaaaaaagctacgttttataagaaaataaagcttgggaaagacattataa

SEQ ID NO: 293973 - DNA, 75 bp, synthetic construct
  source 1..75: mol_type = other DNA
atgttgtatggcgataaggccgaaaacaggaacagacgcagaatgatatatgatgcgttaaccattatttgtgaa

SEQ ID NO: 293974 - DNA, 75 bp, synthetic construct
  source 1..75: mol_type = other DNA
aaatgcatcaaaaattctgggatcaacgttataatgagatcagtcgtattattgatgctgaaggggtgttcagtc

SEQ ID NO: 293975 - DNA, 75 bp, synthetic construct
  source 1..75: mol_type = other DNA
aatgttttataagtttgaaaacagtgcagaagggacattggctcgttataatgtatcacttgatgataaatctca

SEQ ID NO: 293976 - DNA, 75 bp, synthetic construct
  source 1..75: mol_type = other DNA
attaccaataacgtcctgcaatcactgcaaatcgtcaatacagttctggaggctaaccagcatgcaaaacagcag

SEQ ID NO: 293977 - DNA, 75 bp, synthetic construct
  source 1..75: mol_type = other DNA
aaccagcatgcaaaacagcagatcgcactggagtcacagagaacccaggaagatatcaaagtggctgttgcggat

SEQ ID NO: 293978 - DNA, 75 bp, synthetic construct
  source 1..75: mol_type = other DNA
atgaagatgagttattgggcgctcattttaacgtttattgcttgtattgctggtggtcttgtttggtcagcgaat

SEQ ID NO: 293979 - DNA, 75 bp, synthetic construct
  source 1..75: mol_type = other DNA
gtgcctgctaccgctgctgaccggttgcggaagtacgcggacagtttacgagccagttccggcggtaccactacc

SEQ ID NO: 293980 - DNA, 75 bp, synthetic construct
  source 1..75: mol_type = other DNA
gagtgatgattgcgcttcacgtcctgtgcctgctaccgctgctgaccggttgcggaagtacgcggacagtttacg

SEQ ID NO: 293981 - DNA, 75 bp, synthetic construct
  source 1..75: mol_type = other DNA
ggatgatgattgtgcttcacgtcttgtgcctgctgccgctgctgagcggttgcggaagtacgcggacagtttacg

SEQ ID NO: 293982 - DNA, 75 bp, synthetic construct
  source 1..75: mol_type = other DNA
tgccgggaaaaatcagggaatgccatgtttatttccctgatgacagaacaatcagaaacaacggagataaaaatg

SEQ ID NO: 293983 - DNA, 75 bp, synthetic construct
  source 1..75: mol_type = other DNA
acttatgtatatgtcgtttgcggcaggcaccgggaaatatccgatgtggcccggaaaaatgaaatgtgtccgggt

SEQ ID NO: 293984 - DNA, 75 bp, synthetic construct
  source 1..75: mol_type = other DNA
ctgtttgttttatggaaggacaacaccacaccaggaaaattactggttcaggaaattgacttcgtaagacaaaca

SEQ ID NO: 293985 - DNA, 75 bp, synthetic construct
  source 1..75: mol_type = other DNA
gctgaaaccgtgggaggcattagggatcagtcgcgcctggtattaccaactgaaaaaacgaggtctcgtagagta

SEQ ID NO: 293986 - DNA, 75 bp, synthetic construct
  source 1..75: mol_type = other DNA
gggaagtacttgctgaagatgcttccctgccgggaaaaatcagtaaatgccatgcttatttccctgataacagaa

SEQ ID NO: 293987 - DNA, 75 bp, synthetic construct
  source 1..75: mol_type = other DNA
atgacgcgcgccgctgttccggcaattccgtatcggaggtgctggataaattcaggaaaaactacgaccggataa

SEQ ID NO: 293988 - DNA, 75 bp, synthetic construct
  source 1..75: mol_type = other DNA
gagacgatgaagctcatcaccccacagccgcgttcgggttattttgtcgcgcaacgtaaagccctgccgccagtg

SEQ ID NO: 293989 - DNA, 75 bp, synthetic construct
  source 1..75: mol_type = other DNA
ttttacttttacaccaaaaaagaaaactcacaccgagccaaagaaagaaaaagttaaagtcagacgtgtttatgg

SEQ ID NO: 293990 - DNA, 75 bp, synthetic construct
  source 1..75: mol_type = other DNA
aagctactaaagagacctctaaaacatctgacttagaggaagataaaatctctgatgtgattgctagtagtgacc

SEQ ID NO: 293991 - DNA, 75 bp, synthetic construct
  source 1..75: mol_type = other DNA
ggacgacacaccagaagttcattatggataagcatccggaaatcactaccgtgccgtatgacagctaccagaacg

SEQ ID NO: 293992 - DNA, 75 bp, synthetic construct
  source 1..75: mol_type = other DNA
ttcggcggctgccgtctgtcgctggcgaccccggcggatgaagcctggaacggcccggctgcgctcgacggcaaa

SEQ ID NO: 293993 - DNA, 75 bp, synthetic construct
  source 1..75: mol_type = other DNA
ctcgtatccgaagaacagctggtgcgactggcgcagaccggactggtcagtctgactgcgggcctggttccttct

SEQ ID NO: 293994 - DNA, 75 bp, synthetic construct
  source 1..75: mol_type = other DNA
cttgatgatgaagaagaccctgaagaggaattgaaacgtgaacagcgtaaagcagaaattaaagaaagattcaga

SEQ ID NO: 293995 - DNA, 75 bp, synthetic construct
  source 1..75: mol_type = other DNA
ggcaatagataagttgattgccgaaggtaaagcaaaaactacggcagaagcagtacaatacattataaacaaatt

SEQ ID NO: 293996 - DNA, 75 bp, synthetic construct
  source 1..75: mol_type = other DNA
gaaaatgaaaccggcgctgaaaaaaacgctgatggcggtagcgtgactgagcgcagtacccgcagcccaggctgc

SEQ ID NO: 293997 - DNA, 75 bp, synthetic construct
  source 1..75: mol_type = other DNA
agccgcgttcgggttattttgtcgcgcaacgtaaagccctgccgccagtgccgccaatgacgcgtccggtggaaa

SEQ ID NO: 293998 - DNA, 75 bp, synthetic construct
  source 1..75: mol_type = other DNA
aaagcaggtgctgtttaccaccccgtactatgacaactctgccctgtttgtgggtcagcaaggcaaatacaccag

SEQ ID NO: 293999 - DNA, 75 bp, synthetic construct
  source 1..75: mol_type = other DNA
atgaaaaaagttctgattgccgcgttaattgcaggttttagtctttccgccacagctgccgaaaccattcgtttt

SEQ ID NO: 294000 - DNA, 75 bp, synthetic construct
  source 1..75: mol_type = other DNA
acatctgcacttcctgcacctggttcgttaatagcaacatgccgtcctgggggcggcaattattatcccggccgc

SEQ ID NO: 294001 - DNA, 75 bp, synthetic construct
  source 1..75: mol_type = other DNA
gaaaaatcagggaatgccatgtttatttccctgatgacagaacaatcagaaacaacggagataaaaatgaacatg

SEQ ID NO: 294002 - DNA, 75 bp, synthetic construct
  source 1..75: mol_type = other DNA
ctcgccttggccagaagaagggaatcgtaaacttacggcggctatcactgatttgcactttgctccaacagagac

SEQ ID NO: 294003 - DNA, 75 bp, synthetic construct
  source 1..75: mol_type = other DNA
agggggataatagattttgctgcaaggtttgtgtaacgggccagcatcgtgaaatgctcgatcaagttttagacc

SEQ ID NO: 294004 - DNA, 75 bp, synthetic construct
  source 1..75: mol_type = other DNA
actcagattcgaggtttgagtcaagagtttgcgtaaccgcacagcatagggagatgttagatcaagttttggatc

SEQ ID NO: 294005 - DNA, 75 bp, synthetic construct
  source 1..75: mol_type = other DNA
catccgtctccggattttcgacgacgggctgctctgtggggagtggctctgcctgagccggaatttacaccagct

SEQ ID NO: 294006 - DNA, 75 bp, synthetic construct
  source 1..75: mol_type = other DNA
cctaatgtacaagaacctgtgactaggattctttcgggcattgataatgttcatttaattgaaccgcagcagtac

SEQ ID NO: 294007 - DNA, 75 bp, synthetic construct
  source 1..75: mol_type = other DNA
atatttcaaataaaacctgactatgacttaaatttgatgaagtctgggcagtctcttaatgatattacttcatca

SEQ ID NO: 294008 - DNA, 75 bp, synthetic construct
  source 1..75: mol_type = other DNA
tgacggtggcaaaacctacgcgcagacaggggatagcatcacgctttcgagcgatgaagaaacccgataccgcct

SEQ ID NO: 294009 - DNA, 75 bp, synthetic construct
  source 1..75: mol_type = other DNA
catcacagtgggtggaaaatcctactatggtgcggaacttcaactaccggctccttccgagggagtctacaaact

SEQ ID NO: 294010 - DNA, 75 bp, synthetic construct
  source 1..75: mol_type = other DNA
atgccgctaaatgccgcatggtattacagccagtgtgttgagcgaccttattatccatgcgcggtattgtcgccg

SEQ ID NO: 294011 - DNA, 75 bp, synthetic construct
  source 1..75: mol_type = other DNA
ggtgtcctggagtctgaaactttcgctccaggatggggagccaccaataaggtgtatcgtcgcataaatactgat

SEQ ID NO: 294012 - DNA, 75 bp, synthetic construct
  source 1..75: mol_type = other DNA
ggtggggcaagcagtaagcattggggagcaacctgtcgaatacagcttatacctgttcagtggtgacggttccaa

SEQ ID NO: 294013 - DNA, 75 bp, synthetic construct
  source 1..75: mol_type = other DNA
acgatcagcattatcctcagttaagccagcagtacgaccaaaacaataaggtatttaccttattcgttaaccaac

SEQ ID NO: 294014 - DNA, 75 bp, synthetic construct
  source 1..75: mol_type = other DNA
cacggcgcgtatttgttgttgatgttcaattactggcaaacagggaaaccaatacctaaaaacaggctggcaaaa

SEQ ID NO: 294015 - DNA, 75 bp, synthetic construct
  source 1..75: mol_type = other DNA
ctgaaggacgtttatacggaagacgcttccctgccgggaaaaatcagtaaatgtcctgtttatcttcctgatgac

SEQ ID NO: 294016 - DNA, 75 bp, synthetic construct
  source 1..75: mol_type = other DNA
gcaaccgcagatgaacgtctgaaggaagttcttacggaagatgcttccctgccggaaaaaaatcaggaaatgccc

SEQ ID NO: 294017 - DNA, 75 bp, synthetic construct
  source 1..75: mol_type = other DNA
tgttcaggaaagttcagaaagctccggaaaaaataacatgtattcgtgttgcaaccgcagatgaacgtctgaagg

SEQ ID NO: 294018 - DNA, 75 bp, synthetic construct
  source 1..75: mol_type = other DNA
aggaagtttatacggaagacgcctccctgccgggaaaaatcaggaaatgccctgtttatcttcctgatgacagaa

SEQ ID NO: 294019 - DNA, 75 bp, synthetic construct
  source 1..75: mol_type = other DNA
gctggcgggcaaactggccgatgttgccaccttcttcgtgtacccggaggcgatccgcaagattatctacatcac

SEQ ID NO: 294020 - DNA, 75 bp, synthetic construct
  source 1..75: mol_type = other DNA
gcagctggcgggcaaactggccgatgttgccactttcttcgtgtacccggaggcgatccgcaaggttatctacac

SEQ ID NO: 294021 - DNA, 75 bp, synthetic construct
  source 1..75: mol_type = other DNA
atcctggccaccctattcatcaactggccgatcagcaaaaaagcgcggcctacgatttcacccacgaactgttaa

SEQ ID NO: 294022 - DNA, 75 bp, synthetic construct
  source 1..75: mol_type = other DNA
tgtcgacaccgcacaccggctggcggaagatattctgcgcttcgcccgctgccgccagggtggtgcattgacctg

SEQ ID NO: 294023 - DNA, 75 bp, synthetic construct
  source 1..75: mol_type = other DNA
atggttgctgaacgtgtggattatccactggacgagctacgccgcttctggccagacaaagaggcaatcctctac

SEQ ID NO: 294024 - DNA, 75 bp, synthetic construct
  source 1..75: mol_type = other DNA
gaacaaaagctgctggcgcgttatcaggcgttatcagagtgcgttaaaaacaaccgctatccgggctgtctgttt

SEQ ID NO: 294025 - DNA, 75 bp, synthetic construct
  source 1..75: mol_type = other DNA
tacgatttcacccacgaactgttaaccacgctggaagttgacgatccggcgatggtagcaaagcagatggaactg

SEQ ID NO: 294026 - DNA, 75 bp, synthetic construct
  source 1..75: mol_type = other DNA
tgtcgacaccgcacaccgactggcggaagatatcctgcgcttcgctcgctgccgccagggcggggcattgacctg

SEQ ID NO: 294027 - DNA, 75 bp, synthetic construct
  source 1..75: mol_type = other DNA
cacctggtgtgtgcagcaggaaggggaactctggtgcgctaatgccttttatctttttgatgcgcagaaagtcgc

SEQ ID NO: 294028 - DNA, 75 bp, synthetic construct
  source 1..75: mol_type = other DNA
tccctggtggggactaccctgcacagtgacgccctgtttcggcgtctgtctggtgcaggagggtaaccgcctgca

SEQ ID NO: 294029 - DNA, 75 bp, synthetic construct
  source 1..75: mol_type = other DNA
actcatgctcaccagcggtgaactgaatccccgccatcagcataccgtgacgctgtatgcgaatggactgacctg

SEQ ID NO: 294030 - DNA, 75 bp, synthetic construct
  source 1..75: mol_type = other DNA
ttaccttgccgaccgcgccggtatcagaggccggttcagagatgcagatgcgtaccacctggaccaggcctttcc

SEQ ID NO: 294031 - DNA, 75 bp, synthetic construct
  source 1..75: mol_type = other DNA
cacctggtgtgtgcagcaggaaggggaactgtggtgcgctaatgctttttatctgtttgatgcgcagaaagtcgc

SEQ ID NO: 294032 - DNA, 75 bp, synthetic construct
  source 1..75: mol_type = other DNA
acgcgtcatgcacagatgagcgggtcgcaggctccggttgccggtacggtaaacggtcagccgaaaacggtggcg

SEQ ID NO: 294033 - DNA, 75 bp, synthetic construct
  source 1..75: mol_type = other DNA
cgtaccacctggaccaggcctttccgctgctgatgaaacaactggagctcatgctcaccagtggtgaactcagcc

SEQ ID NO: 294034 - DNA, 75 bp, synthetic construct
  source 1..75: mol_type = other DNA
gccgacaccctcggtagttgtggttacgtttatctggctgtttatccaacaccggcacccgcaaccacctcataa

SEQ ID NO: 294035 - DNA, 75 bp, synthetic construct
  source 1..75: mol_type = other DNA
tgcgaagccgacaccctcggcagctgtggttacgtttatctggctgtttatccgacgcccgaaacgaaaaagtaa

SEQ ID NO: 294036 - DNA, 75 bp, synthetic construct
  source 1..75: mol_type = other DNA
actcatgctcaccagcggtgaactgaatccccgccatcagcataccgtgactctgtatgcgaagggactgacctg

SEQ ID NO: 294037 - DNA, 75 bp, synthetic construct
  source 1..75: mol_type = other DNA
actcatgctcaccagcggtgaactgaatccccgccatcagcataccgttaccctgtatgcgaacggactgacctg

SEQ ID NO: 294038 - DNA, 75 bp, synthetic construct
  source 1..75: mol_type = other DNA
agcataccgtcacgctgtatgcaaaaggtctgacctgcaaagctgacactctcggtagcggtggttacgtttatc

SEQ ID NO: 294039 - DNA, 75 bp, synthetic construct
  source 1..75: mol_type = other DNA
cccgccatcagcataccgtcacgctgtatgcgaaaggtctgacctgcaaagctgacaccctcggtagcggtggtt

SEQ ID NO: 294040 - DNA, 75 bp, synthetic construct
  source 1..75: mol_type = other DNA
gcccgccaggaaccatcgttactaagtccacttattaacataattctgggtacccagacactggaacaaaaaaaa

SEQ ID NO: 294041 - DNA, 75 bp, synthetic construct
  source 1..75: mol_type = other DNA
tacatggatatttgcatggcaatgattcgttgtgttgatgcgatttacatgctgaaaggctggcagcggtcagca

SEQ ID NO: 294042 - DNA, 75 bp, synthetic construct
  source 1..75: mol_type = other DNA
cggtgaggctctggcggttacgtataacgacgtgtcagccgactggatcgacatccgggggcatgttgttgacgg

SEQ ID NO: 294043 - DNA, 75 bp, synthetic construct
  source 1..75: mol_type = other DNA
aaaaatttgtgcacccgcatcctgaacaatatacatggctcctgaagtttctgaaaacgcgcaaagcaggggaag

SEQ ID NO: 294044 - DNA, 75 bp, synthetic construct
  source 1..75: mol_type = other DNA
ttccccgctttaaccttacactatgctttccccggtactggatgacgtggacaggtatcggcattatctgtgtgt

SEQ ID NO: 294045 - DNA, 75 bp, synthetic construct
  source 1..75: mol_type = other DNA
cgacagataaacgaagttgttgaaaatttcgttcgtccacatcctgagcagtatacgtggatcctgaagttgctg

SEQ ID NO: 294046 - DNA, 75 bp, synthetic construct
  source 1..75: mol_type = other DNA
cggtatcagaggccggttcagcgatgcagatgcgtaccacctggaccaggcctttccgctgctgatgaaacaact

SEQ ID NO: 294047 - DNA, 75 bp, synthetic construct
  source 1..75: mol_type = other DNA
cgccatcagcataccatcacactgtatgcgaaagggctgacctgcgaagccgaaacccttggcagttgtggttac

SEQ ID NO: 294048 - DNA, 75 bp, synthetic construct
  source 1..75: mol_type = other DNA
cgaaacccttggcagttgtggttacgcttatctggctgtttatccgacaccggcagagcccgcaatcaccgtata

SEQ ID NO: 294049 - DNA, 75 bp, synthetic construct
  source 1..75: mol_type = other DNA
actgctgagtatcattacgcatacaagatggagatgccggtattcactacgttgaattacccgccagcttgttcc

SEQ ID NO: 294050 - DNA, 75 bp, synthetic construct
  source 1..75: mol_type = other DNA
accgtgacactgtatgcgaaggggctgacctgtgaagccgacaccctcggctcctgtggttacgtttatctggct

SEQ ID NO: 294051 - DNA, 75 bp, synthetic construct
  source 1..75: mol_type = other DNA
caggcctttccgctgctgatgaaacaactgaaattaatgctcaccagtggtgaactgaatccccgccatcagcat

SEQ ID NO: 294052 - DNA, 75 bp, synthetic construct
  source 1..75: mol_type = other DNA
ctgcgaagccgataccctgggctcctgtggttacgtttatctggctgtttatccgacgcccgaaacgaaaaagta

SEQ ID NO: 294053 - DNA, 75 bp, synthetic construct
  source 1..75: mol_type = other DNA
tgaccttacaaacgggtgacgctctgcgcagccggcttggattgggtgaggatgagctggcagtactgattggtt

SEQ ID NO: 294054 - DNA, 75 bp, synthetic construct
  source 1..75: mol_type = other DNA
caaagtcatcgggcattatctgaacataaaacactatcaataagttggagtcattaccaaggccgcgttcccaca

SEQ ID NO: 294055 - DNA, 75 bp, synthetic construct
  source 1..75: mol_type = other DNA
agatgtgaaatatcgctggcagaataaagcctgggatgtggcacgagcgctacgtgaacgaagccgggaggaggg

SEQ ID NO: 294056 - DNA, 75 bp, synthetic construct
  source 1..75: mol_type = other DNA
gtatgcgaaaggactgacctgcgaagccgataccctgggctcctgtggttacgtttatatggctgtttatccgac

SEQ ID NO: 294057 - DNA, 75 bp, synthetic construct
  source 1..75: mol_type = other DNA
aggtctgacctgcgaggcggatacgctcggttcgcatggctatgtttatatcgcgatttatcccactcccgtcgc

SEQ ID NO: 294058 - DNA, 75 bp, synthetic construct
  source 1..75: mol_type = other DNA
gcatttccgcattttatcagtcagatggaattgatgctgaccaccggtgaaatgaaccctcgccacgctcactgc

SEQ ID NO: 294059 - DNA, 75 bp, synthetic construct
  source 1..75: mol_type = other DNA
cccgccatcagcataccgtcacgctgtatgcgaaagggctgacctgcgatgccgacaccctcgggtcctgtggtt

SEQ ID NO: 294060 - DNA, 75 bp, synthetic construct
  source 1..75: mol_type = other DNA
tcaacaggacagagcattttccttcgttaaatttttcttctgatacatcctgggttgtttggtggtatggttttt

SEQ ID NO: 294061 - DNA, 75 bp, synthetic construct
  source 1..75: mol_type = other DNA
ttaccttgcagaccgcgccggtatcagaggccggttcagcaatgcggatgcataccatctggaccaggcttttcc

SEQ ID NO: 294062 - DNA, 75 bp, synthetic construct
  source 1..75: mol_type = other DNA
atgaatgtcctaattatctcgcgctgtacaaaaaatgctcgcgtggaaagctgccgtattattgaacagtttgct

SEQ ID NO: 294063 - DNA, 75 bp, synthetic construct
  source 1..75: mol_type = other DNA
caatattaattctctggtcgcggtggctaaagctctgattaccattccttcaccagaagatgtctgcattcatta

SEQ ID NO: 294064 - DNA, 75 bp, synthetic construct
  source 1..75: mol_type = other DNA
ctgccacgctggcagtgcctttcacaggtgacgggcgggatgctgcggagatcctgcgtacactgcctcccctga

SEQ ID NO: 294065 - DNA, 75 bp, synthetic construct
  source 1..75: mol_type = other DNA
tggtgcaggaagggaaccggttgcattaccttgcagaccgcgccggtatcagaggccggttcagggacgcagatg

SEQ ID NO: 294066 - DNA, 75 bp, synthetic construct
  source 1..75: mol_type = other DNA
aatggctgttcttgatggtataaaccggcgtggaaagaaccagcttttttttgcaggccagggcatcgataactc

SEQ ID NO: 294067 - DNA, 75 bp, synthetic construct
  source 1..75: mol_type = other DNA
agaggccggttcagcgacgcggatgcgtatcatctggaccaggcctttccgctgctgatgaaacaactggaactc

SEQ ID NO: 294068 - DNA, 75 bp, synthetic construct
  source 1..75: mol_type = other DNA
cccctggtggggactgccctgcaccgtgacgccctgttttggcgcccgtctggtgcaggaagggaaccggttgca

SEQ ID NO: 294069 - DNA, 75 bp, synthetic construct
  source 1..75: mol_type = other DNA
cccgccatcagcataccgtcacgctgtatgcgaaagggctgacctgcgaagctgatacccttggcagttgtggtt

SEQ ID NO: 294070 - DNA, 75 bp, synthetic construct
  source 1..75: mol_type = other DNA
cgccggtatcagaggccggttcagcgacgcagatgcgtaccacctggaccaggcctttccgctgctgatgaaaca

SEQ ID NO: 294071 - DNA, 75 bp, synthetic construct
  source 1..75: mol_type = other DNA
gcagatgcgtaccacctggaccaggcctttccgctgctgatgaaacaactggaattaatgctcaccagcggtgaa

SEQ ID NO: 294072 - DNA, 75 bp, synthetic construct
  source 1..75: mol_type = other DNA
aggcggaaaccggacggttaaccaggatggtaatgtttaccaggtctaccaggcctgctggaaataccgtgatac

SEQ ID NO: 294073 - DNA, 75 bp, synthetic construct
  source 1..75: mol_type = other DNA
aaccaatattttaaaggccgtgtcgttcgaaaagatctgacaaagcaattgaaagaaggcgctaacgtccctgtc

SEQ ID NO: 294074 - DNA, 75 bp, synthetic construct
  source 1..75: mol_type = other DNA
attggctgccgggcggtggctggaatggtggagcgcttaaattcatgatattgccaatggtggcgttatcactcg

SEQ ID NO: 294075 - DNA, 75 bp, synthetic construct
  source 1..75: mol_type = other DNA
gccgaaaccctgggctcctgtggttacgtttatctggctgtttatcctgcgaccgaaacggaaaatgtagtggtc

SEQ ID NO: 294076 - DNA, 75 bp, synthetic construct
  source 1..75: mol_type = other DNA
cgacctgattcttagtgaaagaggaattatcaaagaaggcgagaatgcagggaaagaaacactaagccgtatcgg

SEQ ID NO: 294077 - DNA, 75 bp, synthetic construct
  source 1..75: mol_type = other DNA
atgaaaacaatgaagctaaacatcgacctcggcaaatacgttattaccgtaaccaaacacgacctgattcttagt

SEQ ID NO: 294078 - DNA, 75 bp, synthetic construct
  source 1..75: mol_type = other DNA
gtgaaacgtctggatgatgtttacggcgaccgtaatctgttctgctcctgcgtaccgattagcgaataccagtaa

SEQ ID NO: 294079 - DNA, 75 bp, synthetic construct
  source 1..75: mol_type = other DNA
tggatgtggttcgcacccgtgccgaaacatttggttttgaagtcattgtcgatgacgcgcaaaaagtgctcgatc

SEQ ID NO: 294080 - DNA, 75 bp, synthetic construct
  source 1..75: mol_type = other DNA
acatgaacgcccaggttggcatcacctcgccaggatttattggcgcggacgtttcccaccttaacctgcataaaa

SEQ ID NO: 294081 - DNA, 75 bp, synthetic construct
  source 1..75: mol_type = other DNA
atgaaattacacctgatgaacaaaaaaaacatggcaaaaagttgccgtgtaagcgccactgcgttcgataagtgg

SEQ ID NO: 294082 - DNA, 75 bp, synthetic construct
  source 1..75: mol_type = other DNA
agcgtcttgagagtgctgaaaacttctataaagaagtacacaatctccataaacgttactattcagctatccaat

SEQ ID NO: 294083 - DNA, 75 bp, synthetic construct
  source 1..75: mol_type = other DNA
tgccgggtcatagcgtggtgcaaatcgaaggcatgttaacccgtcagggcgcggtttctgcggcaccgttcggta

SEQ ID NO: 294084 - DNA, 75 bp, synthetic construct
  source 1..75: mol_type = other DNA
cggcccaggtatgggaccgatcggtgtgaaagcgcatttggcaccgtttgtaccgggtcatagcgtggtgcaaat

SEQ ID NO: 294085 - DNA, 75 bp, synthetic construct
  source 1..75: mol_type = other DNA
cagcaagaaatgctgaatgccgttggcgcacaatcgttaaacgcgctgaccggccagattgtgccgaaagatatt

SEQ ID NO: 294086 - DNA, 75 bp, synthetic construct
  source 1..75: mol_type = other DNA
aacctttggttttgaagtgattgtcgacgatgcgcaaaaagttctcgatcaccaggacgtcttcggcgtgctgtt

SEQ ID NO: 294087 - DNA, 75 bp, synthetic construct
  source 1..75: mol_type = other DNA
gggcgataacctctcctgcatcatggtgacctatccttccacccacggcgtgtatgaagaaacgatccgtgaagt

SEQ ID NO: 294088 - DNA, 75 bp, synthetic construct
  source 1..75: mol_type = other DNA
aaaaatggcaacatcgatctgactgacctgcgcgcgaaagcggaacaagcgggcgataatctctcctgcatcatg

SEQ ID NO: 294089 - DNA, 75 bp, synthetic construct
  source 1..75: mol_type = other DNA
cgactgaatctgaaagcaaagtggaattggatcgctttatcgatgcgatgctggctatccgcgcagaaattgatc

SEQ ID NO: 294090 - DNA, 75 bp, synthetic construct
  source 1..75: mol_type = other DNA
ctgacagcacaggcagaggcgcaggagcttaaaaacgagcgcgaacgcggcgacgttattgatacagcgttttgt

SEQ ID NO: 294091 - DNA, 75 bp, synthetic construct
  source 1..75: mol_type = other DNA
tatcccgcggcaaagatgtcacgcccgaacagctggcgcgctcccagggtgagctgcgttatatgaaaaaacgct

SEQ ID NO: 294092 - DNA, 75 bp, synthetic construct
  source 1..75: mol_type = other DNA
atggccgggcaaaaagagaaactgcttggcgcggggatgagtgattatctggccaaaccgatcgaagaagagcga

SEQ ID NO: 294093 - DNA, 75 bp, synthetic construct
  source 1..75: mol_type = other DNA
atatagcaaatttgacacctaacgatattgccttacaatttggcccagatgctgttgccgaagaaatcgatacgt

SEQ ID NO: 294094 - DNA, 75 bp, synthetic construct
  source 1..75: mol_type = other DNA
tcccacccgcaatggcctggcgcatctcaggccgtgcattgaaagcctggtgcagcacacccgttatccgaatat

SEQ ID NO: 294095 - DNA, 75 bp, synthetic construct
  source 1..75: mol_type = other DNA
cgcggggtgaaacccgtctgcgctggcagtgtcagggcgtctggcatgaacagatcctcccgattacccgccgcg

SEQ ID NO: 294096 - DNA, 75 bp, synthetic construct
  source 1..75: mol_type = other DNA
catccgtttaactactctgcgatcaacaatgcaggcgtgcgcgaggccacgggcgagcttatctgcctgctcaat

SEQ ID NO: 294097 - DNA, 75 bp, synthetic construct
  source 1..75: mol_type = other DNA
actcctacgagtcaggatcagattgctgacagcacaggcagaggcgcaggagcttaaaaacgagcgcgaacgcgg

SEQ ID NO: 294098 - DNA, 75 bp, synthetic construct
  source 1..75: mol_type = other DNA
aaactatcttatgccaaagatagatgtaaggtgtaaactttatatacttgtttgtacattatgttcatttcttag

SEQ ID NO: 294099 - DNA, 75 bp, synthetic construct
  source 1..75: mol_type = other DNA
agcttaaaaacgagcgcgaacgaggcgacgttattgatacagggttttgcctgtacgcgctttcaaagctggcga

SEQ ID NO: 294100 - DNA, 75 bp, synthetic construct
  source 1..75: mol_type = other DNA
aggcaataataatctggaaaaggcatgtgccaatgcgccgaatacacgactagcccgctacgctgacatcgcggt

SEQ ID NO: 294101 - DNA, 75 bp, synthetic construct
  source 1..75: mol_type = other DNA
taaagtaaacgacttgcttgatgatcctactttaagcagttatttacctaacaagcgtaccgctgattctctgat

SEQ ID NO: 294102 - DNA, 75 bp, synthetic construct
  source 1..75: mol_type = other DNA
aaactatggcgcaaagctgccgcgtaagtgcgacagcgttcgacaagtggggagtgactcccgttgagcgtaaag

SEQ ID NO: 294103 - DNA, 75 bp, synthetic construct
  source 1..75: mol_type = other DNA
caacaaaaaggtctgaagctgcgccatgcgtactatttcgacacgttgtgtgtagacgtagccgacaaagcaggc

SEQ ID NO: 294104 - DNA, 75 bp, synthetic construct
  source 1..75: mol_type = other DNA
tgaggcgatgggaaagctgcgggagctgttgccggaaaaacgccgtaaagatgcggtactggctgttgaatacgt

SEQ ID NO: 294105 - DNA, 75 bp, synthetic construct
  source 1..75: mol_type = other DNA
ggaagggcattttcaccaaagacgtggaagatcaggcagccatagccaaacgtctaagccacgcagtgaacgatg

SEQ ID NO: 294106 - DNA, 75 bp, synthetic construct
  source 1..75: mol_type = other DNA
tttctcatcgtatatgctggaatggtctggagattgtgaaaaagatggcacagaacaatgaaaaaatcatttttc

SEQ ID NO: 294107 - DNA, 75 bp, synthetic construct
  source 1..75: mol_type = other DNA
atggataaaaagcaaattgaggccctgcaatctattattgaagaacaagatgaagctatcaggattctttcatat

SEQ ID NO: 294108 - DNA, 75 bp, synthetic construct
  source 1..75: mol_type = other DNA
aacagaatcacgatcgtgaaaaacagcgccagcttgaacgggagcaggaacgccagcaacgtcagaaaactgaca

SEQ ID NO: 294109 - DNA, 75 bp, synthetic construct
  source 1..75: mol_type = other DNA
ttcccgggagcagatgacccatattctgacgatggcgcagacgttccagcaacagaatcacgatcgtgaaaaaca

SEQ ID NO: 294110 - DNA, 75 bp, synthetic construct
  source 1..75: mol_type = other DNA
cacggacacaccatcaaaaaaccagaaaatttgttgtctgcctgcgtctctgactggcgggaagatttcggtaag

SEQ ID NO: 294111 - DNA, 75 bp, synthetic construct
  source 1..75: mol_type = other DNA
cggaaattgatttccaaaaaagcctggccctttatccggtattcgatctgcatatcggggcgcttgctcataaag

SEQ ID NO: 294112 - DNA, 75 bp, synthetic construct
  source 1..75: mol_type = other DNA
gccccctgattaatataattcgcggtacccatgtgctgacacaaaagcaagttccgcaaggattgttaacaggaa

SEQ ID NO: 294113 - DNA, 75 bp, synthetic construct
  source 1..75: mol_type = other DNA
gagatcgcaacgttgcgctgcggttatcatttacagtcctgactatggcgaaattggtcgctttgtatataggcc

SEQ ID NO: 294114 - DNA, 75 bp, synthetic construct
  source 1..75: mol_type = other DNA
tgggatcgctgaacgcgtgctaaataacttctttgattatgctgttggcgctgctcctatgagtgaaaaagcagt

SEQ ID NO: 294115 - DNA, 75 bp, synthetic construct
  source 1..75: mol_type = other DNA
gacttctttgactacgctgtaggcgcagcgccgatgtctgaaaaagctgtattgctgttaggtggcgatctgctt

SEQ ID NO: 294116 - DNA, 75 bp, synthetic construct
  source 1..75: mol_type = other DNA
gctacggtgtctttgagctggttcagggatttgcccgccgtgaaacagtggccattcattacagcgttgaatcca

SEQ ID NO: 294117 - DNA, 75 bp, synthetic construct
  source 1..75: mol_type = other DNA
gggacgacccgaaacgcaaaggtgtgaagttcccgaacgaaagcgaaatgtgccagggcattctttgcccggacc

SEQ ID NO: 294118 - DNA, 75 bp, synthetic construct
  source 1..75: mol_type = other DNA
gcgcaggaactgaatattccaccgcgtacaatttaccactgggctgatgtcgggaagtgggcatcactgctgcct

SEQ ID NO: 294119 - DNA, 75 bp, synthetic construct
  source 1..75: mol_type = other DNA
gagtggaaacagggcagtaaaaaacgtgcggccattaagtttccttcctttaacgaaatgcgtgacggcgggcga

SEQ ID NO: 294120 - DNA, 75 bp, synthetic construct
  source 1..75: mol_type = other DNA
tggcaattcttaacgccaactatattgccagccgcctgcaggatgccttcccggtgctgtataccggtcgtgacg

SEQ ID NO: 294121 - DNA, 75 bp, synthetic construct
  source 1..75: mol_type = other DNA
tccggtgatgaatggcgacgcggagatccgaagcgtaaacaggttgaattcccgtcctttgatgagctgcgtgac

SEQ ID NO: 294122 - DNA, 75 bp, synthetic construct
  source 1..75: mol_type = other DNA
cgcccccaatcgaggacggcgagcgcttccgcgtgctggccgtctggcaatggcagggctttaactttagctggc

SEQ ID NO: 294123 - DNA, 75 bp, synthetic construct
  source 1..75: mol_type = other DNA
cgatgaaccgcgccccaaacgcaaaaacaggaaaaacgatatttcttctctgactcaggcggattttgacacctg

SEQ ID NO: 294124 - DNA, 75 bp, synthetic construct
  source 1..75: mol_type = other DNA
cagccgcgataataaaaccgatctcgacctgaaagaaatggacatgctgattgcccatgcgacaaagctgcgtgc

SEQ ID NO: 294125 - DNA, 75 bp, synthetic construct
  source 1..75: mol_type = other DNA
gagtcggtggaagtggctgtcgctcggcgagtggaacgactgacctgcaaggatggtaaaagcgagcttgagctt

SEQ ID NO: 294126 - DNA, 75 bp, synthetic construct
  source 1..75: mol_type = other DNA
agtggccagcgcaatggccacacatgacaagtggcgcaccacctatttttcaacgccatcggcaaaaacgcacca

SEQ ID NO: 294127 - DNA, 75 bp, synthetic construct
  source 1..75: mol_type = other DNA
agtttcgaaagcacagaggaggcaattgaacgccgttaccagctgttagccgggcgcgacaataaaacggatctg

SEQ ID NO: 294128 - DNA, 75 bp, synthetic construct
  source 1..75: mol_type = other DNA
tgcgttttctctcaaccaacaaaaacacggcccagtcctacagtggccacctgtactgtgacgaatatttctggg

SEQ ID NO: 294129 - DNA, 75 bp, synthetic construct
  source 1..75: mol_type = other DNA
gacggcagggtgaatctgatgcatcacaggaaagccggaaacacgaagctgggggagttcggcgattacggtaac

SEQ ID NO: 294130 - DNA, 75 bp, synthetic construct
  source 1..75: mol_type = other DNA
cgctgacgctgacggatattaccaaaaatgcagcgtatggcgttgagatagaaagtctggtgctggagataaatg

SEQ ID NO: 294131 - DNA, 75 bp, synthetic construct
  source 1..75: mol_type = other DNA
aatgcgctgacgctgacggatgttacaaaaaatgcagcgtatggcgttgagatagaaagtctggtgctggagata

SEQ ID NO: 294132 - DNA, 75 bp, synthetic construct
  source 1..75: mol_type = other DNA
gacacagggcggcagactgaactgtaagttccgcctgtcaggcgcactgaccaacaatcagttcgggctggggat

SEQ ID NO: 294133 - DNA, 75 bp, synthetic construct
  source 1..75: mol_type = other DNA
aataaatcctggtccctgacgcatccggtggatgacgcaattaccctgctgacacagggcggcagactgacctgt

SEQ ID NO: 294134 - DNA, 75 bp, synthetic construct
  source 1..75: mol_type = other DNA
tcacaggaaagccggaaacacgaagctgggggagttcggcgattacggtaacgactggcagacgctggagctggt

SEQ ID NO: 294135 - DNA, 75 bp, synthetic construct
  source 1..75: mol_type = other DNA
aaacctgggccctgacgcgcccggtggatgacgcagtctccctgctgacacggggtggcagactgagctgtaagt

SEQ ID NO: 294136 - DNA, 75 bp, synthetic construct
  source 1..75: mol_type = other DNA
caggtatcatcaaaccgcctgcgtattccgctctattcgatcacggattggcatcgaagtccgatcagcgattcg

SEQ ID NO: 294137 - DNA, 75 bp, synthetic construct
  source 1..75: mol_type = other DNA
acgctggagctggtgttcaccgccagcagtgccacggttactccgaaactgaatggagtggctggcccggcattc

SEQ ID NO: 294138 - DNA, 75 bp, synthetic construct
  source 1..75: mol_type = other DNA
tgtaagtttcgactgtcaggcgcactgaccaacaaccagttcggtctgggaatttatctgtataccgatgtagcg

SEQ ID NO: 294139 - DNA, 75 bp, synthetic construct
  source 1..75: mol_type = other DNA
tgaccgggactggtaacccgttcctgatgtcgttcttcacccagaccacagacggcaaactgaatctgatgcatc

SEQ ID NO: 294140 - DNA, 75 bp, synthetic construct
  source 1..75: mol_type = other DNA
gtggttcggcattcacccagggcgcggaggggacattcagtgcggacacgggggccagccaggattcggcacgct

SEQ ID NO: 294141 - DNA, 75 bp, synthetic construct
  source 1..75: mol_type = other DNA
tgtcgtacttcactcagaccactgacggcagagtgaatctgatgcatcacaggaaagccggaaacacgaagctgg

SEQ ID NO: 294142 - DNA, 75 bp, synthetic construct
  source 1..75: mol_type = other DNA
ttcgtaaaattgacaccaatctttatcgcgcccggctcagtatccggtcccggttactgttttcgctgtatcgct

SEQ ID NO: 294143 - DNA, 75 bp, synthetic construct
  source 1..75: mol_type = other DNA
actcagaattatcagtttctcagctttatgccctattacaactgcgttgcgcagtatttgtcgttgagcagaatt

SEQ ID NO: 294144 - DNA, 75 bp, synthetic construct
  source 1..75: mol_type = other DNA
atgccacatggcaggactgtattaatcattaataaactgaaaggaaaccttatgcgtaatctcgttgttttatct

SEQ ID NO: 294145 - DNA, 75 bp, synthetic construct
  source 1..75: mol_type = other DNA
ccacgttcttccccaaactgggagaaaaaaataacagtgcagcttaccaagggagagttgaacgcagtctgtggt

SEQ ID NO: 294146 - DNA, 75 bp, synthetic construct
  source 1..75: mol_type = other DNA
gggtccagcccagactggaaaagcaagatcacggtgcagctcactcgcggcgaactgacggcgttttgcagcgtt

SEQ ID NO: 294147 - DNA, 75 bp, synthetic construct
  source 1..75: mol_type = other DNA
gttggtggttttggaagatgacgttttgcccaaggaaaatgttaaatatttggacgaaatgattaattcattctg

SEQ ID NO: 294148 - DNA, 75 bp, synthetic construct
  source 1..75: mol_type = other DNA
gtgatactacgtcatcgtactggcccggcattccaggccataaaagacagtctggcagtgggactaaatgtactg

SEQ ID NO: 294149 - DNA, 75 bp, synthetic construct
  source 1..75: mol_type = other DNA
gagctggtgttcaccgccggcagtgccacggttactccgaaactgaatggagtggctggcccggcattccaggtc

SEQ ID NO: 294150 - DNA, 75 bp, synthetic construct
  source 1..75: mol_type = other DNA
ggtgtgggtaaaccgttatatcaggacctgattgcgcgcaccaaagctgcattacagaagaacccgaaaaatgtg

SEQ ID NO: 294151 - DNA, 75 bp, synthetic construct
  source 1..75: mol_type = other DNA
aaagcctgtgaagtcgaaaaatcagattgtcctgtttatcttgtgcttcagacagatccgccaacaatgcgcagc

SEQ ID NO: 294152 - DNA, 75 bp, synthetic construct
  source 1..75: mol_type = other DNA
atgcataaactcgttgttttatctctcagctccgcagcactgtttattcctttggtctcgtctgcaatgacaatt

SEQ ID NO: 294153 - DNA, 75 bp, synthetic construct
  source 1..75: mol_type = other DNA
cttggcaaaaccaaaaaactgcgggatcaaataaacaaaatgaagcaaccactcttaataaatgcagtgagagat

SEQ ID NO: 294154 - DNA, 75 bp, synthetic construct
  source 1..75: mol_type = other DNA
ggggacattcagtgcggacacgggggccagccaggattcggcacgctggggtgtgggtaaaccgttatatcagga

SEQ ID NO: 294155 - DNA, 75 bp, synthetic construct
  source 1..75: mol_type = other DNA
tgagcaacccgatgttgcgcaacacgcttcttataccgtattgcgcaatcgtctcgacccgtggttgatggaaca

SEQ ID NO: 294156 - DNA, 75 bp, synthetic construct
  source 1..75: mol_type = other DNA
taaaaatatgaccggcgggcgtctgtatgcccacacgcttgaagcgatcattccaggctttgctgcatcagcacc

SEQ ID NO: 294157 - DNA, 75 bp, synthetic construct
  source 1..75: mol_type = other DNA
atgtcggatgacaaatttgatgccattgtggtcggtgcgggcgttgctggtagcgttgccgcactggtcatggca

SEQ ID NO: 294158 - DNA, 75 bp, synthetic construct
  source 1..75: mol_type = other DNA
tgcggcatcgagaacgaatggaaaccaggtatcatcaaaccgcccgacacatttcagttcatgggcgcgcaggta

SEQ ID NO: 294159 - DNA, 75 bp, synthetic construct
  source 1..75: mol_type = other DNA
tgggactgaatgcgctgacgctgacggatgttacaaaaaatgcagcgtatggcgttgtgaaccgccccgggaatc

SEQ ID NO: 294160 - DNA, 75 bp, synthetic construct
  source 1..75: mol_type = other DNA
gtgccgtgggtttgtggtgacacgacgtattactggaaaaatacatacgctacccagtacgacaccgtgtacggc

SEQ ID NO: 294161 - DNA, 75 bp, synthetic construct
  source 1..75: mol_type = other DNA
cgcccgacacatttcagttcatgggcgcgcaggagcattattccggatcgtctggcaaccgctattctgaacgca

SEQ ID NO: 294162 - DNA, 75 bp, synthetic construct
  source 1..75: mol_type = other DNA
aagctgggggagttcggcgattacggtaacgactggcagacgctggagctggtgttcaccgccggcagtgccacg

SEQ ID NO: 294163 - DNA, 75 bp, synthetic construct
  source 1..75: mol_type = other DNA
atgcgctggtggcattccttgagcagcataaagaaaagctggacgaagactgcaaacgccgcatgtacactaacc

SEQ ID NO: 294164 - DNA, 75 bp, synthetic construct
  source 1..75: mol_type = other DNA
tggttcgtgaaggaaacaaggtcactggcgtgcaggctggggatgatattctcgaagcgaatgtggtgattctgg

SEQ ID NO: 294165 - DNA, 75 bp, synthetic construct
  source 1..75: mol_type = other DNA
tgtcaggcgcactgaccaacaatcagttcggtctgggaatttatctgtataccgatgtagcgttacctgacgtcg

SEQ ID NO: 294166 - DNA, 75 bp, synthetic construct
  source 1..75: mol_type = other DNA
agactgacctgtaagttccgcctgtcaggcgcactgaccaacaatcagttcgggctggggatttatctgtatacg

SEQ ID NO: 294167 - DNA, 75 bp, synthetic construct
  source 1..75: mol_type = other DNA
atttcagttcatgggcgcgcaggaagcattattccggatcgtgtggcaaccgctattctgaacgcagccgggcgc

SEQ ID NO: 294168 - DNA, 75 bp, synthetic construct
  source 1..75: mol_type = other DNA
gtttggtaacgacgaacgcaaactgaatggtcattacgccgtttattacgtgctgtcgatggagaagggcactaa

SEQ ID NO: 294169 - DNA, 75 bp, synthetic construct
  source 1..75: mol_type = other DNA
ggtagcctggacccttgctactcctgtaccgaccgcatgaccgtagtcgatgtacgtaagaagaagagcaaagtg

SEQ ID NO: 294170 - DNA, 75 bp, synthetic construct
  source 1..75: mol_type = other DNA
gaacatgatcgactacggtctggataacctgccgggtggcccactgatggtggaaggctttacctacattccgca

SEQ ID NO: 294171 - DNA, 75 bp, synthetic construct
  source 1..75: mol_type = other DNA
cgcagtacagtgacgccgggcggggctgcctgcagatataacgatattattccggctgaccactgtctgcatgat

SEQ ID NO: 294172 - DNA, 75 bp, synthetic construct
  source 1..75: mol_type = other DNA
cagtacgacaccgtgtacggcgggtataaaaacagggagagtgagggcgtttattttgtgcccttcatgacagac

SEQ ID NO: 294173 - DNA, 75 bp, synthetic construct
  source 1..75: mol_type = other DNA
tggttatggcctgctgccaatggaagtccacagcgagcagggctgcgacgttatttcccgtctgaaagtgcgtat

SEQ ID NO: 294174 - DNA, 75 bp, synthetic construct
  source 1..75: mol_type = other DNA
gaacatggaacagcgcaccgtcggcattggtcgtctggacccggaaattgcccgcgatttcagtaacgttggccc

SEQ ID NO: 294175 - DNA, 75 bp, synthetic construct
  source 1..75: mol_type = other DNA
tcgggctggggatttatctgtatacggacgctcccgttcctgatggtgtggcgatgacgggtaccggtaatccgt

SEQ ID NO: 294176 - DNA, 75 bp, synthetic construct
  source 1..75: mol_type = other DNA
tccgtgtttaacgcgcagtgccatggtggcagtgctgcagatgtgccgtggatttgtggtgacacgacgtattac

SEQ ID NO: 294177 - DNA, 75 bp, synthetic construct
  source 1..75: mol_type = other DNA
gtcgtctggacccggaaatcgctcgcgacttcagtaacgtcggcccgatggtccgtgccagcggtcacgcccgcg

SEQ ID NO: 294178 - DNA, 75 bp, synthetic construct
  source 1..75: mol_type = other DNA
gatggtccgtgccagcggtcacgcccgcgatactcgcgccgatcacccgtttgtcggttatggcctgctgccaat

SEQ ID NO: 294179 - DNA, 75 bp, synthetic construct
  source 1..75: mol_type = other DNA
tcgcggcatggaaaaactggcggaaacccgcatgggttacaacgaagtgaccttcctctctgaccgtgtgtgcgg

SEQ ID NO: 294180 - DNA, 75 bp, synthetic construct
  source 1..75: mol_type = other DNA
tgtgtggataccgtttaacgattcactggatatgattacgggcttttcgccatcatataaaaagattgttattgg

SEQ ID NO: 294181 - DNA, 75 bp, synthetic construct
  source 1..75: mol_type = other DNA
tgccggaacgaggcatttgtttggacacatcaggaatttcagaatatggcataaagaattaactgatgcgcaaat

SEQ ID NO: 294182 - DNA, 75 bp, synthetic construct
  source 1..75: mol_type = other DNA
agtcctgcataacctcggcaatacaatacgcaccaaaagaaggtggtgtcgttgaatcgggagattatattttcc

SEQ ID NO: 294183 - DNA, 75 bp, synthetic construct
  source 1..75: mol_type = other DNA
aacgccaaatgcagcaccgcgtgtttttgataccggcggtcatcaaaccggagcggctattattcttggcttcgg

SEQ ID NO: 294184 - DNA, 75 bp, synthetic construct
  source 1..75: mol_type = other DNA
tgcgatattggaggagctaacagacgggtaaacgaaaacgcattgcttgaaaaaatggttatggggatgcgtgta

SEQ ID NO: 294185 - DNA, 75 bp, synthetic construct
  source 1..75: mol_type = other DNA
tcttacagccgctgcctgatgtgtggataccgtttaacgattcactggatatgattacgggcttttcgccatcat

SEQ ID NO: 294186 - DNA, 75 bp, synthetic construct
  source 1..75: mol_type = other DNA
caaagacgagcgaaaccaacgcaaagtccagccagacggcagcgaaaacaagcgaaacgaatgccaaagccagtg

SEQ ID NO: 294187 - DNA, 75 bp, synthetic construct
  source 1..75: mol_type = other DNA
cctatttggacacgttcgaaatctgcgtatttggcacaaggcattgactgatgctcagatgggggagtcaatcta

SEQ ID NO: 294188 - DNA, 75 bp, synthetic construct
  source 1..75: mol_type = other DNA
acttacattaataaatctggtgtgctgacagaggctgccattgacgagccacgatttgaacgtgatggcctgctt

SEQ ID NO: 294189 - DNA, 75 bp, synthetic construct
  source 1..75: mol_type = other DNA
tttgtctgcaacgattctctgattgggcaaacctcagccattaatatggcatcaattgctgcaacaaagtcagtt

SEQ ID NO: 294190 - DNA, 75 bp, synthetic construct
  source 1..75: mol_type = other DNA
tgtcattacagacccatgaactacaaattactggtggcaatgcccagctattaacagcaaactttgaaatcgatc

SEQ ID NO: 294191 - DNA, 75 bp, synthetic construct
  source 1..75: mol_type = other DNA
cagggaataacgttcctcgttttgaaaaatatggtttgctgatagagaatcagcgaacaaacatgttcgtaaata

SEQ ID NO: 294192 - DNA, 75 bp, synthetic construct
  source 1..75: mol_type = other DNA
ctgctaacagccagaaagcagcgaagacgagcgaaactaacgcaaagtccagccagacggtagcgaagaccagcg

SEQ ID NO: 294193 - DNA, 75 bp, synthetic construct
  source 1..75: mol_type = other DNA
aaatctgcaaatatgaatgtcgctgaggttggaactgatagttttggttttacttatggaaagtttgtttgtaac

SEQ ID NO: 294194 - DNA, 75 bp, synthetic construct
  source 1..75: mol_type = other DNA
caaagatgaagctacgggctggatttttgtagaggcaacgattcaagcaagtaaagaaacttacataacctctgc

SEQ ID NO: 294195 - DNA, 75 bp, synthetic construct
  source 1..75: mol_type = other DNA
catcaacggcaacatatatcaacaaatctggcgaactgaaaacggcggaaattaatgagccacgatttgaaaaag

SEQ ID NO: 294196 - DNA, 75 bp, synthetic construct
  source 1..75: mol_type = other DNA
ctggttggattttctatcaggctacaattactgcactagatacagagagcatgattggtgcgatggttcaatacg

SEQ ID NO: 294197 - DNA, 75 bp, synthetic construct
  source 1..75: mol_type = other DNA
attcaacaaatccatctaaatggaataagtcaagcaatctggaactcacagaaatatccacggattcttttaatt

SEQ ID NO: 294198 - DNA, 75 bp, synthetic construct
  source 1..75: mol_type = other DNA
ctggatcagcaactgctacggctaacagccagaaagctgcgaagacgagtgaaactaacgcaaagtccagccaga

SEQ ID NO: 294199 - DNA, 75 bp, synthetic construct
  source 1..75: mol_type = other DNA
ttttctggtgtgccacctattgagtcaattacatacgcttttaacacaactgagaaatattacggtcagctttat

SEQ ID NO: 294200 - DNA, 75 bp, synthetic construct
  source 1..75: mol_type = other DNA
attgataagactggtggtgcagcaaatcgtattattgcaaaggctgtaaaagatgaggctactggttggattttc

SEQ ID NO: 294201 - DNA, 75 bp, synthetic construct
  source 1..75: mol_type = other DNA
aaaaacagtcaggatgcagcggcccaaagcgagagtgccgcagctggttctgcaagcgcggcggctgcttctgcc

SEQ ID NO: 294202 - DNA, 75 bp, synthetic construct
  source 1..75: mol_type = other DNA
acctcagaaacgaatgcagctaacagcgcacaggcggcagcggcctcgcagactgcatcggcaaactccgcgaca

SEQ ID NO: 294203 - DNA, 75 bp, synthetic construct
  source 1..75: mol_type = other DNA
aagccagacggcagctaaagcaagcgaagatgcagccagagagtacgcaagccaggctgcggagccgtataaata

SEQ ID NO: 294204 - DNA, 75 bp, synthetic construct
  source 1..75: mol_type = other DNA
tgccaaagccagtgaaactgcagcaaaaaacagccaggttgcagcagcccaaagcgagagcgcggcagccggttc

SEQ ID NO: 294205 - DNA, 75 bp, synthetic construct
  source 1..75: mol_type = other DNA
ggcgcaagcatcggcagcaagccagacagcagctaaagcaagtgaagacgcagccagagagtatgcaagccaggc

SEQ ID NO: 294206 - DNA, 75 bp, synthetic construct
  source 1..75: mol_type = other DNA
aatggtggaagaagtggcacgcaacgccgaagccgcctctcagagcgcagcggcggcaaagaaatccgaaactgc

SEQ ID NO: 294207 - DNA, 75 bp, synthetic construct
  source 1..75: mol_type = other DNA
tcaaataggcgtgttaacgaaaacgcatcgttgaaaaaaatggttatggggatgcgtgtaaagtcagatcagtct

SEQ ID NO: 294208 - DNA, 75 bp, synthetic construct
  source 1..75: mol_type = other DNA
gcggcagcaaagaaatccgaaactgcagcggcatcatcgaagaacgcggcgaaaacctcagaaacgaatgcagct

SEQ ID NO: 294209 - DNA, 75 bp, synthetic construct
  source 1..75: mol_type = other DNA
ccggcacgctgaatgattttctcggtgccatgacggaagaagatgtcatgccggaggcattgcgtcgttttgagg

SEQ ID NO: 294210 - DNA, 75 bp, synthetic construct
  source 1..75: mol_type = other DNA
ctggcacgctgaatgattttctcggcgccatgacggaagaagatgtcatgccggaggcattgcgtcgttttgagg

SEQ ID NO: 294211 - DNA, 75 bp, synthetic construct
  source 1..75: mol_type = other DNA
actgcatcagccaacagtcaaaaagctgcaaaaaccagtgaaaccaacgcaaaggcgagcgagactgcggcggct

SEQ ID NO: 294212 - DNA, 75 bp, synthetic construct
  source 1..75: mol_type = other DNA
atgccattgttaatacgcggtctttattggttgaaatcaccggtgtagctgccgacaggctcaccgcacgagtta

SEQ ID NO: 294213 - DNA, 75 bp, synthetic construct
  source 1..75: mol_type = other DNA
ctttgtgaggtacataagaactggtataaaacgccaaatgcagcgccacgtgtttttgataccggcggtcatcaa

SEQ ID NO: 294214 - DNA, 75 bp, synthetic construct
  source 1..75: mol_type = other DNA
aagcgagagtgccgcagctggttctgcgacttcagctgccggatcagcaactgccgcggctaacagccagaaagc

SEQ ID NO: 294215 - DNA, 75 bp, synthetic construct
  source 1..75: mol_type = other DNA
tcaaaccgacgaataaatgaaaatgccgggctggaaaaaatgcttattggtatgcgggtaaagtccgaacggtcc

SEQ ID NO: 294216 - DNA, 75 bp, synthetic construct
  source 1..75: mol_type = other DNA
gcggctattattcttggcttcggatcttcggcagatgggccagacggatttccttattgcgatattggtggatca

SEQ ID NO: 294217 - DNA, 75 bp, synthetic construct
  source 1..75: mol_type = other DNA
ccggaggcactgcgccgttttgagctgatggtgaatgaagtggcacgtcatgccggagcgtcatcacagagtgca

SEQ ID NO: 294218 - DNA, 75 bp, synthetic construct
  source 1..75: mol_type = other DNA
ccggcacgctgaatgattttctcggggccatgacggaagatgatgtcatgccggaggcattgcgtcgttttgagg

SEQ ID NO: 294219 - DNA, 75 bp, synthetic construct
  source 1..75: mol_type = other DNA
gggccaaaaggcgataccggcgagcgggggccaaagggtgagcgtggtgaggcaggcccacagggggtacagggg

SEQ ID NO: 294220 - DNA, 75 bp, synthetic construct
  source 1..75: mol_type = other DNA
gcatcggcaaactccgcgacagcagccaaaaaatcagaaaccaacgcgaaaaacagcgagacagccgcaaagacg

SEQ ID NO: 294221 - DNA, 75 bp, synthetic construct
  source 1..75: mol_type = other DNA
agcagccagcgagacagaagcaacgtcagccgcaacaagagcagagaatgcagcccggattgcagaagatgccgc

SEQ ID NO: 294222 - DNA, 75 bp, synthetic construct
  source 1..75: mol_type = other DNA
taacgcaaagtccagccagacggcagcgaagaccagcgaaacgaatgccaaagccagtgaaactgcggcgaaaag

SEQ ID NO: 294223 - DNA, 75 bp, synthetic construct
  source 1..75: mol_type = other DNA
catgtggtgacaaatggtaaagcggttaatgaagtttattgtgaatataatggtgtgaccgctgataaaaatatc

SEQ ID NO: 294224 - DNA, 75 bp, synthetic construct
  source 1..75: mol_type = other DNA
gcgttatcctgctggttgaaggttttccgccttcacatgccggggccatcaccgtgtatgaggattctaagccgg

SEQ ID NO: 294225 - DNA, 75 bp, synthetic construct
  source 1..75: mol_type = other DNA
agcagattacgacggatttccttattgcgatattggaggagctaacagacgggtaaacgaaaacgcatcgcttga

SEQ ID NO: 294226 - DNA, 75 bp, synthetic construct
  source 1..75: mol_type = other DNA
aaaggcgagcgagactgcggcggctaactcggcgaaagcatccgctgcaagccagacagcagctaaagcaagtga

SEQ ID NO: 294227 - DNA, 75 bp, synthetic construct
  source 1..75: mol_type = other DNA
cgggcacgctgaatgattttctcggcgccatgacggaagatgatgtcatgccggaggcattgcgtcgttttgagg

SEQ ID NO: 294228 - DNA, 75 bp, synthetic construct
  source 1..75: mol_type = other DNA
agcctgtgtcactgctgtcacttacggcttccttcaggttcatgatggcagccagtgggttacggtgaaacatga

SEQ ID NO: 294229 - DNA, 75 bp, synthetic construct
  source 1..75: mol_type = other DNA
ttttttcaaccagaaataacataagttctgtccctttaagctgtcttgttgaaatacataaaaattgggactcta

SEQ ID NO: 294230 - DNA, 75 bp, synthetic construct
  source 1..75: mol_type = other DNA
ttttctctgtccatcggtgaaacctgcactttttctgcccgctttcgtggagttaattcacgttgtcgcgtccat

SEQ ID NO: 294231 - DNA, 75 bp, synthetic construct
  source 1..75: mol_type = other DNA
ccgcccatgacgttattgttaaaaacattgaccagtctttgactggtcaattagataatttttcttcaatagcgt

SEQ ID NO: 294232 - DNA, 75 bp, synthetic construct
  source 1..75: mol_type = other DNA
aacagacacctgtgcctgattttatctggaatatctgtaggttttacataatattgctttttgttaagaatacag

SEQ ID NO: 294233 - DNA, 75 bp, synthetic construct
  source 1..75: mol_type = other DNA
cgtggtacgtggtggaccgattctgctcgacgagcacgttgtaatacaaggtgagagccgtatttcaggtgcggt

SEQ ID NO: 294234 - DNA, 75 bp, synthetic construct
  source 1..75: mol_type = other DNA
atacagatacaatccccgttgtaggtgttgcagcggccttgcttacttatgccggaggcattttcgcaatgcttg

SEQ ID NO: 294235 - DNA, 75 bp, synthetic construct
  source 1..75: mol_type = other DNA
ttatatatcttatggtatgcattcactgtcttagcaagaaaacaacaaactcctgttccagattttatctggaat

SEQ ID NO: 294236 - DNA, 75 bp, synthetic construct
  source 1..75: mol_type = other DNA
caagccaaaacctatgcttcccagctcgcaggggtaggtgttgaaggcgcgatgcagggggcagccgcaatgggg

SEQ ID NO: 294237 - DNA, 75 bp, synthetic construct
  source 1..75: mol_type = other DNA
aattagcatcgcaaatatataatcaactaaaattttcaggtactgtcagcaactgttttgatgtattgaaaaatg

SEQ ID NO: 294238 - DNA, 75 bp, synthetic construct
  source 1..75: mol_type = other DNA
caattaggtgatgaaaagtatacaaggctactcacagagttcctgatttttcttcaagaaaataaagatggtaaa

SEQ ID NO: 294239 - DNA, 75 bp, synthetic construct
  source 1..75: mol_type = other DNA
aacttattgaagaaacacttaaagaactcgagtcgccaaaaggttctttgttatcggctatacaaaagctgcaga

SEQ ID NO: 294240 - DNA, 75 bp, synthetic construct
  source 1..75: mol_type = other DNA
cctgcaactttcctgggacgtagtagaaaaccgccttacgcaacaactggttctggcagcctatctcggtacggg

SEQ ID NO: 294241 - DNA, 75 bp, synthetic construct
  source 1..75: mol_type = other DNA
atgatagaaaccattactcatggcgcagagtggttcatcgggctgttccagaaaggcggagaggtgtttaccggg

SEQ ID NO: 294242 - DNA, 75 bp, synthetic construct
  source 1..75: mol_type = other DNA
ctttgcccagtattaatgctgtacgtaaaaatataaaaaaattaacttatagtgttcgatttaatgaaaaactag

SEQ ID NO: 294243 - DNA, 75 bp, synthetic construct
  source 1..75: mol_type = other DNA
ggattgcccgactggcgggctgtctgcctctgttgctgacgctgtctgccggcgcggtgaatgtcacttttgacg

SEQ ID NO: 294244 - DNA, 75 bp, synthetic construct
  source 1..75: mol_type = other DNA
aaagggcgggtagagcgcgccaatcagacactacaggacaggctggtcaaagaaatgcggcttcagaatatcagt

SEQ ID NO: 294245 - DNA, 75 bp, synthetic construct
  source 1..75: mol_type = other DNA
gcgcgtcctctgctcggctttaccggtgaggatgtgcagatgattgaagagattatcctggctcacctgaatcgt

SEQ ID NO: 294246 - DNA, 75 bp, synthetic construct
  source 1..75: mol_type = other DNA
aaagcatcacgtacatgatcgccgggttaaacaaagaatatggcgatgtggtggagtccggactgctttttgctg

SEQ ID NO: 294247 - DNA, 75 bp, synthetic construct
  source 1..75: mol_type = other DNA
aagctaaagggtagaacaaaagacagtctggattctggggaagataacttattgtgtaattttgtcaaaaaacaa

SEQ ID NO: 294248 - DNA, 75 bp, synthetic construct
  source 1..75: mol_type = other DNA
tttttgtgatgatgataattggctggtaccatcttattttacaaaactagagaaatattttgaaaacaaacaagt

SEQ ID NO: 294249 - DNA, 75 bp, synthetic construct
  source 1..75: mol_type = other DNA
atgaatgagtttaagcgttttgaagaccggctgaccggactgactgaatcgctgtcaccgtcagggcgtcggcga

SEQ ID NO: 294250 - DNA, 75 bp, synthetic construct
  source 1..75: mol_type = other DNA
gcctcgtttgccgacgaagcgcagcagcatcgttccattgccgaacagctggcgcatcaggcgaatttaattaat

SEQ ID NO: 294251 - DNA, 75 bp, synthetic construct
  source 1..75: mol_type = other DNA
gagcgagtggttgaaaccggcgtggacggcataaagctgcatccgctgcatattgtgaaaggcagcattatggcg

SEQ ID NO: 294252 - DNA, 75 bp, synthetic construct
  source 1..75: mol_type = other DNA
gtatagcccgactggcgggctgtctgcctctgttgctgacgctgtctgccggtgcggtgaatgtcacttttgatg

SEQ ID NO: 294253 - DNA, 75 bp, synthetic construct
  source 1..75: mol_type = other DNA
ttgtatcgtgaaattactgacggaaaaagcattacgtacatgatcgccgggttaaacaaagaatatggcgatgtg

SEQ ID NO: 294254 - DNA, 75 bp, synthetic construct
  source 1..75: mol_type = other DNA
tgggtctttttctccttcgcgatccccgggctggtcatcgccgtcctgtggtatctgctggtgcgtacaaagccg

SEQ ID NO: 294255 - DNA, 75 bp, synthetic construct
  source 1..75: mol_type = other DNA
tcgagctggatcgctatctgaatgaacatggcgtacagggatcggcgctgggacgtccgtggatacctccaacgg

SEQ ID NO: 294256 - DNA, 75 bp, synthetic construct
  source 1..75: mol_type = other DNA
gagttcgtgaagggaagcttgatctggatattttaaaaaatataaaaggtataggtgccaagacacttagtaata

SEQ ID NO: 294257 - DNA, 75 bp, synthetic construct
  source 1..75: mol_type = other DNA
cgccgccgcgtgcatgccggcctgaacaaaggtgaggcgcgcaactcgctggccagggcggtgttcttcaaccgc

SEQ ID NO: 294258 - DNA, 75 bp, synthetic construct
  source 1..75: mol_type = other DNA
cccacatctccgaccaatacgcgccattccacaccaaggtggtcaatgtcggcctgcgcgactcaacctacgtgc

SEQ ID NO: 294259 - DNA, 75 bp, synthetic construct
  source 1..75: mol_type = other DNA
tgcatcgttacgagaaacacagccgttgaggcaaatggaggaaaatcgcccccgtttacaggggacgacgaatgt

SEQ ID NO: 294260 - DNA, 75 bp, synthetic construct
  source 1..75: mol_type = other DNA
cgggtggccggggcgagagcaccgggcacgtcaacccgaagtacggtagcgagccgggacggctgttctataccc

SEQ ID NO: 294261 - DNA, 75 bp, synthetic construct
  source 1..75: mol_type = other DNA
gggcgcaggcgctgatcgaccaaaccagccagttactgccgcgcatcaagatcaccgaactgctgatggacgtgg

SEQ ID NO: 294262 - DNA, 75 bp, synthetic construct
  source 1..75: mol_type = other DNA
gtgccgcagggcgtgcaagcctacccgacgttgcgcccgctgatcggcggcaccctgaaccacggcagcctggcg

SEQ ID NO: 294263 - DNA, 75 bp, synthetic construct
  source 1..75: mol_type = other DNA
cgtgatcgatgagctggtcgatctgcatgaccgcatcctggtcaagctgttcagcggcgcgaagcacaagcatca

SEQ ID NO: 294264 - DNA, 75 bp, synthetic construct
  source 1..75: mol_type = other DNA
cggcggctatcgtgctgtggaacacggtgtacctggaacgcgccacccaggggttggtcgaggccggcaagccgg

SEQ ID NO: 294265 - DNA, 75 bp, synthetic construct
  source 1..75: mol_type = other DNA
ccaactattttaccgctggcgggtgaccaacagcgcgtagcaatgcacatggtcagcagcgaaaccctgttctgg

SEQ ID NO: 294266 - DNA, 75 bp, synthetic construct
  source 1..75: mol_type = other DNA
gtgagctattacgcctttgagggattaattccggtggttcacccgacggcgtttgtccatcccagtgcggtattg

SEQ ID NO: 294267 - DNA, 75 bp, synthetic construct
  source 1..75: mol_type = other DNA
gtgagctattacgcctttgaggggttaattccgatagttcacccgacggcgtttgtccatcccagtgcagtattg

SEQ ID NO: 294268 - DNA, 75 bp, synthetic construct
  source 1..75: mol_type = other DNA
tgtacctggaacgcgccacccaggggttggtcgaggccggcaagccggtggacggcgagctgctgcaattcctgt

SEQ ID NO: 294269 - DNA, 75 bp, synthetic construct
  source 1..75: mol_type = other DNA
cttccgcttcgcgccgcgcatccgcgacctcggcgaaaccaagctgtacgtgccgcagggcgtgcaagcctaccc

SEQ ID NO: 294270 - DNA, 75 bp, synthetic construct
  source 1..75: mol_type = other DNA
gatgattgtttgatttttacagaactaaaatcaaatggtcaaccaatatattatggtaagtactatcagcaagtg

SEQ ID NO: 294271 - DNA, 75 bp, synthetic construct
  source 1..75: mol_type = other DNA
gtggtttatacgtcggtgccagcgtcggaaaggtaaaggttgaagaagtaatcaagccgttactccccttttatg

SEQ ID NO: 294272 - DNA, 75 bp, synthetic construct
  source 1..75: mol_type = other DNA
cctcaccattttgatgaactacaggagaaaattactcaggcagaagccgctggtgaaacgtatatcaccacacca

SEQ ID NO: 294273 - DNA, 75 bp, synthetic construct
  source 1..75: mol_type = other DNA
tcaaacttggtgcctgtaaggtatcgtttggtggtgtggatttgggttacaccaaaggtggtgttcaggttgaag

SEQ ID NO: 294274 - DNA, 75 bp, synthetic construct
  source 1..75: mol_type = other DNA
tgccacatctggaagaatttcgccagcaacaacaccaaccgcagcagcctgaagccgattgggttaacccggaaa

SEQ ID NO: 294275 - DNA, 75 bp, synthetic construct
  source 1..75: mol_type = other DNA
tcaaacttggtgcctgtaaggtgtcgtttggtggtgtggatttgggttacaccaaaggtggtgttcaggttgaaa

SEQ ID NO: 294276 - DNA, 75 bp, synthetic construct
  source 1..75: mol_type = other DNA
taccaagcgctgttaacccgactggattacctcaccaaagtcgaaagcaaagtgtttggtgaaggagaccgtaac

SEQ ID NO: 294277 - DNA, 75 bp, synthetic construct
  source 1..75: mol_type = other DNA
aatatttgttgcttccctaatctggaacctggggagatatcccggatgcgtgattccctcagagctaaactggag

SEQ ID NO: 294278 - DNA, 75 bp, synthetic construct
  source 1..75: mol_type = other DNA
ggcctgaacaaaggtgaggcgcgcaactcgctggccagggcggtgttcttcaaccgccttggggaaatcagggat

SEQ ID NO: 294279 - DNA, 75 bp, synthetic construct
  source 1..75: mol_type = other DNA
ctgagttcacgaggagcattaagcgatagcgattttcgcgtctggattgctgaatgggctacgcttccagcccgc

SEQ ID NO: 294280 - DNA, 75 bp, synthetic construct
  source 1..75: mol_type = other DNA
aaaatcgtcagagcctgatcgatgcatttcaatcaacgccaggttttaacgttattattttatccaccatcgccg

SEQ ID NO: 294281 - DNA, 75 bp, synthetic construct
  source 1..75: mol_type = other DNA
aatatctgctgtttccctaatcttgaaccaggggtgatatcccgaatgcgtgattccctcagagctaaactggag

SEQ ID NO: 294282 - DNA, 75 bp, synthetic construct
  source 1..75: mol_type = other DNA
aactttactgagtacgaagagtacaagaaacgcacgctgggcgcagacgcactggagccgaagcgtatcaagtac

SEQ ID NO: 294283 - DNA, 75 bp, synthetic construct
  source 1..75: mol_type = other DNA
agtcgaaaggtaaagcacgtctggcacgctttgaagagctgaacagcaccgaatatcagaaacgtaacgaaacca

SEQ ID NO: 294284 - DNA, 75 bp, synthetic construct
  source 1..75: mol_type = other DNA
agtcgaaaggtaaagcacgtctggcgcgctttgaagaactgaacagcaccgaatatcagaaacgtaacgaaacca

SEQ ID NO: 294285 - DNA, 75 bp, synthetic construct
  source 1..75: mol_type = other DNA
cagaagaacccgaaaaatgtgttgctggcggtgtgctggatgcagggcgaatttgacatgagcgctgccacctac

SEQ ID NO: 294286 - DNA, 75 bp, synthetic construct
  source 1..75: mol_type = other DNA
tccctgttgccgacagccggagatgctgctgcgcagggctggagcattaagaatggcggaattcagttgtcagat

SEQ ID NO: 294287 - DNA, 75 bp, synthetic construct
  source 1..75: mol_type = other DNA
aaattccgtgatataaaaacaggtcaatcttatggtttgaaatattctaaaagtcaactagagactggcaccact

SEQ ID NO: 294288 - DNA, 75 bp, synthetic construct
  source 1..75: mol_type = other DNA
atcccatcatggcttgcatggaatgccgagcctgcaaagcaggacgttttaatctttgtgaaccaccgcaggttg

SEQ ID NO: 294289 - DNA, 75 bp, synthetic construct
  source 1..75: mol_type = other DNA
ggcccggcattccaggttataaaagacagtctgacactgggactgaatgcgctgacgctgacggatgttacaaaa

SEQ ID NO: 294290 - DNA, 75 bp, synthetic construct
  source 1..75: mol_type = other DNA
tgggtatcatcaaatcgcccgacgcatttcagctcatgggcgcgtcgtggcattattcccgatcgtatggcaacg

SEQ ID NO: 294291 - DNA, 75 bp, synthetic construct
  source 1..75: mol_type = other DNA
tttcgacaagctggccgctgaacagggtcgtctggaagagatcattcaggctcacgacggtcataacctgaatgt

SEQ ID NO: 294292 - DNA, 75 bp, synthetic construct
  source 1..75: mol_type = other DNA
gttgttgagacggctggaacctcgggtgtcaaaactagcgctggatataagacctccttgttaggtacggcacta

SEQ ID NO: 294293 - DNA, 75 bp, synthetic construct
  source 1..75: mol_type = other DNA
gagcgtactggtgattggtgctggaacaattggcttatccattgtgcaggcactgcgcattatgggggcaggaaa

SEQ ID NO: 294294 - DNA, 75 bp, synthetic construct
  source 1..75: mol_type = other DNA
atgtcgtacttcactcagaccactgacggcagagtgaatctgatgcatcacaggaaagccggaaacacgaagctg

SEQ ID NO: 294295 - DNA, 75 bp, synthetic construct
  source 1..75: mol_type = other DNA
ggaacaactgggcggtcgcgccacaccggcagtcggttttgcgatgggcctggaacgtttggtgttgttagttca

SEQ ID NO: 294296 - DNA, 75 bp, synthetic construct
  source 1..75: mol_type = other DNA
tagcaaccgagttctctgaaactgctccggctactctgaaatctgttaacgacgtgaaagctgacgagcagatcc

SEQ ID NO: 294297 - DNA, 75 bp, synthetic construct
  source 1..75: mol_type = other DNA
ctggattccctgtctaaaatcgctgaccagttgatcgttggtggtggtatcgcaaacacctttatcgcggcacaa

SEQ ID NO: 294298 - DNA, 75 bp, synthetic construct
  source 1..75: mol_type = other DNA
caactttaagaaacagtttgcccgtgctgataaatggggtgcccgcgttgctgtggtgctgggtgagtctgaagt

SEQ ID NO: 294299 - DNA, 75 bp, synthetic construct
  source 1..75: mol_type = other DNA
agcctgactctgcgccctgaagggacggcgggctgtgtacgcgccggcatcgagcatggtcttctgtacaatcag

SEQ ID NO: 294300 - DNA, 75 bp, synthetic construct
  source 1..75: mol_type = other DNA
caactttaagaaacagtttgcccgcgctgataaatggggtgcccgcgttgctgtggtgctgggtgagtccgaagt

SEQ ID NO: 294301 - DNA, 75 bp, synthetic construct
  source 1..75: mol_type = other DNA
ccgtctgcagatacgtccgttcgcacaatctccctgctgccggcagccggagaggctgctgcgcagggctggagc

SEQ ID NO: 294302 - DNA, 75 bp, synthetic construct
  source 1..75: mol_type = other DNA
ggcattgctgacaaaatctcctacatctccactggcggcggtgcattcctcgaattcgtggaaggtaaagtactg

SEQ ID NO: 294303 - DNA, 75 bp, synthetic construct
  source 1..75: mol_type = other DNA
tacggttcggcatcccgaacgaacaaaaactgggtatcatcaaatcgccagacgcatttcagttcatgggcgcgc

SEQ ID NO: 294304 - DNA, 75 bp, synthetic construct
  source 1..75: mol_type = other DNA
tcagggcggtatcgccgtcagaccttgcgaaacgactgacacaaaaactgaaggagggctggcagccgtttggta

SEQ ID NO: 294305 - DNA, 75 bp, synthetic construct
  source 1..75: mol_type = other DNA
gggccgcaaggattgcagggtgtggcaggggagagaggcgatgcaggtccggctggtccacagggcgctaccggc

SEQ ID NO: 294306 - DNA, 75 bp, synthetic construct
  source 1..75: mol_type = other DNA
gagagtttgacatgagcgccgccacctatgcacagcaacctgcgctgtttacagccatgctgaagcagtttcgtg

SEQ ID NO: 294307 - DNA, 75 bp, synthetic construct
  source 1..75: mol_type = other DNA
taaagctgcattacagaagaacccgaaaaatgtgttgctggcggtgtgctggatgcagggcgaatttgacatgag

SEQ ID NO: 294308 - DNA, 75 bp, synthetic construct
  source 1..75: mol_type = other DNA
cctttcatacaatctgtccgtcaaggctactggggatactatcttccggatcaagatcatggcccgctggtaagt

SEQ ID NO: 294309 - DNA, 75 bp, synthetic construct
  source 1..75: mol_type = other DNA
tggaaattttggtggggccacatccggaacagtatgtctgggttttaaaattgttaaaaacacgcaaattaaacg

SEQ ID NO: 294310 - DNA, 75 bp, synthetic construct
  source 1..75: mol_type = other DNA
cgctgttctccggcccggcatttggtatcggtatcctcgcggcaggcgtgatcctcgccatcatgatcattccgt

SEQ ID NO: 294311 - DNA, 75 bp, synthetic construct
  source 1..75: mol_type = other DNA
gtcaggcgctttatgcagcaccgccagttccggtatctgtgcccacattcgagaaatggtgtgagttgactgagc

SEQ ID NO: 294312 - DNA, 75 bp, synthetic construct
  source 1..75: mol_type = other DNA
agagccagccaatgccgaaaccgtagcctggatgtggtcacacaggaaacacccgagcgaagtcacgcttgttcg

SEQ ID NO: 294313 - DNA, 75 bp, synthetic construct
  source 1..75: mol_type = other DNA
aaaaacaatacgggtactctttatcgtaagcgtgcagcaagaaccgtattgacggggatgtgttattcagtcggc

SEQ ID NO: 294314 - DNA, 75 bp, synthetic construct
  source 1..75: mol_type = other DNA
aaagtcaaatcacctcaaccgcacaatcttatattgaagacacactctctccctacggtaaggtccgttcgaacc

SEQ ID NO: 294315 - DNA, 75 bp, synthetic construct
  source 1..75: mol_type = other DNA
cagaaaggaattgttcaacttacatcatcaagggtatccgaatctgaaacgcttgctgcaacagcaaaagcggca

SEQ ID NO: 294316 - DNA, 75 bp, synthetic construct
  source 1..75: mol_type = other DNA
tagtccggttaacgtcatcgcgggtatcgggtgcagaggatattgcagccacagctaatgctgtcgcgcaaaact

SEQ ID NO: 294317 - DNA, 75 bp, synthetic construct
  source 1..75: mol_type = other DNA
catggcggtgacctttattatcggtaacacctaccagctcgacagcgcctcgctgtacatgccgggcaacagtat

SEQ ID NO: 294318 - DNA, 75 bp, synthetic construct
  source 1..75: mol_type = other DNA
attttaccaaaagtctaatgcaacgcattattaaatgcacgtatggggctggagagtatgctaccatttttaccg

SEQ ID NO: 294319 - DNA, 75 bp, synthetic construct
  source 1..75: mol_type = other DNA
gttccctggtacgataatcaaaccactgtttatttcagccaattttctgcgcaacgaaaagaagatcgtacgatc

SEQ ID NO: 294320 - DNA, 75 bp, synthetic construct
  source 1..75: mol_type = other DNA
gctaccgtaagctgttcaatctccgtaataccgttgttacttaattattttcattcacaggatctggtcttaaat

SEQ ID NO: 294321 - DNA, 75 bp, synthetic construct
  source 1..75: mol_type = other DNA
gaaagcggcggcagatattgccagtcgggtgagcggcgtaaaacgtgtaaccacagcgtttacgtttattaaata

SEQ ID NO: 294322 - DNA, 75 bp, synthetic construct
  source 1..75: mol_type = other DNA
gaaagcagcggcagatattgccagccgggttagcggcgtgaagcgtgtaaccacagcgtttacgtttattaaata

SEQ ID NO: 294323 - DNA, 75 bp, synthetic construct
  source 1..75: mol_type = other DNA
aagcgccagaaatgcctggtgccgtccgaccgtattgaactgactcgccatatgcatatgaaagaggccatctga

SEQ ID NO: 294324 - DNA, 75 bp, synthetic construct
  source 1..75: mol_type = other DNA
ccggtaacccgttcctgatgtcgttcttcacccagaccacagacggcaaactgaatctgatgcatcacaagaaag

SEQ ID NO: 294325 - DNA, 75 bp, synthetic construct
  source 1..75: mol_type = other DNA
cctgctgccgacagccggagaggctgctgcgcagggctggaccattaaggacggcggaattcagttgtcgggtgg

SEQ ID NO: 294326 - DNA, 75 bp, synthetic construct
  source 1..75: mol_type = other DNA
cctgttgccgacagccggagacgctgctgcgcagggctggagcattaagaatggcggaattcagttgtcagatgg

SEQ ID NO: 294327 - DNA, 75 bp, synthetic construct
  source 1..75: mol_type = other DNA
tcttagctcaggggtttcccaaatctgatgtaaacgatttagaaattgctattggtgaagatggcccgatagcta

SEQ ID NO: 294328 - DNA, 75 bp, synthetic construct
  source 1..75: mol_type = other DNA
gtggcagtttgaccttgggcgctgcatcttctgtgggcgctgcgaagaagtctgcccgacagcggcgatcaaact

SEQ ID NO: 294329 - DNA, 75 bp, synthetic construct
  source 1..75: mol_type = other DNA
agctttgagacttgcccggaatgtaagcgccagaaatgcctggtgccgtccgaccatattgaactgactcgccat

SEQ ID NO: 294330 - DNA, 75 bp, synthetic construct
  source 1..75: mol_type = other DNA
ataagacctttgaaagaatacttgattacaaagtcatccctttgatggatttgatctcatgggaacagctctaca

SEQ ID NO: 294331 - DNA, 75 bp, synthetic construct
  source 1..75: mol_type = other DNA
gggcgatgtctccagcgaacgcgccattgtccgtacccgcaatatcagctgtatcaaaggtgataaaaccatcga

SEQ ID NO: 294332 - DNA, 75 bp, synthetic construct
  source 1..75: mol_type = other DNA
tgaccgctggcttatatttcctgttctggattaacgcctggtatggtttgtatcaatggcgcaaagagttgcaaa

SEQ ID NO: 294333 - DNA, 75 bp, synthetic construct
  source 1..75: mol_type = other DNA
aagcgacaccaatgagcaggtcaatttactggttattgaatctggcgaaaatgccgcactgtgcctgctggcaca

SEQ ID NO: 294334 - DNA, 75 bp, synthetic construct
  source 1..75: mol_type = other DNA
ggcgttggtattacgatgaagagcatgatcgaatgatgcttgatttagccaatggtatgctgtttcgctcacgtt

SEQ ID NO: 294335 - DNA, 75 bp, synthetic construct
  source 1..75: mol_type = other DNA
atgccgcgctgtgtctccttgcacagccttgtgttgtcatcgccggtcgcgccatgcaactgggtgacgccatca

SEQ ID NO: 294336 - DNA, 75 bp, synthetic construct
  source 1..75: mol_type = other DNA
gttgatgacgccgcgctctatttttcctttgaggaaaaatgccgcgatttagatttatccaaagaacaaaaagcc

SEQ ID NO: 294337 - DNA, 75 bp, synthetic construct
  source 1..75: mol_type = other DNA
gaactggtgctgaatgcactggtagcaattcgttatctcaaaccgcaaatgccgaaaagctggcattttgtttcc

SEQ ID NO: 294338 - DNA, 75 bp, synthetic construct
  source 1..75: mol_type = other DNA
ggcgttggtattacgatgaagagcacgatcgaatgatgctcgatttagccaatggtatgctgtttcgctcacgtt

SEQ ID NO: 294339 - DNA, 75 bp, synthetic construct
  source 1..75: mol_type = other DNA
gagctggaacgcgacgcaatggcgctactgtggtcagccattgcggcgggcctgtcgatgggcgcttcgctactg

SEQ ID NO: 294340 - DNA, 75 bp, synthetic construct
  source 1..75: mol_type = other DNA
tgagcaacaagcgcaaagcagaagcacgtcaaaaagcagaacgtgcggaaaacattaagaaaaatgataaaaacc

SEQ ID NO: 294341 - DNA, 75 bp, synthetic construct
  source 1..75: mol_type = other DNA
tggaaggtgtaccggggagttttttgctggagaatctgggttatacctttggttttattatcgtcattatggcac

SEQ ID NO: 294342 - DNA, 75 bp, synthetic construct
  source 1..75: mol_type = other DNA
cacaagttgtatgagaacgacacaggaacaacagacagcaacgggctgccgccgcactcaatttccgccatcgtc

SEQ ID NO: 294343 - DNA, 75 bp, synthetic construct
  source 1..75: mol_type = other DNA
taagagtgcagcaacagttgccgcttcaaatatagatatcttatttaatgaggctgctcattccaatattgccaa

SEQ ID NO: 294344 - DNA, 75 bp, synthetic construct
  source 1..75: mol_type = other DNA
gacgggcaaatggtagcgctgtatgcactcgggattcacgatgctaataacacggccgttgcggtatataactcc

SEQ ID NO: 294345 - DNA, 75 bp, synthetic construct
  source 1..75: mol_type = other DNA
tcaccggcacagcagggacaactatcacgaacggtactgtgaaagacactaataacgtgatctggcgtcttcctg

SEQ ID NO: 294346 - DNA, 75 bp, synthetic construct
  source 1..75: mol_type = other DNA
actggtgaataccctgctgtcgttcaaaagtgattttgtctccactgtcgataatatcgtgtcactggcaggcga

SEQ ID NO: 294347 - DNA, 75 bp, synthetic construct
  source 1..75: mol_type = other DNA
atgggctgggctgaaaacctgcaaaacgcctcctttcgcggtgtgcagtttgacgtactgaacacggacgaacaa

SEQ ID NO: 294348 - DNA, 75 bp, synthetic construct
  source 1..75: mol_type = other DNA
aatacccgtttgttgacggggcagatttgcacgacctcggacgcaaggcgcgaccgttccgcatgacggcgttcc

SEQ ID NO: 294349 - DNA, 75 bp, synthetic construct
  source 1..75: mol_type = other DNA
cacttaccgccgtgatggctacgaatatgactgcgtgatgcctgtttatcagttccggcgtgatttcacgctggt

SEQ ID NO: 294350 - DNA, 75 bp, synthetic construct
  source 1..75: mol_type = other DNA
ttaagggcgtggaagaacggcgtgtaacctaccgccgtgaaggctacgaatatgattgcgtgatgcctgtttatc

SEQ ID NO: 294351 - DNA, 75 bp, synthetic construct
  source 1..75: mol_type = other DNA
gcgcaacagttgtttgatgaactggacactttacaggcgcggttaagtgatttttttgatgccgttactgcacct

SEQ ID NO: 294352 - DNA, 75 bp, synthetic construct
  source 1..75: mol_type = other DNA
ctttcgaaacttccatgcaccgcctgggtgccagcgtggtgggcttctccgacagcgccaatacatcactgggta

SEQ ID NO: 294353 - DNA, 75 bp, synthetic construct
  source 1..75: mol_type = other DNA
gcattacgtgatgcagggcttgcgctgacagaagatttaaccacgcggagcgtgcatcttcccggtgcttttcag

SEQ ID NO: 294354 - DNA, 75 bp, synthetic construct
  source 1..75: mol_type = other DNA
gtgcaaccgacagcaacggtctgcctcctcattccatttccgccatcgtcgatgggggggatgttaccgagatag

SEQ ID NO: 294355 - DNA, 75 bp, synthetic construct
  source 1..75: mol_type = other DNA
actaaaagtgggcttttcgggataacagattgcccgctgttacgtaaaagcaataacgttgtagataatggttaa

SEQ ID NO: 294356 - DNA, 75 bp, synthetic construct
  source 1..75: mol_type = other DNA
gtacaatacttgcacactaaaagtggttttttggggataacagattgcccgctgttacgcaaaagcaatatcgtg

SEQ ID NO: 294357 - DNA, 75 bp, synthetic construct
  source 1..75: mol_type = other DNA
gtacaatacttgcacactaaaagtggtttcttggggataacagattgcccactgttacgtaaaagcaatatcgtg

SEQ ID NO: 294358 - DNA, 75 bp, synthetic construct
  source 1..75: mol_type = other DNA
cggcacctttatcttcgcgttaatgagtcatgcacagattcgtaacgacatgagcaacaagcgcaaagcagaagc

SEQ ID NO: 294359 - DNA, 75 bp, synthetic construct
  source 1..75: mol_type = other DNA
atgtttggtattttcaaaaagaaaacccgcagagcggcagcggaaattaaaaagtttgagaaacgtgatctggca

SEQ ID NO: 294360 - DNA, 75 bp, synthetic construct
  source 1..75: mol_type = other DNA
taatgcgattagcgcaactattatcggtcagctggataccaattttaaaattggtcgtcgtgccgcgttacgtga

SEQ ID NO: 294361 - DNA, 75 bp, synthetic construct
  source 1..75: mol_type = other DNA
atgtttggtatttttggtaaaaaagcccgccgagcggcagtggaaattaaaaagtttgagaaacgcgatctggca

SEQ ID NO: 294362 - DNA, 75 bp, synthetic construct
  source 1..75: mol_type = other DNA
aaaaaatcattctcgatcaggctggtggtttgttggttaacggaacaacttcatctgcaatagtggatgaaggcg

SEQ ID NO: 294363 - DNA, 75 bp, synthetic construct
  source 1..75: mol_type = other DNA
caatggcacgctatcggtcagcgacggtgccattgccacagatattgttcagtccgagggaggcgcaattagtct

SEQ ID NO: 294364 - DNA, 75 bp, synthetic construct
  source 1..75: mol_type = other DNA
tcctcagttcgatctggtgttgggaatgatggcaatgaagggatgagtatggctgataatcgtaagtgctctttt

SEQ ID NO: 294365 - DNA, 75 bp, synthetic construct
  source 1..75: mol_type = other DNA
tgttatggaccagtggacaggtaaagcctcgaatgtatcggcgcgcaaaatctccagaaaaggcggaatgcgcag

SEQ ID NO: 294366 - DNA, 75 bp, synthetic construct
  source 1..75: mol_type = other DNA
taagcaaattaattgatattaagcatggctttgcttttaaaggagaatatttttcagaaacaaaaacaaatcaga

SEQ ID NO: 294367 - DNA, 75 bp, synthetic construct
  source 1..75: mol_type = other DNA
tttattgctattaatgattatgatgactggatggttcgtgggttaccattggaaggtgacgtagtgctaactaca

SEQ ID NO: 294368 - DNA, 75 bp, synthetic construct
  source 1..75: mol_type = other DNA
cgcagagcggcaacggaaattaaaaagtttgaaaaacgcgatctggcacaggtggtgattaacgccgcatacctg

SEQ ID NO: 294369 - DNA, 75 bp, synthetic construct
  source 1..75: mol_type = other DNA
tctctgcatggagtgcacagcctgagttcacgcttaaccttacgcttttcgacaggcgaccgctgcacccgcaaa

SEQ ID NO: 294370 - DNA, 75 bp, synthetic construct
  source 1..75: mol_type = other DNA
atggaaccagagccggggctctgcaggcgcacgcacgctggctgaaatgctgacccaaaacggcgtcccgatgag

SEQ ID NO: 294371 - DNA, 75 bp, synthetic construct
  source 1..75: mol_type = other DNA
agggcggtgtattgattctcgacggcagtacggtaaaaggtgacggtgtcactttcagtgttggtaacatcaatc

SEQ ID NO: 294372 - DNA, 75 bp, synthetic construct
  source 1..75: mol_type = other DNA
aaaatattaccctgttgttgttatgcgttctgctggctcagtaagcgaactggcatcaaggatcattatcaccac

SEQ ID NO: 294373 - DNA, 75 bp, synthetic construct
  source 1..75: mol_type = other DNA
tgcgcaaagtgctgttaccagaggcgttgccgggtctggtaaatgccgcaactatcaccctgattactctggtcg

SEQ ID NO: 294374 - DNA, 75 bp, synthetic construct
  source 1..75: mol_type = other DNA
gcttccgggtctggtgaacgccgcaaccattacgctgattactctggttggttattccgcgatgggtggcgcagt

SEQ ID NO: 294375 - DNA, 75 bp, synthetic construct
  source 1..75: mol_type = other DNA
aaggcagtaaaatcagcctatgacaatgcagagaaacgtctgcagaaagaccagaacggcgctgatatacccgat

SEQ ID NO: 294376 - DNA, 75 bp, synthetic construct
  source 1..75: mol_type = other DNA
gtcggcgcaccaatcccgtggccatcagataccgttccgtctggctatgccctgatgcaggggcagacttttgac

SEQ ID NO: 294377 - DNA, 75 bp, synthetic construct
  source 1..75: mol_type = other DNA
cttacaatgtcactcgctctggcgacagctatattctggttaacttctataccggagtcggaagttgccggaccc

SEQ ID NO: 294378 - DNA, 75 bp, synthetic construct
  source 1..75: mol_type = other DNA
tgccagtcggcaacctgtctgtagcgcgcttaaacttcagccagacgaagacgggattggcgcaacgctccggcc

SEQ ID NO: 294379 - DNA, 75 bp, synthetic construct
  source 1..75: mol_type = other DNA
agaatggagccatctatcgtctggggacggatggtcttcagctctacagttccggtaagacgcaaaacctgtccg

SEQ ID NO: 294380 - DNA, 75 bp, synthetic construct
  source 1..75: mol_type = other DNA
caacaatcaacgattactgtacagcagggcggtgtgttgattctcgacggcagtacggtaaaaggtgacagtgtc

SEQ ID NO: 294381 - DNA, 75 bp, synthetic construct
  source 1..75: mol_type = other DNA
tgagtaataagggcgatgatttgcgctctgtgttctatgttgatggcgctgctttccctgtttttgcgtttatcg

SEQ ID NO: 294382 - DNA, 75 bp, synthetic construct
  source 1..75: mol_type = other DNA
gaatgttctggcaatatcaaaacaatgaacgagccattcactcaataatgatgagtaataagggcgatgatttgc

SEQ ID NO: 294383 - DNA, 75 bp, synthetic construct
  source 1..75: mol_type = other DNA
gttgctggaaaatggcggtaacctgcgtgtactggaaggccatcgcgcggaaaaaatcattctcgatcaagaggg

SEQ ID NO: 294384 - DNA, 75 bp, synthetic construct
  source 1..75: mol_type = other DNA
caggtcagcccttttgcatagagcgtgacacagtgctgatggcggggagtgagttcaccgctggtgagcatcagt

SEQ ID NO: 294385 - DNA, 75 bp, synthetic construct
  source 1..75: mol_type = other DNA
ttaaacaacgcgtaatggccgccagagagcgccaatttaagcggcagaataaactgaacgcctggctggatagtc

SEQ ID NO: 294386 - DNA, 75 bp, synthetic construct
  source 1..75: mol_type = other DNA
tctctaccccgggtagctgcccggtttaacattcccagccacaacacggttaaaaactggataaaaggctaccgc

SEQ ID NO: 294387 - DNA, 75 bp, synthetic construct
  source 1..75: mol_type = other DNA
ctggatgtccggttgcttgaccactttatcgtggcggggactgaaacggtgtcgatggctgaacgggggctggtg

SEQ ID NO: 294388 - DNA, 75 bp, synthetic construct
  source 1..75: mol_type = other DNA
atcacccgtccggtgaagtcacacccagcaaggcagaccgccttatcacggaacgtctggtacaggcactggccc

SEQ ID NO: 294389 - DNA, 75 bp, synthetic construct
  source 1..75: mol_type = other DNA
gcacggaagtccatccccgtgaagtgattaaacgcgccctgtatcacaatgccgctgctgtggtgctggcacaca

SEQ ID NO: 294390 - DNA, 75 bp, synthetic construct
  source 1..75: mol_type = other DNA
tgacgtcagcacccagtcatcacccgtagaaatgaactgcccacagaatggttctattccgggcaaaacctactc

SEQ ID NO: 294391 - DNA, 75 bp, synthetic construct
  source 1..75: mol_type = other DNA
ttatgctcggcagtttgttttttccttttattgccatcgcaggaagcaccgcgcaagggggcgtgatccattttt

SEQ ID NO: 294392 - DNA, 75 bp, synthetic construct
  source 1..75: mol_type = other DNA
tggcaagctgaccattgtcggacgtttagacaatctgttcttcagtggtggcgaaggcattcagccagaagaagt

SEQ ID NO: 294393 - DNA, 75 bp, synthetic construct
  source 1..75: mol_type = other DNA
ttccgctgctgcccttttttatggaagaggtctacctcaagccacaatggatgcaggatgacggtattcatccca

SEQ ID NO: 294394 - DNA, 75 bp, synthetic construct
  source 1..75: mol_type = other DNA
atgaaacttaaatatcctggcttaactgccagcggcaaaactcgcactaaattcatgcgcggtgatatttaccgc

SEQ ID NO: 294395 - DNA, 75 bp, synthetic construct
  source 1..75: mol_type = other DNA
gtagaaatgaactgcccacagaatggttctattccgggcaaaacctactccagcaaagcgttaatgagcggcaat

SEQ ID NO: 294396 - DNA, 75 bp, synthetic construct
  source 1..75: mol_type = other DNA
cccgtatccttgaccaggcgcgtgacattatcagccggtactaccagcgtggcgttcagctctgttcccctgatg

SEQ ID NO: 294397 - DNA, 75 bp, synthetic construct
  source 1..75: mol_type = other DNA
cggtgctgatattgaatttaagcgcactggtaataagcatttgtggtttagagatccgaatggcttagaactagg

SEQ ID NO: 294398 - DNA, 75 bp, synthetic construct
  source 1..75: mol_type = other DNA
tatggctttgataaagatggtaataagcgattcagctaccgcatgtatcacgaaggtgataagccgactccgact

SEQ ID NO: 294399 - DNA, 75 bp, synthetic construct
  source 1..75: mol_type = other DNA
attcaggaaatggacgccaaatatcaagctaagattgaagcattgactaaagagattgccgaactcaaagcaact

SEQ ID NO: 294400 - DNA, 75 bp, synthetic construct
  source 1..75: mol_type = other DNA
cacagacggctggtaaaaaaccaacgccggaacaattatcacagggtgagatcgccttacaactggcggaccatg

SEQ ID NO: 294401 - DNA, 75 bp, synthetic construct
  source 1..75: mol_type = other DNA
tcaatgctttaatcatcaaagcaatgcaggaaatgaccgctaagtttgatgctatggctaaagaacttgccgaaa

SEQ ID NO: 294402 - DNA, 75 bp, synthetic construct
  source 1..75: mol_type = other DNA
aattaaacgcgaagtaggtattattgctcaggatctggaaaaagtattgccggaagcagtaggtattcaatccac

SEQ ID NO: 294403 - DNA, 75 bp, synthetic construct
  source 1..75: mol_type = other DNA
gcattaaccggcgatgcaagattgattgcccttctgggagtcagcaccggcgcgcgatggtctgaactggcaaca

SEQ ID NO: 294404 - DNA, 75 bp, synthetic construct
  source 1..75: mol_type = other DNA
aggcgaaaatttaaaactaaaggtgaagctcaagcattcgaacgtcatgtactggttaactaccacaacaaagag

SEQ ID NO: 294405 - DNA, 75 bp, synthetic construct
  source 1..75: mol_type = other DNA
gctggcaccgcttgaacatgaagagtttggcatcatcctgctcgataatcagaatcagctgctgcaccgcgaaat

SEQ ID NO: 294406 - DNA, 75 bp, synthetic construct
  source 1..75: mol_type = other DNA
ttcacgatacaccggaagccacgttaattaaaccttctgttggtgttattgatgggcgcatcattactctattca

SEQ ID NO: 294407 - DNA, 75 bp, synthetic construct
  source 1..75: mol_type = other DNA
tacgccgacctgctggtcaatctaaccacattgcgtttcaagataaccggactggagatattacgcgtcaaggtt

SEQ ID NO: 294408 - DNA, 75 bp, synthetic construct
  source 1..75: mol_type = other DNA
tatgcaagagcttggtattaacagaagtgaccacttaacccgaaaaaatattatcagatatcgccttgaattaat

SEQ ID NO: 294409 - DNA, 75 bp, synthetic construct
  source 1..75: mol_type = other DNA
gacagcgaagtcgttgatctcagcgaatgggtgaaagataaactggcacgttttcagcaaccggtgcgttggctg

SEQ ID NO: 294410 - DNA, 75 bp, synthetic construct
  source 1..75: mol_type = other DNA
atcagcccgttaaaaggcattgggcggctgttttccagtgaacatctggcggaaacgggaaagatgacggtgaag

SEQ ID NO: 294411 - DNA, 75 bp, synthetic construct
  source 1..75: mol_type = other DNA
cccgacccactacgccgtggcgttgcagtatgaccagtcgcgcgccgccgcgccgtttgtagtggcaaaaggtac

SEQ ID NO: 294412 - DNA, 75 bp, synthetic construct
  source 1..75: mol_type = other DNA
cagccgcgcccagccctgaacagacatatttccattcccaaagaggtccttaaactggatggcgaaaacaactaa

SEQ ID NO: 294413 - DNA, 75 bp, synthetic construct
  source 1..75: mol_type = other DNA
atcagcccgttaaaaggcattaggcggctgttttccagtgagcatctggcggaaacgggaaagatgacggtgaag

SEQ ID NO: 294414 - DNA, 75 bp, synthetic construct
  source 1..75: mol_type = other DNA
gctgaagatgaccaaacaggagctgaaagaagagtacaaaaatcaggaaggcaagccggaagtgaaggcgcgcgt

SEQ ID NO: 294415 - DNA, 75 bp, synthetic construct
  source 1..75: mol_type = other DNA
cgaaagccaacgtggtgatcaccaacccgacccactacgccgtggcgttgcagtatgactcgtcgcgcgccgccg

SEQ ID NO: 294416 - DNA, 75 bp, synthetic construct
  source 1..75: mol_type = other DNA
tgcggctccaccgcgtttctgcttgggcgggaaatgtgtggcaagccagtgcaaatcatcactaattatctaccg

SEQ ID NO: 294417 - DNA, 75 bp, synthetic construct
  source 1..75: mol_type = other DNA
ggcgaaagcgtagtcatcaactgcggctccaccgcgtttctgcttgggcgggaaatgtgtggcaagccagtgcaa

SEQ ID NO: 294418 - DNA, 75 bp, synthetic construct
  source 1..75: mol_type = other DNA
atgtcaaagccgccaacgctgaaccattgttaatgcaaatacgtctgcctgcaaactatggtcgccgttataatg

SEQ ID NO: 294419 - DNA, 75 bp, synthetic construct
  source 1..75: mol_type = other DNA
tatggctggcagccgacagcatggacgaagctgaatggcgggatttacggcggattttgttgcaacaagagacgc

SEQ ID NO: 294420 - DNA, 75 bp, synthetic construct
  source 1..75: mol_type = other DNA
gtgtaaatcaaacactgattaatctttatgataaccgttacctgtacgcatcgacttacagccgcgctattctcg

SEQ ID NO: 294421 - DNA, 75 bp, synthetic construct
  source 1..75: mol_type = other DNA
atatgttgacggcaatggcagagcagaagatgctgagcgtggtagggaaactggtggtactggttgatagcagta

SEQ ID NO: 294422 - DNA, 75 bp, synthetic construct
  source 1..75: mol_type = other DNA
caatttgcgctggtgccggatggggaaaacacgtttccggcgttaacgtcgctgcacattcagcgggttgaaggc

SEQ ID NO: 294423 - DNA, 75 bp, synthetic construct
  source 1..75: mol_type = other DNA
ctcgtctgtgctcaatgacgttgacctctggttctaccggattgccgaaagctgctgtccatacctgtcaggcgc

SEQ ID NO: 294424 - DNA, 75 bp, synthetic construct
  source 1..75: mol_type = other DNA
gctgcaaattcaggctggagagggcgcatatgcagctatgtggcagccgacacgcctgtgctcaatgacgttgac

SEQ ID NO: 294425 - DNA, 75 bp, synthetic construct
  source 1..75: mol_type = other DNA
actctgccgccggagctgaaaaacggcggtattaaaatttcacgtcaggcgctaaaagagtgggtgcaacgccag

SEQ ID NO: 294426 - DNA, 75 bp, synthetic construct
  source 1..75: mol_type = other DNA
atgctgccgccagagttgaaaaacggcggcattaaaatttcacgtcaggtgctaaaagagtgggtgcaacgtcag

SEQ ID NO: 294427 - DNA, 75 bp, synthetic construct
  source 1..75: mol_type = other DNA
tggcaagctgactattgttgggcgtctggacaatctgttctttagcggcggcgaaggcattcagccagaagaagt

SEQ ID NO: 294428 - DNA, 75 bp, synthetic construct
  source 1..75: mol_type = other DNA
gaccaggacagcgtggatcttagcgaatgggtgaaagataagctggctcgttttcagcaaccggtgcgttggctg

SEQ ID NO: 294429 - DNA, 75 bp, synthetic construct
  source 1..75: mol_type = other DNA
acgcttccgccagagctgaaaaatggggggattaaaatttcgcgtcaggcattaaaagagtgggttcaacgccag

SEQ ID NO: 294430 - DNA, 75 bp, synthetic construct
  source 1..75: mol_type = other DNA
gcgcggatgacggtgcgtgataaacagccattggagcaaatgctggcaggctgtactcacgcttcactggtgcca

SEQ ID NO: 294431 - DNA, 75 bp, synthetic construct
  source 1..75: mol_type = other DNA
cgcgtctgtgctcaatgacgttgacctcgggttctaccgggttgccgaaagccgctgtccatacttatcaggccc

SEQ ID NO: 294432 - DNA, 75 bp, synthetic construct
  source 1..75: mol_type = other DNA
ttttcaacaaccggtgcgctggctaactctgccgccggagctgaaaaacggcggtattaaaatttcacgtcaggc

SEQ ID NO: 294433 - DNA, 75 bp, synthetic construct
  source 1..75: mol_type = other DNA
ccgttgccgacaaggagtttggtcatcggccggtagcggtggtggagtatgaccagcaaaccgttgatcttgacg

SEQ ID NO: 294434 - DNA, 75 bp, synthetic construct
  source 1..75: mol_type = other DNA
cgtggaatacgccgcaaacgctgctggcctggctggcgttactgcaatgcggggcgcgggtgctgcccgtgaacc

SEQ ID NO: 294435 - DNA, 75 bp, synthetic construct
  source 1..75: mol_type = other DNA
ccgaaagtggttgcggcggtggaagcgcagttgaaaaaactgtcgcacacctgcttccaggtgctggcttacgag

SEQ ID NO: 294436 - DNA, 75 bp, synthetic construct
  source 1..75: mol_type = other DNA
aaccacataaaaagaaagaaaccaagaaataatgataaatataatatggaaatcgaaaagagcttagacaaagca

SEQ ID NO: 294437 - DNA, 75 bp, synthetic construct
  source 1..75: mol_type = other DNA
ccgatgcagcaggcagcgtgaagccaacaatgcaaaagttgattccggcggattcgctccgtttgcagttttacg

SEQ ID NO: 294438 - DNA, 75 bp, synthetic construct
  source 1..75: mol_type = other DNA
ctcaccattgaagacgctcagatccgtcagggtctggaaatcatcagccagtgttttgctgaggcgaagcagtag

SEQ ID NO: 294439 - DNA, 75 bp, synthetic construct
  source 1..75: mol_type = other DNA
ggcgcagggcgtaccggcacgctgtttgcgatggagcaaatgggcgtggcaccagatctcaccacctttgcgaaa

SEQ ID NO: 294440 - DNA, 75 bp, synthetic construct
  source 1..75: mol_type = other DNA
ggaaaatctgctgcaaaaagccaacgttctggggcagaagctgaaagacggattgctggcgatagccgaaaaaca

SEQ ID NO: 294441 - DNA, 75 bp, synthetic construct
  source 1..75: mol_type = other DNA
tttcggtaggtttgatatttatttcattctcttttgtggcaaagtgctctcaactcaaaaatttgaataattact

SEQ ID NO: 294442 - DNA, 75 bp, synthetic construct
  source 1..75: mol_type = other DNA
ttatgcgggacggctatccgcatccctgcatgcgaccgatgtacaacttcctgggaaaattcaaacccgcccccc

SEQ ID NO: 294443 - DNA, 75 bp, synthetic construct
  source 1..75: mol_type = other DNA
gacatctgcaagatttgaatgttgttatcgagagtgcctatcctgaagatcgggggtacgggcctccgtcattac

SEQ ID NO: 294444 - DNA, 75 bp, synthetic construct
  source 1..75: mol_type = other DNA
gtgaaaaggactcgcgctggtttcacgttactggaaatgctggtggcaatagccatttttgcctcactggcaatg

SEQ ID NO: 294445 - DNA, 75 bp, synthetic construct
  source 1..75: mol_type = other DNA
tgaagggatgcgctttgtgcgtggcggtgtggttaatccgttgatgcgcctgccgcgcagtaatctgctcaccgt

SEQ ID NO: 294446 - DNA, 75 bp, synthetic construct
  source 1..75: mol_type = other DNA
tatctcaaacacaggaactgtatatcatataaatattgaaagtgtcagcaatgataaatgtcttgataaattcaa

SEQ ID NO: 294447 - DNA, 75 bp, synthetic construct
  source 1..75: mol_type = other DNA
cctgattcttctctcctgcggcccgtattacaacgtgctgcgcatccttgtaccgctcaccattgaagacgctca

SEQ ID NO: 294448 - DNA, 75 bp, synthetic construct
  source 1..75: mol_type = other DNA
ggcgtggttaatccgttgatgcgtctgccgcgcagtaatctgctcaccgtcggttaccgcattcatgatggttat

SEQ ID NO: 294449 - DNA, 75 bp, synthetic construct
  source 1..75: mol_type = other DNA
gtgagaaggactcgcgctggtttcacgttactggaaatgctggtggcaatcgccatttttgcctcgctggcactg

SEQ ID NO: 294450 - DNA, 75 bp, synthetic construct
  source 1..75: mol_type = other DNA
agccaggcggcgatggccccagcgttattcatcctcggtgccgctggctttacgctatatccggtggcgatggcc

SEQ ID NO: 294451 - DNA, 75 bp, synthetic construct
  source 1..75: mol_type = other DNA
tgttagcgccgcactggagctttatgccgggtacttatcagggtgcggaagccggggcgaattttgattacggcg

SEQ ID NO: 294452 - DNA, 75 bp, synthetic construct
  source 1..75: mol_type = other DNA
gctactggcatgacacgaccgtgcaaatgagcgatttcaaaacgagggtgtggttgcttccagtgcctggcccta

SEQ ID NO: 294453 - DNA, 75 bp, synthetic construct
  source 1..75: mol_type = other DNA
gataaacaatacgactgggttacgcaattcgaaaaagaaacaggctgtgcggtgaatgtgaaaaccgccgccact

SEQ ID NO: 294454 - DNA, 75 bp, synthetic construct
  source 1..75: mol_type = other DNA
agaaaggaaaggtgattctcggcgcgatgatgcgcaagctggcacaggtggcgtatggagtgctgaagtcaggcg

SEQ ID NO: 294455 - DNA, 75 bp, synthetic construct
  source 1..75: mol_type = other DNA
atgaatcaggtagcagtgtgagaggggcgagccggatgagtaaggccggacatgtgtcgcttcgcagggcgttgt

SEQ ID NO: 294456 - DNA, 75 bp, synthetic construct
  source 1..75: mol_type = other DNA
gtgccgctcaccattgaagatgctcagattcgtcagggtctggagatcatcggccagtgttttgatgaggcgaag

SEQ ID NO: 294457 - DNA, 75 bp, synthetic construct
  source 1..75: mol_type = other DNA
cgtaaccgtgggcgtttgcttgctgcgtatatgatggtttattacgtgggaacgtttttaggccagttactggtc

SEQ ID NO: 294458 - DNA, 75 bp, synthetic construct
  source 1..75: mol_type = other DNA
gtcgtcagtacaggcgatccctgtggcggtacgcatgaccctgcattcgccgcaatggggcgagattgaacgcat

SEQ ID NO: 294459 - DNA, 75 bp, synthetic construct
  source 1..75: mol_type = other DNA
tagcagtgtgagaggggcgagccggatgagtaggccggacatgtgtcgcttcgcagggcgttgtatatgcccgca

SEQ ID NO: 294460 - DNA, 75 bp, synthetic construct
  source 1..75: mol_type = other DNA
atctcaatttgctgctctgtctgcaactgctgatgcaggagcgcagcgtgaccaaagcggcgaagcggatgaacg

SEQ ID NO: 294461 - DNA, 75 bp, synthetic construct
  source 1..75: mol_type = other DNA
aaagctggaatgaccattatcctgatgaagtatcgaaagcactgtcagcaattagcaaagctattggtgaagatt

SEQ ID NO: 294462 - DNA, 75 bp, synthetic construct
  source 1..75: mol_type = other DNA
catagtactggagttgacccaatcaaccttcacaggcatcgataaaaatgaacgctactataaaaaacagcgctg

SEQ ID NO: 294463 - DNA, 75 bp, synthetic construct
  source 1..75: mol_type = other DNA
tgtggtctgtaactacatcaacacagggtataagaactcatcaacctgatgtgcaggtagataccagcgttctgg

SEQ ID NO: 294464 - DNA, 75 bp, synthetic construct
  source 1..75: mol_type = other DNA
gataccgcccttgtcgtgggggatcgtgaagagcatgggggccgctttctccagtgcctacagccatttttcttc

SEQ ID NO: 294465 - DNA, 75 bp, synthetic construct
  source 1..75: mol_type = other DNA
aacaacatcagtaatgaggagtctttccagcagttgatggatgagtctaggaagggaacggtatcaggtgagatg

SEQ ID NO: 294466 - DNA, 75 bp, synthetic construct
  source 1..75: mol_type = other DNA
gctaagccagtattacggaagtcaccttacgcgggaatgatgtttaacgggcagggaagaccaattaacccgaat

SEQ ID NO: 294467 - DNA, 75 bp, synthetic construct
  source 1..75: mol_type = other DNA
acttggtttagataagcttaatgtccaaaaagcatacacaccaagtggcgaaaatgtgaaagttgacactacaac

SEQ ID NO: 294468 - DNA, 75 bp, synthetic construct
  source 1..75: mol_type = other DNA
ccgtgagcttacagttcaagctactaacggtacaaattctgatagcgatttatcatcaatccaggcggaaataac

SEQ ID NO: 294469 - DNA, 75 bp, synthetic construct
  source 1..75: mol_type = other DNA
aaaatctcctggcgatgtaggaagcacaaaaaatgtcaccgcatatcaagttgccaacacacaatctgttgacgc

SEQ ID NO: 294470 - DNA, 75 bp, synthetic construct
  source 1..75: mol_type = other DNA
atgaacactaatccacttaatacaaatttcttgaaacttaaatttccaccactttttgaggaagtaacacagtcc

SEQ ID NO: 294471 - DNA, 75 bp, synthetic construct
  source 1..75: mol_type = other DNA
aagtctattgattcacgaatgcttgggctggtggagcgcatggaaaaagccgcagcatcgcttattgccggaaag

SEQ ID NO: 294472 - DNA, 75 bp, synthetic construct
  source 1..75: mol_type = other DNA
catcatggccggtttcaacggtaccacccgcgctgatacctcagaccgcagcaaaaacccgatgctgcaggatgt

SEQ ID NO: 294473 - DNA, 75 bp, synthetic construct
  source 1..75: mol_type = other DNA
gggacaatggttcggtaatggctgactacggacaaaattctggtcgtatcgatgccatgacgcaagacgctggta

SEQ ID NO: 294474 - DNA, 75 bp, synthetic construct
  source 1..75: mol_type = other DNA
gctgtggcataaacggaacagccataatccgaagatcgtctggttacgggaaaccattaaacatctttacgcgtc

SEQ ID NO: 294475 - DNA, 75 bp, synthetic construct
  source 1..75: mol_type = other DNA
ttacgttatccgcatatcagcatttgctgggaacagagcgatacctgggcgctggacaatgtgttacaggagctg

SEQ ID NO: 294476 - DNA, 75 bp, synthetic construct
  source 1..75: mol_type = other DNA
gtttatggcagcgcagcccgacaatctgctactggcgaccgcgccgcgctactgtcagtactacaatcaactcca

SEQ ID NO: 294477 - DNA, 75 bp, synthetic construct
  source 1..75: mol_type = other DNA
atttgaaaggggaacgcgttgcaacggttgacccagtatctcgcagtgtgtcggcattaaatcgaacaatcgaaa

SEQ ID NO: 294478 - DNA, 75 bp, synthetic construct
  source 1..75: mol_type = other DNA
gcagacaagggaacctgtcagacctacaccgacaatcctgcctgtaccctggtgtcacaccagtgcgccttttac

SEQ ID NO: 294479 - DNA, 75 bp, synthetic construct
  source 1..75: mol_type = other DNA
gacgacccgctctttgtgaactcaccgctgggcctgtcacccacaccgctaatggtcagcatggagcaaaatctg

SEQ ID NO: 294480 - DNA, 75 bp, synthetic construct
  source 1..75: mol_type = other DNA
gaaaaatgccccacaaaatgctgaagctattcttactgacacgtcttcacctgaaatcgctgcccaaagggagca

SEQ ID NO: 294481 - DNA, 75 bp, synthetic construct
  source 1..75: mol_type = other DNA
caacagcatcaggaaacccgtgaaaacatacaacagcaaggcgttgaagtgaaaaaagagaatgctgaactggaa

SEQ ID NO: 294482 - DNA, 75 bp, synthetic construct
  source 1..75: mol_type = other DNA
attactctttcgccaacatgcagatggagaacgtcagcggctacagctggggtaccaacagcacaaccagtttcg

SEQ ID NO: 294483 - DNA, 75 bp, synthetic construct
  source 1..75: mol_type = other DNA
gagatcaactattcggtaaattaggcaagtggggaactgggctatctgcggaagcgggtgtaaaagggagtgccg

SEQ ID NO: 294484 - DNA, 75 bp, synthetic construct
  source 1..75: mol_type = other DNA
taatgtgccgattggccttgcgattccggcatcccttacgacgcgcatcgggaacgcgtttgtacagagctatga

SEQ ID NO: 294485 - DNA, 75 bp, synthetic construct
  source 1..75: mol_type = other DNA
tctgaaaaaccaccataatttggaaggaaataaatttgagaaagaatacaatgacaaaaaggctgaacagagagc

SEQ ID NO: 294486 - DNA, 75 bp, synthetic construct
  source 1..75: mol_type = other DNA
ctggggagatccgcaggaactgattggtgctgcggtgttcctttcttcaaaagcctctgatttcgtaaacggcca

SEQ ID NO: 294487 - DNA, 75 bp, synthetic construct
  source 1..75: mol_type = other DNA
aacgcaaggcaggtaaagttattaatatttgctcgatgcaaagcgaactgggacgtgacaccatcaccccttatg

SEQ ID NO: 294488 - DNA, 75 bp, synthetic construct
  source 1..75: mol_type = other DNA
gatttcttcctgttgaccagtgaaatttcgtgcctggttgatgctctggtaaatgcccttggtggagaggctaag

SEQ ID NO: 294489 - DNA, 75 bp, synthetic construct
  source 1..75: mol_type = other DNA
aacgaagcacggtttgcgttcaaacgtgacactgatggaggaatcagaagactggatgccatcatgtgtatcggt

SEQ ID NO: 294490 - DNA, 75 bp, synthetic construct
  source 1..75: mol_type = other DNA
acgccgttttgcgcgtgtctatatcgcgggggagatagagccaatccagatcaatactatcgctgaaaagctggc

SEQ ID NO: 294491 - DNA, 75 bp, synthetic construct
  source 1..75: mol_type = other DNA
atctgaagaggcatcgtactatccggcagcgctggcggagctgaaggcagcagcgtcagaaatccttgcccgtgc

SEQ ID NO: 294492 - DNA, 75 bp, synthetic construct
  source 1..75: mol_type = other DNA
agccagcgcgaaggaatgctgatctggcccgactttactggctgggacacggtgttgaatgccgaagcaacggca

SEQ ID NO: 294493 - DNA, 75 bp, synthetic construct
  source 1..75: mol_type = other DNA
cctatggctgcaagacggtggaggaagccattgcttaccgggacaatttcagccagcgagaagggatgctgatct

SEQ ID NO: 294494 - DNA, 75 bp, synthetic construct
  source 1..75: mol_type = other DNA
atgtgggcggtggataaacctcttaacccgtcgctggcccgcgacattatcgaaggtatccgcgccaaaatgcgc

SEQ ID NO: 294495 - DNA, 75 bp, synthetic construct
  source 1..75: mol_type = other DNA
gtggtgaagcctaagaacaagcacagcctcagccacgtccggcacgacccggcgcactgtctggcccccggcctg

SEQ ID NO: 294496 - DNA, 75 bp, synthetic construct
  source 1..75: mol_type = other DNA
gctcgcgcaatcatgggcgggcagcacatccgcatagacatggccgaagttaggaagctacagaccgaccccgcc

SEQ ID NO: 294497 - DNA, 75 bp, synthetic construct
  source 1..75: mol_type = other DNA
ggtcagcgtcagcgtgtggcgatggggcgtgcgattgtgcgtgagccggcagtgttcctgtttgatgagccgctc

SEQ ID NO: 294498 - DNA, 75 bp, synthetic construct
  source 1..75: mol_type = other DNA
atcgtatttccagcaatggcgattattacgggcgtgactttgctttagcggaagccatgcgcacggttgatcaga

SEQ ID NO: 294499 - DNA, 75 bp, synthetic construct
  source 1..75: mol_type = other DNA
tgcaaatgctactttcaatggtttttgcaaaagattgcgcccaaaagaaaaatctgaattagaaccagaatatgt

SEQ ID NO: 294500 - DNA, 75 bp, synthetic construct
  source 1..75: mol_type = other DNA
ctggtgaagagtttattattaaaggtggttcaacaccaagtacagccaatgaagatttttggattaatggaacta

SEQ ID NO: 294501 - DNA, 75 bp, synthetic construct
  source 1..75: mol_type = other DNA
gcgatgcagctgggcgacgccattaaaatcatgaacgacaggctgaaaccgcaggtgaatgttgacagcttcagc

SEQ ID NO: 294502 - DNA, 75 bp, synthetic construct
  source 1..75: mol_type = other DNA
tccctcttccgtaaaagaatttatataccaagtattaatatctcaaaactatagaaatactgttttaggtagtgt

SEQ ID NO: 294503 - DNA, 75 bp, synthetic construct
  source 1..75: mol_type = other DNA
tttgtatccatgacagatctaagtaaagaatgtgattctttaggttatgccgctagagtcccttctcgtgaagac

SEQ ID NO: 294504 - DNA, 75 bp, synthetic construct
  source 1..75: mol_type = other DNA
caattcgttatctcaaaccgcaaatgccgaaaagctggcattttgtatctcatggtgaaatgtggatgcccatgc

SEQ ID NO: 294505 - DNA, 75 bp, synthetic construct
  source 1..75: mol_type = other DNA
cacttacaaggcggtattccagtgcgcgatgtagatgctttgaaggattactggcgggtattccctgccctgcgt

SEQ ID NO: 294506 - DNA, 75 bp, synthetic construct
  source 1..75: mol_type = other DNA
atttttatgatcgacgccagccggggctttatcaaagatggcaacaagaaccgcctgcgtagccgagatattcac

SEQ ID NO: 294507 - DNA, 75 bp, synthetic construct
  source 1..75: mol_type = other DNA
atggctatcaaaaaaaccgaactctattcttccctgtgggcaagctgcgacgaactgcgtggcgggatggacgcc

SEQ ID NO: 294508 - DNA, 75 bp, synthetic construct
  source 1..75: mol_type = other DNA
caattcgttatctcaaaccgcaaatgccgaaaagctggcattttgtttcccatggtgaaatgtgggtgcccatgc

SEQ ID NO: 294509 - DNA, 75 bp, synthetic construct
  source 1..75: mol_type = other DNA
aagctgaaggcagcggaatatcactttcagctatctgcggaaacgctgttcgcccggcgcaagatagttctgata

SEQ ID NO: 294510 - DNA, 75 bp, synthetic construct
  source 1..75: mol_type = other DNA
aagctgaaggcagcggaatatgaattccagctgtctgcggaaacgttatatgccaggcgcaggattgttctgacg

SEQ ID NO: 294511 - DNA, 75 bp, synthetic construct
  source 1..75: mol_type = other DNA
tttctgcagatgtgttctgggatctgcaggatccggcaaccgatgcaggtctgctgaaccagaacgacgtcacca

SEQ ID NO: 294512 - DNA, 75 bp, synthetic construct
  source 1..75: mol_type = other DNA
accgtgaaaacttcagccagcgcgaaggaatgctgatctggcccgactttactggctgggacacggtgctgaatg

SEQ ID NO: 294513 - DNA, 75 bp, synthetic construct
  source 1..75: mol_type = other DNA
tttgccaccgctcgcgcgctgggtatgcgcgccaaaattgacgagcagaccggctggcacaaaaccctgtctaac

SEQ ID NO: 294514 - DNA, 75 bp, synthetic construct
  source 1..75: mol_type = other DNA
atgtgggcggtggacaaaccgctgaacccgtcgctggcccgcgacattatcgaaggtattcgcgccaaaatgcgc

SEQ ID NO: 294515 - DNA, 75 bp, synthetic construct
  source 1..75: mol_type = other DNA
gatgatcctttatttatcaattcaccgctcggactgacgccgacgccgctgatgatcagcatggagcagaatctg

SEQ ID NO: 294516 - DNA, 75 bp, synthetic construct
  source 1..75: mol_type = other DNA
gcggagtggatgcaaatgagcaacctgctgctggataaaccgcaccaccagacaccgcgcggcctgaagtttgag

SEQ ID NO: 294517 - DNA, 75 bp, synthetic construct
  source 1..75: mol_type = other DNA
ctgcttaaccagaacgatatcaccacgcttatccgcaaagacggtttccgcttctggggttcccgctgtctgggc

SEQ ID NO: 294518 - DNA, 75 bp, synthetic construct
  source 1..75: mol_type = other DNA
ttgaagctaaaagctttttatcgctttttgcttcaacacatcctgcgttaacaaagcaacatatctgcaaggcga

SEQ ID NO: 294519 - DNA, 75 bp, synthetic construct
  source 1..75: mol_type = other DNA
gctgacggtcagcagggatacttcctgcaacgtatgactccaacctacgcttcctcgaacggtcgcctggatatc

SEQ ID NO: 294520 - DNA, 75 bp, synthetic construct
  source 1..75: mol_type = other DNA
ggcgcttcctacgtttacgcatgggatgctaaacccgctacctggcagagcaatccggatgcgtactacgacaaa

SEQ ID NO: 294521 - DNA, 75 bp, synthetic construct
  source 1..75: mol_type = other DNA
gtcacgataacaaagccgttgcgactgagctgctgagtgtggcgcaaagcctgcgcgggtttgcttacctgtcag

SEQ ID NO: 294522 - DNA, 75 bp, synthetic construct
  source 1..75: mol_type = other DNA
aaggctgttgggttgaaatcaatattgaagaatttgcgcaaaaggtaaaaggaatttcacgagacaagtaccctt

SEQ ID NO: 294523 - DNA, 75 bp, synthetic construct
  source 1..75: mol_type = other DNA
gcttcattcttgctcaccattccatttgctaagtctgttattgatgaaatactgagtaaagaaaatctgtcatga

SEQ ID NO: 294524 - DNA, 75 bp, synthetic construct
  source 1..75: mol_type = other DNA
ttacgttatccgcatatcagcatttgctgggaacagagcgacacctgggtgaggtgtactggcaatagcggacac

SEQ ID NO: 294525 - DNA, 75 bp, synthetic construct
  source 1..75: mol_type = other DNA
gcttctaccagcacgccgcagccgcgcccggaaaaaccggtttatttgtcggtgaaagcggacaattcgatgttt

SEQ ID NO: 294526 - DNA, 75 bp, synthetic construct
  source 1..75: mol_type = other DNA
tgttgcccgggtctatgtctgaaatgcatttttttttactgataggtatttcttctattcacagtgacagggtca

SEQ ID NO: 294527 - DNA, 75 bp, synthetic construct
  source 1..75: mol_type = other DNA
ggtggagtacggatgtgctgtcagccgtcacaacttaccgatgtcttcagggcactcaaatatgctcagtcctga

SEQ ID NO: 294528 - DNA, 75 bp, synthetic construct
  source 1..75: mol_type = other DNA
tcggtgcagactgctggctggatgagtcggtgaacgataaagactccctgaaagcagggaaactcactatcgact

SEQ ID NO: 294529 - DNA, 75 bp, synthetic construct
  source 1..75: mol_type = other DNA
ggtcaggaaatgcgtttttgctgaatatacgcgagagcgtactgttgcccggctctatgtctgaaatgcattttt

SEQ ID NO: 294530 - DNA, 75 bp, synthetic construct
  source 1..75: mol_type = other DNA
ggtaatggactcgctgcatcaggcgggttacctgaagatagggctggttggcgaagaaaccgccaaagcgaagta

SEQ ID NO: 294531 - DNA, 75 bp, synthetic construct
  source 1..75: mol_type = other DNA
ttcactgactcaccctgtgtctggctacgggaagatcatccggcactggacgaagagtggaatctggataccttt

SEQ ID NO: 294532 - DNA, 75 bp, synthetic construct
  source 1..75: mol_type = other DNA
actgtcagtactacaatcaactccaccaactgccgttggttgctcttcctctcccgtttgacgaaagccagcaaa

SEQ ID NO: 294533 - DNA, 75 bp, synthetic construct
  source 1..75: mol_type = other DNA
attacgattcgctggatgcgattacccgtggcgaagtggatatcggcttttccggtcgtgaaagccatccccgtt

SEQ ID NO: 294534 - DNA, 75 bp, synthetic construct
  source 1..75: mol_type = other DNA
ggcctgactttactggctgggatacggtgctgaatgccgaagcaacggcttatgccaccgcccgtgcgcttggtc

SEQ ID NO: 294535 - DNA, 75 bp, synthetic construct
  source 1..75: mol_type = other DNA
ttttcctgacggtccccggacagagcacaaaggaagtcgccgccggctccgctttacccggccatgcagggcatg

SEQ ID NO: 294536 - DNA, 75 bp, synthetic construct
  source 1..75: mol_type = other DNA
tacgcaaagatcatccggcactgcatgaaacgtggaatctggacacctttttacgttatccgcatatcagcattt

SEQ ID NO: 294537 - DNA, 75 bp, synthetic construct
  source 1..75: mol_type = other DNA
actgtcagaagcgcagtcgaaggcgctggctgaccgttttaacgcggcactggaggccagtctgcagacgtggca

SEQ ID NO: 294538 - DNA, 75 bp, synthetic construct
  source 1..75: mol_type = other DNA
atgaccacaacgcaaaaaacgactgacgttacagccccccgacgcagccactggtggtggaccgtgccgggatgc

SEQ ID NO: 294539 - DNA, 75 bp, synthetic construct
  source 1..75: mol_type = other DNA
aggtcaagctggaaagcggcggcaaaacctacaacgtcaattccagcatggtcacgccgttcagccaggcaagct

SEQ ID NO: 294540 - DNA, 75 bp, synthetic construct
  source 1..75: mol_type = other DNA
atgagttcaacgcagaaacccgccgacgtcacggcagaacgacgcatccactggtggtggatggtgccgggatgc

SEQ ID NO: 294541 - DNA, 75 bp, synthetic construct
  source 1..75: mol_type = other DNA
atgaccacaacgcaaaaaacgactgatgttacagcccgtcaacgcagccactggtggtggacggtgccgggatgc

SEQ ID NO: 294542 - DNA, 75 bp, synthetic construct
  source 1..75: mol_type = other DNA
acgtcacggcagaacgacgcagccactggtggtggaccgtaccgggctgcctggcaatgatgttactgaatgccg

SEQ ID NO: 294543 - DNA, 75 bp, synthetic construct
  source 1..75: mol_type = other DNA
ccaggcccgttcgagataaacgatatttatccggccgggagtggaggtgacttacaggtaaccctgcaggaagct

SEQ ID NO: 294544 - DNA, 75 bp, synthetic construct
  source 1..75: mol_type = other DNA
accctgctgcgccatacacgccatgagctggcaaacgatcggcagctgctcgaggaggagtcccgtgagcagtaa

SEQ ID NO: 294545 - DNA, 75 bp, synthetic construct
  source 1..75: mol_type = other DNA
tggccggtgtatacggtacgttgctggaagacaacaacctcagctatagcgtgcaaaccggttatgccgggggag

SEQ ID NO: 294546 - DNA, 75 bp, synthetic construct
  source 1..75: mol_type = other DNA
gcagcacattaacacctggctggagcgggatatagtttccctgcgctcccgtctgacgatgggggacagttatac

SEQ ID NO: 294547 - DNA, 75 bp, synthetic construct
  source 1..75: mol_type = other DNA
gagaatggtcaggtttatctgagcggaatgcctctgtcaggacaggttagtgtgaaatgggggagtcagaccacg

SEQ ID NO: 294548 - DNA, 75 bp, synthetic construct
  source 1..75: mol_type = other DNA
tgtatggaggagcctggatagctgaacgctaccgtgccttcaatctgggggtgggtaaaaacatgggctggctgg

SEQ ID NO: 294549 - DNA, 75 bp, synthetic construct
  source 1..75: mol_type = other DNA
tggtgtcgcctgccgtggtacagggggcaccggatatcacccgggaaatccagcaggatattgcccggcgaatga

SEQ ID NO: 294550 - DNA, 75 bp, synthetic construct
  source 1..75: mol_type = other DNA
gtgacggatatttcaccgacagagcggcagatgtttccgctgacagcaggacgaaatgtgtttctggccggcctg

SEQ ID NO: 294551 - DNA, 75 bp, synthetic construct
  source 1..75: mol_type = other DNA
cctctctgcccttatctgtcgttgggtggcgatttacgctggcagaatgccaggctaacggcacaagtggtaatt

SEQ ID NO: 294552 - DNA, 75 bp, synthetic construct
  source 1..75: mol_type = other DNA
tagctgaagccagaaatacattcctcatgctcaacactgagccagaaaatggatggatacgatacgaaccagaga

SEQ ID NO: 294553 - DNA, 75 bp, synthetic construct
  source 1..75: mol_type = other DNA
gcgctgacagatgctcagtggtcagagattgctgatgattacatgtcccgaatgggcttctctgaaacgcacctc

SEQ ID NO: 294554 - DNA, 75 bp, synthetic construct
  source 1..75: mol_type = other DNA
tggcttttgcaagtgaagatataaagttttatcgtcttatggaggcatggaaagcaaatgaaaaaatagacttta

SEQ ID NO: 294555 - DNA, 75 bp, synthetic construct
  source 1..75: mol_type = other DNA
ctaaaattattaaatacgcattagataattactgtgttaactattactcaagttcaaatagtggtagttatctat

SEQ ID NO: 294556 - DNA, 75 bp, synthetic construct
  source 1..75: mol_type = other DNA
tcctgtgagtatctcagtacggaagataccgatcgtcacatcatggttgcagccgtcagccagaatacaatcccc

SEQ ID NO: 294557 - DNA, 75 bp, synthetic construct
  source 1..75: mol_type = other DNA
gtcagggaaattttcagcatccggccgtttatggttatgccggacgggaatagcggtggttttgccctgccggtc

SEQ ID NO: 294558 - DNA, 75 bp, synthetic construct
  source 1..75: mol_type = other DNA
gtgtcgcctgctgtggtacagggggctccggatatcacccgggaaatccagcaggatatcgcccggcgaatgagg

SEQ ID NO: 294559 - DNA, 75 bp, synthetic construct
  source 1..75: mol_type = other DNA
tattcttaaatctggcggatatgccatttttgacgttcccagtagcaacgatgaaaaaaaatacggttttgtatc

SEQ ID NO: 294560 - DNA, 75 bp, synthetic construct
  source 1..75: mol_type = other DNA
tgcagattgactggcaggaagtcaataacagcttcactgatgaaaacggaaacatcatccagccaccgtggaaag

SEQ ID NO: 294561 - DNA, 75 bp, synthetic construct
  source 1..75: mol_type = other DNA
gggaaatatccggcagaagcacgccttcaccccgtatcccgtgggccacagcttattccggtattactcatactc

SEQ ID NO: 294562 - DNA, 75 bp, synthetic construct
  source 1..75: mol_type = other DNA
cgtttcatccggaaaagtggtctttaaagcgatcaacgactttggcggcaacattgatggttccgcaacattcta

SEQ ID NO: 294563 - DNA, 75 bp, synthetic construct
  source 1..75: mol_type = other DNA
atgagcaaccgtcgacattggtatttgctgaacaacgaaaaaatttttaaaggtctctttatgtcagatgctctt

SEQ ID NO: 294564 - DNA, 75 bp, synthetic construct
  source 1..75: mol_type = other DNA
ataaggaacgaatttgttatggaaattttaggagccaaatggatttcagttgtgggaatactttcatggttggca

SEQ ID NO: 294565 - DNA, 75 bp, synthetic construct
  source 1..75: mol_type = other DNA
gacaaaagctgatccgcccgatgatcgttatcgtctcggcggtgatgagtgccaaattactttatgatagccacg

SEQ ID NO: 294566 - DNA, 75 bp, synthetic construct
  source 1..75: mol_type = other DNA
ttgctaatctggcaaattgtcattgtcgatggtagcgaacagaacctgctgcaatggcatcggattttacaaaaa

SEQ ID NO: 294567 - DNA, 75 bp, synthetic construct
  source 1..75: mol_type = other DNA
atgcaggcgggcagattacgtgatcgcgtaattattctgaatgtcaccaccgcccgctctccgtcagggcatccg

SEQ ID NO: 294568 - DNA, 75 bp, synthetic construct
  source 1..75: mol_type = other DNA
atagaagggccaccaataccggatgcacgcgccacccggcttgaaatgctctgcagtctgaaggggaatgtgtga

SEQ ID NO: 294569 - DNA, 75 bp, synthetic construct
  source 1..75: mol_type = other DNA
gcgagcctcctgccgtgaccgcgccgctggagcagatagaccatacggtcatcgacctgatcgtggtcgatgacc

SEQ ID NO: 294570 - DNA, 75 bp, synthetic construct
  source 1..75: mol_type = other DNA
ggccagcgcggcgagtacgattccgagaagatggccaccctgacgctgcgcgagctggagcgctggctcgcgttg

SEQ ID NO: 294571 - DNA, 75 bp, synthetic construct
  source 1..75: mol_type = other DNA
cgcgcaacaccgtggcccagcggattgccggactacacccggcgaaaatagcccgcagccggggcgggcaggacg

SEQ ID NO: 294572 - DNA, 75 bp, synthetic construct
  source 1..75: mol_type = other DNA
taaacaatacttactgtaataacgattattacaatgaggcgataagagaggaaccgatagactttctggacagat

SEQ ID NO: 294573 - DNA, 75 bp, synthetic construct
  source 1..75: mol_type = other DNA
ccaactcacacattttgatacaaccacctacgatagactcgtaaagcttagtctgaatagtaatgctcttgagtc

SEQ ID NO: 294574 - DNA, 75 bp, synthetic construct
  source 1..75: mol_type = other DNA
ggtaaggggcgcttgccggaaccggtcgagcgcgtcatccacgagctactgcaaaagcggttcctgaccaagcag

SEQ ID NO: 294575 - DNA, 75 bp, synthetic construct
  source 1..75: mol_type = other DNA
ttttctgcgcgaaaccgaacctgaaatgcaggatattaatgcttttcagatgcgctataacgcgttctttcagcc

SEQ ID NO: 294576 - DNA, 75 bp, synthetic construct
  source 1..75: mol_type = other DNA
tgcggtcgaaaaaacgctgtcggtcatacatttaccagacccacaacaagaattacagaaaggtgctaatgttgt

SEQ ID NO: 294577 - DNA, 75 bp, synthetic construct
  source 1..75: mol_type = other DNA
agggcgttggttaggcagtgcacaagggtattctattcttggcgttaaatcctggacacgtcgccccattcttta

SEQ ID NO: 294578 - DNA, 75 bp, synthetic construct
  source 1..75: mol_type = other DNA
tcgccctggctttattttcaaccacctcactagcctgctccggtgtaccttctgctgcgttttactaccagccgt

SEQ ID NO: 294579 - DNA, 75 bp, synthetic construct
  source 1..75: mol_type = other DNA
gcgggaaagtcgtgcttcacgccactaatccaacgtcatttcacgtctcttttagcagcattagtctgatttcgg

SEQ ID NO: 294580 - DNA, 75 bp, synthetic construct
  source 1..75: mol_type = other DNA
tttagcagcattagtctgatttcgggtgggaaaaaatacgccgtcagcgccacgatggtcccccaaaaagcagcg

SEQ ID NO: 294581 - DNA, 75 bp, synthetic construct
  source 1..75: mol_type = other DNA
aattacagggaggcgttaatattgtagggaataaagtttatttcatcgcgagcgctgatgtgactattttcgata

SEQ ID NO: 294582 - DNA, 75 bp, synthetic construct
  source 1..75: mol_type = other DNA
tggggttatcagaatcagaagcgtggaatatgacaatgaccggatatagggccgctgtgcgtgctaaaacgccac

SEQ ID NO: 294583 - DNA, 75 bp, synthetic construct
  source 1..75: mol_type = other DNA
attatggcgcgttgttatggtgagttagtgcaaacgtccatccacgtcctgaaatgttgctcagaggacgaaata

SEQ ID NO: 294584 - DNA, 75 bp, synthetic construct
  source 1..75: mol_type = other DNA
caatcatttatctgtcgctatccatccacttcgaagaaaaaaacgccccaatggaaagatatacttaccaaaggg

SEQ ID NO: 294585 - DNA, 75 bp, synthetic construct
  source 1..75: mol_type = other DNA
atgagactcgacaactcgatgcggcgcatcttgataaaaacggcagtttgcttaccgttgaaggtgagtacacca

SEQ ID NO: 294586 - DNA, 75 bp, synthetic construct
  source 1..75: mol_type = other DNA
cgcttatatcagaactaacggcggctggcgtttcgactggttgactgatggccgtcatattttatgggcagggaa

SEQ ID NO: 294587 - DNA, 75 bp, synthetic construct
  source 1..75: mol_type = other DNA
accgtcgtaatctttactttcaggggcgctggttggggagtgcgcaagggtattctattcttggcattaaatcct

SEQ ID NO: 294588 - DNA, 75 bp, synthetic construct
  source 1..75: mol_type = other DNA
aagcctatgggcatgtcgggatccagatttctcatccgcatgagctggaaagcaaacttagcgaggcgctggaac

SEQ ID NO: 294589 - DNA, 75 bp, synthetic construct
  source 1..75: mol_type = other DNA
acctctggatgagatccgcgactggtggcagcaaattgaacagtggcgcgctcgccagtgcctgaaatatgatac

SEQ ID NO: 294590 - DNA, 75 bp, synthetic construct
  source 1..75: mol_type = other DNA
ctcgtcagtgcctgaaatatgacactcacagtgaaaagattaaaccgcaggcggtgatcgagactctttggcggt

SEQ ID NO: 294591 - DNA, 75 bp, synthetic construct
  source 1..75: mol_type = other DNA
cttttttttggcgcccgccgggtgttaacagaaatataagagtggtgtgtcgaacgtggtccgctaagcctggtt

SEQ ID NO: 294592 - DNA, 75 bp, synthetic construct
  source 1..75: mol_type = other DNA
agtggtcgccctggaccagtggtcgttgatttaccgaaagatattcttaatcctgcgaacaaattaccctacgtc

SEQ ID NO: 294593 - DNA, 75 bp, synthetic construct
  source 1..75: mol_type = other DNA
agtgactgcggcttgccatcaacaactcaaacagattattgagcaacttaatcttcctgtcgtctcgtcattaat

SEQ ID NO: 294594 - DNA, 75 bp, synthetic construct
  source 1..75: mol_type = other DNA
tgatggcagaagtggcgattatgtcactctggctttcggctcctcagttgaagaacttcgtgaaattcgctctca

SEQ ID NO: 294595 - DNA, 75 bp, synthetic construct
  source 1..75: mol_type = other DNA
ttgagagaaatgtccgtatgtatcttgatggcagaagtggcgattatgtcactctggctttcggctcctcagttg

SEQ ID NO: 294596 - DNA, 75 bp, synthetic construct
  source 1..75: mol_type = other DNA
accttgaggggcgaagcggcgattatgtcaccattggtattggttcttccgtagaagagcttcgcgagataaggg

SEQ ID NO: 294597 - DNA, 75 bp, synthetic construct
  source 1..75: mol_type = other DNA
ccatttctaaaaccgtgactgctgatatcccgattgtgggggatgctcgccaggtcctcgaacaaatgcttgaac

SEQ ID NO: 294598 - DNA, 75 bp, synthetic construct
  source 1..75: mol_type = other DNA
agtcggcgtcgtgctggtaacgtcgggtccaggggcgaccaatgcgattaccggcatcgccaccgcttatatgga

SEQ ID NO: 294599 - DNA, 75 bp, synthetic construct
  source 1..75: mol_type = other DNA
cccggaggcgcagtccttgatatttacgatgcattgcataccgtgggtggtattgatcatgtattagttcgtcat

SEQ ID NO: 294600 - DNA, 75 bp, synthetic construct
  source 1..75: mol_type = other DNA
actggttttccatgccgtgctctttgggatcggtatcgtgtgcggcattcttctactactgctgatcttttcctt

SEQ ID NO: 294601 - DNA, 75 bp, synthetic construct
  source 1..75: mol_type = other DNA
atgctcaccagcggtgaactgaatccccgacatcagcataccgtcacgctgtatgcgaaagggctgacctgcgaa

SEQ ID NO: 294602 - DNA, 75 bp, synthetic construct
  source 1..75: mol_type = other DNA
gggaataacccgttacttgttcagagctggctggatactggcgacgacagtgctgaaccggggagcattaaagtt

SEQ ID NO: 294603 - DNA, 75 bp, synthetic construct
  source 1..75: mol_type = other DNA
agaggcctgttcagcgatgcagatgcgtaccctctggaccaggcgtttcctctgctgatgaaacaactggaactc

SEQ ID NO: 294604 - DNA, 75 bp, synthetic construct
  source 1..75: mol_type = other DNA
ttgccgaccgtgccggtatcagaggccggttcagagatgcgaatgtgtaccctctggaccaggcctttccgctgc

SEQ ID NO: 294605 - DNA, 75 bp, synthetic construct
  source 1..75: mol_type = other DNA
ttaccttgccgaccgcgccggtatcagaggacagttcagcgacgcggatgcctaccatctggagcaggcctttcc

SEQ ID NO: 294606 - DNA, 75 bp, synthetic construct
  source 1..75: mol_type = other DNA
tgcaactggctttccgtacgcgcattaaattattttaccgaccggaggggttaagtggtgattcgtttacggcgc

SEQ ID NO: 294607 - DNA, 75 bp, synthetic construct
  source 1..75: mol_type = other DNA
gtatgcaaaaggtctgacctgcaaagctgatactctcagcagctgtggttacgtttatctggctgtttatccgac

SEQ ID NO: 294608 - DNA, 75 bp, synthetic construct
  source 1..75: mol_type = other DNA
cgtccggcgtggtttgctgaaatcgagccttttccatctgccgttcttgcgctccgctggccccatgtcgccaac

SEQ ID NO: 294609 - DNA, 75 bp, synthetic construct
  source 1..75: mol_type = other DNA
tggggcgttgcggagttgtcacagacttgtggttatgtttcttcggtcagctttattgaagttgagcccaaaaaa

SEQ ID NO: 294610 - DNA, 75 bp, synthetic construct
  source 1..75: mol_type = other DNA
agaggcctgttcagcgatgcagatgcgtaccctctggaccaggcctttcctctgctgatgaaacaactgcaactc

SEQ ID NO: 294611 - DNA, 75 bp, synthetic construct
  source 1..75: mol_type = other DNA
agaggcctgttcagcgatgcagatgcgtaccctctggaccaggcttttcctctgctgatgaaacaactgtaactc

SEQ ID NO: 294612 - DNA, 75 bp, synthetic construct
  source 1..75: mol_type = other DNA
agaggcctgttcagcgatgcagatgcgtaccctctggaccaggcatttcctctgctgatgaaacaactgaaactc

SEQ ID NO: 294613 - DNA, 75 bp, synthetic construct
  source 1..75: mol_type = other DNA
agcggtacacaacatgctgcaactaagaatacttcaccatctctaatggctaaaaatccaacagctgtttgctat

SEQ ID NO: 294614 - DNA, 75 bp, synthetic construct
  source 1..75: mol_type = other DNA
tcaatgcttacctgtcccgcgtggcggagctgaacggcgtcgacaccgatgacgtggcgaaaaaattcaccgttg

SEQ ID NO: 294615 - DNA, 75 bp, synthetic construct
  source 1..75: mol_type = other DNA
tctaccagtactacaaagagcacggttatgaaaccgtggttatgggcgcaagcttccgtaacatcggcgaaattc

SEQ ID NO: 294616 - DNA, 75 bp, synthetic construct
  source 1..75: mol_type = other DNA
tatctcaactgaagttgatgcgcgtctttcctatgacactgaagcgtcaattgcgaaagcaaaacgcctgatcaa

SEQ ID NO: 294617 - DNA, 75 bp, synthetic construct
  source 1..75: mol_type = other DNA
tcgaagaagtttacctgaacggtgacctggaacacggtgcgccgaacattctcaacgtcagcttcaactacgttg

SEQ ID NO: 294618 - DNA, 75 bp, synthetic construct
  source 1..75: mol_type = other DNA
tgaaatcgtctttacctctggcgccaccgaatctgacaacctggcaattaaaggtgcagccaacttttatcagaa

SEQ ID NO: 294619 - DNA, 75 bp, synthetic construct
  source 1..75: mol_type = other DNA
gatgcgcaccgccgcgccatcattgaggagccgaagaaagaccgcgtcgaaaactacgagtcgatgagtattgac

SEQ ID NO: 294620 - DNA, 75 bp, synthetic construct
  source 1..75: mol_type = other DNA
tctacgtctgcaagcgcattccatacaatcatgccatctggcacggctttgtgctcggcggtagtgtgtgccact

SEQ ID NO: 294621 - DNA, 75 bp, synthetic construct
  source 1..75: mol_type = other DNA
ggcggtggatctcaatgccagcgccacggcgataaccagttacagcctctatggcggcagtatgatcctgctgtt

SEQ ID NO: 294622 - DNA, 75 bp, synthetic construct
  source 1..75: mol_type = other DNA
ctccgttagcgcgcgggttgatgattgttatctggagcctggcgttgctggggattctgttcaaactgaccatcg

SEQ ID NO: 294623 - DNA, 75 bp, synthetic construct
  source 1..75: mol_type = other DNA
ctgtcgctggtggtaatttatgaaatggcagttaagctcgcggcgggcagcgttaccttactggcagtaggcggc

SEQ ID NO: 294624 - DNA, 75 bp, synthetic construct
  source 1..75: mol_type = other DNA
taagcagggatattcgctggcagaggaaattgccaacagcgtcagtcacggcattgggctggtgtttggtatcgt

SEQ ID NO: 294625 - DNA, 75 bp, synthetic construct
  source 1..75: mol_type = other DNA
tctacgtctgcaaacgcattccgtacaatcatgccatctggcacggctttgtgctcggcggcagcgtgtgccact

SEQ ID NO: 294626 - DNA, 75 bp, synthetic construct
  source 1..75: mol_type = other DNA
gaaagacctcgcagtttcttcaggttccgcctgtacgtcagcaagcctcgaaccgtcctacgtgctgcgcgcgct

SEQ ID NO: 294627 - DNA, 75 bp, synthetic construct
  source 1..75: mol_type = other DNA
aaaggtggcgaatatgccaacctggacgcagtggtgatggatgccgtcaatgagcttatcgatgtggtctaccag

SEQ ID NO: 294628 - DNA, 75 bp, synthetic construct
  source 1..75: mol_type = other DNA
gtatttcccgctggtcaacaaagagcaggaaaacagtgaaaaactggctgccgatatgattatcagtcagaaacg

SEQ ID NO: 294629 - DNA, 75 bp, synthetic construct
  source 1..75: mol_type = other DNA
gacgctaatggtcgatgtggaatataaatgcgagcagaccaactttgacacggtactgacctacgcgaagctgga

SEQ ID NO: 294630 - DNA, 75 bp, synthetic construct
  source 1..75: mol_type = other DNA
gctttattgaagttgagcccaaaaaagtgatcgaggatcgcgtggtaaatcaacggaattattatcaggtaacaa

SEQ ID NO: 294631 - DNA, 75 bp, synthetic construct
  source 1..75: mol_type = other DNA
gatatggttctgtttgcagtggaattgaagcagcgagcattgcctgggaaccgttgggtatgcgtccggcgtggt

SEQ ID NO: 294632 - DNA, 75 bp, synthetic construct
  source 1..75: mol_type = other DNA
tcatccagcggcaggcgctcgatttcatcatggccgggttcaatggcgttgagcgtgccgaaacctctgaccgtg

SEQ ID NO: 294633 - DNA, 75 bp, synthetic construct
  source 1..75: mol_type = other DNA
aaaaggcaagcacataatcaccagcaaaaccgaacacaaagcggtactggatacctgtcgtcagctggagcgcga

SEQ ID NO: 294634 - DNA, 75 bp, synthetic construct
  source 1..75: mol_type = other DNA
catcgcaaaagaagagatggcgaccgagatggaacgtctgcgcggcctgcgtaaccgtctgtggaacggcatcaa

SEQ ID NO: 294635 - DNA, 75 bp, synthetic construct
  source 1..75: mol_type = other DNA
gaacttgaagcagcgatgcgtgacgacaccatccttgtttccatcatgcacgtaaataacgaaatcggcgtggtg

SEQ ID NO: 294636 - DNA, 75 bp, synthetic construct
  source 1..75: mol_type = other DNA
cgcgccaaaacctccagtcgtgctgaaaacccgctactgcaggacgtcaataaaggctggctgcaaaaaatccgc

SEQ ID NO: 294637 - DNA, 75 bp, synthetic construct
  source 1..75: mol_type = other DNA
cacaccgggcgcggtgaaagtcggtaaaggtggcgaatatgccaacctggacgctgtggtgatggatgccgtcaa

SEQ ID NO: 294638 - DNA, 75 bp, synthetic construct
  source 1..75: mol_type = other DNA
tctttctccggtcacaaaatctatggcccgaaaggtatcggtgcgctgtatgtgcgtcgtaaaccgcgcgtacgc

SEQ ID NO: 294639 - DNA, 75 bp, synthetic construct
  source 1..75: mol_type = other DNA
tgggcggagcgggcgatgtgctggcgaacagtcagtctgacccgtatttaagccaggcggtgctggatttacagt

SEQ ID NO: 294640 - DNA, 75 bp, synthetic construct
  source 1..75: mol_type = other DNA
cgccgatgccgcaccgaatcgcagcgcgagcggcgcttccgtatgggtgctctctaaccgtcgcgcgaacagcga

SEQ ID NO: 294641 - DNA, 75 bp, synthetic construct
  source 1..75: mol_type = other DNA
agatgcacaaacgctacggctggtggtcgatcttaccgaaaacggtaaaaccgaagcggtgaagcggcagaatgg

SEQ ID NO: 294642 - DNA, 75 bp, synthetic construct
  source 1..75: mol_type = other DNA
atggaggcctgtggaggttctcagcactgggcacgggaactgacaaaacttggtcataaagtccggttgttgcaa

SEQ ID NO: 294643 - DNA, 75 bp, synthetic construct
  source 1..75: mol_type = other DNA
gataaccgaactgaaaaaacgtcgtccggccagtgtggcaatcgtcgccatggcaaacaagctggcacgaacagt

SEQ ID NO: 294644 - DNA, 75 bp, synthetic construct
  source 1..75: mol_type = other DNA
aacggattggttcacgactgaaaaacagctacccgcgtgaactggtgcgcgacgggaaactttttaccggtaacg

SEQ ID NO: 294645 - DNA, 75 bp, synthetic construct
  source 1..75: mol_type = other DNA
gcctgctatctattacatgagcccggagaacacattacagcaggcggtcggattacccgatcaaaaaacattaaa

SEQ ID NO: 294646 - DNA, 75 bp, synthetic construct
  source 1..75: mol_type = other DNA
atgttaaaaaagatacttttactggctctgcttcctgcaatcgccttcgcagaggaacttcctgccccagtaaaa

SEQ ID NO: 294647 - DNA, 75 bp, synthetic construct
  source 1..75: mol_type = other DNA
cgtcgtccggtcggcgtggcaaccgtcgccatggcaaacaagctggcacgaacagtgtgggcaatagctgcgtat

SEQ ID NO: 294648 - DNA, 75 bp, synthetic construct
  source 1..75: mol_type = other DNA
actttgctcaatgacgatccgatgtttaagggcgttttaacccgtgacggagactactttatctcggtaatgggg

SEQ ID NO: 294649 - DNA, 75 bp, synthetic construct
  source 1..75: mol_type = other DNA
aaggggcgtgctgctttggcgaaggaggtgccggaagccctggagcgtctgaaggagcggctaccgctctacctg

SEQ ID NO: 294650 - DNA, 75 bp, synthetic construct
  source 1..75: mol_type = other DNA
cgggaacatctgcatgggggctggtgcaggtgatggtgtcagaaacaaaagtggcttccatcgccgggattcaaa

SEQ ID NO: 294651 - DNA, 75 bp, synthetic construct
  source 1..75: mol_type = other DNA
cgtggaatatgagcaagattatggtgttgccgtcgaggaaggacgtaaagcagcgcagtctgacccgaactgttt

SEQ ID NO: 294652 - DNA, 75 bp, synthetic construct
  source 1..75: mol_type = other DNA
acctttggctgtagggtattttaatgttgcaaatactatacgtaatgccgcgcaagggttgctaacaccttttac

SEQ ID NO: 294653 - DNA, 75 bp, synthetic construct
  source 1..75: mol_type = other DNA
tagcaggcctactgggattatgtttgattaagaaaaaaagatgggttaatacgattatcgttgattatagtgata

SEQ ID NO: 294654 - DNA, 75 bp, synthetic construct
  source 1..75: mol_type = other DNA
ggttttattcagtcaagtgcaaatctggttgctggaattattgcactagctatcgttgttcatgaaggttggatt

SEQ ID NO: 294655 - DNA, 75 bp, synthetic construct
  source 1..75: mol_type = other DNA
tatggttttttcaaggaatggagaaaatgaaagcgattactgtatgtacaatttcagctcgatttttacttattc

SEQ ID NO: 294656 - DNA, 75 bp, synthetic construct
  source 1..75: mol_type = other DNA
gctatatctatactgcgctggatgtcttttttaccatttattattgttttaagtaatatttttggtgtgcaaaca

SEQ ID NO: 294657 - DNA, 75 bp, synthetic construct
  source 1..75: mol_type = other DNA
aggcgattctattaataaaaaaaacgctacgttatgtaggtgcattggccttgttgggttcaatttttttatata

SEQ ID NO: 294658 - DNA, 75 bp, synthetic construct
  source 1..75: mol_type = other DNA
gtgctaatgccgctacgggcaacctgaatattctattgccgatggtcacaagcctcgatgaagttgacgaagcac

SEQ ID NO: 294659 - DNA, 75 bp, synthetic construct
  source 1..75: mol_type = other DNA
tgatgatgactacagcaaactgctttctccggagtttaaacagttctttagccaatacagcattgctgtgggctc

SEQ ID NO: 294660 - DNA, 75 bp, synthetic construct
  source 1..75: mol_type = other DNA
ctctggaagcggggttgctgacgcttgatgatgactacagcaaactgctttctccggagtttaaacagttcttta

SEQ ID NO: 294661 - DNA, 75 bp, synthetic construct
  source 1..75: mol_type = other DNA
actggtgacaggagttatagtatttggggatagcttaaaggttaggaacgaacagcattatcttatggctagaga

SEQ ID NO: 294662 - DNA, 75 bp, synthetic construct
  source 1..75: mol_type = other DNA
agttgctctaacataacaaatgctaaagcacatctcaatcatcagaagttgatgactacagatattaaatctttt

SEQ ID NO: 294663 - DNA, 75 bp, synthetic construct
  source 1..75: mol_type = other DNA
aaatttaaaaacggtgagctgtatacactggaagcaaaacttacccgtaacccatcttttcaccggaagatgttc

SEQ ID NO: 294664 - DNA, 75 bp, synthetic construct
  source 1..75: mol_type = other DNA
gctggttttgcaccgttcccgcagacaattggttaagttccgcaccatgcagattaattctctgcacggcacgct

SEQ ID NO: 294665 - DNA, 75 bp, synthetic construct
  source 1..75: mol_type = other DNA
caccgataatagctgtctgcctgaaatcctcgtttcaccatcgtggcgtagtaagaaaaaaaatgacagctccac

SEQ ID NO: 294666 - DNA, 75 bp, synthetic construct
  source 1..75: mol_type = other DNA
accgggcaatgtatgagggtaagcaaaccggaagaaatcgctgtatgtttattgacgaacaaaatgtgattaacc

SEQ ID NO: 294667 - DNA, 75 bp, synthetic construct
  source 1..75: mol_type = other DNA
atttctacacacagcgtgctggcggtcctggtactaccgcaatcgagtttagcgtaaacggtaaaattaacgctc

SEQ ID NO: 294668 - DNA, 75 bp, synthetic construct
  source 1..75: mol_type = other DNA
ctgaaatagccaatgaactcgccagtcttgaaagctcccggtcaagtctccattcaaaggagtggttaaaggtca

SEQ ID NO: 294669 - DNA, 75 bp, synthetic construct
  source 1..75: mol_type = other DNA
ggtgatgccgtgcttaagtacacaagcccaggcagtggtgaatggttatttatcggcatcgccaaaaccggttat

SEQ ID NO: 294670 - DNA, 75 bp, synthetic construct
  source 1..75: mol_type = other DNA
gtacaaattaaccatccgcaggtcatccgcaccttgctgttagttgctgataaaaacaaacccagcctgcaacgt

SEQ ID NO: 294671 - DNA, 75 bp, synthetic construct
  source 1..75: mol_type = other DNA
atgcgtatgcgcggtgaaaaacaagccgaagtctggaaattcgctggtaagatgattcaccttgaaacgggcacg

SEQ ID NO: 294672 - DNA, 75 bp, synthetic construct
  source 1..75: mol_type = other DNA
tgacctgggtagcggtaatgttactttgggtggtgatggtaacgaaggtgcattagtcttagaacgtgcaagcaa

SEQ ID NO: 294673 - DNA, 75 bp, synthetic construct
  source 1..75: mol_type = other DNA
ataaacgcggtactctgtcttttgataataacccgcaagcaacttacgatattgtaagtttgagtaacacacaag

SEQ ID NO: 294674 - DNA, 75 bp, synthetic construct
  source 1..75: mol_type = other DNA
cgatcaggggaaaaactcatttcagctagaagctaacggtcaatgctctattaccactggtgcaactaaaattgt

SEQ ID NO: 294675 - DNA, 75 bp, synthetic construct
  source 1..75: mol_type = other DNA
aaactgttcaaggtaacgtttatcgtttagcgactggtactaccgattctagcgaagttctacgaatcactggtc

SEQ ID NO: 294676 - DNA, 75 bp, synthetic construct
  source 1..75: mol_type = other DNA
ggtggtaatcagtcaatggattctttcacgattaaccattgggggaatagtaacgctaaccgatataacgttttg

SEQ ID NO: 294677 - DNA, 75 bp, synthetic construct
  source 1..75: mol_type = other DNA
ttccgcgcctcgcgatgtatgcccataaagaagattgcggcagtctgctggtacaaattaaccatccgcaagtca

SEQ ID NO: 294678 - DNA, 75 bp, synthetic construct
  source 1..75: mol_type = other DNA
gaaacgggtaagagaaaatgagcgcaataagatacgcgaaaaacaacttcaggcattaaatgatgctcattcagc

SEQ ID NO: 294679 - DNA, 75 bp, synthetic construct
  source 1..75: mol_type = other DNA
gcaaagggtaagagaaaacgagcgcaataagatacgtgaaaaacaacttaaggcattaaatgacgttcattccgc

SEQ ID NO: 294680 - DNA, 75 bp, synthetic construct
  source 1..75: mol_type = other DNA
tatggctatgattgtatgtattcctgtttacatcgtttaccttgcgcaacaacctgcaacaccagaacaactgac

SEQ ID NO: 294681 - DNA, 75 bp, synthetic construct
  source 1..75: mol_type = other DNA
cgcccgagccatctggctggcggttcagcagccggtaaaatccgtcgccgttaaaagcgaggagcaacaggctac

SEQ ID NO: 294682 - DNA, 75 bp, synthetic construct
  source 1..75: mol_type = other DNA
aacattttcgcacgtagataccgatgcaaaaattaacgaggtatgcgagttcatcaaagacagtattttaatgtc

SEQ ID NO: 294683 - DNA, 75 bp, synthetic construct
  source 1..75: mol_type = other DNA
gaaaaaacgtcgtccagccagtgtggcaatcgtcgccatagcaaacaagctggcacgaacagtatgggcgataac

SEQ ID NO: 294684 - DNA, 75 bp, synthetic construct
  source 1..75: mol_type = other DNA
cgcggtgaaaatcgcccgtgccgccaccaaacgtagcggcaccatcgcttttagcggcgcgtatcacgggcgcac

SEQ ID NO: 294685 - DNA, 75 bp, synthetic construct
  source 1..75: mol_type = other DNA
ctcaccattgaagacgctcagatccgtcagggtctggagatcatcagccagtgttttgctgaggcaaagcagtag

SEQ ID NO: 294686 - DNA, 75 bp, synthetic construct
  source 1..75: mol_type = other DNA
atcgtggcgcgcgcccgcgataaaggcctgattcttctctcctgcggcccgtattacaacgtgctgcgcatcctt

SEQ ID NO: 294687 - DNA, 75 bp, synthetic construct
  source 1..75: mol_type = other DNA
tggcagaggtgaaacgggtaagagaaaatgagcgaaataagatacgtgaaaaacaacttcaggcattaaatgatg

SEQ ID NO: 294688 - DNA, 75 bp, synthetic construct
  source 1..75: mol_type = other DNA
ggtgaaagtcggtgtaaagattcttttgcttgatggtgataacataacgatttcagttgatggttatcaggccag

SEQ ID NO: 294689 - DNA, 75 bp, synthetic construct
  source 1..75: mol_type = other DNA
ttcgccaaaaaaacgctgctggtaacgaccggttctgaagcggtggagaacgcggtgaaaatcgcccgcgccgcc

SEQ ID NO: 294690 - DNA, 75 bp, synthetic construct
  source 1..75: mol_type = other DNA
cttgcactcaaacatatccggtagatattgcaaaaacaaaatgggattatatcgttactcaaattgagtctaggg

SEQ ID NO: 294691 - DNA, 75 bp, synthetic construct
  source 1..75: mol_type = other DNA
ttatttgaagttggtaaaaatatctgtaggtaaggaggatgatgcttatgatatttttgaagtgttgaatgctcg

SEQ ID NO: 294692 - DNA, 75 bp, synthetic construct
  source 1..75: mol_type = other DNA
atctaacgatgaggaatggaatgcccaaaaagttcagattagaacattatctatgtcagcgaaggcctataatat

SEQ ID NO: 294693 - DNA, 75 bp, synthetic construct
  source 1..75: mol_type = other DNA
tggcgtgcgtcgttatggcttccacggaacctcgcaccgctacgtttctcagcgcgcctattcgctgctggatct

SEQ ID NO: 294694 - DNA, 75 bp, synthetic construct
  source 1..75: mol_type = other DNA
acgcattaaagacaataacgttaatgccaccttttatatgacctcgatccgtgcgtggccggcagagaaccgcgt

SEQ ID NO: 294695 - DNA, 75 bp, synthetic construct
  source 1..75: mol_type = other DNA
taaagaaggactgactgttggagaaaatgacaatccaatgagtcaggcgatgctgcaaatctttgctgtggttgc

SEQ ID NO: 294696 - DNA, 75 bp, synthetic construct
  source 1..75: mol_type = other DNA
cacctaatatgcagtgcaacagccagccggaagactaaaaaacgtgctcgttttaagggggataaagaatggaca

SEQ ID NO: 294697 - DNA, 75 bp, synthetic construct
  source 1..75: mol_type = other DNA
ttgccgcacactctggtatttgtgctttagagcatgatggattcgtttctcgccgcaagctcaagaaaggtgact

SEQ ID NO: 294698 - DNA, 75 bp, synthetic construct
  source 1..75: mol_type = other DNA
caccctctatggtaatgatgtacagtattttcagagtgaagatggtaaggatttctacgagtccctgccattatt

SEQ ID NO: 294699 - DNA, 75 bp, synthetic construct
  source 1..75: mol_type = other DNA
gccaacgggaatgccgcagctggcggcgctattgctggtgctgctggtcgatagcctggtagccccgcatttctg

SEQ ID NO: 294700 - DNA, 75 bp, synthetic construct
  source 1..75: mol_type = other DNA
aagccggacgtttaggtaagcaattgtccggcagagaaattagctgtatcgcgggaattttagattttctttacc

SEQ ID NO: 294701 - DNA, 75 bp, synthetic construct
  source 1..75: mol_type = other DNA
ggatcataaaactaaccgggtattccaatgctcaaagttcttgccgggaatatgctgtttctcaacgtttcctgc

SEQ ID NO: 294702 - DNA, 75 bp, synthetic construct
  source 1..75: mol_type = other DNA
ttattaactgtggttcgtcttcaattaaattttccgtactggatgcctgtgattgtgaagtattaatgtcaggta

SEQ ID NO: 294703 - DNA, 75 bp, synthetic construct
  source 1..75: mol_type = other DNA
agagctagatatttgtttgcgagcaagaaaacataactataaactaaaaacaattactgacagcatagtatatca

SEQ ID NO: 294704 - DNA, 75 bp, synthetic construct
  source 1..75: mol_type = other DNA
tggcggtagtgtttgtggttggttttcgggtgctgacatccggggccagaaaagcgattcgccgtctcagcgatc

SEQ ID NO: 294705 - DNA, 75 bp, synthetic construct
  source 1..75: mol_type = other DNA
atgcaggagattaatgcattccagatgtgctacaacgcgttttttcagcctactgaaggcgtttactggctgcat

SEQ ID NO: 294706 - DNA, 75 bp, synthetic construct
  source 1..75: mol_type = other DNA
tcaccgcgaagtcactcaggtgtgcaaggctcaaaaactgcgagtgccggcgcgcaataccgtggccttacggat

SEQ ID NO: 294707 - DNA, 75 bp, synthetic construct
  source 1..75: mol_type = other DNA
gttccgcatgatcgggcagatgcgcgagatcgtgaccaccgcacagaaggccacgcgcaaggcgcggcgcgacgc

SEQ ID NO: 294708 - DNA, 75 bp, synthetic construct
  source 1..75: mol_type = other DNA
caccctctgggaacaacggcaggcgctgacgaaattgcggcagcagggacgcgaacaggtggatgagtcggcgct

SEQ ID NO: 294709 - DNA, 75 bp, synthetic construct
  source 1..75: mol_type = other DNA
cccatgttatataacgcccctttcgcggtatcacagaaccagtctgatgcatcctatctggaacagatgggcctg

SEQ ID NO: 294710 - DNA, 75 bp, synthetic construct
  source 1..75: mol_type = other DNA
gcgccagaggcttatttatacggtctgccgtggaaatattacgaagagttaggtgtgcgtcgttatggtttccac

SEQ ID NO: 294711 - DNA, 75 bp, synthetic construct
  source 1..75: mol_type = other DNA
caatctgcgcggttcgcaacggtcagagtgttgacacttcaatgggaatgacgccgctggaaggcttgatgatgg

SEQ ID NO: 294712 - DNA, 75 bp, synthetic construct
  source 1..75: mol_type = other DNA
tgcgctataacgcgttctttcagcctgccgagggtgcattaaaaccgcttcgtcttatcagcctacagaccgcgc

SEQ ID NO: 294713 - DNA, 75 bp, synthetic construct
  source 1..75: mol_type = other DNA
atgagttctgattacgcaggagaactcattatctggataatgctcgctacgctggcggtggtgtttgtaattggt

SEQ ID NO: 294714 - DNA, 75 bp, synthetic construct
  source 1..75: mol_type = other DNA
aggcaggagattaatgccttccaaatgcgctataacgccctcttccagccagaagaaggcgtgttttggttgcat

SEQ ID NO: 294715 - DNA, 75 bp, synthetic construct
  source 1..75: mol_type = other DNA
tggaaccgcaattttctgattattcgggaatgttgtgtggagttaagtttgagaatggggtatccgtttccgagt

SEQ ID NO: 294716 - DNA, 75 bp, synthetic construct
  source 1..75: mol_type = other DNA
aacatccgacgcaaaccttgctggacttattcaccattcaggaaacccaggggcgtctggacaatctccacgtcg

SEQ ID NO: 294717 - DNA, 75 bp, synthetic construct
  source 1..75: mol_type = other DNA
cgtcgagcaggtaggccataacctgcgacagatgcgtgaaatgacgtcagcactgaccgcagaacttggcgacaa

SEQ ID NO: 294718 - DNA, 75 bp, synthetic construct
  source 1..75: mol_type = other DNA
agaactgcgcgggcaggatggtatcagcgaagagctggagcagcgtatccgtgatgtactgctggggaaagcgta

SEQ ID NO: 294719 - DNA, 75 bp, synthetic construct
  source 1..75: mol_type = other DNA
cgcgccagcgatcttcacaacgccaaagccaatatgaaagtgctgcatccgctgccgcgtattgatgaaattgcg

SEQ ID NO: 294720 - DNA, 75 bp, synthetic construct
  source 1..75: mol_type = other DNA
cctggagtctgcacagctccattgaagaagtgatggcggaagtggacattctgtatatgactcgcgtgcaaaaag

SEQ ID NO: 294721 - DNA, 75 bp, synthetic construct
  source 1..75: mol_type = other DNA
ccgcaccgttcactccctgactcaggcgttagcgaagttcgacggcaaccgtttttacttcatcgcgccggacgc

SEQ ID NO: 294722 - DNA, 75 bp, synthetic construct
  source 1..75: mol_type = other DNA
caataagtgggttggtagagttgttttttctgtaaaagatattaaggaaaatttagtagatggttggcatgtgtt

SEQ ID NO: 294723 - DNA, 75 bp, synthetic construct
  source 1..75: mol_type = other DNA
cgtatggggctgcgatgacggttttaattacagaaaccgtagttgcatcattgatgtatcttttcttaaaaagaa

SEQ ID NO: 294724 - DNA, 75 bp, synthetic construct
  source 1..75: mol_type = other DNA
tagtaatttttttggcattcaaaccatgctgacacatggttataaaagacaatttagtaaaatactgctaatttg

SEQ ID NO: 294725 - DNA, 75 bp, synthetic construct
  source 1..75: mol_type = other DNA
gccatttgcgctggtggcggggggctgcgtcggtttttacgatggattttttggcccggctgccggatcgtttta

SEQ ID NO: 294726 - DNA, 75 bp, synthetic construct
  source 1..75: mol_type = other DNA
tgcaagcctgtggtggctctatttccgccactatctactttattcgccgtaaagtggttagtttaagcgatcaaa

SEQ ID NO: 294727 - DNA, 75 bp, synthetic construct
  source 1..75: mol_type = other DNA
aatgatgctgcagatgccgctgccatttgtgaagctgttacccgtcctaatatgcggtttgttcccataaaatca

SEQ ID NO: 294728 - DNA, 75 bp, synthetic construct
  source 1..75: mol_type = other DNA
aacgttgcatacttttatgtgaaaaaacgacgaccacttatactaggaaaaattgtaaaaaacattcgtattaac

SEQ ID NO: 294729 - DNA, 75 bp, synthetic construct
  source 1..75: mol_type = other DNA
acctcctgctatgctcttacaatataatcaaatattacccggcggcgctgagagaattttcaggctaaccgaaaa

SEQ ID NO: 294730 - DNA, 75 bp, synthetic construct
  source 1..75: mol_type = other DNA
gggaataattgctttcctgagtggcttgggcactcattttgctgccgtgcaatgggcaaatgatattgcagaata

SEQ ID NO: 294731 - DNA, 75 bp, synthetic construct
  source 1..75: mol_type = other DNA
ctgatttttagtttaagaataaaatttctggcaataccattgatgattgtatttagcttagtatggggagctatt

SEQ ID NO: 294732 - DNA, 75 bp, synthetic construct
  source 1..75: mol_type = other DNA
tacagtctataatattgactctttgaatgatccatattcattaataaaagccatacttatagcacaaagggcaaa

SEQ ID NO: 294733 - DNA, 75 bp, synthetic construct
  source 1..75: mol_type = other DNA
tctgtcgctcagttaactagcgctctgagcgaactggcaaaacagttttgggaaaaaacgaggataacgcttttc

SEQ ID NO: 294734 - DNA, 75 bp, synthetic construct
  source 1..75: mol_type = other DNA
ccgcgcagactggacgacacgaagacctcaaaaaacgcgtggctgctgtcagagctggtggcatggacacgcagc

SEQ ID NO: 294735 - DNA, 75 bp, synthetic construct
  source 1..75: mol_type = other DNA
cgctactcgaccggcaccgtactttacgggcggatttgccagaatcagtcaggcagcgcttcgtggcaggtttac

SEQ ID NO: 294736 - DNA, 75 bp, synthetic construct
  source 1..75: mol_type = other DNA
tagcctgtacagctctcttaactggttgcgtcagccaggataaaggtaatgcgatgcagagccagctgaataacc

SEQ ID NO: 294737 - DNA, 75 bp, synthetic construct
  source 1..75: mol_type = other DNA
taaaaaaatgggtagagaatcccggtaaacgcgatgaaatgctgccggaggtaaaaccgtccgcacgtccttaca

SEQ ID NO: 294738 - DNA, 75 bp, synthetic construct
  source 1..75: mol_type = other DNA
gagtattagataaggaattacgaagggcttctgtatcattaaaaactttgaagagtaaagcggtgagctcacttg

SEQ ID NO: 294739 - DNA, 75 bp, synthetic construct
  source 1..75: mol_type = other DNA
gtgattttcatgctattgatttaaccagtaaaaatgggcgagagctatgtcgtacacttgcctataaaatattcg

SEQ ID NO: 294740 - DNA, 75 bp, synthetic construct
  source 1..75: mol_type = other DNA
gacggtaactcccatccctatgtttatctttctcatgatagttgttgtgagaaaccggaggatttgcaggtagat

SEQ ID NO: 294741 - DNA, 75 bp, synthetic construct
  source 1..75: mol_type = other DNA
ggtgagaacgtaggtgttctgctgcgtggtatcaaacgtgaagaaatcgaacgtggtcaggtactggctaagccg

SEQ ID NO: 294742 - DNA, 75 bp, synthetic construct
  source 1..75: mol_type = other DNA
gaaaaagctcgtggtatcaccatcaacacttctcacgttgaatatgacaccccgacccgtcactacgcacacgta

SEQ ID NO: 294743 - DNA, 75 bp, synthetic construct
  source 1..75: mol_type = other DNA
agttcgtgaacttctgtctcagtacgacttcccgggcgacgacactccgatcgttcgtggttctgctctgaaagc

SEQ ID NO: 294744 - DNA, 75 bp, synthetic construct
  source 1..75: mol_type = other DNA
atgggaggaaaaaagaaaatagaggatgtaggctcaacttttttccacgcaatgattgtttatgtttttgtgact

SEQ ID NO: 294745 - DNA, 75 bp, synthetic construct
  source 1..75: mol_type = other DNA
gatcaccggtgctgctcagatgcggccgactctcgtctttgtcgggttcgattgtcctggtcgcctgctgactta

SEQ ID NO: 294746 - DNA, 75 bp, synthetic construct
  source 1..75: mol_type = other DNA
gcgtacctcgacatcgtgcgtgagctgcgtgaacgtactgaattgccgattggcgcgtatcaggtgagcggtgag

SEQ ID NO: 294747 - DNA, 75 bp, synthetic construct
  source 1..75: mol_type = other DNA
tatcggccacgttgaccagggtaaaactacgctgaccgctgcaatcacaaccgtactggctaaaacctacggcgg

SEQ ID NO: 294748 - DNA, 75 bp, synthetic construct
  source 1..75: mol_type = other DNA
tatcggccacgttgaccacggtaaaactacactgaccgctgcaatcacgaccgtactggctaaaacctacggcgg

SEQ ID NO: 294749 - DNA, 75 bp, synthetic construct
  source 1..75: mol_type = other DNA
gtgtagaacgcggtatcatcaaagttggtgaagaagttgaaatcgttggtatcaaagagactcagaagtctacct

SEQ ID NO: 294750 - DNA, 75 bp, synthetic construct
  source 1..75: mol_type = other DNA
aacgacgcgactctggaaaatttaggcaagcaagccgtggttgcagctgctgcaggtgcagacttcatcgcccct

SEQ ID NO: 294751 - DNA, 75 bp, synthetic construct
  source 1..75: mol_type = other DNA
gaccctcgaaaatttaggcaaacaagcagtggtcgctgctgctgcgggtgcagacttcatcgccccttccgccgc

SEQ ID NO: 294752 - DNA, 75 bp, synthetic construct
  source 1..75: mol_type = other DNA
ggctggcttcctggattcttacattccggaaccagagcgtgcgattgacaagcctttcctgctgccgatcgaaga

SEQ ID NO: 294753 - DNA, 75 bp, synthetic construct
  source 1..75: mol_type = other DNA
accacatcactgacaactgcccgtccggggctgcagccgtcggtaacattacttcaggtggcgccatcatctccc

SEQ ID NO: 294754 - DNA, 75 bp, synthetic construct
  source 1..75: mol_type = other DNA
aggtgaacggctatgaatggaccccggactatggcgggttaaccgcacgtcctgatgcgtttatttcagaggcag

SEQ ID NO: 294755 - DNA, 75 bp, synthetic construct
  source 1..75: mol_type = other DNA
atccattatgttggatagcaacagaacggaatcatatatttcgcatgttaaagaatatctggcaaaacgcttcga

SEQ ID NO: 294756 - DNA, 75 bp, synthetic construct
  source 1..75: mol_type = other DNA
aatggaatgctgctttgcacgacactacgggcctgatgtctggatggaaaaggtgaaatacgcttcgaatgacac

SEQ ID NO: 294757 - DNA, 75 bp, synthetic construct
  source 1..75: mol_type = other DNA
attctttataccgctgttttcctgcttttggtttgtttgtaccgttgtaaaacggcacacccctatttgatggca

SEQ ID NO: 294758 - DNA, 75 bp, synthetic construct
  source 1..75: mol_type = other DNA
cggaatgcactgaaaggaccgattactgcgctggcggaagatctggcgcaacttcgcggtgtgctgggactggat

SEQ ID NO: 294759 - DNA, 75 bp, synthetic construct
  source 1..75: mol_type = other DNA
ggccgctattcagtttgatgatcaggtcgatgtagtcttccagttagaacctgtggatcaacaacctgctaaaac

SEQ ID NO: 294760 - DNA, 75 bp, synthetic construct
  source 1..75: mol_type = other DNA
attcagggggccagtctagattcaccgatgagtaactggtggcaggaactattacgtttcttcctgcgtggtctt

SEQ ID NO: 294761 - DNA, 75 bp, synthetic construct
  source 1..75: mol_type = other DNA
agaaggcgcggcacgaccagctgcttaccgcgcttcgtgcgctgctgttaagcccgaagaatccgtttagcgata

SEQ ID NO: 294762 - DNA, 75 bp, synthetic construct
  source 1..75: mol_type = other DNA
gttgcaggaggagctttgcagcgtggtggaggcatccggtgccagcctggagaaggggcgaaacgaccagttgct

SEQ ID NO: 294763 - DNA, 75 bp, synthetic construct
  source 1..75: mol_type = other DNA
acaagatttggctgttgtatcaactcttgttgatggtatgaagaatattgatacatcaacaccagatattgaata

SEQ ID NO: 294764 - DNA, 75 bp, synthetic construct
  source 1..75: mol_type = other DNA
tcgacgcagctcagccaggcgctgctggcaagctgcaatgcgttcccgcagtatagccggatactcaatggccgc

SEQ ID NO: 294765 - DNA, 75 bp, synthetic construct
  source 1..75: mol_type = other DNA
tcctgctgattaaaggtcgctacgaaggtattggcggtttcccgattggtacccaggaagatgtgctgtcgctca

SEQ ID NO: 294766 - DNA, 75 bp, synthetic construct
  source 1..75: mol_type = other DNA
tgaacaggaagataatccactgaaagtcgaagggattgatgtggtttctctgccgttctataaactgagcaccaa

SEQ ID NO: 294767 - DNA, 75 bp, synthetic construct
  source 1..75: mol_type = other DNA
aagttcgtgaacttctgtctcagtacgacttcccgggcgacgacactccgatcgttcgtggttctgctctgaaag

SEQ ID NO: 294768 - DNA, 75 bp, synthetic construct
  source 1..75: mol_type = other DNA
tgctgctcgcgcattcgaccagatcgataacgcaccggaagaaaaagctcgtggtatcaccatcaacacttctca

SEQ ID NO: 294769 - DNA, 75 bp, synthetic construct
  source 1..75: mol_type = other DNA
atttggcgatctcgaccagaacagaacctggctactgtggtgtgagcgcggggtaatgagccgcctgcaggcgct

SEQ ID NO: 294770 - DNA, 75 bp, synthetic construct
  source 1..75: mol_type = other DNA
aaaaacatgatcaccggtgctgcgcggatggacggcgcgatcctggtagttgctgcgactgacggcccgatgccg

SEQ ID NO: 294771 - DNA, 75 bp, synthetic construct
  source 1..75: mol_type = other DNA
gcagcaggcgcaacaactgctggagaggttgattaatactgcgttgcagtggggacgagatcagtacggcgagcc

SEQ ID NO: 294772 - DNA, 75 bp, synthetic construct
  source 1..75: mol_type = other DNA
agcgtctggctattcgcgacgccctgacccgtattccgggcatccaccatattctcgaagtcgaagacgtgccgt

SEQ ID NO: 294773 - DNA, 75 bp, synthetic construct
  source 1..75: mol_type = other DNA
agatgggcgttatcctcaaacgtatgatggtgcgtgccgcgtctaaagtggctgaacgttacggcgtacaggcgc

SEQ ID NO: 294774 - DNA, 75 bp, synthetic construct
  source 1..75: mol_type = other DNA
cgttacgtcggcggcggtttaaatcagcatattgagtccgcgcgcgtgaagctgaccaatccggaagtgactgtc

SEQ ID NO: 294775 - DNA, 75 bp, synthetic construct
  source 1..75: mol_type = other DNA
actgggtaagccaggcaccatcaagccggacaccgagttagaatctgaagtgtacattcagtccaaagatgaagg

SEQ ID NO: 294776 - DNA, 75 bp, synthetic construct
  source 1..75: mol_type = other DNA
ggtatcatcaaagttggtgaagaagttgaaatcgttggtatcaaagagactcagaagtctacctgtactggcgtt

SEQ ID NO: 294777 - DNA, 75 bp, synthetic construct
  source 1..75: mol_type = other DNA
atgacggatggattggcgactttatcgaagcgtcgtcttaatggcttaaagcagatcgagcgcattctcgaagcg

SEQ ID NO: 294778 - DNA, 75 bp, synthetic construct
  source 1..75: mol_type = other DNA
tcccgggcgacgacactccgatcgttcgtggttctgctctgaaagcgctggaaggcgacgcagagtgggaagcga

SEQ ID NO: 294779 - DNA, 75 bp, synthetic construct
  source 1..75: mol_type = other DNA
gcgttgaaatgttccgcaaactgctggacgaaggccgtgctggtgagaacgtaggtgtggtcaggtactggctaa

SEQ ID NO: 294780 - DNA, 75 bp, synthetic construct
  source 1..75: mol_type = other DNA
accagcgaccagcgaccagcgaccagcgaccagcgaccagcgaccagcgaccagcgaccagcgaccactgaatta

SEQ ID NO: 294781 - DNA, 75 bp, synthetic construct
  source 1..75: mol_type = other DNA
gacggtctacgtttcgcaatccgtgaaggcggccgtaccgttggcgcgggcgttgtagcaaaagttctgagctaa

SEQ ID NO: 294782 - DNA, 75 bp, synthetic construct
  source 1..75: mol_type = other DNA
ggtgtatctcgaaccgctaaaccgctatcaggaccacatgatcaacacgctcgccgatgctcgtcgttacatcgt

SEQ ID NO: 294783 - DNA, 75 bp, synthetic construct
  source 1..75: mol_type = other DNA
gaaatttcgttatatcaaagagatgggcttcgatggttttgagattgacggcaaactgctggtcaacaacatcga

SEQ ID NO: 294784 - DNA, 75 bp, synthetic construct
  source 1..75: mol_type = other DNA
gaaggcgacgcagagtgggaagcgaaaatcctggaactggctggcttccttgattcttacattccggaaccagag

SEQ ID NO: 294785 - DNA, 75 bp, synthetic construct
  source 1..75: mol_type = other DNA
atgggcaaaaccgaccgcagcgccaacccttcgccgggcaacaaaaaaggcggactcgctaacgtggtaaagaaa

SEQ ID NO: 294786 - DNA, 75 bp, synthetic construct
  source 1..75: mol_type = other DNA
acgaccggccgtggtacgccgtacggcctgatggcggtacccgtcattaaaatggcgacccgcaccgagctggcg

SEQ ID NO: 294787 - DNA, 75 bp, synthetic construct
  source 1..75: mol_type = other DNA
gtgcaagtgtttacgaccggccgtggtacgccgtacggcctgatggcggtacccgtcattaaaatggcgacccgc

SEQ ID NO: 294788 - DNA, 75 bp, synthetic construct
  source 1..75: mol_type = other DNA
atgggcaaaaccgaccgcagcgccaacccttcgccgggcaacaaaaatggcgggctcgcgaacgtggtaaagaaa

SEQ ID NO: 294789 - DNA, 75 bp, synthetic construct
  source 1..75: mol_type = other DNA
atgggcaaaaccgaccgcagcgccaacccttcgccgggcaacaaaaatggcggcctcgccaacgtggtaaagaaa

SEQ ID NO: 294790 - DNA, 75 bp, synthetic construct
  source 1..75: mol_type = other DNA
atgggcaaaaccgaccgcagcgccaacccttcgccgggcaacaaaaatggcggactcgcaaacgtggtaaagaaa

SEQ ID NO: 294791 - DNA, 75 bp, synthetic construct
  source 1..75: mol_type = other DNA
gatcaagcaatacatcactgccattctgcgtcatgccgtccagcaaaagcttatgcgtcataatcctgcttacga

SEQ ID NO: 294792 - DNA, 75 bp, synthetic construct
  source 1..75: mol_type = other DNA
ctgcgtcatgctgttcagcagaaacttatacgtcataacccggcctatgatatggaaggtgctattcagaaaccg

SEQ ID NO: 294793 - DNA, 75 bp, synthetic construct
  source 1..75: mol_type = other DNA
ggctgctattcagtttgatgatcaggttgatgtggtcttccagttagaacctgttgatcagcaacctgcaaaaac

SEQ ID NO: 294794 - DNA, 75 bp, synthetic construct
  source 1..75: mol_type = other DNA
gcgacgccagccagcgattttgtctgtggcacgcaacaggtggcttcgggtatcaccgtgcaagtgtttacgacc

SEQ ID NO: 294795 - DNA, 75 bp, synthetic construct
  source 1..75: mol_type = other DNA
cgtagacttaccacactggcgattaaactcaatctgttgattttcattcgttccagtgaactccgctatgcacga

SEQ ID NO: 294796 - DNA, 75 bp, synthetic construct
  source 1..75: mol_type = other DNA
gttccggtaaaaaaagcagaaacgcttggctatcttgaaattgccatgcggatcaagcaatacatcactgccatc

SEQ ID NO: 294797 - DNA, 75 bp, synthetic construct
  source 1..75: mol_type = other DNA
atgggcaaaaccgaccgcagcgccaacccttcgccgggcaacaaaaacggcggcctcgctaacgtggtaaagaaa

SEQ ID NO: 294798 - DNA, 75 bp, synthetic construct
  source 1..75: mol_type = other DNA
ccgcaaaacagcgtacatttgttgatctggcatttacgcctgccgcgcacgctgctggcgatgattgtcggtgcg

SEQ ID NO: 294799 - DNA, 75 bp, synthetic construct
  source 1..75: mol_type = other DNA
gctggaaatagttctattgattggcaggaaatagctgataaatataaaaatgttgttcctcatggtaaaaaatca

SEQ ID NO: 294800 - DNA, 75 bp, synthetic construct
  source 1..75: mol_type = other DNA
tgatgctggttgacccgaaacagggcagtgttcgtccgttatcatacggctttatttcgcaggatgacctggcaa

SEQ ID NO: 294801 - DNA, 75 bp, synthetic construct
  source 1..75: mol_type = other DNA
gaggggcgctgggaggttactgatgacggacagaaacgtttaggctacgaacttcctaatttttcagttcgccaa

SEQ ID NO: 294802 - DNA, 75 bp, synthetic construct
  source 1..75: mol_type = other DNA
tcaagtacataggtatgatgctttacttatcttaagggatggaaagtataaaggatacaataatacactaaggtt

SEQ ID NO: 294803 - DNA, 75 bp, synthetic construct
  source 1..75: mol_type = other DNA
attggtcccgaaggcttcggtaaaaaagacagaagctggaatgataagaagataatgatccaatggcgtgagtca

SEQ ID NO: 294804 - DNA, 75 bp, synthetic construct
  source 1..75: mol_type = other DNA
tagctccacatcgacaagtgaaacttttgttcgacttgagccaagcgattttcttcttcgtcttagtgccgcact

SEQ ID NO: 294805 - DNA, 75 bp, synthetic construct
  source 1..75: mol_type = other DNA
ctgataagacgtgccatcgtcgcatcaggcaagaccgtattaattcggcgtatagcccattaccacgccacttaa

SEQ ID NO: 294806 - DNA, 75 bp, synthetic construct
  source 1..75: mol_type = other DNA
atgggcaaaaccgaccgcagcgccaacccttcgccgggcaacaaaaagggcgggctcgctaacgtggtaaagaaa

SEQ ID NO: 294807 - DNA, 75 bp, synthetic construct
  source 1..75: mol_type = other DNA
ctcatcgtggcccttcttttttataagatgcctctcacagccgcactcgcttccgtgctctatggtttcttctat

SEQ ID NO: 294808 - DNA, 75 bp, synthetic construct
  source 1..75: mol_type = other DNA
atgaggtttcgtgcatggctagcgaaaatgaaaaaaaatcatagagttagggtcgcgcagtacttgaggatgtct

SEQ ID NO: 294809 - DNA, 75 bp, synthetic construct
  source 1..75: mol_type = other DNA
cgctctggtcgccctgatcccaataatattcttcttcgttgcactcgcggtattacgtctgaaaggacatgtcgc

SEQ ID NO: 294810 - DNA, 75 bp, synthetic construct
  source 1..75: mol_type = other DNA
aggccgggcttaacgagattcgttctgtttcgttaggcgtggcacagccggattcttataaagataaagcgcgca

SEQ ID NO: 294811 - DNA, 75 bp, synthetic construct
  source 1..75: mol_type = other DNA
ctgcccacaatcaattaacaatattccactggatgcgcataaccacggttataccgtgctggatatccagcaaga

SEQ ID NO: 294812 - DNA, 75 bp, synthetic construct
  source 1..75: mol_type = other DNA
gaggcaatgccgcagttaaagaaaggcgagatcctcgaagtggtcagcgattgcccgcagtcaattaacaatatt

SEQ ID NO: 294813 - DNA, 75 bp, synthetic construct
  source 1..75: mol_type = other DNA
agaaaccgttgagcgtttcatcgtttcgccgggggaagtcgtaccggctccaccacacccgacagtgtccggtca

SEQ ID NO: 294814 - DNA, 75 bp, synthetic construct
  source 1..75: mol_type = other DNA
gcaggtcaacgctacgcgtctgcaaccggacgtcggcgagcagtattatcttgaaatccatccgtacggcatgtt

SEQ ID NO: 294815 - DNA, 75 bp, synthetic construct
  source 1..75: mol_type = other DNA
caaagaggcgttggcgatggtggatctggaaggattcgaagaccgctttgtcgatcagatctccggcgggcagca

SEQ ID NO: 294816 - DNA, 75 bp, synthetic construct
  source 1..75: mol_type = other DNA
ccactggatgcgcataaccacggttataccgtgctggatatccagcaagacgggccaaccattcgttatttgatt

SEQ ID NO: 294817 - DNA, 75 bp, synthetic construct
  source 1..75: mol_type = other DNA
tttatcttttataataatctgtcttctcctgaaggggcagtaaagctcgttaccggttctcagcagtccagcatt

SEQ ID NO: 294818 - DNA, 75 bp, synthetic construct
  source 1..75: mol_type = other DNA
ctcattgaaaaacctttaaatgagcttttatctcctaacccgaactcagtatcatcaagagaaattgtaacaagc

SEQ ID NO: 294819 - DNA, 75 bp, synthetic construct
  source 1..75: mol_type = other DNA
tccatgcacaagagaatttttatcggcctattcttgagtatcgtagtgcctcaatacttttgatttgttcggttt

SEQ ID NO: 294820 - DNA, 75 bp, synthetic construct
  source 1..75: mol_type = other DNA
tgacccagttcctgaaaaacgttgaagtgttcgataccggcggtcgtggcgcaaccaccacttttgccgagcgtg

SEQ ID NO: 294821 - DNA, 75 bp, synthetic construct
  source 1..75: mol_type = other DNA
tgacccagttcctgaaaaacgttgaagtgttcgataccggtggccgtggcgcgaccaccacctttgccgagcgcg

SEQ ID NO: 294822 - DNA, 75 bp, synthetic construct
  source 1..75: mol_type = other DNA
tccacgactggaacgacctggtgcgctccgacgtgaagctgattttcccgaacccgaaaacgtcgggtaacgcgc

SEQ ID NO: 294823 - DNA, 75 bp, synthetic construct
  source 1..75: mol_type = other DNA
cgtcactcacgatcaaagtgaagctttcgcggtgtccgacaccgtactggtgatgaataaaggtcacatcatgca

SEQ ID NO: 294824 - DNA, 75 bp, synthetic construct
  source 1..75: mol_type = other DNA
aagcagaagaaatctatacaacctttaaaactcaatatgagataaaagcaatagagaaagaactaacccatgaag

SEQ ID NO: 294825 - DNA, 75 bp, synthetic construct
  source 1..75: mol_type = other DNA
ttctatcccaggcagttatatacccgttctaatagaaacatagacaacatcatggcgatgttcagttcagtgtat

SEQ ID NO: 294826 - DNA, 75 bp, synthetic construct
  source 1..75: mol_type = other DNA
aagaacacagtatgaagtgaaggttatcgagaaagagttaacccatgaagtagtcagagtaagaaatgttagatt

SEQ ID NO: 294827 - DNA, 75 bp, synthetic construct
  source 1..75: mol_type = other DNA
cggcattgatgggtttcagcgggatggcagtacaggccaatgaactaccggatggtccgcacattgtcacttcag

SEQ ID NO: 294828 - DNA, 75 bp, synthetic construct
  source 1..75: mol_type = other DNA
cggcattgatgggttttagcgggatggcggtgcaagctaacgaattgccggatggaccgcatattgttacctccg

SEQ ID NO: 294829 - DNA, 75 bp, synthetic construct
  source 1..75: mol_type = other DNA
ttagcccaggctgggcatgggctaaatagttttattagtagtgtggttaagaaaaatttctcacgtaaatacctt

SEQ ID NO: 294830 - DNA, 75 bp, synthetic construct
  source 1..75: mol_type = other DNA
gtcggtcaatgtggccgggacgttcaaatattccgtgggtgacattgagcgtgaaacgctcacggggatgagtgg

SEQ ID NO: 294831 - DNA, 75 bp, synthetic construct
  source 1..75: mol_type = other DNA
atggcaccatcaaccaaaccggaagaggtgctcgcgatgtttcattgtcctttatgccagcatgccgcacatgcg

SEQ ID NO: 294832 - DNA, 75 bp, synthetic construct
  source 1..75: mol_type = other DNA
caacagcgcgatatctgcatggtgtttcagtcatacgctctgttcccgcatatgtcgctgggcgaaaacgtcggc

SEQ ID NO: 294833 - DNA, 75 bp, synthetic construct
  source 1..75: mol_type = other DNA
atggacaaacaaaacaactttgcagtggagacactggaagaacagcttattattattgttgataaatatatctca

SEQ ID NO: 294834 - DNA, 75 bp, synthetic construct
  source 1..75: mol_type = other DNA
agtttactctggaagagcaacttatacttataattgataaatatatatcaaaacgatatcagctacatgataaaa

SEQ ID NO: 294835 - DNA, 75 bp, synthetic construct
  source 1..75: mol_type = other DNA
atggacaagaacattatttatccagagtttactctggaagagcaacttatcattatcgtcgataagtatatttca

SEQ ID NO: 294836 - DNA, 75 bp, synthetic construct
  source 1..75: mol_type = other DNA
cccgctgctgtgggatatccagcgactttacccgaaagagttccagctaggggaagaagcgttaaccattattga

SEQ ID NO: 294837 - DNA, 75 bp, synthetic construct
  source 1..75: mol_type = other DNA
acgaggcagaaatgcggctgatggcgctgaatgagaagcgcaaacgccagcgccgggcagccagggagaaaacag

SEQ ID NO: 294838 - DNA, 75 bp, synthetic construct
  source 1..75: mol_type = other DNA
cccacaggggcgacaccgtggcggcatatgaccaaacgccagcgcaaaaaccgcagacgcgttaaccgcctcact

SEQ ID NO: 294839 - DNA, 75 bp, synthetic construct
  source 1..75: mol_type = other DNA
gggatatccagcggctttacccgaaagagttccagctaggggaagaagcgttaaccattattgataaacggttgg

SEQ ID NO: 294840 - DNA, 75 bp, synthetic construct
  source 1..75: mol_type = other DNA
tatgcctcttgaggtgatggcaacctgtgatcgtattatctctcttgcgcaggagcgcctgggaaagttgcagga

SEQ ID NO: 294841 - DNA, 75 bp, synthetic construct
  source 1..75: mol_type = other DNA
aaaaacgccctggcgaaagaattaactcaagtggaatagaaaaagagtatgccttgagcagtcatgaactgaacg

SEQ ID NO: 294842 - DNA, 75 bp, synthetic construct
  source 1..75: mol_type = other DNA
gtgctgggtgccggtgaaggttgggcgaagtctatcctgttcaatgaccgtgtacgcgatgagtttgcaaccttc

SEQ ID NO: 294843 - DNA, 75 bp, synthetic construct
  source 1..75: mol_type = other DNA
tatcgacgtgcatatgagcgacctgctggctggacgcacgggcctggaggatttccacgccctggtcgcgtgcgg

SEQ ID NO: 294844 - DNA, 75 bp, synthetic construct
  source 1..75: mol_type = other DNA
ggtgcggtgattcaggttcgagccgctgaccgtgaagcagttgaagcggtactggcacagcatgggcttgctgat

SEQ ID NO: 294845 - DNA, 75 bp, synthetic construct
  source 1..75: mol_type = other DNA
ggaagtgacaccacaggaacagcaggaggcagaaacgcggctggcagcactgaatgaaaagcgcaaacgtcaggc

SEQ ID NO: 294846 - DNA, 75 bp, synthetic construct
  source 1..75: mol_type = other DNA
gattccctgctggaattcgttaatgatgatctgttcccggcgttgaaaaacctcactgcgcctatcgataaaaac

SEQ ID NO: 294847 - DNA, 75 bp, synthetic construct
  source 1..75: mol_type = other DNA
agattggcgatatcaaacgcatcaaactttccgccaactggatggcggcggcaggccaccctggtgaagatgcgg

SEQ ID NO: 294848 - DNA, 75 bp, synthetic construct
  source 1..75: mol_type = other DNA
atgagttcatcgtgtatagaagaagtcagtgtaccggatgacaactggtaccgtatcgccaacgaattacttagc

SEQ ID NO: 294849 - DNA, 75 bp, synthetic construct
  source 1..75: mol_type = other DNA
atccctgatatgtctttctggacggttactggtggcaatggaaattttgtgattcgtcaacctgacgggctaatc

SEQ ID NO: 294850 - DNA, 75 bp, synthetic construct
  source 1..75: mol_type = other DNA
gctctcgcttaccccggtcttttgctgccagacctgcgcggtgaatttattcgtggatgggatgatgggcgaggg

SEQ ID NO: 294851 - DNA, 75 bp, synthetic construct
  source 1..75: mol_type = other DNA
cgggatttacatcatcatatggcgggagcgaaacccgtccacgaaatattgcatttaactatatcgtgagggctg

SEQ ID NO: 294852 - DNA, 75 bp, synthetic construct
  source 1..75: mol_type = other DNA
atctcgggcgatgatattagcattgagaaggtcagcggctgcgccagaaaatttctggtcgtagatgatgtcttc

SEQ ID NO: 294853 - DNA, 75 bp, synthetic construct
  source 1..75: mol_type = other DNA
atgctaaccgcccagaagaagatattttcactggccgatatgtcgccaaaatccagcaatatgacagcaaaatca

SEQ ID NO: 294854 - DNA, 75 bp, synthetic construct
  source 1..75: mol_type = other DNA
tactggagaacgacatctgtttggccatattcgcaatttccgcatatggcataaagaattaaatgacaggcaatt

SEQ ID NO: 294855 - DNA, 75 bp, synthetic construct
  source 1..75: mol_type = other DNA
atggaatatcagcacaccagccaggtttctctcgatttcagtacaccagtaactcagtaggagatggtgttaatt

SEQ ID NO: 294856 - DNA, 75 bp, synthetic construct
  source 1..75: mol_type = other DNA
accagtaactcagtaggagatggtgttaattttattgccgtcagaccacgtaacattgcatttaactttctggtg

SEQ ID NO: 294857 - DNA, 75 bp, synthetic construct
  source 1..75: mol_type = other DNA
gaacagcaaaaaatggctcaggaacgctgtgaaggcctggatgtcaccattttgctgcaagattatcgtgacctg

SEQ ID NO: 294858 - DNA, 75 bp, synthetic construct
  source 1..75: mol_type = other DNA
ttttcttaaacgttggtttgggagaaggtgctccagctattggcgttccgttcttctggccgtccgccgcaatgc

SEQ ID NO: 294859 - DNA, 75 bp, synthetic construct
  source 1..75: mol_type = other DNA
cgaattattaagctggcaggcagcaacatctttatcgcaatttggcggtaattatccagaagggtccggccatgc

SEQ ID NO: 294860 - DNA, 75 bp, synthetic construct
  source 1..75: mol_type = other DNA
tcccggagaatctgattgctgaagttcgccaccgtggagtaaccggattaacggtggtttccaataactgtggcg

SEQ ID NO: 294861 - DNA, 75 bp, synthetic construct
  source 1..75: mol_type = other DNA
aacgaagatgtggcagcaccgtatattgccactggcgcacgtccgaaagttgctgtgctgcgtgagcagggcgtg

SEQ ID NO: 294862 - DNA, 75 bp, synthetic construct
  source 1..75: mol_type = other DNA
agaatgcccgccggtcagcagactcaccggctggttccgctttccgacacctggtacgtcagccagctgcagacg

SEQ ID NO: 294863 - DNA, 75 bp, synthetic construct
  source 1..75: mol_type = other DNA
gcagactcaccggctggttccgctctccgacgcctggtacgtcagccagctgcagacgatggtggccacactgaa

SEQ ID NO: 294864 - DNA, 75 bp, synthetic construct
  source 1..75: mol_type = other DNA
caaaatacctgctcgcccctaaagtgagtgccctgctccattacatcccgaatctgcgccgtaagatgctgctgg

SEQ ID NO: 294865 - DNA, 75 bp, synthetic construct
  source 1..75: mol_type = other DNA
ggatgtcattgttaccaacccgccatttggtggcacggaagaagacggtattgagaagaactttccggcagagat

SEQ ID NO: 294866 - DNA, 75 bp, synthetic construct
  source 1..75: mol_type = other DNA
atggccgccctgccagtgaccatcgactatcccgcagcactggccttgcggcagatggcgctcgttcaggacgaa

SEQ ID NO: 294867 - DNA, 75 bp, synthetic construct
  source 1..75: mol_type = other DNA
tcctatgcgatgcatatgctgtatgccggtataccgctgaaggtcctgcagagcctgatggggcataagtccatc

SEQ ID NO: 294868 - DNA, 75 bp, synthetic construct
  source 1..75: mol_type = other DNA
accgcaagatgctgctggcaaccctctggaacaccggcgcgcgtatcaacgaggcgctggcgctgacccgggggg

SEQ ID NO: 294869 - DNA, 75 bp, synthetic construct
  source 1..75: mol_type = other DNA
gcgccgcaagatgctgctggccacactgtggaacaccggtgcgcgcattaatgaagcactggcgctgacgcgggg

SEQ ID NO: 294870 - DNA, 75 bp, synthetic construct
  source 1..75: mol_type = other DNA
ctgggaagtgacggacagaacggtcaggacctggattggggaggcggttgccgccgctgctgctgacggtgtgac

SEQ ID NO: 294871 - DNA, 75 bp, synthetic construct
  source 1..75: mol_type = other DNA
gcctccgtatccgtttgtgcaactggccactctgaagcagcggacagaaaaagccgccaggacggcaggaagaat

SEQ ID NO: 294872 - DNA, 75 bp, synthetic construct
  source 1..75: mol_type = other DNA
gtgcgcattaatgaagcactggcactgacgcgcggggatttttcgcttgcgcctccgtatccgtttgtgcaactg

SEQ ID NO: 294873 - DNA, 75 bp, synthetic construct
  source 1..75: mol_type = other DNA
aatgaagctgtagaggccgctgcggccgacggcgtgacgttctctgttccggttaccccacatacttttcgccat

SEQ ID NO: 294874 - DNA, 75 bp, synthetic construct
  source 1..75: mol_type = other DNA
gcattaaaaccaacctgttgttctttaccaaaggtcagccaaccaaagagatttggttctatgagcatccgtatc

SEQ ID NO: 294875 - DNA, 75 bp, synthetic construct
  source 1..75: mol_type = other DNA
gaatgtgaaattgtcgttcgatatcaacgaagatgtggcggcaccgtttattgctactggcgcgcgcccgaaagt

SEQ ID NO: 294876 - DNA, 75 bp, synthetic construct
  source 1..75: mol_type = other DNA
cgatgagtttgcaaccttcttccaccgtccgcaaacgctggcgctgggggtatgtaacggttgccagatgatgtc

SEQ ID NO: 294877 - DNA, 75 bp, synthetic construct
  source 1..75: mol_type = other DNA
ctgaccgtgaagcggtcgaagccgtactggcacagtatggccttgctgattgcgtccattatgtcggccaggcgg

SEQ ID NO: 294878 - DNA, 75 bp, synthetic construct
  source 1..75: mol_type = other DNA
ccggtcgctaactgcgcggtgactactgccagcctcgacagctactacggtgaagcgatggcaattggcgaacga

SEQ ID NO: 294879 - DNA, 75 bp, synthetic construct
  source 1..75: mol_type = other DNA
ccgccagcctcgacagctactacggtgaagcaatggcaattggtgaacgtgcgccggttgcgctgctggattttg

SEQ ID NO: 294880 - DNA, 75 bp, synthetic construct
  source 1..75: mol_type = other DNA
tggcagcactggaaagcaaagggctggtggcgctgcgttatgtcgataacttcggcaaggtcaccgaaacttacc

SEQ ID NO: 294881 - DNA, 75 bp, synthetic construct
  source 1..75: mol_type = other DNA
gcgatttctccgtggccgggcgcggcgaccggttccggcggtgaaatccgcgatgaaggtgccaccgggcgcggc

SEQ ID NO: 294882 - DNA, 75 bp, synthetic construct
  source 1..75: mol_type = other DNA
tggcggcgctggaaagcaaagggctggtggcactgcgctatgtcgataacttcggtaaagtcactgaaacctacc

SEQ ID NO: 294883 - DNA, 75 bp, synthetic construct
  source 1..75: mol_type = other DNA
gaactcttctggcattggcgttgaattattacctgtggaggtgacgctggatgagcggccttaccccgtttttta

SEQ ID NO: 294884 - DNA, 75 bp, synthetic construct
  source 1..75: mol_type = other DNA
gagatggagcgtcgctgccaggaagtgatcgatcgctgctggcagcttggcgacgcgaacccgattctgtttatc

SEQ ID NO: 294885 - DNA, 75 bp, synthetic construct
  source 1..75: mol_type = other DNA
ccgtactgtcagcaactcctggcatccggaaaactggggcgaggatggcccatggatgcgcattttccgcaatgc

SEQ ID NO: 294886 - DNA, 75 bp, synthetic construct
  source 1..75: mol_type = other DNA
ccgcaccacgttgcgtgtctggtgggcagaaactacctggcagatgcagcgcctgcgtgacaacccggagtgtgc

SEQ ID NO: 294887 - DNA, 75 bp, synthetic construct
  source 1..75: mol_type = other DNA
caaaaccgcacgttaacgtcggtactatcggccacgttgaccaaggtaaaaccacgctgaccgctgcaatcacta

SEQ ID NO: 294888 - DNA, 75 bp, synthetic construct
  source 1..75: mol_type = other DNA
caaaaccgcacgttaacgtgggtactatcggccacgttgaccaaggtaaaaccaccctgaccgctgcaatcacta

SEQ ID NO: 294889 - DNA, 75 bp, synthetic construct
  source 1..75: mol_type = other DNA
caaaaccgcacgttaacgtcggtactatcggccacgttgaccagggtaaaaccacactgaccgctgcaatcacta

SEQ ID NO: 294890 - DNA, 75 bp, synthetic construct
  source 1..75: mol_type = other DNA
ggaactggctggcttcctggattcttacattccggaaccagagcgtgcaattgacaagccgttcctgctgccgat

SEQ ID NO: 294891 - DNA, 75 bp, synthetic construct
  source 1..75: mol_type = other DNA
atggttcagaagcccatgacgccgttacggttcgccagttgcagaacgctattggagcggtcgccactacgccaa

SEQ ID NO: 294892 - DNA, 75 bp, synthetic construct
  source 1..75: mol_type = other DNA
aggcggcgtgcgttacgacaccaaagctgatggttctatcgactatagcaatatcaccctcggtggcggcaacgg

SEQ ID NO: 294893 - DNA, 75 bp, synthetic construct
  source 1..75: mol_type = other DNA
caaaaccgcacgttaacgtaggtactatcggccacgttgaccagggtaaaaccaccctgaccgctgcaatcacta

SEQ ID NO: 294894 - DNA, 75 bp, synthetic construct
  source 1..75: mol_type = other DNA
tatcggccacgttgaccaaggtaaaaccacgctgaccgctgcaatcactaccgtactggctaaaacctacggcgg

SEQ ID NO: 294895 - DNA, 75 bp, synthetic construct
  source 1..75: mol_type = other DNA
gatggtaatgccgggcgacaacatcaaaatggttgttaccctgatccacccgatcgcgatggacgacggtctgcg

SEQ ID NO: 294896 - DNA, 75 bp, synthetic construct
  source 1..75: mol_type = other DNA
atgaaaaaaacataacaaatgttataaataactggaataaagatgagaagctaacctgggatgctttatgcgaca

SEQ ID NO: 294897 - DNA, 75 bp, synthetic construct
  source 1..75: mol_type = other DNA
ggcgacgcagagtgggaagcgaaaatcctagaactggctggcttcctggattcttacattccggaaccagagcgt

SEQ ID NO: 294898 - DNA, 75 bp, synthetic construct
  source 1..75: mol_type = other DNA
actaccctgaccgctgcaatcaccaccgtactggctaaaacctacggcggtgctgctcgtgcattcgaccagatc

SEQ ID NO: 294899 - DNA, 75 bp, synthetic construct
  source 1..75: mol_type = other DNA
actacactgaccgctgcaatcacaaccgtactggctaaaacctacggcggtgctgctcgtgcattcgaccagatc

SEQ ID NO: 294900 - DNA, 75 bp, synthetic construct
  source 1..75: mol_type = other DNA
acaacgctgaccgctgcaatcactaccgtactggctaaaacctacggcggtgctgctcgtgcattcgaccagatc

SEQ ID NO: 294901 - DNA, 75 bp, synthetic construct
  source 1..75: mol_type = other DNA
acgacactgaccgctgcaatcactaccgtactggctaaaacctacggcggtgctgctcgtgcattcgaccagatc

SEQ ID NO: 294902 - DNA, 75 bp, synthetic construct
  source 1..75: mol_type = other DNA
actacgctgaccgctgcaatcacgaccgtactggctaaaacctacggcggtgctgctcgtgcattcgaccagatc

SEQ ID NO: 294903 - DNA, 75 bp, synthetic construct
  source 1..75: mol_type = other DNA
acgtagccgatggttccgaagcccatgacgccgttacggttcgtcaattgcagaatgcgattggtgcggtcgcaa

SEQ ID NO: 294904 - DNA, 75 bp, synthetic construct
  source 1..75: mol_type = other DNA
ggctggcttcctggattcttacattccggaaccagagcgtgctattgacaagccgttcctgctgccgatcgaaga

SEQ ID NO: 294905 - DNA, 75 bp, synthetic construct
  source 1..75: mol_type = other DNA
atatgagctgtttgaaatcacgacggactctgaaaaaatggcgcgcgcaaaatcctttatcacagaaggcttgcg

SEQ ID NO: 294906 - DNA, 75 bp, synthetic construct
  source 1..75: mol_type = other DNA
tggaataataatttaaacttacctaaattgcaatgtagctatataagtgcacaggctattgcgaaaaggggagtg

SEQ ID NO: 294907 - DNA, 75 bp, synthetic construct
  source 1..75: mol_type = other DNA
ctgaaagcgctggaaggcgacgcagagtgggaagcgaaaatcctggaactggctggcttccttgattcttacatt

SEQ ID NO: 294908 - DNA, 75 bp, synthetic construct
  source 1..75: mol_type = other DNA
taggggaatacattgattgctgggaaaaagaacgaaatatacaaccagaccaacttgatttaaaaacgggtgaac

SEQ ID NO: 294909 - DNA, 75 bp, synthetic construct
  source 1..75: mol_type = other DNA
tgccgctgtctcggcgcgcgttgccgcggattccgccgtacttttgctctgtgctgccgccgtcgcactgccagc

SEQ ID NO: 294910 - DNA, 75 bp, synthetic construct
  source 1..75: mol_type = other DNA
cgcgctttttgaggactctgcagcagcagcacttttcgatgcttcactggcctttgttgatgccgttcctgcgct

SEQ ID NO: 294911 - DNA, 75 bp, synthetic construct
  source 1..75: mol_type = other DNA
tatcggccacgttgaccatggtaaaacgaccctgaccgctgcaatcacgaccgtactggctaaaacctacggcgg

SEQ ID NO: 294912 - DNA, 75 bp, synthetic construct
  source 1..75: mol_type = other DNA
tatcggccacgttgaccatggtaaaacaacgctgaccgctgcaatcacaaccgtactggctaaaacctacggcgg

SEQ ID NO: 294913 - DNA, 75 bp, synthetic construct
  source 1..75: mol_type = other DNA
caaaaccgcacgttaacgtcggtactatcggccacgttgaccaaggtaaaacaactctgaccgctgcaatcacga

SEQ ID NO: 294914 - DNA, 75 bp, synthetic construct
  source 1..75: mol_type = other DNA
caaaaccgcacgttaacgtaggtactatcggccacgttgaccaaggtaaaaccactctgaccgctgcaatcacga

SEQ ID NO: 294915 - DNA, 75 bp, synthetic construct
  source 1..75: mol_type = other DNA
ttcgaatctgaagtgtacattctgtccaaagatgaaggcggccgtcatactcctttcttcaaaggctaccgtccg

SEQ ID NO: 294916 - DNA, 75 bp, synthetic construct
  source 1..75: mol_type = other DNA
tgtagaacgcggtatcatcaaagttggtgaagaagttgaaatcgttggtatcaaagagactcagaagtctacctg

SEQ ID NO: 294917 - DNA, 75 bp, synthetic construct
  source 1..75: mol_type = other DNA
gtgaacggctcacaactctatactaccaatcagtacattgtcgatgcgctgggtggtgacgcagaagtcaacgct

SEQ ID NO: 294918 - DNA, 75 bp, synthetic construct
  source 1..75: mol_type = other DNA
gtctttttttatgtcgtaggtctgactcacccattttttgggcgttggtgtataatccagcgcctttgtcaatca

SEQ ID NO: 294919 - DNA, 75 bp, synthetic construct
  source 1..75: mol_type = other DNA
tatcggccacgttgaccagggtaaaacaactctgaccgctgcaatcacaaccgtactggctaaaacctacggcgg

SEQ ID NO: 294920 - DNA, 75 bp, synthetic construct
  source 1..75: mol_type = other DNA
tatcggccacgttgaccacggtaaaacgactctgaccgctgcaatcacgaccgtactggctaaaacctacggcgg

SEQ ID NO: 294921 - DNA, 75 bp, synthetic construct
  source 1..75: mol_type = other DNA
attcggacattcatcaaaagtatcatcagagggaaacattaatctttccagtgttcagggagggaaaacaaatct

SEQ ID NO: 294922 - DNA, 75 bp, synthetic construct
  source 1..75: mol_type = other DNA
tctttttttgtatcggcgcacacgcacaccttatcaatggtgggctgtatggggctaccttcgggtaggctggtt

SEQ ID NO: 294923 - DNA, 75 bp, synthetic construct
  source 1..75: mol_type = other DNA
agaaggtcagcggctgcgccagaaaatttctggtcgtagatgatgtcttccgctcgcgtagtgactccacaaaaa

SEQ ID NO: 294924 - DNA, 75 bp, synthetic construct
  source 1..75: mol_type = other DNA
ttctgtggtaacagagtggcggcgcttatggcgcttgcgacagcgcgcccatgaacgcgacgaagcgcgcgattt

SEQ ID NO: 294925 - DNA, 75 bp, synthetic construct
  source 1..75: mol_type = other DNA
tgtatcgcttgcaatgcaatgtagttggcctgctagcggggtatcggtaaagtttgtaccaaaggatggagtttc

SEQ ID NO: 294926 - DNA, 75 bp, synthetic construct
  source 1..75: mol_type = other DNA
aattgtttgaacgtttttatcgcaccgaaggttcccgcaaccgagccagcggcggttccgggctggggctggcga

SEQ ID NO: 294927 - DNA, 75 bp, synthetic construct
  source 1..75: mol_type = other DNA
ggtcagcgagtcgctctgcaaaacgcttgggttctcgcaaccggtcagcgtgacgctggccggacatgaccatat

SEQ ID NO: 294928 - DNA, 75 bp, synthetic construct
  source 1..75: mol_type = other DNA
gcatgtagcagataaggggttccgtatggtgaggtactacggtttcctgagtccggtgaagcgccgcttactgga

SEQ ID NO: 294929 - DNA, 75 bp, synthetic construct
  source 1..75: mol_type = other DNA
tagatgctcaggtgcggcgcgaaatcagccgctcagcggcggaatcaacgttaatgattgccgttagcccactgg

SEQ ID NO: 294930 - DNA, 75 bp, synthetic construct
  source 1..75: mol_type = other DNA
ttttattattgagaatcgcctgaccaaaccagaacaactgactggctttaatcgtgaaggttacttctttgatga

SEQ ID NO: 294931 - DNA, 75 bp, synthetic construct
  source 1..75: mol_type = other DNA
atagcgaaggctatttctttgacgaagcctcgtccagcaatgacgaactggtgtttaaacgttacgaactacgtt

SEQ ID NO: 294932 - DNA, 75 bp, synthetic construct
  source 1..75: mol_type = other DNA
cacctcgctgagactgcgggcgcaacgggcgtacgacggcctgagtgttgctggcccgtcaggtgcatacgagta

SEQ ID NO: 294933 - DNA, 75 bp, synthetic construct
  source 1..75: mol_type = other DNA
aataaaggagaagaatattacctgttcttggatgaggttcgaaggaatctgagagttatttattctgcgtatcgt

SEQ ID NO: 294934 - DNA, 75 bp, synthetic construct
  source 1..75: mol_type = other DNA
gtaactcaggtggtgcgttggttaacctgaacggcgaactgatcggtatcaacaccgcgatcctcgcaccggacg

SEQ ID NO: 294935 - DNA, 75 bp, synthetic construct
  source 1..75: mol_type = other DNA
atagtgaaggttacttcttcgatgaagccagttccagcaatggcgaactggtgtttaaacgctacgaactgcgtt

SEQ ID NO: 294936 - DNA, 75 bp, synthetic construct
  source 1..75: mol_type = other DNA
atgccgggcgatatccttaactcgacggggaccacagaaggcattctgcaactggatacacaaccgacgctggat

SEQ ID NO: 294937 - DNA, 75 bp, synthetic construct
  source 1..75: mol_type = other DNA
gtggtggattttggggagacttcatatcagaataaggcaggggaaaaacgaacacctttcctcacttatgaaact

SEQ ID NO: 294938 - DNA, 75 bp, synthetic construct
  source 1..75: mol_type = other DNA
tatcagtaccgcgttgagtcgcctggcaggtaaagaacctatgctgacccgctcgaaaattcgtgaattaaccca

SEQ ID NO: 294939 - DNA, 75 bp, synthetic construct
  source 1..75: mol_type = other DNA
gcgatggcgtcgctggcggctatgactggcaacgcatacagcaacttgccgccaacgtccgttgcggttccgtgc

SEQ ID NO: 294940 - DNA, 75 bp, synthetic construct
  source 1..75: mol_type = other DNA
ctccggttaatcaacgcgcgtgggcgtttcatgatgcgctggcgcagggttttgccgcgttgatgcgtgagcagg

SEQ ID NO: 294941 - DNA, 75 bp, synthetic construct
  source 1..75: mol_type = other DNA
ggcatccagatgcagtggcgcgaagcgttacgcctgatgcaaaacatctacgatttcactccgcaatacgttgtg

SEQ ID NO: 294942 - DNA, 75 bp, synthetic construct
  source 1..75: mol_type = other DNA
attggtatgggggagaacggcgctttatgggggggcgagtgcttgcgggtgaactatcgtgaatgccagcacctg

SEQ ID NO: 294943 - DNA, 75 bp, synthetic construct
  source 1..75: mol_type = other DNA
atcccgccgggaatatctggctttccagcctgatagcatcgcttcccatcctgttttttttctttgcgcttatta

SEQ ID NO: 294944 - DNA, 75 bp, synthetic construct
  source 1..75: mol_type = other DNA
aggttgatatgacgctggctcacaccggttacaccgcaggtcaggtattgcgtgcctggacaccgttcctgttcc

SEQ ID NO: 294945 - DNA, 75 bp, synthetic construct
  source 1..75: mol_type = other DNA
ggagcattatccgctgcgcaatcgtcgcggcctgcgctggctacatgcaccggaagtgctgctctggcggctgac

SEQ ID NO: 294946 - DNA, 75 bp, synthetic construct
  source 1..75: mol_type = other DNA
tgacgctatcagcaccttcggcagcacactgaaagaactggccctgcccatctactctataggtatggtgctggc

SEQ ID NO: 294947 - DNA, 75 bp, synthetic construct
  source 1..75: mol_type = other DNA
gacattatttcctcgctggtatcactgctctgcctgacactgttcctcaaacgctggcagccggtacgcgttttc

SEQ ID NO: 294948 - DNA, 75 bp, synthetic construct
  source 1..75: mol_type = other DNA
taacttcattgggccggaactgccagacattatctcttcgctggtatcgctgctctgcctgacactgttcctcaa

SEQ ID NO: 294949 - DNA, 75 bp, synthetic construct
  source 1..75: mol_type = other DNA
atgcctgctgttgacctttcccagttaccggaacccgccatcatcgcggagcctgattttgaggcaattctggct

SEQ ID NO: 294950 - DNA, 75 bp, synthetic construct
  source 1..75: mol_type = other DNA
gaacattgtcgagtgaaagggatacctgaggaactcatccaaggtctgtcggacaccgtagctcatcagattctc

SEQ ID NO: 294951 - DNA, 75 bp, synthetic construct
  source 1..75: mol_type = other DNA
tcaacttcctgcaattcgtagaagcgctaaacccagccgttgtgctgattgagaacgtgcctgagtaccagaaca

SEQ ID NO: 294952 - DNA, 75 bp, synthetic construct
  source 1..75: mol_type = other DNA
tggcgcatcaggcgctggaagaagaactggccgagtggctgggctattcgcgggcactgctgtttatctctggtt

SEQ ID NO: 294953 - DNA, 75 bp, synthetic construct
  source 1..75: mol_type = other DNA
ggcgtcacctatcttgagaagcacttcggagccactccgatcgtgccagcacacgaagccgcccagcgctcttgc

SEQ ID NO: 294954 - DNA, 75 bp, synthetic construct
  source 1..75: mol_type = other DNA
ttgtgggttgctgcactgaccgtcatggcaatggatgttcgccatgtgttgtatggcccgtcactgcgtagccgt

SEQ ID NO: 294955 - DNA, 75 bp, synthetic construct
  source 1..75: mol_type = other DNA
ctgacattttgggcaagagttgtgcaatacttttgtcagacgtaaatatttttgaggaacattattatattgatg

SEQ ID NO: 294956 - DNA, 75 bp, synthetic construct
  source 1..75: mol_type = other DNA
atcaaaccgtgctggcggtgcctgttgataaggctgttgagcttgtcagggatcgcagtaaattcgcggaaattt

SEQ ID NO: 294957 - DNA, 75 bp, synthetic construct
  source 1..75: mol_type = other DNA
acggaaaacgcaacagcttttacagaagtggcagacgtgggcggcgggcgatccggttaaacaggagtttgtaaa

SEQ ID NO: 294958 - DNA, 75 bp, synthetic construct
  source 1..75: mol_type = other DNA
tgatcaaactgtgctggcggtgcctgttgataaggctgtcgctcttgtcagggatcgcagtaaattcgcggaaat

SEQ ID NO: 294959 - DNA, 75 bp, synthetic construct
  source 1..75: mol_type = other DNA
gcgctgtttggcgcgagcgttgttggccagggcgtgcagtggacgatgaatgcctggcaaactcaggattgggta

SEQ ID NO: 294960 - DNA, 75 bp, synthetic construct
  source 1..75: mol_type = other DNA
atgagcggatttgcacaggggttacttgccggattcagcacggttgaccaggcaatgacccgtcgtaaggagctt

SEQ ID NO: 294961 - DNA, 75 bp, synthetic construct
  source 1..75: mol_type = other DNA
cctcagaatcagaaattgctggaaaacgggtatgcgaattttctccgtattcaaaaggctaagagtgaacaggcc

SEQ ID NO: 294962 - DNA, 75 bp, synthetic construct
  source 1..75: mol_type = other DNA
aaaaataactgaggcagaaagtctaaaagaagaaattaaacaacagcagcggaagataagtatattacagtctag

SEQ ID NO: 294963 - DNA, 75 bp, synthetic construct
  source 1..75: mol_type = other DNA
agccttcacactcatgacccgacgtggtatctgcgaaatgcagaacggcggcagaaaacctgccgccgtgttgcc

SEQ ID NO: 294964 - DNA, 75 bp, synthetic construct
  source 1..75: mol_type = other DNA
gcgcatccggtttatatgttaaacccaatgaaaatgaatattgggcacccgataaatccagccagacagcaaacc

SEQ ID NO: 294965 - DNA, 75 bp, synthetic construct
  source 1..75: mol_type = other DNA
gcctgactttgaggcaattctggctgacacaaaggccatgatgattgcgtcctatcctgccgaacagcgtgaagc

SEQ ID NO: 294966 - DNA, 75 bp, synthetic construct
  source 1..75: mol_type = other DNA
ctggcccgtcaggtgcatacgagtattttgcacgcagcgccagcggtctggtgcgtgatgcgcgggctatcagtc

SEQ ID NO: 294967 - DNA, 75 bp, synthetic construct
  source 1..75: mol_type = other DNA
ggagataaccgaacccacacagaatatggccatcagcgacatacaggcggcgcgctgtgagtcattcaccatcag

SEQ ID NO: 294968 - DNA, 75 bp, synthetic construct
  source 1..75: mol_type = other DNA
cgtgctgcgtgaagataccattccgtttcttgaagctctgaaagccagcggcaagcggcgaattttgctcactaa

SEQ ID NO: 294969 - DNA, 75 bp, synthetic construct
  source 1..75: mol_type = other DNA
ctggaaggcctggcgtttattgctggtgttgaccgtatcctcgacatggcacgtactgcgctgaacgtggtgggt

SEQ ID NO: 294970 - DNA, 75 bp, synthetic construct
  source 1..75: mol_type = other DNA
actctggcgaacgtcttccagcccggttccggggtggatatgtcgcagttggcgactgtcgatatttcgaaatat

SEQ ID NO: 294971 - DNA, 75 bp, synthetic construct
  source 1..75: mol_type = other DNA
gtgtgtcatttgtggtgctactggcaacgctgggtggtgtggggatcccgctggaaggtctggcgtttattgccg

SEQ ID NO: 294972 - DNA, 75 bp, synthetic construct
  source 1..75: mol_type = other DNA
tggtgattgccaagtgggaacacaaatttgaccgtaagaaagcgctggcttatgagcgtgaagtgctgggcaaat

SEQ ID NO: 294973 - DNA, 75 bp, synthetic construct
  source 1..75: mol_type = other DNA
agcttacggcgcgccagcgtcgatcaccagtttcgtggtgccgaccgggtattcttttaaccttgatggttcaac

SEQ ID NO: 294974 - DNA, 75 bp, synthetic construct
  source 1..75: mol_type = other DNA
tactattgccattgttcttgggatcacgctggcgaatgtttttcagcccggcgccggggtcgatatgtcgcaact

SEQ ID NO: 294975 - DNA, 75 bp, synthetic construct
  source 1..75: mol_type = other DNA
ggataaagctaatgatgaactggagcgaattgccacaaagttcagtcaggttgatgatgtaagaattgaggggtt

SEQ ID NO: 294976 - DNA, 75 bp, synthetic construct
  source 1..75: mol_type = other DNA
gacaaatgcgcctggagaagaaaatacatgtattttccagcaattatgcgctgtaccacagcatgagccaacggg

SEQ ID NO: 294977 - DNA, 75 bp, synthetic construct
  source 1..75: mol_type = other DNA
agtattgccggcaggtgacgacatttgtacggacatccccctttgcagtaaaagaaccctgttacagcaatgccg

SEQ ID NO: 294978 - DNA, 75 bp, synthetic construct
  source 1..75: mol_type = other DNA
agaaacaacatcggcaacaggtaaacccgttttacgctgggtttcccctgatttcgaccaaagtaaatatgacag

SEQ ID NO: 294979 - DNA, 75 bp, synthetic construct
  source 1..75: mol_type = other DNA
aattttgaactataccaacaccgaaatgaaagaagcgatagcgcagcgtaaaccactggttaccaccgctgggcc

SEQ ID NO: 294980 - DNA, 75 bp, synthetic construct
  source 1..75: mol_type = other DNA
gcaaaacaacagattgtctgtagtcgcagttttggtgaacgaatcacagacaaagatgccatgcaccaggctgtt

SEQ ID NO: 294981 - DNA, 75 bp, synthetic construct
  source 1..75: mol_type = other DNA
cagcaggtggcgacatttatacgaacgtcaccctttgcagtgaaagccccctgttacagcaattccgctgtggaa

SEQ ID NO: 294982 - DNA, 75 bp, synthetic construct
  source 1..75: mol_type = other DNA
agccgatcatcgtcgcgcagaactggtctctggcgggcgtttgtttgacctcggtcaggttccgaagtctgtctg

SEQ ID NO: 294983 - DNA, 75 bp, synthetic construct
  source 1..75: mol_type = other DNA
atgactgttcaggactacttattaaaatttcgcaaaatcagttcactcgaaagtctggaaaaactctacgaccat

SEQ ID NO: 294984 - DNA, 75 bp, synthetic construct
  source 1..75: mol_type = other DNA
aaacttcagcgtcattcttgagcgtacggtacgcgaactcaacggcgagtcctgcatatccctggaagaagcacc

SEQ ID NO: 294985 - DNA, 75 bp, synthetic construct
  source 1..75: mol_type = other DNA
aacgaaaccacgtttgctggagcgccaacaaattcgtgagcagcgtttgcaaaggcagcgccagcgacaatttac

SEQ ID NO: 294986 - DNA, 75 bp, synthetic construct
  source 1..75: mol_type = other DNA
tgaaaggtgaagtgtttgtggtggtcgtggcgttaggtgacgacaaaccagacctgtcaaccctgcgggcgttta

SEQ ID NO: 294987 - DNA, 75 bp, synthetic construct
  source 1..75: mol_type = other DNA
taacgaaagtacgccaatggctttcgaaaatattaagcaagttattgatgacatggcgaccgatgccaccatgtt

SEQ ID NO: 294988 - DNA, 75 bp, synthetic construct
  source 1..75: mol_type = other DNA
cgctgaaatgatcacgccagcgctggaaggtgcaacgttgagcgatggtcagctaaaagatggcggcaaaggtat

SEQ ID NO: 294989 - DNA, 75 bp, synthetic construct
  source 1..75: mol_type = other DNA
ccgataaattgcgcgtcggtgattttgccgtggcggtcggtaacccatttggccttgggcaaaccgccacctctg

SEQ ID NO: 294990 - DNA, 75 bp, synthetic construct
  source 1..75: mol_type = other DNA
taacgcaaatcgctattgccgactccgataaattgcgcgtcggtgattttgccgtggcggtcggtaacccatttg

SEQ ID NO: 294991 - DNA, 75 bp, synthetic construct
  source 1..75: mol_type = other DNA
gattatttttgtcgcgtcttccggcgtcagtttggtctgacgccgggagagtacagcgcccgttttcagggctaa

SEQ ID NO: 294992 - DNA, 75 bp, synthetic construct
  source 1..75: mol_type = other DNA
atgtcattaatcaggcgcagaaaatcagtattcagctcaatgacgggcgtgagtttgatgcgaaactgattggcg

SEQ ID NO: 294993 - DNA, 75 bp, synthetic construct
  source 1..75: mol_type = other DNA
ccgctggaagtagaagtgacgctcgataccagcacctcatcgtcagccagtgccgagatgatcacacctgcgctg

SEQ ID NO: 294994 - DNA, 75 bp, synthetic construct
  source 1..75: mol_type = other DNA
tgctggagttgtatcttcccgatgcggatcatgggaattggagcagcccctgaaggtgccgccccctcacgccct

SEQ ID NO: 294995 - DNA, 75 bp, synthetic construct
  source 1..75: mol_type = other DNA
tggaaatattgatcgctgtcatgctgtcgctctcgctgcctgcaatgacaatggccgcagataccggtgtcccgg

SEQ ID NO: 294996 - DNA, 75 bp, synthetic construct
  source 1..75: mol_type = other DNA
acagtttttgggcgtctataatacgtggagaactatcagagttttcacagcctacagatgatgaatcgcttctga

SEQ ID NO: 294997 - DNA, 75 bp, synthetic construct
  source 1..75: mol_type = other DNA
ccaactcattgatgctattcataatatcattttaattcatggtgctaaaccattcgatttgctggttccgtgttt

SEQ ID NO: 294998 - DNA, 75 bp, synthetic construct
  source 1..75: mol_type = other DNA
tctgagtgcccatttttgtgcaggttgtgatggtaacctctatccgctaaccggccatgtttttgcgaatgacga

SEQ ID NO: 294999 - DNA, 75 bp, synthetic construct
  source 1..75: mol_type = other DNA
ccggaatgttgtcatagacttggtgattctgttcatgactggtcgacacggaagggcggacgaaaacgtataggt

SEQ ID NO: 295000 - DNA, 75 bp, synthetic construct
  source 1..75: mol_type = other DNA
tccactacgttatgttgcgatgattatctggctgtatagcgcatttcgcggcgtgcagttaacttacgagcacac

SEQ ID NO: 295001 - DNA, 75 bp, synthetic construct
  source 1..75: mol_type = other DNA
actagaacttatgctttagaattagcataccttggtattaatgaagaaaatatacgattattgcgacaaacttta

SEQ ID NO: 295002 - DNA, 75 bp, synthetic construct
  source 1..75: mol_type = other DNA
aagagaataaaaccaatgatgtaaagatactagaaggttctgttctgaaggttattgatgaacttgaagataata

SEQ ID NO: 295003 - DNA, 75 bp, synthetic construct
  source 1..75: mol_type = other DNA
accttttgttgcagaaaaataccatggcatggatggtatagccatagaattaatgccagttggcactttctttat

SEQ ID NO: 295004 - DNA, 75 bp, synthetic construct
  source 1..75: mol_type = other DNA
cgatgatatgaaagaaactcttaagccgatgatgaccatgatgcttgagtcggccatgtccgcaattctgaccct

SEQ ID NO: 295005 - DNA, 69 bp, synthetic construct
  source 1..69: mol_type = other DNA
atgtctgataacgacgaattgcagcaaatcgcgcatctgcgccgtgaatacaccaaaggcggattacgc

SEQ ID NO: 295006 - DNA, 75 bp, synthetic construct
  source 1..75: mol_type = other DNA
ggttctgccgaaaggaaagggaaacagttcacagcaaatgaaaaaacacggtaggacagaacttaggaaatgcgt

SEQ ID NO: 295007 - DNA, 75 bp, synthetic construct
  source 1..75: mol_type = other DNA
cgcgatgacggcgaaagaggaccgtattgttgccgatcggctgagtcacgcctcattgctggaagctgccagttt

SEQ ID NO: 295008 - DNA, 75 bp, synthetic construct
  source 1..75: mol_type = other DNA
gccgtgatgagggggatgcacggcgcgaaaaactggtgtcactcattgcgcgttttcgtgccggagtacaggatt

SEQ ID NO: 295009 - DNA, 75 bp, synthetic construct
  source 1..75: mol_type = other DNA
gtggcgcaaggagccggacgctggctggtggcggatgatcgccagtatctgaacttttccagtaacgattattta

SEQ ID NO: 295010 - DNA, 75 bp, synthetic construct
  source 1..75: mol_type = other DNA
cagcgagggaccacacagcaggatgcgcagggacgctggcaatttgagtatcagttaacaaggaaagtcggcgat

SEQ ID NO: 295011 - DNA, 75 bp, synthetic construct
  source 1..75: mol_type = other DNA
atgagctggcaggagaaaatcaacgcggcgctcgatgcgcggcgtactgccgatgccctgcgtcgccgttatccg

SEQ ID NO: 295012 - DNA, 75 bp, synthetic construct
  source 1..75: mol_type = other DNA
cggcagttgctggcagcaaaagatgaaaccagaattgttggtggtgacttttggcaaaggatttggcgtcagtgg

SEQ ID NO: 295013 - DNA, 75 bp, synthetic construct
  source 1..75: mol_type = other DNA
gtgcgccgcgcctgcgtccttgcaccccgcgcggtatcgtcacgctgcttgagcgttacaacattgatacctttg

SEQ ID NO: 295014 - DNA, 75 bp, synthetic construct
  source 1..75: mol_type = other DNA
aaatccgcagagaacgcggaaactgctttcactgcagccagttgaagaaatatggggggtgggtaaccgtattgc

SEQ ID NO: 295015 - DNA, 75 bp, synthetic construct
  source 1..75: mol_type = other DNA
cacgcagaacggcaaaattactcagcctgcagccggtggaagaaatctggggcgtggggaaccggatagcgaaaa

SEQ ID NO: 295016 - DNA, 75 bp, synthetic construct
  source 1..75: mol_type = other DNA
gctccgcgcgcatggtggatgctgcgtacttttggcgtagagagggtatcgattctgggcgggggattagcaggt

SEQ ID NO: 295017 - DNA, 75 bp, synthetic construct
  source 1..75: mol_type = other DNA
tatcaccacagccttagacctagccaatgcctctcctagagccatcagagaccagttttcagtggttttagagag

SEQ ID NO: 295018 - DNA, 75 bp, synthetic construct
  source 1..75: mol_type = other DNA
gcttctacgcgagctgtgagaaagtgtttcgtccagacctgcgtaacaggcctgttgtggtgctcagtaataatg

SEQ ID NO: 295019 - DNA, 75 bp, synthetic construct
  source 1..75: mol_type = other DNA
ggggcgaggcatagctcctgagtggcaaatgaagcacgaaatgttgtcaccagcatatacgacacgctggactga

SEQ ID NO: 295020 - DNA, 75 bp, synthetic construct
  source 1..75: mol_type = other DNA
ttctgattattccggcggctcaatgaaggccatgcttacgcatgatatctatgatgcgacgcatagctacattct

SEQ ID NO: 295021 - DNA, 75 bp, synthetic construct
  source 1..75: mol_type = other DNA
ttcccggcggcgttggcccgatgacggttgccacgctgattgaaaacacgctacaggcgtgcgttgaatatcatg

SEQ ID NO: 295022 - DNA, 75 bp, synthetic construct
  source 1..75: mol_type = other DNA
gcgcgccgcgtctgcgtccctgcaccccgcgcggtatcgtcacgctgcttgagcgttacaacattgataccttcg

SEQ ID NO: 295023 - DNA, 75 bp, synthetic construct
  source 1..75: mol_type = other DNA
tggcagcgtgatgatctgctattagaagaaggcgcagtagaactgccggaaggagagtttaacgccgcgtttaat

SEQ ID NO: 295024 - DNA, 75 bp, synthetic construct
  source 1..75: mol_type = other DNA
tggcagcgcgatgatctgctgttagaagaaggtgcagtagagctgccggaaggagagtttaacgccgcgtttaat

SEQ ID NO: 295025 - DNA, 75 bp, synthetic construct
  source 1..75: mol_type = other DNA
ctcgcgacgctggatgtgccaaacgtgaaactgtacgacggcgcatggagtgaatggggcgcacgagcagattta

SEQ ID NO: 295026 - DNA, 75 bp, synthetic construct
  source 1..75: mol_type = other DNA
ggttaacaaagtaccgccagttattggaggcattgtcggcggtgcggaaatgggcgggattggttcatttggcgc

SEQ ID NO: 295027 - DNA, 75 bp, synthetic construct
  source 1..75: mol_type = other DNA
aacaaattgagcgctataagcatgaaggatacacctcttcagatttttttgagaataatatactcattcgtaacc

SEQ ID NO: 295028 - DNA, 75 bp, synthetic construct
  source 1..75: mol_type = other DNA
atgtttaaccgacctaaccgcaacgacgtcgatgatggcgtgcaggatattcagaatgatgtcaatcaattagct

SEQ ID NO: 295029 - DNA, 75 bp, synthetic construct
  source 1..75: mol_type = other DNA
atttggcggcggggaagataccggttccgtagatacttctggaggccaaccatctggcggttccggtggttcgtc

SEQ ID NO: 295030 - DNA, 75 bp, synthetic construct
  source 1..75: mol_type = other DNA
tgggcgcagcagctgctgcaggcgctacttccgcagcaggtgggatggatgcccttaaagctgcctttcagtctg

SEQ ID NO: 295031 - DNA, 75 bp, synthetic construct
  source 1..75: mol_type = other DNA
gaatagtggatatcggttttgatattgttggccgtgtgctggaacagtcatctatatgggaaccctcagactcaa

SEQ ID NO: 295032 - DNA, 75 bp, synthetic construct
  source 1..75: mol_type = other DNA
acgattagaagaaaagaaatttccggttggtgaaagcgagtcgaaatttaatcaggttaatattatcaaccaggg

SEQ ID NO: 295033 - DNA, 75 bp, synthetic construct
  source 1..75: mol_type = other DNA
ttgacaaaggcttttttaattcccattttcaaatgcaaatttcatttgataacggtgcacccgatctcaatatca

SEQ ID NO: 295034 - DNA, 75 bp, synthetic construct
  source 1..75: mol_type = other DNA
ctgggccaggctgcatcgtgaaggcgagcaggggctggcagaaggtcttgagctgctggccggtctgatagaccg

SEQ ID NO: 295035 - DNA, 75 bp, synthetic construct
  source 1..75: mol_type = other DNA
ccagaatgatgtcaatcaattagctgacagcctcgaatctgtattgaagtcctggggcagcgacgccaaagggga

SEQ ID NO: 295036 - DNA, 75 bp, synthetic construct
  source 1..75: mol_type = other DNA
caatttatcattcagtacaatattgcgatgaagaagcagtatgcagcacaccctgagttagctaacgatcaaaat

SEQ ID NO: 295037 - DNA, 75 bp, synthetic construct
  source 1..75: mol_type = other DNA
cacccgatctcaatatcaagccaggccagaaagttgtatttgatgtggatgttgagcacggtccgttgcccatca

SEQ ID NO: 295038 - DNA, 75 bp, synthetic construct
  source 1..75: mol_type = other DNA
cggccaagcatgactcaaaaatcagcgcggcaaaagacaccattgcgcagactgcaggtggtcagcttgcttctc

SEQ ID NO: 295039 - DNA, 75 bp, synthetic construct
  source 1..75: mol_type = other DNA
tactccagcaactggttgagcagcgtcgtcagttggttgaagataagcgccgttttgtgaaccggctaatcaaca

SEQ ID NO: 295040 - DNA, 75 bp, synthetic construct
  source 1..75: mol_type = other DNA
ggtcggagtttaatcttgatgaaaaggtttggcattttcctgctgatcgagcaaaaaatggtgaggagatagaca

SEQ ID NO: 295041 - DNA, 75 bp, synthetic construct
  source 1..75: mol_type = other DNA
cattcatgacttacgacgtacgatgcgtacccagatggcagcattggggattgatcctgtaatagctgaaagatg

SEQ ID NO: 295042 - DNA, 75 bp, synthetic construct
  source 1..75: mol_type = other DNA
agtatggaggattattctacttataaagaaaaggtcattgatagagatatcacttacaatccaacaccagaagaa

SEQ ID NO: 295043 - DNA, 75 bp, synthetic construct
  source 1..75: mol_type = other DNA
agggacacgcagccaggtgaacgcgtcatggcatcagcatcagtcgagtccccggggccagtagtaaaaatagtg

SEQ ID NO: 295044 - DNA, 75 bp, synthetic construct
  source 1..75: mol_type = other DNA
cttccttaatcacgaaactgtgaagacaatagatcgtctttatcatcagacggggattggcgcagtccggtgggg

SEQ ID NO: 295045 - DNA, 75 bp, synthetic construct
  source 1..75: mol_type = other DNA
acagccgatcgtcagagtaaccacgaacaggatgagtttgagggtgatagtttaactggcagtaaaaaatcttga

SEQ ID NO: 295046 - DNA, 75 bp, synthetic construct
  source 1..75: mol_type = other DNA
ttatagatcagtatttttctattattaaaaatgatattcctgatcttaatagtcttattgttttacttctggcgt

SEQ ID NO: 295047 - DNA, 75 bp, synthetic construct
  source 1..75: mol_type = other DNA
ttttaggtatcatacttttcttttctataaatgcctatgctggtcaattagatagtagcgggctacttgattctt

SEQ ID NO: 295048 - DNA, 75 bp, synthetic construct
  source 1..75: mol_type = other DNA
tgtggcgttgtaagccgatggataatccatggaccttcacttccctgctgaaaaaggcagtcagtgcagttttac

SEQ ID NO: 295049 - DNA, 75 bp, synthetic construct
  source 1..75: mol_type = other DNA
tgtggagttgtaaaacctctgacacaccatggactttcagccgcctgctgaaaaaggctatctgtgcggttttac

SEQ ID NO: 295050 - DNA, 75 bp, synthetic construct
  source 1..75: mol_type = other DNA
ctcagatacgtaaacaaacagctactcgtcgggataaccgcgaacatgatgattttgccggagatagcttatccg

SEQ ID NO: 295051 - DNA, 75 bp, synthetic construct
  source 1..75: mol_type = other DNA
gagcttgccagacagagcaggcgatactgcttggcgctaccggtgagcgcgtggcgcagtggaacaactggttgc

SEQ ID NO: 295052 - DNA, 75 bp, synthetic construct
  source 1..75: mol_type = other DNA
gacgaagtattaggtcattctgttccacgtgctgaatatgagaaacgcgctaagtttaaccaagatgactacaag

SEQ ID NO: 295053 - DNA, 75 bp, synthetic construct
  source 1..75: mol_type = other DNA
tgaacgtgttaagaggaaacagactactccacgtcaggataatatttttaaacgcttcacaactcttgtcataga

SEQ ID NO: 295054 - DNA, 75 bp, synthetic construct
  source 1..75: mol_type = other DNA
ctgaaccagaagagattgtattaccaaaaacaagctccagttcttctgccaatgaaacgcaaagacctgtacttg

SEQ ID NO: 295055 - DNA, 75 bp, synthetic construct
  source 1..75: mol_type = other DNA
ctgaaccagaagagattgttttaccagaaacacgctccggttcttctgccagtgtaccgcaaagacctgttctgg

SEQ ID NO: 295056 - DNA, 75 bp, synthetic construct
  source 1..75: mol_type = other DNA
aaagcggcggttgctctggataatgaagaaaaagcactatggcttgccaaagccgctgaaacaaaccgtcctcca

SEQ ID NO: 295057 - DNA, 75 bp, synthetic construct
  source 1..75: mol_type = other DNA
atgaaagaaaggataagactactccacgtcaggataatattttcaaacgtttcacaactcttgtcatagatttct

SEQ ID NO: 295058 - DNA, 75 bp, synthetic construct
  source 1..75: mol_type = other DNA
aagtctacaaaacattcagcgaacttgatcttgaaattgtcgttgatatcagaagctttacgataacacatcttg

SEQ ID NO: 295059 - DNA, 75 bp, synthetic construct
  source 1..75: mol_type = other DNA
ttctgattctgggacaaatactatcctgaaaacatcctcctctcaaaaccaaaacagggcatccagaagcgcccc

SEQ ID NO: 295060 - DNA, 75 bp, synthetic construct
  source 1..75: mol_type = other DNA
ctgtacgattaattatgaaccccagaggcctcgctccggggaaaacccgtctgttgaggtatcgggctatacgcc

SEQ ID NO: 295061 - DNA, 75 bp, synthetic construct
  source 1..75: mol_type = other DNA
atcttatcagtgaagaacatgataaacgtattgctgaaaattatgtctttgacgaagtattaggccatcctgttc

SEQ ID NO: 295062 - DNA, 75 bp, synthetic construct
  source 1..75: mol_type = other DNA
caaccgattcatgcagagtcagaaccatacagaagaccagccgtaaaatcttaccatgcccccaataaggtcagt

SEQ ID NO: 295063 - DNA, 75 bp, synthetic construct
  source 1..75: mol_type = other DNA
catttcatcttagctcctgctaatgctccagaatatatcgtaaaagactctacagccttatggaatgaagttgaa

SEQ ID NO: 295064 - DNA, 75 bp, synthetic construct
  source 1..75: mol_type = other DNA
ctccagaatatatcgtaaaagactctacagccttatggaatgaagttgaaagagtcgagcgtcaacaaaatggtc

SEQ ID NO: 295065 - DNA, 75 bp, synthetic construct
  source 1..75: mol_type = other DNA
gtattctcggcgagctggatcgtgcggggttactgaaccgtgatgtgaaaaacgtacttggcctgacgttgccgc

SEQ ID NO: 295066 - DNA, 75 bp, synthetic construct
  source 1..75: mol_type = other DNA
cggttcctgctccgggatgtttaccgctaactcaatgaactgcctgaccgaagcgctgggtctgtcgcagccggg

SEQ ID NO: 295067 - DNA, 75 bp, synthetic construct
  source 1..75: mol_type = other DNA
gtattggacgtataccaatactgataaatatgagactgcctcttcaatgattcaatacaactattgggtgttcat

SEQ ID NO: 295068 - DNA, 75 bp, synthetic construct
  source 1..75: mol_type = other DNA
gcctgaatattccggtgatctttgtttccggcggcccgatggaggccgggaaaaccaaactgtccgatcagataa

SEQ ID NO: 295069 - DNA, 75 bp, synthetic construct
  source 1..75: mol_type = other DNA
atgccggtaaacgcattgttgaattgaccaaacgttactacgaacaggatgatgaaagcgcactgccgcgtaaca

SEQ ID NO: 295070 - DNA, 75 bp, synthetic construct
  source 1..75: mol_type = other DNA
accgtgaacgtcaggtttcctttgcgctgcgtgcctacgccagcctggcaaccagcgccgacaaaggcgcggtgc

SEQ ID NO: 295071 - DNA, 75 bp, synthetic construct
  source 1..75: mol_type = other DNA
tttctgtcatttatgacttggataacggcaatacaatcgaatactacattaataatcaggaagaggctgagaaaa

SEQ ID NO: 295072 - DNA, 75 bp, synthetic construct
  source 1..75: mol_type = other DNA
ggcggcttactcggcggtccggtcgtcggtgggctggttggtctgaccggcggcttacatcgatattcgatgggg

SEQ ID NO: 295073 - DNA, 75 bp, synthetic construct
  source 1..75: mol_type = other DNA
gatgatccagggcgcagacccgaaagtttctgactcccagagcgatcaggttgaacgttccgcgtgtccgacctg

SEQ ID NO: 295074 - DNA, 75 bp, synthetic construct
  source 1..75: mol_type = other DNA
ggaaatcgacttcaccatgagtgatatcgacaaactttcgcgtaaagtcccgcagttatgcaaagttgcgccgag

SEQ ID NO: 295075 - DNA, 75 bp, synthetic construct
  source 1..75: mol_type = other DNA
caaagacggcggcctggcggtgctctacggtaatttcgcagaaaacggctgcatcgttaaaaccgcgggcgtcga

SEQ ID NO: 295076 - DNA, 75 bp, synthetic construct
  source 1..75: mol_type = other DNA
agctcaggaaaaatttatgataaagcgcttaccccggctcaggcggctaaggcatgttccaataacaccaataaa

SEQ ID NO: 295077 - DNA, 75 bp, synthetic construct
  source 1..75: mol_type = other DNA
ttacaagagtggtgatagcattatgaatccatttggtggtaagttaactgtggatgcagcagagggcgccgctgt

SEQ ID NO: 295078 - DNA, 75 bp, synthetic construct
  source 1..75: mol_type = other DNA
aacaggaaaactgcaagctaaggccctgactccggctgaagctgccacccactgtaaaccaggcaccaacaacat

SEQ ID NO: 295079 - DNA, 75 bp, synthetic construct
  source 1..75: mol_type = other DNA
gtgggttatgtgattgtggtcatcggcgctttactggcgacggcctcagccatcaacgccaacctgtttgccgtg

SEQ ID NO: 295080 - DNA, 75 bp, synthetic construct
  source 1..75: mol_type = other DNA
ggcgctctcgttgctgtacctgatgacgctggcggtgagtatcgcgatggttgcccgtgcctttggtgcttatgc

SEQ ID NO: 295081 - DNA, 75 bp, synthetic construct
  source 1..75: mol_type = other DNA
atctcgttttcaaccggaccaattcaaaagaattggttggtaaaacggcggtttacgatcgagatgaaactgtta

SEQ ID NO: 295082 - DNA, 75 bp, synthetic construct
  source 1..75: mol_type = other DNA
cccggaattttccgtcgatatcctcgcggataagggcgaaatactcgcagccgtgggacgccgtaaggaaggggc

SEQ ID NO: 295083 - DNA, 75 bp, synthetic construct
  source 1..75: mol_type = other DNA
tcacgccgtagtcggcttaccgctggttgaaacgtatgaattattaagtaattttaacgcactgcgtgagaaaag

SEQ ID NO: 295084 - DNA, 75 bp, synthetic construct
  source 1..75: mol_type = other DNA
cgatatctgaaaatagcaaaggaaaacttcgtagccttacagaaaagctgaattttccacgcggaaaagcacctg

SEQ ID NO: 295085 - DNA, 75 bp, synthetic construct
  source 1..75: mol_type = other DNA
tctaaaaaattcagcgccaaagggctgaatgaggcgctggctgataccacatggcaggactgtattaatcattaa

SEQ ID NO: 295086 - DNA, 75 bp, synthetic construct
  source 1..75: mol_type = other DNA
tcacaaacagggctttctgaacctggcgtcagtatcaatggtaagaaccatcctctggatgaaacagcctttact

SEQ ID NO: 295087 - DNA, 75 bp, synthetic construct
  source 1..75: mol_type = other DNA
agttacttttgctcagtttatggagcaaaaggggctcccggtcgtaccatcctggcgggtgaatacgctggcaga

SEQ ID NO: 295088 - DNA, 75 bp, synthetic construct
  source 1..75: mol_type = other DNA
gtctggtcgctgcaaccggcgcatatttccgtctctgcgccccccagctccggtgcgttcttctcctgtatcggg

SEQ ID NO: 295089 - DNA, 75 bp, synthetic construct
  source 1..75: mol_type = other DNA
atgttattcaacaacaacgactggaaactatcagtcaccgacatcaatccctacgaaaatactgtgagtctggac

SEQ ID NO: 295090 - DNA, 75 bp, synthetic construct
  source 1..75: mol_type = other DNA
agaacaagcgagctgaggctgagcgtatcgctaaagagcagcgcattcaggccgagcgcatgcgtgaagagaaca

SEQ ID NO: 295091 - DNA, 75 bp, synthetic construct
  source 1..75: mol_type = other DNA
cggcttctcatctgttcggtaaattatcggacgccaatccgcttaagatgatgtcaacggtaggctatgctgcga

SEQ ID NO: 295092 - DNA, 75 bp, synthetic construct
  source 1..75: mol_type = other DNA
tgatgtgagtagaaaccggctgtgcagcctgccggtgctgcccgccgggttggtgatgcttgatgtgagtaataa

SEQ ID NO: 295093 - DNA, 75 bp, synthetic construct
  source 1..75: mol_type = other DNA
ctctggctgaagctggcgtgaccattggcaacttcttcagtaatgacttgatgaccgcctatggtcgccgccaga

SEQ ID NO: 295094 - DNA, 75 bp, synthetic construct
  source 1..75: mol_type = other DNA
cgtacccgttgtctctggctatcaagaccctcattccgggatacctgtcaggcttaccgtccaccagcagcgcgg

SEQ ID NO: 295095 - DNA, 75 bp, synthetic construct
  source 1..75: mol_type = other DNA
ttgttcgtcatagtcgattatgcgcgcatgacatttatgcgattcctctgtgccagtcatgccagcgtgacattg

SEQ ID NO: 295096 - DNA, 75 bp, synthetic construct
  source 1..75: mol_type = other DNA
ttgatatggattattggcgcaatcttactcagccttattgtggcaatggtcatgaagcgcaataaaaccgtataa

SEQ ID NO: 295097 - DNA, 75 bp, synthetic construct
  source 1..75: mol_type = other DNA
gatccgcctgcgtcatgatattcacgcctcgttgccgattcttattgttggtacgttggttatgttgctggtgat

SEQ ID NO: 295098 - DNA, 75 bp, synthetic construct
  source 1..75: mol_type = other DNA
cacagcaggaagggtacatacttatcggccttgatctcacatacagtgatggctctacagcacataaacccgtta

SEQ ID NO: 295099 - DNA, 75 bp, synthetic construct
  source 1..75: mol_type = other DNA
cagaacgagacaatagcgcggtgttgttgtgctggcatcacgataaccattaccggatgcgtggttttaatgagc

SEQ ID NO: 295100 - DNA, 75 bp, synthetic construct
  source 1..75: mol_type = other DNA
aaagaggcggatattcgcccgtatgacgatcgcgctacagcatatgttcagatgatggaagaacgcgccgcgccg

SEQ ID NO: 295101 - DNA, 75 bp, synthetic construct
  source 1..75: mol_type = other DNA
agagccgactttcaggtgcaaatcgtaacgcactcattgcgggaggaattatggcaaacactgctgagatattca

SEQ ID NO: 295102 - DNA, 75 bp, synthetic construct
  source 1..75: mol_type = other DNA
aacatgtttgccgcctggtgcgtgaatcttctcgtgttgccgcctggcgtctggggccgagtggcttgagtaccg

SEQ ID NO: 295103 - DNA, 75 bp, synthetic construct
  source 1..75: mol_type = other DNA
gttatcctcgcatccacaaaatctctctgatgggcagattcgtcagggactttcggcaatggtgcaactgcttga

SEQ ID NO: 295104 - DNA, 75 bp, synthetic construct
  source 1..75: mol_type = other DNA
gttatcctcacatccgcaaaatctctctgatgggcagattcgtcagggactttccgcaatggtgcaactgcttga

SEQ ID NO: 295105 - DNA, 75 bp, synthetic construct
  source 1..75: mol_type = other DNA
tgtcgataaatgggcaatacgaactacggcaatgattgccagagaaattggtaaacagaacaacaaggcttcctg

SEQ ID NO: 295106 - DNA, 75 bp, synthetic construct
  source 1..75: mol_type = other DNA
cattgaggttgcaatggaggccggacgccgtggtgtggagtccgtaccggcattgctgaaaaaaatgttctcgcg

SEQ ID NO: 295107 - DNA, 75 bp, synthetic construct
  source 1..75: mol_type = other DNA
tagttatattaaatcgccaatatcatctccgacattacatgatatttctattcgggcaaaatatcgagctctgga

SEQ ID NO: 295108 - DNA, 75 bp, synthetic construct
  source 1..75: mol_type = other DNA
ttatataagttaagcactcattggttcactgtcagaggaggcgagaaaggtattactgttttccccaatggtgtt

SEQ ID NO: 295109 - DNA, 75 bp, synthetic construct
  source 1..75: mol_type = other DNA
gttaaagtaaaagaaataaatattgagtttaatgataatagtttaataaaaaacataattcatgacgggtatgga

SEQ ID NO: 295110 - DNA, 75 bp, synthetic construct
  source 1..75: mol_type = other DNA
ccataaaaaaacactcagtcacgttcaaaaatcaatcttcattaggagtaattgatcattatgccagactaacaa

SEQ ID NO: 295111 - DNA, 75 bp, synthetic construct
  source 1..75: mol_type = other DNA
cgccgatagggctcttactgaacctgtccgtcgtcgatgagcccatcatgacaatgtacataccaggtatgccaa

SEQ ID NO: 295112 - DNA, 75 bp, synthetic construct
  source 1..75: mol_type = other DNA
atcacagttttgtagtatccgtcttcgatgatgtggttcgtgttacagatcctaacttcggatatgctgattttt

SEQ ID NO: 295113 - DNA, 75 bp, synthetic construct
  source 1..75: mol_type = other DNA
tatcaatttttcaccagcttctggtctttctggctgtcatgcgcaaaacatatggctttaataaaaaactggatt

SEQ ID NO: 295114 - DNA, 75 bp, synthetic construct
  source 1..75: mol_type = other DNA
aacgagcaactttccgagttgaccgggatattgccgcacaagtgttctgctgcaaaaagtgttctggtaaagcgt

SEQ ID NO: 295115 - DNA, 75 bp, synthetic construct
  source 1..75: mol_type = other DNA
tctggatggcagcattgacgcccgtgaagatgattacgagcaaaaagccgccgatccaaaattcaccggtttcca

SEQ ID NO: 295116 - DNA, 75 bp, synthetic construct
  source 1..75: mol_type = other DNA
gtggaagagcgggaaaatatcgcccctggttttagccagaaaatgacggcgaatttacagcctggcgaatacgat

SEQ ID NO: 295117 - DNA, 75 bp, synthetic construct
  source 1..75: mol_type = other DNA
aagggctatcttcccagcgagacattatccttggagtgaaatcatttgcggaaaaggaaaatcatgatattgaaa

SEQ ID NO: 295118 - DNA, 75 bp, synthetic construct
  source 1..75: mol_type = other DNA
agagcggcagcaagtgggggacagcagaagacctgactgaaccgccccgggtttcctggagagtgttttatctgt

SEQ ID NO: 295119 - DNA, 75 bp, synthetic construct
  source 1..75: mol_type = other DNA
atggcgaaagctggtctgcgggaacagagccgactttcaggtgcaaatcgtaacgcactcattgcggaaggaatt

SEQ ID NO: 295120 - DNA, 75 bp, synthetic construct
  source 1..75: mol_type = other DNA
tcaggtaaacacaaaagacaaactaacaaaagacaatataaaaccttattcgtccgagaattctggcgaatcctc

SEQ ID NO: 295121 - DNA, 75 bp, synthetic construct
  source 1..75: mol_type = other DNA
gccataccgatctgtgggacttccaggcaaatattgaaggctctcagaaaattgtcgatctgctgcgtccacaat

SEQ ID NO: 295122 - DNA, 75 bp, synthetic construct
  source 1..75: mol_type = other DNA
gccgctgatattccgcaggtcaaagtcactgtgacagataaacagtgcgagccgatgaccattacggttaacgcc

SEQ ID NO: 295123 - DNA, 75 bp, synthetic construct
  source 1..75: mol_type = other DNA
atcgacgctgacggcaaaattgaacacgtatttgatgatttcaaaaccagcaatcaccacgacgtggtgcttaac

SEQ ID NO: 295124 - DNA, 75 bp, synthetic construct
  source 1..75: mol_type = other DNA
gcactatcactgcgccgagttacaccattgcaaatgccgagtacaacaatgtcggtgacgccctggatgcgctcg

SEQ ID NO: 295125 - DNA, 75 bp, synthetic construct
  source 1..75: mol_type = other DNA
cccagaatacccagagcattactaacctgaacaatcaggtgacgaatctggatactcgcgttaccaatatcgaaa

SEQ ID NO: 295126 - DNA, 75 bp, synthetic construct
  source 1..75: mol_type = other DNA
gggtgggctgttgtcgtcgtttggggtacaggctcaggcaggaaaggacaacggtgaaggcgtcgattatggcct

SEQ ID NO: 295127 - DNA, 75 bp, synthetic construct
  source 1..75: mol_type = other DNA
atcttggcgggatgatacaggcgaacctggaagaaatcaggatacaggaagaaacattgcagaaactgaacgcga

SEQ ID NO: 295128 - DNA, 75 bp, synthetic construct
  source 1..75: mol_type = other DNA
tgaaagaactgctggagaggtatcagaaaacgaccgtcgatacgatggacgcgcactggaaaaccgtactgaaaa

SEQ ID NO: 295129 - DNA, 75 bp, synthetic construct
  source 1..75: mol_type = other DNA
gctatagccctgttcacagcctcgacagagaaatcgctggaaaaacaccgggaaggggtgaaagaggcgatgatg

SEQ ID NO: 295130 - DNA, 75 bp, synthetic construct
  source 1..75: mol_type = other DNA
cgtttaatgcagcttcgtttcgtgaaatctgagtctactttcacctattttgaagcgacccgtggttatatcgaa

SEQ ID NO: 295131 - DNA, 75 bp, synthetic construct
  source 1..75: mol_type = other DNA
ccaaagaaacggtccgtaagctgatgactcaggccagtctgtgggtcccacgtaagcaacgtgcgccaaaaattc

SEQ ID NO: 295132 - DNA, 75 bp, synthetic construct
  source 1..75: mol_type = other DNA
atattgaaatgcatggtaagccactggcgctctatagcgacaaagccagtgtcttcaggatcaacaataaaaatg

SEQ ID NO: 295133 - DNA, 75 bp, synthetic construct
  source 1..75: mol_type = other DNA
tcggatcgcactgtccgcatccaggtaggttatgggctggaagaaaaggtaaccgatgctctgggctggagatat

SEQ ID NO: 295134 - DNA, 75 bp, synthetic construct
  source 1..75: mol_type = other DNA
gctacaagagtttttgacaattggcgtttaggagatgccaaacgtaatgatgggatactgatcgttgttgcctgg

SEQ ID NO: 295135 - DNA, 75 bp, synthetic construct
  source 1..75: mol_type = other DNA
gaattattattttgttttttgcaaagtgttaattttattgtatctaacatactattatcatatggtttttggagt

SEQ ID NO: 295136 - DNA, 75 bp, synthetic construct
  source 1..75: mol_type = other DNA
ggaaggggggaaagaggcgatgatgcagcacaggaaggacgtgttaaagctggcagggaatacgggcatgatgtt

SEQ ID NO: 295137 - DNA, 75 bp, synthetic construct
  source 1..75: mol_type = other DNA
agtgtttatggcttgagtcagcttatttgcgtagaagaatcgaaaaaatagaatcacgtcttgcaatgcttgaaa

SEQ ID NO: 295138 - DNA, 75 bp, synthetic construct
  source 1..75: mol_type = other DNA
aatgggatgataaatacgcgccagtgatggcggtaaggatgatcactaaagttgtggatggcgtcgaaattgaga

SEQ ID NO: 295139 - DNA, 75 bp, synthetic construct
  source 1..75: mol_type = other DNA
tcgtaagggcattaacgatctcaaagcacaacttaatcaatggatggagatctttgatcagaatttaaatgctgc

SEQ ID NO: 295140 - DNA, 75 bp, synthetic construct
  source 1..75: mol_type = other DNA
gcgatgaggcgcagcgtgatgaccctaaacccgatccggctttcagtgagccaaaacctgaaccaaaggagaaat

SEQ ID NO: 295141 - DNA, 75 bp, synthetic construct
  source 1..75: mol_type = other DNA
agttgatataactcttcttacaggttacacgaagtattcaacagagcgcacgaccagtggtattgggcagctaga

SEQ ID NO: 295142 - DNA, 75 bp, synthetic construct
  source 1..75: mol_type = other DNA
gagacgaatctttagcagcctggattaaaaggattattcgcaaagaactacagcaacgcggatatgaagtcaaaa

SEQ ID NO: 295143 - DNA, 75 bp, synthetic construct
  source 1..75: mol_type = other DNA
gccgcagtatgaaggcaaaatcggcgagcaggaatacttcgataaaggcgtactgatgatcgcgatggtgaaagc

SEQ ID NO: 295144 - DNA, 75 bp, synthetic construct
  source 1..75: mol_type = other DNA
cgagctgccgttgattgccaacaccatcgcccgtaagcgactgtacgaaatgaacgtggttatctctgataccgc

SEQ ID NO: 295145 - DNA, 75 bp, synthetic construct
  source 1..75: mol_type = other DNA
aaactgctgacctggcgtgaagagaccggcaaaaccgcgttcgaaaccgcgccgcagtatgaaggcaaaatcggc

SEQ ID NO: 295146 - DNA, 75 bp, synthetic construct
  source 1..75: mol_type = other DNA
agtttcatgccagaaaagttacgacacgcgagttctctgttatcagcgaggcggtgtcactgtttccacaattca

SEQ ID NO: 295147 - DNA, 75 bp, synthetic construct
  source 1..75: mol_type = other DNA
atttgcaaccatctttaagagggttacaaatttccccgaaagcccgctccctcatactctggacagaacgcggag

SEQ ID NO: 295148 - DNA, 75 bp, synthetic construct
  source 1..75: mol_type = other DNA
aaaacggttttaaagttggcacttatgaagagctgatcccgcaggcggatctggtcgttaacctgacgccagaca

SEQ ID NO: 295149 - DNA, 75 bp, synthetic construct
  source 1..75: mol_type = other DNA
atatcacatattcctggtgcaaagtgtttgtttgtggcaaccagtgattttgcagatgcagagaaaagactttct

SEQ ID NO: 295150 - DNA, 75 bp, synthetic construct
  source 1..75: mol_type = other DNA
aaaaagttatttttggtggacgactagctgagtaccgttactacgatatgcatcaagtcattagatctgccttta

SEQ ID NO: 295151 - DNA, 75 bp, synthetic construct
  source 1..75: mol_type = other DNA
ccggattatttggatgtacgtttgctcgcttggcaacggacgcagggaaaaaatgtcttattattgaaaaacgag

SEQ ID NO: 295152 - DNA, 75 bp, synthetic construct
  source 1..75: mol_type = other DNA
ccgggagccgggtcgggctgcttgtgaaagggatgaaactgctggggaaatgggggctgacagtgattgtcatca

SEQ ID NO: 295153 - DNA, 75 bp, synthetic construct
  source 1..75: mol_type = other DNA
cgtgatggtttgtttgcctataacctggctgtggtggttgatgatcactttcagggcgtgactgaaattgtccgt

SEQ ID NO: 295154 - DNA, 75 bp, synthetic construct
  source 1..75: mol_type = other DNA
aagagatgacagacacacactatattggccgcttcgccccctctccttccggcgagcttcattttggttctctga

SEQ ID NO: 295155 - DNA, 75 bp, synthetic construct
  source 1..75: mol_type = other DNA
caaatctcgctgtaccagctttttgactggcaagtgccagattacattcatttgccgctggcacttaacgcacaa

SEQ ID NO: 295156 - DNA, 75 bp, synthetic construct
  source 1..75: mol_type = other DNA
agagcagtacgttggtcaacaatgactatgtcagaatggcttgaggaactacttaaagataatgaatctatggaa

SEQ ID NO: 295157 - DNA, 75 bp, synthetic construct
  source 1..75: mol_type = other DNA
ggaagggatgagttgcggactggaatatcttgctaaatttatttctcagtactggactatatgctggccatccca

SEQ ID NO: 295158 - DNA, 75 bp, synthetic construct
  source 1..75: mol_type = other DNA
gaagatatacatcatattttcgcaaaaaccagacatatcatcagtgagataaccgagttactgagtcgttttttg

SEQ ID NO: 295159 - DNA, 75 bp, synthetic construct
  source 1..75: mol_type = other DNA
aagcgatggatgcacgaaacgcgctacggctggcttgcatggcggctagttatctactgcgccgtcgggtggggg

SEQ ID NO: 295160 - DNA, 75 bp, synthetic construct
  source 1..75: mol_type = other DNA
atctttttactttttccatacgcatgaaaacatacatcatattttcgcaaaaacaagaaatactatcagtgaaat

SEQ ID NO: 295161 - DNA, 75 bp, synthetic construct
  source 1..75: mol_type = other DNA
cagtttcaccgttatcagttgaacccggtagcagggagacaaggaaggcgttgccggcggaacagcaggagtttt

SEQ ID NO: 295162 - DNA, 75 bp, synthetic construct
  source 1..75: mol_type = other DNA
cgatgcctatcgcgaagcactcgcctggttacatgagcaaggactaagttattactgcacctgcacgcgcgcgcg

SEQ ID NO: 295163 - DNA, 75 bp, synthetic construct
  source 1..75: mol_type = other DNA
gcggcagatggctaaaaccagaacagtggaaagttttgttaatcagcggtcatgccgtggcgacaaaacaggaag

SEQ ID NO: 295164 - DNA, 75 bp, synthetic construct
  source 1..75: mol_type = other DNA
gataaagacaaacccgttacgatccgcatcgccgattacaagcggaatcttgatcaaaatgccaaatttcacgcg

SEQ ID NO: 295165 - DNA, 75 bp, synthetic construct
  source 1..75: mol_type = other DNA
aaaagcgcaatcacaggctgaaattgagcccgagctgcctctggaaaccgctgagctactccagcgactggaaac

SEQ ID NO: 295166 - DNA, 75 bp, synthetic construct
  source 1..75: mol_type = other DNA
tcttttggtggaactaagaaattttttgtggataactttaaatcacaagaaaaggcattctggcatggttgcgaa

SEQ ID NO: 295167 - DNA, 75 bp, synthetic construct
  source 1..75: mol_type = other DNA
gtgatggaaaacacgctggggatcagcaaaagtcaggcggattccgatcacaggagtcaaaattgccatataacc

SEQ ID NO: 295168 - DNA, 75 bp, synthetic construct
  source 1..75: mol_type = other DNA
cgctcaaaatgccaaatttcacgcgatggtcgctgatatctcccgacaggttcagtggtgcggcagatggctaaa

SEQ ID NO: 295169 - DNA, 75 bp, synthetic construct
  source 1..75: mol_type = other DNA
gaatctattgatacaacaacgccacacgggtcgttcctctttaacctttttggcacgctcgcggagtacgaaaga

SEQ ID NO: 295170 - DNA, 75 bp, synthetic construct
  source 1..75: mol_type = other DNA
ctgaacttcgcgaaggtgatgtactgatagtctggaaactggatcgacttggtcgttcactctcacatttgctcc

SEQ ID NO: 295171 - DNA, 75 bp, synthetic construct
  source 1..75: mol_type = other DNA
tattcaaagcattggcggtatttacgacggtcattgccgggaattgcatcatggaccagacaacgccgcagtgcg

SEQ ID NO: 295172 - DNA, 75 bp, synthetic construct
  source 1..75: mol_type = other DNA
tgattttgtggtgctctgtgacgttgtcactgctctattttattgtctatatgtgttcatggagtactctgctct

SEQ ID NO: 295173 - DNA, 75 bp, synthetic construct
  source 1..75: mol_type = other DNA
gaactcacacttggcaaggtatctcatctatctctgtctgaggtacgtagcctcgctgaggatactcgaagaaaa

SEQ ID NO: 295174 - DNA, 75 bp, synthetic construct
  source 1..75: mol_type = other DNA
tataatgatgaagaaagttcggcaacgttgtttattaatccgcaatggaattcagctttcgatgcgaagtcatga

SEQ ID NO: 295175 - DNA, 75 bp, synthetic construct
  source 1..75: mol_type = other DNA
ggtagaactgctgctggatcaggcgctgctggcagaacgcggtacgctggaagatccgaacctgtttattcgtcg

SEQ ID NO: 295176 - DNA, 75 bp, synthetic construct
  source 1..75: mol_type = other DNA
agcttatctctaacgcctccgatgcggcggacaagctgcgtttccgcgcgctctctaacccggatctgtacgaag

SEQ ID NO: 295177 - DNA, 75 bp, synthetic construct
  source 1..75: mol_type = other DNA
cgcggaaaaataccagaccttctggcaacagtttggcctggtactgaaagaaggtccggcggaagatttcgctaa

SEQ ID NO: 295178 - DNA, 75 bp, synthetic construct
  source 1..75: mol_type = other DNA
cgccttatccgtcctggggggctgggcttggatcttgtaggcctgataagacgcgccagcgtcgcatcaggcact

SEQ ID NO: 295179 - DNA, 75 bp, synthetic construct
  source 1..75: mol_type = other DNA
cagtggttagcgcccatttctggccgctggcgatgaccgcgatcctcggttatctggtcaatagtgcggtgagaa

SEQ ID NO: 295180 - DNA, 75 bp, synthetic construct
  source 1..75: mol_type = other DNA
cgtggcggtgtttttgttgagtgatctcatcggcgacgtgctgaataacccggacctggcaccgttgattaaaac

SEQ ID NO: 295181 - DNA, 75 bp, synthetic construct
  source 1..75: mol_type = other DNA
ctgaattgtatattacctttttcgcgctgctgaaactgggcgttgcgccggtgctggcgctgttcagccatcagc

SEQ ID NO: 295182 - DNA, 75 bp, synthetic construct
  source 1..75: mol_type = other DNA
catatcaaagccaaatatacccttgatggtaaagagctcaccgcgccaattagcgcccatcagcgggtaggggaa

SEQ ID NO: 295183 - DNA, 75 bp, synthetic construct
  source 1..75: mol_type = other DNA
cgagtggattgggatttcagagaagcggagcggcttgctaaagagcaggagaaagcagcgggtaaaggagactga

SEQ ID NO: 295184 - DNA, 75 bp, synthetic construct
  source 1..75: mol_type = other DNA
gtccgtctgactcaccgtctgaccgatacgccagcgatcgtttcgaccgacgcggacgaaatgagcacccagatg

SEQ ID NO: 295185 - DNA, 75 bp, synthetic construct
  source 1..75: mol_type = other DNA
tcataaacacggcctgaaactgtacgttcaacgcgtgtttatcatggacgacgctgaacagtttatgccgaacta

SEQ ID NO: 295186 - DNA, 75 bp, synthetic construct
  source 1..75: mol_type = other DNA
tatgtaatcatgaagttgtcggaaaactatccgtacaagggagtgtatgaaaaatgtcggcactgttgcaaagtt

SEQ ID NO: 295187 - DNA, 75 bp, synthetic construct
  source 1..75: mol_type = other DNA
cggtggttagcgcccatttctggccgctggcgatgaccgcgatcctcggttatctggtcaatagtgcggtaagaa

SEQ ID NO: 295188 - DNA, 75 bp, synthetic construct
  source 1..75: mol_type = other DNA
agaaggcgatgtgatcgatccactgccgatctacacgccgggctttgaaagttatcaggatccgctgaacaaaca

SEQ ID NO: 295189 - DNA, 75 bp, synthetic construct
  source 1..75: mol_type = other DNA
ggtggcgcactggccgctggttaccctggaatctgtcggggaaggcagcatgttttcccggctgagtgattattt

SEQ ID NO: 295190 - DNA, 75 bp, synthetic construct
  source 1..75: mol_type = other DNA
gttgtccctgttaatggagatataaaactatctattgtagtttactttttccttattacgattatttccatattc

SEQ ID NO: 295191 - DNA, 75 bp, synthetic construct
  source 1..75: mol_type = other DNA
cgagatttgagtgtaagaccatctatgagatgaccagcgaactggcaaaacgtcttggtgtggagcaacagttca

SEQ ID NO: 295192 - DNA, 75 bp, synthetic construct
  source 1..75: mol_type = other DNA
aagccttccgtgaagatccgcaggctaatccattgaccacgccatcgggcaaaattgagatctattcacaggcgc

SEQ ID NO: 295193 - DNA, 75 bp, synthetic construct
  source 1..75: mol_type = other DNA
agtcgcgggaagcgattcctgaactgccaacgtttgaagagttccgtaagcaggggatctttaaaaagcgcgacc

SEQ ID NO: 295194 - DNA, 75 bp, synthetic construct
  source 1..75: mol_type = other DNA
tggcacgtattctcggcgcgggcgtggcggggggctacaacctggcgtacaacgtggctgttgtaccgccgatga

SEQ ID NO: 295195 - DNA, 75 bp, synthetic construct
  source 1..75: mol_type = other DNA
ggtgaatggctatccccgtaaggtcgtgcgcattttccccctcaccctaaccctctccccagggggcgaggggac

SEQ ID NO: 295196 - DNA, 75 bp, synthetic construct
  source 1..75: mol_type = other DNA
tatctggtcaatagtgcggtaagaacgctgctgtttggctactttggccgcaaaatttatcgccccggtctgcat

SEQ ID NO: 295197 - DNA, 75 bp, synthetic construct
  source 1..75: mol_type = other DNA
gtcgcacaggcaatatctcctacattctttgctgctatagccttatacgttatttatctaatatatgaaatcacg

SEQ ID NO: 295198 - DNA, 75 bp, synthetic construct
  source 1..75: mol_type = other DNA
attcgccctggttggtgcattcacttattcagcgccttattacagccagtttgttattccttttgtcatgcacgc

SEQ ID NO: 295199 - DNA, 75 bp, synthetic construct
  source 1..75: mol_type = other DNA
gcgaggtaactaaaaatatcggcgcattcgccctggttggtgcattcacttattcagcgccttattacagccagt

SEQ ID NO: 295200 - DNA, 75 bp, synthetic construct
  source 1..75: mol_type = other DNA
ttaacttctacaagctgctgtcggtagtggggattatcaactttccggcgctgctggggctgatggtggtgtcga

SEQ ID NO: 295201 - DNA, 75 bp, synthetic construct
  source 1..75: mol_type = other DNA
acaacgtggcggtgggtaagaaaaacaacagcaatgaactggacaaggcgtttcattctgacaccgggctgttct

SEQ ID NO: 295202 - DNA, 75 bp, synthetic construct
  source 1..75: mol_type = other DNA
gtaacacggtggtgtggctgtctgagtattcagaaaacagtatcaacatcaacatggataacgtgccagatgaca

SEQ ID NO: 295203 - DNA, 75 bp, synthetic construct
  source 1..75: mol_type = other DNA
tacctctgtttttgattctgtctcggtatttctgaacgggtcgtattcaaagtatgcctggtcggataaggcaga

SEQ ID NO: 295204 - DNA, 75 bp, synthetic construct
  source 1..75: mol_type = other DNA
ttgattcagtttcactctttttgaacggttcgtattcgaagaatgttcgttctgataaagctgattactctgcgt

SEQ ID NO: 295205 - DNA, 75 bp, synthetic construct
  source 1..75: mol_type = other DNA
tattgcttatgaatatgctcgcggaaccggagtctgttcgcgttgatatgggaaatggaaagcagtgtcgttttt

SEQ ID NO: 295206 - DNA, 75 bp, synthetic construct
  source 1..75: mol_type = other DNA
gacctggtcgtaacagtagaagatgaaagtggtcataagactcagcaggtctacccggttaccaccttaccgaca

SEQ ID NO: 295207 - DNA, 75 bp, synthetic construct
  source 1..75: mol_type = other DNA
ccatgtgggctttctcggggcacagccaccttccatcaaggggctgaaacaggtgtccttcagtgagcaggaaga

SEQ ID NO: 295208 - DNA, 75 bp, synthetic construct
  source 1..75: mol_type = other DNA
ggatgccagaactcggtggcgtcggctgtggtgtggcgactgcggctgtgtattgggtgatgttcctcgctatgg

SEQ ID NO: 295209 - DNA, 75 bp, synthetic construct
  source 1..75: mol_type = other DNA
gcaccatgactgaagaagaaatcaaagcgcttcaggcggaaaacacgcgtctgaaagcggaagccacccagcggg

SEQ ID NO: 295210 - DNA, 75 bp, synthetic construct
  source 1..75: mol_type = other DNA
aataacagcaacgaactggacaaggcgtttcattctgataccggtctgttctggttgggtagcttggactatggc

SEQ ID NO: 295211 - DNA, 75 bp, synthetic construct
  source 1..75: mol_type = other DNA
gaatggcagctcaacattctgcgcgaagaggcgtaccgcgacacaccgtcgcaggatgcagcaggtgcacaattc

SEQ ID NO: 295212 - DNA, 75 bp, synthetic construct
  source 1..75: mol_type = other DNA
ctggccaccgcctttcgttcattgctctccgacggggagccagtgatgaatttcgccgaacaggccacaaaagag

SEQ ID NO: 295213 - DNA, 75 bp, synthetic construct
  source 1..75: mol_type = other DNA
gagagcacatcatacaaggtggtgccgaccgaaaaggcaatgatttaccgcaaattcggcttcgaaaacgtgttg

SEQ ID NO: 295214 - DNA, 75 bp, synthetic construct
  source 1..75: mol_type = other DNA
gcggcgcgaagtggtcggcgattgccacggtgatcatcatcggcctcgggctggtgcagatgactgtgctggcgc

SEQ ID NO: 295215 - DNA, 75 bp, synthetic construct
  source 1..75: mol_type = other DNA
aattttgatgctgccattaacatggggcgctgggtgttatccagtaacatgaacgtttcgcactctgataataaa

SEQ ID NO: 295216 - DNA, 75 bp, synthetic construct
  source 1..75: mol_type = other DNA
acgaggaacggaaaacagtgtcgtttctcaatggcaggactgaaagcaaataccaacaaggttcaggaggttcgc

SEQ ID NO: 295217 - DNA, 75 bp, synthetic construct
  source 1..75: mol_type = other DNA
atcgcgctggtcgacacgctgtctgacttcggtatcgccaactcgattatccagcgcaaagagattagccagctg

SEQ ID NO: 295218 - DNA, 75 bp, synthetic construct
  source 1..75: mol_type = other DNA
gcgccatccgctggtggtggaagtgaagcgtcagttttgtcgcagcgaaaaaatgaaaatgcttttgcgggccgg

SEQ ID NO: 295219 - DNA, 75 bp, synthetic construct
  source 1..75: mol_type = other DNA
gctgctgatggcgaaagcgcgggtcgatatcagctttaaattcaacgtattcaaaacatttctgtttattccggc

SEQ ID NO: 295220 - DNA, 75 bp, synthetic construct
  source 1..75: mol_type = other DNA
atcggcatcggccagttatgcttttgacgctgttcagacaaatattggagtatcgcagacacattcgcgccaggg

SEQ ID NO: 295221 - DNA, 75 bp, synthetic construct
  source 1..75: mol_type = other DNA
cgtatcccgctcaggaggagaaacagaattcacctccagtgatatgacattgtccacggcaatcagtcaaatcca

SEQ ID NO: 295222 - DNA, 75 bp, synthetic construct
  source 1..75: mol_type = other DNA
gggagacctgctgctgggaaaatcacagacccgtacagaactgttttctgactttaatttctacggagcggcact

SEQ ID NO: 295223 - DNA, 75 bp, synthetic construct
  source 1..75: mol_type = other DNA
tgcttcagcttctgccagttatgcgtttgatgccattcagaccaacgttgggttatcacgttcttactcaaaaca

SEQ ID NO: 295224 - DNA, 75 bp, synthetic construct
  source 1..75: mol_type = other DNA
ggtaatggaaaacaatgtcagttttccgcaaaaggtttaaaagcaaatatcaatgaggttcaggaggttcgttgt

SEQ ID NO: 295225 - DNA, 75 bp, synthetic construct
  source 1..75: mol_type = other DNA
cattatagcagtaacagtgtggggtatacccgcaccggtggtacgacattcaataccagtgtatcggccatgcca

SEQ ID NO: 295226 - DNA, 75 bp, synthetic construct
  source 1..75: mol_type = other DNA
atggataacaaactgtccaaaactgaaagcaagctgagtggtggtatcgcttctgcaatggcaatgaccggtctg

SEQ ID NO: 295227 - DNA, 75 bp, synthetic construct
  source 1..75: mol_type = other DNA
aataacgtcggtgatgctctggacgcgatcgactcaaccctggatgatgcgctgctctgggacgcaaccgccggt

SEQ ID NO: 295228 - DNA, 75 bp, synthetic construct
  source 1..75: mol_type = other DNA
agcgtggccattggtcaaggtagcagcagctccgttgataccggcattgccttgggtagcagctccgtttccagt

SEQ ID NO: 295229 - DNA, 75 bp, synthetic construct
  source 1..75: mol_type = other DNA
acggcagtatcactacaccgacttatgccatcgctggcggcagttacaacaacgtcggtgacgcgctggaagcga

SEQ ID NO: 295230 - DNA, 75 bp, synthetic construct
  source 1..75: mol_type = other DNA
aatcactgatgttgcaaacggtgcagtctcgtccaccagcagcgacgccattaacggttcacaactttatggtgt

SEQ ID NO: 295231 - DNA, 75 bp, synthetic construct
  source 1..75: mol_type = other DNA
tggcgaccttaaggacgattctctgctgtggaacaaagcggctggcgcattcagcgccgcgcacggtaccgaagc

SEQ ID NO: 295232 - DNA, 75 bp, synthetic construct
  source 1..75: mol_type = other DNA
ctgaaagcaagctgagtggtggtatcgcttctgcaatggcaatgaccggtctgccgcaggcttacacgccgggag

SEQ ID NO: 295233 - DNA, 75 bp, synthetic construct
  source 1..75: mol_type = other DNA
ttgcattcactcgcgataggccaagcaagtgaggcgaccaaagccggttctgtcgctatgggctataacagccag

SEQ ID NO: 295234 - DNA, 75 bp, synthetic construct
  source 1..75: mol_type = other DNA
tacatcaagtgttgcaatagggcaaagtgcgttctctggcgtggggggaacctcattaggcttcagtagcaatgc

SEQ ID NO: 295235 - DNA, 75 bp, synthetic construct
  source 1..75: mol_type = other DNA
ccaacctacaatttaaaaaatggtaacaaaaataacgttggcagtgcgctcactgtacttgatgaaaacaccctg

SEQ ID NO: 295236 - DNA, 75 bp, synthetic construct
  source 1..75: mol_type = other DNA
gcgcgatcaaggctgacagccacgacgccattaatggctcacagctttatgccatcagcgactcaatagccaaaa

SEQ ID NO: 295237 - DNA, 75 bp, synthetic construct
  source 1..75: mol_type = other DNA
gccgatatagctacaaacgctagcagtatcactactctgaacgcggacgttgataccctggaaaaagatgccctg

SEQ ID NO: 295238 - DNA, 75 bp, synthetic construct
  source 1..75: mol_type = other DNA
ggtaacggtgcatttagcgccgctcacgggaaagataaaactgccagtgtaatcactaacgtcgctaacggtgca

SEQ ID NO: 295239 - DNA, 75 bp, synthetic construct
  source 1..75: mol_type = other DNA
ggtcaacgtgggtcaattgaaagtaacggatgcgcaggtttcccagaatacccagagcattactaacctgaacaa

SEQ ID NO: 295240 - DNA, 75 bp, synthetic construct
  source 1..75: mol_type = other DNA
taaagctgggattagcaagacgtttactactcgtaaccagctaataaataaccaaagtattctaatgaatctggt

SEQ ID NO: 295241 - DNA, 75 bp, synthetic construct
  source 1..75: mol_type = other DNA
caacgtcgcggatggttccgaagcccatgacgctgttactgttcgccagttgcaaaacgccattggtgcagtagc

SEQ ID NO: 295242 - DNA, 75 bp, synthetic construct
  source 1..75: mol_type = other DNA
tgggtctacaaattacaaggtagtaccaatagccagggtgaatactccgccgcactcggtgccggtattcagtgg

SEQ ID NO: 295243 - DNA, 75 bp, synthetic construct
  source 1..75: mol_type = other DNA
ccaacgaagaaaacacaatctctgtgggttcttctaccaaccagcgccgtatcaccaacgttgctgccggtgtta

SEQ ID NO: 295244 - DNA, 75 bp, synthetic construct
  source 1..75: mol_type = other DNA
gcaatggcagccaggctttggcagatagcgcaattgccataggtcagggcagcaaagctaatggcacggatgcta

SEQ ID NO: 295245 - DNA, 75 bp, synthetic construct
  source 1..75: mol_type = other DNA
agcaggcggcgttcgctacgacaccaaagctgatggctctatcgactacagcaacatcactctcggtggcggcaa

SEQ ID NO: 295246 - DNA, 75 bp, synthetic construct
  source 1..75: mol_type = other DNA
cacggcaccgaagccaccagcaaaatcactaacgtcaccgctggcaacctgactgccagcagcactgacgccgtt

SEQ ID NO: 295247 - DNA, 75 bp, synthetic construct
  source 1..75: mol_type = other DNA
gttctaacgcacgcgcaaatcatgccgacagcattgctatgggtaatggttctcagactacccgtggtgcgcaga

SEQ ID NO: 295248 - DNA, 75 bp, synthetic construct
  source 1..75: mol_type = other DNA
cacagctctatagcaccaataagtacatcgctgatgcgctgggtggtgatgcagaagtcaacgctgacggaacta

SEQ ID NO: 295249 - DNA, 75 bp, synthetic construct
  source 1..75: mol_type = other DNA
tacgtcatatcttggtggtggtgctgatatcagcgatacgggtgtattaagtgggccaacctacactattggtgg

SEQ ID NO: 295250 - DNA, 75 bp, synthetic construct
  source 1..75: mol_type = other DNA
tacagtaacatcaccctcggtggtggcaatggcggtacaacgcgtatcagcaacgtttccgctggcgtgaacaac

SEQ ID NO: 295251 - DNA, 75 bp, synthetic construct
  source 1..75: mol_type = other DNA
acggcaccgatgctaccagcaagatcaccaacgtcgcagcaggcgcacttagcgcaaccagtaccgatgcggtga

SEQ ID NO: 295252 - DNA, 75 bp, synthetic construct
  source 1..75: mol_type = other DNA
gtgtagctagcggtactgacagcctcgcatttgggagacaatcacttgccagtgcagcaaacgctattgcgatgg

SEQ ID NO: 295253 - DNA, 75 bp, synthetic construct
  source 1..75: mol_type = other DNA
caacaacgtcggtgacgccctggatgcgcttgatgataacgccctgctgtgggatgagactgccaatggcggtgc

SEQ ID NO: 295254 - DNA, 75 bp, synthetic construct
  source 1..75: mol_type = other DNA
cggtgtgtttaccggtccaacctacaaaatcggtgaaacaaattattataacgtcggcgatgcactggctgcgat

SEQ ID NO: 295255 - DNA, 75 bp, synthetic construct
  source 1..75: mol_type = other DNA
cgaagagattcaggcaagtcacatccgcgataccgaacgcaaaggtatcgccatcattcaccaggaattggccct

SEQ ID NO: 295256 - DNA, 75 bp, synthetic construct
  source 1..75: mol_type = other DNA
accgagaccattcagtgcctgtttggcgtgtggcccggacaatgggaaggaaaaattcttatgacctttgtcaaa

SEQ ID NO: 295257 - DNA, 75 bp, synthetic construct
  source 1..75: mol_type = other DNA
gtaggttcttccactaaccaacgccgtattactaacgttgccgcaggtaaaaatgctaccgatgctgttaacgtt

SEQ ID NO: 295258 - DNA, 75 bp, synthetic construct
  source 1..75: mol_type = other DNA
gatgccagcgcagcaggtattggctctaccgctgtggggtataacactgttgccaaaggcgatagcagcgtggcc

SEQ ID NO: 295259 - DNA, 75 bp, synthetic construct
  source 1..75: mol_type = other DNA
gtgatgccctgctctgggatgcgacagccaatgacggtgctggtgcattcagcgccggtcgcggggtagataaca

SEQ ID NO: 295260 - DNA, 75 bp, synthetic construct
  source 1..75: mol_type = other DNA
aatggctcacaactatatggtttggctgattcattcacgtcctatctgggtggtggtgctgatattagcgataca

SEQ ID NO: 295261 - DNA, 75 bp, synthetic construct
  source 1..75: mol_type = other DNA
aaaaatggtatttatggcaatgttggcgatgctttagcggatctaaacaataacacgatacaatgggactccgtt

SEQ ID NO: 295262 - DNA, 75 bp, synthetic construct
  source 1..75: mol_type = other DNA
gctgacggcgcaaatgctatcgcgctgggtaatggtagtgttacaggtggcgcaaatgctattgctcttggacaa

SEQ ID NO: 295263 - DNA, 75 bp, synthetic construct
  source 1..75: mol_type = other DNA
agaacgccattggtgcagtcgcaaccacaccaaccaaatactatcacgccaactcaacggctgaagactcactgg

SEQ ID NO: 295264 - DNA, 75 bp, synthetic construct
  source 1..75: mol_type = other DNA
acccgaagacagaaagcgcgacggcatcgttccggtaatggcggttggtaaaaatattaccctcgccgcactcaa

SEQ ID NO: 295265 - DNA, 75 bp, synthetic construct
  source 1..75: mol_type = other DNA
atgacacaactgatggtgaactgcttggcgcattgtcgatcggtgacgatggtaaatatcgtcaaatcatcaacg

SEQ ID NO: 295266 - DNA, 75 bp, synthetic construct
  source 1..75: mol_type = other DNA
aagtaacagtttgtcctcgggagagaatgccatcgcattgggagagggtagtgccgctggtggcagcaacagcct

SEQ ID NO: 295267 - DNA, 75 bp, synthetic construct
  source 1..75: mol_type = other DNA
tcagcaaaatgagatcatcaaccatattgccggtaataccagcatagactacatcgaagagaacggtgcgggtct

SEQ ID NO: 295268 - DNA, 75 bp, synthetic construct
  source 1..75: mol_type = other DNA
gcaacaaacgcattcagcgctgcacacggcaccgatgctaccagcaagatcaccaacgtcgcagcaggcgcactt

SEQ ID NO: 295269 - DNA, 75 bp, synthetic construct
  source 1..75: mol_type = other DNA
acgctaacaacaccaacgccatcgctataggtcaaggcagcgtagcagacaaagttggttcaattgcgctgggaa

SEQ ID NO: 295270 - DNA, 75 bp, synthetic construct
  source 1..75: mol_type = other DNA
ccaccagcagcgacgccattaacggttcacaactttatggtgttagtgactatattgccgatgctctgggcggga

SEQ ID NO: 295271 - DNA, 75 bp, synthetic construct
  source 1..75: mol_type = other DNA
ggtgaactacgcgcagttgaagcaaagcgtgcaggaaacgaagcaatacaccgatcagcgcatggttgagatgga

SEQ ID NO: 295272 - DNA, 75 bp, synthetic construct
  source 1..75: mol_type = other DNA
gatgatggtaaatatcgtcaaatcatcaacgttgctgatggtactgaatcccatgacgccgtgactgtacgccaa

SEQ ID NO: 295273 - DNA, 75 bp, synthetic construct
  source 1..75: mol_type = other DNA
taacggctctcagttgaaaaccacccaagacgatgtggatgccaacacggctaatatcgcaaccaatactagcaa

SEQ ID NO: 295274 - DNA, 75 bp, synthetic construct
  source 1..75: mol_type = other DNA
atcagcaacctgactggcgaagttgctaacaacaccaccaacatcactaacctgacgaatgatgttgccgccaac

SEQ ID NO: 295275 - DNA, 75 bp, synthetic construct
  source 1..75: mol_type = other DNA
gcaggtttcccagaacacccagagcataactaacctgaacaatcaggtaactaatctcgattctcgtgtgactac

SEQ ID NO: 295276 - DNA, 75 bp, synthetic construct
  source 1..75: mol_type = other DNA
tgggtcagttgaaagtgacagacgcgcaggtttcccagaacacccagagcataactaacctgaacaatcaggtaa

SEQ ID NO: 295277 - DNA, 75 bp, synthetic construct
  source 1..75: mol_type = other DNA
gcgttcaacgatgccagcgcttcaggtattggcgctacggctgtgggttataacgctgtcgcctcaggcgaaagc

SEQ ID NO: 295278 - DNA, 75 bp, synthetic construct
  source 1..75: mol_type = other DNA
caaccaatattctggttacgcaaaatagccaaatgattaaccagcttgctggtaacactagcgaaacctacatcg

SEQ ID NO: 295279 - DNA, 75 bp, synthetic construct
  source 1..75: mol_type = other DNA
tctgaacgcggacgttgataccctggaaaaagatgccctgctctggaatggcacagcattcagcgccaaacacgg

SEQ ID NO: 295280 - DNA, 75 bp, synthetic construct
  source 1..75: mol_type = other DNA
gtggtgaacactgacggcagtatcactacaccaacttatgccatcgctggcggcagttacaacaacgtcggtgac

SEQ ID NO: 295281 - DNA, 75 bp, synthetic construct
  source 1..75: mol_type = other DNA
gacagccaatggcggtaatggtgcatttagcgccgctcacgggaaagataaaactgccagtgtaatcactaacgt

SEQ ID NO: 295282 - DNA, 75 bp, synthetic construct
  source 1..75: mol_type = other DNA
taacgctgtcgcctcaggcgaaagcagcgtagccattggtcaaggtagcagcagcaccgttgataccggtattgc

SEQ ID NO: 295283 - DNA, 75 bp, synthetic construct
  source 1..75: mol_type = other DNA
atgacactctgcactgggacaaaaccaataaagcatttagtgccagctatctcgccaaaaacgctgatggctccc

SEQ ID NO: 295284 - DNA, 75 bp, synthetic construct
  source 1..75: mol_type = other DNA
ttcggtagggaacagcacaacacaacgcaaaattaccaatatggctgccggtcaaataagaaatagcagtactga

SEQ ID NO: 295285 - DNA, 75 bp, synthetic construct
  source 1..75: mol_type = other DNA
aggctaatggactatacagcctggcaatgggtgcagaaagtgctacttcgaacgataacgccatcgcgattggga

SEQ ID NO: 295286 - DNA, 75 bp, synthetic construct
  source 1..75: mol_type = other DNA
cggatggcgaactgcttggcgcgttgtcgatcggtgatgatggtaaatatcgtcaaatcatcaacgtcgcggatg

SEQ ID NO: 295287 - DNA, 75 bp, synthetic construct
  source 1..75: mol_type = other DNA
cggcattaataatgatcccagtgtaatcactgatgttgcaaacggtgcagtctcgtccaccagcagcgacgccat

SEQ ID NO: 295288 - DNA, 75 bp, synthetic construct
  source 1..75: mol_type = other DNA
cgtaccaacgacagcggcttagcgttcaacgatgccagcgcagcaggtattggctctaccgctgtggggtataac

SEQ ID NO: 295289 - DNA, 75 bp, synthetic construct
  source 1..75: mol_type = other DNA
cttgaaaatacgcgcttgacagaccctagacgagtgaaaaaattgattgcggtgttagctataagcttctgttgg

SEQ ID NO: 295290 - DNA, 75 bp, synthetic construct
  source 1..75: mol_type = other DNA
ggcaaaaaaaacaattacctccattagaattctgctctttagatagagcagctcaaattttagaatgtgaaatag

SEQ ID NO: 295291 - DNA, 75 bp, synthetic construct
  source 1..75: mol_type = other DNA
atgagcaatcttttacaaatggggacagacttcgagaagaaactgaaagagcgtgccgtctctacagagaacatg

SEQ ID NO: 295292 - DNA, 75 bp, synthetic construct
  source 1..75: mol_type = other DNA
gactgtggacgttacggctgcctggaaaccgtcgcctcgttaagcgcattaaaaaaacaggcgcgggtatggcta

SEQ ID NO: 295293 - DNA, 75 bp, synthetic construct
  source 1..75: mol_type = other DNA
gaaaagtaagaaaattatgtgaggttactttacgcaataagagtaaagacctgcagattagttgctggtatgtgg

SEQ ID NO: 295294 - DNA, 75 bp, synthetic construct
  source 1..75: mol_type = other DNA
tatctggctaaatttatttctcagtactggactatatgctggccatcgcacgaagaaggcccggaaatacgttac

SEQ ID NO: 295295 - DNA, 75 bp, synthetic construct
  source 1..75: mol_type = other DNA
ataacaaatggatttccaatttactccataaacaacactataaaaaaagaaaatcacaagttaccaagattaaca

SEQ ID NO: 295296 - DNA, 75 bp, synthetic construct
  source 1..75: mol_type = other DNA
cgttaatccggatggcgtcgtctgcgactgtgggcgttacggctgcctggaaaccgtcgcctcgttaagcgcatt

SEQ ID NO: 295297 - DNA, 75 bp, synthetic construct
  source 1..75: mol_type = other DNA
aatagtcattctctctttaacacaattaagggattgcttttcgatgataattcttctgtgtcagatgtaaaaatg

SEQ ID NO: 295298 - DNA, 75 bp, synthetic construct
  source 1..75: mol_type = other DNA
acagaaacacagcaagactctattgttaaattcagagaactaaacagacagctttcacagctttctgatgcaaga

SEQ ID NO: 295299 - DNA, 75 bp, synthetic construct
  source 1..75: mol_type = other DNA
ttgatcctgaaaaactgactacagcgcagttaatcgctgcctggcagagtggagaaccgtggatcaccagctggg

SEQ ID NO: 295300 - DNA, 75 bp, synthetic construct
  source 1..75: mol_type = other DNA
aaaccatgccgcaagcgccgtgggcaacaccgattgaggtgaagtacctgctggaagagaagctgggcattcggg

SEQ ID NO: 295301 - DNA, 75 bp, synthetic construct
  source 1..75: mol_type = other DNA
gtagcggacagattggtcacaccatcgttaatccggatggcgtctctgcgactgtggacgttatggctgcctgga

SEQ ID NO: 295302 - DNA, 75 bp, synthetic construct
  source 1..75: mol_type = other DNA
atggcaccggcatgatttacggcatgtatgtcatcagcagggtgagtgaaacagggagtattttctttgcagatg

SEQ ID NO: 295303 - DNA, 75 bp, synthetic construct
  source 1..75: mol_type = other DNA
gtcaccgctggcgacctgactgctggcagcactgacgcggttaacggctcccagctgaaaaccaccaacgataac

SEQ ID NO: 295304 - DNA, 75 bp, synthetic construct
  source 1..75: mol_type = other DNA
cactgacgccgttaacggctcgcagctcaaaaccaccaacgacaacgtgccgaccaacaccaccaacatcgccac

SEQ ID NO: 295305 - DNA, 75 bp, synthetic construct
  source 1..75: mol_type = other DNA
cactgacgccgttaacggctcccagctcaaaaccaccaacgagaacgtgccgaccaacaccaccaacatcgccac

SEQ ID NO: 295306 - DNA, 75 bp, synthetic construct
  source 1..75: mol_type = other DNA
gattggttatgacaccacggatggcgaactgctcggtgcattgtcgattggtgatgatggcaagtaccgccaaat

SEQ ID NO: 295307 - DNA, 75 bp, synthetic construct
  source 1..75: mol_type = other DNA
gcaccgttgataccggtattgcgctgggtagcagctccgtttccagccgtgtgattgccaaaggttctcgtgata

SEQ ID NO: 295308 - DNA, 75 bp, synthetic construct
  source 1..75: mol_type = other DNA
gcggataccgatgcggttaacgtgggtcagttgaaagtaacggacgcgcaggtttcccagaatacccagagcatt

SEQ ID NO: 295309 - DNA, 75 bp, synthetic construct
  source 1..75: mol_type = other DNA
gactgatacggtgactaacctcggtgaagacgccctgaaatgggacgacgccgcaggcgcattcaccgctgcaca

SEQ ID NO: 295310 - DNA, 75 bp, synthetic construct
  source 1..75: mol_type = other DNA
ctggcgagctctctgacaccagcaccgacgccgttaacggttctcagctgaaaaccactaacgataacgtggcga

SEQ ID NO: 295311 - DNA, 75 bp, synthetic construct
  source 1..75: mol_type = other DNA
agatgccaacgcgcagggtaaagacagtgttgcgattggttctggttccattgctgccgctgacaacagcgtcgc

SEQ ID NO: 295312 - DNA, 75 bp, synthetic construct
  source 1..75: mol_type = other DNA
cactgacgccgttaacggctcccagctcaaaaccaccaacgacaacgtggcgaccaacaccaccaacatcgccac

SEQ ID NO: 295313 - DNA, 75 bp, synthetic construct
  source 1..75: mol_type = other DNA
agaccaacaccgatggcgcagacgccaacgcgcagggtaaagacagtgttgcgattggttctggttccattgctg

SEQ ID NO: 295314 - DNA, 75 bp, synthetic construct
  source 1..75: mol_type = other DNA
cggctcacaactctataccactaacaaatatatcgctgatgctctgggcggtgatgcagaagttaacgctgacgg

SEQ ID NO: 295315 - DNA, 75 bp, synthetic construct
  source 1..75: mol_type = other DNA
gagcaagtagcgtcgcatctgaagaaaacgcaattgccctggggcgtagcagtgtagctagcggtactgacagcc

SEQ ID NO: 295316 - DNA, 75 bp, synthetic construct
  source 1..75: mol_type = other DNA
tcggtaaacaggcggaatcgctcatcggtaaggctggtagtctggtgaccagattcacgggtatgacgggggcgg

SEQ ID NO: 295317 - DNA, 75 bp, synthetic construct
  source 1..75: mol_type = other DNA
acaacaacgacgcagtgaactatgcgcaactgaagcaaagcgtgcaggaaacgaagcaatacaccgatcagcgca

SEQ ID NO: 295318 - DNA, 75 bp, synthetic construct
  source 1..75: mol_type = other DNA
aaggacgattctctgctgtggaacaaagcggctggcgcattcagcgccgcgcacggtaccgaagctaccagcaag

SEQ ID NO: 295319 - DNA, 75 bp, synthetic construct
  source 1..75: mol_type = other DNA
accctttcggatgacagtactgacgcggttaatggctcgcaactgaaagctactaacgataacgtggcaaccaac

SEQ ID NO: 295320 - DNA, 75 bp, synthetic construct
  source 1..75: mol_type = other DNA
gaacaacaacgacgcagtgaactatgcgcagttgaagcaaagtgtgcaggaaacgaagcaatacaccgatcagcg

SEQ ID NO: 295321 - DNA, 75 bp, synthetic construct
  source 1..75: mol_type = other DNA
ttgggatgcaaccgcaggcaaattcagcgccaaacacggcattaataatgctcccagtgtaatcactgatgttgc

SEQ ID NO: 295322 - DNA, 75 bp, synthetic construct
  source 1..75: mol_type = other DNA
ctacctaatgacgcaatgaattatctgaagtcatgcggcgttgtttctgaagatgcagttcgttttgtggagttt

SEQ ID NO: 295323 - DNA, 75 bp, synthetic construct
  source 1..75: mol_type = other DNA
cttccacgctaattcaacggaagaagattcactggcagtgggaactgactcgctggcaatgggtgcgaaaaccat

SEQ ID NO: 295324 - DNA, 75 bp, synthetic construct
  source 1..75: mol_type = other DNA
ctgactgagacggtgactaaccttgatgaagatgcgctgaaatgggataaggacaatggtgtattcacggcagct

SEQ ID NO: 295325 - DNA, 75 bp, synthetic construct
  source 1..75: mol_type = other DNA
cacagcgtaggtgaagccctggatgcgctcgatgataacgcgctgctgtgggatgaagacgcaggtgcctacaac

SEQ ID NO: 295326 - DNA, 75 bp, synthetic construct
  source 1..75: mol_type = other DNA
caatagccaaaaggcttggaggaggctcatcggtaaaccctgacgacggtacagttaacgcaccaacctacaatt

SEQ ID NO: 295327 - DNA, 75 bp, synthetic construct
  source 1..75: mol_type = other DNA
cagtaagtctgtatccgacaggcttggaggatatcatgatgatcctgataatgttataaactctgacgggacgct

SEQ ID NO: 295328 - DNA, 75 bp, synthetic construct
  source 1..75: mol_type = other DNA
aacaaatggcgggcttcccgtacagcgaaattccgcacctgatcaccgtgggttttggtcgccagacgctgcttg

SEQ ID NO: 295329 - DNA, 75 bp, synthetic construct
  source 1..75: mol_type = other DNA
ttggactatacccctccagatttaaatgaatatcaaaaagatttgcgcgtagcaacaatagtggttaccgatgat

SEQ ID NO: 295330 - DNA, 75 bp, synthetic construct
  source 1..75: mol_type = other DNA
agacgctgactcatttgagtggaaaggatgttgccggtcttctcgcataccttggtttgggagaagcggcaacga

SEQ ID NO: 295331 - DNA, 75 bp, synthetic construct
  source 1..75: mol_type = other DNA
gtaaatatcgctttaacaaactcgagtttggcgatatcgaaggtctgccgcgtctggtggatgccggtcagtgta

SEQ ID NO: 295332 - DNA, 75 bp, synthetic construct
  source 1..75: mol_type = other DNA
acactgctttctctgggcgtgaaaaatatcgtcaccggcccgactgcacctggcttcctgaccccagacctgctg

SEQ ID NO: 295333 - DNA, 75 bp, synthetic construct
  source 1..75: mol_type = other DNA
gccccatcgtgatgacctcgaactgcatcatcgacccaaccgtaggcgcttatgacgatcgtatctggacccgca

SEQ ID NO: 295334 - DNA, 75 bp, synthetic construct
  source 1..75: mol_type = other DNA
ccgaaattgccgacgggtgtgatttagccaccgtgcgtgccaaaaccgaagctcagtttgaagtagccaccgatc

SEQ ID NO: 295335 - DNA, 75 bp, synthetic construct
  source 1..75: mol_type = other DNA
attgccgacgggtgtgatttagccaccgtgcgtgccaaaacagaagctcggtttgaagtcgccgccgatctgaat

SEQ ID NO: 295336 - DNA, 75 bp, synthetic construct
  source 1..75: mol_type = other DNA
tctgcaatcggaaaacggcttcctcggtttaggcccggtcacgacagcgcatccagatctggtgaacgctggcgg

SEQ ID NO: 295337 - DNA, 75 bp, synthetic construct
  source 1..75: mol_type = other DNA
accaacagcacctctgaaacgctggccgccacaccaaaagccgtcaaggcggcatacgaccttgcagccggcaag

SEQ ID NO: 295338 - DNA, 75 bp, synthetic construct
  source 1..75: mol_type = other DNA
cgccaaagatggttcagcaaaaattttgcgccgctgcaccatgccgctcactgcgcaacacgcggtgcatatgct

SEQ ID NO: 295339 - DNA, 75 bp, synthetic construct
  source 1..75: mol_type = other DNA
agccaccgtgcgtgccaaaaccgaagctcagtttgaagtagccaccgatctgaatacgcaacggggtgatttatg

SEQ ID NO: 295340 - DNA, 75 bp, synthetic construct
  source 1..75: mol_type = other DNA
aacgttaacttcgattctccgcgtattgtcggctacgcccgtgaagccattgctctgcgtgaagcgctgaaagcg

SEQ ID NO: 295341 - DNA, 75 bp, synthetic construct
  source 1..75: mol_type = other DNA
aaccaacgcagcacaacagcgcgtactcgccgataaaaatgaaaaaattgattctctctctaccagactggaaaa

SEQ ID NO: 295342 - DNA, 75 bp, synthetic construct
  source 1..75: mol_type = other DNA
gttgcctgtgcgatggatattgccctgccgaaacgtaacgccgatggtactcaggacttacagtttgcgatcagc

SEQ ID NO: 295343 - DNA, 75 bp, synthetic construct
  source 1..75: mol_type = other DNA
gctttattgccacttttgccgggttgattttccactacatcggtattggcccgaataaggaagtggacgatgacg

SEQ ID NO: 295344 - DNA, 75 bp, synthetic construct
  source 1..75: mol_type = other DNA
atgccgaaaatcagggcaacaagcgtaactggcagactgcacttgagtatgttgccgcacatccagaactggacg

SEQ ID NO: 295345 - DNA, 75 bp, synthetic construct
  source 1..75: mol_type = other DNA
gtgtgaacgataacgcgcaaacgctggcaaacctgagtaatgcgttgttcgatgccggcgtgatgccgtattacc

SEQ ID NO: 295346 - DNA, 75 bp, synthetic construct
  source 1..75: mol_type = other DNA
ggcggaagtgaccgcgttagcggttgaggcggaatctgccatcgccgttcgactgtccagcgcttttgagacact

SEQ ID NO: 295347 - DNA, 75 bp, synthetic construct
  source 1..75: mol_type = other DNA
aagagaatgtagtagaaaagttggtagttaaatatgatggtgaggcattggctaaccataaaatagatttggatg

SEQ ID NO: 295348 - DNA, 75 bp, synthetic construct
  source 1..75: mol_type = other DNA
ttaacctcgaccagcttgtgtccatgacctcagttgaaattgctgtgaagtggcacactgaatttggccacctga

SEQ ID NO: 295349 - DNA, 75 bp, synthetic construct
  source 1..75: mol_type = other DNA
tgtaatgttatcattggattatcagagagcgacttttataaaagcatgaccacctactctgatcatactatctga

SEQ ID NO: 295350 - DNA, 75 bp, synthetic construct
  source 1..75: mol_type = other DNA
gctacatgaatatcctcgataccgcctggccacgttaccgctacacgctccctgtcttccccggactgcgttata

SEQ ID NO: 295351 - DNA, 75 bp, synthetic construct
  source 1..75: mol_type = other DNA
cgttgatttgctcgtccgtgagaacttgaattcgctggacaaaacgtacatagttgttaaagtacacggcatctt

SEQ ID NO: 295352 - DNA, 75 bp, synthetic construct
  source 1..75: mol_type = other DNA
tttttagtgatgtttactatgtggacttgctagttcgcgagaacttgaattcactggacaaagcgtacatagttg

SEQ ID NO: 295353 - DNA, 75 bp, synthetic construct
  source 1..75: mol_type = other DNA
ggtttacccacaatggtcgccaattatttaccggagggtattcatatcactctgcaatcggaaaacggcttcctc

SEQ ID NO: 295354 - DNA, 75 bp, synthetic construct
  source 1..75: mol_type = other DNA
agggtggtggaccaggctggtataccgcgatgaaaaacaacaaggtcaaagccattgtcgctttcgagccaggca

SEQ ID NO: 295355 - DNA, 75 bp, synthetic construct
  source 1..75: mol_type = other DNA
gatgtggtttaaccagttccgtgttggcgtgtggccagattattttaaaggcgtccagttttcccacgacaaaga

SEQ ID NO: 295356 - DNA, 75 bp, synthetic construct
  source 1..75: mol_type = other DNA
gcagtcaaagctgtaacactggataatggtaattatcagctgtcaggctataaatggccccagtcatttggtgtc

SEQ ID NO: 295357 - DNA, 75 bp, synthetic construct
  source 1..75: mol_type = other DNA
cgctctgattaacggtgcgcctgacacgctggacacactgaaagaaattgccgcagctatcaacaatgacccgaa

SEQ ID NO: 295358 - DNA, 75 bp, synthetic construct
  source 1..75: mol_type = other DNA
tcatctgccagaagtgggaatcaaagggaatacccacttcccgttctctgatttaaataatgtgcagattgctga

SEQ ID NO: 295359 - DNA, 75 bp, synthetic construct
  source 1..75: mol_type = other DNA
cgggagtggcgtgacgtggtgaacaagcatggcggggatgtgacggtgactcatctgccagaagtgggaatcaaa

SEQ ID NO: 295360 - DNA, 75 bp, synthetic construct
  source 1..75: mol_type = other DNA
tattcctgcacttctttagccgccaatacttttggaaagcgcttcaccacttggttagaagaaatttttcaaaag

SEQ ID NO: 295361 - DNA, 75 bp, synthetic construct
  source 1..75: mol_type = other DNA
gctgtcacgaaatgcgcaatacggtgtatcaggagtacatggattccgtgcactacaacaaccgtagcggcgtgc

SEQ ID NO: 295362 - DNA, 75 bp, synthetic construct
  source 1..75: mol_type = other DNA
tgcgtatctcagctgtaaccaaaaagctggggatcgcaaggtcgaccatttacgactggctcaatgtcaaatcgc

SEQ ID NO: 295363 - DNA, 75 bp, synthetic construct
  source 1..75: mol_type = other DNA
attcagtaccactattaacaatgcgctggcactgaaagcgccgctgtcaagtccggcactcaccggaacgccaac

SEQ ID NO: 295364 - DNA, 75 bp, synthetic construct
  source 1..75: mol_type = other DNA
gctggttggttcgtcgccggaggcgctggacacactgaatgaactggcggctgcgctggggaatgatcctaactt

SEQ ID NO: 295365 - DNA, 75 bp, synthetic construct
  source 1..75: mol_type = other DNA
tgacggatatcggcgcggcgaaactggcaagcgccaccgcgctcggtgtaccgttgaaaattacccatatggcgg

SEQ ID NO: 295366 - DNA, 75 bp, synthetic construct
  source 1..75: mol_type = other DNA
gtgataacagcgatgtcctggatgtttctgcaccttttaatattgagagttataaaacagcggaaggtcaatatg

SEQ ID NO: 295367 - DNA, 75 bp, synthetic construct
  source 1..75: mol_type = other DNA
attgcggtggcgaactgcccggaaacgtacaaaccgcagttacaggaaggcagcggtcgtacccagactatccgc

SEQ ID NO: 295368 - DNA, 75 bp, synthetic construct
  source 1..75: mol_type = other DNA
gaggattctggatccgtgagattggtctttatgatgatgaaggtgtactcattgcggtggcgaactgcccggaaa

SEQ ID NO: 295369 - DNA, 75 bp, synthetic construct
  source 1..75: mol_type = other DNA
gcaggcaaacaaccgctggacaatacgcttactaatttgagtggaaaggatgtggctggtcttctcgcatacctt

SEQ ID NO: 295370 - DNA, 75 bp, synthetic construct
  source 1..75: mol_type = other DNA
cccgctacctttccccgcgcgggtcgaatcaattacactgacaatggcagatatccaggagtctctgctttctcc

SEQ ID NO: 295371 - DNA, 75 bp, synthetic construct
  source 1..75: mol_type = other DNA
tgccactgattaccctgtgctggcgaaagtgtttccggcgctagcattacctgacgcacggggtgatttcattcg

SEQ ID NO: 295372 - DNA, 75 bp, synthetic construct
  source 1..75: mol_type = other DNA
ttttggaatatatcgtggagtttttcacttcctcagattacacggccctggtgataaggtttcatttgcctgtac

SEQ ID NO: 295373 - DNA, 75 bp, synthetic construct
  source 1..75: mol_type = other DNA
ccgtttaaagcgaaatatctgaaactgacagaaaactcagtgcaatcaggtgatgtagtatcttctttagttatg

SEQ ID NO: 295374 - DNA, 75 bp, synthetic construct
  source 1..75: mol_type = other DNA
ctgaaactgacagataactcagtgcaatcaggtgatgtgttatcttctctggttatgcgtgtggcgcaggattaa

SEQ ID NO: 295375 - DNA, 75 bp, synthetic construct
  source 1..75: mol_type = other DNA
ggaatattgcagaatctccgtgtaaattcgaagcgggtggtgattcagtaagtattaatatgccaactgtaccaa

SEQ ID NO: 295376 - DNA, 75 bp, synthetic construct
  source 1..75: mol_type = other DNA
attcacgcctctaccagtaaaggggtgatgcgctcttcccttgataatgtctactggcagaaaaatttctggcaa

SEQ ID NO: 295377 - DNA, 75 bp, synthetic construct
  source 1..75: mol_type = other DNA
acaaagctggcatggcacgccgtatcgttatggtggcatgacgcggcgcggtgtggactgttcgggatttgtggt

SEQ ID NO: 295378 - DNA, 75 bp, synthetic construct
  source 1..75: mol_type = other DNA
cagcgggcgtacccagaccgtgcgcatggtgctgattaccagcagcacggacaatatcaccctgaaaatcgaccc

SEQ ID NO: 295379 - DNA, 75 bp, synthetic construct
  source 1..75: mol_type = other DNA
ggaaaagcgcggcgtgctctactgccgcattgtgccgccgatgaccgggaaagcgattcatgtgatgtgcgtaca

SEQ ID NO: 295380 - DNA, 75 bp, synthetic construct
  source 1..75: mol_type = other DNA
cggcgcaaaaatcaccacacagacagtggatgcacaggctttcatcgagatacttcaggcattaaatgatgctca

SEQ ID NO: 295381 - DNA, 75 bp, synthetic construct
  source 1..75: mol_type = other DNA
tccggactctctgtacccgaaaagacgtcagctggacccgtattctgatctgaattatcagtgtgtggaggacag

SEQ ID NO: 295382 - DNA, 75 bp, synthetic construct
  source 1..75: mol_type = other DNA
aactccagtcgctggccgaccgtcgactttatctcgctaaacaggccgggcgcaatcgggtattcgcgagcgata

SEQ ID NO: 295383 - DNA, 75 bp, synthetic construct
  source 1..75: mol_type = other DNA
aaacaccacgcggtcattctggtgtcgcctgctgtggtacaggggcaccggatatcacccgggaaatccagcagg

SEQ ID NO: 295384 - DNA, 75 bp, synthetic construct
  source 1..75: mol_type = other DNA
cgctatcccattgaacattatgagaatcgcgatgtttcggtcgatggtgcggaaaagcgcggcgtgctctactgc

SEQ ID NO: 295385 - DNA, 75 bp, synthetic construct
  source 1..75: mol_type = other DNA
tcaccagagtaatttgtgcgaagctcctgtgcagtacgatgcattgaatgacattctctggtgtaaccactcttg

SEQ ID NO: 295386 - DNA, 75 bp, synthetic construct
  source 1..75: mol_type = other DNA
gcaagcactataactttcatcgcacaaatcgagcatgttgagctaaataaaacagcattatctcatgatatgaaa

SEQ ID NO: 295387 - DNA, 75 bp, synthetic construct
  source 1..75: mol_type = other DNA
aaagttattacaatagcaatggtaacgtctatgaatctctaagtttttctaatggtcttatcaacggcgagttta

SEQ ID NO: 295388 - DNA, 75 bp, synthetic construct
  source 1..75: mol_type = other DNA
atgcgctgctggaacgtctggaagcaggcgaaaccctgagcaccgaagagcaatcctgggttgatgccaaattgg

SEQ ID NO: 295389 - DNA, 75 bp, synthetic construct
  source 1..75: mol_type = other DNA
aacggttggtgcctttctggtgatctgtctggtggtgactcccggtgcaacagcatggttgttaaccgatcgttt

SEQ ID NO: 295390 - DNA, 75 bp, synthetic construct
  source 1..75: mol_type = other DNA
gccgaagaagtcgacattatcgaagtaggcaccattctttgcgtaggcgaaggcgtgcgtgcggttcgtgacctg

SEQ ID NO: 295391 - DNA, 75 bp, synthetic construct
  source 1..75: mol_type = other DNA
actgaaacaacggaccgaaaaggcagccagaacggcaggaagagcgccggccggtcagcagactcaccggctggt

SEQ ID NO: 295392 - DNA, 75 bp, synthetic construct
  source 1..75: mol_type = other DNA
gaggtctacacgaaggtgtttgcgctggatgtggctgcacggcaccgggtgcagttttcgatgcctgagtccgat

SEQ ID NO: 295393 - DNA, 75 bp, synthetic construct
  source 1..75: mol_type = other DNA
ccggtcagcagactcaccggctggttccgctctctgactcctggtacgtcagccagctgcagacgatggtggcaa

SEQ ID NO: 295394 - DNA, 75 bp, synthetic construct
  source 1..75: mol_type = other DNA
ggcgctgacgcggggggatttttcgcttgcgcctccgtatccgtttgtgcagccggccactctgaagcagcggac

SEQ ID NO: 295395 - DNA, 75 bp, synthetic construct
  source 1..75: mol_type = other DNA
tctctgatgcctggtacgtcagccagctgcagacgatggtggccacactgaaaatccccatggaacggcgtaata

SEQ ID NO: 295396 - DNA, 75 bp, synthetic construct
  source 1..75: mol_type = other DNA
ctgcgctggcactccgccagatgtcgatggttcatgatgaactgccaaaatacctgctcgcccctgaagtgagtg

SEQ ID NO: 295397 - DNA, 75 bp, synthetic construct
  source 1..75: mol_type = other DNA
gctggcgatttacgtgcacttggtcagcgattgctgtttcatcttgatgacgctaatcaagggccgaacgcctag

SEQ ID NO: 295398 - DNA, 75 bp, synthetic construct
  source 1..75: mol_type = other DNA
aaagcgctttacccgcacaaaatcgtactggcagacgccaaaattgccgatgcaggcaaaatcctttcgcgtatg

SEQ ID NO: 295399 - DNA, 75 bp, synthetic construct
  source 1..75: mol_type = other DNA
ttaccatatgacgtcgccgccggaaaacggcgcaggcgcggcactggcaatggcgaatgctctgcgtgacgcagg

SEQ ID NO: 295400 - DNA, 75 bp, synthetic construct
  source 1..75: mol_type = other DNA
caatatggaattgtcgctggcgttcagggcatgcaggattctggccttgaaataacggaagagaacgcaacccgc

SEQ ID NO: 295401 - DNA, 75 bp, synthetic construct
  source 1..75: mol_type = other DNA
cagcggcgttgcagcgctgaaatgtacgcgtcctggtggcagagctgggatccctgactgtgatcaaacccgatc

SEQ ID NO: 295402 - DNA, 75 bp, synthetic construct
  source 1..75: mol_type = other DNA
atgctccgtttacttcgtcattatttttactttgttccggtgcagttatcaaaagcaaaaggaataggtaaaaat

SEQ ID NO: 295403 - DNA, 75 bp, synthetic construct
  source 1..75: mol_type = other DNA
tgggcaccattctgtgtgtgggcgaaggcgtgcgtgcggttcgtgacctgaaagcgctttacccgcacaaaatcg

SEQ ID NO: 295404 - DNA, 75 bp, synthetic construct
  source 1..75: mol_type = other DNA
tcactgttcaggacaggatttattctttgccctgtctgccagagggcggcgggaaatatcaggcaaatcattata

SEQ ID NO: 295405 - DNA, 75 bp, synthetic construct
  source 1..75: mol_type = other DNA
aaactgaaaaatgaagggcgcatgttcagtcgcttgttgctggaagagcggatgcgtgttgctgtcaatatgtta

SEQ ID NO: 295406 - DNA, 75 bp, synthetic construct
  source 1..75: mol_type = other DNA
aaactgaaaaatgaagggcatatgttcagtcgcttgttgctggaagagcggatgcgggttgctgtaaatatgtta

SEQ ID NO: 295407 - DNA, 75 bp, synthetic construct
  source 1..75: mol_type = other DNA
caacaatcctgcgttggctgcggctttaattaccagccagagattttccggagataccacggatatgtttcttat

SEQ ID NO: 295408 - DNA, 75 bp, synthetic construct
  source 1..75: mol_type = other DNA
cattgtggtcagttaacgtataatgttgacacccgtcatctgttttcttcgcccgtcaaaggtgtaacgacagaa

SEQ ID NO: 295409 - DNA, 75 bp, synthetic construct
  source 1..75: mol_type = other DNA
tcagtcccccaacatgcagtatggctatggttaatggtcaacctcaacagcattgtggtcagttaacgtataatg

SEQ ID NO: 295410 - DNA, 75 bp, synthetic construct
  source 1..75: mol_type = other DNA
cggcaccaaagcgccgccataccggtattgcagcggcacgacgagcagcaaagagacgcaggagagcaaagcgat

SEQ ID NO: 295411 - DNA, 75 bp, synthetic construct
  source 1..75: mol_type = other DNA
atctgaaatggtgggaagtgcgggacaccgtcgtgtgccgctagttgctatagaaaaatatttgattccatgtcc

SEQ ID NO: 295412 - DNA, 75 bp, synthetic construct
  source 1..75: mol_type = other DNA
aatgttgatagcttgattctatccctagaaaaattactctcaaaaaaacagtccatcaaaactgccacaatgcag

SEQ ID NO: 295413 - DNA, 75 bp, synthetic construct
  source 1..75: mol_type = other DNA
aaacattccgtcaggcgatggctaagttaaaacgcgtgggcgtcaccctgcttaaccagagtgttctgttacgtg

SEQ ID NO: 295414 - DNA, 75 bp, synthetic construct
  source 1..75: mol_type = other DNA
agcaaagtgctattgctgattcattatctgatattaataattttattctagctctagaaaagcttatcgttaaaa

SEQ ID NO: 295415 - DNA, 75 bp, synthetic construct
  source 1..75: mol_type = other DNA
attacatcttgcatttccgccaaaagaagaacaaaccgccatcgccaccatcctctccgatatggacaaggaaat

SEQ ID NO: 295416 - DNA, 75 bp, synthetic construct
  source 1..75: mol_type = other DNA
ccagatcctgcaacagcgtctggacaaaacccgccagcttaagcaagggatgatgcaggaactgttaaccgggaa

SEQ ID NO: 295417 - DNA, 75 bp, synthetic construct
  source 1..75: mol_type = other DNA
gtggttgttgcaggtagcgatagcaaacgtcgaatcgtgttaaatcgcttacgattaatttggcaacctgatttt

SEQ ID NO: 295418 - DNA, 75 bp, synthetic construct
  source 1..75: mol_type = other DNA
gctggcaggccatttgtgatgcggcacggcagattggtatgccggaagaggtgttgcaggctttctgtcagcagt

SEQ ID NO: 295419 - DNA, 75 bp, synthetic construct
  source 1..75: mol_type = other DNA
ggcggtaatgcaggagtcgccgttgggttcgctgttgacctttgccgaacataaaggctacgccctggcggcaat

SEQ ID NO: 295420 - DNA, 75 bp, synthetic construct
  source 1..75: mol_type = other DNA
taaccatcatgccaaaatcgttaaagaggcgggggcggcggtcacgctcgatggcgatcgcgcatttggtcaggt

SEQ ID NO: 295421 - DNA, 75 bp, synthetic construct
  source 1..75: mol_type = other DNA
aaaaaatggcaattgtcacttatttctgatgaaataaatatatcagaagtagctattagaaaaaaattagaaaac

SEQ ID NO: 295422 - DNA, 75 bp, synthetic construct
  source 1..75: mol_type = other DNA
gggatgattttgccgcagataaacacagtctctatttcgaaggcaagcgcaccgataacaatggcgggggaaatc

SEQ ID NO: 295423 - DNA, 75 bp, synthetic construct
  source 1..75: mol_type = other DNA
gctttggcaccaatccgttctgtgtggttttccctcgtaaagataatttcccgctgttgctcgattacgccacca

SEQ ID NO: 295424 - DNA, 75 bp, synthetic construct
  source 1..75: mol_type = other DNA
gtgcgccagctcaggcggctaaacagtaagcggctccggcagcaggcccctgcatcagcggctggcgtgaaagaa

SEQ ID NO: 295425 - DNA, 75 bp, synthetic construct
  source 1..75: mol_type = other DNA
gagcgccagctcaggcggctaaacagaaagcggctccggcagcaggcccatgcatcagcggctggcgtgaaagaa

SEQ ID NO: 295426 - DNA, 75 bp, synthetic construct
  source 1..75: mol_type = other DNA
ctgcaagaagttctgccgggcaaaaccgttatcaacattccaggctgtccgccgaacccgcacaacttccttgcg

SEQ ID NO: 295427 - DNA, 75 bp, synthetic construct
  source 1..75: mol_type = other DNA
ttaacggcgtgccgacgaccaatccggcggtaaaacgacgcatcaggaaacgttacaaaccagtcccgatgccat

SEQ ID NO: 295428 - DNA, 75 bp, synthetic construct
  source 1..75: mol_type = other DNA
tactgggcagaacagtgtgcagcggcggggtttgtctctatccactttgttagcgtggtcggtattccaatggtc

SEQ ID NO: 295429 - DNA, 75 bp, synthetic construct
  source 1..75: mol_type = other DNA
gcgcgccagctcaggcggctaaacagtaagcggctccggcagcaggcccttgcatcagcggctggcgtgaaagaa

SEQ ID NO: 295430 - DNA, 75 bp, synthetic construct
  source 1..75: mol_type = other DNA
ataccggaacacctttatcttcgttttgatgtggaagccgggcatgtggcggaagaaaaagcggtgccggtcggg

SEQ ID NO: 295431 - DNA, 75 bp, synthetic construct
  source 1..75: mol_type = other DNA
tccgggctgcttcgccgaatatctggtgattccggcgttcaacgctttcaaaatccccgacaatatctccgacga

SEQ ID NO: 295432 - DNA, 75 bp, synthetic construct
  source 1..75: mol_type = other DNA
tgaagtggtgggcattggtcaggaagtgaaaggcttccagattggcgatcgcgtgtctggcgaaggtcatatcat

SEQ ID NO: 295433 - DNA, 75 bp, synthetic construct
  source 1..75: mol_type = other DNA
gtgaacaacgatcccgaaataccggaacgtctgcaccttcactttgatttaagttacacagaatcaacggataag

SEQ ID NO: 295434 - DNA, 75 bp, synthetic construct
  source 1..75: mol_type = other DNA
gggctgcccgactatatcggcggtgtacattctgcattgcttaacagcgaagccgtgatttttcgccgccgttac

SEQ ID NO: 295435 - DNA, 75 bp, synthetic construct
  source 1..75: mol_type = other DNA
tatacgccggaagatattatctttctgcggatgtatgatccgcgtcagcaaatttacgggctgccggattatatc

SEQ ID NO: 295436 - DNA, 75 bp, synthetic construct
  source 1..75: mol_type = other DNA
cttagcagctttttctatccataaaaataaaccagatgaagatccttgcatgcttgttcttgctgctgatcattc

SEQ ID NO: 295437 - DNA, 75 bp, synthetic construct
  source 1..75: mol_type = other DNA
taccgctatacccattatgactccagcgatgcaggtagtagttatagcaatatgatttccgtgcgtctgaaggac

SEQ ID NO: 295438 - DNA, 75 bp, synthetic construct
  source 1..75: mol_type = other DNA
aaacgtgtcttatgatttggaggaggcaataaaataccttccgcggttgactgatgctattcaggaaacgattgg

SEQ ID NO: 295439 - DNA, 75 bp, synthetic construct
  source 1..75: mol_type = other DNA
ctgtgggcattgccgcaactgtcgcggcggtcgtacccatctgtgccgcaatactattggtgttggcgttaatcg

SEQ ID NO: 295440 - DNA, 75 bp, synthetic construct
  source 1..75: mol_type = other DNA
gatgcctggcaaggtggcatatcactctatactggcccggtgatcaccagctatcgctatacccattatgactcc

SEQ ID NO: 295441 - DNA, 75 bp, synthetic construct
  source 1..75: mol_type = other DNA
gaaggggaaccgcaggtatggccagaagaagatattatcttcatcaaaatgtatgacccgcaacagcatatctac

SEQ ID NO: 295442 - DNA, 75 bp, synthetic construct
  source 1..75: mol_type = other DNA
acatcgccatgccgacacagaagacaccgtgctggaaattcagcggctggctgccgtctgccacgccgcactgag

SEQ ID NO: 295443 - DNA, 75 bp, synthetic construct
  source 1..75: mol_type = other DNA
gttggtagctgccaggatgattacacactttcccgcatcgaaagcggcacgccttccgtactgggtatttaccag

SEQ ID NO: 295444 - DNA, 75 bp, synthetic construct
  source 1..75: mol_type = other DNA
aatacctgctcaacacagagcgcgatcttgccgttcgcgcgcgtgaccgttatgacatgtacctgaaatccctgc

SEQ ID NO: 295445 - DNA, 75 bp, synthetic construct
  source 1..75: mol_type = other DNA
cgtcactatcggcaatcgtggtgccgataacatggcatgtccacacattggcaacggcgtcgaactcggtgccaa

SEQ ID NO: 295446 - DNA, 75 bp, synthetic construct
  source 1..75: mol_type = other DNA
attgccgggttattttcgtcattgccggacagcgtatggtatttcgtgaatctgtttatggtcacggaagggatt

SEQ ID NO: 295447 - DNA, 75 bp, synthetic construct
  source 1..75: mol_type = other DNA
aatacctgctcaacacagagcgtgatcttgccgttcgcgtgcgtgaccgttatgacatgtacctgaaatccctgc

SEQ ID NO: 295448 - DNA, 75 bp, synthetic construct
  source 1..75: mol_type = other DNA
gtgatcgacctgctgccgctgccgtcgctgtatctgcgctgccgaaaagacggggcgtttgctgttttgcaggaa

SEQ ID NO: 295449 - DNA, 75 bp, synthetic construct
  source 1..75: mol_type = other DNA
ttaaatccatgtttatcaatataccgggcggagacaaagaaggcgttaaggtgatccctatcggggattcaggta

SEQ ID NO: 295450 - DNA, 75 bp, synthetic construct
  source 1..75: mol_type = other DNA
gatgaaatggaagaagaaattgaacagcagctgcgtgacagcaaaggtatcggcaacttctcgaccattctggtg

SEQ ID NO: 295451 - DNA, 75 bp, synthetic construct
  source 1..75: mol_type = other DNA
acaccgccatgccaacacagaatacaccgtactggaaattcagcggctggctgccgtctgccacgacgcactgag

SEQ ID NO: 295452 - DNA, 75 bp, synthetic construct
  source 1..75: mol_type = other DNA
tatggaggggatcaacagcgacccggatatcagacgactgggggaggtaaaatttattcttgattttgatgaacc

SEQ ID NO: 295453 - DNA, 75 bp, synthetic construct
  source 1..75: mol_type = other DNA
gccgcaccgccagcaagccgcgccatatgagccttattaccctgggtaaaccggaacccattctgacgaccggca

SEQ ID NO: 295454 - DNA, 75 bp, synthetic construct
  source 1..75: mol_type = other DNA
aaccagctctgcaggcttccggcgaaatcgtcagggggctggatgatatccggcagtccatccaaatcatcctgc

SEQ ID NO: 295455 - DNA, 75 bp, synthetic construct
  source 1..75: mol_type = other DNA
aggatcagccagtgaaatcgccaggcgtattggtgtcagtcgcgcggtattgtataaatggaaagatgaaattat

SEQ ID NO: 295456 - DNA, 75 bp, synthetic construct
  source 1..75: mol_type = other DNA
tgagttgggagctatcgctgtggaaccttatggttctgtaaccagtcgcggtgtcgcttgtcgtcagccaaaaga

SEQ ID NO: 295457 - DNA, 75 bp, synthetic construct
  source 1..75: mol_type = other DNA
atatgattaagaatgcgggaattaacggcaatagacgtatgcttatgcttgaatacctaaatcagttgatggaca

SEQ ID NO: 295458 - DNA, 75 bp, synthetic construct
  source 1..75: mol_type = other DNA
gttccggattaagggaagacgatgagacgcctgttaagaatttaattaaggagtttatgttaaatgaaacccgat

SEQ ID NO: 295459 - DNA, 75 bp, synthetic construct
  source 1..75: mol_type = other DNA
ctcaaaacacaggcatctaaaaatataggggttcgtacgaaaaaacgtgttaacactgaagatcaaagtagtgaa

SEQ ID NO: 295460 - DNA, 75 bp, synthetic construct
  source 1..75: mol_type = other DNA
actaaggttaacccgacaccacaaaaagcacctacgagtacaggtgaggacgttataacgccagtatttaaacaa

SEQ ID NO: 295461 - DNA, 75 bp, synthetic construct
  source 1..75: mol_type = other DNA
tggtggatcaggaattcctcgataaatattgcgttggctacgacgagaaaaccctgccagccagtgcgccgaaaa

SEQ ID NO: 295462 - DNA, 75 bp, synthetic construct
  source 1..75: mol_type = other DNA
cgtcttggcgttgagcaacagtttactgaaggtcgtactcaggaagagtggatgcgccatctgtatgcccagtcg

SEQ ID NO: 295463 - DNA, 75 bp, synthetic construct
  source 1..75: mol_type = other DNA
attttcaatgatcaggtgattaaaccgcgctttgaatgtaagaccatctatgaaatgaccagcgaactggcaaaa

SEQ ID NO: 295464 - DNA, 75 bp, synthetic construct
  source 1..75: mol_type = other DNA
cggttcgacgctgactttgttctgatgaccggcgagcttatctctctcattaacggattaacaacctctctcggc

SEQ ID NO: 295465 - DNA, 75 bp, synthetic construct
  source 1..75: mol_type = other DNA
aaaacaccggaatgggcttcgcaaattaccggtatcccggcagataaaatcatcaaacttgctcgtgaaattggt

SEQ ID NO: 295466 - DNA, 75 bp, synthetic construct
  source 1..75: mol_type = other DNA
gagatttattcgcaggcgctggctgacattgccgcgacctgggaattgccagaaggtgatgttttttacgcagct

SEQ ID NO: 295467 - DNA, 75 bp, synthetic construct
  source 1..75: mol_type = other DNA
atatcgcaaaacatgtcattcaggttcacttcatcaatgagcacacaggtaaagtggtagttaagcagattcgcc

SEQ ID NO: 295468 - DNA, 75 bp, synthetic construct
  source 1..75: mol_type = other DNA
gcaatcccgccagcctgacaaagctgatgacgggttatgtcgtggatcgcgctatcgatagtcatcgcattacgc

SEQ ID NO: 295469 - DNA, 75 bp, synthetic construct
  source 1..75: mol_type = other DNA
cgattggcgcggggagcgtcgtggtggatagcgttccggacaatacgctggtcgtgggcgagaaggcacgggtga

SEQ ID NO: 295470 - DNA, 75 bp, synthetic construct
  source 1..75: mol_type = other DNA
atctgcactggcaaccggccctgaaacgcgacggcgagtacgtctgtgggctggaggatatcagccaggccgttc

SEQ ID NO: 295471 - DNA, 75 bp, synthetic construct
  source 1..75: mol_type = other DNA
atcctgtggcgaattgtctcgattacgcgcaacttttaaaggaaaagtaccatttaaccgactgtaatattgtgc

SEQ ID NO: 295472 - DNA, 75 bp, synthetic construct
  source 1..75: mol_type = other DNA
aacgtccggcgatcctcgcagcattaaaaggtgggtggatcaacggtctggtcaccgatgaacacaccgcacgct

SEQ ID NO: 295473 - DNA, 75 bp, synthetic construct
  source 1..75: mol_type = other DNA
cgacagcgttggtcacttgcgtacgatgatcaacacagttaagtcggtacgcccgtcgttttcggtattctgcgg

SEQ ID NO: 295474 - DNA, 75 bp, synthetic construct
  source 1..75: mol_type = other DNA
agctaattgaatatttaactttaggaaaggatgtcattagtaataaatataaatgggttatggatttcgtaaatg

SEQ ID NO: 295475 - DNA, 75 bp, synthetic construct
  source 1..75: mol_type = other DNA
aatgcaggggactatattgcgcaagattggcattcagttatcgataatctaaatataacaaggatgttaaagaat

SEQ ID NO: 295476 - DNA, 75 bp, synthetic construct
  source 1..75: mol_type = other DNA
atgctggaagatttacgcgcgaacggctggagtctgcgcccctgctgcatggtggcggcctatcggattgcccat

SEQ ID NO: 295477 - DNA, 75 bp, synthetic construct
  source 1..75: mol_type = other DNA
ctgatggccgccattgaactggacgaacggattggttattcagccagcagcctggccgggcagccgtataaaggt

SEQ ID NO: 295478 - DNA, 75 bp, synthetic construct
  source 1..75: mol_type = other DNA
caggcagcagggagcatcaatctcgaattcataagctactggaaagccggggtcctgactcacactgataattca

SEQ ID NO: 295479 - DNA, 75 bp, synthetic construct
  source 1..75: mol_type = other DNA
ccatcaccagaaacaaaacggatcagggtcacaataacgggcggcggtggcggagggggtggctgccaggctata

SEQ ID NO: 295480 - DNA, 75 bp, synthetic construct
  source 1..75: mol_type = other DNA
attgccgtgggaaactgcccggaaagctataagccgcaactggctgaaggcagtgggcgtacccagaccgtgcgc

SEQ ID NO: 295481 - DNA, 75 bp, synthetic construct
  source 1..75: mol_type = other DNA
ggcgtggcaaaaccggttcacgtattaacgccaatcgcgtcagtgcgtcgtatcgttaacatggtggcgctggcc

SEQ ID NO: 295482 - DNA, 75 bp, synthetic construct
  source 1..75: mol_type = other DNA
acgggaaaatcctgcaatatggtcgaggtgaggctatgccgaaattatcgacgcaaacaatgaggattacatttc

SEQ ID NO: 295483 - DNA, 75 bp, synthetic construct
  source 1..75: mol_type = other DNA
gcagaacagtagccagattattgctgaacaggtgatccctgaaaacgagggcggttggtggatacgtgaagtggg

SEQ ID NO: 295484 - DNA, 75 bp, synthetic construct
  source 1..75: mol_type = other DNA
ctgttggggtgcctgttccgtggccttcagccactccgccaacaggctggctgaaatgcaatggtgcggcttttt

SEQ ID NO: 295485 - DNA, 75 bp, synthetic construct
  source 1..75: mol_type = other DNA
gttccggcccgaaagtgctgacccaggaaatggtgaagaaaatggctcgtgcgccaatgatcctggcgctggcga

SEQ ID NO: 295486 - DNA, 75 bp, synthetic construct
  source 1..75: mol_type = other DNA
aatgcacggcgatgcagcgctggtggaagcgattcgcaacgaccgtatgccggacagccctttgaaaggttccgc

SEQ ID NO: 295487 - DNA, 75 bp, synthetic construct
  source 1..75: mol_type = other DNA
ggtttaggagaagcggcgaaaagggatgtgggcacaggagataatcagataccggatatgggagcattcgcttct

SEQ ID NO: 295488 - DNA, 75 bp, synthetic construct
  source 1..75: mol_type = other DNA
tggttatcgcgatggcgttcacaccgcaggtgcaatgaacgcgctgctgctgccgagtggtaacacctttattgc

SEQ ID NO: 295489 - DNA, 75 bp, synthetic construct
  source 1..75: mol_type = other DNA
taacgccgattgcgtcagtacgccgtattgtcaacatggtggcgctggctgttgtagaagcgcaaactcaaccgc

SEQ ID NO: 295490 - DNA, 75 bp, synthetic construct
  source 1..75: mol_type = other DNA
gaagctgcccgcattagctacaacctactgcgtgtttccagctcggaaggcgtgacggttggtccggtgttgatg

SEQ ID NO: 295491 - DNA, 75 bp, synthetic construct
  source 1..75: mol_type = other DNA
taggcgatggcggcggaacattgccaacgccggacgcaaagcagactgcactggtaaatgagaaacgccgggctg

SEQ ID NO: 295492 - DNA, 75 bp, synthetic construct
  source 1..75: mol_type = other DNA
cgctggcagcggctggctttattgccacttttgccgggttgattttccactacatcggtattggcccgaataagg

SEQ ID NO: 295493 - DNA, 75 bp, synthetic construct
  source 1..75: mol_type = other DNA
gctggagctggcggaacagcgcgtggcgaaactgaaagcgcgtggttacgaacatgctggcgtctacaacccgga

SEQ ID NO: 295494 - DNA, 75 bp, synthetic construct
  source 1..75: mol_type = other DNA
tgaaggcgtgcccgtctgctggtgcaatcattcagtacgctaacgggattgtcgatttccagtcggaaaactgca

SEQ ID NO: 295495 - DNA, 75 bp, synthetic construct
  source 1..75: mol_type = other DNA
cgaaccctataatgaatatccaatatcagctcaatggggtgagtatttgcttactacgttcgaagataaagttat

SEQ ID NO: 295496 - DNA, 75 bp, synthetic construct
  source 1..75: mol_type = other DNA
gttattcattctgattatcctaaaacggaaataaaaaaacgtcttaataaattattatcaagacaatcaagaatc

SEQ ID NO: 295497 - DNA, 75 bp, synthetic construct
  source 1..75: mol_type = other DNA
cgcttaccaatttgagtggaaaggatgtagctggtcttctcgcataccttggtttgggagaagcggcaaaacggg

SEQ ID NO: 295498 - DNA, 75 bp, synthetic construct
  source 1..75: mol_type = other DNA
gatggacgtggagtggacaatgggcgagcattattaagcaggcaggaggctacaaatttttcttattacggaggt

SEQ ID NO: 295499 - DNA, 75 bp, synthetic construct
  source 1..75: mol_type = other DNA
tatgtggatgataaagcactggagctgaaggtgtatgtggatgaccaaatggcaaaacaccttgccgcagcggac

SEQ ID NO: 295500 - DNA, 75 bp, synthetic construct
  source 1..75: mol_type = other DNA
cgctgaatatgctgtacatcgacccgcagaacagcagccagattattgccgaacaggtgatccctgaaaacgagg

SEQ ID NO: 295501 - DNA, 75 bp, synthetic construct
  source 1..75: mol_type = other DNA
aggggtcggtggtacgcacgtcatgtacgtgctgcatcacgccgatcagccggagctgtatcacggtctgccgaa

SEQ ID NO: 295502 - DNA, 75 bp, synthetic construct
  source 1..75: mol_type = other DNA
gtcaagaacaactgtaattgcacgagtattaaaatttgcgaatggaaattggtatggtgggacagcagcaggaag

SEQ ID NO: 295503 - DNA, 75 bp, synthetic construct
  source 1..75: mol_type = other DNA
gcgctgtttacccaaaagtgattggccttgatgcttcaagaattgttccaactgcaaacgaaaatcgaccccgta

SEQ ID NO: 295504 - DNA, 75 bp, synthetic construct
  source 1..75: mol_type = other DNA
ggctcttattaatggtgcgccagccacgctggatacgctgaaagaaatagctgtagccattaacaatgatccgaa

SEQ ID NO: 295505 - DNA, 75 bp, synthetic construct
  source 1..75: mol_type = other DNA
aactactaccaactgcgccatccgccgcagtggtcgtcgtgcgtgtggtggtggtggtcgtcggcaatgcgccgt

SEQ ID NO: 295506 - DNA, 75 bp, synthetic construct
  source 1..75: mol_type = other DNA
atgactacttccatgctcaacgcaaaactactaccaactgcgccatccgccgcagtggtcgtcgtgcgtgtggtg

SEQ ID NO: 295507 - DNA, 75 bp, synthetic construct
  source 1..75: mol_type = other DNA
aacttctggaaggggattttaaaaccactctccgcagccggatttatcgccacttttgccgggctgatttaccac

SEQ ID NO: 295508 - DNA, 75 bp, synthetic construct
  source 1..75: mol_type = other DNA
ggagaaggctctgcattaccggttggggtgcctgttccgtggccttcagccacaccgccgacaggctggctgaaa

SEQ ID NO: 295509 - DNA, 75 bp, synthetic construct
  source 1..75: mol_type = other DNA
tgttgctggtcttctcgcataccttggtttgggagaaggtgctccagctattggcgttccgttcttctggccgtc

SEQ ID NO: 295510 - DNA, 75 bp, synthetic construct
  source 1..75: mol_type = other DNA
atgactacttccatgttcaacgcaaaactactaccaactgcgccattcgccgcagtggtcgtcgtgcgtgtggtg

SEQ ID NO: 295511 - DNA, 75 bp, synthetic construct
  source 1..75: mol_type = other DNA
ttcagtgcgacatcaagtcgcgcttgttactgccttcgctgtctttttcctgtagctttcacctttcagttcgaa

SEQ ID NO: 295512 - DNA, 75 bp, synthetic construct
  source 1..75: mol_type = other DNA
taatcggcgttggaggattaaatttttgtcaccagtctattttataccgagtaaaaatattgaaagagattcctt

SEQ ID NO: 295513 - DNA, 75 bp, synthetic construct
  source 1..75: mol_type = other DNA
cgcgacgagtctgaatcgcacttcaaaacgggtgatgtgcttcgtgtcgggcgttttgaagatgacggttatttt

SEQ ID NO: 295514 - DNA, 75 bp, synthetic construct
  source 1..75: mol_type = other DNA
taccgtgcagaagtggcgaaactaattgatgtaaccacctgtattgggtgtaaaggctgtcaggtagcatgctca

SEQ ID NO: 295515 - DNA, 75 bp, synthetic construct
  source 1..75: mol_type = other DNA
ttttctcggcgcaggtgttatccttcatcgccatgacgatgctatatctggactaacaactgcagctatcgtttg

SEQ ID NO: 295516 - DNA, 75 bp, synthetic construct
  source 1..75: mol_type = other DNA
tgtcattccaatggatacgcaggccataaagatgtttatggccgcataatgattccccccccagccaatacaatt

SEQ ID NO: 295517 - DNA, 75 bp, synthetic construct
  source 1..75: mol_type = other DNA
aaaggcttacccgacaaataaattgcctgatttacgtggtgagtttattcgtggctgggatgattctagagggat

SEQ ID NO: 295518 - DNA, 75 bp, synthetic construct
  source 1..75: mol_type = other DNA
tattcctgcaggtacgggctcacttattttgtccaatgatatcttaattacgggtcatgacagtaatggctcaag

SEQ ID NO: 295519 - DNA, 75 bp, synthetic construct
  source 1..75: mol_type = other DNA
cctgatttacgcggtgagtttattcgtggctgggatgacggtcgttcagtagatactggtcgcagcgttatgtct

SEQ ID NO: 295520 - DNA, 75 bp, synthetic construct
  source 1..75: mol_type = other DNA
tgctgtagtactggcaactcgcaagtatgtggatgataaggcactggagctgaaggtgtatgtggatgaccaaat

SEQ ID NO: 295521 - DNA, 75 bp, synthetic construct
  source 1..75: mol_type = other DNA
cgggcggtacaacagagtcaatgaatatttcatcagtcacaaaatcgggttgcatcatttcttcagcatggcaaa

SEQ ID NO: 295522 - DNA, 75 bp, synthetic construct
  source 1..75: mol_type = other DNA
aataacaccacgcggattgcgaccactgagtttgttcaggccgctattaccgctctgattaacggtgcgccagcc

SEQ ID NO: 295523 - DNA, 75 bp, synthetic construct
  source 1..75: mol_type = other DNA
ataccagcatcagaagttatgggaagaggatatattgcaagcctgacgccgggtgctgatagcccacttgatttt

SEQ ID NO: 295524 - DNA, 75 bp, synthetic construct
  source 1..75: mol_type = other DNA
gaacaccgaagccatcacgctgaaaatcgacccgtctgtggttctggcaacccgcaaatatgtggatgataaaat

SEQ ID NO: 295525 - DNA, 75 bp, synthetic construct
  source 1..75: mol_type = other DNA
agcggaggataattttaccggggcatggatatcaatgcgccctcgtaacctttcatttaattacatcgtgagggc

SEQ ID NO: 295526 - DNA, 75 bp, synthetic construct
  source 1..75: mol_type = other DNA
cagctttgcaggattattacggttacgatctgaatactaatgtcaaagtaggtatcgcttttgctactgctgatt

SEQ ID NO: 295527 - DNA, 75 bp, synthetic construct
  source 1..75: mol_type = other DNA
cgctgactaatttgagtggaaaggatgtagctggtcttctcactgtctcttatacacattccgagcccacgagac

SEQ ID NO: 295528 - DNA, 75 bp, synthetic construct
  source 1..75: mol_type = other DNA
gcagaacagcagccagattattgctgaacaggtgatccctgaaaatgagggcggttggtggatacgtgaagtggg

SEQ ID NO: 295529 - DNA, 75 bp, synthetic construct
  source 1..75: mol_type = other DNA
tcggcgatggtggcggagtattgccaacgccagacgcaaagcagactgcactggtaaatgagaaacgccgggctg

SEQ ID NO: 295530 - DNA, 75 bp, synthetic construct
  source 1..75: mol_type = other DNA
ggatcgctgattcaggtgccgcaggaagaagaagcggaactgaaagtatttctggacgcgctgtatcgcctggaa

SEQ ID NO: 295531 - DNA, 75 bp, synthetic construct
  source 1..75: mol_type = other DNA
ggtgataacctaaccatattaattggactattatccagttctctctatcaatatttaattcaattacaaggaggt

SEQ ID NO: 295532 - DNA, 75 bp, synthetic construct
  source 1..75: mol_type = other DNA
tattcagcaggcgtggattctggcgcagcgatatgatgcggtggtggcgaatccgccgtatatggggggaaaata

SEQ ID NO: 295533 - DNA, 75 bp, synthetic construct
  source 1..75: mol_type = other DNA
tgccggtttccacggaagataccgttatcgtgccggaaggatacatcgcgaagcccttctacaaatggggcgacg

SEQ ID NO: 295534 - DNA, 75 bp, synthetic construct
  source 1..75: mol_type = other DNA
actgctttacaagaaagcaaaacggacagcccaatttatacatttctacctgatttaaaaacaccaacattcagt

SEQ ID NO: 295535 - DNA, 75 bp, synthetic construct
  source 1..75: mol_type = other DNA
tggagatactcgaaggccagcgtgcagaagcgaaacaactacgtaaacaggccagaagagcgcacaggaactacg

SEQ ID NO: 295536 - DNA, 75 bp, synthetic construct
  source 1..75: mol_type = other DNA
acctgtatttttccgtttaatcgatggaaatgaagaagcgaaaaagtgttctttattaaataaagaaaactcatt

SEQ ID NO: 295537 - DNA, 75 bp, synthetic construct
  source 1..75: mol_type = other DNA
aagtgatggctacgaaataagaaactatgcagatgagaatggcaagctaaggtctcgaccacagaatatggctta

SEQ ID NO: 295538 - DNA, 75 bp, synthetic construct
  source 1..75: mol_type = other DNA
attgggagtccttgcaaggagtgctgtcagtatcgagaaaaaactatattccttaaatgaaacatcaccaatatt

SEQ ID NO: 295539 - DNA, 75 bp, synthetic construct
  source 1..75: mol_type = other DNA
gtggttatcgcgggcgtgatattccacaactgattctggaaaataatatttttggtcttgatatcgacgatcggg

SEQ ID NO: 295540 - DNA, 75 bp, synthetic construct
  source 1..75: mol_type = other DNA
atagccagtttgccattacttgatcttcataaaacagaaatagcgtcattatccaaagagaatgtggatatttca

SEQ ID NO: 295541 - DNA, 75 bp, synthetic construct
  source 1..75: mol_type = other DNA
ctgttggataacaagacgttaatcacaatggctcatctaggttcaagagcttttagtcaaatttctggtgaggtt

SEQ ID NO: 295542 - DNA, 75 bp, synthetic construct
  source 1..75: mol_type = other DNA
gccaaacgcggtgctggcttttaaacgcgagggttatcgcaagcgcgacttctcatttagcgacacgctggagat

SEQ ID NO: 295543 - DNA, 75 bp, synthetic construct
  source 1..75: mol_type = other DNA
cagcgttcccctgattattaccgccagtgacatcacgtctcatcagtccgtcagcagaaaaatcagtgcccgtca

SEQ ID NO: 295544 - DNA, 75 bp, synthetic construct
  source 1..75: mol_type = other DNA
ggaaacagaacgtgcactggcggataaatcctctccgaaggtgattttcctgcacatgatggggtctcatccgaa

SEQ ID NO: 295545 - DNA, 75 bp, synthetic construct
  source 1..75: mol_type = other DNA
cagcatcagtaaactggataactttctcggtcagcttgatggtatccttcgccggcattcccgtcatttcgccat

SEQ ID NO: 295546 - DNA, 75 bp, synthetic construct
  source 1..75: mol_type = other DNA
ctgaccgtggaagaggaacaagaacgattacgccaggccattgacttcacgttattagatctgatgacgttaaca

SEQ ID NO: 295547 - DNA, 75 bp, synthetic construct
  source 1..75: mol_type = other DNA
attaaccagattgcgttactacaagttcgctataacgatacgctgcgcctgattgcgaaagggccagaagctgaa

SEQ ID NO: 295548 - DNA, 75 bp, synthetic construct
  source 1..75: mol_type = other DNA
agaagatattacgccgccaacgctgcaccaggttaatcctgttacggggaaagccttttattatcaacccgtttt

SEQ ID NO: 295549 - DNA, 75 bp, synthetic construct
  source 1..75: mol_type = other DNA
cccgtgtgaccggcttaactcctggccgaataattaccaggagcagttcccacggaagattgcctgttacctcgc

SEQ ID NO: 295550 - DNA, 75 bp, synthetic construct
  source 1..75: mol_type = other DNA
attatgctctgtaaacagctggccgttgcggatggttaaaggaaccgttgtggggacaactgacacattgcgtga

SEQ ID NO: 295551 - DNA, 75 bp, synthetic construct
  source 1..75: mol_type = other DNA
cttgtgttagctcaagggggaataaataacggggttgttaaatataatgctgaattaatttcagaaaataaagat

SEQ ID NO: 295552 - DNA, 75 bp, synthetic construct
  source 1..75: mol_type = other DNA
atcattttctggttagtgtcacggttctggtattcatggtgattttctggcagacacaccaccgcggtcaccgta

SEQ ID NO: 295553 - DNA, 75 bp, synthetic construct
  source 1..75: mol_type = other DNA
atataccgccattcaacccgctcgtggacagagagccggggccggttatggtgtttaatggcgagaaaaatgttc

SEQ ID NO: 295554 - DNA, 75 bp, synthetic construct
  source 1..75: mol_type = other DNA
gagccggacactgatttatgactatgagcagaaccctgattccggcaacaacgtggtggcgctggcagcaaaagc

SEQ ID NO: 295555 - DNA, 75 bp, synthetic construct
  source 1..75: mol_type = other DNA
ttatggttaattatttagtcagcgaatcgagagcatcatctgaagtagcatcaagctatgctatagcaagaaaaa

SEQ ID NO: 295556 - DNA, 75 bp, synthetic construct
  source 1..75: mol_type = other DNA
ttcaaaaagattcctggaagcccaattgcttattgggtgtcagagattatactccaagcctttgagaatggtgtg

SEQ ID NO: 295557 - DNA, 75 bp, synthetic construct
  source 1..75: mol_type = other DNA
gatgatggtgtgaaagtgaattacggcaagtttggtgatctgttggctgatgttaaggccattaccggttcagcc

SEQ ID NO: 295558 - DNA, 75 bp, synthetic construct
  source 1..75: mol_type = other DNA
tggatatgcaacaaattatataatatattttattgtgatgtttttaatctttagaaaaaaatatcttttacaata

SEQ ID NO: 295559 - DNA, 75 bp, synthetic construct
  source 1..75: mol_type = other DNA
caaagaatcgctgtatgttactatactgatatcagaactaatatcatattccatcggctgccaaatgggccgcta

SEQ ID NO: 295560 - DNA, 75 bp, synthetic construct
  source 1..75: mol_type = other DNA
ttaaatgttttcgagacttcaaaaccaatttcagaatattttgatactcgtcttgggatgtctacagctaacaat

SEQ ID NO: 295561 - DNA, 75 bp, synthetic construct
  source 1..75: mol_type = other DNA
atgtgcaattcgctatatggagctgcacggttatcttgatcacggcttccgtatgttgtctcacccggagactcc

SEQ ID NO: 295562 - DNA, 75 bp, synthetic construct
  source 1..75: mol_type = other DNA
gatctcatcatactgaacggaactggaacggtttacgaaataaaatccgaaagggattccttaagccgtctacaa

SEQ ID NO: 295563 - DNA, 75 bp, synthetic construct
  source 1..75: mol_type = other DNA
ggaaagactggccgcgatgatcccgcccggtcagccgatccttgtggggcatcacagcgaacgccgcgcccgccg

SEQ ID NO: 295564 - DNA, 75 bp, synthetic construct
  source 1..75: mol_type = other DNA
gtaccggcatgtcgacctcaaccatgattgcacacaaacttcaagaatttctgactgaacaaggcattgcggtca

SEQ ID NO: 295565 - DNA, 75 bp, synthetic construct
  source 1..75: mol_type = other DNA
aataataaaacctttattacgatggcgcatttaggggcaagagcatttggacagatttctggcgaggttgtgcag

SEQ ID NO: 295566 - DNA, 75 bp, synthetic construct
  source 1..75: mol_type = other DNA
taagctggatatcgctgggctgtggaccaagctgaactttcaccagcaagtgcagcgcggcagcatgggagatat

SEQ ID NO: 295567 - DNA, 75 bp, synthetic construct
  source 1..75: mol_type = other DNA
tggacccggcctgcggctccgggcatatcctgaccgaagcctataaagtgctgaaagagatttacgaagaacgcg

SEQ ID NO: 295568 - DNA, 75 bp, synthetic construct
  source 1..75: mol_type = other DNA
aaaaaaacaggtcttaattcaatggtaacgatgcaaagctggatgtttctatctagctacgagcaaatgagagat

SEQ ID NO: 295569 - DNA, 75 bp, synthetic construct
  source 1..75: mol_type = other DNA
tgaatattgtttctctgcaggaaagtaagctggatatcgctgagctgtggaccaagctgaactttcatcagcagg

SEQ ID NO: 295570 - DNA, 75 bp, synthetic construct
  source 1..75: mol_type = other DNA
atcctccgtatatgggcagtaagggaatgaatggtgagctgaaagagtttgccaaaaataatttcccagatagta

SEQ ID NO: 295571 - DNA, 75 bp, synthetic construct
  source 1..75: mol_type = other DNA
actggtttgacgacgacgttactgcccgcattaaagagttcgtctgcaccgtctggggtgaagagcacctacagg

SEQ ID NO: 295572 - DNA, 75 bp, synthetic construct
  source 1..75: mol_type = other DNA
ccgcagcgaaagcgtttattccgtatattcagcaggcgtggatactggcgcagcggtatgatgcggtggtagcga

SEQ ID NO: 295573 - DNA, 75 bp, synthetic construct
  source 1..75: mol_type = other DNA
cagcacagctttccggctttgcattattaatgatggcgcgtcaggatgaccgcagaatatttacccgtgatgtgc

SEQ ID NO: 295574 - DNA, 75 bp, synthetic construct
  source 1..75: mol_type = other DNA
gatactaacaatatcttcctggcaatggctgcagcgaattcaaaaatggtcgagccgcagttagatttggtcaac

SEQ ID NO: 295575 - DNA, 75 bp, synthetic construct
  source 1..75: mol_type = other DNA
agctccgatgtcgatggtaagttgaaactggcttttctaaatagcacatcaggcatatatcttttggagctattc

SEQ ID NO: 295576 - DNA, 75 bp, synthetic construct
  source 1..75: mol_type = other DNA
ggtgatgtttctgacgtgaagcaaggtttagcaactgctaatgatgatcgtttcttgcgggcttggtttgaagtt

SEQ ID NO: 295577 - DNA, 75 bp, synthetic construct
  source 1..75: mol_type = other DNA
agtaatgaaaattgcatttggcactaatgctactattttcagcaatacccatattaaaggttatcgcagctcatt

SEQ ID NO: 295578 - DNA, 75 bp, synthetic construct
  source 1..75: mol_type = other DNA
agaatgctgaatctggtgcggtcaacacacgcctgaaaaaagagctggatgggttgaccaaaaaattcaacgagc

SEQ ID NO: 295579 - DNA, 75 bp, synthetic construct
  source 1..75: mol_type = other DNA
aattgcctttggtaccaatgcaacagtgtttagaaatgttcacattccttcttatcaaggggcattctcttatac

SEQ ID NO: 295580 - DNA, 75 bp, synthetic construct
  source 1..75: mol_type = other DNA
attgaaccagaaagtattaaggtgctggacccggcctgcggctccgggcatatcctgaccgaagcctataacgtg

SEQ ID NO: 295581 - DNA, 75 bp, synthetic construct
  source 1..75: mol_type = other DNA
tcggcggtatttttgtgccgtccagcggcattgtcagctaccgcgaagtgacagcggcgatggcaaaaatctttc

SEQ ID NO: 295582 - DNA, 75 bp, synthetic construct
  source 1..75: mol_type = other DNA
aaaaaaatcgggatttatgagcattcaagcgcaggtagagatttatatggtccattattcagactattgggcgca

SEQ ID NO: 295583 - DNA, 75 bp, synthetic construct
  source 1..75: mol_type = other DNA
acagtttccttagctattgataatcgaccgagtagttacgaaattgctcaggcatgcgcattcgctatcaaacaa

SEQ ID NO: 295584 - DNA, 75 bp, synthetic construct
  source 1..75: mol_type = other DNA
gaacccgttatggtttttagcggagagaaaaatgtgccggcagactgtctgaaacagcagccacttattcttccg

SEQ ID NO: 295585 - DNA, 75 bp, synthetic construct
  source 1..75: mol_type = other DNA
tccgtgtgaccgacttaactcctggccgaatcattacctggagcagtatccccgaaagattgcctgttacctcgc

SEQ ID NO: 295586 - DNA, 75 bp, synthetic construct
  source 1..75: mol_type = other DNA
tttttgggcgtgcatctcacccgaatgatcgatggcagcgtgaccgtcgggccaaacgcggtgctggcttttaaa

SEQ ID NO: 295587 - DNA, 75 bp, synthetic construct
  source 1..75: mol_type = other DNA
ggctgtaagtcaaaatgatcgtgatctggcgaaaatatggtcacaggattatgagttagatgccatattttctac

SEQ ID NO: 295588 - DNA, 75 bp, synthetic construct
  source 1..75: mol_type = other DNA
taaggcaatggctgagaatatgcctgcgattatgataacaggtagccatataccttttgacagaaatggaatgaa

SEQ ID NO: 295589 - DNA, 75 bp, synthetic construct
  source 1..75: mol_type = other DNA
ttaacaaaaattggttcgccttacgtattagatgctttttcttctttaaaagataaatatcaaaattatgcaggt

SEQ ID NO: 295590 - DNA, 75 bp, synthetic construct
  source 1..75: mol_type = other DNA
tttctgataggattacggactatccatcaaataaaagtaggaacttgattttttatgccataaactccccttcag

SEQ ID NO: 295591 - DNA, 75 bp, synthetic construct
  source 1..75: mol_type = other DNA
ttatcaggcaatgaaagataatattcctggtattatggttacgggcagtcatataccatatgatagaaatggttt

SEQ ID NO: 295592 - DNA, 75 bp, synthetic construct
  source 1..75: mol_type = other DNA
ttgagaggcgatgtattgggctttttggctgctgaagctttaagcattgaagccttggcaatacctattaattgt

SEQ ID NO: 295593 - DNA, 75 bp, synthetic construct
  source 1..75: mol_type = other DNA
gacataacgtctcatcagcccgtcagcagaaaaatcagtgcccgtcatttcgcgggtatttttcagtggctgagc

SEQ ID NO: 295594 - DNA, 75 bp, synthetic construct
  source 1..75: mol_type = other DNA
cgacgactgtctggaaatcgccgtgttgaaaggcgatatgggtgacgtgcagcattttgccgatgacgttatcgc

SEQ ID NO: 295595 - DNA, 75 bp, synthetic construct
  source 1..75: mol_type = other DNA
tcagaaactctcttccttgccgttcattctttcgaagataaaaatcgcggtcgtggttatgtcatcacgtctgtt

SEQ ID NO: 295596 - DNA, 75 bp, synthetic construct
  source 1..75: mol_type = other DNA
cataacggctggcgctatcaggaacagagtgctattggtcaggcagagttgctggcgaatgacctcaccgcggtg

SEQ ID NO: 295597 - DNA, 75 bp, synthetic construct
  source 1..75: mol_type = other DNA
cttgaagatggattttttgaaatcctcggcggcgaacatcgctggcgtgctgctattgagcaaggaatttcaacg

SEQ ID NO: 295598 - DNA, 75 bp, synthetic construct
  source 1..75: mol_type = other DNA
aggttgatgttgccaaccttcgcccgaatacctggaacaccaattcggttggtgcgcagaattttgaaaaactga

SEQ ID NO: 295599 - DNA, 75 bp, synthetic construct
  source 1..75: mol_type = other DNA
caaggtttcgcagtgctctcctatgtgtatgaacacgaaaaacgcgacttagccagccgtattgtttccacccag

SEQ ID NO: 295600 - DNA, 75 bp, synthetic construct
  source 1..75: mol_type = other DNA
gacactggaaccacgggtgatgatgacaaaaacccgcgcctgggcgctggacgcagaaactgcgcctgtggcacc

SEQ ID NO: 295601 - DNA, 75 bp, synthetic construct
  source 1..75: mol_type = other DNA
tccctcagaagcaagcttttgttatcgaacgtatcactaaaggcaagcttaaatacgatgccagcctttaccaaa

SEQ ID NO: 295602 - DNA, 75 bp, synthetic construct
  source 1..75: mol_type = other DNA
ccttaagttacagctacttatttatcctgacagtaacaataatacaggtaagtaaatggtatctgacgatgactg

SEQ ID NO: 295603 - DNA, 75 bp, synthetic construct
  source 1..75: mol_type = other DNA
atacagaaagcgaggcacgggtagaagcaatgaataacggtgttttactttgcgaacaattattccccatgcttc

SEQ ID NO: 295604 - DNA, 75 bp, synthetic construct
  source 1..75: mol_type = other DNA
gcacatgtgttgggacaatttcgtaatacagaaagcgaggcacgggtagaagcaatgaataacggtgttttactt

SEQ ID NO: 295605 - DNA, 75 bp, synthetic construct
  source 1..75: mol_type = other DNA
tgatgcgctgccaggcgttacttattcaactgctccataacggctggcgctatcaggaacagagcgctattagtc

SEQ ID NO: 295606 - DNA, 75 bp, synthetic construct
  source 1..75: mol_type = other DNA
atattattgctttatcaaaagttcaatttggtactagtggtgctcgtggcttaatagcagattttagtaacgatg

SEQ ID NO: 295607 - DNA, 75 bp, synthetic construct
  source 1..75: mol_type = other DNA
ccgtagactggaatgaatattacagatttgttgaacgctggggcaatcaccctcgtttctcattcgcggttatcc

SEQ ID NO: 295608 - DNA, 75 bp, synthetic construct
  source 1..75: mol_type = other DNA
tgctttacttttctgaccatgggctgtcggtcagcgacagtgctaatcctgttcatcatgatggtcatgtgcagg

SEQ ID NO: 295609 - DNA, 75 bp, synthetic construct
  source 1..75: mol_type = other DNA
tgcgattgccacacgggcattaatgaaacttggactgggaactctgagcgatttcaggctgctctatacgggatg

SEQ ID NO: 295610 - DNA, 75 bp, synthetic construct
  source 1..75: mol_type = other DNA
aagagcccggcccggcctgtcaccagacgggccacaacagcggcgtaatccatgccggggtctattacacgcccg

SEQ ID NO: 295611 - DNA, 75 bp, synthetic construct
  source 1..75: mol_type = other DNA
aagagcccggcccggcctgtcaccagacgggccacaacagcggcgtgatccatgccggagtctattacacgcccg

SEQ ID NO: 295612 - DNA, 75 bp, synthetic construct
  source 1..75: mol_type = other DNA
cccgcaaaggttgtattagtgactaacgaagtggaatggggattgtgccggagagtcgtctggcacgacattttc

SEQ ID NO: 295613 - DNA, 75 bp, synthetic construct
  source 1..75: mol_type = other DNA
catgcaactgattgatctctatccggatgcccgcattgcgttgctggaaaaagagtccggccctgcctgtcatca

SEQ ID NO: 295614 - DNA, 75 bp, synthetic construct
  source 1..75: mol_type = other DNA
acggcggcgatggcaaaaatcttccaggccagaggcggcgagattatttataacgccgaagtcagcgccctcagt

SEQ ID NO: 295615 - DNA, 75 bp, synthetic construct
  source 1..75: mol_type = other DNA
agtccgtcagcaggaaaatcaatgcccgtaatttcgcaggcatttttcagtggctgaccggtattcgtaccgaaa

SEQ ID NO: 295616 - DNA, 75 bp, synthetic construct
  source 1..75: mol_type = other DNA
ttttcagtggctgaccggcattcgtactgaaaatataccgccattcaatccgctgacagacgaagataatgaact

SEQ ID NO: 295617 - DNA, 75 bp, synthetic construct
  source 1..75: mol_type = other DNA
cagcacggggctgacaactggaaaatcctgccgggaacaccgttatatgacacaattgttattgtcactggtgag

SEQ ID NO: 295618 - DNA, 75 bp, synthetic construct
  source 1..75: mol_type = other DNA
atgaacccgttatggtttttaacggagagaaaaatgtgccggcagacagtctgaaaccgcagccacttattcttc

SEQ ID NO: 295619 - DNA, 75 bp, synthetic construct
  source 1..75: mol_type = other DNA
gtggttaaacgccgaggaactgcgcgagcgcgaaccgaatatcaccgggcttggcggcatttttgtgccgtccag

SEQ ID NO: 295620 - DNA, 75 bp, synthetic construct
  source 1..75: mol_type = other DNA
aagtgttgcccgatggattgtttgccaaagagcgagtagcactgtttctgcgagcagataacaacctctatcaaa

SEQ ID NO: 295621 - DNA, 75 bp, synthetic construct
  source 1..75: mol_type = other DNA
ccgtgattttaaaccctgtgttggcaagttcagcgttggactttcatctggcacatcggggcgtcgtgggctttt

SEQ ID NO: 295622 - DNA, 75 bp, synthetic construct
  source 1..75: mol_type = other DNA
gagctgtggatgctggagcattgccgggaggcgttgaatgccttgtttatacgccaggatatcgctgtcgggcaa

SEQ ID NO: 295623 - DNA, 75 bp, synthetic construct
  source 1..75: mol_type = other DNA
agcagttagcgaagaagatcgtctacttgcaagagagtggtctaaaaaatacaatctcgatgcaattttctcaac

SEQ ID NO: 295624 - DNA, 75 bp, synthetic construct
  source 1..75: mol_type = other DNA
aaaattctacagacctgatggtgaaatcactaaagaggatgagctcgcaattataaatagtgagtatacattttc

SEQ ID NO: 295625 - DNA, 75 bp, synthetic construct
  source 1..75: mol_type = other DNA
ccgatagcaatattgctttcggcactagtggtgctcgtggtttagtcatcgattttacccatgatgtttgtgcag

SEQ ID NO: 295626 - DNA, 75 bp, synthetic construct
  source 1..75: mol_type = other DNA
tctcacccgcatgatcgatggcagcgtgaccgtcgggccaaacgcggtgctggcttttaaacgcgaaggctatcg

SEQ ID NO: 295627 - DNA, 75 bp, synthetic construct
  source 1..75: mol_type = other DNA
acggcggcgatggcaaaaatcttccaggccagaggtggtgagattatttataacgccgaagtcagcgccctcagt

SEQ ID NO: 295628 - DNA, 75 bp, synthetic construct
  source 1..75: mol_type = other DNA
cggcattgtcagctatcgcgaagtgacggcggcgatggcaaaaatcttccaggccagaggcggcgagattattta

SEQ ID NO: 295629 - DNA, 75 bp, synthetic construct
  source 1..75: mol_type = other DNA
agcattttgccgatgacgtcatcgcccagcgcggcgtgcggcacgggcatttgcagtgcctgccgaaggaagatt

SEQ ID NO: 295630 - DNA, 75 bp, synthetic construct
  source 1..75: mol_type = other DNA
gaattcagaattttgctaccgccaaaagcttagctatcctggaaacgggtaagtcgaatacagaaagcttgatct

SEQ ID NO: 295631 - DNA, 75 bp, synthetic construct
  source 1..75: mol_type = other DNA
cggcattgtcagctaccgcgacgtgacggcggcgatggcaaaaatcttccagtccagaggcggtgaaattatcta

SEQ ID NO: 295632 - DNA, 75 bp, synthetic construct
  source 1..75: mol_type = other DNA
atgaaagatttgcattattaattagagatatcaatctttataattgggctattgcaaactatcccaatgtggata

SEQ ID NO: 295633 - DNA, 75 bp, synthetic construct
  source 1..75: mol_type = other DNA
gctgcttacatccatcttgctgaacatctcgatgagcggaggctaatgcttcagtggtgggctgactatcttgat

SEQ ID NO: 295634 - DNA, 75 bp, synthetic construct
  source 1..75: mol_type = other DNA
aaccctgagagaaattcagaagctcagtggagatcaggaaatcatcttcattggtgatcactatgcttataaacc

SEQ ID NO: 295635 - DNA, 75 bp, synthetic construct
  source 1..75: mol_type = other DNA
tgcgtggggcggctaaacttatgccatcggagctttctggcggaatggcgcgacgcgcggcgctggcgcgcgcga

SEQ ID NO: 295636 - DNA, 75 bp, synthetic construct
  source 1..75: mol_type = other DNA
atggagcagtctgtggcgaatttagtcgatatgcgcgatgtcagttttacgcgtggcaatcgctgcatcttcgat

SEQ ID NO: 295637 - DNA, 75 bp, synthetic construct
  source 1..75: mol_type = other DNA
gtgcacaaagccgccagcgcgccgctatggaaaaaagagcaatggaatgacacgcgtaatctgcgccagaaagtg

SEQ ID NO: 295638 - DNA, 75 bp, synthetic construct
  source 1..75: mol_type = other DNA
atgactggcattgccagtgctgccacgtcggtattgattggctatctggcggcgaataccaccacgctgcatctg

SEQ ID NO: 295639 - DNA, 75 bp, synthetic construct
  source 1..75: mol_type = other DNA
ctaaccactcaccgttggtgatcgccgaacagttcggcacgctcaatacgctctatccggggcgaatcgatttgg

SEQ ID NO: 295640 - DNA, 75 bp, synthetic construct
  source 1..75: mol_type = other DNA
cgagcagttcggcacgctcaatactctctatccggggcgaatcgatttagggctgggtcgcgcgccgggtagcga

SEQ ID NO: 295641 - DNA, 75 bp, synthetic construct
  source 1..75: mol_type = other DNA
gcttcagggtgtcgaacctgcaagtaatcatgaagagttgtcagaggagaacggatcatcgcttcaattgcgcaa

SEQ ID NO: 295642 - DNA, 75 bp, synthetic construct
  source 1..75: mol_type = other DNA
gatgtacaacgacgcagccagcgcggcagaacgtgcactatcaggaaaatctgctgacaaagtgcccggaaaaac

SEQ ID NO: 295643 - DNA, 75 bp, synthetic construct
  source 1..75: mol_type = other DNA
gtctgccgtttgcgtttgcctcacacttcgcgccggatatgctgttccaggcgctgcatctttatcgcagcaact

SEQ ID NO: 295644 - DNA, 75 bp, synthetic construct
  source 1..75: mol_type = other DNA
cacaatctggcgctgttaggccgcgacgtccatttgctttcagtgattggcgatgacttttatggcgaaatgctc

SEQ ID NO: 295645 - DNA, 75 bp, synthetic construct
  source 1..75: mol_type = other DNA
atggatatacttcttgactatcataaccacggtggaaccgttattatggtaactcatgacacaaatttaatcaca

SEQ ID NO: 295646 - DNA, 75 bp, synthetic construct
  source 1..75: mol_type = other DNA
gaggaacagtcgttatggtaactcatgatcttgaactaatcgatgagaatatgactttaatccaactattaaata

SEQ ID NO: 295647 - DNA, 75 bp, synthetic construct
  source 1..75: mol_type = other DNA
aacctatagaaaacagaaccatcctgaataatagcactattgagataaaagaggggtcgttcaatattattactg

SEQ ID NO: 295648 - DNA, 75 bp, synthetic construct
  source 1..75: mol_type = other DNA
cttcattgctgtctggtggagaaaaacaacgacttgcgcttgctagagcgttaataaaaagcccccaaatacttc

SEQ ID NO: 295649 - DNA, 75 bp, synthetic construct
  source 1..75: mol_type = other DNA
gaagcagactgttttacggaatttattatcaattacagatctgagaaagcagagtgaatataaatatgttatttc

SEQ ID NO: 295650 - DNA, 75 bp, synthetic construct
  source 1..75: mol_type = other DNA
gatacatcctaccatggtagatatgttcttaatggtattgatatatctaaaataaattataaaaatcaactctat

SEQ ID NO: 295651 - DNA, 75 bp, synthetic construct
  source 1..75: mol_type = other DNA
ttaaaattttacggcgtaacccgctgattcaacagaatgaaatcgccgatattctgcaaatcagccgctcacgtg

SEQ ID NO: 295652 - DNA, 75 bp, synthetic construct
  source 1..75: mol_type = other DNA
gcaaggtgttcagcaactgtttgtttatttgcccgatgaatccgtttattgcagcgaaaaggatggcgaacaatt

SEQ ID NO: 295653 - DNA, 75 bp, synthetic construct
  source 1..75: mol_type = other DNA
acgtccatttactctctgtgattggcaatgatttttatggcgagatgctcttagaagagacgcgccgtgctggag

SEQ ID NO: 295654 - DNA, 75 bp, synthetic construct
  source 1..75: mol_type = other DNA
gaggggtcgttcaatattattactggtccgtctggggttggaaagagttcactacttaacattattggtctgtta

SEQ ID NO: 295655 - DNA, 75 bp, synthetic construct
  source 1..75: mol_type = other DNA
gaggaacggtcgttatggtaactcatgatcttgaactaatcgatgataatatgactttaatccaattattaaata

SEQ ID NO: 295656 - DNA, 75 bp, synthetic construct
  source 1..75: mol_type = other DNA
atggttttatggcgggcctggtgtatagctttctggaaggaagcagtttccgtgacagcgcccgttttgcgatgg

SEQ ID NO: 295657 - DNA, 75 bp, synthetic construct
  source 1..75: mol_type = other DNA
ggcggcgaataccaccacgctgcatctggggtctggcggcgtgatgttacctaaccactcaccgttggtgattgc

SEQ ID NO: 295658 - DNA, 75 bp, synthetic construct
  source 1..75: mol_type = other DNA
acggcgataagccagatcacgatgatgaccatcatcctgacgatgaacctccgcagcccccccgcggtggtcgcc

SEQ ID NO: 295659 - DNA, 75 bp, synthetic construct
  source 1..75: mol_type = other DNA
acccgcaccgcctgagaaacgggttactgctggcgacgttgatattaatagccggatggctggtactcaaacccg

SEQ ID NO: 295660 - DNA, 75 bp, synthetic construct
  source 1..75: mol_type = other DNA
cagaaaaaagcacaattactggctatcctgtcaggattacagccccgcaaagacaaccagcgcccgtcagaaaat

SEQ ID NO: 295661 - DNA, 75 bp, synthetic construct
  source 1..75: mol_type = other DNA
atggcgacaagccagatcacgatgatgacactcatcctgacgatgaaccaccgcagccaccacgtggtggtcgac

SEQ ID NO: 295662 - DNA, 75 bp, synthetic construct
  source 1..75: mol_type = other DNA
gaatgatgaaggggcatcagcagacaatgaaaccgttatgtcggtcattgatggtgacaagccagatcacgatga

SEQ ID NO: 295663 - DNA, 75 bp, synthetic construct
  source 1..75: mol_type = other DNA
ctcacgccgcacctggtggtggatgtgacgctccctggcgtgcaggttcctatggaatatgcacgtgatgggcaa

SEQ ID NO: 295664 - DNA, 75 bp, synthetic construct
  source 1..75: mol_type = other DNA
ctgcccaatgatgaaaccggagactgccagctgtttacccagaatctggcgcggatggcggagcaggcgggggtt

SEQ ID NO: 295665 - DNA, 75 bp, synthetic construct
  source 1..75: mol_type = other DNA
caccgagctgttgcaaccgcgtcgtgaaacgctggagatggtggttcgcgatctctatccacgcggcggtcatgt

SEQ ID NO: 295666 - DNA, 75 bp, synthetic construct
  source 1..75: mol_type = other DNA
agcatccactgatatatttattcctagaggatctgcccttgtcgtcattagattcatctccccaaaatggcaaca

SEQ ID NO: 295667 - DNA, 75 bp, synthetic construct
  source 1..75: mol_type = other DNA
ttctcaccaaactacgcaaagaagcttctctttcgcagtcagaattggccatttttctaggattatcacaatcag

SEQ ID NO: 295668 - DNA, 75 bp, synthetic construct
  source 1..75: mol_type = other DNA
cagctctttacccagaatttagcgcgaatggcggaacaggcgggggttaaattccgctttaatacgcctgtcgat

SEQ ID NO: 295669 - DNA, 75 bp, synthetic construct
  source 1..75: mol_type = other DNA
agggcgggacgctgcaactgttccgcactgaacaacagtatgaaaacgctactcgcgatatcgccgtactggaag

SEQ ID NO: 295670 - DNA, 75 bp, synthetic construct
  source 1..75: mol_type = other DNA
cggcgacgatgtgaaaggaacctctccggaacgtcttacaggcaccgatgttatggcggctattggtaccaccag

SEQ ID NO: 295671 - DNA, 75 bp, synthetic construct
  source 1..75: mol_type = other DNA
ctgactggaggactgcgtctcgataatcatgaaatctatggcagttactggaatccaagattgtacgctgtttat

SEQ ID NO: 295672 - DNA, 75 bp, synthetic construct
  source 1..75: mol_type = other DNA
cgggcattgctgtgatatgttctacagtcatatcatcaggttatgccagttctgataaaaaagaagatacgcttg

SEQ ID NO: 295673 - DNA, 75 bp, synthetic construct
  source 1..75: mol_type = other DNA
ggcactacgctttctggctataccacgcctgaaacgccagaagagccggatctggcgctggtgaaaacgttgagt

SEQ ID NO: 295674 - DNA, 75 bp, synthetic construct
  source 1..75: mol_type = other DNA
atgactgataaaaccattgcgttttcgctactcgatctggcccccattcccgaaggttcttcagcgcgagaagcg

SEQ ID NO: 295675 - DNA, 75 bp, synthetic construct
  source 1..75: mol_type = other DNA
tgattacggttgctctggcatttgtgaccggctggaaggtggccggttggcagcgtgacagtattgatctggtta

SEQ ID NO: 295676 - DNA, 75 bp, synthetic construct
  source 1..75: mol_type = other DNA
cacatacacgatcagagtgaacgccgcttcgtcgtggaatgcgacggcgaaaaagcgggtctggtggaattagtt

SEQ ID NO: 295677 - DNA, 75 bp, synthetic construct
  source 1..75: mol_type = other DNA
ctgggccagccgctcccgtgctgttcgcccgtcagactgggagaaatggacagaggtcacggagattgtgccagc

SEQ ID NO: 295678 - DNA, 75 bp, synthetic construct
  source 1..75: mol_type = other DNA
atgaaaaaatggcctttacttaatgacccgcaccgcctgagaaacgggttactgctggcgacgttgatattaata

SEQ ID NO: 295679 - DNA, 75 bp, synthetic construct
  source 1..75: mol_type = other DNA
cagggagaaagagatggtcacctcgttattgcaacaccccgaaacgcggtattttggcttctattccgtggcgct

SEQ ID NO: 295680 - DNA, 75 bp, synthetic construct
  source 1..75: mol_type = other DNA
ggcactacgctttctggctatactacgcctgaaacgcctgaaacgcctgaaacgcctgaaacgcctgaaacgcca

SEQ ID NO: 295681 - DNA, 75 bp, synthetic construct
  source 1..75: mol_type = other DNA
ctctatatttggtggggggcctaaggcattttccaagtatgaatctgatgatgtcattcaatcagaagcaatgga

SEQ ID NO: 295682 - DNA, 75 bp, synthetic construct
  source 1..75: mol_type = other DNA
gtgatactgaagcgcgttccggatctgcacgtcagaacatggactcgcaactggaaaccgtttcttgaggcgctg

SEQ ID NO: 295683 - DNA, 75 bp, synthetic construct
  source 1..75: mol_type = other DNA
atggaaagcctggtcaaacgtgaccgggctgcggtggtgtgcgatctgctgttcggtttgcctggtcaggatgcg

SEQ ID NO: 295684 - DNA, 75 bp, synthetic construct
  source 1..75: mol_type = other DNA
ctgagcgaatagacgcttgccttgatgcgggagcaaaccgcttctcgattggtattcagtcctttaacagcaaaa

SEQ ID NO: 295685 - DNA, 75 bp, synthetic construct
  source 1..75: mol_type = other DNA
cagcggggtggcgtcttcgccgatggatatgcgtgaaatgttgaataaaaaagcggaagaaaaaggcgctacggc

SEQ ID NO: 295686 - DNA, 75 bp, synthetic construct
  source 1..75: mol_type = other DNA
acgatgccggctggcgctgcatcagtaacagccactggggtcgtactacacgcgaacgtaatctctataacctgc

SEQ ID NO: 295687 - DNA, 75 bp, synthetic construct
  source 1..75: mol_type = other DNA
cccgcgatatcggtctcgacggcgtcgatctctatgcgctcaatgtcctgcccaatacaccgctgggcaaagccg

SEQ ID NO: 295688 - DNA, 75 bp, synthetic construct
  source 1..75: mol_type = other DNA
gattcgtgaaatagaaatggaagcggacagcgtattgcatcagtcagcccccatccacgcggtctatttcggtgg

SEQ ID NO: 295689 - DNA, 75 bp, synthetic construct
  source 1..75: mol_type = other DNA
ctttttcaaacggcaaattagagagcgtggaaaacttgaacgtaccggtaacacaaccgatggcggtgctgaaag

SEQ ID NO: 295690 - DNA, 75 bp, synthetic construct
  source 1..75: mol_type = other DNA
gatgaaacgcagcatcaacgtctgcaacatcttttcgccacaacattgcagaccctcgccggagaacatgaagca

SEQ ID NO: 295691 - DNA, 75 bp, synthetic construct
  source 1..75: mol_type = other DNA
cccattccgtttttacgtccgcgtgacattattaccagccaggcggggcttaacggtattgaaaaacagcagcat

SEQ ID NO: 295692 - DNA, 75 bp, synthetic construct
  source 1..75: mol_type = other DNA
ggggtacgacgcatgatgatgcccgctctgcaaaaagtccctttttctggcttgcctttttccggcatttgcgga

SEQ ID NO: 295693 - DNA, 75 bp, synthetic construct
  source 1..75: mol_type = other DNA
aagagattccttaagccgtctacaaaaccaaatagcaaactaccgtaaagcatttgggaaaatctatgtaatagc

SEQ ID NO: 295694 - DNA, 75 bp, synthetic construct
  source 1..75: mol_type = other DNA
gatgaatcgcagcagcaacgtctgcagtatcttttcaccacgacgttgcataccctcgccggagaacacgaagta

SEQ ID NO: 295695 - DNA, 75 bp, synthetic construct
  source 1..75: mol_type = other DNA
atgatgccgtttcgtggagccattccggttgccaaagagcaactggcacagacctggcaagagatgatcaatcaa

SEQ ID NO: 295696 - DNA, 75 bp, synthetic construct
  source 1..75: mol_type = other DNA
agcgttgaaagtgactcaagccttattccggatgttaaacctaacgtcccctgggttcgactcgcccaacgcgtt

SEQ ID NO: 295697 - DNA, 75 bp, synthetic construct
  source 1..75: mol_type = other DNA
gcgtgggcgcagtctgaaatcaccgcatggatggcagatcgcattgccgaacgtaaccggggctatgacgcatga

SEQ ID NO: 295698 - DNA, 75 bp, synthetic construct
  source 1..75: mol_type = other DNA
gcgtgggcgcagtctgaaatcactgcatggatggcggatcgcattgccgaacgcaaccggggctatgacgcatga

SEQ ID NO: 295699 - DNA, 75 bp, synthetic construct
  source 1..75: mol_type = other DNA
ccccttaaatgcaaatgagcatgactgggggcatattggtcagataattagtcatgagagaaaactatctgaatg

SEQ ID NO: 295700 - DNA, 75 bp, synthetic construct
  source 1..75: mol_type = other DNA
ttaatgtactgtcattgcaggaaagtaaccatattgacttgccgaccttgtggaaagcactcaacttatcgggaa

SEQ ID NO: 295701 - DNA, 75 bp, synthetic construct
  source 1..75: mol_type = other DNA
tcggtcgtcaatggctgcaaacctacccagattctgccattaaaacgcagatggaatactacattgagccagctg

SEQ ID NO: 295702 - DNA, 75 bp, synthetic construct
  source 1..75: mol_type = other DNA
tgaatccgtcgcggcaggcaaaaaaccgctgatgatgatcatgcgtaacgccgaacgtaatgcgcagtggcgtca

SEQ ID NO: 295703 - DNA, 75 bp, synthetic construct
  source 1..75: mol_type = other DNA
cctgattcgtgaaatagaaatggaagcagacagcgtattgcatcagtcagcccccatccacgcggtctatttcgg

SEQ ID NO: 295704 - DNA, 75 bp, synthetic construct
  source 1..75: mol_type = other DNA
tcacgccacattttgctttagacggtgatcagccatttaaagacaggcgcgccatgatgccgtttcgtggggcca

SEQ ID NO: 295705 - DNA, 75 bp, synthetic construct
  source 1..75: mol_type = other DNA
cggcggcacgccttccgcgctctcggcacgcgatttggcaagaatcatcaccaccttacgagaaaagctaccgct

SEQ ID NO: 295706 - DNA, 75 bp, synthetic construct
  source 1..75: mol_type = other DNA
ttccggtcgccaaagagcaactggcacagacctggcaagagatgatcaatcaaacgatctcaccgcgtaagcgac

SEQ ID NO: 295707 - DNA, 75 bp, synthetic construct
  source 1..75: mol_type = other DNA
atgatgccgtttcgtggggccattccagttgccaaagagcaactggcacagacctggcaagagatgatcaatcaa

SEQ ID NO: 295708 - DNA, 75 bp, synthetic construct
  source 1..75: mol_type = other DNA
taagcctgatagctacattttttaaaatgctatcaggattagtgattaataaggcagtctctgtctatatcggtc

SEQ ID NO: 295709 - DNA, 75 bp, synthetic construct
  source 1..75: mol_type = other DNA
gagctgtattgaagcattccatgaggcagaaaccagcgtgaatcataccgcttttcgccgtaatcaatgggaggc

SEQ ID NO: 295710 - DNA, 75 bp, synthetic construct
  source 1..75: mol_type = other DNA
ttcagtccgccaccagcgagatttgcacctccggtggtggaagttttccacagtcaacggaggctgccatcatgg

SEQ ID NO: 295711 - DNA, 75 bp, synthetic construct
  source 1..75: mol_type = other DNA
gtctacgcacaatgcggtactacgagagctgcattgaagcattccatgaggcagggaacagcctgaatcttaccg

SEQ ID NO: 295712 - DNA, 75 bp, synthetic construct
  source 1..75: mol_type = other DNA
agccactgaagcaggtgcacctgaactgaatcgcatttttgctgagggtgtcgcgcatattaaaatgcttccccc

SEQ ID NO: 295713 - DNA, 75 bp, synthetic construct
  source 1..75: mol_type = other DNA
atgacaaccaaactactggacctgagctggaatgcaaatgccatcccggcgatgcaaattgtcggtacgcgcgcg

SEQ ID NO: 295714 - DNA, 75 bp, synthetic construct
  source 1..75: mol_type = other DNA
acaaaagcggaaggacatagagcagaagatattgcagcgatcttttccggtcaccgtacgctattagatgaccca

SEQ ID NO: 295715 - DNA, 75 bp, synthetic construct
  source 1..75: mol_type = other DNA
tctgcctgctggccttgctgctgcctggcgctctggcactgagcgcaacaacctatgcagaaaccaacaaactgg

SEQ ID NO: 295716 - DNA, 75 bp, synthetic construct
  source 1..75: mol_type = other DNA
gtcgtcgctgaagttctcgctgccttacgcaagggtggttacattgaaatgaataaaggcaaactgattgctatc

SEQ ID NO: 295717 - DNA, 75 bp, synthetic construct
  source 1..75: mol_type = other DNA
gaccttgaatttaatggtgagtatttattttatggcaataatattaatgcaaaaaatcttgaattagctatgtca

SEQ ID NO: 295718 - DNA, 75 bp, synthetic construct
  source 1..75: mol_type = other DNA
cgagagctgtattgaagcatttcatgaggccgaaaccagcctgactcacactgctttcagccgtaatcaatggga

SEQ ID NO: 295719 - DNA, 75 bp, synthetic construct
  source 1..75: mol_type = other DNA
gagctgtattgacgcactccatgaggttgaaaccgtccagggtcactccgtgtcccgtcgtaatcaacgggaggt

SEQ ID NO: 295720 - DNA, 75 bp, synthetic construct
  source 1..75: mol_type = other DNA
gcggcgatggccagttttttccgcattaatccggacgaaattctggtggcccacgacgaactggatctgcctcct

SEQ ID NO: 295721 - DNA, 75 bp, synthetic construct
  source 1..75: mol_type = other DNA
atttaactcgccaaccattttactggcggagaacatttatccgtctacggttctgcaactggatccggcggttgt

SEQ ID NO: 295722 - DNA, 75 bp, synthetic construct
  source 1..75: mol_type = other DNA
atgagcgataaattacaaatgatgctggaagatgcaaaggaactgaatgcactgggcctgatgtctgatagtgaa

SEQ ID NO: 295723 - DNA, 75 bp, synthetic construct
  source 1..75: mol_type = other DNA
ctggctttgtttatgtgaatgtcaaaccgcaaacttggattgcgggcaaaaattcaacatcaaatccggcacgaa

SEQ ID NO: 295724 - DNA, 75 bp, synthetic construct
  source 1..75: mol_type = other DNA
cagctttatcgccgatatgacagttgcaatgcgcgcaggtcatctcaaaacgggagctccatgccggggtgagcg

SEQ ID NO: 295725 - DNA, 75 bp, synthetic construct
  source 1..75: mol_type = other DNA
ttgtattccttcagcacggtataacgaaggatgaccaatcagaatggttaaatagccgcaaaatagattatttgg

SEQ ID NO: 295726 - DNA, 75 bp, synthetic construct
  source 1..75: mol_type = other DNA
aatatactcggccctaatgctttttatgaggaattatgtgaagtatctaaagaggattgtctacataaatcattt

SEQ ID NO: 295727 - DNA, 75 bp, synthetic construct
  source 1..75: mol_type = other DNA
atgaacagacgcctccacctcatcaccacctgtacacagcgcaaggcgggccgcgtggaggataccgtttttccg

SEQ ID NO: 295728 - DNA, 75 bp, synthetic construct
  source 1..75: mol_type = other DNA
aacagatattagttttgactccacggttcccgtttcctgtcattggtggggatcgattacgtatctataagatct

SEQ ID NO: 295729 - DNA, 75 bp, synthetic construct
  source 1..75: mol_type = other DNA
gaaaaactccctgctattgcagataaagatatcggtttcattctcaagaataccggtatgacgctgctttccagc

SEQ ID NO: 295730 - DNA, 75 bp, synthetic construct
  source 1..75: mol_type = other DNA
aaaggccgcgccagttatctcggtgaacgcagtattggtcaccaggatcccggcgcgacctcggtgatgtttatg

SEQ ID NO: 295731 - DNA, 75 bp, synthetic construct
  source 1..75: mol_type = other DNA
acgcagaccgcagctacatggtaaccaacggtacttccactgcgaacaagattgttggtatgtactctgctccgg

SEQ ID NO: 295732 - DNA, 75 bp, synthetic construct
  source 1..75: mol_type = other DNA
ctgcagatgctgtgtgaaatcggcgctcactatccgggctttgaaaccgatattcacggtgcataccgtcaggct

SEQ ID NO: 295733 - DNA, 75 bp, synthetic construct
  source 1..75: mol_type = other DNA
acgcagaccgcagctacatggtgaccaacggtacttccactgcgaacaaaattgttggtatgtactctgctccgg

SEQ ID NO: 295734 - DNA, 75 bp, synthetic construct
  source 1..75: mol_type = other DNA
aaaaaatagccgcgacaaaaatcgaccacacctttaaaaccgctaatgatctgtgggaaatgactattacccatc

SEQ ID NO: 295735 - DNA, 75 bp, synthetic construct
  source 1..75: mol_type = other DNA
accgtcggtgcaggtctggctgaattaacctttcagggctgtcatttagttattccgcataaacccgaagagatg

SEQ ID NO: 295736 - DNA, 75 bp, synthetic construct
  source 1..75: mol_type = other DNA
ataaggaaagcagcatttaaactccagcttgatgtttccactttcattttctacaacaaaatacacgacatagaa

SEQ ID NO: 295737 - DNA, 75 bp, synthetic construct
  source 1..75: mol_type = other DNA
acgaccaccgataccggagaaacgccgcgtattgaaggattctccagccgcgacggcaatgtcgaatttgcctag

SEQ ID NO: 295738 - DNA, 75 bp, synthetic construct
  source 1..75: mol_type = other DNA
tcaggtatcgacttattattactggaaccaggaaaaccgcaccgcctgttttttaatatttacggacagagaaaa

SEQ ID NO: 295739 - DNA, 75 bp, synthetic construct
  source 1..75: mol_type = other DNA
gtcagggactggcagttgaacctatgagttgcccgcctaacgcctttaattcaggtatcgacttattattactgg

SEQ ID NO: 295740 - DNA, 75 bp, synthetic construct
  source 1..75: mol_type = other DNA
agatgttccgcgatggcgcggacggcgtaatcagtcgcgggaaagccgaacctggcgataaaaccatgtgtgatg

SEQ ID NO: 295741 - DNA, 75 bp, synthetic construct
  source 1..75: mol_type = other DNA
accatgcttgaggtggagttacccggcggctcccgtatcacggccctgccggcgaatcccgacacggctcgtggg

SEQ ID NO: 295742 - DNA, 75 bp, synthetic construct
  source 1..75: mol_type = other DNA
gggggcagtgagtgctgaattgcttcaggataaagcagcacttcaggacaaacaacatgcatggtgggctttctg

SEQ ID NO: 295743 - DNA, 75 bp, synthetic construct
  source 1..75: mol_type = other DNA
ttaactggctcactcgttgtggcgatattttcaacaccgagagcgagtatcttaccggactggatcgcgaaattg

SEQ ID NO: 295744 - DNA, 75 bp, synthetic construct
  source 1..75: mol_type = other DNA
aacgcagtatcggtcatcaggatcctggcgcgacctccgtgatgtttatgatgaaaatgctggctttagccgcga

SEQ ID NO: 295745 - DNA, 75 bp, synthetic construct
  source 1..75: mol_type = other DNA
aagtacgattacgatgcaagcccgcaaaggccgcgccagttatctcggtgaacgcagtattggtcaccaggaccc

SEQ ID NO: 295746 - DNA, 75 bp, synthetic construct
  source 1..75: mol_type = other DNA
ctaagcagcaggcggtaagggatcaaattattcaaagaaaatctcagtacacagcagacatagctgcagcaaaat

SEQ ID NO: 295747 - DNA, 75 bp, synthetic construct
  source 1..75: mol_type = other DNA
ttgggtaaaaacaagcatggcatattttaaaccaacagatttcatccagtacacatggaaattcgcaacagttac

SEQ ID NO: 295748 - DNA, 75 bp, synthetic construct
  source 1..75: mol_type = other DNA
ccctggtttgaagaacagcaccaagtactctcttcattgcgtactaatacagagctccggagaatatttacagaa

SEQ ID NO: 295749 - DNA, 75 bp, synthetic construct
  source 1..75: mol_type = other DNA
tatcaccatcatcgactttgtcgcactcatcaatggcagttactgctctgtgcctgaagcggatgtgtccctctc

SEQ ID NO: 295750 - DNA, 75 bp, synthetic construct
  source 1..75: mol_type = other DNA
ggcatcgtgtgacgcacctgccgagccagctttccggtggtgagcagcagcgtgtgtgtatcgcccgggcgctgg

SEQ ID NO: 295751 - DNA, 75 bp, synthetic construct
  source 1..75: mol_type = other DNA
atggtaaaacagactatgcaacaaaatcatcagtactatcgtattttatccggagaatcccgcccattccctggc

SEQ ID NO: 295752 - DNA, 75 bp, synthetic construct
  source 1..75: mol_type = other DNA
cagagaagattgacgttgttgtacgacttgcgggactgaaagcctatgatttgcaggaaggggttccggatggtc

SEQ ID NO: 295753 - DNA, 75 bp, synthetic construct
  source 1..75: mol_type = other DNA
acagggaataagtgacgcagacagacgacgtgaagaaattgaggctgcgaacaaacagatggcggcgcaacagaa

SEQ ID NO: 295754 - DNA, 75 bp, synthetic construct
  source 1..75: mol_type = other DNA
atggggtacggcttactggatattgcgaatcagtcacggcgtgaggcattacagggaataagtgacgcagaccga

SEQ ID NO: 295755 - DNA, 75 bp, synthetic construct
  source 1..75: mol_type = other DNA
aaagggagtggagttagatatttactatcccgtcctttcacattgcggagagcatccattggcaaccggatattc

SEQ ID NO: 295756 - DNA, 75 bp, synthetic construct
  source 1..75: mol_type = other DNA
cgatgttctttattgccatgaagaacattctaaataaaggtaatgtcgttcatatacagaatgaagaagatatcg

SEQ ID NO: 295757 - DNA, 75 bp, synthetic construct
  source 1..75: mol_type = other DNA
aatatcatgatgatcctcaatcttaagcggatcaatgagctggtacgccatcagcatattgattatctggtgtga

SEQ ID NO: 295758 - DNA, 75 bp, synthetic construct
  source 1..75: mol_type = other DNA
agccagtcgaattgcgcatggcgtaccggttggcggcgaactggaaatggttgatggcaccacgctgtcacactc

SEQ ID NO: 295759 - DNA, 75 bp, synthetic construct
  source 1..75: mol_type = other DNA
ctgataatgccgttaaaattgggctgggtgcattaatcaccattgttggtggctggattacactgaaattaacac

SEQ ID NO: 295760 - DNA, 75 bp, synthetic construct
  source 1..75: mol_type = other DNA
gttgagcgtgctggcgctgcctgtaaagctgcaggcgcaaaacgcgcgctgccgttgccagtgagcgtaccgtct

SEQ ID NO: 295761 - DNA, 75 bp, synthetic construct
  source 1..75: mol_type = other DNA
gccgttgccggtgagcgtaccttctcactgtgcgctgatgaagcccgcggcggacaagctggcggtagaattagc

SEQ ID NO: 295762 - DNA, 75 bp, synthetic construct
  source 1..75: mol_type = other DNA
ccagtgagcgtaccgtctcactgtgcgctgatgaaaccagcagccgacaaactggcagtagaattagcgaaaatc

SEQ ID NO: 295763 - DNA, 75 bp, synthetic construct
  source 1..75: mol_type = other DNA
gtgtggcagcagcagggcggtaaagcaccggcgatgatggccggtcacagcctgggtgaatactccgcgctggtt

SEQ ID NO: 295764 - DNA, 75 bp, synthetic construct
  source 1..75: mol_type = other DNA
ggacctgccgaagaattgaataaaacctggcaaacccaaccagcactgttgacggcatctgttgcgctgtaccgt

SEQ ID NO: 295765 - DNA, 75 bp, synthetic construct
  source 1..75: mol_type = other DNA
cgacctgtgggcgctgacccagcaggggccagctgaagaactgaataaaacctggcaaacccagcctgcgctgtt

SEQ ID NO: 295766 - DNA, 75 bp, synthetic construct
  source 1..75: mol_type = other DNA
gatgatgcggggagcgtggcgggtgtggttcatgcagtggcctgtacagacgaagccgaagccgaaggcacagga

SEQ ID NO: 295767 - DNA, 75 bp, synthetic construct
  source 1..75: mol_type = other DNA
tgtacgaatactacagacgcctggtgatgatgcgggagccgtggcgggtgtggttcatgcagagaccggtgcaga

SEQ ID NO: 295768 - DNA, 75 bp, synthetic construct
  source 1..75: mol_type = other DNA
tgctgttgatcctgatgttgacctcgaaaggaatggctggcgtaccacgcgcctcaatggtggttatcgccgcca

SEQ ID NO: 295769 - DNA, 75 bp, synthetic construct
  source 1..75: mol_type = other DNA
gaagctgaagctgaagccggacaggatgctccccggaaaaagaccggtaacaaagcgaaacaggcgaaaaaggcc

SEQ ID NO: 295770 - DNA, 75 bp, synthetic construct
  source 1..75: mol_type = other DNA
tgtgcgaatactacagacgcctgctgatgatgcggggagcgtggcgggtgtggttcatgcagtggccggttcaga

SEQ ID NO: 295771 - DNA, 75 bp, synthetic construct
  source 1..75: mol_type = other DNA
ctggcagaagtgcgttgcagtcgttcggcgtttcgtcgtgcgggattcctgttcacgcgtggacgtcagcaggtt

SEQ ID NO: 295772 - DNA, 75 bp, synthetic construct
  source 1..75: mol_type = other DNA
aaaccgttctactttactggctttggccgtcatgaagatgcggatttgcgcggcaaaggattcgataacgtgctg

SEQ ID NO: 295773 - DNA, 75 bp, synthetic construct
  source 1..75: mol_type = other DNA
tggcaggctgctcgtcagtcccccctgctggttggcatagcctgcgaccgggaaaaactgattgtacattacaaa

SEQ ID NO: 295774 - DNA, 75 bp, synthetic construct
  source 1..75: mol_type = other DNA
caattattatcacaacccttagtgactgctccaccgtctggcaagaggtcttactcggcattgaagaagaaggta

SEQ ID NO: 295775 - DNA, 75 bp, synthetic construct
  source 1..75: mol_type = other DNA
gtatctgggcgcaggactggtccggtgtccgtatgacctcctttggtaaacgcgtgatgtggaactggaaatgga

SEQ ID NO: 295776 - DNA, 75 bp, synthetic construct
  source 1..75: mol_type = other DNA
atgattgacctgacgtgccgcctctgtgctggttccggtatttatgacttgtccccttccaaagaaacctgcggt

SEQ ID NO: 295777 - DNA, 75 bp, synthetic construct
  source 1..75: mol_type = other DNA
cgcgagcctgtcattgaagtggtaatggggttggtgctccagggtgtggatgttagagggaaggagcctggagag

SEQ ID NO: 295778 - DNA, 75 bp, synthetic construct
  source 1..75: mol_type = other DNA
ctgtatcactacatgggatgaggtgcttcttggcattgaagaggaaggtattccctttcgcattcaacacattcc

SEQ ID NO: 295779 - DNA, 75 bp, synthetic construct
  source 1..75: mol_type = other DNA
cacggctatctggcaaaagatgcctctggcggtgactatctggtggagtttggcgagttttacggcggcgttgtc

SEQ ID NO: 295780 - DNA, 75 bp, synthetic construct
  source 1..75: mol_type = other DNA
gtattactgccatgttgataacagttgctatatgaacttcgactttagtgccccggaataccatgaactggcgct

SEQ ID NO: 295781 - DNA, 75 bp, synthetic construct
  source 1..75: mol_type = other DNA
ccgcgtctttgatcgcgtcagcgccgtcgtcggtgaacaggtatggaatttcgccgattttgcgacctcgcaagg

SEQ ID NO: 295782 - DNA, 75 bp, synthetic construct
  source 1..75: mol_type = other DNA
atggatacgccacgccagcagttattagattttcaatttcaccaaaatagcgacagttttacgctacattttcaa

SEQ ID NO: 295783 - DNA, 75 bp, synthetic construct
  source 1..75: mol_type = other DNA
gttgaagcgcccatcggcaagccgccggtcttttatcgcgccgacagcgaatgggctgcactgttcgcctcgtta

SEQ ID NO: 295784 - DNA, 75 bp, synthetic construct
  source 1..75: mol_type = other DNA
taaagatctctgcgaagaagcggcacaacacggctatctggcaaaagatgcctctggcggtgactatctggtgga

SEQ ID NO: 295785 - DNA, 75 bp, synthetic construct
  source 1..75: mol_type = other DNA
acccatgaaatccagatcccggatatctcaaccaaagagaaagcccagcaggctattggcctgaacatggaacaa

SEQ ID NO: 295786 - DNA, 75 bp, synthetic construct
  source 1..75: mol_type = other DNA
atgacaaggataaaaataaacgcacgccgtttcttcagcttgttggttccttttttctttctcacttctgttcac

SEQ ID NO: 295787 - DNA, 75 bp, synthetic construct
  source 1..75: mol_type = other DNA
gtgattctgtgggcggggtatcctttctcgcgcgattacaacaagccgcgcggacatgcctttgcggtaaccgat

SEQ ID NO: 295788 - DNA, 75 bp, synthetic construct
  source 1..75: mol_type = other DNA
atgctgaatgttgcagtctcccgtgcgaaggatagcttcctggtcttcggcgatatggatctgtttgaggtccag

SEQ ID NO: 295789 - DNA, 75 bp, synthetic construct
  source 1..75: mol_type = other DNA
cgcactggcggaagatccacgactggtgatcctgtgggcggggtatcctttctcgcgcgattacaacaaaccgcg

SEQ ID NO: 295790 - DNA, 75 bp, synthetic construct
  source 1..75: mol_type = other DNA
ttttttctttttcacttctgttcacgctgaacaaacggcatctcccgcgaaacctgtaactgtggaagcgaagaa

SEQ ID NO: 295791 - DNA, 75 bp, synthetic construct
  source 1..75: mol_type = other DNA
tttccacggtaaatgggcgcgcggcggcccggagatcgtcaacaacttaggttgtgccgactgccataacactgc

SEQ ID NO: 295792 - DNA, 75 bp, synthetic construct
  source 1..75: mol_type = other DNA
ggtaaacaaggcatcagtacaggcgcgaatgaaacgtcgctcaccgtgggcactgtgcactctcttcagggggcg

SEQ ID NO: 295793 - DNA, 75 bp, synthetic construct
  source 1..75: mol_type = other DNA
gcttccctgcatttttactgacgactcactactgggaaggtcgttggctgatggatatggccagcattgatgatc

SEQ ID NO: 295794 - DNA, 75 bp, synthetic construct
  source 1..75: mol_type = other DNA
agtcgattaacgacctgaaaatcaaggttgaagatcaactggttcacgctcacttcgaagcgaaagcggcgctgg

SEQ ID NO: 295795 - DNA, 75 bp, synthetic construct
  source 1..75: mol_type = other DNA
gtgcgtgaaaccctgcgtaccggtgcgccgaaaaacgctgaagatggtccgctaccgatggcgtgctggagttgt

SEQ ID NO: 295796 - DNA, 75 bp, synthetic construct
  source 1..75: mol_type = other DNA
tggcaagccgtttgaaaaaggtgggcgcttcgatcagcaatcgatggtctgtggtcagtgccacgtggagtatta

SEQ ID NO: 295797 - DNA, 75 bp, synthetic construct
  source 1..75: mol_type = other DNA
caggaagagaagaagaaaaaaggcgctaaaggggtaaccgcccgttggcaacgtcgaatgaaactcacgccatgt

SEQ ID NO: 295798 - DNA, 75 bp, synthetic construct
  source 1..75: mol_type = other DNA
tggcgtggcgatgtttgtgttcgatgcagccgttcagcatggcgttaaaaaagctatcaggattttgcaggaagc

SEQ ID NO: 295799 - DNA, 75 bp, synthetic construct
  source 1..75: mol_type = other DNA
ttccttattcgtctttgatgctgccgttcagcacggtgttaaacgcgcaattcaaatcctccaggcggcagcagg

SEQ ID NO: 295800 - DNA, 75 bp, synthetic construct
  source 1..75: mol_type = other DNA
tatcggcaacgtgtattcaacgcttgagcatgggcgtgaaattcatgaaagcgaatttcgtaaactggtaacagc

SEQ ID NO: 295801 - DNA, 75 bp, synthetic construct
  source 1..75: mol_type = other DNA
ttgctgcgtcttgatgaagccagtgaactggcgcgtctggcggcccccgttcttcacgcccgtactttacagcca

SEQ ID NO: 295802 - DNA, 75 bp, synthetic construct
  source 1..75: mol_type = other DNA
acccattgcgaaggtggaagcatcgaccatttctttgaaaatggcgatgaacttaatgagcagatggtacaacgg

SEQ ID NO: 295803 - DNA, 75 bp, synthetic construct
  source 1..75: mol_type = other DNA
cctttgaacatgcgctgaattttattctgcgtcccgatatcgaaggcggctatgtcaatgaccccacagacagcg

SEQ ID NO: 295804 - DNA, 75 bp, synthetic construct
  source 1..75: mol_type = other DNA
gcggtattaacgacgcagtgtatgcggaagtggtgggccacggggaagtatggtcggcacgcctgatgtctgcgg

SEQ ID NO: 295805 - DNA, 75 bp, synthetic construct
  source 1..75: mol_type = other DNA
gaaagttggcgtacataacgatcgccagttgctgcaattttgctacacctcagaagtggccgacagtgcgctgaa

SEQ ID NO: 295806 - DNA, 75 bp, synthetic construct
  source 1..75: mol_type = other DNA
aacaacgttatcaccctctccactttccgtaacgctgaatttctgcaagcctacggtgtggcaattgctgatggc

SEQ ID NO: 295807 - DNA, 75 bp, synthetic construct
  source 1..75: mol_type = other DNA
ctgacagaagcatggtggtataccgagacaaaaacggctggtaactggcttatcggcaacgtgtattcaacgctt

SEQ ID NO: 295808 - DNA, 75 bp, synthetic construct
  source 1..75: mol_type = other DNA
gttacttcgatatagagattgaacatacctttgaccctaccattcagggcagcaacgaaacgggtaaagacgtca

SEQ ID NO: 295809 - DNA, 75 bp, synthetic construct
  source 1..75: mol_type = other DNA
ttacgcgctgaacgcgccgcacaaccgcaggttgatgaagggctttcttacccgttgctgcaacagctgctggtg

SEQ ID NO: 295810 - DNA, 75 bp, synthetic construct
  source 1..75: mol_type = other DNA
aaaaagcagcatcagttttggtggaattagctaaagagtattcatcttataatgggtgtcgacgaaggcaattaa

SEQ ID NO: 295811 - DNA, 75 bp, synthetic construct
  source 1..75: mol_type = other DNA
ccgtgagctggcggcgattgtctggcgtctgtactgctcgctttcgcaacttgagcaagcgccgccgcaaggtac

SEQ ID NO: 295812 - DNA, 75 bp, synthetic construct
  source 1..75: mol_type = other DNA
gttattacgctggggcgtggtgctgctgaactgttcacatgttgtctggcaattgcgggactgggaatcgcgttc

SEQ ID NO: 295813 - DNA, 75 bp, synthetic construct
  source 1..75: mol_type = other DNA
taatctggcaaaaatcgttggcgttgcgctggcgtggttagcgttcgccattctgcgtccaggatcggatgctcg

SEQ ID NO: 295814 - DNA, 75 bp, synthetic construct
  source 1..75: mol_type = other DNA
tcatgctcgcccagcattaccacagcgtggtggatgaagcggcggcgaggaaggtgctggaacaggtagggcttg

SEQ ID NO: 295815 - DNA, 75 bp, synthetic construct
  source 1..75: mol_type = other DNA
caaacggttcggtgacgttaccgccctggatgacattaatctgcgcattgcgcagggtgaatttgtcgccattat

SEQ ID NO: 295816 - DNA, 75 bp, synthetic construct
  source 1..75: mol_type = other DNA
agattagcgatctgtggcaatttttactgtttctctttccactgctggcgacgatgcagcttcttaaattgcaga

SEQ ID NO: 295817 - DNA, 75 bp, synthetic construct
  source 1..75: mol_type = other DNA
ataccttttatagtattattaacgttgggtatcttttttttaaaagaatacattgttcttatactttttaataaa

SEQ ID NO: 295818 - DNA, 75 bp, synthetic construct
  source 1..75: mol_type = other DNA
cgcttaaccgttaccgtcaaacagttcaacacattattaaggatgagatcgacacgttgctgatagcacagaggg

SEQ ID NO: 295819 - DNA, 75 bp, synthetic construct
  source 1..75: mol_type = other DNA
aactgtatttcattgttgcggggagtgatgagtgagcgtggcgttcagcaaaaatcactggcggccacacttgaa

SEQ ID NO: 295820 - DNA, 75 bp, synthetic construct
  source 1..75: mol_type = other DNA
aaaacatgcatgctcgtttactggaacatgccagtttgctttggcagcccgaaacgaccgatgccattcgcacag

SEQ ID NO: 295821 - DNA, 75 bp, synthetic construct
  source 1..75: mol_type = other DNA
cagccagctatgggatatcgctcaggcacgtgtttgtgaagtgattgtcggtattctttgcggcggcatgatgat

SEQ ID NO: 295822 - DNA, 75 bp, synthetic construct
  source 1..75: mol_type = other DNA
tgtggcggacattgcgcagtcgctgccatcgtttaccgaaacgcgtgcgaatgacctgattttaccatcgctgca

SEQ ID NO: 295823 - DNA, 75 bp, synthetic construct
  source 1..75: mol_type = other DNA
atcaatatgatcccgaactggctcgtggtatgtacctatatgaacaccgccggtgctacgacaatattattggat

SEQ ID NO: 295824 - DNA, 75 bp, synthetic construct
  source 1..75: mol_type = other DNA
tgccgctcttcaatcgcttcgcctcgcgagaggttcatgctgcagagtctttgctggccccaggagcaaaattca

SEQ ID NO: 295825 - DNA, 75 bp, synthetic construct
  source 1..75: mol_type = other DNA
ccaacaaaatattgaagcgcattacggtaaatcgcttcatgaagttgtcggtatcgtgacgccttttagcgctca

SEQ ID NO: 295826 - DNA, 75 bp, synthetic construct
  source 1..75: mol_type = other DNA
cttaaccgtgattccctgcgatatgacttcaccttttggttctaatcaatttattaccattccggttgaggaaac

SEQ ID NO: 295827 - DNA, 75 bp, synthetic construct
  source 1..75: mol_type = other DNA
cagttgtcgtaattgatgaaaatgacaatgtgattttcagccagctggtgaatgaaatcaccactgagccggatt

SEQ ID NO: 295828 - DNA, 75 bp, synthetic construct
  source 1..75: mol_type = other DNA
cgatataatttgcttgaggctgaaacaatagcggcctggttggcagagaaccagcaaaatattgaagcgcattac

SEQ ID NO: 295829 - DNA, 75 bp, synthetic construct
  source 1..75: mol_type = other DNA
gaaaacacctgaactggcaaagtttgtaggagatgatttatttaatattctgactgaatgtaaagcctggagttc

SEQ ID NO: 295830 - DNA, 75 bp, synthetic construct
  source 1..75: mol_type = other DNA
cctgcttgaacctttgccaaaaggggcattttcgattggtgagattgagcagtatgacaaatataaaacgacaca

SEQ ID NO: 295831 - DNA, 75 bp, synthetic construct
  source 1..75: mol_type = other DNA
taaagggcagattgttgatctcgtacgccagagtgggcgcgagacgttacgacaactggaagctaaaacgggggc

SEQ ID NO: 295832 - DNA, 75 bp, synthetic construct
  source 1..75: mol_type = other DNA
attatcgcgacttcaacgaataaccaggctgtaacgaacattattgaggcattcgggaaagacttttcgcaaggt

SEQ ID NO: 295833 - DNA, 75 bp, synthetic construct
  source 1..75: mol_type = other DNA
atggaaacgttgattgatacgttaaaagcgatgcaaaaggtgacgtgcaccgagcttgctgccagtttgggcatt

SEQ ID NO: 295834 - DNA, 75 bp, synthetic construct
  source 1..75: mol_type = other DNA
cggatgaagaacgggaagcacgatatgcagccttgcagcaggagtggcgtcaatatctggatgattcagaaaggc

SEQ ID NO: 295835 - DNA, 75 bp, synthetic construct
  source 1..75: mol_type = other DNA
tgctcgacagttatgccgagcaggcggacaacatgccgttattgcatcgggcgctggtgctggcgtgggcacagg

SEQ ID NO: 295836 - DNA, 75 bp, synthetic construct
  source 1..75: mol_type = other DNA
gcgctttacctggtggggtgaagatggcaatggcgacgccttcctcacggcatgggcatggtacgccgactggca

SEQ ID NO: 295837 - DNA, 75 bp, synthetic construct
  source 1..75: mol_type = other DNA
acggttattgatcttaccgatgatacgccggtcgtggtgcgtgaaggcgtaggtgatgtgaagcctttcttataa

SEQ ID NO: 295838 - DNA, 75 bp, synthetic construct
  source 1..75: mol_type = other DNA
acacccgtcagtttacgctgggaaaactgaaactcgatgctgcaacattccatctgtccagaaacggccagatgc

SEQ ID NO: 295839 - DNA, 75 bp, synthetic construct
  source 1..75: mol_type = other DNA
ctaattatcttattatgggcgacagcggctcccccctgtttgcttatgattcctggcaaaaaaaatgggtgctga

SEQ ID NO: 295840 - DNA, 75 bp, synthetic construct
  source 1..75: mol_type = other DNA
ttggcgttctttcatcaggaagtgagtatggtaataactgggttgtcacaactcaagattttcttaatcagcaac

SEQ ID NO: 295841 - DNA, 75 bp, synthetic construct
  source 1..75: mol_type = other DNA
ttaagtgcagaactgcaacaaaatgggcaagtgcaggacagcattagcacaaaactgtcttttgtggacaacagc

SEQ ID NO: 295842 - DNA, 75 bp, synthetic construct
  source 1..75: mol_type = other DNA
ggcacgattaccgccatggtggaaggatgggtgaccagcgcctgggcgaagaaacatcacccgcgctggtaccgt

SEQ ID NO: 295843 - DNA, 75 bp, synthetic construct
  source 1..75: mol_type = other DNA
aattcatgcagacattaacccgcatgaggctgtgttgctggaatgcgttaccacaatggtgactaatctgttgtt

SEQ ID NO: 295844 - DNA, 75 bp, synthetic construct
  source 1..75: mol_type = other DNA
atatctacgccgccctttgggtgaaaggcacgattaccgccatggtggaaggatgggttaccagcgcctgggcga

SEQ ID NO: 295845 - DNA, 75 bp, synthetic construct
  source 1..75: mol_type = other DNA
aggtggataccgcggcatggatgccgtcactcacaaccgataaacaaggcaaagcgtatttcacgttcctgatgc

SEQ ID NO: 295846 - DNA, 75 bp, synthetic construct
  source 1..75: mol_type = other DNA
cgcagttgaagtccacggtgatgccacaggttcagcaatatgcgtgggataaagcggtaaacagcaatcagccgc

SEQ ID NO: 295847 - DNA, 75 bp, synthetic construct
  source 1..75: mol_type = other DNA
taatcagtacacggcgaattttgcctcactgggagaaaaagactacagctctcattcctggtatgccggtgctga

SEQ ID NO: 295848 - DNA, 75 bp, synthetic construct
  source 1..75: mol_type = other DNA
ggcagtgatgaaaatacattcaaggccggaacccagcagattggattcagtaatatcacgccagaaatcaggaca

SEQ ID NO: 295849 - DNA, 75 bp, synthetic construct
  source 1..75: mol_type = other DNA
tctacgctttcctgcgtgagccgcagcgggtgatgagcgcggtgcgcaaagtgctttctgcgccgcagcaaaccc

SEQ ID NO: 295850 - DNA, 75 bp, synthetic construct
  source 1..75: mol_type = other DNA
cctgcgtaagcggcgtggcgcatacttatatggcggcggaacggctggaaaagttgtgccagttagagaagtggg

SEQ ID NO: 295851 - DNA, 75 bp, synthetic construct
  source 1..75: mol_type = other DNA
taaaggataaaaatgggaatcttacaccggtatatacaaatggtggtttcctaaccggaggtactatcagtgctt

SEQ ID NO: 295852 - DNA, 75 bp, synthetic construct
  source 1..75: mol_type = other DNA
gcattactgacctatacagacagcaatgctagcagccaggctttcagcggtaaaacaaaatcgctagggggaggg

SEQ ID NO: 295853 - DNA, 75 bp, synthetic construct
  source 1..75: mol_type = other DNA
gagggtgggcgcgtatcatgaatggtaccggttcaggtgagagtggttacagagataactatacccacgttcaga

SEQ ID NO: 295854 - DNA, 75 bp, synthetic construct
  source 1..75: mol_type = other DNA
tcggcaattcatccacagaagttgctctggcgacgctcagtacgtctggagaattgttattcgtgagcagcgccc

SEQ ID NO: 295855 - DNA, 75 bp, synthetic construct
  source 1..75: mol_type = other DNA
agcgaaggtccgcgcaacgcggtagctactgggctactcatcgcctggcacaaggagtcgattcatggaaagtaa

SEQ ID NO: 295856 - DNA, 75 bp, synthetic construct
  source 1..75: mol_type = other DNA
tggggctgggtgtaggactcaccatcactccgcaagagttgttaacacgcccggcggacacaccgtacattctgg

SEQ ID NO: 295857 - DNA, 75 bp, synthetic construct
  source 1..75: mol_type = other DNA
tggcgtactggtcagtaaccgactggaaatccctttacccattgttgatgaagtcctctacatcgatcgtattcc

SEQ ID NO: 295858 - DNA, 75 bp, synthetic construct
  source 1..75: mol_type = other DNA
ttcagcagtggtcgtgaaaacgccttctggcgacgttaaagcccgttcgatacccgccggaaatatcgaactgct

SEQ ID NO: 295859 - DNA, 75 bp, synthetic construct
  source 1..75: mol_type = other DNA
gggcgacatggtgacgatgattattgccagggaactgggcttaaatgatcgttatctggcagaagaaatcaaaaa

SEQ ID NO: 295860 - DNA, 75 bp, synthetic construct
  source 1..75: mol_type = other DNA
atctgcggctaccttacgaattaaaggaaaaactaaaacagcgagccaaatccaatgtccgctctcttaattcag

SEQ ID NO: 295861 - DNA, 75 bp, synthetic construct
  source 1..75: mol_type = other DNA
ccagtgcagaaatgtgcggcaacacgcgtcagcaggcaatgacctggcttatcgatctggaaatactgaccgcgc

SEQ ID NO: 295862 - DNA, 75 bp, synthetic construct
  source 1..75: mol_type = other DNA
gctgaaatgtgcggtaactcgcgtcagcaggccatgacctggcttatcgatctggaaatgctgaccgcgccttaa

SEQ ID NO: 295863 - DNA, 75 bp, synthetic construct
  source 1..75: mol_type = other DNA
cgtgttgcactgccccttcaatttccagccctattcccggtatgccagatggcaagcccgccaatacgccctgca

SEQ ID NO: 295864 - DNA, 75 bp, synthetic construct
  source 1..75: mol_type = other DNA
gtattcgataacacagcttcagaccaccgatactgaatttgaccagtatggggagccgaagaaaatagagtttac

SEQ ID NO: 295865 - DNA, 75 bp, synthetic construct
  source 1..75: mol_type = other DNA
aagcactaggtgaaccgatgctctccacttcgttgatgttgcctggtagcgaatttaccgaatccgatcccgaag

SEQ ID NO: 295866 - DNA, 75 bp, synthetic construct
  source 1..75: mol_type = other DNA
aaccatcggtatgcgtgtgccttctaacccgattgcgcaggcgctgcttgaagcattgggcgaaccgatgctttc

SEQ ID NO: 295867 - DNA, 75 bp, synthetic construct
  source 1..75: mol_type = other DNA
cccctaaccagcgcaacgggaaggggaaccggatgatctctggtgacttctatccggcgtttctgttttttggtg

SEQ ID NO: 295868 - DNA, 75 bp, synthetic construct
  source 1..75: mol_type = other DNA
atgcgtcagatcgtgttgcagaaaccataaaaaacatcatcaaagagcaggctattaacaccggtaatgaaatgg

SEQ ID NO: 295869 - DNA, 75 bp, synthetic construct
  source 1..75: mol_type = other DNA
ttagcgatgtcgtagctaaacagatgtcactggtggacaacgagcgatacggtgaagacgaccaaatcgcattgc

SEQ ID NO: 295870 - DNA, 75 bp, synthetic construct
  source 1..75: mol_type = other DNA
tatcggtgcgggtgatgaccagatcacgttgtccggcatgttgtatcccgaaattaccggcggggaggtgtcgct

SEQ ID NO: 295871 - DNA, 75 bp, synthetic construct
  source 1..75: mol_type = other DNA
tgccggacggtcacaactttaccctgatgtgtcgcgatctttctgaactctcgacctattcatttgttgataacg

SEQ ID NO: 295872 - DNA, 75 bp, synthetic construct
  source 1..75: mol_type = other DNA
atggcgactcccttttttcacgttgatgttcagcagcccgccgagatgcgctttaaccgcgcccgtgtccgacgg

SEQ ID NO: 295873 - DNA, 75 bp, synthetic construct
  source 1..75: mol_type = other DNA
atgatgatgattctggggatgttccccttttcactgcaaaccacaccttaccagagtgcgaataaaaccaactcc

SEQ ID NO: 295874 - DNA, 75 bp, synthetic construct
  source 1..75: mol_type = other DNA
cgattaccgctcatggcgagacactctccgtactggagtttgatgaacccaccgggaaggatgtccgcgagctgg

SEQ ID NO: 295875 - DNA, 75 bp, synthetic construct
  source 1..75: mol_type = other DNA
cgattaccgctcatggcgagacactctccgtactggagtttgatgagcccaccgggaaagatgtccgcgagctgg

SEQ ID NO: 295876 - DNA, 75 bp, synthetic construct
  source 1..75: mol_type = other DNA
tcgggccggtcgcctgcctgctgccgtttaaagacgaagccgaaggtctgcgcctggcaaacgacgtggagtacg

SEQ ID NO: 295877 - DNA, 75 bp, synthetic construct
  source 1..75: mol_type = other DNA
gatgattggtcataacccgcaaacgcccggcggcgttggcgtgggcatgggaaccaccatcgccgtggagaagtt

SEQ ID NO: 295878 - DNA, 75 bp, synthetic construct
  source 1..75: mol_type = other DNA
ggcaatgcttcaggcttgggggaaggcgttcactcgtcgtgacaatgttatcttaatcattaagacttttaacaa

SEQ ID NO: 295879 - DNA, 75 bp, synthetic construct
  source 1..75: mol_type = other DNA
attgcggatattaaggcgcaatttgccgatctcctgccggcagaaaatatagtcgtatggcatgccgtaggccct

SEQ ID NO: 295880 - DNA, 75 bp, synthetic construct
  source 1..75: mol_type = other DNA
ttaacaaaatatcaacttgaattatctcaacgagcgagagatattgcattagaacttcaaaaagaagttttagca

SEQ ID NO: 295881 - DNA, 75 bp, synthetic construct
  source 1..75: mol_type = other DNA
cgaccgtcagtaaaaaaccattcaccttcattgtggaaaccgaacgcgggctgaacttctccattcgtgccgtgc

SEQ ID NO: 295882 - DNA, 75 bp, synthetic construct
  source 1..75: mol_type = other DNA
tttcaggttgtctgctgttggtcgcccctgcgatgtcagcgacccttagcggtacgctggcgccgacagtggttc

SEQ ID NO: 295883 - DNA, 75 bp, synthetic construct
  source 1..75: mol_type = other DNA
gagtattatctcaatgaaactgttgtaacttttcccgggaatattattcaggacagcactattaatatgctgcgc

SEQ ID NO: 295884 - DNA, 75 bp, synthetic construct
  source 1..75: mol_type = other DNA
ctacacgccagttcaggtaacacgggtagggattaatgacggtgaacaagggctggaaatacagagccagtttct

SEQ ID NO: 295885 - DNA, 75 bp, synthetic construct
  source 1..75: mol_type = other DNA
atttaacaaggaggaagaaaaacaaaaccttttaagtgcgtacacacaactaaacgctattgatatgaatgtccg

SEQ ID NO: 295886 - DNA, 75 bp, synthetic construct
  source 1..75: mol_type = other DNA
atggccaatgttgaaatctataccaaagaaacctgcccgtattgccatcgtgcaaaagcactgctgagcagcaag

SEQ ID NO: 295887 - DNA, 75 bp, synthetic construct
  source 1..75: mol_type = other DNA
agagatgatcaaacgcagcggtcgcaccacggttccccagatttttattgacgcacagcacattggtggctgtga

SEQ ID NO: 295888 - DNA, 75 bp, synthetic construct
  source 1..75: mol_type = other DNA
cgtcgacctgctggggattattgaccaggacgtgccgaaaatgaccgaccacggcttgccgctgccacacatggg

SEQ ID NO: 295889 - DNA, 75 bp, synthetic construct
  source 1..75: mol_type = other DNA
cgcaaatttgctcccatggctagcgtgggaatacgcggttacgtactggaatccggactggagtgagcgacaaaa

SEQ ID NO: 295890 - DNA, 75 bp, synthetic construct
  source 1..75: mol_type = other DNA
aagaaacctgtccctattgccatcgtgcgaaagcgctgttgagcagcaagggtgtgaattttcaggaactgccga

SEQ ID NO: 295891 - DNA, 75 bp, synthetic construct
  source 1..75: mol_type = other DNA
aagaaacctgcccttattgccatcgtgcgaaagcattgctgagcagcaagggcgtgaatttccaggaactgccga

SEQ ID NO: 295892 - DNA, 75 bp, synthetic construct
  source 1..75: mol_type = other DNA
aatatgaggattatgtagattctggagttgaatggttaggggatttaccgagccattgggacgcagtaaaaatga

SEQ ID NO: 295893 - DNA, 75 bp, synthetic construct
  source 1..75: mol_type = other DNA
attgcaaattttctcgacaagaaaaccgctctaatcgacgaagcgatttcgatcaaagagcagcaaattagcctg

SEQ ID NO: 295894 - DNA, 75 bp, synthetic construct
  source 1..75: mol_type = other DNA
tgaaaagacattatctctgaaagcagatttcgttaccccgaaaaatctgttggaagtcttgcttaataaaggggc

SEQ ID NO: 295895 - DNA, 75 bp, synthetic construct
  source 1..75: mol_type = other DNA
tgccgatagaagggtgactttcgtccccgcgcagggagcgacatcgctgtctgaaacggctctgctgacgcactg

SEQ ID NO: 295896 - DNA, 75 bp, synthetic construct
  source 1..75: mol_type = other DNA
tccggagccagagtggcgatttatagcttgacagaaggtgctgcaagacgcgcgaaacggatgctggaaacgctg

SEQ ID NO: 295897 - DNA, 75 bp, synthetic construct
  source 1..75: mol_type = other DNA
gctgtggctcagcgttcagtcttttgtgagcggaatatgggcgcgattagatccgactactcgtacagtgatgcg

SEQ ID NO: 295898 - DNA, 75 bp, synthetic construct
  source 1..75: mol_type = other DNA
ggtggggattcggaacgtcttggtaaaccccattttgctctcgtctattgcattatttttgaaaaagctttgttc

SEQ ID NO: 295899 - DNA, 75 bp, synthetic construct
  source 1..75: mol_type = other DNA
gctgctacgactgtgaagatgaagactggtagcgctgctgctgttctgccagtggttaagtgcctgagctttagc

SEQ ID NO: 295900 - DNA, 75 bp, synthetic construct
  source 1..75: mol_type = other DNA
gtttcactcatggcacactccagcaggacgctatgaacatctgtgagaatgtggtccgtaccattaactctaaga

SEQ ID NO: 295901 - DNA, 75 bp, synthetic construct
  source 1..75: mol_type = other DNA
agtttggcattgagccagtacgcatcaccgataccgacaacattcaggtcaatgaaggtctgccgactaacgccg

SEQ ID NO: 295902 - DNA, 75 bp, synthetic construct
  source 1..75: mol_type = other DNA
tcgttcgttgttcatcagcgaaaatacggttaaaacgcatctttataatcttttcaagaagatagccgtaaaaaa

SEQ ID NO: 295903 - DNA, 75 bp, synthetic construct
  source 1..75: mol_type = other DNA
gctgctgaagacagtagattacccgaagctgaccgggagtctcctgcctaaggcggaggctatcgtagatgcgct

SEQ ID NO: 295904 - DNA, 75 bp, synthetic construct
  source 1..75: mol_type = other DNA
tcactcaggggacgctccagcaagatgcattgaacatttgtgagaatgtggtccgtaccattaactctaagatgg

SEQ ID NO: 295905 - DNA, 75 bp, synthetic construct
  source 1..75: mol_type = other DNA
ggtgtgctgaaatccgctcaggagaacatcccgttccctgtagaagtcctgcctacccgcaatagcctgcctact

SEQ ID NO: 295906 - DNA, 75 bp, synthetic construct
  source 1..75: mol_type = other DNA
cgttgcgacggcacaattctttatcaccggcgctttccctgggtgcgacattccggtacatcatcaggaaaaaat

SEQ ID NO: 295907 - DNA, 75 bp, synthetic construct
  source 1..75: mol_type = other DNA
ccgtggtggcaagcgacctgaagtcgtgaccgttccgtctggacaagaaatcgtggtcgaaccaatcgagcaggc

SEQ ID NO: 295908 - DNA, 75 bp, synthetic construct
  source 1..75: mol_type = other DNA
atgactatgactaaagacagctatcagttcggcattgagccagtacgtatcaccgacacagacaacattcaggtt

SEQ ID NO: 295909 - DNA, 75 bp, synthetic construct
  source 1..75: mol_type = other DNA
gctgaagaccgtagagctgccagtcctgaccgggagccttaccaacaaagcagacgctatcatggacgctctgta

SEQ ID NO: 295910 - DNA, 75 bp, synthetic construct
  source 1..75: mol_type = other DNA
gatggatggcaaagtgatctacacaaataccgttttttgtgcgccaaacgacagtattattgaagaggctattca

SEQ ID NO: 295911 - DNA, 75 bp, synthetic construct
  source 1..75: mol_type = other DNA
tctgccgcatggcacggcgattgacctgcccgacgttgaaacctcacctacggcggagaccctgaacctatggga

SEQ ID NO: 295912 - DNA, 75 bp, synthetic construct
  source 1..75: mol_type = other DNA
cggggcttgccgaatacgtcccctttttacctcacgggctgcaggtggagctgccggacattccgacaaccacca

SEQ ID NO: 295913 - DNA, 75 bp, synthetic construct
  source 1..75: mol_type = other DNA
tggatatgtgagagaaagtggtggcgtatacaaagatcgtagccattttctggctcaggcggcacgtcatgaact

SEQ ID NO: 295914 - DNA, 75 bp, synthetic construct
  source 1..75: mol_type = other DNA
tttacgtcattggttattttgaagaaaccaagttgcgccatatccgcgaaggtgcaccagcacaaattaccctct

SEQ ID NO: 295915 - DNA, 75 bp, synthetic construct
  source 1..75: mol_type = other DNA
ctaacctcacgacccgcgcaggtgactatgccgatactggtaaaccgcagtttgcccttgtcgatagccgttctt

SEQ ID NO: 295916 - DNA, 75 bp, synthetic construct
  source 1..75: mol_type = other DNA
attgttgagctgaatataaaagacaaccaactggttaacgcgggggatcttctgctcacgatcgataaaacgccc

SEQ ID NO: 295917 - DNA, 75 bp, synthetic construct
  source 1..75: mol_type = other DNA
aaaaccgtcagtttacaatggataaactgaagcttgatgcagcaacattccatctctccagaaatgctcgtatgc

SEQ ID NO: 295918 - DNA, 75 bp, synthetic construct
  source 1..75: mol_type = other DNA
cgggtctttactgacaagaatgacggaaccggtaatgcggtatcttctgttgaagggagttccattgcaacaaca

SEQ ID NO: 295919 - DNA, 75 bp, synthetic construct
  source 1..75: mol_type = other DNA
agtgaaaaatatgggctatctgagttcaaatattacagcagagaactctgcagcaattattaatctgggagacag

SEQ ID NO: 295920 - DNA, 75 bp, synthetic construct
  source 1..75: mol_type = other DNA
gcaattgttgaagagatgctattaagcggtgctcattctcttgatgatattcatgacgaagggtatttggcttat

SEQ ID NO: 295921 - DNA, 75 bp, synthetic construct
  source 1..75: mol_type = other DNA
tggatttgtcagagaaagtggcggtgtttacagagatcgtagccattttcttgctcaggccgcgcggcatgaact

SEQ ID NO: 295922 - DNA, 75 bp, synthetic construct
  source 1..75: mol_type = other DNA
caccgaaggatgatcaaatcgcatacggtattaccgttccggcttttgatcgctttgattttggatgtgtttctg

SEQ ID NO: 295923 - DNA, 75 bp, synthetic construct
  source 1..75: mol_type = other DNA
aactgaacgcccaggcacagttaacgaaagcgcaatctgacctcgccaaagccaataacgaagctaaccgtcgcc

SEQ ID NO: 295924 - DNA, 75 bp, synthetic construct
  source 1..75: mol_type = other DNA
tgcaggttacttttgctgagaaaaccgcagtttcagccgccagtttttcggttaatgccggagaaacatttagct

SEQ ID NO: 295925 - DNA, 75 bp, synthetic construct
  source 1..75: mol_type = other DNA
ttcttgatgtccatcaacctgatccaatggttcagggcggtgagactcctcagtttacaccagatatcgatcttg

SEQ ID NO: 295926 - DNA, 75 bp, synthetic construct
  source 1..75: mol_type = other DNA
gaccatatcggggcttttgaaaactgtgaaaaggtgccggtgacagaggctcatctgcgggctttacagcaggat

SEQ ID NO: 295927 - DNA, 75 bp, synthetic construct
  source 1..75: mol_type = other DNA
ccggtggtcaccgcccagtgcagtgcctcacgatcacagcagtccagcgcgaatgtgacacgcagtctctctccg

SEQ ID NO: 295928 - DNA, 75 bp, synthetic construct
  source 1..75: mol_type = other DNA
agcgcagcatcgggcatcaggatcccggcgcgacctcggtgctgtttatggttcagatgctggctgccgccgcca

SEQ ID NO: 295929 - DNA, 75 bp, synthetic construct
  source 1..75: mol_type = other DNA
gttaatgccggagaaacatttagcttaattggcgaatcaggctgtggaaaatccacaattttgcgcgtaattgcc

SEQ ID NO: 295930 - DNA, 75 bp, synthetic construct
  source 1..75: mol_type = other DNA
ttttcccttgtcgacagccactcgttttacgtcattggttattttgaagtgagctggccccctgaaataccagac

SEQ ID NO: 295931 - DNA, 75 bp, synthetic construct
  source 1..75: mol_type = other DNA
ccgtccgctttgctctggataaagtccccagcgatgtcacgctggtgtcgggcaccacctgtagcatcgccgtag

SEQ ID NO: 295932 - DNA, 75 bp, synthetic construct
  source 1..75: mol_type = other DNA
gcccagcgagtaccagtacgctttcgtttagatagcgttcccaacaatttaaccctggtctctggtactacctgc

SEQ ID NO: 295933 - DNA, 75 bp, synthetic construct
  source 1..75: mol_type = other DNA
aggaaaactgcacaacaatagccagcagtcctcagataaacggaatagcaacccaaaaacaatgcaagaagatta

SEQ ID NO: 295934 - DNA, 75 bp, synthetic construct
  source 1..75: mol_type = other DNA
cttttttctcttacccgcgctattaaccctggttggctggataatcacgctacatctggcagattatcaatttcg

SEQ ID NO: 295935 - DNA, 75 bp, synthetic construct
  source 1..75: mol_type = other DNA
ctgcccgacgttcagaccgcgcccgtggctgaaactgtcaatctgtgggagttgcgtattaccgtgaaggagatc

SEQ ID NO: 295936 - DNA, 75 bp, synthetic construct
  source 1..75: mol_type = other DNA
cgatttcaccccgcaatacgttgtgcatgacgcgcatccgggctatgtctccagccagtgggcgcgcgaaatgaa

SEQ ID NO: 295937 - DNA, 75 bp, synthetic construct
  source 1..75: mol_type = other DNA
catgatgcgcatccgggctatgtctccagccagtgggcgcgtgagatgaatctgccgacgcaaacggtgctgcat

SEQ ID NO: 295938 - DNA, 75 bp, synthetic construct
  source 1..75: mol_type = other DNA
tatccgtttatcaactgtacccactgcggcccgcgtttcaccattattcgcgcgatgccttacgaccgtccattt

SEQ ID NO: 295939 - DNA, 75 bp, synthetic construct
  source 1..75: mol_type = other DNA
ccagccagtgggcgagcgaaatgaatctgccgacgcaaacggtgctgcatcatcatgcccacgcagcggcgtgtc

SEQ ID NO: 295940 - DNA, 75 bp, synthetic construct
  source 1..75: mol_type = other DNA
cgacccgctcgatcgtcgcttccatgcccagccggtggcttgcccggaatgtggtccgcatcttgaatgggtaag

SEQ ID NO: 295941 - DNA, 75 bp, synthetic construct
  source 1..75: mol_type = other DNA
gttgtgcatgacgcgcatccgggctatgtctccagccagtgggcgcgtgaaatgaatctgccgacgcaaacggta

SEQ ID NO: 295942 - DNA, 75 bp, synthetic construct
  source 1..75: mol_type = other DNA
accatgacagtgcaggatcactcccacgactcggatatccctcagtctggtcacgcaggccatcatcagacagac

SEQ ID NO: 295943 - DNA, 75 bp, synthetic construct
  source 1..75: mol_type = other DNA
agcggcacaacgggaagaaatactaaagtttctggaatgttaactagtgggaaaagaaaaatggcaagtggttgg

SEQ ID NO: 295944 - DNA, 75 bp, synthetic construct
  source 1..75: mol_type = other DNA
tagagaaagatattctctcgtttttaaaagcggaatttattgaaaatggatattcccgagatcatcttcgaaatg

SEQ ID NO: 295945 - DNA, 75 bp, synthetic construct
  source 1..75: mol_type = other DNA
gatggcggcttgtctctggggcaggggggtattgctgcggcgcgttggttagcgggtgaagtccagaacggataa

SEQ ID NO: 295946 - DNA, 75 bp, synthetic construct
  source 1..75: mol_type = other DNA
gaatgaatcctcccgtcttcgccggcagtggctggatgttctggaggagtgccggcagacagaggccgggccaga

SEQ ID NO: 295947 - DNA, 75 bp, synthetic construct
  source 1..75: mol_type = other DNA
tcctgtagcagacagatggttgccgcttgccgatcttcgcagcccggttaaggccacggacatcatttaccgccc

SEQ ID NO: 295948 - DNA, 75 bp, synthetic construct
  source 1..75: mol_type = other DNA
atccggtgacaatgccgttggtcaataatcacctggatctcgccattttctggcggcagtggctgaactggcaag

SEQ ID NO: 295949 - DNA, 75 bp, synthetic construct
  source 1..75: mol_type = other DNA
atggacaagaataaaaagcaacctgataccaaaggcctagaaagattaagcgcggaaattatcaatgcgctacgt

SEQ ID NO: 295950 - DNA, 75 bp, synthetic construct
  source 1..75: mol_type = other DNA
cgttgggaaaacgccagggtgccgaccagcaacttggtaaaagtacctcccctgcacttctgggtcttgagcaag

SEQ ID NO: 295951 - DNA, 75 bp, synthetic construct
  source 1..75: mol_type = other DNA
acaaacgttagcattctcgattttaagcgatgcggatatgccagaagtttcagaccgtgacagaatcgcgatgat

SEQ ID NO: 295952 - DNA, 75 bp, synthetic construct
  source 1..75: mol_type = other DNA
atgacagcagaatttattatacgtcttatactcgcggcaattgcctgtggcgctattggcatggaaaggcaaatg

SEQ ID NO: 295953 - DNA, 75 bp, synthetic construct
  source 1..75: mol_type = other DNA
caggaaaatgaagatcatgaggtggttgctattgatatccagcttcatgctacgacgccgatagaagacctgttg

SEQ ID NO: 295954 - DNA, 75 bp, synthetic construct
  source 1..75: mol_type = other DNA
tcagtgatgaccttgctggtgctggaagtcttccatcaattaaccttccgcctgatgaacaaaaattaccattta

SEQ ID NO: 295955 - DNA, 75 bp, synthetic construct
  source 1..75: mol_type = other DNA
taaccgcgacatcgtgcagcggatggatgattcggtggtgcgcgaaagcggcgaaatgctgcgccgttcgcgggg

SEQ ID NO: 295956 - DNA, 75 bp, synthetic construct
  source 1..75: mol_type = other DNA
gcggtcatgttgccagtggcagacggtttaccagacgctgcgcgccagttgcttaccacgcccgccgcgccgatt

SEQ ID NO: 295957 - DNA, 75 bp, synthetic construct
  source 1..75: mol_type = other DNA
gccctgcctgtcttgccgaaatgaataccccaggcgaacgacgctggcgttatccgtttatcaactgtactcact

SEQ ID NO: 295958 - DNA, 75 bp, synthetic construct
  source 1..75: mol_type = other DNA
atggactttccgcagcaactcgaagcctgcgttaagcaggccaaccaggcgctgagccgttttatcgccccactg

SEQ ID NO: 295959 - DNA, 75 bp, synthetic construct
  source 1..75: mol_type = other DNA
tcaggacttgatgaagatacattacaggatcgaaacttcgccaccgcaatgtggatagctatgcagatcctgtgt

SEQ ID NO: 295960 - DNA, 75 bp, synthetic construct
  source 1..75: mol_type = other DNA
atggacaagaataaaaagcaacctgataccaaaggcctggaaagattaagcgcagaaattatcaatgcgctacgt

SEQ ID NO: 295961 - DNA, 75 bp, synthetic construct
  source 1..75: mol_type = other DNA
ctacgacgaggaaagcctgtcgctgtgcggcgttgaggacttcttgcaggtagtggcggcttaccgcgatttcct

SEQ ID NO: 295962 - DNA, 75 bp, synthetic construct
  source 1..75: mol_type = other DNA
tctgcaaaactctccgtgccagaacgacaaaaactggtacaacagagtgcgggtaaagcactaactttgctggat

SEQ ID NO: 295963 - DNA, 75 bp, synthetic construct
  source 1..75: mol_type = other DNA
gccggatcaacccatcaagttagacgtgattaaacccgacgggcaggtactgcgtagtgtcgttagtcagccgga

SEQ ID NO: 295964 - DNA, 75 bp, synthetic construct
  source 1..75: mol_type = other DNA
aacatgccgcgctttatggcgagtggcgatacctcgcgcctgacgctggatatcactaatcttaccgataaaccg

SEQ ID NO: 295965 - DNA, 75 bp, synthetic construct
  source 1..75: mol_type = other DNA
aaattattgctgccgctgggcgatatcaagccgcttcagcaggcgggcgtgtatctggcggtgatgaatcaggcc

SEQ ID NO: 295966 - DNA, 75 bp, synthetic construct
  source 1..75: mol_type = other DNA
ttgatcgttactattggcaaggaggtcaaagcactcaacaacgcaaccttcagtaaagattacgaaaaaactata

SEQ ID NO: 295967 - DNA, 75 bp, synthetic construct
  source 1..75: mol_type = other DNA
caccgttaccgtaatcgtctggatatctttacccaaagcctggaaaacggcgcggcccagcagggaattgaagtc

SEQ ID NO: 295968 - DNA, 75 bp, synthetic construct
  source 1..75: mol_type = other DNA
cgaccagtgatgcacagggtcatgtacagctggaaaacgataaaaacgcggcattactgctggcacgtaaagatg

SEQ ID NO: 295969 - DNA, 75 bp, synthetic construct
  source 1..75: mol_type = other DNA
tacaggttattttccagggcagtttgcttgagtcaggtggtcgcccggtgacgcgccgtgctgagcaggctatct

SEQ ID NO: 295970 - DNA, 75 bp, synthetic construct
  source 1..75: mol_type = other DNA
gtatgtggcatattcgcgctaacacgggcgataaccagtatcggatgtgggatttccacgtcgaagattttatgc

SEQ ID NO: 295971 - DNA, 75 bp, synthetic construct
  source 1..75: mol_type = other DNA
tcaaaccgcttcagcaggcgggcgtgtatctggctgtgatgaatcaggccggacgttacgattacagcaatcctg

SEQ ID NO: 295972 - DNA, 75 bp, synthetic construct
  source 1..75: mol_type = other DNA
aaaatggcgagaagcctaaacaggtgaatgtgctggtgtctgccgttgatagtggtgtgctgaatattactgact

SEQ ID NO: 295973 - DNA, 75 bp, synthetic construct
  source 1..75: mol_type = other DNA
tgaagggccgctgtggtggcaagagattgatgttcgggctcaagggctggatctgacgattccggtcgataaaac

SEQ ID NO: 295974 - DNA, 75 bp, synthetic construct
  source 1..75: mol_type = other DNA
tacgtagataatctcaaagccagcaaatttgccgctcagtcttacgctgcgctggtgctggcgcgtcagcaaaaa

SEQ ID NO: 295975 - DNA, 75 bp, synthetic construct
  source 1..75: mol_type = other DNA
tacaaccactaaacccgcaatatccaatgatcccatgcaatgatagctgttccgtagtagggaaagttatcgcca

SEQ ID NO: 295976 - DNA, 75 bp, synthetic construct
  source 1..75: mol_type = other DNA
acgcattatttatgcctatctggtctgcctcatgggttctaccggctggttttaaaggcgctcgtgatgcccgct

SEQ ID NO: 295977 - DNA, 75 bp, synthetic construct
  source 1..75: mol_type = other DNA
tggtttataccggacggtttgatctcaatcctgcgcgtaacacccgtgaaaaattattgctgccgctgggcgata

SEQ ID NO: 295978 - DNA, 75 bp, synthetic construct
  source 1..75: mol_type = other DNA
aaggctcggttacactgccgattggcgattttaacggtgaattgcgcgtcatggcgcaagcctggacggcagatg

SEQ ID NO: 295979 - DNA, 75 bp, synthetic construct
  source 1..75: mol_type = other DNA
aactggcccaacagagtgccggtaaggcgctgacattgctggatctctctgaagttcaactcgatggcgcagcca

SEQ ID NO: 295980 - DNA, 75 bp, synthetic construct
  source 1..75: mol_type = other DNA
tactaccttaatcggtggtttgcagataaaaactactacttcacgcagatctacggcgagcataaaaatacagat

SEQ ID NO: 295981 - DNA, 75 bp, synthetic construct
  source 1..75: mol_type = other DNA
ggtggtggagctgaccgggcggcgtaataacggtgtgcctgtttccctttccgtatcaacaggagcagagaatgg

SEQ ID NO: 295982 - DNA, 75 bp, synthetic construct
  source 1..75: mol_type = other DNA
atgacgctttatagcgggatgaacaataccagcggcaaagtcattactgatattgatcatctgcgccagtcggtg

SEQ ID NO: 295983 - DNA, 75 bp, synthetic construct
  source 1..75: mol_type = other DNA
ccatcacgcctataagtggtatggcggccgaggtatcaaagtctgcgagcggtggcaaatatttgaaaactttta

SEQ ID NO: 295984 - DNA, 75 bp, synthetic construct
  source 1..75: mol_type = other DNA
cgggatattctgctgactccgcagggtagccgtcttgcccgtcgggaatatggctccctgctgtctgccctgatt

SEQ ID NO: 295985 - DNA, 75 bp, synthetic construct
  source 1..75: mol_type = other DNA
gtagccgcattgctcgccgggaatatggttccctgctgtcggctttaatagatcagccacaaaatccggcgttac

SEQ ID NO: 295986 - DNA, 75 bp, synthetic construct
  source 1..75: mol_type = other DNA
cgggacattctgctgaccccacagggtagccgcattgcccgtcgtgaatatggttccctgctgttggcgctaata

SEQ ID NO: 295987 - DNA, 75 bp, synthetic construct
  source 1..75: mol_type = other DNA
gaaaaatacctgtggaacgaccagcaaggctggtatgccgattacgatctgaagagccataaagtacgcaatcag

SEQ ID NO: 295988 - DNA, 75 bp, synthetic construct
  source 1..75: mol_type = other DNA
gttccggcgacgcgtccgaccgttaagtcagcaacgacgcaaccctcaaccaaagaggcacaacccacaccttaa

SEQ ID NO: 295989 - DNA, 75 bp, synthetic construct
  source 1..75: mol_type = other DNA
gaaatgtatgtcgatattaccgggatgcgcaccgataccggtgcgtcagtttcaaccactgtttcactgagttaa

SEQ ID NO: 295990 - DNA, 75 bp, synthetic construct
  source 1..75: mol_type = other DNA
tccggcgacgcgtccactcagtgaatcaacaacacagccggtaaaacaaaaagaggcgggtgatgctgccaactt

SEQ ID NO: 295991 - DNA, 75 bp, synthetic construct
  source 1..75: mol_type = other DNA
gggcaacaggaaaagcgcgttgtaaagctcaaggatggcactattcttaaccgctactgggacgaccgcgataca

SEQ ID NO: 295992 - DNA, 75 bp, synthetic construct
  source 1..75: mol_type = other DNA
gcccaacagcgacccactaatgatcctcgctgactaccggatgcagcagaaccagagcgggtttgatttacggca

SEQ ID NO: 295993 - DNA, 75 bp, synthetic construct
  source 1..75: mol_type = other DNA
gtagccgcattgcccgtcgtgaatatggttccctgctgtcgacactgatagaccagccacaaaatccggcattac

SEQ ID NO: 295994 - DNA, 75 bp, synthetic construct
  source 1..75: mol_type = other DNA
cgtgtaccacttaaagagggcggcgagctttactcggtcaagccacaaccgggcggtttaatctggcgcgactgg

SEQ ID NO: 295995 - DNA, 75 bp, synthetic construct
  source 1..75: mol_type = other DNA
gtctgtaataaaattggtacctatcttaaggcgctggcggcccatgataaccatgttcccttctacgtcgcgtta

SEQ ID NO: 295996 - DNA, 75 bp, synthetic construct
  source 1..75: mol_type = other DNA
cgcatgaaaacggaatccctgttcacgtctgggtggatgaaacgcggccacgtaatcagggcggactcacggcat

SEQ ID NO: 295997 - DNA, 75 bp, synthetic construct
  source 1..75: mol_type = other DNA
cgacgtatacgtattgattttaagacaacctcaataggtaactgcgacatttgcggtaggcagagcgatgctctt

SEQ ID NO: 295998 - DNA, 75 bp, synthetic construct
  source 1..75: mol_type = other DNA
atgcaccagcgggtggcaaaggctatcgcaccggtttgcgcggcggtgggccgatgaccactctgattgaattac

SEQ ID NO: 295999 - DNA, 75 bp, synthetic construct
  source 1..75: mol_type = other DNA
cctctgactacacttatagaattgctggagtataagggcaatcaacaaaccccactgtggcgaaagctgtggcta

SEQ ID NO: 296000 - DNA, 75 bp, synthetic construct
  source 1..75: mol_type = other DNA
tcaacagcaattttgacggttctatggtggtggaactgaccggacagcgtaataacggtgtgcctgtttcccttt

SEQ ID NO: 296001 - DNA, 75 bp, synthetic construct
  source 1..75: mol_type = other DNA
ttaacagcaattttgacggttcaatggtggtggcgctgaacgggcggcgtaataacggtgtgcctgtttcccttt

SEQ ID NO: 296002 - DNA, 75 bp, synthetic construct
  source 1..75: mol_type = other DNA
tggttccctgctgttggcactgatagaccagccacaaaatccggcgttacgtctgcaggtcatgtcggcagtgta

SEQ ID NO: 296003 - DNA, 75 bp, synthetic construct
  source 1..75: mol_type = other DNA
acctgatatcgcaagataagtttgatgcagaagcggcaatgaagaaagtgtctgaactggaaacgctagtggcgc

SEQ ID NO: 296004 - DNA, 75 bp, synthetic construct
  source 1..75: mol_type = other DNA
caggccagtatcaactcgaggctaaaaaatacgttcgccgcgtcagagataaagtcccgtactctgactgggata

SEQ ID NO: 296005 - DNA, 75 bp, synthetic construct
  source 1..75: mol_type = other DNA
cgtctgccgcttaaagagggtggagatttttactcagttaaaccacaacctggtggtttaatctggcgcgactgg

SEQ ID NO: 296006 - DNA, 75 bp, synthetic construct
  source 1..75: mol_type = other DNA
atatggctcgcttctgtcggcgctgattgatatgccgcaaaacccggcactcaggctgcaaattatggtggcgtg

SEQ ID NO: 296007 - DNA, 75 bp, synthetic construct
  source 1..75: mol_type = other DNA
gagaaacgcagcggaagcgaggaaaatgcgttagccatgctggcaatgacagccttcacactcatgacccgacgt

SEQ ID NO: 296008 - DNA, 75 bp, synthetic construct
  source 1..75: mol_type = other DNA
agagccctttcgatcctgttgaggactatacagttcatgaaataacattaggccctggttgcaatgttccaggtt

SEQ ID NO: 296009 - DNA, 75 bp, synthetic construct
  source 1..75: mol_type = other DNA
tccgccatataccaaacgtcagtatgctagttattatcatattcttgaaacggtggcatggggagatgaacctga

SEQ ID NO: 296010 - DNA, 75 bp, synthetic construct
  source 1..75: mol_type = other DNA
actgccatgataatgcggttgcagaaagttttttccagttgttgaaatcggcatggttccagcgatcagatgtca

SEQ ID NO: 296011 - DNA, 75 bp, synthetic construct
  source 1..75: mol_type = other DNA
atgcaatcccggatgacaaaagacattgtcctgaacgcactgctgatggctgtatggcggcgtaatccccaaaaa

SEQ ID NO: 296012 - DNA, 75 bp, synthetic construct
  source 1..75: mol_type = other DNA
atcagtatccgttgaatccggtcataaatgtagatccgcaaggtttggttgatataaatttataccccgaaagtg

SEQ ID NO: 296013 - DNA, 75 bp, synthetic construct
  source 1..75: mol_type = other DNA
attaactcggatgtttgaagattctggctggcttgagcatgaagcgcaagacgcatgggaatataagaaggcacg

SEQ ID NO: 296014 - DNA, 75 bp, synthetic construct
  source 1..75: mol_type = other DNA
ttattattggcgacttcagttctggttgggggcatattgtattttgtaagaaatttacaaagttaattcttcttg

SEQ ID NO: 296015 - DNA, 75 bp, synthetic construct
  source 1..75: mol_type = other DNA
gcaaaccatcgatccgcaactggttacgccacaaggcgctgacgatattctgtcgcctgcctttatgacgtcgtt

SEQ ID NO: 296016 - DNA, 75 bp, synthetic construct
  source 1..75: mol_type = other DNA
ttgaagacttgagtctggtccagcgcgatcggctggcctacatcgattttcggctctacttcttcggtgagatcg

SEQ ID NO: 296017 - DNA, 75 bp, synthetic construct
  source 1..75: mol_type = other DNA
tgcagagcttagtgatggggaaggtcgccgctggcgatttaatctgcccaccaccggtctggaaagtcaggcatt

SEQ ID NO: 296018 - DNA, 75 bp, synthetic construct
  source 1..75: mol_type = other DNA
aactgcgggagtggattaaacgccgtttaattgtcgaacgggatggccgtatttttgctaccgatgcgcttgagg

SEQ ID NO: 296019 - DNA, 75 bp, synthetic construct
  source 1..75: mol_type = other DNA
cagtcagtacacaagccatgagtggcagtcgttcctgaaatcacacggcctggagggtagcatgagccgtcgcgg

SEQ ID NO: 296020 - DNA, 75 bp, synthetic construct
  source 1..75: mol_type = other DNA
attcgccgctttcttaatactcatggtagcattgtcagcaatacaactgctgatggtactgctctaagatggcac

SEQ ID NO: 296021 - DNA, 75 bp, synthetic construct
  source 1..75: mol_type = other DNA
cagaaatgccattatcatgtcgcgattgccgctaacccggaatacagttcgctgaacctggcgatggcggttcag

SEQ ID NO: 296022 - DNA, 75 bp, synthetic construct
  source 1..75: mol_type = other DNA
atgctcacatcgtcgatacgctcgacgaagcgttagccggttgtagcctggtggtgggcaccagcgcacgctccc

SEQ ID NO: 296023 - DNA, 75 bp, synthetic construct
  source 1..75: mol_type = other DNA
ccacggcgcgcagctttgacgggcgaatgacggtcactttgacaggccagcacaacgacaccggccagccacttt

SEQ ID NO: 296024 - DNA, 75 bp, synthetic construct
  source 1..75: mol_type = other DNA
gacgggaatatggcagccttgtgcctgatttgattgacgaacccatgaataacaccacgcgtctgcaatgcatga

SEQ ID NO: 296025 - DNA, 75 bp, synthetic construct
  source 1..75: mol_type = other DNA
aaactattcgcgattgcacgagtattatcgagactcatgtgctgaatcagcacaagcttgaagtacgtaagctca

SEQ ID NO: 296026 - DNA, 75 bp, synthetic construct
  source 1..75: mol_type = other DNA
gttgggtaccgtagcccacgagcacgtaaaggcgaagccagtatcgtgacacccaacaggctccagcggcagttc

SEQ ID NO: 296027 - DNA, 75 bp, synthetic construct
  source 1..75: mol_type = other DNA
atccggatgctcctgatgagcgttgggtaacggacataacctacatcaggacccacgaaggctggctgtatcttg

SEQ ID NO: 296028 - DNA, 75 bp, synthetic construct
  source 1..75: mol_type = other DNA
agtaaacagagtctggagactgatgaaacgtgtcggaataaaggctcaggtcggataccgaagcccgcgggcacg

SEQ ID NO: 296029 - DNA, 75 bp, synthetic construct
  source 1..75: mol_type = other DNA
cgactcccaggcgattgccctggcagcaggggccagcgatgtgattggtaatgctcacatcgtcgatacgctcga

SEQ ID NO: 296030 - DNA, 75 bp, synthetic construct
  source 1..75: mol_type = other DNA
gccccggatgacaaaggatattgtcctgaatgcacttctgatggccgtgtggcgacgtaatcctcaaaagcaggt

SEQ ID NO: 296031 - DNA, 75 bp, synthetic construct
  source 1..75: mol_type = other DNA
gttttataacagtaagcgtcggcatggttccagcgatcagatgtcaccgacagaatatgaaaaccagtattatca

SEQ ID NO: 296032 - DNA, 75 bp, synthetic construct
  source 1..75: mol_type = other DNA
gccgcgcgggtgtttgccgtgctttgcgagttacgcccggaaccagaagatgagattgccgaagtgttgcttaat

SEQ ID NO: 296033 - DNA, 75 bp, synthetic construct
  source 1..75: mol_type = other DNA
taattatgctggtagttggtgtgctcgttggcgtcggtggtttgttgttgtcacaacacgttttgcataaaacat

SEQ ID NO: 296034 - DNA, 75 bp, synthetic construct
  source 1..75: mol_type = other DNA
atgaatatgatgatctcatatcaggaacttgttcgcaccttccctaaattaaaagcatctaaagatatttatcat

SEQ ID NO: 296035 - DNA, 75 bp, synthetic construct
  source 1..75: mol_type = other DNA
ctcctgcacggtctgtttctgggaaaccttccacaaaatgtacccggattcaccgcacgaatacgtcacgttctg

SEQ ID NO: 296036 - DNA, 75 bp, synthetic construct
  source 1..75: mol_type = other DNA
gcgagttacgcccggaacccgcggatgagattgccgaagtgttgcttaataacacctatacgttgtttaacgtgc

SEQ ID NO: 296037 - DNA, 75 bp, synthetic construct
  source 1..75: mol_type = other DNA
gcgagttacgatcggaacccgcggatgagattgccgaagtgttgcttaataatacgaatgaggtgtttaacatgc

SEQ ID NO: 296038 - DNA, 75 bp, synthetic construct
  source 1..75: mol_type = other DNA
atttgggagcacatgcatgagacaggtcgtgtcagtacgacatacgaaactttcagacggcatgttaaacgatac

SEQ ID NO: 296039 - DNA, 75 bp, synthetic construct
  source 1..75: mol_type = other DNA
ggtcaaaagagagccgcctacgaataccggcagtcagctgccaacttttaattttaatcctggaaaaaagaaggg

SEQ ID NO: 296040 - DNA, 75 bp, synthetic construct
  source 1..75: mol_type = other DNA
tacaggagtgggttaagcagaaaaaggggctgaacggcaagagtgcaaacagcgcgagggtagtcttcctggcaa

SEQ ID NO: 296041 - DNA, 75 bp, synthetic construct
  source 1..75: mol_type = other DNA
accgttaatgcctggccctccatcgccaaaggaatgggagctcgtaccagcatgagcgacaacgaactggacatt

SEQ ID NO: 296042 - DNA, 75 bp, synthetic construct
  source 1..75: mol_type = other DNA
gcgcgaaccagcatgagcgaaaacgaactggacattttgacgcggtacttccagtacaacgccaaagatattacc

SEQ ID NO: 296043 - DNA, 75 bp, synthetic construct
  source 1..75: mol_type = other DNA
cgggactgggatttgtcggggctgggttgggtttaaccatttctcgttatattggcgcagttgcaattttgtggg

SEQ ID NO: 296044 - DNA, 75 bp, synthetic construct
  source 1..75: mol_type = other DNA
tgaagcgctcatcaatagcctgacgatgggacttaccgcgacgtttatcgctttaatcctgatactggcgtggct

SEQ ID NO: 296045 - DNA, 75 bp, synthetic construct
  source 1..75: mol_type = other DNA
tcactatggtgtggctggccaaatggatacgtgagaatgtcaaagacgctcgtgtgctgatcgtgactgaccgta

SEQ ID NO: 296046 - DNA, 75 bp, synthetic construct
  source 1..75: mol_type = other DNA
atgagtaatgtcggtcaacgcgaacgtgctacccaaaatcgtatcgttcagttttttcaaactgacttaggctat

SEQ ID NO: 296047 - DNA, 75 bp, synthetic construct
  source 1..75: mol_type = other DNA
gggggatatatcacaagcggagatgagttttttgtaattcctgactttgatgatgttatcgctgtattagatgcc

SEQ ID NO: 296048 - DNA, 75 bp, synthetic construct
  source 1..75: mol_type = other DNA
cacaggcttataagcaatttgggaattcagtcgcagtccctgttatcaatgcaatagcagaaaaaatcatatcga

SEQ ID NO: 296049 - DNA, 75 bp, synthetic construct
  source 1..75: mol_type = other DNA
tctaattaccctgcatcaatggatactaatcccaaacgtgctttttatgataactttggcaaagatgaatggctt

SEQ ID NO: 296050 - DNA, 75 bp, synthetic construct
  source 1..75: mol_type = other DNA
tgagtttattgccgagttaaagaaatccctaccatcggactttaaagccaaaggcgacctattcgtatttgttga

SEQ ID NO: 296051 - DNA, 75 bp, synthetic construct
  source 1..75: mol_type = other DNA
gtcgcgcagagtatcatgctcgctatctcgacattcaaattgtgttaaaagggcaggagggcatgacctttagca

SEQ ID NO: 296052 - DNA, 75 bp, synthetic construct
  source 1..75: mol_type = other DNA
aacgccagctggcggaacgggatgaagagctgaccatcctccaaaaggccgcgacatacttcgcgaagcgcctga

SEQ ID NO: 296053 - DNA, 75 bp, synthetic construct
  source 1..75: mol_type = other DNA
ccttcgcggtgggattttcagtcagtattgcgcagtatatgccgacgctgtggctgggcgcggggcgttttccga

SEQ ID NO: 296054 - DNA, 75 bp, synthetic construct
  source 1..75: mol_type = other DNA
agaaggacaattttacaaaaaatgtttcaggcaagcaatactttttgccagtctactgagcatggtatagtcatt

SEQ ID NO: 296055 - DNA, 75 bp, synthetic construct
  source 1..75: mol_type = other DNA
acgccaggcgattgagcatatcaaagcacacgttacggcagaaacgccaaagggtaagcacgatatcgaaggcaa

SEQ ID NO: 296056 - DNA, 75 bp, synthetic construct
  source 1..75: mol_type = other DNA
gcatttttgccggaaggcgttgatgagaaaacagttatccttaatgaaggtgattttgttgtgttttatccgggg

SEQ ID NO: 296057 - DNA, 75 bp, synthetic construct
  source 1..75: mol_type = other DNA
ttgcccgtctataccaacgtgtttggtaagattggtctggtcacgctgggcgttgcagtagtgatgctattgatg

SEQ ID NO: 296058 - DNA, 75 bp, synthetic construct
  source 1..75: mol_type = other DNA
tttctggatatcaatattccgtcgctggatggtgtgttgctggcgcaaaacatcagccagttcgcccataaaccg

SEQ ID NO: 296059 - DNA, 75 bp, synthetic construct
  source 1..75: mol_type = other DNA
ggtttcctgcatgactactcgctggaaaaagaacagggcgcaccactggagttgatttccccgtgtgaaggtacg

SEQ ID NO: 296060 - DNA, 75 bp, synthetic construct
  source 1..75: mol_type = other DNA
cctggtgccgcagcatttgatgggctttattctcgggatgtggttcctgacgcaggctgccgcgttcttgctggg

SEQ ID NO: 296061 - DNA, 75 bp, synthetic construct
  source 1..75: mol_type = other DNA
attaccgatccgcttgagacgttgcccgtctataccaacgtgtttggtaagattggcctggttacgctgggcgtt

SEQ ID NO: 296062 - DNA, 75 bp, synthetic construct
  source 1..75: mol_type = other DNA
aatgtggtttgcggatgcccaggggctgacatcgccgtggtttatcgtgctggtttacttattccagagcctggg

SEQ ID NO: 296063 - DNA, 75 bp, synthetic construct
  source 1..75: mol_type = other DNA
atcatttcacaatcgacactacagcgccaaagtataccagcatctacccgagccagaacgcaggctatgaaatgg

SEQ ID NO: 296064 - DNA, 75 bp, synthetic construct
  source 1..75: mol_type = other DNA
cagtttatgtattgattttccccgtctggatatcgtgctacgcggcgaatacggcaatctgctggaagcaaagca

SEQ ID NO: 296065 - DNA, 75 bp, synthetic construct
  source 1..75: mol_type = other DNA
ccgacctggcttgggttatcgttttacgatagccgcaccacgtcgttactgcatccggttcgccagatccagctt

SEQ ID NO: 296066 - DNA, 75 bp, synthetic construct
  source 1..75: mol_type = other DNA
taactggaagccatatcgaaatggtggcatgagcattaccaataactatggcggagtacaggtcctttccgaaga

SEQ ID NO: 296067 - DNA, 75 bp, synthetic construct
  source 1..75: mol_type = other DNA
atacgaccaacatccttcaggtttacatcaaccagccgggagacggatcgtatttcgataccgttaaactgagcc

SEQ ID NO: 296068 - DNA, 75 bp, synthetic construct
  source 1..75: mol_type = other DNA
gtactcgaaaacccataccgtatggtcatccgtatcccccgaaccaactggaagccataccgtaacggcggcatc

SEQ ID NO: 296069 - DNA, 75 bp, synthetic construct
  source 1..75: mol_type = other DNA
cgaacagctgaaactggcgaaacgctacgatctgccggtgatccttcattcccggcgtacacacgacaaactggc

SEQ ID NO: 296070 - DNA, 75 bp, synthetic construct
  source 1..75: mol_type = other DNA
gcttatttcgctgggcgtatatgtgaatctgatcctgccacctgccgcacctgcaggcattacgctgctgcgctg

SEQ ID NO: 296071 - DNA, 75 bp, synthetic construct
  source 1..75: mol_type = other DNA
acggtctgcaaaaactgggttatgagttaagttcacatattagtccggtagtgccagtaataatcggttcgaaag

SEQ ID NO: 296072 - DNA, 75 bp, synthetic construct
  source 1..75: mol_type = other DNA
ttgatatcaaacgtcgtctcggtggttatttgattgtcgatgaagcgcattcgtttggcgtgttaggcgcaacgg

SEQ ID NO: 296073 - DNA, 75 bp, synthetic construct
  source 1..75: mol_type = other DNA
tgtcaggtttctggtcccgacgcattacagaggagcaccgtctggtatacgcggttactgatgattcactgctca

SEQ ID NO: 296074 - DNA, 75 bp, synthetic construct
  source 1..75: mol_type = other DNA
ctcctgtacggtctgtttctgggaaaccttccacaaaatgtacccggattcaccgtacgaatacgtcacgttctg

SEQ ID NO: 296075 - DNA, 75 bp, synthetic construct
  source 1..75: mol_type = other DNA
tgtagcgtaaacgcggcccacagtcgcgagcaaattgatgccatcattcaggcatttgctactctaaagcagtaa

SEQ ID NO: 296076 - DNA, 75 bp, synthetic construct
  source 1..75: mol_type = other DNA
gtgccggtaataatcggttcgaaagaggaaggtttacgcatctggcgcgagcttatttcgctgggcgtgtatgtg

SEQ ID NO: 296077 - DNA, 75 bp, synthetic construct
  source 1..75: mol_type = other DNA
gtcttgctggcgagcgactgcaatttagtgacaacgggttaacaccgtttggcacctgtattgatgaagtgtatt

SEQ ID NO: 296078 - DNA, 75 bp, synthetic construct
  source 1..75: mol_type = other DNA
ggcggaaaattttgcccgtgtgttggcattagcggaaaattatcaaccgctgtatgccgcattgggcttgcatcc

SEQ ID NO: 296079 - DNA, 75 bp, synthetic construct
  source 1..75: mol_type = other DNA
cggcgcatggttcgcctcggtgaacgggcgaaagaggcgattatcatcgttgagggcatctacagtatgctcggt

SEQ ID NO: 296080 - DNA, 75 bp, synthetic construct
  source 1..75: mol_type = other DNA
gctgggcgtttatgtgaatcttatcctgccacctgccgcgcctgcaggcatcacgctgctgcgctgtagcgtaaa

SEQ ID NO: 296081 - DNA, 75 bp, synthetic construct
  source 1..75: mol_type = other DNA
gccttgccaccgagaggctgcaattcagtgataacgggttaacgccgtttggaacctgtattgatgaagtctatt

SEQ ID NO: 296082 - DNA, 75 bp, synthetic construct
  source 1..75: mol_type = other DNA
agcatttcataaagcttaagacactgaacaagggcgtggagaaaacatattggggggctgattttggtgagttaa

SEQ ID NO: 296083 - DNA, 75 bp, synthetic construct
  source 1..75: mol_type = other DNA
tgtgaagagctgaagatgaagggctatgacgttaaagccactcataagcagcagcatggacttaaccagtctatt

SEQ ID NO: 296084 - DNA, 75 bp, synthetic construct
  source 1..75: mol_type = other DNA
gttcgcgggaaagcgttaaagcaggtgatcttgtcagactgaagaaacttggtcagaaagaagtaaaaatcccgg

SEQ ID NO: 296085 - DNA, 75 bp, synthetic construct
  source 1..75: mol_type = other DNA
tgccggaaggcgttgatgagaaaacagttatcctaaatgaaggtgattttgttgtgttttatccgggggaagtgc

SEQ ID NO: 296086 - DNA, 75 bp, synthetic construct
  source 1..75: mol_type = other DNA
atgatcatcggaaatattcataatctccagcaatggttgccggaagaattacgtcaggcgattgagtatattaaa

SEQ ID NO: 296087 - DNA, 75 bp, synthetic construct
  source 1..75: mol_type = other DNA
cgactggttggctgataaagacatcgcctttttaccggaaggcgttgaggagaagaccgttatccttaatgaagg

SEQ ID NO: 296088 - DNA, 75 bp, synthetic construct
  source 1..75: mol_type = other DNA
gccatcgcctggctaacggctccctttgcggggttatggcatcgttttacacccaggatccacaggttaaacatg

SEQ ID NO: 296089 - DNA, 75 bp, synthetic construct
  source 1..75: mol_type = other DNA
gtgaattgtttaacaatgccacaatgaatattgcaagattcaatcatccagaattaaacaacattaagcaagatt

SEQ ID NO: 296090 - DNA, 75 bp, synthetic construct
  source 1..75: mol_type = other DNA
ttatcgttgaactaggcttcaatgaaaacgttattaagggcttgcaaagagttgaaaaggcagctttgcagtcag

SEQ ID NO: 296091 - DNA, 75 bp, synthetic construct
  source 1..75: mol_type = other DNA
gtgctgttactcgtcaggggattcggaacagtattgattatatgagccgtgagtcagagctaccagtgatgagtg

SEQ ID NO: 296092 - DNA, 75 bp, synthetic construct
  source 1..75: mol_type = other DNA
tgttcgttgccgggatggggaccagtgttattgccggaaattttatcgcgttttcaattgcggctcttatcaact

SEQ ID NO: 296093 - DNA, 75 bp, synthetic construct
  source 1..75: mol_type = other DNA
agcgagtgtcgaatcagtgttatttaccagtggtcggttattaacccaaatgttcgttgccgggatggggaccag

SEQ ID NO: 296094 - DNA, 75 bp, synthetic construct
  source 1..75: mol_type = other DNA
cacacctggtcggcaatcgcggaaaagatgcttgagacgtttatcacgcagaaaccgtcgcgaggtaacggataa

SEQ ID NO: 296095 - DNA, 75 bp, synthetic construct
  source 1..75: mol_type = other DNA
attttttagtcgtatgattgaaaaggcagcccgttccattataattgaactaaataaacaggctcaggggaagaa

SEQ ID NO: 296096 - DNA, 75 bp, synthetic construct
  source 1..75: mol_type = other DNA
aaataatcgtagatgggcctcgagttcttattaatatcaggtatctttcaactaattatggtaaaagtgatttca

SEQ ID NO: 296097 - DNA, 75 bp, synthetic construct
  source 1..75: mol_type = other DNA
attaccgatcaggatgattattgtaaaataatcgtagatgggcctcgagttcttattaatatcaggtatctttca

SEQ ID NO: 296098 - DNA, 75 bp, synthetic construct
  source 1..75: mol_type = other DNA
ttatcccggtgcgagcattgccgggttatggtgatggtgaaattcaggccactattagcgggttagcgttaccgg

SEQ ID NO: 296099 - DNA, 75 bp, synthetic construct
  source 1..75: mol_type = other DNA
caaccagtgacgctcaggggcatgtgcagctggaaaatgataaaaacgcggcattactgttggcgcgtaaagacg

SEQ ID NO: 296100 - DNA, 75 bp, synthetic construct
  source 1..75: mol_type = other DNA
ctggcaggacaatagcgacggtagcggtgctgtgcgaccagaccgtgtcacgctgaaactggataaagccagtta

SEQ ID NO: 296101 - DNA, 75 bp, synthetic construct
  source 1..75: mol_type = other DNA
tgtctttcgtgatagcggcaacagttttgaagagaagcgatttcgtgccttgtttcactctgtgcagttgcgcaa

SEQ ID NO: 296102 - DNA, 75 bp, synthetic construct
  source 1..75: mol_type = other DNA
gcattaaccgggatgtggaaagaaagcgttatcgggccactgaaatcttacgggatgaggcccgtagcctggtcg

SEQ ID NO: 296103 - DNA, 75 bp, synthetic construct
  source 1..75: mol_type = other DNA
acacctggtctgcgatcgcagagaagatgattgagacgtttacgacagcaaaactgccgtacgtaactgcatcaa

SEQ ID NO: 296104 - DNA, 75 bp, synthetic construct
  source 1..75: mol_type = other DNA
agcatcaaaaaattgcaacccttttaggtggccagacaaggaccgaaaaatttacatgtgtaagaattgagactg

SEQ ID NO: 296105 - DNA, 75 bp, synthetic construct
  source 1..75: mol_type = other DNA
gcaaaaaacaaggtgtgcgcaggactccggaagaggtcgaagcctggatattacaacatctcaaagaggtatctg

SEQ ID NO: 296106 - DNA, 75 bp, synthetic construct
  source 1..75: mol_type = other DNA
catgctgatgcttaacataaaaatcgcgcagtatgtaatagagcagtttacccgagaaggatatgacaatttggg

SEQ ID NO: 296107 - DNA, 75 bp, synthetic construct
  source 1..75: mol_type = other DNA
tgaaagtttcacttggtggtcaagttgtcgttcgaccagatgaaccatctttctttactttcaatcaatcagcta

SEQ ID NO: 296108 - DNA, 75 bp, synthetic construct
  source 1..75: mol_type = other DNA
aactttcatgaaagaaaccattgatgaaggtttatgggacaccctgagtgcacgtctggatttttgtaatctcga

SEQ ID NO: 296109 - DNA, 75 bp, synthetic construct
  source 1..75: mol_type = other DNA
taagcatcatcggatcgtcgggatcggggaaaagtacctttctgcgctgcattaacttcctcgaaaaaccgagcg

SEQ ID NO: 296110 - DNA, 75 bp, synthetic construct
  source 1..75: mol_type = other DNA
ccggctggtggcactgggtagttgttaacttacccgctgatacccgcgtattgccgcaggggtttggctctggtc

SEQ ID NO: 296111 - DNA, 75 bp, synthetic construct
  source 1..75: mol_type = other DNA
ggtaaaaccgggtacgatggcgcagcgccgccgaaaggcgaaacccatcgctacatttttaccgttcacgcgctg

SEQ ID NO: 296112 - DNA, 75 bp, synthetic construct
  source 1..75: mol_type = other DNA
ttcatggccattctaacaatcccactggttttctggtttatgaagaagcagtgccaaagagttgagacaggtaaa

SEQ ID NO: 296113 - DNA, 75 bp, synthetic construct
  source 1..75: mol_type = other DNA
ttgagattaccgtggcagaagaagtggggatcgaagggcgctggggctattttgataaagccggtcagatgcgtg

SEQ ID NO: 296114 - DNA, 75 bp, synthetic construct
  source 1..75: mol_type = other DNA
acataaactcgactttcatttaagtcgtctgtgtagcaaatccaggctgttggatatcgtccataattacattgc

SEQ ID NO: 296115 - DNA, 75 bp, synthetic construct
  source 1..75: mol_type = other DNA
cgtgaaagacaaagaaggcgcaggcgagcagaaccaaaccgtgtggctgattgactgggccaacccacaagccaa

SEQ ID NO: 296116 - DNA, 75 bp, synthetic construct
  source 1..75: mol_type = other DNA
gctgtaaatgttgttttttccagcgaatgggataagtttgctcaaaagacatatcatgcaaattatggtgatttc

SEQ ID NO: 296117 - DNA, 75 bp, synthetic construct
  source 1..75: mol_type = other DNA
aatatgacatggttaaaaatctggctggcacctaagttatatctaatcgaatacgcagcatcactaggctgtgtc

SEQ ID NO: 296118 - DNA, 75 bp, synthetic construct
  source 1..75: mol_type = other DNA
gaaattgccaacgcattacgtgaagagaccgccagctataatattgatattgatgaggtgatagcgcttgcccgt

SEQ ID NO: 296119 - DNA, 75 bp, synthetic construct
  source 1..75: mol_type = other DNA
ttttaccggcacaccgctgatgaagaaagataagaagaagtcggttgaggtgttcggcccttatatccataccta

SEQ ID NO: 296120 - DNA, 75 bp, synthetic construct
  source 1..75: mol_type = other DNA
gccacttagacaacaaagacagccacgaattagcggcaacagagcaatcacagcagcttattcagctaatatgtc

SEQ ID NO: 296121 - DNA, 75 bp, synthetic construct
  source 1..75: mol_type = other DNA
tcatggaaaggaatgtcgataaaactgtttccaagattgagcagcgtcttaaaaacactagagtgtttaagatta

SEQ ID NO: 296122 - DNA, 75 bp, synthetic construct
  source 1..75: mol_type = other DNA
atgagcaaattcacagttgatagttttatcgttgaacttagtttcagtgaaaacgttattaagggattgcaaaga

SEQ ID NO: 296123 - DNA, 75 bp, synthetic construct
  source 1..75: mol_type = other DNA
tatgacatttaacagcagtctgtacgaccaatacgcagaagctacgctattaagttcatcattcccagaagatga

SEQ ID NO: 296124 - DNA, 75 bp, synthetic construct
  source 1..75: mol_type = other DNA
atggcacaatttaaagttgatgattttctgattgagctaggttttaactctcagagggttttaaaaggtctggaa

SEQ ID NO: 296125 - DNA, 75 bp, synthetic construct
  source 1..75: mol_type = other DNA
agtaaacgtattcaggaacctgtgaaagtttcacttggtggtgaagttgctattaaaccagatgaaacatcgttt

SEQ ID NO: 296126 - DNA, 75 bp, synthetic construct
  source 1..75: mol_type = other DNA
taataagacttttgataagattgaacagagagcaagaaatactaaagctttccagtttacaaccagatttaatga

SEQ ID NO: 296127 - DNA, 75 bp, synthetic construct
  source 1..75: mol_type = other DNA
gacggtaaggttctttctaaagatgttcttcctaaagtatccgctgaaatgggaaggatgattgataaagctggt

SEQ ID NO: 296128 - DNA, 75 bp, synthetic construct
  source 1..75: mol_type = other DNA
ttgatgggaaagttattgatgaaaggacaacatcacatattaatcgtatgcaggaagataccttgattagctcag

SEQ ID NO: 296129 - DNA, 75 bp, synthetic construct
  source 1..75: mol_type = other DNA
cacaagatttaaagcttatcaagccgtcagtaaatattcagcctcagacaatcaatatcacaactcagacggtac

SEQ ID NO: 296130 - DNA, 75 bp, synthetic construct
  source 1..75: mol_type = other DNA
caaaaacgctaatatgcatccatctggggtaggtgtgggtagtgactttaatcctgtgtattctggtgaccctaa

SEQ ID NO: 296131 - DNA, 75 bp, synthetic construct
  source 1..75: mol_type = other DNA
gccgctaagtttgtacttggtgataaagcatctgaagctgaaacatttatcaggggactggctgacaagacaggt

SEQ ID NO: 296132 - DNA, 75 bp, synthetic construct
  source 1..75: mol_type = other DNA
atgcacttgctctcggagagttcagaccttattttcaacccgtcatttccgccaaaaatcaccggctaactggct

SEQ ID NO: 296133 - DNA, 75 bp, synthetic construct
  source 1..75: mol_type = other DNA
aaggcgggcatgtatcgcgagcaggaagaacgggcggcacaccgtaacgactggatgtatggcgatgatgactga

SEQ ID NO: 296134 - DNA, 75 bp, synthetic construct
  source 1..75: mol_type = other DNA
tctacggcgtgaagtgtggtgatgaagtgattaaggccgatgcgtatgtgatggcgtttggttcttactcgacgg

SEQ ID NO: 296135 - DNA, 75 bp, synthetic construct
  source 1..75: mol_type = other DNA
gggatgccgcaggagacgcaggcctacgcgccgaaggtactcaggcacatgtcacagatatccggcggcagcatc

SEQ ID NO: 296136 - DNA, 75 bp, synthetic construct
  source 1..75: mol_type = other DNA
cgacgaccggaaaatcgcttcgcatcactcaaactcaatttaacataatatacattatgcgcactaaggtgcgca

SEQ ID NO: 296137 - DNA, 75 bp, synthetic construct
  source 1..75: mol_type = other DNA
tgagtggttgccagagtttatattggctaatttgttttttgtgtctctggcagaggaatcattatttagagggta

SEQ ID NO: 296138 - DNA, 75 bp, synthetic construct
  source 1..75: mol_type = other DNA
atagcattatctttccatctatggccagggtttcacaatcctgtagtgctaaattctgttactgttggccctcaa

SEQ ID NO: 296139 - DNA, 75 bp, synthetic construct
  source 1..75: mol_type = other DNA
cgtagtcgccaaggcggcgacatggaaactaggtcgcgtcgtccagttggacggacgtggacgattcactgacag

SEQ ID NO: 296140 - DNA, 75 bp, synthetic construct
  source 1..75: mol_type = other DNA
tctggcccggcggtgcaaaaatggattgaagaacgcaacaaaaatagagacaaaatatcgtctatagactatcat

SEQ ID NO: 296141 - DNA, 75 bp, synthetic construct
  source 1..75: mol_type = other DNA
ctaaaaaggctatcgacgccatcacaaccgactggtctatccgaggaccgtatcacgaagacgacgggaaatatt

SEQ ID NO: 296142 - DNA, 75 bp, synthetic construct
  source 1..75: mol_type = other DNA
tcaccggcaggatgaaggcgaaggtactgggcagtgatgctgtcaccgcctccgtggactgggcgaccgatgtcc

SEQ ID NO: 296143 - DNA, 75 bp, synthetic construct
  source 1..75: mol_type = other DNA
aggcacaggcggagaccggtgcattgttcacgacactgaacgatgcgctgaacacccgttcaccggaggtcacgg

SEQ ID NO: 296144 - DNA, 75 bp, synthetic construct
  source 1..75: mol_type = other DNA
agagggcctttcagaccgaggtatacgctccgaaggacaccaaaaagggagaggcgagcgatatgccaggcgtgg

SEQ ID NO: 296145 - DNA, 75 bp, synthetic construct
  source 1..75: mol_type = other DNA
taccgaacaacagtatgaaaatgcgacccgcgatatcgccgtgctggaagatgctggcgtaccgtatcagctgct

SEQ ID NO: 296146 - DNA, 75 bp, synthetic construct
  source 1..75: mol_type = other DNA
gcgtctggaacatcccaacgccagtgccgaagcggcgctgacgatgctggcgcagttatccccggcacaatccgg

SEQ ID NO: 296147 - DNA, 75 bp, synthetic construct
  source 1..75: mol_type = other DNA
gcggtatgcaaggcgcgcagatattacagacgacgttatgcgcggctatcgatcgcacactctggctatgtgaat

SEQ ID NO: 296148 - DNA, 75 bp, synthetic construct
  source 1..75: mol_type = other DNA
gcggtatgcaaggcgcgcaaatattgcagacgacgttatgcgcggctatcgatcgcacgctgtggctgtgtgaat

SEQ ID NO: 296149 - DNA, 75 bp, synthetic construct
  source 1..75: mol_type = other DNA
gtttcacgctcatctgcatagctggcaagcgttgtgtcatatcctgcgcgatctacatagcggcgttaatttacc

SEQ ID NO: 296150 - DNA, 75 bp, synthetic construct
  source 1..75: mol_type = other DNA
tacatcggctggcaatactggagatcccaggggttgtgcgccagcagggaagtacactgacacttgcaggcaacg

SEQ ID NO: 296151 - DNA, 75 bp, synthetic construct
  source 1..75: mol_type = other DNA
ttgttcgaagatgaaagccagcaaactgcattaccctctgcactggcgcactattttgcccaactgcgcggcgac

SEQ ID NO: 296152 - DNA, 75 bp, synthetic construct
  source 1..75: mol_type = other DNA
gcgtgagttatttagcctgtttgagtatgctccgacgatattaacatcggtaaagcctgagcaatatttgcatta

SEQ ID NO: 296153 - DNA, 75 bp, synthetic construct
  source 1..75: mol_type = other DNA
tctcaaaacgccgtcaggttggcgcaagtgagtatgcatatattagttttttaacagtcagtcagcgccgtactt

SEQ ID NO: 296154 - DNA, 75 bp, synthetic construct
  source 1..75: mol_type = other DNA
ttttaaagaaggtgaggttgagtggaagactttgggggagatcacgaggaaaattgcatcagggcgtaataagac

SEQ ID NO: 296155 - DNA, 75 bp, synthetic construct
  source 1..75: mol_type = other DNA
gaagcctttatggcccgctggattgcatgggcgatgcagcaaaataatggcgacgtattagtcgtctgcggaggc

SEQ ID NO: 296156 - DNA, 75 bp, synthetic construct
  source 1..75: mol_type = other DNA
ggtgctggcagtggggcttacagcaggccggtgaacaactgctaaaaactatccttacccgtttgcgccagcaca

SEQ ID NO: 296157 - DNA, 75 bp, synthetic construct
  source 1..75: mol_type = other DNA
cagttttgttgatgggcaattgacactggaaccacgggtgatgatgacaaaaacccgcgcctgggcgctggacgc

SEQ ID NO: 296158 - DNA, 75 bp, synthetic construct
  source 1..75: mol_type = other DNA
gacgcgggtctggaactcagctatgagctcgatttttttggcaaacttaagaacatgagtgaggctgatcgccag

SEQ ID NO: 296159 - DNA, 75 bp, synthetic construct
  source 1..75: mol_type = other DNA
tgacctgtgccgcctggtcatcacgggttcgcatgctgggggttgaattcagcgccgagtttaagcaggtggtga

SEQ ID NO: 296160 - DNA, 75 bp, synthetic construct
  source 1..75: mol_type = other DNA
tgacctgtgccgcctggtcatcacgggttcgcatgctgcgggttgaattcagagcagagtttaagcaggtggtga

SEQ ID NO: 296161 - DNA, 75 bp, synthetic construct
  source 1..75: mol_type = other DNA
tgacctgtgccgcctggtcatcacgggttcgcatgctgtgggttgaattcagtgcggagtttaagcaggtggtga

SEQ ID NO: 296162 - DNA, 75 bp, synthetic construct
  source 1..75: mol_type = other DNA
ccttttatcatgccaaagctcaggctgtcggcgcggcagatagcctgaaaacgtttatggaaactccgctcgccc

SEQ ID NO: 296163 - DNA, 75 bp, synthetic construct
  source 1..75: mol_type = other DNA
gcttaatgcgctttccggttttctctcatatcagggatcactacgggtcaacgggatagaattacgtgatttatc

SEQ ID NO: 296164 - DNA, 75 bp, synthetic construct
  source 1..75: mol_type = other DNA
gtactcgagcaaattgacgatatgcatgattactatgcacgctatctgccgcaaatggcgctggcagtgtcggtg

SEQ ID NO: 296165 - DNA, 75 bp, synthetic construct
  source 1..75: mol_type = other DNA
tgacctgtgccgcctggtcatcacgggttcgcatgctgagggttgaattcagtgctgagtttaagcaggtggtga

SEQ ID NO: 296166 - DNA, 75 bp, synthetic construct
  source 1..75: mol_type = other DNA
ggacgttacgcggaattaagcgtggctaacggtcctttcgctacattgctggcccatcgtcaggaggagatttaa

SEQ ID NO: 296167 - DNA, 75 bp, synthetic construct
  source 1..75: mol_type = other DNA
atccgcagcgcggtgaggctgaattaacgtcggccgatccggtgaccattgaggccgaggatctgtttatcacgt

SEQ ID NO: 296168 - DNA, 75 bp, synthetic construct
  source 1..75: mol_type = other DNA
ctgaaaacataccgtgtgacgctttccgtgacccgggaggaggcccggcatctggaagcgttcctggcagagcac

SEQ ID NO: 296169 - DNA, 75 bp, synthetic construct
  source 1..75: mol_type = other DNA
tcacatacagcggtggtctgaaaggcgacaagccgaccacacaggagtacgacgcgggtctggaactcagctatg

SEQ ID NO: 296170 - DNA, 75 bp, synthetic construct
  source 1..75: mol_type = other DNA
tgaaaggcggggagatcgcaccagtaaaattgccaccaaatctgtcgtcacaaattttgctgcagcgaccggata

SEQ ID NO: 296171 - DNA, 75 bp, synthetic construct
  source 1..75: mol_type = other DNA
ggatggggggtatgggcccttgttgttaataatttagtttttgcaacaatatcaacttttctatatttttggttc

SEQ ID NO: 296172 - DNA, 75 bp, synthetic construct
  source 1..75: mol_type = other DNA
tgaaaggcggggagatcgcaccagtaaaattgccaccaaatctatcttcacaaattttgctgcagcgtccggata

SEQ ID NO: 296173 - DNA, 75 bp, synthetic construct
  source 1..75: mol_type = other DNA
ttgtcgatccccaggttacccggttgatcggtgaagctctgactaataactgtgatttgagaatggcagccctga

SEQ ID NO: 296174 - DNA, 75 bp, synthetic construct
  source 1..75: mol_type = other DNA
ccccaactgaatgcctcatccgggatcacctacagcggtggtctgaaaggcgacaagccgaccacacaggagtat

SEQ ID NO: 296175 - DNA, 75 bp, synthetic construct
  source 1..75: mol_type = other DNA
gcacagcttaacgccgcaaaagacgctattgcccaggcgaaagcgcaatatgataagtacgagggaatggtcaaa

SEQ ID NO: 296176 - DNA, 75 bp, synthetic construct
  source 1..75: mol_type = other DNA
acccgggaggaggcccgacatttggaggcgttcctggcagagcacggtggctggaaggcgtttctgtggacaccg

SEQ ID NO: 296177 - DNA, 75 bp, synthetic construct
  source 1..75: mol_type = other DNA
tgacctgtgccgccaggtcatcacgggttcgcatgctgcgggttgaattcagtgccgagtttaagcaggtggtga

SEQ ID NO: 296178 - DNA, 75 bp, synthetic construct
  source 1..75: mol_type = other DNA
aatatggaatttctgcaatatgtatggggatggttttttattcattgttagccacttatatcaataccattcata

SEQ ID NO: 296179 - DNA, 75 bp, synthetic construct
  source 1..75: mol_type = other DNA
aaattatcaacagtcttatgcattcgttgagcaacaactggtgaccgggagtacgaacgttctggcgcttgaaca

SEQ ID NO: 296180 - DNA, 75 bp, synthetic construct
  source 1..75: mol_type = other DNA
aataaagcaaaggaggcaattcgacaggcaaaagatcagtacgatcattataaatcgattcttcagggaaacgat

SEQ ID NO: 296181 - DNA, 75 bp, synthetic construct
  source 1..75: mol_type = other DNA
cgatgaagtgattaaggtcaacctctcccgactgcctgcaaacgttgaatacctggcgtttacggtaaacagctt

SEQ ID NO: 296182 - DNA, 75 bp, synthetic construct
  source 1..75: mol_type = other DNA
atggaaaataaagatacttgtcgatatctacaagaaatattatcagagaataaagatccttatttagtaaaagag

SEQ ID NO: 296183 - DNA, 75 bp, synthetic construct
  source 1..75: mol_type = other DNA
tgattcgccatgctggcgtggtgctggcagactgtaacctcacgcctgaagccctggaatgggtctttaccctcg

SEQ ID NO: 296184 - DNA, 75 bp, synthetic construct
  source 1..75: mol_type = other DNA
aatagccttggagggctaactaacgttatccttgggcgcttctttccattgcgcgaaacatcgcgctggcaagag

SEQ ID NO: 296185 - DNA, 75 bp, synthetic construct
  source 1..75: mol_type = other DNA
gtcggggcgcttaatgagatcagttctggcgaggtgttaagcgatgatgaaattgctgtcctcaaagaaatcaac

SEQ ID NO: 296186 - DNA, 75 bp, synthetic construct
  source 1..75: mol_type = other DNA
catcattgccgcagataacgatcaccagcaaggaaactccgaaagtggagggatcaacacggggaaagatgccgc

SEQ ID NO: 296187 - DNA, 75 bp, synthetic construct
  source 1..75: mol_type = other DNA
agagctggggatattatggggttcccctgtcaacaatgagaccgatcgactcaacgcagtgaacgcactgcatca

SEQ ID NO: 296188 - DNA, 75 bp, synthetic construct
  source 1..75: mol_type = other DNA
tcaccgcagtgaacgcactacatcagcagggtgtgcaacagatttttgtctggatgggagatgaatccgttttct

SEQ ID NO: 296189 - DNA, 75 bp, synthetic construct
  source 1..75: mol_type = other DNA
atgatccgtcagaaagatatccgggttatggccgtgaacgttccgaccacatggattaattctggcatgagtgag

SEQ ID NO: 296190 - DNA, 75 bp, synthetic construct
  source 1..75: mol_type = other DNA
gcatggacacagcactgcaacttatctcgctatcgctaataagcaggaagaaactatcctggcaatcaatgacac

SEQ ID NO: 296191 - DNA, 75 bp, synthetic construct
  source 1..75: mol_type = other DNA
gataacgccttctgccgcgtcgtggatcagaccaataaggaacttgcccgctatcagctgacagaacaaggccca

SEQ ID NO: 296192 - DNA, 75 bp, synthetic construct
  source 1..75: mol_type = other DNA
gttcttggagccaggttcagaaaattatggcctgtagtcgagggacaattagtagtgctgtaaaatcgagggaag

SEQ ID NO: 296193 - DNA, 75 bp, synthetic construct
  source 1..75: mol_type = other DNA
cgcggctgctggagctggtgccgggaagaacgttgttgagaataatgcgctgagtctggttgccagaggctgtgc

SEQ ID NO: 296194 - DNA, 75 bp, synthetic construct
  source 1..75: mol_type = other DNA
atccggagtcgctttcccggcgcggtctgtcagctggtggataccttaaccacgcccactatcgacgtggataaa

SEQ ID NO: 296195 - DNA, 75 bp, synthetic construct
  source 1..75: mol_type = other DNA
ggaggaagtagcccgtgggatagtttccccgatgaaatggccagaaaagccattgttaagcgcgccagcaaatac

SEQ ID NO: 296196 - DNA, 75 bp, synthetic construct
  source 1..75: mol_type = other DNA
gggcctgatgcacatcgcgcagcagtctggcgccattaagtggtgccagtcggctattgttcgaagaaacgacca

SEQ ID NO: 296197 - DNA, 75 bp, synthetic construct
  source 1..75: mol_type = other DNA
atggatgaattaattcgcaggaaactatttaagccttatcgtaaattaaataaacagagttatagaagtcagcaa

SEQ ID NO: 296198 - DNA, 75 bp, synthetic construct
  source 1..75: mol_type = other DNA
gctggtcaattccgggcaaaagcgtcagacgctggcgaataatgcgaaggaatatacgtattcgttgatgtatta

SEQ ID NO: 296199 - DNA, 75 bp, synthetic construct
  source 1..75: mol_type = other DNA
tggcgagcacgaaatctataaactgtaccgcgacctgccgcgcgtgacggtattacacccgatgagctggcagaa

SEQ ID NO: 296200 - DNA, 75 bp, synthetic construct
  source 1..75: mol_type = other DNA
atcagaagcaaaccgtaagcacgctggcaacgctgtcagcgggtatggctggcggcattgccagtggcgatgtgg

SEQ ID NO: 296201 - DNA, 75 bp, synthetic construct
  source 1..75: mol_type = other DNA
atccgggacagggacaatcagaagcagaatctggcgaacctgagccgtgaccctgcgcacgctaatgacagtatc

SEQ ID NO: 296202 - DNA, 75 bp, synthetic construct
  source 1..75: mol_type = other DNA
cgatatttgacaaggagaaagagcagaggcgtctgcagacagtggggcttatcagtgacattggcagtcaggtgg

SEQ ID NO: 296203 - DNA, 75 bp, synthetic construct
  source 1..75: mol_type = other DNA
actactatcgcgaccagttgttgagtttcaaagagggtgaggttgagtggaagaccttaggagaaattggtcatt

SEQ ID NO: 296204 - DNA, 75 bp, synthetic construct
  source 1..75: mol_type = other DNA
aacggctgaccagcgcactggaactggagtatgaaacccatttctgccgttttctgatgccaaccattcgcggag

SEQ ID NO: 296205 - DNA, 75 bp, synthetic construct
  source 1..75: mol_type = other DNA
aaaatataccgatattaaaggagaattggggctatcaaaagaaatgacacccagtaggattcctggtatagctgg

SEQ ID NO: 296206 - DNA, 75 bp, synthetic construct
  source 1..75: mol_type = other DNA
aacaggaacaagaacaggaaagggataaaacccttctggtccatggcgaaaaaatcgccacggacccacaggggg

SEQ ID NO: 296207 - DNA, 75 bp, synthetic construct
  source 1..75: mol_type = other DNA
atcgtcgctcatggaatggggtctccgcatcttcatggttatcaccgcctgaccctggcccacttttttctgccg

SEQ ID NO: 296208 - DNA, 75 bp, synthetic construct
  source 1..75: mol_type = other DNA
tgcatcaaattgcttggatcatcattattgcctctggcttgattgctaggctaactaaaccaaagcaaaaaccaa

SEQ ID NO: 296209 - DNA, 75 bp, synthetic construct
  source 1..75: mol_type = other DNA
aaaagaatttaaccagccatactggcgaattaatgaggaatcatgttactggcgtgatgctttattccgtgcatt

SEQ ID NO: 296210 - DNA, 75 bp, synthetic construct
  source 1..75: mol_type = other DNA
tggtattggtctgtccgggctgctttctccagtaatggcgatcgtagcgctgtgtgttgcagctatcgggtttat

SEQ ID NO: 296211 - DNA, 75 bp, synthetic construct
  source 1..75: mol_type = other DNA
atatcaccattatatcggcttcaacagatttaataatcaggtgggcggggcgacagaatgcgatttaatggaaca

SEQ ID NO: 296212 - DNA, 75 bp, synthetic construct
  source 1..75: mol_type = other DNA
aagatttataacgaaattagcaaccttaaagagtcaaaaggggcgaaagttttagttatgagccttgaaggtctt

SEQ ID NO: 296213 - DNA, 75 bp, synthetic construct
  source 1..75: mol_type = other DNA
tggcacgccccggcgctggcaaaaagatggcgcgaatgcttgcaggaaagtcaaaaaccagaattaccatcactg

SEQ ID NO: 296214 - DNA, 75 bp, synthetic construct
  source 1..75: mol_type = other DNA
tggcccgtcatcaactgacccatcagcctgcatttatcgccggttttagccgtcttttgaatcaacttaatgacg

SEQ ID NO: 296215 - DNA, 75 bp, synthetic construct
  source 1..75: mol_type = other DNA
caagcgttgtgtcatatcctgcgcgatctacatagcggcgttaatttacccggcgtttctctttttgcggcggta

SEQ ID NO: 296216 - DNA, 75 bp, synthetic construct
  source 1..75: mol_type = other DNA
aaaagaatttaaccagccatactggcgaattaatgaagagtcatgttactggcgtgatgctttattccgtgcatt

SEQ ID NO: 296217 - DNA, 75 bp, synthetic construct
  source 1..75: mol_type = other DNA
ggcgtgaaaatttatttcgtgctttacgtgagttgtttagcctgtttgagtatgcgccgacgatattaacatcgg

SEQ ID NO: 296218 - DNA, 75 bp, synthetic construct
  source 1..75: mol_type = other DNA
tcggataattggtaagcatcttgccgttcctcgctggcaggatacatgtgattattataatcagatgatggagcg

SEQ ID NO: 296219 - DNA, 75 bp, synthetic construct
  source 1..75: mol_type = other DNA
ggaacgcacatcactggcgtggtttcgtaccatgctgggctacggcgcgttgatggcgttggctatcaaacacaa

SEQ ID NO: 296220 - DNA, 75 bp, synthetic construct
  source 1..75: mol_type = other DNA
accgggaccgtctgcgggacgggttgattatcctgacgtgttctgtcaacgacggatgaaaagtgatccacttat

SEQ ID NO: 296221 - DNA, 75 bp, synthetic construct
  source 1..75: mol_type = other DNA
gaagaaatccgctttcagtgcctggaaggccagattacgcgagggggtgccaccagaggccatgctggatggcgt

SEQ ID NO: 296222 - DNA, 75 bp, synthetic construct
  source 1..75: mol_type = other DNA
tgaagcaggcatgtcttccgccgttacagtacacttcgatgaatcagtgtatttaaacagcttttcttttggtat

SEQ ID NO: 296223 - DNA, 75 bp, synthetic construct
  source 1..75: mol_type = other DNA
accatcgccctctcttcagcggtgagcaaaggcgagaccctgaccgttaacaacattaatgattatggtgcagat

SEQ ID NO: 296224 - DNA, 75 bp, synthetic construct
  source 1..75: mol_type = other DNA
aaagaggacaacggcaatatttcgcaaaccgcaaaatctccggcagagcgcaagagggcgcagcgtgagagggaa

SEQ ID NO: 296225 - DNA, 75 bp, synthetic construct
  source 1..75: mol_type = other DNA
aagcctttggcaaaagctattggaaaatccgacgtttgcttcaattgcttcaatattggcaaaaagtgctttagg

SEQ ID NO: 296226 - DNA, 75 bp, synthetic construct
  source 1..75: mol_type = other DNA
tgatcatgaaggtaaatatatttgagagaacgttaaatcgccttcaagagcaatggcctgaaaaaaagaaagcat

SEQ ID NO: 296227 - DNA, 75 bp, synthetic construct
  source 1..75: mol_type = other DNA
atgtctgggaaaaatcctttttggaattatgattataatgcagcacaacgtaatagagaaatcgtagactcttac

SEQ ID NO: 296228 - DNA, 75 bp, synthetic construct
  source 1..75: mol_type = other DNA
gtctgtttataccacggccaaaaactaaagatgataatggcctcaaaacactcaatagtaaagctgttggcagac

SEQ ID NO: 296229 - DNA, 75 bp, synthetic construct
  source 1..75: mol_type = other DNA
ttgttgaaaagcatatctccagatttgatcatgatccagctaatgatgtaatgatttcaaggctaaagaaaatag

SEQ ID NO: 296230 - DNA, 75 bp, synthetic construct
  source 1..75: mol_type = other DNA
tatcgaaggattcagggaaacagcaaacaagttgggaggagatgcacctgctggttacgatcaatttatggataa

SEQ ID NO: 296231 - DNA, 75 bp, synthetic construct
  source 1..75: mol_type = other DNA
cgaaggcctgccccgagagattgaactacgccagaagcagtacgaatactatcgtgatttgctgttcagcttccc

SEQ ID NO: 296232 - DNA, 75 bp, synthetic construct
  source 1..75: mol_type = other DNA
tggacggcggtggtctgggggcatctgttgtgggtgatgccgtggatgctgtttatcctgcaacctgcctggcgg

SEQ ID NO: 296233 - DNA, 75 bp, synthetic construct
  source 1..75: mol_type = other DNA
ggctgggtttcactctggcggtgaaagaaagcgcatttctgctatggatcttgtcagccgcgctaagtgaaaaac

SEQ ID NO: 296234 - DNA, 75 bp, synthetic construct
  source 1..75: mol_type = other DNA
agaaagcgcatttctgctgtggatcttagcggcagtattgagcgaaaaacggctgttgcagcaagttattgtact

SEQ ID NO: 296235 - DNA, 75 bp, synthetic construct
  source 1..75: mol_type = other DNA
ctggcgatcctcgcggatcaatcgacgatcaatcttgaggcgctacttaatagcctgactatggctctggtcgcg

SEQ ID NO: 296236 - DNA, 75 bp, synthetic construct
  source 1..75: mol_type = other DNA
cccattttattacccgctctgccactggtggcgggccagtacacgctggcgctatggctgaacctggatggaagc

SEQ ID NO: 296237 - DNA, 75 bp, synthetic construct
  source 1..75: mol_type = other DNA
ttacgctggcgagttttttacccttgaccggtgtgctgtgtgtggttctgctggcgatcctcgcggatcagtcga

SEQ ID NO: 296238 - DNA, 75 bp, synthetic construct
  source 1..75: mol_type = other DNA
aacccggcaactctccggtaattccggatggttgggtcatggtgccgaagagactaacagccgagaacggcgcta

SEQ ID NO: 296239 - DNA, 75 bp, synthetic construct
  source 1..75: mol_type = other DNA
ggaagccgcagccgaaccagacgatcttagcgagtgggctgatatgcagtttctgttgtgggatgcacagcgccg

SEQ ID NO: 296240 - DNA, 75 bp, synthetic construct
  source 1..75: mol_type = other DNA
gtatatggcaggacaggtacaaggggaatacgtggagttgagcgacggcactttatcgtggttagggaacgcctt

SEQ ID NO: 296241 - DNA, 75 bp, synthetic construct
  source 1..75: mol_type = other DNA
aacaaacgaaaggcgcactcgccagtctgctgctgatgctgttactcgccgcctacgttttgctgggctatctgc

SEQ ID NO: 296242 - DNA, 75 bp, synthetic construct
  source 1..75: mol_type = other DNA
ttcggtgaatttcgatagctctctggttgaaccgctaatatgctccgcacgctataccggaagcacctttcggcg

SEQ ID NO: 296243 - DNA, 75 bp, synthetic construct
  source 1..75: mol_type = other DNA
ctcaaaagaggctctggaagccgcagccgaaccagacgatctcagcgagtgggctgatatgcatttcctgttgtt

SEQ ID NO: 296244 - DNA, 75 bp, synthetic construct
  source 1..75: mol_type = other DNA
tgcacaacgccgtgctggcatcagcgatgctgaaattaacgttgctatggaagataaattgaagatcaacatgga

SEQ ID NO: 296245 - DNA, 75 bp, synthetic construct
  source 1..75: mol_type = other DNA
ggaaattcacaaccgttgcctaatgcttgcctcaacataagtctctctcaaacaccaggcggagacatttacgtt

SEQ ID NO: 296246 - DNA, 75 bp, synthetic construct
  source 1..75: mol_type = other DNA
tcttagtcttggtttatggagtccaaagtattcacccagtgaaaaacaagaataccaagagttgttaagcgttct

SEQ ID NO: 296247 - DNA, 75 bp, synthetic construct
  source 1..75: mol_type = other DNA
gactccacatttggctgcgttggccccattggtccgctgaaacatctctcaaaagaggcactggaagccgcagcc

SEQ ID NO: 296248 - DNA, 75 bp, synthetic construct
  source 1..75: mol_type = other DNA
caatctttcaatgtgccagccttaacgttgacacatgaaaggatctctaaagccagtgaatacaatgcggaaaga

SEQ ID NO: 296249 - DNA, 75 bp, synthetic construct
  source 1..75: mol_type = other DNA
atggcaggacaacaaaccgatcccctcttccagcagttagacgactggctagccagcgtggccgcgcagctttcg

SEQ ID NO: 296250 - DNA, 75 bp, synthetic construct
  source 1..75: mol_type = other DNA
gctttcaggggcataccgccgaaattgccagcgttcaccagtacggtgaagtcgataacgtggtgccgggtgccc

SEQ ID NO: 296251 - DNA, 75 bp, synthetic construct
  source 1..75: mol_type = other DNA
atggtgatgaatttttcgaaacacagagtcgcaatgtaacccactggatgccactgacagaaccgccgtgggagg

SEQ ID NO: 296252 - DNA, 75 bp, synthetic construct
  source 1..75: mol_type = other DNA
atgaccactataaccaaagagcgactactgacaatcaagcagtggcgcgaaacatacggacctggtagcaacgta

SEQ ID NO: 296253 - DNA, 75 bp, synthetic construct
  source 1..75: mol_type = other DNA
ggtgagcctcgcttgcacattaaagaacccggcaactatccggtaactccggatggttggataagctgtagtgag

SEQ ID NO: 296254 - DNA, 75 bp, synthetic construct
  source 1..75: mol_type = other DNA
gacggtgatggcgaagacctgtatctcaaggaggtaacccactggatgccgctgccagaaccgccgcaggaggtg

SEQ ID NO: 296255 - DNA, 75 bp, synthetic construct
  source 1..75: mol_type = other DNA
gcgcaatatcgagacggagagtttttcgatattgtccgcaatggtgatgaatttttcgaaacacagagtcgcaat

SEQ ID NO: 296256 - DNA, 75 bp, synthetic construct
  source 1..75: mol_type = other DNA
acgctcgtcagtgtggatttaatgaaaaaacgtctcgaaaacggtgacgattactttgccgttaaccctaagggg

SEQ ID NO: 296257 - DNA, 75 bp, synthetic construct
  source 1..75: mol_type = other DNA
atgaccactattaccaaagaatggctacagaaaacgattaccagcattgagtcagcacgggatgaaataccgttc

SEQ ID NO: 296258 - DNA, 75 bp, synthetic construct
  source 1..75: mol_type = other DNA
agcaacacgctttattcagcgaacagcaaaaatgtctgtttatccctggcgactggttaggtcgcattgaagcca

SEQ ID NO: 296259 - DNA, 75 bp, synthetic construct
  source 1..75: mol_type = other DNA
agtttgcagggtacgacactggctctccccggcacatctgcagaaggcctgcctggcgaaataaaacaacaactg

SEQ ID NO: 296260 - DNA, 75 bp, synthetic construct
  source 1..75: mol_type = other DNA
gctaaaagtttaatcgcccggcgcttaaaattcgccttccagaatgcgcgcgcgtttgaatatctgatgacccgc

SEQ ID NO: 296261 - DNA, 75 bp, synthetic construct
  source 1..75: mol_type = other DNA
cagtctgttggtaagggtgggtattcacatccggaagggatttctacaacatggcattcagaatctaatttggat

SEQ ID NO: 296262 - DNA, 75 bp, synthetic construct
  source 1..75: mol_type = other DNA
gaaagccgggccagcgattcttaataccctactaaccgctattaatgaacgccacttccgcaacggcgcacatgt

SEQ ID NO: 296263 - DNA, 75 bp, synthetic construct
  source 1..75: mol_type = other DNA
cgcccactctgaccctgctactgcaaaaaccgctaaaactgcacgatatggaagtcgtacatatcacttttgagc

SEQ ID NO: 296264 - DNA, 75 bp, synthetic construct
  source 1..75: mol_type = other DNA
cagcaaaaagggatgataagtttatcaccaccgactatttgcaacagtgccgcctggcgttttgtccgtgagcgt

SEQ ID NO: 296265 - DNA, 75 bp, synthetic construct
  source 1..75: mol_type = other DNA
ttgtatccgttctgtttctctctggttgtaacgataaagtgtatgatgttgattattattttgcaaaccaatctg

SEQ ID NO: 296266 - DNA, 75 bp, synthetic construct
  source 1..75: mol_type = other DNA
aatctggcgcgactggttaggcctcatagaggtaggtaactcaaaaaacaatactgaactccccgcacaggtcgt

SEQ ID NO: 296267 - DNA, 75 bp, synthetic construct
  source 1..75: mol_type = other DNA
ggtaaaggcgttcactttttgcagggctatttgtactctccgccagtaccgggtaataaatttatctctgaatgg

SEQ ID NO: 296268 - DNA, 75 bp, synthetic construct
  source 1..75: mol_type = other DNA
gagtgttgacgaaatttctggtcatattgtggacaatattgtcgagctggcacgtaagccgggtcttaatattgt

SEQ ID NO: 296269 - DNA, 75 bp, synthetic construct
  source 1..75: mol_type = other DNA
atccggagatcatatccgccagtggtaataacagtcacagatatatctctgacaaccactatcaccatattgtca

SEQ ID NO: 296270 - DNA, 75 bp, synthetic construct
  source 1..75: mol_type = other DNA
atagtgatccaatgatcttcaactggaatgtattgttttatgtttcattagaagagtttcctatagatgatcctt

SEQ ID NO: 296271 - DNA, 75 bp, synthetic construct
  source 1..75: mol_type = other DNA
atgaccactatgaccagagaagaacaaaagcaagttctcatagatacagctaatcacgtaatcaaccgtgataat

SEQ ID NO: 296272 - DNA, 75 bp, synthetic construct
  source 1..75: mol_type = other DNA
atggtgcaaaaggctccagcagttcatttgtgaccatcgctcaggttattggcctggtgctctttattgccggcc

SEQ ID NO: 296273 - DNA, 75 bp, synthetic construct
  source 1..75: mol_type = other DNA
atcagagattgctaactttcgcggtcatgctgctggttacagggctgctattgaggcagcaccacaactggaggt

SEQ ID NO: 296274 - DNA, 75 bp, synthetic construct
  source 1..75: mol_type = other DNA
atgagcactatcactaaagaacgtatcgaattgttcattaaatccccgcttgaaaacgggcttactcgtggcgaa

SEQ ID NO: 296275 - DNA, 75 bp, synthetic construct
  source 1..75: mol_type = other DNA
gtgactaacacttctgttaacccggcgcgcagcaccgcggttgctatcttccagggcggctgggcattagaataa

SEQ ID NO: 296276 - DNA, 75 bp, synthetic construct
  source 1..75: mol_type = other DNA
cgaatgccggaagacaccaaaatgttactggcatttagtcaaggtcaaatagtggcagcatattggaactgggta

SEQ ID NO: 296277 - DNA, 75 bp, synthetic construct
  source 1..75: mol_type = other DNA
cggcggaatccgcggcaacgcgcgccgagacagcagcaaaacgggcagaggatattgcatccgccgtggcgctgg

SEQ ID NO: 296278 - DNA, 75 bp, synthetic construct
  source 1..75: mol_type = other DNA
ttcaggtcatgtattgtctggtattaatgttcaggatacagggtctaactctgccgataatatagcgggtgttta

SEQ ID NO: 296279 - DNA, 75 bp, synthetic construct
  source 1..75: mol_type = other DNA
aggcggtaatgggtgaaacgaacaagaaagcgcccttaaatagtcctgcactgaccggaacgccaacaacaccaa

SEQ ID NO: 296280 - DNA, 75 bp, synthetic construct
  source 1..75: mol_type = other DNA
tgggttatggtgccgaaggaaccaactcaggccatgattaaagcgtggctatcagagattgctaactttcgcggt

SEQ ID NO: 296281 - DNA, 75 bp, synthetic construct
  source 1..75: mol_type = other DNA
ccgttcagattagaagtgagcttggagggtatgccacttccaatctatctggtgcatacaatatgttttctgagt

SEQ ID NO: 296282 - DNA, 75 bp, synthetic construct
  source 1..75: mol_type = other DNA
gcgggtaagcaaccgaaagatgccaccctgacggcgctggccggacttactactgcggcaggcaagtttccgtat

SEQ ID NO: 296283 - DNA, 75 bp, synthetic construct
  source 1..75: mol_type = other DNA
atgcggatatcacctttgcgggttaccgcttctctgaacgcaattacatgacgatggaccagtacctcaatgccc

SEQ ID NO: 296284 - DNA, 75 bp, synthetic construct
  source 1..75: mol_type = other DNA
tattgatttttcccggttctctcaggcgggatatatcatgcccgggcagtaccagatggaaattatggtgaatga

SEQ ID NO: 296285 - DNA, 75 bp, synthetic construct
  source 1..75: mol_type = other DNA
acgtgagaaggagctgtacaccgtcacactcaacaagaacttcgaggactggaaggcatcggtcaatctgcagta

SEQ ID NO: 296286 - DNA, 75 bp, synthetic construct
  source 1..75: mol_type = other DNA
ttaatggcattacatatgcgttgttgttttccctggctggcgcaccggcttatgccgtcgattttaatacagatg

SEQ ID NO: 296287 - DNA, 75 bp, synthetic construct
  source 1..75: mol_type = other DNA
ccggaagatatggaagccacccgctcggtggtggagtcggttctgacggaaggggccattggttatcgtgagttc

SEQ ID NO: 296288 - DNA, 75 bp, synthetic construct
  source 1..75: mol_type = other DNA
acaagccgcacaagggaaagcagtcacagtcactgagctataacgggactgcgggtgccaacttcggtgcctggc

SEQ ID NO: 296289 - DNA, 75 bp, synthetic construct
  source 1..75: mol_type = other DNA
acgcttaattatagcagcagcatgagtaacgatcgttatactaacaccgtagggtacagcggtaccttggatggt

SEQ ID NO: 296290 - DNA, 75 bp, synthetic construct
  source 1..75: mol_type = other DNA
ttgaatttcagggcgaaatacgcggcagtagatactgaagtgaaggctggcccggttaactctgcactgacaatg

SEQ ID NO: 296291 - DNA, 75 bp, synthetic construct
  source 1..75: mol_type = other DNA
gggaggaggcccggcatctggaagcgttcctggcagagcacggaggctggaaggcatttttgtggaagccaccct

SEQ ID NO: 296292 - DNA, 75 bp, synthetic construct
  source 1..75: mol_type = other DNA
ctttggtattcccgcctgtccaaatttaactctcgcttactgcctggcggtgtgcgtcggtatcgccaactcagc

SEQ ID NO: 296293 - DNA, 75 bp, synthetic construct
  source 1..75: mol_type = other DNA
tcagtcactcagttattacggaacaacaggcatcaacgctggagcatggcgtttacgcggagactaccagggtaa

SEQ ID NO: 296294 - DNA, 75 bp, synthetic construct
  source 1..75: mol_type = other DNA
tggtcgagtttcgaccaacgattggggtattggtgttgtgacaaatgtgagcagttattatcgtaacactacttc

SEQ ID NO: 296295 - DNA, 75 bp, synthetic construct
  source 1..75: mol_type = other DNA
acctcagtggacctgaacaggctgccggaagacatggaagccacccgctcggtggtggaatcggtcctgacggaa

SEQ ID NO: 296296 - DNA, 75 bp, synthetic construct
  source 1..75: mol_type = other DNA
tcccgtgatgatgccagacggctggaagattttctggcagagcacgggggttggaaggcgtttctgtggacgccg

SEQ ID NO: 296297 - DNA, 75 bp, synthetic construct
  source 1..75: mol_type = other DNA
ttctgccgtcactcctcaccggctgcgccggtttcgccccgccgccggagtctgagaacgctgccactgcgctgg

SEQ ID NO: 296298 - DNA, 75 bp, synthetic construct
  source 1..75: mol_type = other DNA
tctgctattttcgtttggcgcatttcaccagccatcgcgcctgcgcccatttctgttggcttctgcctggcgagc

SEQ ID NO: 296299 - DNA, 75 bp, synthetic construct
  source 1..75: mol_type = other DNA
ttccagccattacgcgatctcggtacgttttatcatgctaaagcccaggctgttggtgcagctgacagtctgaaa

SEQ ID NO: 296300 - DNA, 75 bp, synthetic construct
  source 1..75: mol_type = other DNA
gccagacaacgttaatggtcacccaccagttagaagatcttgctgactgggatgtcatttgggtaatgcaggatg

SEQ ID NO: 296301 - DNA, 75 bp, synthetic construct
  source 1..75: mol_type = other DNA
agcgaacaagagttacaaacagcgctggataacgcctgggtcagtgagtttctaccgctcctgccacaaggcgtt

SEQ ID NO: 296302 - DNA, 75 bp, synthetic construct
  source 1..75: mol_type = other DNA
gttattaccggaatacaacctctgttgacctgaagcgcttaccggatgatgtggaagcaacccgttctgttgtgg

SEQ ID NO: 296303 - DNA, 75 bp, synthetic construct
  source 1..75: mol_type = other DNA
ttgaagttatcgagcaggacgggcggaaaaaaacgttccaggtggacacggcatatgtgccctatctgacccgtc

SEQ ID NO: 296304 - DNA, 75 bp, synthetic construct
  source 1..75: mol_type = other DNA
caccggtgccagtctggaaagtgatgaccgcatgctgccgccaaaactgcgcggttatgcaccgcaggtctcagg

SEQ ID NO: 296305 - DNA, 75 bp, synthetic construct
  source 1..75: mol_type = other DNA
aaagaatgcatccccatcttagcgatgaacacattggttgctgtgtggaggtgcttgccaccatgatggaaggta

SEQ ID NO: 296306 - DNA, 75 bp, synthetic construct
  source 1..75: mol_type = other DNA
gcggaaaaaaacgttccaggtggacacggcatatgtgccgtatctgacccgtccgggccaggttcgttacaagct

SEQ ID NO: 296307 - DNA, 75 bp, synthetic construct
  source 1..75: mol_type = other DNA
gaaatttcacatggagtcgcttttatctgttccgtgccattccccggtggcgggcaaacctgacgctgggcgaga

SEQ ID NO: 296308 - DNA, 75 bp, synthetic construct
  source 1..75: mol_type = other DNA
gggctgaatgctgacctgaaaacataccgtgtgacgctttccgtgacccgggaggaggcccggcatctggaagcg

SEQ ID NO: 296309 - DNA, 75 bp, synthetic construct
  source 1..75: mol_type = other DNA
cagtctgtcgatatgactttcacggttaatatcgaaccaccaatgtgtaaactggataatgcaacgctggacgtt

SEQ ID NO: 296310 - DNA, 75 bp, synthetic construct
  source 1..75: mol_type = other DNA
cgacagaggcggcgcgaccggaacggtcgctgcaagcccgggggtttttcacgcatcggaccgtagcgacagccc

SEQ ID NO: 296311 - DNA, 75 bp, synthetic construct
  source 1..75: mol_type = other DNA
tacgatgacgatctcatacttggtcatagttttagggtggaaaagtcactaaatccatatataggaccggatcaa

SEQ ID NO: 296312 - DNA, 75 bp, synthetic construct
  source 1..75: mol_type = other DNA
aatctgcgatggctgttgatggcggggctgggtggatttgtgttttcaatgtatctttttacccctataacccac

SEQ ID NO: 296313 - DNA, 75 bp, synthetic construct
  source 1..75: mol_type = other DNA
taatacctgtgtttttggggcaggttcgcggattaaatgccgaagagataggttttgccgtttgcacaacaggta

SEQ ID NO: 296314 - DNA, 75 bp, synthetic construct
  source 1..75: mol_type = other DNA
tacggctgcggtgcttaaagacagcagcaatgcagccataacccctggaaatatagagacatcagttaatatgaa

SEQ ID NO: 296315 - DNA, 75 bp, synthetic construct
  source 1..75: mol_type = other DNA
ctgggcacaacaatgacccggaacagattgatttaattgatttactgatgcagttgtggcgtgggaaggtgacaa

SEQ ID NO: 296316 - DNA, 75 bp, synthetic construct
  source 1..75: mol_type = other DNA
tgaatcaagagctagaaaaggatctcaaggacaacattgctctgggacggaaaaacttgcaggactctttaagaa

SEQ ID NO: 296317 - DNA, 75 bp, synthetic construct
  source 1..75: mol_type = other DNA
cccaggaagtggttgcgcaggagcagaaagatctgcgtatccgtcagattcaggaagcgttgcagtatgcgaatc

SEQ ID NO: 296318 - DNA, 75 bp, synthetic construct
  source 1..75: mol_type = other DNA
cggcagccgtgcccaactgcctgatgcgatgcttgacgtgtcttatcaggcctactagtccgttgaaaatgctgg

SEQ ID NO: 296319 - DNA, 75 bp, synthetic construct
  source 1..75: mol_type = other DNA
aaaaacttgcaggactccctgaaaactcaggaagtggtggctcaggagcaaaaaacgctgcgtatccgccagatt

SEQ ID NO: 296320 - DNA, 75 bp, synthetic construct
  source 1..75: mol_type = other DNA
aaaaatcagtcattacctttagcggtttcttatgttggtgaaacacctgaaggtgcgcagaaacagctggcgaag

SEQ ID NO: 296321 - DNA, 75 bp, synthetic construct
  source 1..75: mol_type = other DNA
attggcctgccgcatactgcggtgcgctgtatctcttataaagacagcaaagccgtacaccgggggatcatcatc

SEQ ID NO: 296322 - DNA, 75 bp, synthetic construct
  source 1..75: mol_type = other DNA
tgctgcgcgtacacttacaatatccaatccgataatggatcttcatgcttttaaggataaaaatttcacactggg

SEQ ID NO: 296323 - DNA, 75 bp, synthetic construct
  source 1..75: mol_type = other DNA
ggcaataaccataattacgatggaaaaagcgttgtcgaaattagaaaacttaatattagcaaacagtcctggcca

SEQ ID NO: 296324 - DNA, 75 bp, synthetic construct
  source 1..75: mol_type = other DNA
gttaggtcgggcggtgatccccgatctcaccgtaccggacctggtgatcccgacgttaatggtaaaagtgctgcc

SEQ ID NO: 296325 - DNA, 75 bp, synthetic construct
  source 1..75: mol_type = other DNA
cggcgattgggcgggctaccgcgaatgccacatcaagcccgacctgctgctgatctaccgcaagtccgacgccga

SEQ ID NO: 296326 - DNA, 75 bp, synthetic construct
  source 1..75: mol_type = other DNA
tacgcctcggatgccagaacacagggaaaggtcacaggcatgcggctgttgttgccgtccagcacagatgagctg

SEQ ID NO: 296327 - DNA, 75 bp, synthetic construct
  source 1..75: mol_type = other DNA
gtaacattaacgctggggggaattccaaaagaacggctgaagttagcctctggtgtatttaatttaacacgtaat

SEQ ID NO: 296328 - DNA, 75 bp, synthetic construct
  source 1..75: mol_type = other DNA
tggtcgcctatctggtggtggtgttcgggatttcagtttatgcgatgcgtaaacggaacaccggcaccttcctta

SEQ ID NO: 296329 - DNA, 75 bp, synthetic construct
  source 1..75: mol_type = other DNA
acgccacaaggcgctgacgatattctgtcgcctgcctttatgacgtcgttctgggtactggtgtgctttggcgtg

SEQ ID NO: 296330 - DNA, 75 bp, synthetic construct
  source 1..75: mol_type = other DNA
ctaccagagtcgtcttctggtgtggctggcgagtttgagtttgctggttgcgttcgttggtgcgatgaccgtgca

SEQ ID NO: 296331 - DNA, 75 bp, synthetic construct
  source 1..75: mol_type = other DNA
gctgcatctcttataaagacagtaaagcagtacatcgtgggatcatcattggtacggttgtagtggcgatcctga

SEQ ID NO: 296332 - DNA, 75 bp, synthetic construct
  source 1..75: mol_type = other DNA
ctaccagagtcgtcttttggtgtggctggcgagtttgagtttgctggtcgcgtttattggcgcgatgaccgtgca

SEQ ID NO: 296333 - DNA, 75 bp, synthetic construct
  source 1..75: mol_type = other DNA
aaacaggtttgctgatttttggcatcagcattgcgctctacaccgccttcggcggctttcgcgccagcgtgctga

SEQ ID NO: 296334 - DNA, 75 bp, synthetic construct
  source 1..75: mol_type = other DNA
tattggcggcactgactacactaacgtcggggatgctctggctgcgattaacacttcatttagtgattctctcgg

SEQ ID NO: 296335 - DNA, 75 bp, synthetic construct
  source 1..75: mol_type = other DNA
atcggcgcttttcctccccgtcattctttggggcgctgttcatgcacctggttgttaagtgatgttttatggtgg

SEQ ID NO: 296336 - DNA, 75 bp, synthetic construct
  source 1..75: mol_type = other DNA
gaagggcgtttcccgcctcgttgtcatttcgggcgcaatagctgtgcgtggcttctctctgatgtgctttggtgg

SEQ ID NO: 296337 - DNA, 75 bp, synthetic construct
  source 1..75: mol_type = other DNA
gggttactgatgttaatcataacaaacgcagttactacgccattgataatacgcttttatatattgaagatgtag

SEQ ID NO: 296338 - DNA, 75 bp, synthetic construct
  source 1..75: mol_type = other DNA
aatatctgcgcttgagtatgccaccacgcgcaagaaatcagaggttgtttactcaggagtatcggtaaccattcc

SEQ ID NO: 296339 - DNA, 75 bp, synthetic construct
  source 1..75: mol_type = other DNA
attaatcagctggatagcgataataagctgaatatcaacaatgatgatattgtcgcggttgggatgacgtatcag

SEQ ID NO: 296340 - DNA, 75 bp, synthetic construct
  source 1..75: mol_type = other DNA
tattctctcttattaacgcaacgccagactctgcgccgtggatgatctcgttggcgatttttattgctaaagatt

SEQ ID NO: 296341 - DNA, 75 bp, synthetic construct
  source 1..75: mol_type = other DNA
tcccctgaaatctcccggcagcggacatggccgatatttatggccggaatggttgtgatggccggtctcggcgga

SEQ ID NO: 296342 - DNA, 75 bp, synthetic construct
  source 1..75: mol_type = other DNA
tggtgcatacttctggcggtgcattttttaaagctaaagaatggctcaggaaacacggtgcgaaaggagtaatcc

SEQ ID NO: 296343 - DNA, 75 bp, synthetic construct
  source 1..75: mol_type = other DNA
tattagatttaaaaaattatgctgaagatatgtataactggaggcatatagctgctatgtatgaatctatttatt

SEQ ID NO: 296344 - DNA, 75 bp, synthetic construct
  source 1..75: mol_type = other DNA
gatgtagaaaataataaaccattaatcggtaatgactccaacttattgatagtgttttatgttcagataatgccc

SEQ ID NO: 296345 - DNA, 75 bp, synthetic construct
  source 1..75: mol_type = other DNA
gttattaagaggaaccaggaacctgttaaaagttagtacgaccaagaaccctgctaaaataaaagaggccgcatt

SEQ ID NO: 296346 - DNA, 75 bp, synthetic construct
  source 1..75: mol_type = other DNA
ccaaccccatccaccgccggtattctgaagattgttgtcggtgaatgggggaagattatgattatcttgggggtg

SEQ ID NO: 296347 - DNA, 75 bp, synthetic construct
  source 1..75: mol_type = other DNA
atgtcataaatcagggtgctgatgttggcgcaattgccgggaaggcaaatcaggctggtcagggcgcttacgatg

SEQ ID NO: 296348 - DNA, 75 bp, synthetic construct
  source 1..75: mol_type = other DNA
gtggcgatctctttttcctgccgttcctgtacggcagcaacgccggactcgagatgaccagcggtttctacggga

SEQ ID NO: 296349 - DNA, 75 bp, synthetic construct
  source 1..75: mol_type = other DNA
aaataccaacgttatcagcatctcattgccgcacttcagggctttcacgcccgcatcaaggagcacacattatga

SEQ ID NO: 296350 - DNA, 75 bp, synthetic construct
  source 1..75: mol_type = other DNA
cggcgcttgccgcccgcgtcggtacgggggtttatcgcaatttcaatgaagcccagcacagcttgcagcatccgg

SEQ ID NO: 296351 - DNA, 75 bp, synthetic construct
  source 1..75: mol_type = other DNA
ctgccgcctgttgtcggatctgccgaaatctgcggggagatcaccgctcagacagccgtactgaccggtctgaaa

SEQ ID NO: 296352 - DNA, 75 bp, synthetic construct
  source 1..75: mol_type = other DNA
ggcggcccggcgcactccgatgtctggatgcaaatgctggcagacgtcagcggtctgcgtatcgagctgccgcag

SEQ ID NO: 296353 - DNA, 75 bp, synthetic construct
  source 1..75: mol_type = other DNA
aaataccaacgctatcagcatctcattgccgcacttcagggctttcacgcccgcatcaaggagcacatattatga

SEQ ID NO: 296354 - DNA, 75 bp, synthetic construct
  source 1..75: mol_type = other DNA
aaagacggatttcttgccacaaatggcagtacgttaaccatccagtcaaatggtgcggcgtttactgccacaaac

SEQ ID NO: 296355 - DNA, 75 bp, synthetic construct
  source 1..75: mol_type = other DNA
atcttctcgcagtcgtatctgctttacgttatcgcacagagcactgatgttggtaacgtggctaacaaggccaac

SEQ ID NO: 296356 - DNA, 75 bp, synthetic construct
  source 1..75: mol_type = other DNA
atgtcattaatcagggggctgatgtcggtgcaattgctggaaaggcaaatcaggctggtcagggcgcttatgatg

SEQ ID NO: 296357 - DNA, 75 bp, synthetic construct
  source 1..75: mol_type = other DNA
cgggctgtatgaccgcgaaggccgggaggcaggcgtgcagcgcctgccgctgtgcgcattaagcccgcagccagg

SEQ ID NO: 296358 - DNA, 75 bp, synthetic construct
  source 1..75: mol_type = other DNA
actctctcgaccgtttaggacgtaatacgctggacattctggagttagtcaaacaattgaatgatcgaggtgtaa

SEQ ID NO: 296359 - DNA, 75 bp, synthetic construct
  source 1..75: mol_type = other DNA
cgctgtcgctggcggcacgtattcatgcggaagttccggcggatgaaagcccggaaatgacagaaggctatgaag

SEQ ID NO: 296360 - DNA, 75 bp, synthetic construct
  source 1..75: mol_type = other DNA
ctcacccggcccgacctgatgtggactggcgtcgggtggaaaaactcagcctcgcgctgttccggcaaaatggcg

SEQ ID NO: 296361 - DNA, 75 bp, synthetic construct
  source 1..75: mol_type = other DNA
ttgttgcggttgagcatatcccgactgaaaatatagccgaggcagttgaattgacctatgacagatttaatagca

SEQ ID NO: 296362 - DNA, 75 bp, synthetic construct
  source 1..75: mol_type = other DNA
ggaagtctcattagtgcttgctttgcattgaagggagtaagaagagatggcttaaataaacggtccacttactac

SEQ ID NO: 296363 - DNA, 75 bp, synthetic construct
  source 1..75: mol_type = other DNA
gaaaatctacatttcgggaatactgttcaacactggcagacgctggcgttttccggtgggttactgatgttaatc

SEQ ID NO: 296364 - DNA, 75 bp, synthetic construct
  source 1..75: mol_type = other DNA
caccacatcattgttcttggcacagtatatctcatgatagtctaagccaaaaaggcgatgatgcaaaaacctctg

SEQ ID NO: 296365 - DNA, 75 bp, synthetic construct
  source 1..75: mol_type = other DNA
aacggagaatcttcatcagtttttcaagcccggttattaggtccatcacccaagaaagatctcgacgagttagaa

SEQ ID NO: 296366 - DNA, 75 bp, synthetic construct
  source 1..75: mol_type = other DNA
cgaatataaagttggtaattactatgagccagagttttatgatgcacggggagttctggagtccatttttaaata

SEQ ID NO: 296367 - DNA, 75 bp, synthetic construct
  source 1..75: mol_type = other DNA
atgtcaggatttaaaaaaggttttttatggggcggcgcggtagccgcgcatcagttggaaggtggctggaatgaa

SEQ ID NO: 296368 - DNA, 75 bp, synthetic construct
  source 1..75: mol_type = other DNA
ctggtttactgatgttcatgctcgtggatattatccgcaacatatgctgaattactttgccaggaaaggattcaa

SEQ ID NO: 296369 - DNA, 75 bp, synthetic construct
  source 1..75: mol_type = other DNA
gcgaaagcctgtgtccatttactaattccggtatcttgtattcgccagaggaagatatcaatgagcgcgaacaaa

SEQ ID NO: 296370 - DNA, 75 bp, synthetic construct
  source 1..75: mol_type = other DNA
gacgaagaaaaaacggtgcttgaatcacttatgtgcttcaaacgcgccggggcggatggaatactgacttatttt

SEQ ID NO: 296371 - DNA, 75 bp, synthetic construct
  source 1..75: mol_type = other DNA
gtcagtctgaggaccgaatcaaattctggggttattcctgatttgccagtgccccaggtaagtgtaagagaccgc

SEQ ID NO: 296372 - DNA, 75 bp, synthetic construct
  source 1..75: mol_type = other DNA
gttagttgccagtgccctggcggtacagactggaaaatcgatcaatcctgaatttaatatcggctgtatgatcgc

SEQ ID NO: 296373 - DNA, 75 bp, synthetic construct
  source 1..75: mol_type = other DNA
aggtgataataggactgccaattttttaagtggtggtgatgccgaggttgtttgttgggaatgtgtaagagatcg

SEQ ID NO: 296374 - DNA, 75 bp, synthetic construct
  source 1..75: mol_type = other DNA
atgaaatttgaccatcttgttgatgttagcttccacaattttgtctttaacggaaaattagattttgtcgaaccg

SEQ ID NO: 296375 - DNA, 75 bp, synthetic construct
  source 1..75: mol_type = other DNA
aaattatgctcgaagaaaaagaggagcaaagaaggattaaagaacagcttcgtgaagaggaaagagctcgtagag

SEQ ID NO: 296376 - DNA, 75 bp, synthetic construct
  source 1..75: mol_type = other DNA
tggacaatgtttgcggaagcgaaagaatatagagagtcactggcgattgagcaagagcgcaaagcagcaacttcc

SEQ ID NO: 296377 - DNA, 75 bp, synthetic construct
  source 1..75: mol_type = other DNA
acctgaaacttgccaccgatcgactcattggatttaagccagaaccatatgagttgcatgaaggtcatggtgtag

SEQ ID NO: 296378 - DNA, 75 bp, synthetic construct
  source 1..75: mol_type = other DNA
atggccctgacagcaatacgaattcctgagtgggtgcacctgcaggcggtccgtgttctccgcctgttcagagcc

SEQ ID NO: 296379 - DNA, 75 bp, synthetic construct
  source 1..75: mol_type = other DNA
gccattatggaggcgatcaagctggaagacaaaaaagaatacagtgccccactgaagcccggctaccgcagtctg

SEQ ID NO: 296380 - DNA, 75 bp, synthetic construct
  source 1..75: mol_type = other DNA
atgaccaaaataattgtttattatgttgtcctaatcacaattttctgtgtggggatatttactgcaatacagtac

SEQ ID NO: 296381 - DNA, 75 bp, synthetic construct
  source 1..75: mol_type = other DNA
tggactgaggataaccttgatattatggttgcgacctctgcatttggcgtcgggatggacaaaaacaacgtacgc

SEQ ID NO: 296382 - DNA, 75 bp, synthetic construct
  source 1..75: mol_type = other DNA
cgttgaagttaacggctgtttcctgcgaccagaacctatgtggtacgttagcaaagcgtatgatcgtgatgatca

SEQ ID NO: 296383 - DNA, 75 bp, synthetic construct
  source 1..75: mol_type = other DNA
ctaccgcgggcgtcgctggtgggaggttgataccagtgccgtggcattagaacaatttcagaggaatattatcta

SEQ ID NO: 296384 - DNA, 75 bp, synthetic construct
  source 1..75: mol_type = other DNA
ctatagtataatgttaatcataagtattatttcagcactaaccttcaaaactgagccagtctggagttctcaatg

SEQ ID NO: 296385 - DNA, 75 bp, synthetic construct
  source 1..75: mol_type = other DNA
tcgactattatttattcgttctcaattaatagcctcacttatcatgtctattttgtatgtgttttttttcatttt

SEQ ID NO: 296386 - DNA, 75 bp, synthetic construct
  source 1..75: mol_type = other DNA
taggaaagattaccctattgattctaatactggtcgtgtatatggtcatgatgaccctaaaggcacagggcatgg

SEQ ID NO: 296387 - DNA, 75 bp, synthetic construct
  source 1..75: mol_type = other DNA
agcggccatctccagcagataaatctggaccgggaggtcatcagcgagttcacgcgcgaccacctgcaccgtgaa

SEQ ID NO: 296388 - DNA, 75 bp, synthetic construct
  source 1..75: mol_type = other DNA
gggcatggggcgacgcttggatatggaagccgtactgccggggggcgggttttacagccccggtgaagggctggc

SEQ ID NO: 296389 - DNA, 75 bp, synthetic construct
  source 1..75: mol_type = other DNA
tcgcagataaccctggtggcaaccgtggcgctgatgtttcttcgcccgggtaaaatgctttctgaaatcgcctgt

SEQ ID NO: 296390 - DNA, 75 bp, synthetic construct
  source 1..75: mol_type = other DNA
acgaaaactgcatgacctttgtgtcggggatgggacgacgcctggagatggaagccgtactgccggggggcgggt

SEQ ID NO: 296391 - DNA, 75 bp, synthetic construct
  source 1..75: mol_type = other DNA
ccttccgcatccggtcagtgccgccaccggggccaaatacctggccggtgatgatgacttcgatttcagtctgcc

SEQ ID NO: 296392 - DNA, 75 bp, synthetic construct
  source 1..75: mol_type = other DNA
taaccaggaaaaaacccgtttaaccttcgctggtttgaaatataacgaactcggatctttcgactatggtcgtaa

SEQ ID NO: 296393 - DNA, 75 bp, synthetic construct
  source 1..75: mol_type = other DNA
taatcaggaaaaaactcgtttaaccttcgcaggtttgaaatataacgagttaggatctttcgactatggtcgtaa

SEQ ID NO: 296394 - DNA, 75 bp, synthetic construct
  source 1..75: mol_type = other DNA
gatgctgctgaccatatctatctgtcgcaagacttgggtatgcgcaaacctgaagcacgaatttatcagcatgtt

SEQ ID NO: 296395 - DNA, 75 bp, synthetic construct
  source 1..75: mol_type = other DNA
atatagagtgtcaggtcatgggccaggaaatcctgatggtgatttaccacatttacaagttcatcaacatggtgg

SEQ ID NO: 296396 - DNA, 75 bp, synthetic construct
  source 1..75: mol_type = other DNA
cagatttctttggcatggttgaaggtctaaattttgctctgcaatatcagggtaaaaatgaaggtacaggcaact

SEQ ID NO: 296397 - DNA, 75 bp, synthetic construct
  source 1..75: mol_type = other DNA
tggcgatggccatggtttatctgtaacttacactattgacggtttctcatttgctggtgcttacgcaaactctga

SEQ ID NO: 296398 - DNA, 75 bp, synthetic construct
  source 1..75: mol_type = other DNA
gacggcgcagggcatcctgacccatcagtacgatgaactcagtaaccggactgccaccacctttccggacggcag

SEQ ID NO: 296399 - DNA, 75 bp, synthetic construct
  source 1..75: mol_type = other DNA
aaaccctcgataccatatagatgaattgactgtgaaaggtgatattgttctttctgataatgcaaaaataactcg

SEQ ID NO: 296400 - DNA, 75 bp, synthetic construct
  source 1..75: mol_type = other DNA
attcgggtcagaaataatgggggtgggacttttcacggttttccaattgactcatcgacagcaggacccattttt

SEQ ID NO: 296401 - DNA, 75 bp, synthetic construct
  source 1..75: mol_type = other DNA
aaatcccgccaaaagattctcatgctagctattctgtgcaagagcatattgaaaatggaaaactttcaactcaac

SEQ ID NO: 296402 - DNA, 75 bp, synthetic construct
  source 1..75: mol_type = other DNA
aagagtttgttggtgaaggatattcagtagtacgaggtaaaaagggagagctatggtacatttctgctgatggaa

SEQ ID NO: 296403 - DNA, 75 bp, synthetic construct
  source 1..75: mol_type = other DNA
cgcagaatcaggtgacggcgtaccaggacgaagccgggcaggtgacgacgttccgctggagcgacgaagaacggc

SEQ ID NO: 296404 - DNA, 75 bp, synthetic construct
  source 1..75: mol_type = other DNA
tttccggtgggatgcgcagaaccagataacccgttaccaggacgaagccggacaggtgatgacattccgctggag

SEQ ID NO: 296405 - DNA, 75 bp, synthetic construct
  source 1..75: mol_type = other DNA
ggcagggggatgccctgctgcatacgtcgtttatggcagatgtgctgggggctgtgctggaagtggcggcaaatg

SEQ ID NO: 296406 - DNA, 75 bp, synthetic construct
  source 1..75: mol_type = other DNA
gcatcacccgcagcgccagcggctgaaaatgctgggcgaccgcaacagcaactgtctgaatctgtactacgacga

SEQ ID NO: 296407 - DNA, 75 bp, synthetic construct
  source 1..75: mol_type = other DNA
cactggctgactggttttatctcagcccggaatggctgaacggcagggtgcattatccgctgtatcgtccggggg

SEQ ID NO: 296408 - DNA, 75 bp, synthetic construct
  source 1..75: mol_type = other DNA
tccgtcactaaaaggaaaatctgtaagttatattcaagatattttgcagaaggctggatttacaaggaaaaatcc

SEQ ID NO: 296409 - DNA, 75 bp, synthetic construct
  source 1..75: mol_type = other DNA
ccgtggtgtgcactaccgttatgacgaatatggccggatggtggaaaagcagggccggagcgggacgcagagtta

SEQ ID NO: 296410 - DNA, 75 bp, synthetic construct
  source 1..75: mol_type = other DNA
atgtgtacgatgcgctggggaggcggacggaaaaacagcacatcagccctgacggtaaaccgtacaaccggacaa

SEQ ID NO: 296411 - DNA, 75 bp, synthetic construct
  source 1..75: mol_type = other DNA
gaaattagcgacgaagcgttcgcagaggcgctgtgtcatgagatggctctaccgctaagctacgagcagttctct

SEQ ID NO: 296412 - DNA, 75 bp, synthetic construct
  source 1..75: mol_type = other DNA
atggcggattcgaatctcaatgtgccggtaatcatccaggctacgcggctcgatacatcagttcttccacgcaat

SEQ ID NO: 296413 - DNA, 75 bp, synthetic construct
  source 1..75: mol_type = other DNA
ggcagcacgttaaccattcagtcaaatggtgcggcgtttactgccacaaccatcaagataatcgcggagcagtga

SEQ ID NO: 296414 - DNA, 75 bp, synthetic construct
  source 1..75: mol_type = other DNA
cctaatgtgtcagataaagtcgtcagaatcgttcattcttatactgattatgtcaagcgagtcgtctggaaagaa

SEQ ID NO: 296415 - DNA, 75 bp, synthetic construct
  source 1..75: mol_type = other DNA
aactaatgagacccttgggatttagtgattatgttaaattacaaaaaaatgctaaggttgtcttaagtgatagtg

SEQ ID NO: 296416 - DNA, 75 bp, synthetic construct
  source 1..75: mol_type = other DNA
tttccagccttaaacctgcgagaagtacatgagagaccagaaggatttgaagaagctgttgttatgtttgtcggg

SEQ ID NO: 296417 - DNA, 75 bp, synthetic construct
  source 1..75: mol_type = other DNA
aaagatttgggtgttcgcaaacctgattattttcttaatgccgcaggtaaaaatgcagcagagactattggacaa

SEQ ID NO: 296418 - DNA, 75 bp, synthetic construct
  source 1..75: mol_type = other DNA
atgacgcaatactggctggggttagattgtggcggtagctggctgaaagccgggctgtatgaccgagaaggccgg

SEQ ID NO: 296419 - DNA, 75 bp, synthetic construct
  source 1..75: mol_type = other DNA
ctttctctgacccatcacgcctattcgccgcttctggtggtgatcaacaaagcgaagtttgatggcttaaccccg

SEQ ID NO: 296420 - DNA, 75 bp, synthetic construct
  source 1..75: mol_type = other DNA
cctgtacggcagcaacgccggactcgagatgaccagtggtttctacgggatgcaggccattcacacccgtgcaca

SEQ ID NO: 296421 - DNA, 75 bp, synthetic construct
  source 1..75: mol_type = other DNA
aatgaccttggtgtacgaaaacccgattactttttaaatgctgctgggaaaaatgctgcagaaaccatcggtcag

SEQ ID NO: 296422 - DNA, 75 bp, synthetic construct
  source 1..75: mol_type = other DNA
tggttgggacacgtcctgaaatcatccgtttatcacgtgttttggtcaaacttgacgaacattgtgagcatattc

SEQ ID NO: 296423 - DNA, 75 bp, synthetic construct
  source 1..75: mol_type = other DNA
tgcccatcagctttaccaacaaaaataccaacgctatcagcatctgattgccgcacttcagggctttcacgcccg

SEQ ID NO: 296424 - DNA, 75 bp, synthetic construct
  source 1..75: mol_type = other DNA
aagcagccgtgggcgaaaaacggcttcgataaagtgttgctggacccggcgcgagcaggtgccgcaggtgttatg

SEQ ID NO: 296425 - DNA, 75 bp, synthetic construct
  source 1..75: mol_type = other DNA
aggttatctattctctgtttcctgtcttgccattgctcttctttacctgtggacgagatcaaagaataaaaatta

SEQ ID NO: 296426 - DNA, 75 bp, synthetic construct
  source 1..75: mol_type = other DNA
gatttcggtgtatcccggcgaggaaatctccgaagcgttacttcgcgatctgatcaacgattcgtggaatctggt

SEQ ID NO: 296427 - DNA, 75 bp, synthetic construct
  source 1..75: mol_type = other DNA
ccgaacgtcctccggcaagcctgcccgtgcggaagcgaaaaaacgttatcagaaggcttatgctgcaagccttca

SEQ ID NO: 296428 - DNA, 75 bp, synthetic construct
  source 1..75: mol_type = other DNA
ctattttcacccaactacacaacaaaggatactatattggaagaattgcttggtctgctaaacctaaaaacggaa

SEQ ID NO: 296429 - DNA, 75 bp, synthetic construct
  source 1..75: mol_type = other DNA
atggaattttctcccccactacagcgtgcaacgttaattcggcgttataaacgctttttagccgatgtgatcaca

SEQ ID NO: 296430 - DNA, 75 bp, synthetic construct
  source 1..75: mol_type = other DNA
gcgctacgctaatccggcgttacaaacgctttttagccgatgtgatcacacccgatggtcgtgagttaacgctac

SEQ ID NO: 296431 - DNA, 75 bp, synthetic construct
  source 1..75: mol_type = other DNA
tggtgtaaatgctgctccacaggggcagggaaaagtaacttttaacggaactgtagtagatgcaccatgtggtat

SEQ ID NO: 296432 - DNA, 75 bp, synthetic construct
  source 1..75: mol_type = other DNA
taaaaattattacaaagtaatgaatagaattataaatagcaagtatattgatgttaacttagtaaataaacttgc

SEQ ID NO: 296433 - DNA, 75 bp, synthetic construct
  source 1..75: mol_type = other DNA
gctgcgcgtggtctggatataaaatcgcttgagctggtggtgaactttgagctggcgtgggaccctgaagttcat

SEQ ID NO: 296434 - DNA, 75 bp, synthetic construct
  source 1..75: mol_type = other DNA
ctgattgccgaaaccagtagcgggttcgtagaggctttttttgcctgccagtatgccggcttagtcgccgtcccg

SEQ ID NO: 296435 - DNA, 75 bp, synthetic construct
  source 1..75: mol_type = other DNA
tgaatttttatgacagacgttgccaacttgaagatcaactggaatatcagacgttaaaaacgcgtgccgaagctg

SEQ ID NO: 296436 - DNA, 75 bp, synthetic construct
  source 1..75: mol_type = other DNA
cggggcaactaataataaaggtacagtgtcattgacattttcaggtgtgcctgcaggaaactcaaatgacatgct

SEQ ID NO: 296437 - DNA, 75 bp, synthetic construct
  source 1..75: mol_type = other DNA
cttgccgttatgctgaatttactggtttttattcgttccagtgaactcagatacgcccgttggtctgaaattgat

SEQ ID NO: 296438 - DNA, 75 bp, synthetic construct
  source 1..75: mol_type = other DNA
gcattgaccacggtaaaacgccagcatcgcccggctcttgatctttcccgcctgcctgaacttttgtcgcgtatt

SEQ ID NO: 296439 - DNA, 75 bp, synthetic construct
  source 1..75: mol_type = other DNA
gcattgaccacggtaaaacgccagcatcgcccggctcttgatctttctcgcctgcctgaacttctgtcgcgtatt

SEQ ID NO: 296440 - DNA, 75 bp, synthetic construct
  source 1..75: mol_type = other DNA
atggggtatgacacaacccaggaagtctgtggccatggattccgggcgatggcgtgcagtgcattgattgaatca

SEQ ID NO: 296441 - DNA, 75 bp, synthetic construct
  source 1..75: mol_type = other DNA
ctggcggttatgctgaatttactggtttttattcgttccagtgaactcagatatgcccgttggtctgaaattgat

SEQ ID NO: 296442 - DNA, 75 bp, synthetic construct
  source 1..75: mol_type = other DNA
ctggctgttatgctgaatttactggtttttattcgttccagtgaactcagataggcccgttggtctgaaattgat

SEQ ID NO: 296443 - DNA, 75 bp, synthetic construct
  source 1..75: mol_type = other DNA
tggtttttattcgttccagtgaactcagatatgcccgctggtctgaaattgatattgacaattccatgtggacta

SEQ ID NO: 296444 - DNA, 75 bp, synthetic construct
  source 1..75: mol_type = other DNA
ctagcacttggggtttatcctgaaatcacactagcggatgctagagtacgtcgtgacgaggcgcgtaagctgctt

SEQ ID NO: 296445 - DNA, 75 bp, synthetic construct
  source 1..75: mol_type = other DNA
gacggtgaaaaatgaaatatttagtgcgccaccttatccaaactggacggcggtgggcgttacatggctggcttt

SEQ ID NO: 296446 - DNA, 75 bp, synthetic construct
  source 1..75: mol_type = other DNA
gcattgaccacggtaaaacgccagcatcgccccgctcttgatctttcgcgcctgcctgaacttttgtcgcgtatt

SEQ ID NO: 296447 - DNA, 75 bp, synthetic construct
  source 1..75: mol_type = other DNA
gcattgaccacggtaaaacgccagcatcgccccgctcttgatctttctcgcctgcctgaacttgtgtcgcgtatt

SEQ ID NO: 296448 - DNA, 75 bp, synthetic construct
  source 1..75: mol_type = other DNA
cgtggggcattcactggctatgcaaggggtcagcgccgaggaaattgcgcatattctgggacatagctcccttac

SEQ ID NO: 296449 - DNA, 75 bp, synthetic construct
  source 1..75: mol_type = other DNA
cagccagacgatgtccgcaaagccgcgcaggaaatcgttaatagcggcaaggccaaacgggttgtcgtttccctg

SEQ ID NO: 296450 - DNA, 75 bp, synthetic construct
  source 1..75: mol_type = other DNA
aagcgtctatatggactatcccaccggagcgggagcctattcctggagtgaagcattcccatagaggctcaaaaa

SEQ ID NO: 296451 - DNA, 75 bp, synthetic construct
  source 1..75: mol_type = other DNA
aatcagtgaaaatactgtaaataaagccctcagggtgatggggtatgacacaacccgggaagtctgtggccatgg

SEQ ID NO: 296452 - DNA, 75 bp, synthetic construct
  source 1..75: mol_type = other DNA
catgttctggatccgctcgaaaaaagcatgatcagtaaaggcttgtttgaaatggctacgtcgattcgctatggc

SEQ ID NO: 296453 - DNA, 75 bp, synthetic construct
  source 1..75: mol_type = other DNA
cacatgacccgcgtaaaccaatcagtgaaaatactgtaaataaagccctgagggtgatggggtatgacacaaccc

SEQ ID NO: 296454 - DNA, 75 bp, synthetic construct
  source 1..75: mol_type = other DNA
agagtgatggggtatgacacaaccaaggaagtctgtggccatggattccgggcgatggcgtgcagtgcattgatt

SEQ ID NO: 296455 - DNA, 75 bp, synthetic construct
  source 1..75: mol_type = other DNA
atatccataaagcagaacatctggaagaacggcgattgatgttgcaatggtgggccgattttcttgatgcgaacc

SEQ ID NO: 296456 - DNA, 75 bp, synthetic construct
  source 1..75: mol_type = other DNA
cagttataaaggtcagcctgtcacccgactggcagttatgctgaatttactggtttttattcgctccagtgaact

SEQ ID NO: 296457 - DNA, 75 bp, synthetic construct
  source 1..75: mol_type = other DNA
aatatctgctgtaatgcgttacgccgtacagtctggcatcatcagatataacccggctctggatatggctggtgc

SEQ ID NO: 296458 - DNA, 75 bp, synthetic construct
  source 1..75: mol_type = other DNA
gggggaatcaccaccaacctgtcggcaacgcgtttctccgactatgctcaaaagtcatgtgataacaaaggggtg

SEQ ID NO: 296459 - DNA, 75 bp, synthetic construct
  source 1..75: mol_type = other DNA
tcagacatgggctggtgaaaatggtctgatatttacgggtgcacatgacccgcgtaaaccaatcagtgaaaatac

SEQ ID NO: 296460 - DNA, 75 bp, synthetic construct
  source 1..75: mol_type = other DNA
acccggctctggatatggctggtgcattgaccacagtaaaacgccagcatcgccctgctctggatctttcacgcc

SEQ ID NO: 296461 - DNA, 75 bp, synthetic construct
  source 1..75: mol_type = other DNA
cggaatggcaaggccagcgcgtggtcggcatagtcggtgatcagttgcatgatgggattggtggttgctccagag

SEQ ID NO: 296462 - DNA, 75 bp, synthetic construct
  source 1..75: mol_type = other DNA
gattgtcagtcagtggcgaatcattgccgagcgtcttcgattacctggtcgtgagcaagagttaatggcagaggc

SEQ ID NO: 296463 - DNA, 75 bp, synthetic construct
  source 1..75: mol_type = other DNA
gttgctatggcacaggattacggcgcagatattcgtctggtggcgtttatgcaatacctacgagtgctgttcgtc

SEQ ID NO: 296464 - DNA, 75 bp, synthetic construct
  source 1..75: mol_type = other DNA
ggagcaatgccgatatggcgctcattatggcgatgcaaaccctgcgcctgttcagtattttgctgacggggcctg

SEQ ID NO: 296465 - DNA, 75 bp, synthetic construct
  source 1..75: mol_type = other DNA
ccccatgacggcagaactaacttataccattgtcgcaacggactatgcagttaaggctgttgttgtcccattgat

SEQ ID NO: 296466 - DNA, 75 bp, synthetic construct
  source 1..75: mol_type = other DNA
ttctgacacctgtcgccacgcagctttcagtggattatttgcgcacccaggattttgccatgcgcccactgcaat

SEQ ID NO: 296467 - DNA, 75 bp, synthetic construct
  source 1..75: mol_type = other DNA
tatccgatagcaagggatttctctggcttgcaaatgataaaaattatcatatgatattggttatcattatcaatg

SEQ ID NO: 296468 - DNA, 75 bp, synthetic construct
  source 1..75: mol_type = other DNA
gatacggtggcggtcatcgccgcagggagcaatgccgatatggcgttcatcatggcgatgcaaaccctgcgcttg

SEQ ID NO: 296469 - DNA, 75 bp, synthetic construct
  source 1..75: mol_type = other DNA
caggcgtggattgatgatggtgacacttctttaccacctgaaaaaattcaggttccttttatgttaacaccgcca

SEQ ID NO: 296470 - DNA, 75 bp, synthetic construct
  source 1..75: mol_type = other DNA
aagaatgcactgaagtttgcgatgcaaaacagaatcaaattgttttaccggccggcgggtattgctccggtaaat

SEQ ID NO: 296471 - DNA, 75 bp, synthetic construct
  source 1..75: mol_type = other DNA
aaattgctggtgaatcgcagtggtaatcatttggtgataaaaaatgactcagcgaattgggtaacgatttctgat

SEQ ID NO: 296472 - DNA, 75 bp, synthetic construct
  source 1..75: mol_type = other DNA
ggcttacggtggcgatggctacgacaaacagctgaaagtgctggaaagcggcgttgacattctgattggcaccac

SEQ ID NO: 296473 - DNA, 75 bp, synthetic construct
  source 1..75: mol_type = other DNA
ggcgcaagtggtcattccatcagcctggcgtgtgaagagtatgcattgaatttgcctgctattgagacctatatt

SEQ ID NO: 296474 - DNA, 75 bp, synthetic construct
  source 1..75: mol_type = other DNA
accaaatagtccagagcaagagggcaagaatgcactgaaatttgcaatgcaaaacagaatcaaattgttttaccg

SEQ ID NO: 296475 - DNA, 75 bp, synthetic construct
  source 1..75: mol_type = other DNA
cctccggcaagcctgcccgtgcggaagcgaaaaaacgttatcagaaggcttatgctgccagtcttaatgtgcagg

SEQ ID NO: 296476 - DNA, 75 bp, synthetic construct
  source 1..75: mol_type = other DNA
tggggatggtattatcacgttgcgtccaagaatatcatatgttaacgacgatggctcaagtaacacactgaccgc

SEQ ID NO: 296477 - DNA, 75 bp, synthetic construct
  source 1..75: mol_type = other DNA
ttctgcaagtgcggcggctgcttctgccactgcatcagctaacagtcaaaaagcagcaaaaaccagtgaaaccaa

SEQ ID NO: 296478 - DNA, 75 bp, synthetic construct
  source 1..75: mol_type = other DNA
gatgttttaggtttttctggtggggatgctgtaaatcatgtcatatacagagaagctaacggatggttacgcgtc

SEQ ID NO: 296479 - DNA, 75 bp, synthetic construct
  source 1..75: mol_type = other DNA
ttttttcgcattttatctgtctgtacggcagtgaacatggtgggcgggtggagtatgttacctgtgaatttctaa

SEQ ID NO: 296480 - DNA, 75 bp, synthetic construct
  source 1..75: mol_type = other DNA
agtgagtgggctgcccgcagggcgagcgaagcgagtcattcccccctcaccgccatatttaaagaagagctcgta

SEQ ID NO: 296481 - DNA, 75 bp, synthetic construct
  source 1..75: mol_type = other DNA
atcaagtctggcgataaattaatgttaacaacccctcaattcgaaaagggactaaacgcgtcatcttttatcatc

SEQ ID NO: 296482 - DNA, 75 bp, synthetic construct
  source 1..75: mol_type = other DNA
ccgcagaacaactccatcaattcgctgaatgtttccgtcaggttaactttgacgataaaacgttcatgccgtgct

SEQ ID NO: 296483 - DNA, 75 bp, synthetic construct
  source 1..75: mol_type = other DNA
ccgcacctcttccggcaagcccgcccgcgcagaagcgaaaaaacgttatcagaaggccgttgccgctaatcctca

SEQ ID NO: 296484 - DNA, 75 bp, synthetic construct
  source 1..75: mol_type = other DNA
gcgacatcctcgaatatcaggggaaagccgttacgccgggtgttgagacacgtgccgtatcaactttcgtcaact

SEQ ID NO: 296485 - DNA, 75 bp, synthetic construct
  source 1..75: mol_type = other DNA
tatacctaatatgttattattctgtttatcggttttcaatatattttttttcagttcttttttacaagattaata

SEQ ID NO: 296486 - DNA, 75 bp, synthetic construct
  source 1..75: mol_type = other DNA
acagtattctcctaagcagagcggggcaaccgtatctggtgactatatttatctggccaccccacaagtagaaga

SEQ ID NO: 296487 - DNA, 75 bp, synthetic construct
  source 1..75: mol_type = other DNA
gttttgaaccacgcctggtttaaaaccttgccagaagccgatgttacgctcccgttgccagtgccagacgatatc

SEQ ID NO: 296488 - DNA, 75 bp, synthetic construct
  source 1..75: mol_type = other DNA
gcattgaccacggtaaaacgccagcatcgccctgctctggatctttcacgcctgcctgaacttttgtcgcgtatt

SEQ ID NO: 296489 - DNA, 75 bp, synthetic construct
  source 1..75: mol_type = other DNA
tgctgaatttactggtttttattcgttccagtgaactcagatacgcccgctggtctgaaattgatattgacaatg

SEQ ID NO: 296490 - DNA, 75 bp, synthetic construct
  source 1..75: mol_type = other DNA
tcgactgatgctacagtggtgggccgattttcttgatgcgaaccgggagaaggggatcagtccgtttgaatacgc

SEQ ID NO: 296491 - DNA, 75 bp, synthetic construct
  source 1..75: mol_type = other DNA
ctcgccgttatgctgaatttactggtttttattcgttccagtgaactcagataagcccgatggtctgaaattgat

SEQ ID NO: 296492 - DNA, 75 bp, synthetic construct
  source 1..75: mol_type = other DNA
ctagcggttatgctgaatttactggtttttattcgttccagtgaactcagataagcccgctggtctgaaattgat

SEQ ID NO: 296493 - DNA, 75 bp, synthetic construct
  source 1..75: mol_type = other DNA
gcattgaccacggtaaaacgccagcatcgccctgctctggatctttctcgcctgcctgaacttatgtcgcgtatt

SEQ ID NO: 296494 - DNA, 75 bp, synthetic construct
  source 1..75: mol_type = other DNA
ggtgatggggtatgacacaacccgggaagtctgtggccatggattccgggcgatggcgtgcagtgcattgattga

SEQ ID NO: 296495 - DNA, 75 bp, synthetic construct
  source 1..75: mol_type = other DNA
gtctggtctttacgggagcacatgacccgcataaaccaatcagtgaaaacaccgtaaataaagccctcagagtta

SEQ ID NO: 296496 - DNA, 75 bp, synthetic construct
  source 1..75: mol_type = other DNA
cagcgataaagtactcaaaagcctcgagacacacgtattcccctttatcggcaatcgggatatcacaacactcaa

SEQ ID NO: 296497 - DNA, 75 bp, synthetic construct
  source 1..75: mol_type = other DNA
tccaagatgcgaacaccacatcttgtgccactcagcaaacaggctgtagccatactgacagaactacagacatgg

SEQ ID NO: 296498 - DNA, 75 bp, synthetic construct
  source 1..75: mol_type = other DNA
gctacagtggtgggcagattttctggatgcgaacagagaacaatgtatcagcccgtttgaatatgcaaagattaa

SEQ ID NO: 296499 - DNA, 75 bp, synthetic construct
  source 1..75: mol_type = other DNA
tggattccgggcaatggcgtgcagtgcattgattgaatcaggtttgtggtcccgcgatgctgtggaacgtcagat

SEQ ID NO: 296500 - DNA, 75 bp, synthetic construct
  source 1..75: mol_type = other DNA
ctggcagttatgctgaatttactggtttttattcgttccagtgaactcagataagcccgctggtctgaaattgat

SEQ ID NO: 296501 - DNA, 75 bp, synthetic construct
  source 1..75: mol_type = other DNA
gctgctgaccgcgctaccggtggatgtattaggtagcctgggggaattaagctcgccggtggtttcagcttttgc

SEQ ID NO: 296502 - DNA, 75 bp, synthetic construct
  source 1..75: mol_type = other DNA
atgacccgtgtggtggtagtgcgctatttcccgcatctcaatccggaatccatcgaaatctttattggcatggtg

SEQ ID NO: 296503 - DNA, 75 bp, synthetic construct
  source 1..75: mol_type = other DNA
ttcacctgtttatttctctcaatggaaaatatgtaactcatttctcgcattagcctctccactcatcacccctaa

SEQ ID NO: 296504 - DNA, 75 bp, synthetic construct
  source 1..75: mol_type = other DNA
gctgctggggatcgcgataactcacgacctgcgtcatcgtgatgaaaatgatatcgatgccagcggattttcggt

SEQ ID NO: 296505 - DNA, 75 bp, synthetic construct
  source 1..75: mol_type = other DNA
aaacagcctgatggcgtttggtcttggcgcgatctggggggtactgatcctcacctgcctgttgccggtaaacca

SEQ ID NO: 296506 - DNA, 75 bp, synthetic construct
  source 1..75: mol_type = other DNA
cggcgccggtcgtggcagtaatgatcaccggcattctgctgaatgttctttactggcttggcttgtttgttccgg

SEQ ID NO: 296507 - DNA, 75 bp, synthetic construct
  source 1..75: mol_type = other DNA
ttgccctttcagaagcctgggatgacgaatttacgcaatatccgttggtgatggggttgattctcggcaccggcg

SEQ ID NO: 296508 - DNA, 75 bp, synthetic construct
  source 1..75: mol_type = other DNA
tgattatctggatgcgaatagaatggcggctatcactccatttgactatgcaaagattaatagtccttttcgata

SEQ ID NO: 296509 - DNA, 75 bp, synthetic construct
  source 1..75: mol_type = other DNA
tacgtgctgcgtatatccataaagcagaacatctggaagaacggcgactgatgttgcaatggtgggccgattttc

SEQ ID NO: 296510 - DNA, 75 bp, synthetic construct
  source 1..75: mol_type = other DNA
cgtctcaaacgccagctggcagaacgggatgaagagctggctatcctccaaaaggccgcgacatacttcgcgaag

SEQ ID NO: 296511 - DNA, 75 bp, synthetic construct
  source 1..75: mol_type = other DNA
agtttttacaaagccagcttacgggcgaagagcgcgagatctttatggtgatctttctcgacactcaacaccggg

SEQ ID NO: 296512 - DNA, 75 bp, synthetic construct
  source 1..75: mol_type = other DNA
gtgaaaaacaatgcacagctgttgatgccacgcgaaaaaatgttgaagtttggcattggtgcgttaacggatgtc

SEQ ID NO: 296513 - DNA, 75 bp, synthetic construct
  source 1..75: mol_type = other DNA
ggtttttattcgttccagtgaactcagatacgcccgctggtctgaaattgatattgacaatgccatgtggactat

SEQ ID NO: 296514 - DNA, 75 bp, synthetic construct
  source 1..75: mol_type = other DNA
atgctgtggaacgtcagatgagccatcaggagcgtaatggtgtacgtgctgcgtatatccataaagcagaacatc

SEQ ID NO: 296515 - DNA, 75 bp, synthetic construct
  source 1..75: mol_type = other DNA
gaaaatggtctgatatttacgggtgcacatgacccgcgtaaaccaatcagtgaaaatactgtaaataaagccctg

SEQ ID NO: 296516 - DNA, 75 bp, synthetic construct
  source 1..75: mol_type = other DNA
atcaggtttgtggtcccgcgatgcagttgaacgtcagatgagccatcaggaacgtaacggtgtacgtgctgctta

SEQ ID NO: 296517 - DNA, 75 bp, synthetic construct
  source 1..75: mol_type = other DNA
tgatttacagctctcttttgaacatattgcacgacgctggcatgccagtaataaacaatggacacaatcacacag

SEQ ID NO: 296518 - DNA, 75 bp, synthetic construct
  source 1..75: mol_type = other DNA
tgcattgaccacggtaaaacgccagcatcgccctgcactggatctttcacgcctgcctgaacttctgtcgcgtat

SEQ ID NO: 296519 - DNA, 75 bp, synthetic construct
  source 1..75: mol_type = other DNA
tgggcaggtgaaaatggtctgatatttacgggtgcacatgacccgcttaaaccaatcagtgaaaatactgtaaat

SEQ ID NO: 296520 - DNA, 75 bp, synthetic construct
  source 1..75: mol_type = other DNA
atgcgctatgccgattttccaacgctggttgatgctttggactatgccgctctgagtagcgctggaatgaatttt

SEQ ID NO: 296521 - DNA, 75 bp, synthetic construct
  source 1..75: mol_type = other DNA
agcgggattcctggagcgccaaattgcagggtttactggcaagttgccagcccgcagccattatcactggtgatg

SEQ ID NO: 296522 - DNA, 75 bp, synthetic construct
  source 1..75: mol_type = other DNA
tgatgctgcagtggtgggctgattatctggatgcgaatagaatggcggctatcactccatttgactatgcaaaga

SEQ ID NO: 296523 - DNA, 75 bp, synthetic construct
  source 1..75: mol_type = other DNA
ggattccgggcgatggcgtgcagtgcattgattgaatccggcttatggtcaagagatgcggttgaacgtcagatg

SEQ ID NO: 296524 - DNA, 75 bp, synthetic construct
  source 1..75: mol_type = other DNA
tccgattgtttaaggaaggtcatctgttacgtaatagctttgctatttttgtacttaccacgttgttttatttta

SEQ ID NO: 296525 - DNA, 75 bp, synthetic construct
  source 1..75: mol_type = other DNA
gcgctaaccacgctgttctattttattggtgcagagttacggctggttcacgaactttctcttttctggccgctg

SEQ ID NO: 296526 - DNA, 75 bp, synthetic construct
  source 1..75: mol_type = other DNA
gtttgtggtcccgcgatgctgtggaacgccagatgagccatcaggagcgtaatggtgtacgtgctgcgtatatcc

SEQ ID NO: 296527 - DNA, 75 bp, synthetic construct
  source 1..75: mol_type = other DNA
gcaatggtgggccgattttctagatgcgaaccgggagaagggtatcagcccgtttgaatatgcaaagattaacaa

SEQ ID NO: 296528 - DNA, 75 bp, synthetic construct
  source 1..75: mol_type = other DNA
aaacgccagcatcgccccgctctgaatctttcacgcctgcctgaacttctgtcgcgtattgacggttataaaggc

SEQ ID NO: 296529 - DNA, 75 bp, synthetic construct
  source 1..75: mol_type = other DNA
atccctgttcgtgctgcagaagcaaaacaaatttatgaaatcgccagtcgtctgcagcaaagaatatctgctgta

SEQ ID NO: 296530 - DNA, 75 bp, synthetic construct
  source 1..75: mol_type = other DNA
gccttacgtgtgatgggctatgatacgaagactgaaatttgtggacacggttttagaacgatggcgtgggtgatg

SEQ ID NO: 296531 - DNA, 75 bp, synthetic construct
  source 1..75: mol_type = other DNA
cggcttgctgttatgctgaatttactggtttttattcgctccagtgaactcagatatgcccgctgggctgaaatt

SEQ ID NO: 296532 - DNA, 75 bp, synthetic construct
  source 1..75: mol_type = other DNA
cgtaacggtgtacgcgctgcttacattcataaagcagaacatctggaagaacgccgattgatgctacaatggtgg

SEQ ID NO: 296533 - DNA, 75 bp, synthetic construct
  source 1..75: mol_type = other DNA
agatgcgaacaccacatcttgtgccactcagcaaacaggctgtagccatactgacagaacttcagacatgggcag

SEQ ID NO: 296534 - DNA, 75 bp, synthetic construct
  source 1..75: mol_type = other DNA
gctgcagtggtgggctaattatctggatgcgaatagaatggcggctatcactccatttgactatgcaaagattaa

SEQ ID NO: 296535 - DNA, 75 bp, synthetic construct
  source 1..75: mol_type = other DNA
ctggaagaacggcgactgatgctacagtggtgggccgattttctggatgcaaacagagaaagatttatcagtcca

SEQ ID NO: 296536 - DNA, 75 bp, synthetic construct
  source 1..75: mol_type = other DNA
ctggcacttggtgtgtatcccgaagtttctctctccgaagctcgtacaaaacgggatgaggcccgaaaactgatt

SEQ ID NO: 296537 - DNA, 75 bp, synthetic construct
  source 1..75: mol_type = other DNA
aaaatggtctgatatttacgggtgcacatgacccgcgtcaaccaatcagtgaaaatactgtaaataaagccctga

SEQ ID NO: 296538 - DNA, 75 bp, synthetic construct
  source 1..75: mol_type = other DNA
gccatcaggagcgtaatggtgtacgtgctgcgtatatccataaagccgaacatctggaagaacgtcgacttatgc

SEQ ID NO: 296539 - DNA, 75 bp, synthetic construct
  source 1..75: mol_type = other DNA
agcgaaaatgcgtccaggcgatgtgctgggggcgctgacgggggatattggtctggatagcacagatattggcaa

SEQ ID NO: 296540 - DNA, 75 bp, synthetic construct
  source 1..75: mol_type = other DNA
gtgccgctggaagcagaaatggcaacgttgtgtatcgatggcgggaaaaaagccaaaatgcgcccgggtgatgta

SEQ ID NO: 296541 - DNA, 75 bp, synthetic construct
  source 1..75: mol_type = other DNA
gttatagcgtgtagggtagctatgctggctttatctgtagcgacaaagctaacccctttcgggtggattcagatg

SEQ ID NO: 296542 - DNA, 75 bp, synthetic construct
  source 1..75: mol_type = other DNA
ccgcgtgctggtagcgaccgatgtcgcagcgcgcggtctggatatcaaatctcttgaactggtagtgaactttga

SEQ ID NO: 296543 - DNA, 75 bp, synthetic construct
  source 1..75: mol_type = other DNA
ttccggcgatccttgccggaaaagacgttcgcgtgcaggcgaaaaccggcagcggcaaaacggcggcatttggcc

SEQ ID NO: 296544 - DNA, 75 bp, synthetic construct
  source 1..75: mol_type = other DNA
tcggttggcgcgttttctgccaaataccaaaattttgacgttgtgcggtggtcaaccgttcggtatgcagcgtga

SEQ ID NO: 296545 - DNA, 75 bp, synthetic construct
  source 1..75: mol_type = other DNA
ttttttggctcgttgcctgctgatgcggataaggctgaagcgctggtcagggcacgtatgcagtctcccgaatgg

SEQ ID NO: 296546 - DNA, 75 bp, synthetic construct
  source 1..75: mol_type = other DNA
ttcttgccctgccagtgatatccgttgccggcaccactgtttataccgattcggcacatccgccggttaacctgc

SEQ ID NO: 296547 - DNA, 75 bp, synthetic construct
  source 1..75: mol_type = other DNA
ttggcgcatggtttacgctggattgaagacgaaagtaatcaggatgatagctacgatcgtaactttctgcgcctg

SEQ ID NO: 296548 - DNA, 75 bp, synthetic construct
  source 1..75: mol_type = other DNA
ccgacccaagcgcgcaagaatggaaaagccagaagtaaaccttatagcgatgttaaaagacgcaatagccaacag

SEQ ID NO: 296549 - DNA, 75 bp, synthetic construct
  source 1..75: mol_type = other DNA
agtaaaacctgatcaggtgcgtactccgtggcatgagttctggcgacgttttcgccgtcagcatatggcgatgac

SEQ ID NO: 296550 - DNA, 75 bp, synthetic construct
  source 1..75: mol_type = other DNA
ctgatcatgcgcatttgcgatgtgctgtttgccttcccgggtattttactggcgatcgctgttgttgcggtgttg

SEQ ID NO: 296551 - DNA, 75 bp, synthetic construct
  source 1..75: mol_type = other DNA
gttttgctaacggtagcgcccgtgtactggttgcgactgatgttgctgcgcgtggtctggatattaaatcgcttg

SEQ ID NO: 296552 - DNA, 75 bp, synthetic construct
  source 1..75: mol_type = other DNA
taaagttcgtgttaaatggcctaatgacctctatctgcaggatcgcaagctggcaggcattcttgtggagctgac

SEQ ID NO: 296553 - DNA, 75 bp, synthetic construct
  source 1..75: mol_type = other DNA
agataaccaaggcgcattattgcttgaacaggatgggataattaaaccctggatgggcggtgaaatatcgctacg

SEQ ID NO: 296554 - DNA, 75 bp, synthetic construct
  source 1..75: mol_type = other DNA
aaatcgacaacgcagcgtcgctcatcgctttgcaatggctgcagctgcaccatcaagcgttaaaaaatgagtggg

SEQ ID NO: 296555 - DNA, 75 bp, synthetic construct
  source 1..75: mol_type = other DNA
caggacagagaaagcgcggatctgggaagtgacggacagaacggtcaggacctggattggggaagcggttgccgc

SEQ ID NO: 296556 - DNA, 75 bp, synthetic construct
  source 1..75: mol_type = other DNA
gtatctcctggaccgcatcggagagcttaaatctggcgatgcctgtgttgcagaataccagcaggctggccgtgg

SEQ ID NO: 296557 - DNA, 75 bp, synthetic construct
  source 1..75: mol_type = other DNA
cggctattaataaacacattcagacactgcgtgactggggcgttgatgtctttactgttccgggtaaaggataca

SEQ ID NO: 296558 - DNA, 75 bp, synthetic construct
  source 1..75: mol_type = other DNA
tgatcccaactggtctgcatcaggtgctgaacaccatcgcctggttccagattggtgaattcaccaacgcggcgg

SEQ ID NO: 296559 - DNA, 75 bp, synthetic construct
  source 1..75: mol_type = other DNA
atgccgctgtccataaggcattctttgaggcaaagcagcgatacggtgctccccgccttgctgacgaaatgctgg

SEQ ID NO: 296560 - DNA, 75 bp, synthetic construct
  source 1..75: mol_type = other DNA
aagttgtgctgattgagcagattcggattgccgcgtacgacaccagcgaaaccccctggctactggagatggttg

SEQ ID NO: 296561 - DNA, 75 bp, synthetic construct
  source 1..75: mol_type = other DNA
cccgcaaaacggcactggggatgtttatcgaagctgttggtatcaacattcgggcggcaaaaaatgccggggtaa

SEQ ID NO: 296562 - DNA, 75 bp, synthetic construct
  source 1..75: mol_type = other DNA
ccgcttctatgccggtgacggcactgcggggatgttcatgtccggcttcttcccgattatgatgttcggtctgcc

SEQ ID NO: 296563 - DNA, 75 bp, synthetic construct
  source 1..75: mol_type = other DNA
cgatcgccaccggcttcttctgtctggtgctggcggccatttttggttacgtctggccgccggtacagcacgcta

SEQ ID NO: 296564 - DNA, 75 bp, synthetic construct
  source 1..75: mol_type = other DNA
gtggtcgaacgcgtacaacttgcgcaagaggggctggggattgaggcccaggcgcggcaggcgcgttatcaggca

SEQ ID NO: 296565 - DNA, 75 bp, synthetic construct
  source 1..75: mol_type = other DNA
acataaatgggggttatccccatttcattatattaatgattattatgtggagttcataaataaattgaacaccat

SEQ ID NO: 296566 - DNA, 75 bp, synthetic construct
  source 1..75: mol_type = other DNA
gggagcgattgtcagcgcactgattgctccgttttatgtctggtggtttaagccacaattcaccttcccggtttc

SEQ ID NO: 296567 - DNA, 75 bp, synthetic construct
  source 1..75: mol_type = other DNA
ggcaagggagcagccgtagcagtactgattttcgacgttctgaaaggaatgttgcccgtctggggcgcgtatgaa

SEQ ID NO: 296568 - DNA, 75 bp, synthetic construct
  source 1..75: mol_type = other DNA
tcgctggttcggcggcctgatgcttggcgctatgggcgaccgctacggacgtcgactggcaatggtcaccagtat

SEQ ID NO: 296569 - DNA, 75 bp, synthetic construct
  source 1..75: mol_type = other DNA
tggttgggatacctgcttgatggttttgatttcgttttaattgccctggtacttactgaagtacagggtgagttt

SEQ ID NO: 296570 - DNA, 75 bp, synthetic construct
  source 1..75: mol_type = other DNA
ttgcgattggcggcgcaaacgtctgggtactcggtctgttactgttcttccagcaaatgcttggtcagggcatct

SEQ ID NO: 296571 - DNA, 75 bp, synthetic construct
  source 1..75: mol_type = other DNA
atgtctatcttttctgattacagttccagtagtgaaatgcacaataatttaacaattgattattatttagcactt

SEQ ID NO: 296572 - DNA, 75 bp, synthetic construct
  source 1..75: mol_type = other DNA
attttacttggtggccttgctgaacagaaagacagtaaggccagttccggctggagcttcttcggttcccgtacc

SEQ ID NO: 296573 - DNA, 75 bp, synthetic construct
  source 1..75: mol_type = other DNA
cgctactgttttcttcatgtgctttcgccgggtcagagcttgaattaaataaagtcaagctaccggaggctattt

SEQ ID NO: 296574 - DNA, 75 bp, synthetic construct
  source 1..75: mol_type = other DNA
acgaaaaaagacattcagcgggtcgaagatttgcttcctcttatcgaccgggccgccgaagaagttattgtcgcc

SEQ ID NO: 296575 - DNA, 75 bp, synthetic construct
  source 1..75: mol_type = other DNA
ttgaacattcaacagcagctttctaattttgttgcaactgatactggcgttaataattctccgacgcttttaaag

SEQ ID NO: 296576 - DNA, 75 bp, synthetic construct
  source 1..75: mol_type = other DNA
atgcggttcttactcgccaatacattttgcaaaattgttaagcaattctcttttattgaccgtatcagaatctat

SEQ ID NO: 296577 - DNA, 75 bp, synthetic construct
  source 1..75: mol_type = other DNA
tgctggccgctgaccggtgcggtggagtcaaatgcacaaacactgccggagatcatcgaagagatgctggtttcc

SEQ ID NO: 296578 - DNA, 75 bp, synthetic construct
  source 1..75: mol_type = other DNA
ggtgaaacgcgtggcatcccgttttgcaatgctggatgcagccggagaactggcaacgggaataaccggatggac

SEQ ID NO: 296579 - DNA, 75 bp, synthetic construct
  source 1..75: mol_type = other DNA
gcctcacggtggaagctgcggcacgtaatgatggctttatccccattgatgaaatcggtcagggcggacggatta

SEQ ID NO: 296580 - DNA, 75 bp, synthetic construct
  source 1..75: mol_type = other DNA
gcgtaactatctggagactgagcgcaaaaacatttctgacggactggttattgagctgcctgtaaagaaaaaaac

SEQ ID NO: 296581 - DNA, 75 bp, synthetic construct
  source 1..75: mol_type = other DNA
atccggcgcattttgcgcgtgccctggatgctgccggaatgctggagaagggaagcgatcgccgatacaaaaaaa

SEQ ID NO: 296582 - DNA, 75 bp, synthetic construct
  source 1..75: mol_type = other DNA
gagtaaaatctcattaaattcaataaactgctctcttaacgtccggttaaaacgttcacagatagcgttcatttt

SEQ ID NO: 296583 - DNA, 75 bp, synthetic construct
  source 1..75: mol_type = other DNA
atccgcccgtgtgagtggattggtgaccgtatgcgaaccgtggggatcggtcatgatggctgcgatgggtatctg

SEQ ID NO: 296584 - DNA, 75 bp, synthetic construct
  source 1..75: mol_type = other DNA
gacaggcaaagtgggtattaccggattttgctatggcggtggcgtatcgaacgcggcggctgtcgcgtatccgga

SEQ ID NO: 296585 - DNA, 75 bp, synthetic construct
  source 1..75: mol_type = other DNA
ggaacgcgacggtatgttgatgatgattgatgacaaccgtatcgacctgcaaccgggcgaagtaattaaaaaacg

SEQ ID NO: 296586 - DNA, 75 bp, synthetic construct
  source 1..75: mol_type = other DNA
gtggcacaactacaacgggcagattaacaaaggcgaaagtatccgcgtcttcccgctttccaactggaccgaaca

SEQ ID NO: 296587 - DNA, 75 bp, synthetic construct
  source 1..75: mol_type = other DNA
gtcgctggacatcgaaaacggtgaagattaacggaacacagcagcgatttatcgtgctgattgaccaggctgaag

SEQ ID NO: 296588 - DNA, 75 bp, synthetic construct
  source 1..75: mol_type = other DNA
tttgatgactggttacaggatttcgggctggaaaaccgggaaaaataccaggtcatcagccgcgcccgtgatttt

SEQ ID NO: 296589 - DNA, 75 bp, synthetic construct
  source 1..75: mol_type = other DNA
cgaccgtgcgagaaacggtgaaaacatagtgtctgagattaaatcactctatgcaaagcgggatgctcttcgtga

SEQ ID NO: 296590 - DNA, 75 bp, synthetic construct
  source 1..75: mol_type = other DNA
gccgtggtcggtattgatatcgattacgaaacggtcgggcaaaacggcagtatgttgatggtcagcgtcagcgga

SEQ ID NO: 296591 - DNA, 75 bp, synthetic construct
  source 1..75: mol_type = other DNA
gccgtcgtcggtattgatatcgactacgaaacggtcgggcaaaacggcagtatgctgatggttagcgtcagcggt

SEQ ID NO: 296592 - DNA, 75 bp, synthetic construct
  source 1..75: mol_type = other DNA
atttctttgccggtatccgcgatatcgtcggcggtcgttcaggggcttacgaaaaggaactgcgcaaggcacgag

SEQ ID NO: 296593 - DNA, 75 bp, synthetic construct
  source 1..75: mol_type = other DNA
gaaatgtatcattaagtgcgctttggcggaattactgggggcgaagtggaaatgctaaagattaccaattcagtt

SEQ ID NO: 296594 - DNA, 75 bp, synthetic construct
  source 1..75: mol_type = other DNA
attgactcaatactgttgctggcgggttactatgatcctgtcgtcgcgcaagcctggctggagaactggcagggg

SEQ ID NO: 296595 - DNA, 75 bp, synthetic construct
  source 1..75: mol_type = other DNA
cgaccaccattttgcatgttgcggcaaaagctgatgtggaacaggggctggaagcggcgctcgagctggcgttag

SEQ ID NO: 296596 - DNA, 75 bp, synthetic construct
  source 1..75: mol_type = other DNA
caggggcagggcagaatccggcaagacaatcggctattaaaggtggtcttcctaatagcgtttctgcaatcacta

SEQ ID NO: 296597 - DNA, 75 bp, synthetic construct
  source 1..75: mol_type = other DNA
ttgagcaagaactagatggtttaaaaaggaaccttaaattaattgctgaaagtatttctttaaaagatacctcag

SEQ ID NO: 296598 - DNA, 75 bp, synthetic construct
  source 1..75: mol_type = other DNA
ctacgcgcacaccgattggctgttttcatggcgctctcgccccactttctgcggttgatctcggtgctgccacca

SEQ ID NO: 296599 - DNA, 75 bp, synthetic construct
  source 1..75: mol_type = other DNA
cgccgattgccgaccgctggcgcgatgcggcaaaactgattggtgtggatattctcaccatgcctggtgtggcag

SEQ ID NO: 296600 - DNA, 75 bp, synthetic construct
  source 1..75: mol_type = other DNA
tgactcttattctttttattactacccactgtgcgaatgctaataaaaaagcactaacgataccattagactcta

SEQ ID NO: 296601 - DNA, 75 bp, synthetic construct
  source 1..75: mol_type = other DNA
attgagattgccacgctggtgaccgatgccaatctgaatattctggcagaagggccgaccattgcagtacatcag

SEQ ID NO: 296602 - DNA, 75 bp, synthetic construct
  source 1..75: mol_type = other DNA
tatgatgaaaacgacaaagaagaggagcgttttaatctgtttatctccattcctttctactggggggatgatatt

SEQ ID NO: 296603 - DNA, 75 bp, synthetic construct
  source 1..75: mol_type = other DNA
tcattcttcgtaaaagggaaatatctggtgaacaacggcggtatacagccatctactgagcaggattacgggaag

SEQ ID NO: 296604 - DNA, 75 bp, synthetic construct
  source 1..75: mol_type = other DNA
atgcaaaccgttttagcgaaaattgtcgcagacaaggcgatttgggtagaagcccgcaaacagcaacaaccgctg

SEQ ID NO: 296605 - DNA, 75 bp, synthetic construct
  source 1..75: mol_type = other DNA
gtgtgctgaccgaagtcagtaatgaagaggaactggagcgcgccattgcattgggggcaaaggtcgttggcatca

SEQ ID NO: 296606 - DNA, 75 bp, synthetic construct
  source 1..75: mol_type = other DNA
caggtaacgctgttaaatacacagttaagcgagtttgccccaaccatgccccataacgaagcgatgaaaagttaa

SEQ ID NO: 296607 - DNA, 75 bp, synthetic construct
  source 1..75: mol_type = other DNA
aagagcatatcattgatgttcacctcagagagtatggcagaacagaaaaacaaaaatgcacctttgtttttcaac

SEQ ID NO: 296608 - DNA, 75 bp, synthetic construct
  source 1..75: mol_type = other DNA
aaaaattatggtgaccattttaccgttgactcaataaggcagatgaggtgtactggcaatagcggacactaccat

SEQ ID NO: 296609 - DNA, 75 bp, synthetic construct
  source 1..75: mol_type = other DNA
tgaggtcgttgataaagcgaataccctggcattggcggcagtacaactgcatggcagtgaagatcaggagtatat

SEQ ID NO: 296610 - DNA, 75 bp, synthetic construct
  source 1..75: mol_type = other DNA
ttgattggggtgatgacgtttcgacgcctcgtcggcaaatatatatgtctaactcaacgacgtttgatgatcagg

SEQ ID NO: 296611 - DNA, 75 bp, synthetic construct
  source 1..75: mol_type = other DNA
gtgtcattaagtacgttatggcgagattactgggggcgtagcggcagtagtaaggattatcagttgagttattcc

SEQ ID NO: 296612 - DNA, 75 bp, synthetic construct
  source 1..75: mol_type = other DNA
cccatcgtcagccaaatcgccccgcagccgattttatgtaaagactttattatcgacccttaccagatctatctg

SEQ ID NO: 296613 - DNA, 75 bp, synthetic construct
  source 1..75: mol_type = other DNA
tttaattctgctgtagagtcgcaaccgggcatcaaagacgcacgtcttttggcctcggttttccagacgctgcgc

SEQ ID NO: 296614 - DNA, 75 bp, synthetic construct
  source 1..75: mol_type = other DNA
ttatcgctggcggcagtgcaactgcatggtaatgaagatcagctgtatatcgatacgctgcgtgaagctctgcca

SEQ ID NO: 296615 - DNA, 75 bp, synthetic construct
  source 1..75: mol_type = other DNA
cggggccatcgcgctcgggcatcctatcggtgccagtggtgctcgtattctggtcacactattacatgccatgca

SEQ ID NO: 296616 - DNA, 75 bp, synthetic construct
  source 1..75: mol_type = other DNA
tggagcggcgtaaccgtcgcacaggaaggacagagaaagcgcggatctgggaagtgacggacagaacggtcagga

SEQ ID NO: 296617 - DNA, 75 bp, synthetic construct
  source 1..75: mol_type = other DNA
aaggcgatggcttcgataacggcgcatgggttgcaccgaccgtgttcaccgattgcagcgacgatatgaccatcg

SEQ ID NO: 296618 - DNA, 75 bp, synthetic construct
  source 1..75: mol_type = other DNA
gaagacgaagtgattcgccgcgccaacgacaccaactacggcctggcggcgggcatcgtgacggctgacctgaac

SEQ ID NO: 296619 - DNA, 75 bp, synthetic construct
  source 1..75: mol_type = other DNA
tgtatgccggtataccgctgaaggtcctgcagagtctgatggggcataagtccatcagctcaacggaggtctaca

SEQ ID NO: 296620 - DNA, 75 bp, synthetic construct
  source 1..75: mol_type = other DNA
tgtggctgcccggcaccgggtgcagtttttgatgcctgagtccgatgctgtcacaatgctgaaaaacaggcaggc

SEQ ID NO: 296621 - DNA, 75 bp, synthetic construct
  source 1..75: mol_type = other DNA
gatgtggctgcgcggcaccgggtgcagtttgcgatgcctgagtccgatgcagtgtctatgctcaaaagaattcct

SEQ ID NO: 296622 - DNA, 75 bp, synthetic construct
  source 1..75: mol_type = other DNA
cacctggggcgaatccccggcagagatgcccgttggcggctacaaacactccggcattggtcgcgagaacggcgt

SEQ ID NO: 296623 - DNA, 75 bp, synthetic construct
  source 1..75: mol_type = other DNA
acgctcgcgtattctgcatcgagccgttgatattctgcgtgaacgcaatgacgaactcgcaaaactggaaaccct

SEQ ID NO: 296624 - DNA, 75 bp, synthetic construct
  source 1..75: mol_type = other DNA
agggtgatggcttcgataacggcgcatgggttgctccgaccgtattcaccgattgccgcgacgaaatgactatcg

SEQ ID NO: 296625 - DNA, 75 bp, synthetic construct
  source 1..75: mol_type = other DNA
gatgtccatcctcacatatgaaacggaagacgaagtgattcgccgcgccaacgacaccaactacggcctggcggc

SEQ ID NO: 296626 - DNA, 75 bp, synthetic construct
  source 1..75: mol_type = other DNA
agccagatccccctgcgtgagacatcgtttgtctacactcgccgcgaaccgctcggcgtggtcgcggggattggc

SEQ ID NO: 296627 - DNA, 75 bp, synthetic construct
  source 1..75: mol_type = other DNA
aggtgtgtaccaacggcacccgcgtcttcgttccggcgaaatgcaaagccgcatttgaacaaaagattctggcgc

SEQ ID NO: 296628 - DNA, 75 bp, synthetic construct
  source 1..75: mol_type = other DNA
ctttaccttgcaagagttacaagggcagccgcacaacatggtgcgtcacccggatatgccaaaagcggcgtttgc

SEQ ID NO: 296629 - DNA, 75 bp, synthetic construct
  source 1..75: mol_type = other DNA
ttgccgccgctgccgctgatggagtgacgttctctgtcccggtcacgccacatacgttccgccattcctatgcga

SEQ ID NO: 296630 - DNA, 75 bp, synthetic construct
  source 1..75: mol_type = other DNA
cataagtccatcagctcaacggaagtctacacgaaggtgtttgcgctggatgtggctgcccggcaccgggtgcag

SEQ ID NO: 296631 - DNA, 75 bp, synthetic construct
  source 1..75: mol_type = other DNA
gacagagaaagcgcggatctgggaagtgacggacagaacggtcaggacctggattggggaggcggttgccgccgc

SEQ ID NO: 296632 - DNA, 75 bp, synthetic construct
  source 1..75: mol_type = other DNA
gcgcaggatgcctatgccgccgagtcgcaacgcagggcggtcgccgccgtggaggctgggcgcttcaaggacgag

SEQ ID NO: 296633 - DNA, 75 bp, synthetic construct
  source 1..75: mol_type = other DNA
gcactggccccaatcatcggcgcgttgatcgctcaacgtctggatctgggtactgcgctggcatcgctctcgttc

SEQ ID NO: 296634 - DNA, 75 bp, synthetic construct
  source 1..75: mol_type = other DNA
gggcataagtccatcagctcaacggaggtctacacgaaggtgtttgcactggatgtggctgcacggcaccgggtg

SEQ ID NO: 296635 - DNA, 75 bp, synthetic construct
  source 1..75: mol_type = other DNA
gagagtgcgcaggtgtcggcgatggtgaaacaccgcgccagccgactggaagacgcggtgacggtgctgcattaa

SEQ ID NO: 296636 - DNA, 75 bp, synthetic construct
  source 1..75: mol_type = other DNA
atgtcgggcgcacaaataagcgtatccataaaggtttagtggtgcgtaaaggctggttgggaaaactcccttcat

SEQ ID NO: 296637 - DNA, 75 bp, synthetic construct
  source 1..75: mol_type = other DNA
aaaggcaccgatgaactgaacgaacatacccagcagacggttgataatgttcagcaaacggtggcgaccatgaac

SEQ ID NO: 296638 - DNA, 75 bp, synthetic construct
  source 1..75: mol_type = other DNA
ggtcacgccacatacgttccgccattcctatgcgatgcatatgctgtatgccggtataccgctgaaggtcctgca

SEQ ID NO: 296639 - DNA, 75 bp, synthetic construct
  source 1..75: mol_type = other DNA
cacggaggtctatacgaaggtgtttgcgctcgatgtcgcggcacggcaccgggtgcagtttcagatgcccgaagc

SEQ ID NO: 296640 - DNA, 75 bp, synthetic construct
  source 1..75: mol_type = other DNA
gtaaactgccttcattaccgcttcgctggcgggcgcgtggagtgatgaccctgatgtttatcttgctggcggcca

SEQ ID NO: 296641 - DNA, 75 bp, synthetic construct
  source 1..75: mol_type = other DNA
cagcaatggcgatattgacctgccctacatcgcgtatgcactgcacgacgctgagcatcctgacctcgtgaaccg

SEQ ID NO: 296642 - DNA, 75 bp, synthetic construct
  source 1..75: mol_type = other DNA
tcaactcctggacctgtgaagacttcctggctgtagacgaatccttccagccgactgctgtcggttttgctgagg

SEQ ID NO: 296643 - DNA, 75 bp, synthetic construct
  source 1..75: mol_type = other DNA
tgaatcaaaccgtcagctgaaatataagcagttcgcgttgagtaatcctgagcgcgtggtggtggatattgaaga

SEQ ID NO: 296644 - DNA, 75 bp, synthetic construct
  source 1..75: mol_type = other DNA
cacctgttcagcaacgccgcacatctctccccggggcaggtgctggagccgcagggggatgtcattacggacctg

SEQ ID NO: 296645 - DNA, 75 bp, synthetic construct
  source 1..75: mol_type = other DNA
aggctggggctttttgcccggaccggacaactgagcgtcaaatccggggagggaccggtagaggtacaggcgcaa

SEQ ID NO: 296646 - DNA, 75 bp, synthetic construct
  source 1..75: mol_type = other DNA
tttttgttaaaaaaccacaacccgaagaaacgatgtggtttgtgggggaaaccgatacgcagcaactggaaaccg

SEQ ID NO: 296647 - DNA, 75 bp, synthetic construct
  source 1..75: mol_type = other DNA
tgcaattcagcaattgaaacgacgaagccccgcactgttggagcagtaacggggcttctaaccaacaacgtaaac

SEQ ID NO: 296648 - DNA, 75 bp, synthetic construct
  source 1..75: mol_type = other DNA
agcgaacaggaagcacgccagcaatccccggctggctgcgtgatggtattcgctgcccgtattcgccaggaggta

SEQ ID NO: 296649 - DNA, 75 bp, synthetic construct
  source 1..75: mol_type = other DNA
tcttcggcgttattgatggcctgaacctgaccttgcaatatcaaggaaaaaacgaaaaccgcgatgttaaaaagc

SEQ ID NO: 296650 - DNA, 75 bp, synthetic construct
  source 1..75: mol_type = other DNA
ttaccagtcgccagccgagcggttcctcagtgtttgcgctctcaaccaaaggcgcaaccagtactgcggcaaaat

SEQ ID NO: 296651 - DNA, 75 bp, synthetic construct
  source 1..75: mol_type = other DNA
ctgaaaacggcgactttccagcaggaagttgcagagtccattcttgcgggaattaaagcgtattttgccgatgga

SEQ ID NO: 296652 - DNA, 75 bp, synthetic construct
  source 1..75: mol_type = other DNA
ttgaggccagcagcgaacaggaagcacgccagcaatccccggctggctgcgtgatggtattcgccgcccgtattc

SEQ ID NO: 296653 - DNA, 75 bp, synthetic construct
  source 1..75: mol_type = other DNA
gtcaccaacgatatctgtacccgtttacggaagaaagatttctataatgaagagactgagtcttaacatgaaaga

SEQ ID NO: 296654 - DNA, 75 bp, synthetic construct
  source 1..75: mol_type = other DNA
gatgtcgcttctcacttatgaatctgaggacgaagtgattcaccgcgccaatgataccgactacggcctggcggc

SEQ ID NO: 296655 - DNA, 75 bp, synthetic construct
  source 1..75: mol_type = other DNA
ccggcattggtcgcgagaacggcgtgatgacgctccagagttacacccaggcgaagtccatccaggttgagatgg

SEQ ID NO: 296656 - DNA, 75 bp, synthetic construct
  source 1..75: mol_type = other DNA
ggatatttggcaatacatctggctggaaaatatcgacattgttccgctgtatctcgctgcggaacgtccggttct

SEQ ID NO: 296657 - DNA, 75 bp, synthetic construct
  source 1..75: mol_type = other DNA
agcaatcgcgttggcagctctggttaactccgcaacaaaaactaagtcgtgagtggtttcagtccgctggattac

SEQ ID NO: 296658 - DNA, 75 bp, synthetic construct
  source 1..75: mol_type = other DNA
aagcaaaattgcgcgtgtctctacggaaaacactacagccgggcttatcagtgaagttgtctatcgcgaagatca

SEQ ID NO: 296659 - DNA, 75 bp, synthetic construct
  source 1..75: mol_type = other DNA
tctttgtggcagatgagtcccgccatcagtgggtaaatgaacgtaatggtcgtaccgggatgctgacagtcagtg

SEQ ID NO: 296660 - DNA, 75 bp, synthetic construct
  source 1..75: mol_type = other DNA
aggctggggctttttgcccggaccggtcaactgagcgtcaaatccggggaagggcctgtggatgttcaggcgcaa

SEQ ID NO: 296661 - DNA, 75 bp, synthetic construct
  source 1..75: mol_type = other DNA
tttgaccgggaggggacggaacccggattcggctacctgtggctgcggatggcaaaaccctgtgcaggtgaaacg

SEQ ID NO: 296662 - DNA, 75 bp, synthetic construct
  source 1..75: mol_type = other DNA
ggacaatcacacccggaacatcctcagaacccccgctaactcaaaactgcggatggaggacaggcgcggcgagga

SEQ ID NO: 296663 - DNA, 75 bp, synthetic construct
  source 1..75: mol_type = other DNA
ctaccagtttgatgtgtgtctgccgtacagcgagccgtcgggcctttttgacggtgctgcagaatcggtctggga

SEQ ID NO: 296664 - DNA, 75 bp, synthetic construct
  source 1..75: mol_type = other DNA
gcatcaggttttatgagagcgcagcaagaagtcccatctttaactgattgctgctcgttatctccggagcaagta

SEQ ID NO: 296665 - DNA, 75 bp, synthetic construct
  source 1..75: mol_type = other DNA
tgatagcctggtcggcagcagtgaaactgaaaaccgggtaaaaatgagtgatctcattcacagtgctcttgcaaa

SEQ ID NO: 296666 - DNA, 75 bp, synthetic construct
  source 1..75: mol_type = other DNA
tggtgatgggcattgtggcatctgcatccgtacaagctgcagaagtatataataaagacggtaataaactggatg

SEQ ID NO: 296667 - DNA, 75 bp, synthetic construct
  source 1..75: mol_type = other DNA
tccaggacgggattggtcggatttactttatggaacggatcgctgctcaggggacagttgttacagcaacatgca

SEQ ID NO: 296668 - DNA, 75 bp, synthetic construct
  source 1..75: mol_type = other DNA
tcacgatcgtgaagaagtgacggtgcatgtccgccgcatctgggctgcggtgggaggccgtcgcgacgagcgata

SEQ ID NO: 296669 - DNA, 75 bp, synthetic construct
  source 1..75: mol_type = other DNA
gttacagggcgtagtagagaagggcggtgaactgcgtgttgaagttgccgataccaacgaaagcaaagagttgct

SEQ ID NO: 296670 - DNA, 75 bp, synthetic construct
  source 1..75: mol_type = other DNA
tgtacatacctcaatcaacaaagcgatccccaccatgcccgatgtcggcatcgacgcacaggaactgaaagatat

SEQ ID NO: 296671 - DNA, 75 bp, synthetic construct
  source 1..75: mol_type = other DNA
gggcttaactctcggctggagatccaactggacgctacgaaggaggcggccaaagcgatgaaagctgctggctgt

SEQ ID NO: 296672 - DNA, 75 bp, synthetic construct
  source 1..75: mol_type = other DNA
atgactatcgttatctacggacgagataactgctcatattgcaaacgtgcggtcgagctggcgaaacaactaaag

SEQ ID NO: 296673 - DNA, 75 bp, synthetic construct
  source 1..75: mol_type = other DNA
ctggagcaggagttggttctgctggcacaacgaattgacgttgccgaagaactggaccgcctcgaagcgcatgtc

SEQ ID NO: 296674 - DNA, 75 bp, synthetic construct
  source 1..75: mol_type = other DNA
aatctatcaatgccgaagtgacgaattctgccatcgagctgaaagtgttgattgagcagatgcgcgagcagatcc

SEQ ID NO: 296675 - DNA, 75 bp, synthetic construct
  source 1..75: mol_type = other DNA
agccctgacggtaaaccgtacaaccggacgacatttttatgggacggaatgcggctggcgcaggagagcaggccg

SEQ ID NO: 296676 - DNA, 75 bp, synthetic construct
  source 1..75: mol_type = other DNA
actatcttcaatctcaaactgccgatgaaaaaaacgctacgaagaagtgtcacacaatctggcgtatattcaggc

SEQ ID NO: 296677 - DNA, 75 bp, synthetic construct
  source 1..75: mol_type = other DNA
ttgctactgtattcaatggagggtatgagggtattggaaaggcacgaattggttctacgataaatgctggtaaat

SEQ ID NO: 296678 - DNA, 75 bp, synthetic construct
  source 1..75: mol_type = other DNA
actggaccgcctcgaagcgcatgttaaagagacgtacaacattctgaagaaaaaagaagccgttggtcgtcgtct

SEQ ID NO: 296679 - DNA, 75 bp, synthetic construct
  source 1..75: mol_type = other DNA
aagatagtcgcaatgttcgcaactggcagatgttaaaggagtccacatccagatccagcattccgtatgcagcct

SEQ ID NO: 296680 - DNA, 75 bp, synthetic construct
  source 1..75: mol_type = other DNA
gcgattcctccgcacaaaccgacaactttatgaccaagcgcgccagcggactggcaacgtatcgtaataccgact

SEQ ID NO: 296681 - DNA, 75 bp, synthetic construct
  source 1..75: mol_type = other DNA
accagcgaacaggaagcacgccagcaatctccggctggctgcgtgatggtatttgctgcccgtattcgtcagggg

SEQ ID NO: 296682 - DNA, 75 bp, synthetic construct
  source 1..75: mol_type = other DNA
ttgcgtttgttgtacccgttgccatttctattcctctgttggattggtgggggacagtatacacagaaaaagcac

SEQ ID NO: 296683 - DNA, 75 bp, synthetic construct
  source 1..75: mol_type = other DNA
cgttgggaagcggagtttgccggaaataaagcggagagtgatactgcacagcaaaaaacgcgtctcgcttttgcc

SEQ ID NO: 296684 - DNA, 75 bp, synthetic construct
  source 1..75: mol_type = other DNA
aaacctgcaaagccgtggtacaggcaaacgcgcagaagcatgggcaacaggcctgaaatatgacgccaacgatat

SEQ ID NO: 296685 - DNA, 75 bp, synthetic construct
  source 1..75: mol_type = other DNA
actgacgtatgactttggcggcagcgatttcgctatcagtggggcctataccaactctgatcgcaccaacgagca

SEQ ID NO: 296686 - DNA, 75 bp, synthetic construct
  source 1..75: mol_type = other DNA
aatctgtaacaagctgaatgacataaactttcagtttaaccaactgaaacaggatttcatcaaaggttacaacaa

SEQ ID NO: 296687 - DNA, 75 bp, synthetic construct
  source 1..75: mol_type = other DNA
gcgtttagttgttgaagacgtcaccacacaaaatgtattggccaccttcatcggttcttttctcttcagtctggt

SEQ ID NO: 296688 - DNA, 75 bp, synthetic construct
  source 1..75: mol_type = other DNA
ctgtcaccatgcgggctattcaaaaagccatcgcgctgattgatctgaaatttactccacaaggcgaatcccatt

SEQ ID NO: 296689 - DNA, 75 bp, synthetic construct
  source 1..75: mol_type = other DNA
cgccaacaatgccacatttgcggctggtgggcaatgcaatcagtctggttcagttcgttgccatacctgcaatga

SEQ ID NO: 296690 - DNA, 75 bp, synthetic construct
  source 1..75: mol_type = other DNA
tcataacggttgcagacatcatgtcgtccatgaaagataccttcggcaacaggaataccagtgaagaacaactac

SEQ ID NO: 296691 - DNA, 75 bp, synthetic construct
  source 1..75: mol_type = other DNA
ggaagatgaatccaaggccggtgatgcgattcaagaagagcgagttgaagttgaggatgagcctgttttgcctgg

SEQ ID NO: 296692 - DNA, 75 bp, synthetic construct
  source 1..75: mol_type = other DNA
tatgacatcacaccgttcggcaccgaaggccgttctccggcacggctggaagagttgcgcgatattctgaaggac

SEQ ID NO: 296693 - DNA, 75 bp, synthetic construct
  source 1..75: mol_type = other DNA
ccgaacgaacggtggacaccctgtaccagaaaggcgcgtcgttcgtcgattttctgccgtgggtggagtaccagc

SEQ ID NO: 296694 - DNA, 75 bp, synthetic construct
  source 1..75: mol_type = other DNA
aaagcggcagagatggccgaagccctggggatgttcacccagccgggtagtttcgaggcagatctcttcaaccgg

SEQ ID NO: 296695 - DNA, 75 bp, synthetic construct
  source 1..75: mol_type = other DNA
gaagactctccggaagaggcactgaacaccgtttgcgaacgaatggtctcagcactggctggcgcgggaattcac

SEQ ID NO: 296696 - DNA, 75 bp, synthetic construct
  source 1..75: mol_type = other DNA
gccagctcctgctcagcgcgactaaagcaccggggaaatataccgaaggcgttgtgctttcgccgcgtgttgaag

SEQ ID NO: 296697 - DNA, 75 bp, synthetic construct
  source 1..75: mol_type = other DNA
aggccgcgcagggcacatggctgttcgaccagcgcccgcataaagtcatcgtactggacaggctgcgtaaaccgc

SEQ ID NO: 296698 - DNA, 75 bp, synthetic construct
  source 1..75: mol_type = other DNA
ctgtcgttaacgcagatggacaagccaaacaggatttgctgattgaaagcgggattgttcgccagttgggcaaca

SEQ ID NO: 296699 - DNA, 75 bp, synthetic construct
  source 1..75: mol_type = other DNA
ggtctatcggtacacgccagactcgttgatttcagccatagacgacaatctggggtcgtctcagaaaacggaatc

SEQ ID NO: 296700 - DNA, 75 bp, synthetic construct
  source 1..75: mol_type = other DNA
tccggacaacgaacgcgctggggcaggtgacgcagtttggtgactacgacgcgaacggtcgcgccgggaccattc

SEQ ID NO: 296701 - DNA, 75 bp, synthetic construct
  source 1..75: mol_type = other DNA
atgggtttcccgctgtttaaaaagaaagtgaaaccggcaatatctgcagagacgaccgtgtcagcagaatgcgcg

SEQ ID NO: 296702 - DNA, 75 bp, synthetic construct
  source 1..75: mol_type = other DNA
tggaggcactgttccgcgtggtgcccccgagtatttacctggcgctggggatgacggagaaggaggagaaggcgg

SEQ ID NO: 296703 - DNA, 75 bp, synthetic construct
  source 1..75: mol_type = other DNA
aaagagtccccctaaagcagactgacagacatcacaaatccccgggtggggatttgtgtataagagacagccggt

SEQ ID NO: 296704 - DNA, 75 bp, synthetic construct
  source 1..75: mol_type = other DNA
aaactctccggctgttacacggaaggtgtggtgctggcccggaaagtggaggcgctgttccgggtggtgcagccg

SEQ ID NO: 296705 - DNA, 75 bp, synthetic construct
  source 1..75: mol_type = other DNA
taaccctctttattgctcgtctggttattggtatggggatggcaggtgaatatggcagtagtgtaacatacgtca

SEQ ID NO: 296706 - DNA, 75 bp, synthetic construct
  source 1..75: mol_type = other DNA
ggtaagcaaagcctggcagccgtttttagatgccaaagcgcagggtaaaatcagcgattccttcaaacgctttgc

SEQ ID NO: 296707 - DNA, 75 bp, synthetic construct
  source 1..75: mol_type = other DNA
gctcgacctggcgcagttaccgacggaagtctggccgaacggcgaattgcccgccgatctcgcttcccgcgtaca

SEQ ID NO: 296708 - DNA, 75 bp, synthetic construct
  source 1..75: mol_type = other DNA
agtatcaccatgagcagcgcatcggggctggataactttattcgtctcagcacggggtctgttgatgcaatgtat

SEQ ID NO: 296709 - DNA, 75 bp, synthetic construct
  source 1..75: mol_type = other DNA
tccaaggaaatggtgatcataaatgccaattagtgaatttataccatgccagattgttagatgaagaaggaaggg

SEQ ID NO: 296710 - DNA, 75 bp, synthetic construct
  source 1..75: mol_type = other DNA
ggtactgggtttattactcttttttcagcaaatgttggggcaaggtattgccggtattcttccaaaacttattgg

SEQ ID NO: 296711 - DNA, 75 bp, synthetic construct
  source 1..75: mol_type = other DNA
atgaggcggtgtcgtgggcagaagatatggcgggacaggtcgaggacgccattggagaagcaatggaacaagtcg

SEQ ID NO: 296712 - DNA, 75 bp, synthetic construct
  source 1..75: mol_type = other DNA
ttgtttattgcggaggccgggaactcgttcggcctgctggccgacttctttgacagcctcgggctgacagtgaat

SEQ ID NO: 296713 - DNA, 75 bp, synthetic construct
  source 1..75: mol_type = other DNA
gtcaacccgctgttgtccccctatgtgaccaaagtggtgaaaatgtggcggaaactgggggcctggctgtggctg

SEQ ID NO: 296714 - DNA, 75 bp, synthetic construct
  source 1..75: mol_type = other DNA
ccattaatacataaagatattgtaactgatgttggtttgcctgatccacgattttttatttttggtgatgataca

SEQ ID NO: 296715 - DNA, 75 bp, synthetic construct
  source 1..75: mol_type = other DNA
accagcgatgatgcactgaccgatgatgtgttaagcacggaattcgtcgtgcgcaatgaacatggcctgcatgct

SEQ ID NO: 296716 - DNA, 75 bp, synthetic construct
  source 1..75: mol_type = other DNA
tcaacgtttctcggcaatgggattgcaattcctcacggcactaccgacacccgcgagcaggtactgaaaacgggt

SEQ ID NO: 296717 - DNA, 75 bp, synthetic construct
  source 1..75: mol_type = other DNA
ccggacgactgaccggcatcgagaagcccaacggcaatcacatcaccctgagctatctgaacggagagctatcct

SEQ ID NO: 296718 - DNA, 75 bp, synthetic construct
  source 1..75: mol_type = other DNA
gtcatcctgtttacctctttctcagggagtttagtctccaggattcccggggcggttcaacttgagcgatttttg

SEQ ID NO: 296719 - DNA, 75 bp, synthetic construct
  source 1..75: mol_type = other DNA
cgctgtcgctggctgctcgcattcatgcggaagtcccggcggatgaaagcccggaaacgacagaaggttatgaag

SEQ ID NO: 296720 - DNA, 75 bp, synthetic construct
  source 1..75: mol_type = other DNA
ttgtgactctggaaggtatggaaaaagcggtgcaggtgatcgtccgtattgccgagttaacggcgcaacggaagt

SEQ ID NO: 296721 - DNA, 75 bp, synthetic construct
  source 1..75: mol_type = other DNA
gcgctaggctttgaaggtgtcggacaaaaacttcagagtcttgataccagcaatattgctcgcggcataaatagt

SEQ ID NO: 296722 - DNA, 75 bp, synthetic construct
  source 1..75: mol_type = other DNA
tgttgctcgcgctattagtccgttaacaaggagtgttggcggttggctgaatggtggcatacagaaaacggcgga

SEQ ID NO: 296723 - DNA, 75 bp, synthetic construct
  source 1..75: mol_type = other DNA
aggcaatcaatcgcaaccgattaatccagagaatgttgatgttaatactggctcgccatcaagtctgcttgagag

SEQ ID NO: 296724 - DNA, 75 bp, synthetic construct
  source 1..75: mol_type = other DNA
ggagggcttttcgtctgcagcaccagcaccgaaaaccccacagcaggagcaggctctagcaatcaaccaggctat

SEQ ID NO: 296725 - DNA, 75 bp, synthetic construct
  source 1..75: mol_type = other DNA
gattatctgaaggaagaaggtatcaccccaagtgatgagatcatcgagctagacttcccgactcagccaaacctg

SEQ ID NO: 296726 - DNA, 75 bp, synthetic construct
  source 1..75: mol_type = other DNA
aagaatcgctcatattaaatatgaatggcgaggcttacgaacaagccgataatgcgcaaaagtatttcaccgcct

SEQ ID NO: 296727 - DNA, 75 bp, synthetic construct
  source 1..75: mol_type = other DNA
aacgatctgctgaatgtgaacaagaacaatacaaaaggcgatccggataatgttgtcaaaacatcgcagccgcag

SEQ ID NO: 296728 - DNA, 75 bp, synthetic construct
  source 1..75: mol_type = other DNA
aaatgttggagactggctgaatggggggattcaacaaaccgctaatagcattaggggaatagcaactggtgccaa

SEQ ID NO: 296729 - DNA, 75 bp, synthetic construct
  source 1..75: mol_type = other DNA
tatataaaacgccttccgatgaaaaaagggaggacgcagatcaacaacggagaagaacgtctcattgttgcaacc

SEQ ID NO: 296730 - DNA, 75 bp, synthetic construct
  source 1..75: mol_type = other DNA
tgtcggtagcaaagtcaaatacgccaacggctcatcttctgctattcctgcgtcaagcgtagcccaggctgtaat

SEQ ID NO: 296731 - DNA, 75 bp, synthetic construct
  source 1..75: mol_type = other DNA
gtggcggtacaacaaccattattgaccatatgggatttggcccaaatggctgccggttacgccatcaactggaag

SEQ ID NO: 296732 - DNA, 75 bp, synthetic construct
  source 1..75: mol_type = other DNA
cgatcttctgtgacggcaactttacaggcaaagccggacgtggccgttttctgcgacgcaaaccgtttgtccctc

SEQ ID NO: 296733 - DNA, 75 bp, synthetic construct
  source 1..75: mol_type = other DNA
cgattttctgtgacggcacctttacaggcaaagccgggcgaggtcgtttcctgcgacgcaaaccgtttgtccctc

SEQ ID NO: 296734 - DNA, 75 bp, synthetic construct
  source 1..75: mol_type = other DNA
ggcatcagcgatggtgcgattgacgtggtggcgaccgatcattgcaccttctcgatggctcaacgccagcaaatt

SEQ ID NO: 296735 - DNA, 75 bp, synthetic construct
  source 1..75: mol_type = other DNA
tctgggttgaaacttgtccgcaatatcttctgctcgacgaacgtagttatgacgcagaagacggcatgaaattta

SEQ ID NO: 296736 - DNA, 75 bp, synthetic construct
  source 1..75: mol_type = other DNA
aaactctatttaacctatcaatataaactcaacgatgatgaagtgttgcaagcattacgccgcttgcatgagtcc

SEQ ID NO: 296737 - DNA, 75 bp, synthetic construct
  source 1..75: mol_type = other DNA
ggagtgcatccgggatggttgctattacctttgataaacatctctattacccgcttctttcgattgaaaaaaatg

SEQ ID NO: 296738 - DNA, 75 bp, synthetic construct
  source 1..75: mol_type = other DNA
atgagcgtcggtatgagtattttaccgcgtgtttgctcagcttttatcagcaacaatatttattcaataagaata

SEQ ID NO: 296739 - DNA, 75 bp, synthetic construct
  source 1..75: mol_type = other DNA
gttgaaacagaaattcagaagaaaaaagcaaagctgctttttgaaacaactgccttaggtaaactgagcgaagaa

SEQ ID NO: 296740 - DNA, 75 bp, synthetic construct
  source 1..75: mol_type = other DNA
cgccaatcaggaaggggcgacgctggaagcaccgaatgcaaaaggtgaacagcgttttgctcgattcaacacgcc

SEQ ID NO: 296741 - DNA, 75 bp, synthetic construct
  source 1..75: mol_type = other DNA
gcgaaggcactgcgcaggttaagaaagccgttgaagatggcaccaagcaaacggtaaccgcaattaataacctgg

SEQ ID NO: 296742 - DNA, 75 bp, synthetic construct
  source 1..75: mol_type = other DNA
attacttttgtccatgatcttcagtcttttgttgattcgacaaaagggcagaaaattattggtgataaaagttta

SEQ ID NO: 296743 - DNA, 75 bp, synthetic construct
  source 1..75: mol_type = other DNA
cgctggctggacctcggtattgttcgttttcaaccgtcggaaattgccaagatagccgtaccactgatggttgca

SEQ ID NO: 296744 - DNA, 75 bp, synthetic construct
  source 1..75: mol_type = other DNA
gatggtatttcaggactctatcagcgccgttaacccgcgtaaaactgtgcgcgagatcctgcgtgaaccgatgcg

SEQ ID NO: 296745 - DNA, 75 bp, synthetic construct
  source 1..75: mol_type = other DNA
agaaatgggcaaatgaataaagaccgtgaacaacaacgtgagcttcaacagcagcagcaagttcaacaggggaaa

SEQ ID NO: 296746 - DNA, 75 bp, synthetic construct
  source 1..75: mol_type = other DNA
acaggaattatccccgagaaaaggtttatattttcagtcccgataatgcccccgtccataataatattaaagact

SEQ ID NO: 296747 - DNA, 75 bp, synthetic construct
  source 1..75: mol_type = other DNA
gcagacatcactcatcaggaagcagagactgttttactggcgacaaactacgatatggcagaagctctacggcgt

SEQ ID NO: 296748 - DNA, 75 bp, synthetic construct
  source 1..75: mol_type = other DNA
cgccatcgttaaaaaataccgccatcgcgctggtgctgatttttatgccaacactgctggtggcagcgcagccag

SEQ ID NO: 296749 - DNA, 75 bp, synthetic construct
  source 1..75: mol_type = other DNA
gtctcctatagagagttttaagactccgggtaaaggtgatgggggcggatcttctggtggtgattcatcaccaaa

SEQ ID NO: 296750 - DNA, 75 bp, synthetic construct
  source 1..75: mol_type = other DNA
acgcagcagatttatttacggttcctgatacggataaatcaaagctatggttcttggatgttttatttcctgaga

SEQ ID NO: 296751 - DNA, 75 bp, synthetic construct
  source 1..75: mol_type = other DNA
ctacccggaagacgcgcaggctaaatgggatgccattcggacgcgtgaagccaagcatctgcgtgacaacacaat

SEQ ID NO: 296752 - DNA, 75 bp, synthetic construct
  source 1..75: mol_type = other DNA
cgccgggtggagtttattaggtggctctgctgttgttggtgcaggtcttggaatatggacgtcatttactgcaaa

SEQ ID NO: 296753 - DNA, 75 bp, synthetic construct
  source 1..75: mol_type = other DNA
taataacatcgatattcagtctgatataaacagtgcaactgctacctacgtttctgttatcgatacggcggtcag

SEQ ID NO: 296754 - DNA, 75 bp, synthetic construct
  source 1..75: mol_type = other DNA
tgaataaaaacttactggtatccaaatcagcgtgtggaagcatcacattgacagacccggaagctaaagcgtctt

SEQ ID NO: 296755 - DNA, 75 bp, synthetic construct
  source 1..75: mol_type = other DNA
gctgaccattaaccgtaaaccgcagggtattttcagtaagtcaccggcaacgccgctgcaggataaaacgaacac

SEQ ID NO: 296756 - DNA, 75 bp, synthetic construct
  source 1..75: mol_type = other DNA
attaagctgtatctgcaaagtcatggaaccattgttactgaatccacataaagttggttctatgcgaagtagaat

SEQ ID NO: 296757 - DNA, 75 bp, synthetic construct
  source 1..75: mol_type = other DNA
gctggtgttggatatccgcatgcatcaggcggctaaactcatcacaactaccgaaaagcatataaacagtattgc

SEQ ID NO: 296758 - DNA, 75 bp, synthetic construct
  source 1..75: mol_type = other DNA
ccgattttccatgctgattcttatggttaccaaccaggcaaatcagctcatgacgctctgaaacaatgtgccatc

SEQ ID NO: 296759 - DNA, 75 bp, synthetic construct
  source 1..75: mol_type = other DNA
atctgatggcgcgtatggaaggtcccatcgccaccgcgatggggattatttattcctgcgactgggagattgaaa

SEQ ID NO: 296760 - DNA, 75 bp, synthetic construct
  source 1..75: mol_type = other DNA
gacgattatatttcgcgttcacgtttacttgatgcgcggttgtgggcgaaacgaccactctggcaacgcgttgcc

SEQ ID NO: 296761 - DNA, 75 bp, synthetic construct
  source 1..75: mol_type = other DNA
ggattactgcataccaagagcgtgctggtcgatggcgagttaagtctggtgggcaccgttaacctcgatatgcgt

SEQ ID NO: 296762 - DNA, 75 bp, synthetic construct
  source 1..75: mol_type = other DNA
atgaatccgcagcacaaaaggaggcaaaagggttatgggcagacaccaaccctgtcccaccatggcagtggagac

SEQ ID NO: 296763 - DNA, 75 bp, synthetic construct
  source 1..75: mol_type = other DNA
gatcctaatcccgttgccccctgggagtggcgccagcaaaaccagaaacctcaaaagacgaaaagcagggggtga

SEQ ID NO: 296764 - DNA, 75 bp, synthetic construct
  source 1..75: mol_type = other DNA
atgatccatatcaagggagtcgatatctgatgactgaacaggaatttaaggaggtatggaatgggcatagtgttt

SEQ ID NO: 296765 - DNA, 75 bp, synthetic construct
  source 1..75: mol_type = other DNA
aatcaagaagtggcgtatacatcgctcaacagctgagagtttgctggattttgcgaggcgctacaatgcgatagt

SEQ ID NO: 296766 - DNA, 75 bp, synthetic construct
  source 1..75: mol_type = other DNA
tgaaaatgttcgaccagcaacgtgatggcaatctatacaagatctggaaccggctatgttcgggaacatggtttc

SEQ ID NO: 296767 - DNA, 75 bp, synthetic construct
  source 1..75: mol_type = other DNA
gcaacgagtttcacctttctcggatatgacttcaaagtgcgtacgctgaagaatttcaaaggcgaactgtaccga

SEQ ID NO: 296768 - DNA, 75 bp, synthetic construct
  source 1..75: mol_type = other DNA
tgatacagcaggcgcagcaggttatatgaatgtagctcaaaaggctgctaacagagcggtatcgtttggtgaaca

SEQ ID NO: 296769 - DNA, 75 bp, synthetic construct
  source 1..75: mol_type = other DNA
cagctttgcgacgactgggggctgacctggggctgccattctaataaccatttcgatatctctctggcgatgttt

SEQ ID NO: 296770 - DNA, 75 bp, synthetic construct
  source 1..75: mol_type = other DNA
ctttgcagggtgaagggatggcctgtgcaccctggtacgttcgtcagcggctgcgccgcgcttcggggcgatgtg

SEQ ID NO: 296771 - DNA, 75 bp, synthetic construct
  source 1..75: mol_type = other DNA
ggtatttgaagtcataggtaattgggtctggattagtggcgaaaccattacgcataaggaaactttgaaagaaat

SEQ ID NO: 296772 - DNA, 75 bp, synthetic construct
  source 1..75: mol_type = other DNA
atggacgtcgtcagcaaagcggataactcaccggtgacggcggcggacattgccgcgcacaccgtaatcatggac

SEQ ID NO: 296773 - DNA, 75 bp, synthetic construct
  source 1..75: mol_type = other DNA
attggtgaagcgccgggcggagaggtgatttatcagacactggtcgatgctattccgatggtgctgggccaggaa

SEQ ID NO: 296774 - DNA, 75 bp, synthetic construct
  source 1..75: mol_type = other DNA
ctggactgggaacaggtacaaaaggcacatgaggcctataaacgtctgcctgtcggtgcgcgtaacgacgcaggt

SEQ ID NO: 296775 - DNA, 75 bp, synthetic construct
  source 1..75: mol_type = other DNA
gttatcaaggcgtttatcgcggtgcgggtgctgggcctgcggcagggcggtatcagtgaagaaacacaaaatgac

SEQ ID NO: 296776 - DNA, 75 bp, synthetic construct
  source 1..75: mol_type = other DNA
gtcatgatgttggcgtatctctgaaggtgacgcctgttgttatggggaacggccagcttgtacttactattgata

SEQ ID NO: 296777 - DNA, 75 bp, synthetic construct
  source 1..75: mol_type = other DNA
cttacggtcagaaattttaagctgacaaaagttagatcgtccgatgttcagcaactgattaaaatttatcttgat

SEQ ID NO: 296778 - DNA, 75 bp, synthetic construct
  source 1..75: mol_type = other DNA
aacagctttggtgctacatacattaccctcagaagctcgcaaagagattttgtcaatctatggcgttcatgaaca

SEQ ID NO: 296779 - DNA, 75 bp, synthetic construct
  source 1..75: mol_type = other DNA
tttggtaataatactgctgcaccgcgtgcaggtaaaaaacgccagccgcgtccggcgaaataccaattcaccgat

SEQ ID NO: 296780 - DNA, 75 bp, synthetic construct
  source 1..75: mol_type = other DNA
accgaccctgaaatgggcctgtttgaaactggctaaactggggcgatggcatgacagcaaacgcacaagcagccc

SEQ ID NO: 296781 - DNA, 75 bp, synthetic construct
  source 1..75: mol_type = other DNA
tttaccgcgctttatggcgatatgtcgttatggaccgcctggaacggcatgattgcttatttgttgatgggaacg

SEQ ID NO: 296782 - DNA, 75 bp, synthetic construct
  source 1..75: mol_type = other DNA
agtcgccatgctgatgcaagcgccatattacttccaggaagcgcagattgaagccgcgatcgccgcgatggatat

SEQ ID NO: 296783 - DNA, 75 bp, synthetic construct
  source 1..75: mol_type = other DNA
gacttacgcgtcaaccagagcgatatcagcgacgcacagataaaaaagatcattgcggtgatcgaccgcgccgcc

SEQ ID NO: 296784 - DNA, 75 bp, synthetic construct
  source 1..75: mol_type = other DNA
gtgacatcagcgacgcgcagataaaaaagatcattgcggtaattgaccgcgccgcttttgatattacgcaactgg

SEQ ID NO: 296785 - DNA, 75 bp, synthetic construct
  source 1..75: mol_type = other DNA
gtcgccatcccggaaattccccagccacaaccgctgaatccgcaaggcgaagcggtggcgaatgattttatcccc

SEQ ID NO: 296786 - DNA, 75 bp, synthetic construct
  source 1..75: mol_type = other DNA
aggcgacggcgtgttccttgatcatagcgagcgttacgaagcctcggcagaatttacccaggtctggcggcggtt

SEQ ID NO: 296787 - DNA, 75 bp, synthetic construct
  source 1..75: mol_type = other DNA
agttcgtttgcacaactgaaaactcagcaacctgcaaccttgtgctatgcaccgccgttatcgaccgacgatacg

SEQ ID NO: 296788 - DNA, 75 bp, synthetic construct
  source 1..75: mol_type = other DNA
ggtgacgcaacggctgaagtttcttgtcgccctgcgtcccagcgtaacctcacctaccgttgccgcccgccaggc

SEQ ID NO: 296789 - DNA, 75 bp, synthetic construct
  source 1..75: mol_type = other DNA
gacacaagcgtagctattctcctgaagataaactttgcgtggttctttatgctctcgggcattctgagtctctac

SEQ ID NO: 296790 - DNA, 75 bp, synthetic construct
  source 1..75: mol_type = other DNA
gagcaaaactgctcttcccggcgattcaacagccgtatccgccactttactttggcggatcgtcagacgtcgccc

SEQ ID NO: 296791 - DNA, 75 bp, synthetic construct
  source 1..75: mol_type = other DNA
atcaaagcccgctgcgttggcgctgcgctacgccagaacccgcaaatgaagcgggcgctggataattttaaagcg

SEQ ID NO: 296792 - DNA, 75 bp, synthetic construct
  source 1..75: mol_type = other DNA
tccaggagcagtcgctgattaccatccgcgaagaagaaggcggcaagaagcagattgcgctgaccgaacagggcg

SEQ ID NO: 296793 - DNA, 75 bp, synthetic construct
  source 1..75: mol_type = other DNA
aacagcgctccgctggcgattgcggcgctgaaagagatctaccgcaccaccagcgaaatgccggtagaagaagcg

SEQ ID NO: 296794 - DNA, 75 bp, synthetic construct
  source 1..75: mol_type = other DNA
atgactttacttaacgtctccgacctttcccatcactatgcccacggtgggtttagcggaaaacatcagcaccag

SEQ ID NO: 296795 - DNA, 75 bp, synthetic construct
  source 1..75: mol_type = other DNA
gaacaactggcgcgcgccagcgaaatgctgaatgcggtcgatctcgacgacagcgtgctcgacaagcgcccaccg

SEQ ID NO: 296796 - DNA, 75 bp, synthetic construct
  source 1..75: mol_type = other DNA
gtaaagcgttccgccgtgatattcagatggtgtttcaggactccatcagcgccgttaacccacgcaaaaccgtgc

SEQ ID NO: 296797 - DNA, 75 bp, synthetic construct
  source 1..75: mol_type = other DNA
actatcggtccgtactatgtggttggccctggtattgcgatgcctcatgcgcgcccggaagagggagctaacaag

SEQ ID NO: 296798 - DNA, 75 bp, synthetic construct
  source 1..75: mol_type = other DNA
actatcggtccgtactatgtggttggccctggtattgcgatgcctcatgcgcgcccggaagaggggactaacaag

SEQ ID NO: 296799 - DNA, 75 bp, synthetic construct
  source 1..75: mol_type = other DNA
tttcacatcactatgcgcacggtggattcagcggtaagcaccagcatcaggcggtactcaataacgtttctctga

SEQ ID NO: 296800 - DNA, 75 bp, synthetic construct
  source 1..75: mol_type = other DNA
tttgttgatgaagaaaccggagcctgccttgaagatgaagacggacaggtgacgcactggtgtcatatttcggct

SEQ ID NO: 296801 - DNA, 75 bp, synthetic construct
  source 1..75: mol_type = other DNA
atgataacgaccttatttgttgaatcagacgaacctctggtatgtgccgccgggatgccggtctgtggcggaacc

SEQ ID NO: 296802 - DNA, 75 bp, synthetic construct
  source 1..75: mol_type = other DNA
acgatctcggcggatatctggattatgcaatggaacgtgttatcgatgccacattgcgcttcgatggcaacgagg

SEQ ID NO: 296803 - DNA, 75 bp, synthetic construct
  source 1..75: mol_type = other DNA
tagccatgctgtggctaaagagattgttgaagcttggttacagcccgaagggctgcttggaaaaataatagacct

SEQ ID NO: 296804 - DNA, 75 bp, synthetic construct
  source 1..75: mol_type = other DNA
atgagggatgcagtaaaagatgatcctaacgaaagttatcttcatcttgatttctacgaccgctccaaactcatc

SEQ ID NO: 296805 - DNA, 75 bp, synthetic construct
  source 1..75: mol_type = other DNA
ctgaccggcgtttatttcggggatttacgcggttatccctggcattcactgaatgatgctttcccgcctgatatg

SEQ ID NO: 296806 - DNA, 75 bp, synthetic construct
  source 1..75: mol_type = other DNA
gttaatgttgattacgaaacctgcctatatattagttgtgacaatgaaattcaaaaagtaatatccaaaaataaa

SEQ ID NO: 296807 - DNA, 75 bp, synthetic construct
  source 1..75: mol_type = other DNA
gtcgccattccggaaattccgcagccgctgaatccgcaaggcgaagcggtggcgaatgattttatcccccgtaaa

SEQ ID NO: 296808 - DNA, 75 bp, synthetic construct
  source 1..75: mol_type = other DNA
tggagatcagccccaatttatgggcgggcgttggcttagtgcgcggcggtgccggaacggcgctggtgggcgatg

SEQ ID NO: 296809 - DNA, 75 bp, synthetic construct
  source 1..75: mol_type = other DNA
atctggaagaagcgtatcgggttggcgagttgctgttcccacatctggatgtcgccattccggaaattccccagc

SEQ ID NO: 296810 - DNA, 75 bp, synthetic construct
  source 1..75: mol_type = other DNA
acgatctggcggaggcactgagagctgtggagggtgtggatgttgaaagtggtacgggtaaaaccggtgggctgg

SEQ ID NO: 296811 - DNA, 75 bp, synthetic construct
  source 1..75: mol_type = other DNA
tggcatcgacagctttgtgctttcgggctatccgcatctggaagaagcgtatcgggtcggcgagttgctgttccc

SEQ ID NO: 296812 - DNA, 75 bp, synthetic construct
  source 1..75: mol_type = other DNA
gtcgccattccggaaataccccagccgcagcagctgaatccgcaaggcgaagcggtggcaaatgattttatcccc

SEQ ID NO: 296813 - DNA, 75 bp, synthetic construct
  source 1..75: mol_type = other DNA
ctcgtctgcaacccgtatcccttaccccaccgagtcacgtaattataatataggtgctcgtctggactggatact

SEQ ID NO: 296814 - DNA, 75 bp, synthetic construct
  source 1..75: mol_type = other DNA
tatccagtgctggtgagcgaggaaaacggcgtagtgacgggatatgcctcgtttggcgactggcgtagtttcgat

SEQ ID NO: 296815 - DNA, 75 bp, synthetic construct
  source 1..75: mol_type = other DNA
caataattagtcacagagatttttttgaacgtcatgaaacactgtgctctgttaatgttgattacgaaacctgcc

SEQ ID NO: 296816 - DNA, 75 bp, synthetic construct
  source 1..75: mol_type = other DNA
cgataaaactccacgcttcacccagaattattcgtcgctgagtgctgtacagaagaaagtgtatgatgagaaagg

SEQ ID NO: 296817 - DNA, 75 bp, synthetic construct
  source 1..75: mol_type = other DNA
tgatgttataccttttctttgctctcttacagagtatatctggcttgatgattttggtagtgggaatagcaccat

SEQ ID NO: 296818 - DNA, 75 bp, synthetic construct
  source 1..75: mol_type = other DNA
ataaaatttcggcaggttatgatcatgcattcaccttcggaacctggaagtcatccctgaactggaatgagacgg

SEQ ID NO: 296819 - DNA, 75 bp, synthetic construct
  source 1..75: mol_type = other DNA
tcaaccaatggtatgtacgcaacgcctctggcacgatggcgccgctttctgcctattcttcaacagaatggacct

SEQ ID NO: 296820 - DNA, 75 bp, synthetic construct
  source 1..75: mol_type = other DNA
aacactcagcaacagcagcagcgccgtttcaggtggagaaaatgccattgttaacgtaacccgcaccggcgattc

SEQ ID NO: 296821 - DNA, 75 bp, synthetic construct
  source 1..75: mol_type = other DNA
aatatatcccgccagtgacttaccgcgtagttgatgagttcatggctgaacatgaagacgaggacgatgattatg

SEQ ID NO: 296822 - DNA, 75 bp, synthetic construct
  source 1..75: mol_type = other DNA
ttatggccggtaagccggaagaagcgcgcgaagcatcgcatcgccatctggcctttatcgaagaaattttgctcg

SEQ ID NO: 296823 - DNA, 75 bp, synthetic construct
  source 1..75: mol_type = other DNA
aacgcgtgtttcgttatgatgccaatgaatatctgctgctgacggtgccgttgccgtttgagtgcgaaacctatg

SEQ ID NO: 296824 - DNA, 75 bp, synthetic construct
  source 1..75: mol_type = other DNA
accagcacctctccgttgcagtatttgaagaactaccgactgcataaggcgcggatgatgatcatccatgatggc

SEQ ID NO: 296825 - DNA, 75 bp, synthetic construct
  source 1..75: mol_type = other DNA
gattagccgcgtgctgaaacgtattgagaataaatacaccgaaaatctaagcgtcgagcaactcgcggcagaagc

SEQ ID NO: 296826 - DNA, 75 bp, synthetic construct
  source 1..75: mol_type = other DNA
tggggctaaaatgtttcatgagttaggcctggaattgctgagcagaggccatgatgtaactgtaattacgcctga

SEQ ID NO: 296827 - DNA, 75 bp, synthetic construct
  source 1..75: mol_type = other DNA
cttgatgtttttcgggtgacaaacaagggctatccttgcgaagttctacgtaactgggcatctctcacgccgacg

SEQ ID NO: 296828 - DNA, 75 bp, synthetic construct
  source 1..75: mol_type = other DNA
aagcgtatctcggcatcaatgcgcaaacagcctgatgcccttcgctacgaccgccagactatttttggccttgtc

SEQ ID NO: 296829 - DNA, 75 bp, synthetic construct
  source 1..75: mol_type = other DNA
cgcatccgtgaactccaccacgccatagagctggcgcagcagtctggcgatctggacgcggaatcaaacgccgta

SEQ ID NO: 296830 - DNA, 75 bp, synthetic construct
  source 1..75: mol_type = other DNA
ttgacgatctccagcaagttcataccggtatcatgctctctacgcgtttgttgaatgatgttaatcagcccgaag

SEQ ID NO: 296831 - DNA, 75 bp, synthetic construct
  source 1..75: mol_type = other DNA
ttcgtctcggcataaatgaagaaatggcgacaacgttagcggcactgactcttccgcaaatggttaagctggcag

SEQ ID NO: 296832 - DNA, 75 bp, synthetic construct
  source 1..75: mol_type = other DNA
caacatgatgtcaggtactaatgctctgttaagtaccgatggaggcagtgttgttaacaacggcaccatcatcgg

SEQ ID NO: 296833 - DNA, 75 bp, synthetic construct
  source 1..75: mol_type = other DNA
tcgccctcgccgcactctatgagagctggtcaattccgttctcggtgatgttggttgttccgttaggcgtcgttg

SEQ ID NO: 296834 - DNA, 75 bp, synthetic construct
  source 1..75: mol_type = other DNA
actcaataaatacaatctggtaccttccgatgttatttcccagattaaggtgcaaaacaaccagatttccggtgg

SEQ ID NO: 296835 - DNA, 75 bp, synthetic construct
  source 1..75: mol_type = other DNA
ggtgcaatggccgaccagctcgacgacacaaagagtcgccttgaagacatgatgcgggagctcacgcatcgccat

SEQ ID NO: 296836 - DNA, 75 bp, synthetic construct
  source 1..75: mol_type = other DNA
tcattgtgcagacgcgtctacaaacgccggaagaatttggcaaaatcctgctaaaagttcagcaagatggttcgc

SEQ ID NO: 296837 - DNA, 75 bp, synthetic construct
  source 1..75: mol_type = other DNA
ccgtaccgcgggcgtcggtagcgtgcagctctttgggtcagagtacgccatgcgtatctggctggacccacaaaa

SEQ ID NO: 296838 - DNA, 75 bp, synthetic construct
  source 1..75: mol_type = other DNA
cggtttttgcctgggttcttgccattattttgatgctcgcaggtggcctggcgatcatgaacttaccgatagcgc

SEQ ID NO: 296839 - DNA, 75 bp, synthetic construct
  source 1..75: mol_type = other DNA
aagttggagtcactaccgaataaacgcataattacctatcaggcagtttgcgccaatcactaccggaccctgaat

SEQ ID NO: 296840 - DNA, 75 bp, synthetic construct
  source 1..75: mol_type = other DNA
tcaaggtaaataccggattcagtgcaggtactgccgacacgactgttgtgattaatgatgttttcaaaggtgaaa

SEQ ID NO: 296841 - DNA, 75 bp, synthetic construct
  source 1..75: mol_type = other DNA
atgttggcggttactcaagcgattatagaaaatgctggcaccatcaaactggactctctatgggttgatgctaac

SEQ ID NO: 296842 - DNA, 75 bp, synthetic construct
  source 1..75: mol_type = other DNA
tggatatggtgagcgagactcaaggaactcatgacggtaacaaaagtgagacgattattgccagcaaagatcgtg

SEQ ID NO: 296843 - DNA, 75 bp, synthetic construct
  source 1..75: mol_type = other DNA
ggcattcccggctggaaaccacagaaacctacacgcgcgtgtttgcgctcgatgtcggccgtcagtatggcgtcc

SEQ ID NO: 296844 - DNA, 75 bp, synthetic construct
  source 1..75: mol_type = other DNA
gatttattcgctttgttcgtgacgacatgaaagtaccggttcacgctattgctgacgatgatccgacgctggaat

SEQ ID NO: 296845 - DNA, 75 bp, synthetic construct
  source 1..75: mol_type = other DNA
aatacgttgccgagcgcgatcttatcggcaagatcgacggcattctcctcgatcttggcgtctcttcaccgcaac

SEQ ID NO: 296846 - DNA, 75 bp, synthetic construct
  source 1..75: mol_type = other DNA
ctcgcagcttggcgaagaggggcgtttgctggcgatcgatcgcgacccgcaggctatcgccgttgcgaagactat

SEQ ID NO: 296847 - DNA, 75 bp, synthetic construct
  source 1..75: mol_type = other DNA
acctcactgcaagcgcactggcatcggcatcttcacacacgatcgcaatggtcgtgccaaacctggctgaagcgg

SEQ ID NO: 296848 - DNA, 75 bp, synthetic construct
  source 1..75: mol_type = other DNA
atgatggaaaactataaacacactacggtgctgctggatgaagccgtaaatggcctcaatatccgtcctgacggt

SEQ ID NO: 296849 - DNA, 75 bp, synthetic construct
  source 1..75: mol_type = other DNA
ggtgaaagataagtttaaacatcccgcgacccggaccttccaggcggtgcgcatttgggtaaacagtgaactgga

SEQ ID NO: 296850 - DNA, 75 bp, synthetic construct
  source 1..75: mol_type = other DNA
tgatgatccgcgcttctccatcatccacggacctttctccgcgctgggcgaatatgttgccgagcgcgatcttat

SEQ ID NO: 296851 - DNA, 75 bp, synthetic construct
  source 1..75: mol_type = other DNA
acgggcgaaagatatggggtccgccgcagtgctgattgcaattatcgtcgcagtggcaacctgggtcattctgtt

SEQ ID NO: 296852 - DNA, 75 bp, synthetic construct
  source 1..75: mol_type = other DNA
aaaataagtgccacatgtaaccaagcttgtgccgctataatttgtgatgaagataaaattaatcgacaattttta

SEQ ID NO: 296853 - DNA, 75 bp, synthetic construct
  source 1..75: mol_type = other DNA
tctgttaagcgtggtgagattattgcgtcattacagcaatcagtgaaagcaagtggtgtgtctttgtctggtgac

SEQ ID NO: 296854 - DNA, 75 bp, synthetic construct
  source 1..75: mol_type = other DNA
cgtgggttccggcgcatttaattcatgatgttgatgccatcggaatttctctttatgactacttccgcagccagc

SEQ ID NO: 296855 - DNA, 75 bp, synthetic construct
  source 1..75: mol_type = other DNA
taataagcgagtggtaaagtgtcccgaagaagttgcgcagcaactggcgattgccgcgggcagcgatgtcttctt

SEQ ID NO: 296856 - DNA, 75 bp, synthetic construct
  source 1..75: mol_type = other DNA
ttttctcagcaggtggtattgcgcgggaaaaagcccgatacgctatgggttaacaagcgtgtcgtgaaatgtccc

SEQ ID NO: 296857 - DNA, 75 bp, synthetic construct
  source 1..75: mol_type = other DNA
ggagatagagcaggcgctaaaaagctcgctcaacgtgctggccccgggtgggcggctttcatcaggtaagaactg

SEQ ID NO: 296858 - DNA, 75 bp, synthetic construct
  source 1..75: mol_type = other DNA
tcgaatcaacaataggcgcactacgttatgggcaccagccgatagcaccctacaacgcgtagcacgttacgccat

SEQ ID NO: 296859 - DNA, 75 bp, synthetic construct
  source 1..75: mol_type = other DNA
tgcaatgttttatccgcgctctgtttgcttctcgcctgccgccgggcgtcgcttatctgtttgccgggccgttat

SEQ ID NO: 296860 - DNA, 75 bp, synthetic construct
  source 1..75: mol_type = other DNA
gttaattattccgctaacacacaatgcgcttaacgatctggctgtccgtggtgcggcgctggatatgcgggcatt

SEQ ID NO: 296861 - DNA, 75 bp, synthetic construct
  source 1..75: mol_type = other DNA
ccagtgcaaattaatgaaatggaatcattaactaacattctttatcgggaattacgagcgattaagtcaggaatg

SEQ ID NO: 296862 - DNA, 75 bp, synthetic construct
  source 1..75: mol_type = other DNA
tcggtctgtggctggtgcacggtggctggctgacagaatggataagtgacgcgccacgctctccagaacggtggg

SEQ ID NO: 296863 - DNA, 75 bp, synthetic construct
  source 1..75: mol_type = other DNA
gcttatctgtttgccggaccgctgctggtcgttgagcagttaaaacggcaattagcgattattcatgaagcacag

SEQ ID NO: 296864 - DNA, 75 bp, synthetic construct
  source 1..75: mol_type = other DNA
ccttattgccaccgatgcgccgtttatcccgtatccgggataccggccaccggccgaaatggttcatcctgaaca

SEQ ID NO: 296865 - DNA, 75 bp, synthetic construct
  source 1..75: mol_type = other DNA
cagaccctaccggcgttcggctacaagatcgcttatctcaggaagatagaccctttcacctttgaggaactgtta

SEQ ID NO: 296866 - DNA, 75 bp, synthetic construct
  source 1..75: mol_type = other DNA
ccgatgacccgtaccaaagaactggcggaagtcgttgctgcggcaaccccggtgaaggacaaattcaaacatccc

SEQ ID NO: 296867 - DNA, 75 bp, synthetic construct
  source 1..75: mol_type = other DNA
ttcctggttgcgcaacaaagctgatatcccgttgactttctgggattatcagcatcacgcgctggtggcgaccat

SEQ ID NO: 296868 - DNA, 75 bp, synthetic construct
  source 1..75: mol_type = other DNA
aaggcattctggcctttttgccgcttagcgatccgcatctttgctcgattgtctggtcactgtcgccagaggaag

SEQ ID NO: 296869 - DNA, 75 bp, synthetic construct
  source 1..75: mol_type = other DNA
aaggcattctggcctttttaccgcttagcgatccgcatctttgctcaattgtctggtcactgtcgccagaggaag

SEQ ID NO: 296870 - DNA, 75 bp, synthetic construct
  source 1..75: mol_type = other DNA
tctgttaagcgtggtgagattattgagtcattacagcaatcagtgaaagcaatcggtgtgtctttgtctggtgac

SEQ ID NO: 296871 - DNA, 75 bp, synthetic construct
  source 1..75: mol_type = other DNA
gtcgcgatggcacccggggaccggggcatgtgctgaatggcgacaatacagacgaagataaacagcctaaccagg

SEQ ID NO: 296872 - DNA, 75 bp, synthetic construct
  source 1..75: mol_type = other DNA
gttggcccagggagaaatataacgccgaatatggttgaaagtgttatcaaagaaggaactcctcaaaatagtgtc

SEQ ID NO: 296873 - DNA, 75 bp, synthetic construct
  source 1..75: mol_type = other DNA
ggaatctatgttttctggtcgaaaggcgaggaagcgactgtctataaacgcgatcgcatcgtcttgaataactgt

SEQ ID NO: 296874 - DNA, 75 bp, synthetic construct
  source 1..75: mol_type = other DNA
tggaaaatctgcctgccgctgacgctgatcaacttgctggtaacggcggctgccattctctggcaggcgcaataa

SEQ ID NO: 296875 - DNA, 75 bp, synthetic construct
  source 1..75: mol_type = other DNA
ggcacgctgggctggtcggatatccataaccaggcagactataaagccagccataccggaatcagtttatcgggt

SEQ ID NO: 296876 - DNA, 75 bp, synthetic construct
  source 1..75: mol_type = other DNA
gcctggcgaccggagccacgccattactgacgtatcattatctggtagaaaaaatggtaatgactccaacttatt

SEQ ID NO: 296877 - DNA, 75 bp, synthetic construct
  source 1..75: mol_type = other DNA
tcttgattgtggaattgttggtctaattataagtaaattacttagagcaaaacatatatatgacatatatgatgt

SEQ ID NO: 296878 - DNA, 75 bp, synthetic construct
  source 1..75: mol_type = other DNA
aaaggtggctttaaacttggaaaaaaatggctgaacgtgatggctatttttaaatggtggatctttattttttat

SEQ ID NO: 296879 - DNA, 75 bp, synthetic construct
  source 1..75: mol_type = other DNA
actattacaagggtttgaggatctagtgtttccagaaacaaatgctgcaagtcttggcatgaaatacacggtggt

SEQ ID NO: 296880 - DNA, 75 bp, synthetic construct
  source 1..75: mol_type = other DNA
ctgtagcgcgttcaatcaactggttgagcacatgcaaaccgctacgctggaataccagtgtgatgaaaaaccgtt

SEQ ID NO: 296881 - DNA, 75 bp, synthetic construct
  source 1..75: mol_type = other DNA
attttctgacgcagaactaaaagctattctgcctatgcgtcgcatgtacggggttggtgactataagtcaaattc

SEQ ID NO: 296882 - DNA, 75 bp, synthetic construct
  source 1..75: mol_type = other DNA
atagtaatgctcttgagtcaataaattttcctcaaggcagaaatgtaagtattacacatatatctatgaataata

SEQ ID NO: 296883 - DNA, 75 bp, synthetic construct
  source 1..75: mol_type = other DNA
gaggtcacagcggacatgcggaaggaacgactcaggccgcagtggcagaaggcactatcaccatccgggacaggg

SEQ ID NO: 296884 - DNA, 75 bp, synthetic construct
  source 1..75: mol_type = other DNA
ccctctgtttatcagcagggttactggcaagcgcgcctggaattagccttgccgatgttaactacgtaccgcaaa

SEQ ID NO: 296885 - DNA, 75 bp, synthetic construct
  source 1..75: mol_type = other DNA
ctactccagcgatttaccgttattactgctgccgccgcatcaacagacccgactatgggaagcctttctggcctg

SEQ ID NO: 296886 - DNA, 75 bp, synthetic construct
  source 1..75: mol_type = other DNA
tgtaacgatattgagcagcttcttattgaagaatacaacaggaaaatccaggccactccggttaaggcacaatga

SEQ ID NO: 296887 - DNA, 75 bp, synthetic construct
  source 1..75: mol_type = other DNA
ctacaacaaaatacacgacacagaactcattaatgcactgagggataaggctagaaattctgtttccatgtttca

SEQ ID NO: 296888 - DNA, 75 bp, synthetic construct
  source 1..75: mol_type = other DNA
atggcagacaaactccgtcctctgtatatagcgctgtatgactatgttctggaggcaggaaaggtgcatgccgat

SEQ ID NO: 296889 - DNA, 75 bp, synthetic construct
  source 1..75: mol_type = other DNA
cgaacgtgctgattcttgatcagaacatgaccccatcagccttcttccccagcagttatttcacctaccaggaac

SEQ ID NO: 296890 - DNA, 75 bp, synthetic construct
  source 1..75: mol_type = other DNA
gcggctgtcttcattgctctgatgttgaatgccatagtgtggggtgcattgacagggcgtaatttattaacctgg

SEQ ID NO: 296891 - DNA, 75 bp, synthetic construct
  source 1..75: mol_type = other DNA
cattctcggtggtgtgacagcagcccttcagggcaacagtgcggcagcaggcgcaattggcgcgggtactggcga

SEQ ID NO: 296892 - DNA, 75 bp, synthetic construct
  source 1..75: mol_type = other DNA
aatgacagtatcagcccgatatttgacaaggagaaagagcagaggcgtctgcagacagtgtggcttatcagtgac

SEQ ID NO: 296893 - DNA, 75 bp, synthetic construct
  source 1..75: mol_type = other DNA
aggtaactggatcacggtgagtaaaggtcacgctacgctgggcggcccgaataccacctatgtgtttaaagcggg

SEQ ID NO: 296894 - DNA, 75 bp, synthetic construct
  source 1..75: mol_type = other DNA
gcgattgaaaatgctgagatcgtgattgtcggcggcggcaacactttccagttgctgaaagaatgccgcgtacgc

SEQ ID NO: 296895 - DNA, 75 bp, synthetic construct
  source 1..75: mol_type = other DNA
cgcaggtcgatattgctgaagataatgcgttcttcccttcagaatattcgcttagccaatatacgagtcccgtct

SEQ ID NO: 296896 - DNA, 75 bp, synthetic construct
  source 1..75: mol_type = other DNA
ggcggagaaccagagacttctgaaagctgctggagcaatggtgaagcgcgagcaaaacaagaagaaaagaggttg

SEQ ID NO: 296897 - DNA, 75 bp, synthetic construct
  source 1..75: mol_type = other DNA
gataatccacaagcgttaatttttgattttggcccacggcagtttagcgttcgctttgatgaaaatctcaatccg

SEQ ID NO: 296898 - DNA, 75 bp, synthetic construct
  source 1..75: mol_type = other DNA
atgcggacctttttatcagaacgacaactccgcgactggcgtgaattacgcaaagacattcagaacgatggcaaa

SEQ ID NO: 296899 - DNA, 75 bp, synthetic construct
  source 1..75: mol_type = other DNA
agcgccaccaacagtgattctgaaacgctggctgcaacaccaaaagcggtgaagtctgcctatgacaatgctgaa

SEQ ID NO: 296900 - DNA, 75 bp, synthetic construct
  source 1..75: mol_type = other DNA
gtatcagactaatgagcgttcaatccattccattgttacaagcctgaaagatgatgatgtatgtagtgtttttta

SEQ ID NO: 296901 - DNA, 75 bp, synthetic construct
  source 1..75: mol_type = other DNA
aagaaaaaaggaatgcggcagtacgcatttaatgcgccgtctaatgcagttggtggaaagtggtatccagttatt

SEQ ID NO: 296902 - DNA, 75 bp, synthetic construct
  source 1..75: mol_type = other DNA
cgcctaagaaggagtttagatttaccgaagaagaacacttagaaaacgctcgcaagttctacaagccgatagggt

SEQ ID NO: 296903 - DNA, 75 bp, synthetic construct
  source 1..75: mol_type = other DNA
acagttgaggatggcagtggtaacctgatcgaaggtctcactgtgtacttcgccttaaaaaacggctccaccaca

SEQ ID NO: 296904 - DNA, 75 bp, synthetic construct
  source 1..75: mol_type = other DNA
tgtgcaatcaggtactaacgtgccctatatgaaaattagcgcaattgattacagtcaaaatatcaacggtgatta

SEQ ID NO: 296905 - DNA, 75 bp, synthetic construct
  source 1..75: mol_type = other DNA
aactccgtgactggcgtgaattgcgcaaaaacattcagaaagacggcaaaagcgcaggagataaagatcatgaca

SEQ ID NO: 296906 - DNA, 75 bp, synthetic construct
  source 1..75: mol_type = other DNA
tgtggacgcagattgataacggtcagcttgcgcctgacctggctgaaatcaggacgtccattacggatgtcagca

SEQ ID NO: 296907 - DNA, 75 bp, synthetic construct
  source 1..75: mol_type = other DNA
aaaaatgacggtgatagcaatactgtaataatcacagcgcccccaagatccggtggtgctatttaccaaacagtt

SEQ ID NO: 296908 - DNA, 75 bp, synthetic construct
  source 1..75: mol_type = other DNA
tcactactgccggtgcagcaaagctggcagcggcaaccgcgccgggagggcggaaggtcaacattaccacgatgg

SEQ ID NO: 296909 - DNA, 75 bp, synthetic construct
  source 1..75: mol_type = other DNA
gggattacggctatggtgcattctggccggaaccgggctggggcgcgccttactacaccaatgcggtgagtcagg

SEQ ID NO: 296910 - DNA, 75 bp, synthetic construct
  source 1..75: mol_type = other DNA
atgaacatgacaaaaggtgcactcatactcagcctttcatttttgcttgccgcatgtagttcaattccgcaaaat

SEQ ID NO: 296911 - DNA, 75 bp, synthetic construct
  source 1..75: mol_type = other DNA
ttctccggttctgtccgaaagcgaccttgctcccctgaaacccgcctgcgatatcatcattaatggcaccgcgta

SEQ ID NO: 296912 - DNA, 75 bp, synthetic construct
  source 1..75: mol_type = other DNA
gccgcgacgtaggcgtatcactaaaggtaacgccggttgttatgggaaatggtcagttagttctcaccatcgata

SEQ ID NO: 296913 - DNA, 75 bp, synthetic construct
  source 1..75: mol_type = other DNA
caaggccacgggaaaacgacgcttgctggaggtggtttgccgtctggccgatcatatcgaccgcgtatttggtcc

SEQ ID NO: 296914 - DNA, 75 bp, synthetic construct
  source 1..75: mol_type = other DNA
ttcagattaaggatggccagacgctcttacttggtgggctgattgattcatcatccagcaatgctgaccgttctg

SEQ ID NO: 296915 - DNA, 75 bp, synthetic construct
  source 1..75: mol_type = other DNA
tgtaccgcacgccgcgtaacctcaagaaactgaacgttattgatgaaggctggcgtctgctggacttcaaaaatc

SEQ ID NO: 296916 - DNA, 75 bp, synthetic construct
  source 1..75: mol_type = other DNA
gtggttcagttccttcctgctgcaggtggaaaaccattcctcctggcaccgcctgtttgtggacccgttaagccg

SEQ ID NO: 296917 - DNA, 75 bp, synthetic construct
  source 1..75: mol_type = other DNA
ttggtattgtcggtgaagtcgatggtgatgaccccgcagtattcagaccgatacaaaaatacatcaatggcacat

SEQ ID NO: 296918 - DNA, 75 bp, synthetic construct
  source 1..75: mol_type = other DNA
gttcgccgcttgcctggcaagtgacgttgtttctcggtatcaactcactggtctattacgtgattatcggctggc

SEQ ID NO: 296919 - DNA, 75 bp, synthetic construct
  source 1..75: mol_type = other DNA
ccttacttattatttggcggtacagcggtcattggcggtgggattgcattaggcaatgtcttactgccaggatta

SEQ ID NO: 296920 - DNA, 75 bp, synthetic construct
  source 1..75: mol_type = other DNA
tttggtatggaacgtagcctgtttgccgcgttacttttgatctgtgctggtatcgcaattcgctctctcccttcg

SEQ ID NO: 296921 - DNA, 75 bp, synthetic construct
  source 1..75: mol_type = other DNA
gttgcagagggttctaaggccatcagaatcacaacgggccaactggaactactcaaagcacagtccgctgtaaca

SEQ ID NO: 296922 - DNA, 75 bp, synthetic construct
  source 1..75: mol_type = other DNA
tcgaaaaacctgaaatccatcctgacgcagcaaattttttgggtgaacagtaaccgtccgatggactgggactgg

SEQ ID NO: 296923 - DNA, 75 bp, synthetic construct
  source 1..75: mol_type = other DNA
tggctgaaagcatatcaacaaaaactggcttcggcggtaggttccctgcgtaacgatagccagctcaatacgcca

SEQ ID NO: 296924 - DNA, 75 bp, synthetic construct
  source 1..75: mol_type = other DNA
cctgctgctgattgccttcctggtatggccgatgtgccgcgaaagctggcgtgataaagagtcgcacaccatgcg

SEQ ID NO: 296925 - DNA, 75 bp, synthetic construct
  source 1..75: mol_type = other DNA
cttgactcgcttaataaacaaaaagatctttctgctcaggacaaactggttcagcaggatctgacagacacatta

SEQ ID NO: 296926 - DNA, 75 bp, synthetic construct
  source 1..75: mol_type = other DNA
tgtcagcaaactggaagaaggtcatgctaatgaagttaatgacgaagttcacgatgctttgttacaagtcgttga

SEQ ID NO: 296927 - DNA, 75 bp, synthetic construct
  source 1..75: mol_type = other DNA
aaaatgcgccaggcgacggcggcgttaactgcgctgagcgatgtagataacgacgaagaaacacgtaaaacactt

SEQ ID NO: 296928 - DNA, 75 bp, synthetic construct
  source 1..75: mol_type = other DNA
caaccagcagcagttaatgagtgtgtcgaaaaacctgaaatccatcctgactcagcaaatcttttgggtgaacag

SEQ ID NO: 296929 - DNA, 75 bp, synthetic construct
  source 1..75: mol_type = other DNA
cgctggtgaaactgccgggtattggcaaaaaaaccgccgaacgcttgattgtcgaaatgaaagaccgatttaaag

SEQ ID NO: 296930 - DNA, 75 bp, synthetic construct
  source 1..75: mol_type = other DNA
tatgtcagcacagcaatttgtaaatgccgttgagcgtgaagaacctgcggcgctggtgaagttgcctggtatagg

SEQ ID NO: 296931 - DNA, 75 bp, synthetic construct
  source 1..75: mol_type = other DNA
tcgcagcagctgcaacaaattcgcagtcgtctggatgggactgatgtcggcgagactgccttacgtcccagccag

SEQ ID NO: 296932 - DNA, 75 bp, synthetic construct
  source 1..75: mol_type = other DNA
agtgcgtaaagtgttactgaaggcggcgactgagcacccaagggtgatgcacgaaccaatgccggaagtcttctt

SEQ ID NO: 296933 - DNA, 75 bp, synthetic construct
  source 1..75: mol_type = other DNA
cggcgtatcgcctggcgtcgtgcgctggcgcgtcggcagaatctggtgaaagagggcgcagaaggtgccgaaccg

SEQ ID NO: 296934 - DNA, 75 bp, synthetic construct
  source 1..75: mol_type = other DNA
cacgttgcgtctggctgggcgctggattgaaaccgtttatctggtgatcatctggaacttgctttaccagacggt

SEQ ID NO: 296935 - DNA, 75 bp, synthetic construct
  source 1..75: mol_type = other DNA
aaatcatgcaagattaattcatccagagggtgttgatggttttaatgccaacaaagggaaactatctggtacttt

SEQ ID NO: 296936 - DNA, 75 bp, synthetic construct
  source 1..75: mol_type = other DNA
cagaacctgcgctaccagggacagtacctcgacagggaaacggggctgcattacaatctgcacaggtactatgat

SEQ ID NO: 296937 - DNA, 75 bp, synthetic construct
  source 1..75: mol_type = other DNA
ccaacattattccctagaggagaaaatccagaacataatcactggcgtttacatcatgcggaacgagatgtgata

SEQ ID NO: 296938 - DNA, 75 bp, synthetic construct
  source 1..75: mol_type = other DNA
cctttattttggggttaagcggatatatcgccaatcaggtgcaaacgccggaagttattatgggcatccgcacat

SEQ ID NO: 296939 - DNA, 75 bp, synthetic construct
  source 1..75: mol_type = other DNA
attgaatatcagtctgcaaaccctgaaacggaatcgcccgctgtttatgttgtgcatcggtgcgctgtgtgtgct

SEQ ID NO: 296940 - DNA, 75 bp, synthetic construct
  source 1..75: mol_type = other DNA
tctcaaactataccattagcactggaagttggcacgtacaggtgggcaaaaaacgaaaactggtcaaccaaatat

SEQ ID NO: 296941 - DNA, 75 bp, synthetic construct
  source 1..75: mol_type = other DNA
atttattagttggctggttgttgttcttgttctgtatgtatataaacactatcgacatattatgaccgggaacat

SEQ ID NO: 296942 - DNA, 75 bp, synthetic construct
  source 1..75: mol_type = other DNA
cggcgtatcgcctggcgccgtgcgctggcgcgtcggcagaatctggtgaaagagggtgctgaaggagccgaaccg

SEQ ID NO: 296943 - DNA, 75 bp, synthetic construct
  source 1..75: mol_type = other DNA
acagtaaccattggtagcttctccgggacggtcagcaagatccgtattcgtgcgacgacgattaccgatttcgat

SEQ ID NO: 296944 - DNA, 75 bp, synthetic construct
  source 1..75: mol_type = other DNA
gatgacggacagtgacgggaaaatcgtgtgggagacggggtatcaggtctggggtaacacgatacaggagaagga

SEQ ID NO: 296945 - DNA, 75 bp, synthetic construct
  source 1..75: mol_type = other DNA
ggcagcctgtatatctacagcgacccggggagttatgaaccgctggcgcgggtggataaggcaggcaaagagggc

SEQ ID NO: 296946 - DNA, 75 bp, synthetic construct
  source 1..75: mol_type = other DNA
gcaggagagcaggccggagggaacaggcagcctgtatatctacagcgacccggggagttatgaaccgctggcgcg

SEQ ID NO: 296947 - DNA, 75 bp, synthetic construct
  source 1..75: mol_type = other DNA
atgactgtcagtagggttgtaattatgagcggtgagactgtaaaatatgcagtacactctgtgcgtgtattggaa

SEQ ID NO: 296948 - DNA, 75 bp, synthetic construct
  source 1..75: mol_type = other DNA
ttcggaatcctttaatacgcatgcacaaaattaattaccgtcgcaactgggatattgatttcaattttaaacctg

SEQ ID NO: 296949 - DNA, 75 bp, synthetic construct
  source 1..75: mol_type = other DNA
ttcctttaacgctaaatccgatgaaacagagtaaaaacaaaccgcgaattcgccaggcggtcggtgccacccggc

SEQ ID NO: 296950 - DNA, 75 bp, synthetic construct
  source 1..75: mol_type = other DNA
ttgcatcgatggcgcggtgcagtttcccattatcttcgagctgaactttgatggccgaacaaaggtgatcgctgc

SEQ ID NO: 296951 - DNA, 75 bp, synthetic construct
  source 1..75: mol_type = other DNA
cagatcgtctggcaatacaagttggctccggaaacgatcaacctgcccgccaggctgggagtaccagagcttcag

SEQ ID NO: 296952 - DNA, 75 bp, synthetic construct
  source 1..75: mol_type = other DNA
cactgctggctatatttatcttgaactgactgtaagtcgggtaataattaacagtggggaaactgtgaaatattt

SEQ ID NO: 296953 - DNA, 75 bp, synthetic construct
  source 1..75: mol_type = other DNA
ccgtcattgaagatcagcctgcaaacgctgaaacggaatcgcccgctgtttatgttgtgcattggcgcgctatgc

SEQ ID NO: 296954 - DNA, 75 bp, synthetic construct
  source 1..75: mol_type = other DNA
atgaatcaacaactctcctggcgcaccatcgtcggctacagcctcggtgccgctgcggcgggcaccatgctgtta

SEQ ID NO: 296955 - DNA, 75 bp, synthetic construct
  source 1..75: mol_type = other DNA
ctgaaacggaatcgcccgctgtttatgttgtgcatcggtgcgctgtgtgtgctgatttcgaccttcgcggtcagc

SEQ ID NO: 296956 - DNA, 75 bp, synthetic construct
  source 1..75: mol_type = other DNA
agtttaatgggattacgcaaacttgtgccggtattgcgaaaaacctcgccctataacagccggatgtttactctg

SEQ ID NO: 296957 - DNA, 75 bp, synthetic construct
  source 1..75: mol_type = other DNA
acccgtggttcactaaaatgtatggttttcatctgcttaagattggcaatttaagcgcagaaatcaattgcgaag

SEQ ID NO: 296958 - DNA, 75 bp, synthetic construct
  source 1..75: mol_type = other DNA
atgtgggcgctggaggccgatactgtagaatatggtgaatacctgaccggtgtacgcattgaagggcttacctat

SEQ ID NO: 296959 - DNA, 75 bp, synthetic construct
  source 1..75: mol_type = other DNA
ctgacccttcaggcgatgacagttacgtgcgactgttgtttgccgatcgttgccaggccggttttccttcgcctg

SEQ ID NO: 296960 - DNA, 75 bp, synthetic construct
  source 1..75: mol_type = other DNA
aaacaaaacaggtgattgatagttggaataaaaagctggatgaagtcgtgcagcaaacggtggcgcaatcgccag

SEQ ID NO: 296961 - DNA, 75 bp, synthetic construct
  source 1..75: mol_type = other DNA
atgaatactatgccgtttgatgccgtcacgataggcaaccatgaatttgaccacggctgggacaacacattatta

SEQ ID NO: 296962 - DNA, 75 bp, synthetic construct
  source 1..75: mol_type = other DNA
attgaagatgcgacagtttattctattgccacccagagtttccttgctgatggtggagatggttttaccgccttt

SEQ ID NO: 296963 - DNA, 75 bp, synthetic construct
  source 1..75: mol_type = other DNA
ttagacaagcattagaggtaaaaaataagaatagttacaagataagtaaatttacatgggaaacgtatggtgata

SEQ ID NO: 296964 - DNA, 75 bp, synthetic construct
  source 1..75: mol_type = other DNA
ggcacagatgtgcgtcgcgcgctggataaagatattcagacggcaagtcaggtgaaagggctggatattttgatc

SEQ ID NO: 296965 - DNA, 75 bp, synthetic construct
  source 1..75: mol_type = other DNA
cgcgtgatgaaattaaatggctacaacgttatatcgatgaactcaaaggcaaggttgatttgaccgtcgccctga

SEQ ID NO: 296966 - DNA, 75 bp, synthetic construct
  source 1..75: mol_type = other DNA
atttcattttcttcaataacaaaaccagccctgatggcgcggtagagcaccagggcgacaaccgtaccggtgaag

SEQ ID NO: 296967 - DNA, 75 bp, synthetic construct
  source 1..75: mol_type = other DNA
gacgttaagaaactcgtattcgcagtcaccattcatgaagcagacagccgtaagcaaaatttcggcatggtcagt

SEQ ID NO: 296968 - DNA, 75 bp, synthetic construct
  source 1..75: mol_type = other DNA
cagggcgacaaccgtaccggtgaaggcgacggcgacgatgagcaggtcaaaatcgatctgaccaaagtctcagca

SEQ ID NO: 296969 - DNA, 75 bp, synthetic construct
  source 1..75: mol_type = other DNA
atcattctgggataagccatataccatcatcgaaaaagacggtgtgaaaataggcgttataggtttgcacggagt

SEQ ID NO: 296970 - DNA, 75 bp, synthetic construct
  source 1..75: mol_type = other DNA
ggtaaactggttctcgactacaaagagaagccgcatgattttacggtgaaaaacttcgagcttaaaaccatttac

SEQ ID NO: 296971 - DNA, 75 bp, synthetic construct
  source 1..75: mol_type = other DNA
gaagtttaaagctgtcggtcagggtttttccggtggcctgtcagcgcttgcttcccagcacggcgtcaacgtcta

SEQ ID NO: 296972 - DNA, 75 bp, synthetic construct
  source 1..75: mol_type = other DNA
ttcaaatcgacgcgtgagaatgtggtacgtatcgtggcgcagccgtcattgaagatcagtctgcaaaccctgaaa

SEQ ID NO: 296973 - DNA, 75 bp, synthetic construct
  source 1..75: mol_type = other DNA
atggggctggtttcactggctatcaatttctccaatatgatgtttattgttaccgtcgccttactggtcgcgcgg

SEQ ID NO: 296974 - DNA, 75 bp, synthetic construct
  source 1..75: mol_type = other DNA
gagaacgaggatattgcgctaacggtagggaagctgcgtgttgagcttgaagcagaaaaacagcgggcaaaagtt

SEQ ID NO: 296975 - DNA, 75 bp, synthetic construct
  source 1..75: mol_type = other DNA
gtgattgcgacacagccgctgacgggcaatgaaacctggcaaaagattatgccaggtgaatggcgcttattttgc

SEQ ID NO: 296976 - DNA, 75 bp, synthetic construct
  source 1..75: mol_type = other DNA
tggcgaagaaacactccatttgcccgtcaggcaaacgcggcggtgatttaggtgaattccgccagggtcagatgg

SEQ ID NO: 296977 - DNA, 75 bp, synthetic construct
  source 1..75: mol_type = other DNA
atatccttgtaaaagaagagaaactggctctggaacttctggaacagattaagaacggcgctgatttcggcaagc

SEQ ID NO: 296978 - DNA, 75 bp, synthetic construct
  source 1..75: mol_type = other DNA
aagaacggcgccgatttcggcaagctggcgaagaaacactccatttgcccgtcaggcaaacgcggcggtgattta

SEQ ID NO: 296979 - DNA, 75 bp, synthetic construct
  source 1..75: mol_type = other DNA
atgggcgatattatggcagatgatgaaaatacggcaaaagcgccgtcttatactctcgtcggcttattcaccggg

SEQ ID NO: 296980 - DNA, 75 bp, synthetic construct
  source 1..75: mol_type = other DNA
gaggtcaatatcgaccagttaactacgccgattcaagagttattgttaacgccgaatgtacccgcaacgcgtgag

SEQ ID NO: 296981 - DNA, 75 bp, synthetic construct
  source 1..75: mol_type = other DNA
gtttaacgggcattgtgaccaccaccgataacggtggttcaacagggcgtattcgccgctcagaaggcggtattg

SEQ ID NO: 296982 - DNA, 75 bp, synthetic construct
  source 1..75: mol_type = other DNA
tgtataattccggacgtaaccagctcaccagtgatttgctggatgaatgggcgaaaggaaacgttcgtcagcaac

SEQ ID NO: 296983 - DNA, 75 bp, synthetic construct
  source 1..75: mol_type = other DNA
acgtgccctgcgtaactcccgttttatggctgatttacagcaacatataaaaggcggatgctcacaccggcaggc

SEQ ID NO: 296984 - DNA, 75 bp, synthetic construct
  source 1..75: mol_type = other DNA
tcgtgccaagccaaaatattactggccgcgagttaataacctgcgtcgattacaacaaaaaacttgcgcccttaa

SEQ ID NO: 296985 - DNA, 75 bp, synthetic construct
  source 1..75: mol_type = other DNA
gatgggattggcggttgctccagagatgatggcaaatgcccattcagtgaagtacgctgctgctacggttgcctg

SEQ ID NO: 296986 - DNA, 75 bp, synthetic construct
  source 1..75: mol_type = other DNA
atgaatctgagtggtgcacatgcaccgttcttcacgcgtaatatttgtgattatcaaaaaataattccggtcaca

SEQ ID NO: 296987 - DNA, 75 bp, synthetic construct
  source 1..75: mol_type = other DNA
gttgcgacagcaaaagttagaacgcctgagctactttcatgtcgatcacccttccggtgtttctccggatgtcag

SEQ ID NO: 296988 - DNA, 75 bp, synthetic construct
  source 1..75: mol_type = other DNA
tcgaggatggcaggaaccaaaactgtcctggtcagtaatttgtgaggcggcagaaccattggttggaaagttgcc

SEQ ID NO: 296989 - DNA, 75 bp, synthetic construct
  source 1..75: mol_type = other DNA
gttacaggtaaagcagcagaaaccgtaaccagtgccaaacccatcaacgatgcagccgaagatggcgatctggat

SEQ ID NO: 296990 - DNA, 75 bp, synthetic construct
  source 1..75: mol_type = other DNA
ggcgttcgatttttggcgtaggcgcggcacaggtgctgttaagcgcggcgttgctggcaggattattgatgctga

SEQ ID NO: 296991 - DNA, 75 bp, synthetic construct
  source 1..75: mol_type = other DNA
gtcgtgggctttgggcgttttggtcaggtgattggtcgtttgctgatggcaaataaaatgcgcattaccgtgctg

SEQ ID NO: 296992 - DNA, 75 bp, synthetic construct
  source 1..75: mol_type = other DNA
ctatcgctaaactggtccaggactatccaatcaaatcctgctcggtaattgctcatattcgccaggcgaatcggg

SEQ ID NO: 296993 - DNA, 75 bp, synthetic construct
  source 1..75: mol_type = other DNA
cacaccgaatgatgtggtcacggtgattgcaacacagccgctgacgggcaatgaaacctggcaaaagattatgcc

SEQ ID NO: 296994 - DNA, 75 bp, synthetic construct
  source 1..75: mol_type = other DNA
gcgtcgattagtgaaccgccccgggtttcctggagagtgttttatctgtgaactcaggctgccagatcatcgttt

SEQ ID NO: 296995 - DNA, 75 bp, synthetic construct
  source 1..75: mol_type = other DNA
cagtttgtgatctggcaatacaatgcatacaaacatggaatgaaggagcatcaacttaatgcgcagttgacgaag

SEQ ID NO: 296996 - DNA, 75 bp, synthetic construct
  source 1..75: mol_type = other DNA
tcacctcgaagaacagaataaaaatttaaaagaacagtttgtgaagtggcagtataatgcttataagcatggaat

SEQ ID NO: 296997 - DNA, 75 bp, synthetic construct
  source 1..75: mol_type = other DNA
atatagatacaatcataaatacaataattgtttgggatagtgacaaaattacatgggatgaaatatgtaatgctg

SEQ ID NO: 296998 - DNA, 75 bp, synthetic construct
  source 1..75: mol_type = other DNA
caacgtcgcccgcgccattgcccatcttggaggcactgccacagcgatcttcccggcgggtggcgcgaccggcga

SEQ ID NO: 296999 - DNA, 75 bp, synthetic construct
  source 1..75: mol_type = other DNA
tctgcacgtacatgtagaatctacgggtgagcagtaccgatttgtcatgcctggcgcggcgttaagtgaagatga

SEQ ID NO: 297000 - DNA, 75 bp, synthetic construct
  source 1..75: mol_type = other DNA
atgcaacactccataaaacaccgcgcttcaacggcgcaccccgacgaggatgaccttgttgataccacgtgcact

SEQ ID NO: 297001 - DNA, 75 bp, synthetic construct
  source 1..75: mol_type = other DNA
gcgtgggtcgcattcgttatcttggcgtgctgctctacgacgccgaccgcatcgaagaagcagcgagtaccgaac

SEQ ID NO: 297002 - DNA, 75 bp, synthetic construct
  source 1..75: mol_type = other DNA
tggcgggcgatgccttcgcagaacgcaacggctgcggttttacctttggcgacggttgccacggttcggacagta

SEQ ID NO: 297003 - DNA, 75 bp, synthetic construct
  source 1..75: mol_type = other DNA
cgcaggaaatcgttaatagcggcaaggccaaacgggttgtcgtttccctgggtccacaaggggcgctgggcgttg

SEQ ID NO: 297004 - DNA, 75 bp, synthetic construct
  source 1..75: mol_type = other DNA
tgttcgaatcgttcaaagagctgtttttatctactgccaatactgccgtgcatcgagctaaaaaccctgtgctag

SEQ ID NO: 297005 - DNA, 75 bp, synthetic construct
  source 1..75: mol_type = other DNA
atgaaaaacttcaaggtaattagcatgtttgaatccttcaaagagctgtttttatctactgccaatactgccgtg

SEQ ID NO: 297006 - DNA, 75 bp, synthetic construct
  source 1..75: mol_type = other DNA
ggcagcagtcgcgacaaacaaattttcagtggacacaaaacagaaaatcaggtgttgatttacgatcgtaaaacc

SEQ ID NO: 297007 - DNA, 75 bp, synthetic construct
  source 1..75: mol_type = other DNA
cacaccgtcaggtgtgcagggagcgcaggtcacggcgcgacaggggcggtgcgaccggaacggtcgctgcaagcc

SEQ ID NO: 297008 - DNA, 75 bp, synthetic construct
  source 1..75: mol_type = other DNA
ttacttacgaaaaagtaaaaacaggcgctgaaaaaaacattcaagacatgaaagaggaaataattctttcaaaag

SEQ ID NO: 297009 - DNA, 75 bp, synthetic construct
  source 1..75: mol_type = other DNA
aaacaatatcattaacgtatggcaagcaaagcctcttgataataatgactcaatcgaaaatcaccggaaggcaag

SEQ ID NO: 297010 - DNA, 75 bp, synthetic construct
  source 1..75: mol_type = other DNA
gatccctcagtgatcgaggaagccctgaaacaaggtattccacaaaacgtgattgacgctgcccagcgttcgcct

SEQ ID NO: 297011 - DNA, 75 bp, synthetic construct
  source 1..75: mol_type = other DNA
ttccttatgcagtcgaatattacgctgaaggtcagtcaactgcaggtgctgtaacaagtactgtagtttataacc

SEQ ID NO: 297012 - DNA, 75 bp, synthetic construct
  source 1..75: mol_type = other DNA
tattcttattgaggctgactattacaaaaaaaatggagaatttaaatcatctaatgaaattctaaaaattagact

SEQ ID NO: 297013 - DNA, 75 bp, synthetic construct
  source 1..75: mol_type = other DNA
cgcaaaacaggattttattaacacttacagaaagggcgttgcagggttaatacaacgagagtggtttgggaagaa

SEQ ID NO: 297014 - DNA, 75 bp, synthetic construct
  source 1..75: mol_type = other DNA
aagttactggtaagtcgcagtggcaatggattggtgataaaaaatgactcagctaattgggtgacgatttcggat

SEQ ID NO: 297015 - DNA, 75 bp, synthetic construct
  source 1..75: mol_type = other DNA
aagaagtgatggtgcagttgatgaatcagggaaaccgatcttcattacttcaggcgtggattgatgatggcgaca

SEQ ID NO: 297016 - DNA, 75 bp, synthetic construct
  source 1..75: mol_type = other DNA
tgccgctggccccagtgtggattttgcaagtggtcacctgaaaaacacggatgaatctgatggtggagcaaagct

SEQ ID NO: 297017 - DNA, 75 bp, synthetic construct
  source 1..75: mol_type = other DNA
ttgcctgagtccgtgcctgccggttttgacgtgctgaaagatctgaatgatctggagtcgctgttgatcgttgat

SEQ ID NO: 297018 - DNA, 75 bp, synthetic construct
  source 1..75: mol_type = other DNA
caacaaacatcaaactacagtggcaggaaaacgacggaacaattaaacagcacattagcccgaacagcttcaaac

SEQ ID NO: 297019 - DNA, 75 bp, synthetic construct
  source 1..75: mol_type = other DNA
accaaaggcgggaaagtcatagctaaaacgctgaataactggtggaatcaggctaaacgcgcagccgagcaaaaa

SEQ ID NO: 297020 - DNA, 75 bp, synthetic construct
  source 1..75: mol_type = other DNA
cgcaaaacaggattttattaaaacttacagaaagggtgttgtagggttaatacaaagagagtggtttgggaagaa

SEQ ID NO: 297021 - DNA, 75 bp, synthetic construct
  source 1..75: mol_type = other DNA
tcagagcaacggggatacctgacaaaaagtatctccgggatcccgtaataaaacgttgttataaacgtctgagtc

SEQ ID NO: 297022 - DNA, 75 bp, synthetic construct
  source 1..75: mol_type = other DNA
gggaaaaagccctgacgcaccgtgtcaccgattcagttggccgctttgccggcttcacgcacgtcatggttgtcg

SEQ ID NO: 297023 - DNA, 75 bp, synthetic construct
  source 1..75: mol_type = other DNA
gaccgattcttaccgactccggcggcttccaggtcttcagccttggcgatattcgtaaaatcaccgaacagggcg

SEQ ID NO: 297024 - DNA, 75 bp, synthetic construct
  source 1..75: mol_type = other DNA
atgaccatagaagaacgtctgaacaacattgagttgaaccaaaccctgcttgaccagcgactttcagatcttgag

SEQ ID NO: 297025 - DNA, 75 bp, synthetic construct
  source 1..75: mol_type = other DNA
aagctcaatggcgcggattttttcttcttcagtaaacatgttttatctcctgagagtccaggaaatcgtccgcat

SEQ ID NO: 297026 - DNA, 75 bp, synthetic construct
  source 1..75: mol_type = other DNA
tttgatgaaaacgcgccacgcccgggtagtgagaaactgatggaagtgttggatcacctcaacgccaaagacggc

SEQ ID NO: 297027 - DNA, 75 bp, synthetic construct
  source 1..75: mol_type = other DNA
cgagtttacggtgaaaaaattgcaactacgcccgacggtacagcttattcccatgaacagtgcgtactcgcccat

SEQ ID NO: 297028 - DNA, 75 bp, synthetic construct
  source 1..75: mol_type = other DNA
cacatttaatcagttttaccatcaatggctgcaaagcactgatgaatcccctaatgatttttatcaaaatcatta

SEQ ID NO: 297029 - DNA, 75 bp, synthetic construct
  source 1..75: mol_type = other DNA
tttgaagattttttattgccgttgacccgcaaaccgatctcagcgccgtcactcgcccgcgtgcgttaccgttat

SEQ ID NO: 297030 - DNA, 75 bp, synthetic construct
  source 1..75: mol_type = other DNA
aacgtatggtgatatcgtagtatcacctgaagatagaatttctcatctggaattagatggatttaattatttttc

SEQ ID NO: 297031 - DNA, 75 bp, synthetic construct
  source 1..75: mol_type = other DNA
gtaaatttacatgggaaacgtatggtgatatcgttgtatcacctgaagatagaatttctcatctggagttagatg

SEQ ID NO: 297032 - DNA, 75 bp, synthetic construct
  source 1..75: mol_type = other DNA
aggtatagatgagtctctctatgaaaagcatataatctttatcactcttaaggttattgtcccctcaaaaaagta

SEQ ID NO: 297033 - DNA, 75 bp, synthetic construct
  source 1..75: mol_type = other DNA
catttgtacggacatccccctgaaccctgttacagcaatgccgctgtggaaaagctttcattgcccacacaggac

SEQ ID NO: 297034 - DNA, 75 bp, synthetic construct
  source 1..75: mol_type = other DNA
gtgatcgacggctggaataaaaagcttgatgaagtggtgcaacaaacggtggcgcaatcgccggttgaattaaaa

SEQ ID NO: 297035 - DNA, 75 bp, synthetic construct
  source 1..75: mol_type = other DNA
tgtggttgacggtaaccacatgctggctggtcagaacctgaaattcaacgttgaagttgtggcgattcgcgaagc

SEQ ID NO: 297036 - DNA, 75 bp, synthetic construct
  source 1..75: mol_type = other DNA
gcaacgcgcggaggaaaccgggcttttcgggccactggcattggcggcaagcgatccgctgcctgctgaattacg

SEQ ID NO: 297037 - DNA, 75 bp, synthetic construct
  source 1..75: mol_type = other DNA
ccaggggttaatgtcccggtttatcgactctctgaaagcgcaactggtcgcttaccgacaccagaaagcccggga

SEQ ID NO: 297038 - DNA, 75 bp, synthetic construct
  source 1..75: mol_type = other DNA
atacctattcctatctggatattaatcatcttattgctgattaaccacttcattcttactaaaacaacctttgga

SEQ ID NO: 297039 - DNA, 75 bp, synthetic construct
  source 1..75: mol_type = other DNA
ttaaaggattagtcattcttgtagccgtttattttgacgtaagaaaaaaagaaaacgcagctaatcatttcaagg

SEQ ID NO: 297040 - DNA, 75 bp, synthetic construct
  source 1..75: mol_type = other DNA
acgccttgttttatgcctgttggcacctacggcactgtaaaagggatgacgccggaagaagttgaagccactggc

SEQ ID NO: 297041 - DNA, 75 bp, synthetic construct
  source 1..75: mol_type = other DNA
ctgaaccttgttcagccgcaggaagtgcaggaggggaatgatgcatttgatgcttatctgaatggtatatggatc

SEQ ID NO: 297042 - DNA, 75 bp, synthetic construct
  source 1..75: mol_type = other DNA
ctgagtgcaatgcgggttcgtgactggccggaatacctgacgctggttcactttgctgataatcctctggcatac

SEQ ID NO: 297043 - DNA, 75 bp, synthetic construct
  source 1..75: mol_type = other DNA
tgattcgctgctggcgctggggcatacgtcaggggcagatacgttgctgggattctggctgggtcaacaattatt

SEQ ID NO: 297044 - DNA, 75 bp, synthetic construct
  source 1..75: mol_type = other DNA
gcgctttagatgcgcgctccggtcgccagttttttgcctgttccgacaatctgcaactcgttaccacagcggtga

SEQ ID NO: 297045 - DNA, 75 bp, synthetic construct
  source 1..75: mol_type = other DNA
gcctcgccactcctgcactttgttcatgctctgagttgcccgaaacgtaccgctgttgcgattgattcgctgctg

SEQ ID NO: 297046 - DNA, 75 bp, synthetic construct
  source 1..75: mol_type = other DNA
ggggggcaccagtctcaacggtggttatggcacggtggtgggtacggtgatcggcgcattaaccataggcattat

SEQ ID NO: 297047 - DNA, 75 bp, synthetic construct
  source 1..75: mol_type = other DNA
aaagtctttatgattacagccgtgctggcaggtatcagcgggatgatcctcgcctcacgcctctattccgggcaa

SEQ ID NO: 297048 - DNA, 75 bp, synthetic construct
  source 1..75: mol_type = other DNA
atgacgatcatccatccactgcttgccagccgtagcgcaccggactatcgccagtgctggcggttagcgggcgtc

SEQ ID NO: 297049 - DNA, 75 bp, synthetic construct
  source 1..75: mol_type = other DNA
gaagggatgaccggcgatccgagtattttaatcgccaagtcatttctcgatttctttacggcgatgatcttcgcc

SEQ ID NO: 297050 - DNA, 75 bp, synthetic construct
  source 1..75: mol_type = other DNA
atgactgaccgttacggcatggtgaccattcaccaggaggcgagcttcatccctctgaacctgcgcccgaactac

SEQ ID NO: 297051 - DNA, 75 bp, synthetic construct
  source 1..75: mol_type = other DNA
atcgtctcgccttattaaatcgtttgagcctatcacattattgagcggacagttgacattctcccttatactgtc

SEQ ID NO: 297052 - DNA, 75 bp, synthetic construct
  source 1..75: mol_type = other DNA
caccgatcgttgccgatagtgatcatgctgaggcaaatgcagtgagctatgaagcactgactccgacagaactcg

SEQ ID NO: 297053 - DNA, 75 bp, synthetic construct
  source 1..75: mol_type = other DNA
gcctggtggaccgtgaatgtcagaaggtgatttgtgaaccgctgggccgtaattaccgcgtcagtatgccgctta

SEQ ID NO: 297054 - DNA, 75 bp, synthetic construct
  source 1..75: mol_type = other DNA
tacgtgaacaacaactttgccgtgatcagccgttccgttgttgacactcagtaccgcggtgtcggcgtctcctat

SEQ ID NO: 297055 - DNA, 75 bp, synthetic construct
  source 1..75: mol_type = other DNA
cagttgtctgtttccgggagattccccagctgattttgggtataaactaagattagctgaactggcaaaagaacc

SEQ ID NO: 297056 - DNA, 75 bp, synthetic construct
  source 1..75: mol_type = other DNA
attaacaccatgtctcaggttccgaccatcagccagctgctgccgttaccggcatcagatgatgatgatgatctg

SEQ ID NO: 297057 - DNA, 75 bp, synthetic construct
  source 1..75: mol_type = other DNA
tcaagttacacatgggcagaggccgcctggtctcagcagcttgaagactgggtgatgagtcatgttcgctgcttc

SEQ ID NO: 297058 - DNA, 75 bp, synthetic construct
  source 1..75: mol_type = other DNA
tgatattcaccattacttgtcagatgagtttctagatggctgtctgcgcactctggcgttttatgctgccaatcg

SEQ ID NO: 297059 - DNA, 75 bp, synthetic construct
  source 1..75: mol_type = other DNA
ggttagtaccagaacgaatccgtgccagggccaatggctactcttttctgttgtatgacacatcgtggacattgg

SEQ ID NO: 297060 - DNA, 75 bp, synthetic construct
  source 1..75: mol_type = other DNA
agtacagcttctgccaaagtgttccatgcagagcgctatggtggcagtggtattcagcgtaatggaggtggtgca

SEQ ID NO: 297061 - DNA, 75 bp, synthetic construct
  source 1..75: mol_type = other DNA
gaagctcttacgccgacagaactcgacgcagataaagcaggctgttatatcagtgcgcttaattatgcttatgaa

SEQ ID NO: 297062 - DNA, 75 bp, synthetic construct
  source 1..75: mol_type = other DNA
atggatgaactgcgtgcccaaggttaccattttaaagtaaaaaccgtgacggaaagcctgcgccgtcacggactg

SEQ ID NO: 297063 - DNA, 75 bp, synthetic construct
  source 1..75: mol_type = other DNA
ggcgcacatgacgcacgaaaacggcactgacaagcttctggtgagtatgggctctgcgacgggcgatgggaccca

SEQ ID NO: 297064 - DNA, 75 bp, synthetic construct
  source 1..75: mol_type = other DNA
gttgtcgtatcgacaccgcgacggagttgacctactaccagaacgacggcattttgcattatgtcattcgtaata

SEQ ID NO: 297065 - DNA, 75 bp, synthetic construct
  source 1..75: mol_type = other DNA
ttctggcaggtcacggtgctgacggggggcttatggggcatttcctggggatgtgcaatgtggtttatctactgg

SEQ ID NO: 297066 - DNA, 75 bp, synthetic construct
  source 1..75: mol_type = other DNA
gtcaaaaccatgtatccactactgcgaaattggcacaatcatcgttaatgaacagcagttgcacgaggtgaagtg

SEQ ID NO: 297067 - DNA, 75 bp, synthetic construct
  source 1..75: mol_type = other DNA
atggatgttgtggcctcgacctgtcatgtggtggtggaggcagacagttccggcaacagtggtcggctgacattc

SEQ ID NO: 297068 - DNA, 75 bp, synthetic construct
  source 1..75: mol_type = other DNA
tgaattaacagaaattctgtggactaacatagaagattttattttatcggtatttattgaatcggaagagattga

SEQ ID NO: 297069 - DNA, 75 bp, synthetic construct
  source 1..75: mol_type = other DNA
tgaccgttttaacaatggccggattttcgtgaaattgcgggaaatcaatcaaattattaataactgcctttctga

SEQ ID NO: 297070 - DNA, 75 bp, synthetic construct
  source 1..75: mol_type = other DNA
atgatattgtctgtttttataacggtaatttcaggccatgacaagccgcagccgccaggctgcctactcgataaa

SEQ ID NO: 297071 - DNA, 75 bp, synthetic construct
  source 1..75: mol_type = other DNA
ttatcgtcctgttttgtgccagcggtacagggatcttcggcgcgatgaatgaaggaatgaccggcgatccgagta

SEQ ID NO: 297072 - DNA, 75 bp, synthetic construct
  source 1..75: mol_type = other DNA
tgattagtattccattgctgatcatccagttaacgctggcttgggctgctgcgctgatattaccgctgacaacac

SEQ ID NO: 297073 - DNA, 75 bp, synthetic construct
  source 1..75: mol_type = other DNA
ggtggcctgacaatgcagtcggaccatgagcagattgattttatattttttctgttatcaagtggctatctgtca

SEQ ID NO: 297074 - DNA, 75 bp, synthetic construct
  source 1..75: mol_type = other DNA
ggttagtggcgctgggcattgcgacagcgttgatggcatcttgtgcattcgctgccaaagaggtggtggtggcgg

SEQ ID NO: 297075 - DNA, 75 bp, synthetic construct
  source 1..75: mol_type = other DNA
gatcgatgacatccgtaaaatcgtagacacaaccgccgaagtacttggcaaagctttgccagtactcctctttta

SEQ ID NO: 297076 - DNA, 75 bp, synthetic construct
  source 1..75: mol_type = other DNA
agcattacaatgaaaaccatccgcatagtgcgttgggttatcgctctccgcgagaatatcgacgtcaacgggtaa

SEQ ID NO: 297077 - DNA, 75 bp, synthetic construct
  source 1..75: mol_type = other DNA
ctcgaaaaattactcgatcaggcgcgctactcttcacgcccaccagaaattttgctgactcacccattgccggaa

SEQ ID NO: 297078 - DNA, 75 bp, synthetic construct
  source 1..75: mol_type = other DNA
atggctttagcgccagaagatgaatgcctgatgggtttaccgccgcttagcaaaattcctttcattttacgtccg

SEQ ID NO: 297079 - DNA, 75 bp, synthetic construct
  source 1..75: mol_type = other DNA
agcatgggatttagcccatgcaaacaatattaatattgcgttgtcaaatgtttgttttgaattgtggattttaca

SEQ ID NO: 297080 - DNA, 75 bp, synthetic construct
  source 1..75: mol_type = other DNA
tcaagaactactaataaacaataaatttatagcgattgagatatcagaaaactatcctgatttaagtgatgagga

SEQ ID NO: 297081 - DNA, 75 bp, synthetic construct
  source 1..75: mol_type = other DNA
tcgtcattccctgtctcgggttttcagccagtggcatggccgcagaggatgcgatgattgtctcggcatccggct

SEQ ID NO: 297082 - DNA, 75 bp, synthetic construct
  source 1..75: mol_type = other DNA
aaggattacagtgacgtgagcctgtacagtgccggtaagagtacgctgtatgccggtgattacttccagacggga

SEQ ID NO: 297083 - DNA, 75 bp, synthetic construct
  source 1..75: mol_type = other DNA
aattattcgtcgctgagcgctgtacagaagaaagtgtatgatgagaaaggagaatatctgaaagcctggacggtg

SEQ ID NO: 297084 - DNA, 75 bp, synthetic construct
  source 1..75: mol_type = other DNA
ccaatgacgctatcaatcgcctgaaaaatgcccgcgatttgcgcaccaatccggtgttgcagctcaacctggcga

SEQ ID NO: 297085 - DNA, 75 bp, synthetic construct
  source 1..75: mol_type = other DNA
cgaaaaaatggccgcgcttgtgaagtcgcatgatttaccggtttttgacttcaacgttaaagcgcagatccccgc

SEQ ID NO: 297086 - DNA, 75 bp, synthetic construct
  source 1..75: mol_type = other DNA
tgctcgcggttatattggggggagtttctcttaatgctgcctatgcaggcgcgttacctgcaaagtatgaggctg

SEQ ID NO: 297087 - DNA, 75 bp, synthetic construct
  source 1..75: mol_type = other DNA
cagcaccgataaactgctggcagtggctgactggcggcaaagcccgctttcggcgcacgccccggcgcttgtgct

SEQ ID NO: 297088 - DNA, 75 bp, synthetic construct
  source 1..75: mol_type = other DNA
gatcctgacgttaaccctacctaccagcttgagcattataatgtcgcagttttgcctgcgcggccacgtaaaccg

SEQ ID NO: 297089 - DNA, 75 bp, synthetic construct
  source 1..75: mol_type = other DNA
ggtgcacaaacagaaaccagtgtcgagatgattatattgaccaattcaaagtaattggaaccggttttgtttcaa

SEQ ID NO: 297090 - DNA, 75 bp, synthetic construct
  source 1..75: mol_type = other DNA
cctacaagcaggccagaccaacaaaacaatggctaccaaccaccacgccagacccaacaaacccaacatattgct

SEQ ID NO: 297091 - DNA, 75 bp, synthetic construct
  source 1..75: mol_type = other DNA
ggttaatggcgctgggcgttgccgcagcgttgatggcatcttgtgcatttgctgccaaagatgtggttgttgccg

SEQ ID NO: 297092 - DNA, 75 bp, synthetic construct
  source 1..75: mol_type = other DNA
ccgcacagaaagtgctgcaatttacccagcaacagctagcgcaggtggggattaaagcccaggtaacggcgatgg

SEQ ID NO: 297093 - DNA, 75 bp, synthetic construct
  source 1..75: mol_type = other DNA
accggcagcgctggaaaaatatggcaaggagattggttttcatccggtgggaaccggaccgtatgaactggatac

SEQ ID NO: 297094 - DNA, 75 bp, synthetic construct
  source 1..75: mol_type = other DNA
gccgcaggtaggcactaaatttggtcgttggctggatctgacatttatgcagttgcaactcgacgagcgcactga

SEQ ID NO: 297095 - DNA, 75 bp, synthetic construct
  source 1..75: mol_type = other DNA
agggaaaaacaaatctacttggtaaccccgacctgaagccggaagagagcgtcagttatgaggctggggtgtatt

SEQ ID NO: 297096 - DNA, 75 bp, synthetic construct
  source 1..75: mol_type = other DNA
gctacgagattgaagagggttccggcctgttcgttcctaagttctccagtgctgatcgtaacccgttcaaactgg

SEQ ID NO: 297097 - DNA, 75 bp, synthetic construct
  source 1..75: mol_type = other DNA
tttcggtaatcaccactattggtgtttacgactgggaacagaccatcgaacagaagttggtgttcgatatcgaaa

SEQ ID NO: 297098 - DNA, 75 bp, synthetic construct
  source 1..75: mol_type = other DNA
cgcactgaagcctcttcctgaagccagttacagttacaccctgggtgaagaaagtcagagttcatgccgattacc

SEQ ID NO: 297099 - DNA, 75 bp, synthetic construct
  source 1..75: mol_type = other DNA
gtttgaagcacggactttatcgggttatccggtgctggtgagcgaagaggatggcgtcatcacggggtatgcctc

SEQ ID NO: 297100 - DNA, 75 bp, synthetic construct
  source 1..75: mol_type = other DNA
gttcttttttgctgtgatacagataaagggtgggtgacgagccgcaagaaatattttgtccgtttccacattcag

SEQ ID NO: 297101 - DNA, 75 bp, synthetic construct
  source 1..75: mol_type = other DNA
tcgctttactggagatacgccagaacagtggttagcgagttttcgtcagcatcgctgggacctggaagaagaagc

SEQ ID NO: 297102 - DNA, 75 bp, synthetic construct
  source 1..75: mol_type = other DNA
gtgaatcaggccatccagtttccggatagggaagagtgggacgagaataaaaaatgtgtatgttttcccgctctc

SEQ ID NO: 297103 - DNA, 75 bp, synthetic construct
  source 1..75: mol_type = other DNA
atgtacccggctgataacaggaacacaggtcaatggtgttatcagtaaactccatactcttttgattaacggcta

SEQ ID NO: 297104 - DNA, 75 bp, synthetic construct
  source 1..75: mol_type = other DNA
ctgtcatggctggcatgggcagcccatataccagtagtactgataagtggctttagtcttcctaacagtgaattt

SEQ ID NO: 297105 - DNA, 75 bp, synthetic construct
  source 1..75: mol_type = other DNA
atggtcagggatttatctggaaccacatcccttggggtgctgagaacttcaccggaaacattcctttacaggaga

SEQ ID NO: 297106 - DNA, 75 bp, synthetic construct
  source 1..75: mol_type = other DNA
gagcaaaaggatgtcgccgcaggctccgctttacccggccatgcggggcatggccttgtgggttttcagttatgt

SEQ ID NO: 297107 - DNA, 75 bp, synthetic construct
  source 1..75: mol_type = other DNA
tccgccttttccagccggtccccggaaagagcaaaaggatgtcgccgcaggctccgctttacccggccatgcggg

SEQ ID NO: 297108 - DNA, 75 bp, synthetic construct
  source 1..75: mol_type = other DNA
tgtgtgcagaaactgatgacggcagtgaaagcgtgttattagcgccggagcggatgatgcctgcgggtgtgcgta

SEQ ID NO: 297109 - DNA, 75 bp, synthetic construct
  source 1..75: mol_type = other DNA
aaacaatcctcactcactttctccatgctcgacgacatcaccgccagcgagctgattaacgacattgaatcactg

SEQ ID NO: 297110 - DNA, 75 bp, synthetic construct
  source 1..75: mol_type = other DNA
ttttgcgtacttgatatcgatggtatggatacgttggttgacactcgtcattactgcgataccgcaacagctact

SEQ ID NO: 297111 - DNA, 75 bp, synthetic construct
  source 1..75: mol_type = other DNA
tggacgagccagaaggcgttgaattatatgaccgactggcaatatcaagcgctatgttcatatcgaaagctcgac

SEQ ID NO: 297112 - DNA, 75 bp, synthetic construct
  source 1..75: mol_type = other DNA
cacaggtgagcggctccggcctgaatgatgagattcgtacctatgaatattccttttcaggggatccgactacag

SEQ ID NO: 297113 - DNA, 75 bp, synthetic construct
  source 1..75: mol_type = other DNA
tgagcagggacatgaagtttacggcgaggtcaatatcgaccagttaaccacgccgattcaggaattactcttaac

SEQ ID NO: 297114 - DNA, 75 bp, synthetic construct
  source 1..75: mol_type = other DNA
attcgtcgttcagaaggtggtattgcctggggcgatatgcgcaactgcctcaatcaattaatcactgaacctagt

SEQ ID NO: 297115 - DNA, 75 bp, synthetic construct
  source 1..75: mol_type = other DNA
ccctaatgtgcctgctacgcgtgaagctgtacatgctatcaatgaagcagatctgattcttatcgggccaggcag

SEQ ID NO: 297116 - DNA, 75 bp, synthetic construct
  source 1..75: mol_type = other DNA
ttaaaggcactggatcaccttagcgtgcggcctctggaagccatcaatttaattcgtaatctgctgaaagtggat

SEQ ID NO: 297117 - DNA, 75 bp, synthetic construct
  source 1..75: mol_type = other DNA
ttgaaggcactggatcaccttagcgtgcgacctcttgaagcgatcaatctgattcgaaatctgctgaaagtggac

SEQ ID NO: 297118 - DNA, 75 bp, synthetic construct
  source 1..75: mol_type = other DNA
tatggagcagtatgttggtaaaaaggtaattgatgcggtcatcgtcgggccaaaagtggatgtctcggcggtgaa

SEQ ID NO: 297119 - DNA, 75 bp, synthetic construct
  source 1..75: mol_type = other DNA
ggctttcctctcttgcctgctgctgcccgcccccgcactggggctgacgctggcacaaaaactggtgaccacgtt

SEQ ID NO: 297120 - DNA, 75 bp, synthetic construct
  source 1..75: mol_type = other DNA
aatataacgttaaggcgggatattatgggcgtaagccgaaggcgaagctgacaccggagttgatggcgtttcctg

SEQ ID NO: 297121 - DNA, 75 bp, synthetic construct
  source 1..75: mol_type = other DNA
atggctccggcgatggcaatactggatggcgcacagtcacagatgaagtcgctgtccactgatgcgcagacggcg

SEQ ID NO: 297122 - DNA, 75 bp, synthetic construct
  source 1..75: mol_type = other DNA
aattcgtaatctgctgaaagtggatgcgcatttgattccgatgtcagagcatcccgttgatctgatggcgattga

SEQ ID NO: 297123 - DNA, 75 bp, synthetic construct
  source 1..75: mol_type = other DNA
ggcaaagagcatatcaaggtcagtaccgagtacggcggcaagagccagctaaacctcggtcatctggtggacgcc

SEQ ID NO: 297124 - DNA, 75 bp, synthetic construct
  source 1..75: mol_type = other DNA
tggcagctacatccggctggatgcctgcgggatagaagctggaacgccgggagaatataacgttaaggcgggata

SEQ ID NO: 297125 - DNA, 75 bp, synthetic construct
  source 1..75: mol_type = other DNA
gccagaagcctgttttatgctgttactgtgatcgcaatattcctgactggatggggagtaggtattgttttcttt

SEQ ID NO: 297126 - DNA, 75 bp, synthetic construct
  source 1..75: mol_type = other DNA
cgcagaagaacatggatacggaggtgctgaataatcggacgacggatgtgaaggctgaccacacggagaccattg

SEQ ID NO: 297127 - DNA, 75 bp, synthetic construct
  source 1..75: mol_type = other DNA
aggaaagataataatacgggggacggagtttctatttgaggctaccggtcctgtagatattaaaggaaaagatat

SEQ ID NO: 297128 - DNA, 75 bp, synthetic construct
  source 1..75: mol_type = other DNA
gtgtgtcgcaggcgtgggcggggccgggatttggtaatctggcgataccgcgggtgggccaggaggtgattgttg

SEQ ID NO: 297129 - DNA, 75 bp, synthetic construct
  source 1..75: mol_type = other DNA
agatacttagctactttgaaccagataacctcgaatgggtgactggtgagattggtgcgccgccgttcgatgtgt

SEQ ID NO: 297130 - DNA, 75 bp, synthetic construct
  source 1..75: mol_type = other DNA
ctgcattcaggcaaatttacgctgattacgaactgcttccccctttccaacagctcgagcgaggtagctatcacc

SEQ ID NO: 297131 - DNA, 75 bp, synthetic construct
  source 1..75: mol_type = other DNA
gaactgccttcgggtttccaccgccacggctatttcaacctacgcggaaagcacggcatgtccgggcatatcaaa

SEQ ID NO: 297132 - DNA, 75 bp, synthetic construct
  source 1..75: mol_type = other DNA
ggcgtgggcggggccggggttcggtaacctggcgataccgcgtgtgggtcaggaagtgatagtggacttcctgaa

SEQ ID NO: 297133 - DNA, 75 bp, synthetic construct
  source 1..75: mol_type = other DNA
cgggccgaaaatcaatctcaatagcggcggtagtccgggagcgccggtgccgacgctgcaaccggcggttctgaa

SEQ ID NO: 297134 - DNA, 75 bp, synthetic construct
  source 1..75: mol_type = other DNA
tgaccaccaccgtgacggccagcgcggcgctgacgcaacagcgctttgtcggggccgataatggcccctgtcagg

SEQ ID NO: 297135 - DNA, 75 bp, synthetic construct
  source 1..75: mol_type = other DNA
atgagaatgaccagccgcaaaaaagagatacttagctactttgaaccggataacctcgaatgggtgactggtgag

SEQ ID NO: 297136 - DNA, 75 bp, synthetic construct
  source 1..75: mol_type = other DNA
gggagcctgccggggacgaagacgcagatgacgatacggtcgaagacctataaaggaagcggctttaatgaactg

SEQ ID NO: 297137 - DNA, 75 bp, synthetic construct
  source 1..75: mol_type = other DNA
cacgcgcagaagaacatggacacggaggtacttaacgaccggacgacggacgttaagcatgaccacacggaaacc

SEQ ID NO: 297138 - DNA, 75 bp, synthetic construct
  source 1..75: mol_type = other DNA
cgctttgatgctggtaatgatggcctcatgcacatcaatggtcaaaagccagaaacacaaaaaatgacctttttg

SEQ ID NO: 297139 - DNA, 75 bp, synthetic construct
  source 1..75: mol_type = other DNA
accacagcggtgagcgtcagttatttacgttatgccgcgcaaggatatttcgcctcgccactcctgcactttgtc

SEQ ID NO: 297140 - DNA, 75 bp, synthetic construct
  source 1..75: mol_type = other DNA
tattgttttatcatgatggtaaaataaatatggaaggtctaattaaagaaatggaattaaaaggttatatgtatc

SEQ ID NO: 297141 - DNA, 75 bp, synthetic construct
  source 1..75: mol_type = other DNA
gcgtttgtgtaatgaggattttaacggtagctattttaactctggtgtaatgtatattaatttacgggaatggtt

SEQ ID NO: 297142 - DNA, 75 bp, synthetic construct
  source 1..75: mol_type = other DNA
tcggtatcatgcttctatgataagccatttataaaaaaacatttttttgagattgtgatgattgcttttgtggca

SEQ ID NO: 297143 - DNA, 75 bp, synthetic construct
  source 1..75: mol_type = other DNA
gaacaggctatgtgccagcgcagacgctggacggcagagcagttccgcctgtttctggtggagcatccgctggta

SEQ ID NO: 297144 - DNA, 75 bp, synthetic construct
  source 1..75: mol_type = other DNA
ggcgctggggcatacgtcaggggcagatacgctgctggggttctggcttggccaacaattattacaaggaaaacc

SEQ ID NO: 297145 - DNA, 75 bp, synthetic construct
  source 1..75: mol_type = other DNA
cattactgccgcactggtatttaatcgagagtttttcccgcaagtgagtccggcaatgggaactctcgcagcgtt

SEQ ID NO: 297146 - DNA, 75 bp, synthetic construct
  source 1..75: mol_type = other DNA
gagcgcatttcctttctttatggcgcttgaagcacaatccattttctggatagttttcttctccataatgctggc

SEQ ID NO: 297147 - DNA, 75 bp, synthetic construct
  source 1..75: mol_type = other DNA
ttatggcgcttgaggcacagtccattttctggattgttttcttctccattatgctggcgaacattgcgcatgaca

SEQ ID NO: 297148 - DNA, 75 bp, synthetic construct
  source 1..75: mol_type = other DNA
gattgggcgaactacgcatctgcagattattttcgtaatatttataatatatctccatggagaaatataccttat

SEQ ID NO: 297149 - DNA, 75 bp, synthetic construct
  source 1..75: mol_type = other DNA
gcggcgtagctttagctttagcttttgttggtgcttcgtctgctttagcggacactcagtgtgggccttttcgtc

SEQ ID NO: 297150 - DNA, 75 bp, synthetic construct
  source 1..75: mol_type = other DNA
tttgctggtgggagggttaagctgcctgacaattccctgttttgcctggcttgccgatcgttttggtcgccgcag

SEQ ID NO: 297151 - DNA, 75 bp, synthetic construct
  source 1..75: mol_type = other DNA
agcagaagaaacacgacgattttgtcgatcgtatgatggaaaaaggctacacccgtaaacaggtgcgtttactgt

SEQ ID NO: 297152 - DNA, 75 bp, synthetic construct
  source 1..75: mol_type = other DNA
tggtctgtccacgcgtttcgcgtttaagatcctctcgcgcgtgtttaacttcgatcacgtggaagtggcggctaa

SEQ ID NO: 297153 - DNA, 75 bp, synthetic construct
  source 1..75: mol_type = other DNA
atcgtgaaggttccgtattgcttacgcatttccgaagagatcaaaatctacgagaaactgcttaatcatagtgaa

SEQ ID NO: 297154 - DNA, 75 bp, synthetic construct
  source 1..75: mol_type = other DNA
aatcattgatggtgcaacctggacgcgcacgatgggctggaccgagtaccagcaggtacgctacgccaccgcacg

SEQ ID NO: 297155 - DNA, 75 bp, synthetic construct
  source 1..75: mol_type = other DNA
gatttccgcaacgagattgttaacttcgtactgcgagccagagccaataacagcggacgtaatccgaactggacc

SEQ ID NO: 297156 - DNA, 75 bp, synthetic construct
  source 1..75: mol_type = other DNA
agatgcgcgtttatgatggcgaaagtctgaaagataccgatccgaaagccaaatcgtatcaggagtatcgggatt

SEQ ID NO: 297157 - DNA, 75 bp, synthetic construct
  source 1..75: mol_type = other DNA
gtgcagaagtacctttctctgacgcaccatgcctattccccacttctggtggtgatcaacaaagcgaagtttgat

SEQ ID NO: 297158 - DNA, 75 bp, synthetic construct
  source 1..75: mol_type = other DNA
ggtttgtagctctgatttttgtccctctcctgttaattggtacttttgtggatggttttcctagtacatggcggg

SEQ ID NO: 297159 - DNA, 75 bp, synthetic construct
  source 1..75: mol_type = other DNA
aaggtaccggatgcagacaagggtaacctgcaggatcgcgtggatgcgctgacgccggctcaggtaccggacgtg

SEQ ID NO: 297160 - DNA, 75 bp, synthetic construct
  source 1..75: mol_type = other DNA
atggtcgatacggcccaggaacccagactttctcgactcttttccaaccgggtcattgcacgttatccggcgttt

SEQ ID NO: 297161 - DNA, 75 bp, synthetic construct
  source 1..75: mol_type = other DNA
ttccattctttcgcgtctgaaagagccagaaaactccagcatttattcaaagatgcgggtttatgatggcgaaag

SEQ ID NO: 297162 - DNA, 75 bp, synthetic construct
  source 1..75: mol_type = other DNA
gatcgatacacaataccgtacacagaaaattgatgatagcatcagatcgaactgtgtttgcccagtaccaacaat

SEQ ID NO: 297163 - DNA, 75 bp, synthetic construct
  source 1..75: mol_type = other DNA
aaagtgaacccgcaattcaaagcgtgggtgccggtaactcaggtgccaaactgctggctgctggtggatggcgtg

SEQ ID NO: 297164 - DNA, 75 bp, synthetic construct
  source 1..75: mol_type = other DNA
ggcgattgaacaacatggcccacaaacggcggatgaactggcattgatgttcggaattacctcccgccgggcgaa

SEQ ID NO: 297165 - DNA, 75 bp, synthetic construct
  source 1..75: mol_type = other DNA
agcagagccggaagttacatcggtaacggaaaccgatggtaaagcctttcctcagccagcaggtgttgcgttacc

SEQ ID NO: 297166 - DNA, 75 bp, synthetic construct
  source 1..75: mol_type = other DNA
acgctgtccggtaccacatcccgcaaagtggcttcaacgctggcaatggcaatcagcaaaggtcgtctgattcgc

SEQ ID NO: 297167 - DNA, 75 bp, synthetic construct
  source 1..75: mol_type = other DNA
aattacctcccgccgggcgaattcatcgctggcaatggcaatcagcaaagggcgtctgattcgcgtgaatcaggg

SEQ ID NO: 297168 - DNA, 75 bp, synthetic construct
  source 1..75: mol_type = other DNA
tggctgactcagactggtgaaagtgaaccagtgtcaccggtaccgaaagtgacagcgcaaatgctgactgaggcg

SEQ ID NO: 297169 - DNA, 75 bp, synthetic construct
  source 1..75: mol_type = other DNA
gcgggagctgaacaagcaccaggatattgttcgacagattgtcgattcatccggtcgtattgtgtcggaaaagtg

SEQ ID NO: 297170 - DNA, 75 bp, synthetic construct
  source 1..75: mol_type = other DNA
ttgattcacatctgtttaccggcaccgggaaattcgcttcttcacaactgatggtggaggcgatccgcgcttccg

SEQ ID NO: 297171 - DNA, 75 bp, synthetic construct
  source 1..75: mol_type = other DNA
ggcgcttgaaatgggagccgatgcggtgttagtgaatacggcgattgccgtcgcggacgatcccgtcaacatggc

SEQ ID NO: 297172 - DNA, 75 bp, synthetic construct
  source 1..75: mol_type = other DNA
gacgcccgctggctgttgcccgatcccatcgaaaccctgaaagccgccgaaacgctggtacaacagggatttgtc

SEQ ID NO: 297173 - DNA, 75 bp, synthetic construct
  source 1..75: mol_type = other DNA
cgacgacacaggaaggcatcaaaacagaaaccgtggaagacactgagcgctcacaggcatcgttaaccggaaccc

SEQ ID NO: 297174 - DNA, 75 bp, synthetic construct
  source 1..75: mol_type = other DNA
atcatgtgcgccttatgtgattacaacgaaaataaaaaccatcacaccccatttaatatcagggaaccggacata

SEQ ID NO: 297175 - DNA, 75 bp, synthetic construct
  source 1..75: mol_type = other DNA
cgaaaaaggggatagtacagctcagcagtgcgactaacagcacttccgagtcactggcggcaacgccaaaagccg

SEQ ID NO: 297176 - DNA, 75 bp, synthetic construct
  source 1..75: mol_type = other DNA
aacggtaacggcaaggcagacacagccgagcaggcagtggccgatgcggaagctgcagtcaaggcagcggaagcg

SEQ ID NO: 297177 - DNA, 75 bp, synthetic construct
  source 1..75: mol_type = other DNA
gcatcataaacagcattgcagcaggcattttcaccaaagaggggggtcagcacgatgagaacactagaagttcgc

SEQ ID NO: 297178 - DNA, 75 bp, synthetic construct
  source 1..75: mol_type = other DNA
cagctttctactccatgcactgacagcatcataaacagcattgcagcaggcattttcaccaaagaaggggcagca

SEQ ID NO: 297179 - DNA, 75 bp, synthetic construct
  source 1..75: mol_type = other DNA
agggtggcgaacttttcagcacggattttactatggtaatgaaaagcgttgggggatatggaatctgtaccttat

SEQ ID NO: 297180 - DNA, 75 bp, synthetic construct
  source 1..75: mol_type = other DNA
atgacctttgctcggtgttcgttaaggacgcgacggttgtcgggctggacgatggcgacatcgttacggtgaaag

SEQ ID NO: 297181 - DNA, 75 bp, synthetic construct
  source 1..75: mol_type = other DNA
gctttcctggctgaagtgcgggcgcagggcgtggatgctgctatagaagctgcaaaaaatctggtggcccaagaa

SEQ ID NO: 297182 - DNA, 75 bp, synthetic construct
  source 1..75: mol_type = other DNA
atattgagacgcgctatcgctataacccggacgtaaaaagcctgccagcgattgttccggcggtgatcccgcttc

SEQ ID NO: 297183 - DNA, 75 bp, synthetic construct
  source 1..75: mol_type = other DNA
atggacaaggaattaccgtggctggcggataacgcccaactggaactgaaatataaaaaaggcaaaacgccactc

SEQ ID NO: 297184 - DNA, 75 bp, synthetic construct
  source 1..75: mol_type = other DNA
cctgaaatcctcgtttcaccaccatggcgtgggaggaagaaaaagacttccatacctcacttttcgctgcctgat

SEQ ID NO: 297185 - DNA, 75 bp, synthetic construct
  source 1..75: mol_type = other DNA
acattgtctggcgttatgaaaatttttcactggagtggcagtccaccattacgcaggccatcaacttgatcggcg

SEQ ID NO: 297186 - DNA, 75 bp, synthetic construct
  source 1..75: mol_type = other DNA
cgagagtactcatagcaacgacctgccagaaatacttgtttctccaccgtggcgaggtaagaaaaaaacggcatt

SEQ ID NO: 297187 - DNA, 75 bp, synthetic construct
  source 1..75: mol_type = other DNA
atgtatgctcataaagaagattgcggcagtctgctggtacaaattaaccatccgcaagtcatccgcaccttgctg

SEQ ID NO: 297188 - DNA, 75 bp, synthetic construct
  source 1..75: mol_type = other DNA
cagatgtatggtctgccctggagcagttgcttaaacagggtccaatggacatttacccggcacgcattccaaaag

SEQ ID NO: 297189 - DNA, 75 bp, synthetic construct
  source 1..75: mol_type = other DNA
atccgcttgatggcctgtccggtgaatatgcggagaaatcccttgaagaatgggcggaacagattcgcaaaggaa

SEQ ID NO: 297190 - DNA, 75 bp, synthetic construct
  source 1..75: mol_type = other DNA
gaaactggcagaagcgcaggaagagctgaaaaagctggaagcgcgcgactactaactcacaatagtcactactta

SEQ ID NO: 297191 - DNA, 75 bp, synthetic construct
  source 1..75: mol_type = other DNA
gcaaaaaggcgatgccgataagattgccaaacgcgaacggaaactggcagaagcgcaggaagagctgaaaaagct

SEQ ID NO: 297192 - DNA, 75 bp, synthetic construct
  source 1..75: mol_type = other DNA
cctgatagggaaggttgaaatgactgagtggttagttgactttgctgcccagcttcgcaaaggagttcagtcatg

SEQ ID NO: 297193 - DNA, 75 bp, synthetic construct
  source 1..75: mol_type = other DNA
aacaacctgccggaaggaccggagaaagaagccctgaaaggtcgtctggatgcggtggatggtatccaggtaccg

SEQ ID NO: 297194 - DNA, 75 bp, synthetic construct
  source 1..75: mol_type = other DNA
aactatgggtgatggtgatgatacacttcttgctttaggctatgagggatttggtaatgctattgttaataccga

SEQ ID NO: 297195 - DNA, 75 bp, synthetic construct
  source 1..75: mol_type = other DNA
ccgagaaggttgcagaagatgcactgaaggcagcaggcgatgtgatcgaccagccgaaacatgatgatctgacgg

SEQ ID NO: 297196 - DNA, 75 bp, synthetic construct
  source 1..75: mol_type = other DNA
gtcagtcctggcacgcatatcaggaatacaagaagcataaagagcagttggaaaaattatcgattgaacttgata

SEQ ID NO: 297197 - DNA, 75 bp, synthetic construct
  source 1..75: mol_type = other DNA
tttgattgggattccgggaaagtgctgattttcccagcacagccactgactacgctaacaccagaacagattact

SEQ ID NO: 297198 - DNA, 75 bp, synthetic construct
  source 1..75: mol_type = other DNA
ccagccaccgatgctttcctggctgaagtacgggcgcagggcgtggagatgtttgcggagtgtgcatacacgctt

SEQ ID NO: 297199 - DNA, 75 bp, synthetic construct
  source 1..75: mol_type = other DNA
ggtaatggcatacaaagtttctgaagtcatcgctgcaatccgcgccgctggcattcgcatcaaaggaggtgagta

SEQ ID NO: 297200 - DNA, 75 bp, synthetic construct
  source 1..75: mol_type = other DNA
agatgatgcgcgaacacccatcaatcaaactttgctctttgacgcacatatgtgacgagttagtcgcagagcttc

SEQ ID NO: 297201 - DNA, 75 bp, synthetic construct
  source 1..75: mol_type = other DNA
cgaacacccatcaatcaaacttttctctttgacgcacatatgtgacgagttagccgcccggattcgcaaaggagg

SEQ ID NO: 297202 - DNA, 75 bp, synthetic construct
  source 1..75: mol_type = other DNA
cgtttgaggcctgtcagacgaacaaaaccgcatggctgaaccgtagagccgaactggccgctgccgagcaggaat

SEQ ID NO: 297203 - DNA, 75 bp, synthetic construct
  source 1..75: mol_type = other DNA
aaaaatgggagattaatcaggccgccggtcgctacatttcctcgcatgaggaggtgcagcgcatcagcatccgta

SEQ ID NO: 297204 - DNA, 75 bp, synthetic construct
  source 1..75: mol_type = other DNA
cgttcgatgcctgtcagacaaacaaaacggcgtggctgaactgtaaagccgaactgaccgccgcagaacaggaat

SEQ ID NO: 297205 - DNA, 75 bp, synthetic construct
  source 1..75: mol_type = other DNA
ggctggccgcaggaaatgaaattaattattctgcacaggataacgacattttaacggccatcggatacaggcctg

SEQ ID NO: 297206 - DNA, 75 bp, synthetic construct
  source 1..75: mol_type = other DNA
caaagactggtctcaggtcgagcaaaatccattcttctgcccggacccggacaaaatcgacgcgttagatgaact

SEQ ID NO: 297207 - DNA, 75 bp, synthetic construct
  source 1..75: mol_type = other DNA
gccagtagcgccagcctggcagcgacgccgtggcaaaaaataacccaacctgtgccgggtagcgcacaatcgata

SEQ ID NO: 297208 - DNA, 75 bp, synthetic construct
  source 1..75: mol_type = other DNA
acgccacgtattgggctatttgcaggacttcctgttccatccgaaacgggcgatgacgccggtacgtgcgctttc

SEQ ID NO: 297209 - DNA, 75 bp, synthetic construct
  source 1..75: mol_type = other DNA
gcgtacgcgccctgaaagcaatgcgccgtgaacgtagccagcgccgtgaggtcatggggacggcgaagatgcagg

SEQ ID NO: 297210 - DNA, 75 bp, synthetic construct
  source 1..75: mol_type = other DNA
gttttcgaaatggaagacgtttgctaccaggttgacggtaagcaactggtgaaagatttttctgcccaggttcta

SEQ ID NO: 297211 - DNA, 75 bp, synthetic construct
  source 1..75: mol_type = other DNA
gatgcgcgcgctgaaaaaagagggtgactccatcggcgcgaaagtcaccgtcgttgccagtggcgtacccgccgg

SEQ ID NO: 297212 - DNA, 75 bp, synthetic construct
  source 1..75: mol_type = other DNA
aaaatatctcgctgagaaatttggtattgaaattcgcggctgcctgacccaaatgggcgacattccgctggaaat

SEQ ID NO: 297213 - DNA, 75 bp, synthetic construct
  source 1..75: mol_type = other DNA
gggacatcgcgctataccacccagcgccgcgagccggatcaggtcaaaattctctccggtgtttttgaaggcgtt

SEQ ID NO: 297214 - DNA, 75 bp, synthetic construct
  source 1..75: mol_type = other DNA
cgtcgctatcagcagcaccagagcggaaaaggggcgaaagcactgcgtgggaaaggtgaactgacgctggcgttt

SEQ ID NO: 297215 - DNA, 75 bp, synthetic construct
  source 1..75: mol_type = other DNA
acatattcgcccagtgatgccactgctgatgatgcgagcctcgatggaagcccagcagcgtttcgctccggaaaa

SEQ ID NO: 297216 - DNA, 75 bp, synthetic construct
  source 1..75: mol_type = other DNA
agacgtccaccagataaccgctatacctttgggtggctgcgcttaaccacacttgccgctttcattaatgccatt

SEQ ID NO: 297217 - DNA, 75 bp, synthetic construct
  source 1..75: mol_type = other DNA
gttgaggagattattttagcaacaaggagaatgacacataaatcagttgaagaactgatggaaatgtcaaaagaa

SEQ ID NO: 297218 - DNA, 75 bp, synthetic construct
  source 1..75: mol_type = other DNA
agaaggtgatgtgatcgatccactgccgatctatacgccaggctttgaaagttatcaggatccgctgaacaaaca

SEQ ID NO: 297219 - DNA, 75 bp, synthetic construct
  source 1..75: mol_type = other DNA
atgacccgctcgtggccgccgggaaataccctggtcgcgcggctaatgaactgctgcggcggttatctgaaccat

SEQ ID NO: 297220 - DNA, 75 bp, synthetic construct
  source 1..75: mol_type = other DNA
catggagtgcactgaaagtgtcattaccattggaagaaaaacgcacgctgctggtcaatggtgttgaagggagtg

SEQ ID NO: 297221 - DNA, 75 bp, synthetic construct
  source 1..75: mol_type = other DNA
gttagcttatatgactatattaatgatgcttcggcgctggcctgcctcataaatttgtcgctgaacccttcagag

SEQ ID NO: 297222 - DNA, 75 bp, synthetic construct
  source 1..75: mol_type = other DNA
gaagccttggtggtgagttcattgaattcaacataggggctgtcaccatgactactctcccaacccaatctcacc

SEQ ID NO: 297223 - DNA, 75 bp, synthetic construct
  source 1..75: mol_type = other DNA
gaaaggtgaactgacgctggcattttccgcgccagtgggcgaccgttcgctggcactacgggcggaatatcgcgt

SEQ ID NO: 297224 - DNA, 75 bp, synthetic construct
  source 1..75: mol_type = other DNA
gtagtctggggggcctgttccgtcaactgtggtagccgctgcgcacttcggctacatgttaaagataatgaagtt

SEQ ID NO: 297225 - DNA, 75 bp, synthetic construct
  source 1..75: mol_type = other DNA
atgagcgggttttagatagaattcgaaacctcgaatgttccgctgaatttactgaacacaattttgtgttaagtg

SEQ ID NO: 297226 - DNA, 75 bp, synthetic construct
  source 1..75: mol_type = other DNA
tgaagagctaaatcacgacggcaacgagtacgcgtttaccgacgacgaaatccttggaccctttggtgaactgca

SEQ ID NO: 297227 - DNA, 75 bp, synthetic construct
  source 1..75: mol_type = other DNA
ccaacttcagccggacagcggacgcattcacgtcggcactaaactggaagtcgcctattttgaccagcaccgcgc

SEQ ID NO: 297228 - DNA, 75 bp, synthetic construct
  source 1..75: mol_type = other DNA
actggcttaacgtgctgcagcgcaatacccaggataacaaggattactggctccctgacgtgggggagcaggttg

SEQ ID NO: 297229 - DNA, 75 bp, synthetic construct
  source 1..75: mol_type = other DNA
gaaagaggggttaacttgtctgtcaggataaagaaaatagacatagttcagaaaccatattttgtcattcggcta

SEQ ID NO: 297230 - DNA, 75 bp, synthetic construct
  source 1..75: mol_type = other DNA
tggctggctatgagcagaaacgcaatgaagtctcggattctggattaggaaaaccaggctttaaattactgggtg

SEQ ID NO: 297231 - DNA, 75 bp, synthetic construct
  source 1..75: mol_type = other DNA
aatggtcttccccgacagatgatgatgagctgccggaagtcaccggacctgcgtggataatcgacaatgtggcgc

SEQ ID NO: 297232 - DNA, 75 bp, synthetic construct
  source 1..75: mol_type = other DNA
gatcaacgataactacgaggccatgcatgataaattcatggtctttgaccgccgcgccgtattgaccggctcgtt

SEQ ID NO: 297233 - DNA, 75 bp, synthetic construct
  source 1..75: mol_type = other DNA
aagctgatttacgaaggaggcatggcgggttctggtggtaaaggtgttaccgcgaccatccatggcaatatcgag

SEQ ID NO: 297234 - DNA, 75 bp, synthetic construct
  source 1..75: mol_type = other DNA
tggctattgcaacggtgattctttgcttatttatgacggggtgtgcacaacgttatgagagtggtcatgatcagc

SEQ ID NO: 297235 - DNA, 75 bp, synthetic construct
  source 1..75: mol_type = other DNA
gcgggagctgaacaagcaccgggatattgttcggcagattgtcgattcatccggtcgtattgtgtcggaaaagtg

SEQ ID NO: 297236 - DNA, 75 bp, synthetic construct
  source 1..75: mol_type = other DNA
atccggatggtctgattttaccatcgctgcatgtggctaaccgcgagctgcgccgggcaaaaggtcaggttcaga

SEQ ID NO: 297237 - DNA, 75 bp, synthetic construct
  source 1..75: mol_type = other DNA
gttaaccagaaatggtggagttctgggttctattacgtcgaatttccctgctgcaagtggaactccgacaataac

SEQ ID NO: 297238 - DNA, 75 bp, synthetic construct
  source 1..75: mol_type = other DNA
aatccagaaatatttctctttttaaaaatacagatcttgtcaatagaaataaaggtatatatctcggtcataaag

SEQ ID NO: 297239 - DNA, 75 bp, synthetic construct
  source 1..75: mol_type = other DNA
tcaggcaactgttaatggaaccgtaattcaattacctaatgttgattccacaacctttgtgcaatcaagcatgct

SEQ ID NO: 297240 - DNA, 75 bp, synthetic construct
  source 1..75: mol_type = other DNA
tagcaatgggctggctggaagtgttttttaatctgttgttctgcgtgctggtaatacgcgcacgcgggaacgtca

SEQ ID NO: 297241 - DNA, 75 bp, synthetic construct
  source 1..75: mol_type = other DNA
caatttcgcccgctgcgcgcaactggcgcgggaggccggatacgatggcgtagaagtgatgggttccgaagggta

SEQ ID NO: 297242 - DNA, 75 bp, synthetic construct
  source 1..75: mol_type = other DNA
atgagctatccgtcactgttcgccccgcttgatttaggcttcaccacattaaagaaccgtgtgctgatgggctca

SEQ ID NO: 297243 - DNA, 75 bp, synthetic construct
  source 1..75: mol_type = other DNA
atcgatcatccgaaggtgttgagttatctggatgtactgcgcgacaaagcgccagtgggcaacaaagtcgccatt

SEQ ID NO: 297244 - DNA, 75 bp, synthetic construct
  source 1..75: mol_type = other DNA
cgtgaacaggggttggatgacgggcgcattatttacgagcaagatttaatcgttgctcgtctgcaacaagatccg

SEQ ID NO: 297245 - DNA, 75 bp, synthetic construct
  source 1..75: mol_type = other DNA
aggcgaatccaccagccagaatatcgctgaattctgcacagaatgggggatcgacagcagcctgcaacaagctgg

SEQ ID NO: 297246 - DNA, 75 bp, synthetic construct
  source 1..75: mol_type = other DNA
tcaacggcgaaacgcaggtattagcagtggacaatgtggtgatctgcggcagggcaagagccaaaccgcgcgctg

SEQ ID NO: 297247 - DNA, 75 bp, synthetic construct
  source 1..75: mol_type = other DNA
ttttaatctgttgttctgcgtactggtaatacgcgcacgcgggaacgtcacaaaaatctttccattgttgaggtg

SEQ ID NO: 297248 - DNA, 75 bp, synthetic construct
  source 1..75: mol_type = other DNA
ttttaacctgctgttttgcgtgctggtgatacgtgcgcgcgggaatgtcacaagaatctttccattgttgaggca

SEQ ID NO: 297249 - DNA, 75 bp, synthetic construct
  source 1..75: mol_type = other DNA
tgaacgtggcgttatgtacggtcatcgtgctgacgctttttttttaccgccgtcgcgattccagacataaaccgc

SEQ ID NO: 297250 - DNA, 75 bp, synthetic construct
  source 1..75: mol_type = other DNA
ttttaatctgctgttctgcgtgctggtgatacgcgcgcgcgggaacgtcacaagaatctttccattgttgaggca

SEQ ID NO: 297251 - DNA, 75 bp, synthetic construct
  source 1..75: mol_type = other DNA
cgtgctgacgctctttttttatcgtcgcggtgagtcgagatataaaccgctgatgtcgtggctggcctggctgtt

SEQ ID NO: 297252 - DNA, 75 bp, synthetic construct
  source 1..75: mol_type = other DNA
gcttaatctgctgttctgcgtgctggtgatacgtgcacgcgggaacgtttcaaaaatcctttcattccggaggtg

SEQ ID NO: 297253 - DNA, 75 bp, synthetic construct
  source 1..75: mol_type = other DNA
aagagaatgaggacggtttccaggatgtgacgggaccggactatattcttgattcattgccacattacggagggt

SEQ ID NO: 297254 - DNA, 75 bp, synthetic construct
  source 1..75: mol_type = other DNA
aatcagtaaaaatactgcggcactgaataatactccagggattgaggatttgaccacaagcgccctgactggcga

SEQ ID NO: 297255 - DNA, 75 bp, synthetic construct
  source 1..75: mol_type = other DNA
caatctgaccgatctgctggaagaggagatcgatccggcgctgggcaatggcggcctggggcgactggctgcgtg

SEQ ID NO: 297256 - DNA, 75 bp, synthetic construct
  source 1..75: mol_type = other DNA
ggataccgacaaaatacagcaggaaccacgtctgccgatgaaaaagagcttttcggcaatgaaaggcaactggcc

SEQ ID NO: 297257 - DNA, 75 bp, synthetic construct
  source 1..75: mol_type = other DNA
gcaccggcgaacatggtggtaacggtgaccaaaccgtccatcgacaataccaacgtcctgatcaacgacccacgt

SEQ ID NO: 297258 - DNA, 75 bp, synthetic construct
  source 1..75: mol_type = other DNA
tggtacaggggaagccgtaccaatggatatgcggacattgttaccgaccagccttgcggctgaattacacggctt

SEQ ID NO: 297259 - DNA, 75 bp, synthetic construct
  source 1..75: mol_type = other DNA
cgcggcgatcctcaataccgcccgctgcggtatgtttagctcggatcgctctattcgcgattatcaggctcgtat

SEQ ID NO: 297260 - DNA, 75 bp, synthetic construct
  source 1..75: mol_type = other DNA
tcgtaccggtattgagatcaatccacaggcgattttcgatattcagatcaaacgtctgcatgagtacaaacgcca

SEQ ID NO: 297261 - DNA, 75 bp, synthetic construct
  source 1..75: mol_type = other DNA
gacatgcagcgacaagttgccagggtgaatccagaagatagcaaatcaaatcgcgccattggtgtggcgctgaac

SEQ ID NO: 297262 - DNA, 75 bp, synthetic construct
  source 1..75: mol_type = other DNA
gctcatccgttcaatctcaccaaatttaatgacggtgacttcctgcgtgccgaacaacaaggcatcaacgctgaa

SEQ ID NO: 297263 - DNA, 75 bp, synthetic construct
  source 1..75: mol_type = other DNA
acgacaaccatactgccggtaaaaagctgcgcttgatgcagcaatacttccagtgtgcctgttcggtagcggata

SEQ ID NO: 297264 - DNA, 75 bp, synthetic construct
  source 1..75: mol_type = other DNA
gtggaacaagtgaaggcaattctggccaaaggctacgacccggtgaaatggcggaagaaagataaggtgctggac

SEQ ID NO: 297265 - DNA, 75 bp, synthetic construct
  source 1..75: mol_type = other DNA
ttgaagaagataaagcattgttgattggtaatggtctgaagctacgtttactggatgaaaacgcctcgccttata

SEQ ID NO: 297266 - DNA, 75 bp, synthetic construct
  source 1..75: mol_type = other DNA
tgctgaagcgcaagggatggtggggaccgcgtgacacgactgacccggtaacgggtgagccggtcaccattcagc

SEQ ID NO: 297267 - DNA, 75 bp, synthetic construct
  source 1..75: mol_type = other DNA
ggcttaccgccgtggccagggacaacttgtcagcatggcgcgtttgcgcgtactgctggacattacctttgaact

SEQ ID NO: 297268 - DNA, 75 bp, synthetic construct
  source 1..75: mol_type = other DNA
gctgcaggcaatagtgtctatttcagtcctcacccgggagccaaaaacgtatcgctgaaactgatcgccataatc

SEQ ID NO: 297269 - DNA, 75 bp, synthetic construct
  source 1..75: mol_type = other DNA
tgataaccgaagatcaagtcagagcactgcaattttctgctggggatgtagcggaaatagagcagactattctct

SEQ ID NO: 297270 - DNA, 75 bp, synthetic construct
  source 1..75: mol_type = other DNA
tgggccaggaactgaaactggtctcagagaaaaccggcgaaatgcggaacgtggccacctttaataccggcacca

SEQ ID NO: 297271 - DNA, 75 bp, synthetic construct
  source 1..75: mol_type = other DNA
cgctgcatggtctggtgctgcgctgggatgacccgttctggcaggcattttacccgccgaacggctggcgctgcc

SEQ ID NO: 297272 - DNA, 75 bp, synthetic construct
  source 1..75: mol_type = other DNA
aaagccgccgaagacatcatcaacggcgcttcattcgattacaacctgccgtgtatcgctgaaaaaagcctgata

SEQ ID NO: 297273 - DNA, 75 bp, synthetic construct
  source 1..75: mol_type = other DNA
atggttacgctttggggaaattatgaggggatctctcagcacacaatgtcgaaaacattcagtattaagacgaca

SEQ ID NO: 297274 - DNA, 75 bp, synthetic construct
  source 1..75: mol_type = other DNA
aaacattcagtattaagacgacaaaatcacaaaatgaccaatgcaccgacggatttaaagtcagttcctcctttt

SEQ ID NO: 297275 - DNA, 75 bp, synthetic construct
  source 1..75: mol_type = other DNA
caccaaccggagaaggggcaacgtcagcacggacttttgcccgctcacgacgctgtgtattaaccagcggctttt

SEQ ID NO: 297276 - DNA, 75 bp, synthetic construct
  source 1..75: mol_type = other DNA
ccaggcctttttacgttttcaacagtgtccgcttaaaacccgtagcgccattatcagcgccattcgcgaagaatt

SEQ ID NO: 297277 - DNA, 75 bp, synthetic construct
  source 1..75: mol_type = other DNA
taccgcagaaaatgccacgattactgattgccgttgttgacgccgatgataactgggttacctgtgaacaactga

SEQ ID NO: 297278 - DNA, 75 bp, synthetic construct
  source 1..75: mol_type = other DNA
gcccgggtcacgtacaaattttcaaccaggggctgaagtcttatcgcgatctgccgctgcgtatggccgagtttg

SEQ ID NO: 297279 - DNA, 75 bp, synthetic construct
  source 1..75: mol_type = other DNA
tcaatcagccattttatctggttttcgctcgctgtactgaccggttgtattctgctggcatcaggcatcgcaatt

SEQ ID NO: 297280 - DNA, 75 bp, synthetic construct
  source 1..75: mol_type = other DNA
ttgatcttcataatggccatcagaccaccatgacattaagcattggttacgcgggtaatgactccaacttactga

SEQ ID NO: 297281 - DNA, 75 bp, synthetic construct
  source 1..75: mol_type = other DNA
acgggcgatcgtgtcttgattgaggtagcaaaacggttagctgaatttggcgggctgcaacataaagcataccgc

SEQ ID NO: 297282 - DNA, 75 bp, synthetic construct
  source 1..75: mol_type = other DNA
caacacggttaatggaatttagcgggaaacggcatcaagcgtaccgtataggaggcgatgagttcgctatgattc

SEQ ID NO: 297283 - DNA, 75 bp, synthetic construct
  source 1..75: mol_type = other DNA
aacctggcgctcaccgcagcaaccatgacttatagtctggaagcagcggtcgtttttgccgatggttcggcagcg

SEQ ID NO: 297284 - DNA, 75 bp, synthetic construct
  source 1..75: mol_type = other DNA
tcagaactgtcccaggccgaagcagagaaggttcttggattcctgaaacagaaagccacggagcagaaggtggca

SEQ ID NO: 297285 - DNA, 75 bp, synthetic construct
  source 1..75: mol_type = other DNA
gagcgcattgtcgaaaataccgcatacactgcagaacgtcagccggaacgcgacatcactccggtattagacgtc

SEQ ID NO: 297286 - DNA, 75 bp, synthetic construct
  source 1..75: mol_type = other DNA
ccggtttaatcggctttgaggttgctcggagcgaaggctcaaatgacttgctacccagtgtgctgatgcgtactg

SEQ ID NO: 297287 - DNA, 75 bp, synthetic construct
  source 1..75: mol_type = other DNA
aatgaatcgtgtacatgccggatttaccgcaaagaccgcaatcatccgatctgcgttaccgactggatggatgaa

SEQ ID NO: 297288 - DNA, 75 bp, synthetic construct
  source 1..75: mol_type = other DNA
aatgaatcttgtacatgccggatttaccgcaatgaccgcaatcatccgatctgcgttaccgactggatggatgaa

SEQ ID NO: 297289 - DNA, 75 bp, synthetic construct
  source 1..75: mol_type = other DNA
gcgcaggagccagcggcatttcatgttgatttactggcggcgcactaccgccatgatgcaggtttacttggggct

SEQ ID NO: 297290 - DNA, 75 bp, synthetic construct
  source 1..75: mol_type = other DNA
cagcatgggcggagtatcaggcgctggaaggcgatataaccgagatggtgtttatcaccgtttccactggcgtcg

SEQ ID NO: 297291 - DNA, 75 bp, synthetic construct
  source 1..75: mol_type = other DNA
gtcgttacactgctaaagagtggggcaatgacgaaaccacaatagaagtcttcattggctacaagttgctccggg

SEQ ID NO: 297292 - DNA, 75 bp, synthetic construct
  source 1..75: mol_type = other DNA
ctgctttggtgtgaagattgaaaatgagggaagcgatacctctataccatctgaaagcccactttcttcaggtgc

SEQ ID NO: 297293 - DNA, 75 bp, synthetic construct
  source 1..75: mol_type = other DNA
tggcgcggatgcgaaaaccattttcacgcgcgccggacagggcgacgagcaggcgcagcaactgattcatcgctc

SEQ ID NO: 297294 - DNA, 75 bp, synthetic construct
  source 1..75: mol_type = other DNA
tacctcgacagcctgccagcctccgaacgcagccgcgcacaacgcgcggcttttctggctggactggctcttata

SEQ ID NO: 297295 - DNA, 75 bp, synthetic construct
  source 1..75: mol_type = other DNA
tattcccagaataatctgataattgtatgtgaactaataaaatacattgtcatacgagtcacctgtactccctgt

SEQ ID NO: 297296 - DNA, 75 bp, synthetic construct
  source 1..75: mol_type = other DNA
aaggaaacataccaggataatccgcctagcggaattgaatgcaatttttataaaataaaaaagaatattcagacc

SEQ ID NO: 297297 - DNA, 75 bp, synthetic construct
  source 1..75: mol_type = other DNA
agatgggggcagcaagtctttcggtaccacaacagcaggtacagtttgatgctcccggaatgctggctgaaacgg

SEQ ID NO: 297298 - DNA, 75 bp, synthetic construct
  source 1..75: mol_type = other DNA
gtttctatctgaagcctgcggccgtcaagaacgaaagcgaagcatgcgcctggctggacagccttacaccagaag

SEQ ID NO: 297299 - DNA, 75 bp, synthetic construct
  source 1..75: mol_type = other DNA
gatttccctatgtttaccactcctggtcaatgggatttcctgttaaaactaccgtatgaatttatcattacgcaa

SEQ ID NO: 297300 - DNA, 75 bp, synthetic construct
  source 1..75: mol_type = other DNA
cgcccgttacgctaccgatgataataatcatgaaggcgcgctgaacgtgattcaggctgtgctggataacacatc

SEQ ID NO: 297301 - DNA, 75 bp, synthetic construct
  source 1..75: mol_type = other DNA
atggatttcgacacaatcatggaaaaggcttacgaagaatacttcgatggtcttgccgaaggcgaagaaactctc

SEQ ID NO: 297302 - DNA, 75 bp, synthetic construct
  source 1..75: mol_type = other DNA
ttaaaacttggcgcatcgcttgatggtcgcacggcgatggcgagcggcgaaagccagtggatcacttcgcctcag

SEQ ID NO: 297303 - DNA, 75 bp, synthetic construct
  source 1..75: mol_type = other DNA
acggcgatttaagtgccgatatccgacagcttgagaacgcgctggcacgctgtgccagccaggtaaaaatgatta

SEQ ID NO: 297304 - DNA, 75 bp, synthetic construct
  source 1..75: mol_type = other DNA
gctataactgggcctatgagacggaacccgaaccgtttatgaacaaccgccgcatggagtgcggacgcggcaaag

SEQ ID NO: 297305 - DNA, 75 bp, synthetic construct
  source 1..75: mol_type = other DNA
agcgctcgatggcattatgaaacccgtcaccagtggttttggctttatcgacctgattattcccggtctacataa

SEQ ID NO: 297306 - DNA, 75 bp, synthetic construct
  source 1..75: mol_type = other DNA
actgaagcacgcaaggagggcgcttactttgtggcgaacagaatgctggctgcctgggaagctggttttattgat

SEQ ID NO: 297307 - DNA, 75 bp, synthetic construct
  source 1..75: mol_type = other DNA
tggctggcactccacggaagcaaaatcagccgaacaggcacttcgttccggcgacgttgaagcgttaattaacat

SEQ ID NO: 297308 - DNA, 75 bp, synthetic construct
  source 1..75: mol_type = other DNA
aaatggcggtatcgtgctggcaacaaattgttgcggctgattttcattacaccggggtggaatatctgttaagtg

SEQ ID NO: 297309 - DNA, 75 bp, synthetic construct
  source 1..75: mol_type = other DNA
taccttatcgcgcaaatgccgcgcgaaatggcggtatcgtgctggcaacaaattgttgcggctgattttcattac

SEQ ID NO: 297310 - DNA, 75 bp, synthetic construct
  source 1..75: mol_type = other DNA
tgcatttcgcgtagcggcagaaggggaattctgtaatgcccaggacgatgttattgatctacctccagattgcct

SEQ ID NO: 297311 - DNA, 75 bp, synthetic construct
  source 1..75: mol_type = other DNA
aacagcctgactcgctgggaaggtaaatccgctaccgttggtcaacttatgggaatgcgatacaaaggctgggag

SEQ ID NO: 297312 - DNA, 75 bp, synthetic construct
  source 1..75: mol_type = other DNA
ctggaaattatcggcgaaatgctgcgctttacccagggcggacgtttttatagcggactggaacagctgaaaacg

SEQ ID NO: 297313 - DNA, 75 bp, synthetic construct
  source 1..75: mol_type = other DNA
tggtgaatcgtattttgtccaacaaccacagccatcgtcgcgatatgaatgtaacgatcgttgttcattcgcctg

SEQ ID NO: 297314 - DNA, 75 bp, synthetic construct
  source 1..75: mol_type = other DNA
ttaactataccgcaagccgtcttgctgctactttcaatcacggatttatcaataagtctttacgtgaagttttcg

SEQ ID NO: 297315 - DNA, 75 bp, synthetic construct
  source 1..75: mol_type = other DNA
agcggaggccaagtgcgcggcgctggcagcggagaatgcgggaataaagtctgcaattccagaatcacgggatat

SEQ ID NO: 297316 - DNA, 75 bp, synthetic construct
  source 1..75: mol_type = other DNA
tactggagccaggatatatttagcgatcgcgaagccagctacatgtcgcatgaaaaccacttcggctacgcggcc

SEQ ID NO: 297317 - DNA, 75 bp, synthetic construct
  source 1..75: mol_type = other DNA
tcaattatcaggcaaaacagactgaaaataaacactaccgggaagaggccgccagcgcattactggcacaagata

SEQ ID NO: 297318 - DNA, 75 bp, synthetic construct
  source 1..75: mol_type = other DNA
cgagtcagccagtaatagtttgaatcgctgggaaggtaaatctgctaccgttgggcaacttatgggaatgcgata

SEQ ID NO: 297319 - DNA, 75 bp, synthetic construct
  source 1..75: mol_type = other DNA
agctgatgcgccccaatttaaattcaaagagatacgacatgtaggcccggatgtttgcctgcatttagtgggcgc

SEQ ID NO: 297320 - DNA, 75 bp, synthetic construct
  source 1..75: mol_type = other DNA
cgagccggataaactggcgattgaagcgcgcaaaaccggttttgatgaaatttatctgccatttcgcgccgacca

SEQ ID NO: 297321 - DNA, 75 bp, synthetic construct
  source 1..75: mol_type = other DNA
cggaagagccgtttatcaatacagccgggctaaatgtcgttgtactgggcggcggcgacaccgcgatggactgtg

SEQ ID NO: 297322 - DNA, 75 bp, synthetic construct
  source 1..75: mol_type = other DNA
gtggacaagcgggtggcgattatcggtgcgggtccggcagggctggcctgtgcggatgttctgacccgcaatggc

SEQ ID NO: 297323 - DNA, 75 bp, synthetic construct
  source 1..75: mol_type = other DNA
gccagcgacgtttcgctcgtctgcaatcccgtatacaaagccccgaactgaacgtccgtctgtctaaatggtggg

SEQ ID NO: 297324 - DNA, 75 bp, synthetic construct
  source 1..75: mol_type = other DNA
ggcgcataaatgcgacctttgtgcagggcgcaaaaacggtcctgcctgtgtcgaaaactgcccggcggacgcgct

SEQ ID NO: 297325 - DNA, 75 bp, synthetic construct
  source 1..75: mol_type = other DNA
ccgtcgagctttctcaccagaccaacaccctgccggaaattaccggacgcgtttgtccgcaagaccgtttgtgtg

SEQ ID NO: 297326 - DNA, 75 bp, synthetic construct
  source 1..75: mol_type = other DNA
agcaaatgcaggcaacgcccgcgcgcggcgagccggataaactggcaattgaagcgcgcaaaaccggctttgatg

SEQ ID NO: 297327 - DNA, 75 bp, synthetic construct
  source 1..75: mol_type = other DNA
gcgtttgtgaatggacctgcccgctgcataaccatattccgcagtggattgaactggtgaaagccggaaacatcg

SEQ ID NO: 297328 - DNA, 75 bp, synthetic construct
  source 1..75: mol_type = other DNA
atgagcgtgacaacggctgaactggcgtactgcatgacgcttcccccgaagcgggcaatcaactacctgaagtcc

SEQ ID NO: 297329 - DNA, 75 bp, synthetic construct
  source 1..75: mol_type = other DNA
cgtgatgaagccaacatgccgggctcgaaaaaagaggtgaaaaatgcgcgtgaagaaggggccaactttgagttt

SEQ ID NO: 297330 - DNA, 75 bp, synthetic construct
  source 1..75: mol_type = other DNA
aacaaaaatgtatcggttgtaaatcctgtgtcgtagcttgcccgtttggcactatgcaaatcgtactgacgcccg

SEQ ID NO: 297331 - DNA, 75 bp, synthetic construct
  source 1..75: mol_type = other DNA
atgaatcgttttattatggccaacagtcagcaatgtctggggtgtcatgcttgtgaaatcgcctgtgtcatggct

SEQ ID NO: 297332 - DNA, 75 bp, synthetic construct
  source 1..75: mol_type = other DNA
aaaaaatcaggaaatccaattggtgatggctctgccataatgccgctgaaaaccgtcactgatggtctttactgg

SEQ ID NO: 297333 - DNA, 75 bp, synthetic construct
  source 1..75: mol_type = other DNA
cgcgacacgtctgactgaagatccgaacactaccgtgctgctgcttgaagcgggcggcccggactatcgctttga

SEQ ID NO: 297334 - DNA, 75 bp, synthetic construct
  source 1..75: mol_type = other DNA
ttgcaatttgactacatcattattggcgccggctctgccggcaacgtcctcgcgacacgtctgactgaagatccg

SEQ ID NO: 297335 - DNA, 75 bp, synthetic construct
  source 1..75: mol_type = other DNA
gtgaaaacgactatcacggcggtgatggcccggtgagcgtcactacctccaaacccggcgtcaatccgctgtttg

SEQ ID NO: 297336 - DNA, 75 bp, synthetic construct
  source 1..75: mol_type = other DNA
gcgcaccggctttccttatattcagttaaaacttggcgcatcgcttgatggccgcacggcgatggcgagcggcga

SEQ ID NO: 297337 - DNA, 75 bp, synthetic construct
  source 1..75: mol_type = other DNA
aattgaataaaggctttctcaagcggatgcgcaccggctttccttatattcagttaaaacttggcgcatcgcttg

SEQ ID NO: 297338 - DNA, 75 bp, synthetic construct
  source 1..75: mol_type = other DNA
aagaagcgttgccgaggagcacggcaagatattttgtggcaaatgggatgccggtgagagcgaaaaaaatgagtc

SEQ ID NO: 297339 - DNA, 75 bp, synthetic construct
  source 1..75: mol_type = other DNA
aatccgtaaaaaccttgatttgatctgcgcgaacgatgtttcacagccaactcaaggatttaatagcgacagtaa

SEQ ID NO: 297340 - DNA, 75 bp, synthetic construct
  source 1..75: mol_type = other DNA
tatgattaccgccggcccgacgcgtgaaccgctcgatccggtgcgttatatctctaatcacagctccggcaagat

SEQ ID NO: 297341 - DNA, 75 bp, synthetic construct
  source 1..75: mol_type = other DNA
tctggctctgccggacttgacctgcgtgcctgtctcgacgacgccgtagaactggctccgggtgacactacgctg

SEQ ID NO: 297342 - DNA, 75 bp, synthetic construct
  source 1..75: mol_type = other DNA
cgcatggagtgcggacgcggtaaaggcctgggtggatcgtcgctgatcaacggcatgtgctacatccgtggcaat

SEQ ID NO: 297343 - DNA, 75 bp, synthetic construct
  source 1..75: mol_type = other DNA
aaagcaaaacgtttaaaaccgaatctggagcgcgtcgctggctggaaagaaattcaggtgggtgatatggatttc

SEQ ID NO: 297344 - DNA, 75 bp, synthetic construct
  source 1..75: mol_type = other DNA
gtgtgaaagttgtaaacagcaaagaagacatccgtgcttttgcagagaactggctgggcaagcgtctggtaacgt

SEQ ID NO: 297345 - DNA, 75 bp, synthetic construct
  source 1..75: mol_type = other DNA
atacaactgattaagcgtctgcagaaattcgtaccggatgccttacccgtggtgcgtaaagccagctggcactgc

SEQ ID NO: 297346 - DNA, 75 bp, synthetic construct
  source 1..75: mol_type = other DNA
ttgacggtaatggtcgtctgaccggtgcccatactgcgcagaccgccccttacgatcgttatacctgccacctct

SEQ ID NO: 297347 - DNA, 75 bp, synthetic construct
  source 1..75: mol_type = other DNA
cgaaccttgtccagtcgttcttcgtgtttgtgaatgagctgtttgccgaaaacaaaagctggaacggtttctggc

SEQ ID NO: 297348 - DNA, 75 bp, synthetic construct
  source 1..75: mol_type = other DNA
tttgaacacaccgacgaagagctgactgaacacgctcagcagtgtccttacgtcaggccagatcgcagggaagtg

SEQ ID NO: 297349 - DNA, 75 bp, synthetic construct
  source 1..75: mol_type = other DNA
gcggcagtgcactcagataccatccgcaatacgacactgaacgcccctggtttgaacacaccgacgaagagctga

SEQ ID NO: 297350 - DNA, 75 bp, synthetic construct
  source 1..75: mol_type = other DNA
gcgtaaaaccagctggcactgcagacaatgtcaccacgattattatggggagcagtactgcacacactgtcatac

SEQ ID NO: 297351 - DNA, 75 bp, synthetic construct
  source 1..75: mol_type = other DNA
gttacccaacccgcccgctatgacggtgaatgtcaggtggttaatgccaatgcagagcggattaagaacctgacc

SEQ ID NO: 297352 - DNA, 75 bp, synthetic construct
  source 1..75: mol_type = other DNA
ttatctcagtgaaattccgggcgttgatgccattatgtttggtcatgcccatgccgtcttcccgggcaaagattt

SEQ ID NO: 297353 - DNA, 75 bp, synthetic construct
  source 1..75: mol_type = other DNA
atgattaagtttagcgcaacgctcctggccacgctgattgctgccagcgtgaatgcggcaacagtcgatctacgc

SEQ ID NO: 297354 - DNA, 75 bp, synthetic construct
  source 1..75: mol_type = other DNA
tgcgtttattaaagagaaagggcaatatccgatgaataaagtcgcgaccgatgatatcgggtttgcgatttatca

SEQ ID NO: 297355 - DNA, 75 bp, synthetic construct
  source 1..75: mol_type = other DNA
gctgaagagtcgaagcgtgcgggggaaattcacccggcggcagataacaactggcgtttggcaccgatccccggc

SEQ ID NO: 297356 - DNA, 75 bp, synthetic construct
  source 1..75: mol_type = other DNA
ccggtactctctgctgctgcaccgtttaaagttggcggtcgcaaaaatgaccctgccagctatgttgaagtggaa

SEQ ID NO: 297357 - DNA, 75 bp, synthetic construct
  source 1..75: mol_type = other DNA
caatgtcaccacgattattatggggagcagtactgtacacgctgtcagaccgggcgcttcagtgaggaggctgtg

SEQ ID NO: 297358 - DNA, 75 bp, synthetic construct
  source 1..75: mol_type = other DNA
acctggcgatggccatcctggaatcgcgccttaaaaccacgtctttctcattcaccagccccgatgccgttaagc

SEQ ID NO: 297359 - DNA, 75 bp, synthetic construct
  source 1..75: mol_type = other DNA
tgttgagaagtagccggccatctggtctggctcaggtaattatggaagtgggccgggtcaacaagactctgtatc

SEQ ID NO: 297360 - DNA, 75 bp, synthetic construct
  source 1..75: mol_type = other DNA
atgtacgcaaaatcctttctcgctcttgatggcaacgggcgtctgaccggtgcccgtactgcacagactgcgcca

SEQ ID NO: 297361 - DNA, 75 bp, synthetic construct
  source 1..75: mol_type = other DNA
gcatgtcaacggcttaaccatcctgttccggaagtgggaaaaaagatgctcaaagagatgatgcgccgcatgtgg

SEQ ID NO: 297362 - DNA, 75 bp, synthetic construct
  source 1..75: mol_type = other DNA
gagcaagcggaatcctcagtggtacgagaaagacaccaacagactgtttgcacgacttcgttgggttcggcgcat

SEQ ID NO: 297363 - DNA, 75 bp, synthetic construct
  source 1..75: mol_type = other DNA
acagcgaacctgggtaacggcgtcgcagctatcacctataaagctcagccgattctgattcaaccaggtcagact

SEQ ID NO: 297364 - DNA, 75 bp, synthetic construct
  source 1..75: mol_type = other DNA
tcgtcccggatgccttacccgtagtacgtaaagccagctggcactgcaggcaatgtcaccacgattattatgggg

SEQ ID NO: 297365 - DNA, 75 bp, synthetic construct
  source 1..75: mol_type = other DNA
tacgatagctacacctgccacctttgcggcagtgcactcagataccacccgcaatacgacactgaacggccctgg

SEQ ID NO: 297366 - DNA, 75 bp, synthetic construct
  source 1..75: mol_type = other DNA
tttgaacacactggcgaagggctggctgagcacggtcatgagtgcctttatgtcagaccggagcgcagagaaata

SEQ ID NO: 297367 - DNA, 75 bp, synthetic construct
  source 1..75: mol_type = other DNA
atgtacgcaaaatccttcaaggcgcttgacggtaatggtcgtctgattggtgcacgtaccgcgcagaccgcccct

SEQ ID NO: 297368 - DNA, 75 bp, synthetic construct
  source 1..75: mol_type = other DNA
atgtacgcaaaatcctttcttgcacttgatggcaacgggcgtctgacgggtgcccgtaccgcacagactgcacct

SEQ ID NO: 297369 - DNA, 75 bp, synthetic construct
  source 1..75: mol_type = other DNA
tacgatcgctacacctgtcacctttgcggcagtgcgctcagataccacccgcaatacgacactgaacgtccctgg

SEQ ID NO: 297370 - DNA, 75 bp, synthetic construct
  source 1..75: mol_type = other DNA
tataaggcgctgaatacgctggattatacggtcggtacactcggcaatcatgaatttaactacggtctggattac

SEQ ID NO: 297371 - DNA, 75 bp, synthetic construct
  source 1..75: mol_type = other DNA
gaagtagagaaactggttgaagaagcacacaaggttagccaagatttttggtcaaatgcaaaatttgacaagaat

SEQ ID NO: 297372 - DNA, 75 bp, synthetic construct
  source 1..75: mol_type = other DNA
gggaatcacctgaagatggtccgctttgccgtggaaaataaaacgctgtctgccctgaatatccgggaaagtgat

SEQ ID NO: 297373 - DNA, 75 bp, synthetic construct
  source 1..75: mol_type = other DNA
gaagaagccggcgcgtgggaaacgtccacgccttacgaatccctgcttgtgaccatcagccaggccaacggagat

SEQ ID NO: 297374 - DNA, 75 bp, synthetic construct
  source 1..75: mol_type = other DNA
gcaatacgacaccgaactgccctggtttgaacacactgacgacgggctgaccgagcacggtcaacagtgtcctta

SEQ ID NO: 297375 - DNA, 75 bp, synthetic construct
  source 1..75: mol_type = other DNA
cttccctggtttgaacacactgacgacgggctgactgagcacggtcaacagtgcccttatgtcagaccggagcgc

SEQ ID NO: 297376 - DNA, 75 bp, synthetic construct
  source 1..75: mol_type = other DNA
gcgtaaaaccagctggcactgcagacaatgcctgcacgattattatggggaacgctattgtacacactgtcatac

SEQ ID NO: 297377 - DNA, 75 bp, synthetic construct
  source 1..75: mol_type = other DNA
agttcattcttatctggctggtgtttgtgattatggtcttccggttatttcatcggtcagatacgctggtggtga

SEQ ID NO: 297378 - DNA, 75 bp, synthetic construct
  source 1..75: mol_type = other DNA
atatttttgcgaaggttataaaattcttttttcaacaatggtgccttatttgaatgccattgtagagttagctaa

SEQ ID NO: 297379 - DNA, 75 bp, synthetic construct
  source 1..75: mol_type = other DNA
gaatggtgtgcctttctcaaagaacatgagtttctggttggtatctcgatcgatggaccccaggagctacatgac

SEQ ID NO: 297380 - DNA, 75 bp, synthetic construct
  source 1..75: mol_type = other DNA
catggtttccgtgaagggtggcttgctggtaacgaagattcagggaccgagctcagtcgtcaacaacatgatgca

SEQ ID NO: 297381 - DNA, 75 bp, synthetic construct
  source 1..75: mol_type = other DNA
atcacctgaagatggtccgctttgccgtggaaaataaaacgctgtctgccctgaatatccgggaaagtgacttct

SEQ ID NO: 297382 - DNA, 75 bp, synthetic construct
  source 1..75: mol_type = other DNA
atggctgaaaaattatccacctggaagttcatccttatctggctggtgtttgtgattatggcccccggttatttc

SEQ ID NO: 297383 - DNA, 75 bp, synthetic construct
  source 1..75: mol_type = other DNA
aggtgcctgtgacaaaggaaaccctgcaggccccggcggggctgtcttcagtggcagattccgtatggacgggga

SEQ ID NO: 297384 - DNA, 75 bp, synthetic construct
  source 1..75: mol_type = other DNA
tgcccgtaccgcacagactgctccttatgcccactacacctgccacctttgcggcagtgcactcagataccaccc

SEQ ID NO: 297385 - DNA, 75 bp, synthetic construct
  source 1..75: mol_type = other DNA
cgtttgattaaacgtctgcagcaattcgtaccggatgccttacccgtagtacgtaaagccagctggtactgcaga

SEQ ID NO: 297386 - DNA, 75 bp, synthetic construct
  source 1..75: mol_type = other DNA
caatgtcaccacgattattatggggagccgtactgcacacactgccagaccgggcgtttcagtgaggagggggta

SEQ ID NO: 297387 - DNA, 75 bp, synthetic construct
  source 1..75: mol_type = other DNA
tccggcaagctatgtggaggtggaaaaaggccagttgaccttccgtaatgcgccgatctttatctctaccccaat

SEQ ID NO: 297388 - DNA, 75 bp, synthetic construct
  source 1..75: mol_type = other DNA
atgtacgcaaaatcctttctcgctcttgatagcaacggacgtctgacgggcgcccgtactgtacaggccgcacct

SEQ ID NO: 297389 - DNA, 75 bp, synthetic construct
  source 1..75: mol_type = other DNA
atgtacgcaaaatcctttatcgctcttgatcgcaacggacgtctgacgggcgcccgtactgtacaggccgcacct

SEQ ID NO: 297390 - DNA, 75 bp, synthetic construct
  source 1..75: mol_type = other DNA
cgcttgattaatcgtctgcagcaattcgttccggatgccttacccgtggtacgtaaagccagctggcactgcaga

SEQ ID NO: 297391 - DNA, 75 bp, synthetic construct
  source 1..75: mol_type = other DNA
ttctcgacccgctgaacactgccggaagcatcgtcctgaaccaggatccgaacgcgcaggactttcagaaggtcg

SEQ ID NO: 297392 - DNA, 75 bp, synthetic construct
  source 1..75: mol_type = other DNA
gatggcgatccgcaggtgttgatcaagaacccgccgagccagcgcttgcaggaatttttgcagcacgtctcttaa

SEQ ID NO: 297393 - DNA, 75 bp, synthetic construct
  source 1..75: mol_type = other DNA
caatgtcaccacgattattatggggagctgtactgcacacactgccagaccgggcgcttcagtgaggagggggta

SEQ ID NO: 297394 - DNA, 75 bp, synthetic construct
  source 1..75: mol_type = other DNA
cgcttgatttatcgtctgcagcaattcgttccggatgccttacccgtggtccgtaaagccagctggcactgcagt

SEQ ID NO: 297395 - DNA, 75 bp, synthetic construct
  source 1..75: mol_type = other DNA
cgcttgatttatcgtctgcagcaattcgttccggatgccttacccgtggttcgtaaagccagctggcactgcagc

SEQ ID NO: 297396 - DNA, 75 bp, synthetic construct
  source 1..75: mol_type = other DNA
cgatggtagcgattggtatcgtggttggcgcaggtgcggcagcgaagctggttacgctggaaaccgtgtcacgct

SEQ ID NO: 297397 - DNA, 75 bp, synthetic construct
  source 1..75: mol_type = other DNA
gggacacgttcagagctggcgcgtcttaaggagctggtcccgctgattgatgttccggcgcagggtgttgtggtg

SEQ ID NO: 297398 - DNA, 75 bp, synthetic construct
  source 1..75: mol_type = other DNA
acgaaacggcgttgaccattaccgctcgtttaaacccgtggctgcgccggaaaaaatggtgtcatgggtatatac

SEQ ID NO: 297399 - DNA, 75 bp, synthetic construct
  source 1..75: mol_type = other DNA
aaagggcatcatagtggtatgccatactgggcaaaggggagtaccacagaaatgcgtcccaaaaatattgcattc

SEQ ID NO: 297400 - DNA, 75 bp, synthetic construct
  source 1..75: mol_type = other DNA
ttcctaaactggcggcggcgcgtccggggcagtcctggaatctcatcaacatgacccgcagtttcctgaatgcct

SEQ ID NO: 297401 - DNA, 75 bp, synthetic construct
  source 1..75: mol_type = other DNA
atgcgatggtcgcgataggtattgtggtcggtgcaggcgcggcggcaaaactggttacgctggaaaccgtttcgc

SEQ ID NO: 297402 - DNA, 75 bp, synthetic construct
  source 1..75: mol_type = other DNA
aatggatgaaaaggaaccactgacaatcgatcctgcagattcctctgtattaaccggggaatacagtgtaatcga

SEQ ID NO: 297403 - DNA, 75 bp, synthetic construct
  source 1..75: mol_type = other DNA
agcgcggagcaaatgtatcagttagtgaatgacgttcagtcttatcctcagtttttgccgggttgtaccggaagt

SEQ ID NO: 297404 - DNA, 75 bp, synthetic construct
  source 1..75: mol_type = other DNA
ggagttataccgttcggaaagcctgctaacgctgtggcagcatcacagtctgagtattctcaggagaaatacaaa

SEQ ID NO: 297405 - DNA, 75 bp, synthetic construct
  source 1..75: mol_type = other DNA
cagcgatacaactggcacaggaagatattttcaggcgtcagtatgcgttgccgcctgagcttgccagtgataccc

SEQ ID NO: 297406 - DNA, 75 bp, synthetic construct
  source 1..75: mol_type = other DNA
ctttcttcctggtggcctgcgacgcttcgcatgacgttgattggtacaaaaagcatgacaaagagcgcaaggcaa

SEQ ID NO: 297407 - DNA, 75 bp, synthetic construct
  source 1..75: mol_type = other DNA
tgaaaaggaaccactgacaatcgatcctgcagattcctctgtattaaccggggaatacagtgaggtgtactggca

SEQ ID NO: 297408 - DNA, 75 bp, synthetic construct
  source 1..75: mol_type = other DNA
atgttcccggtatcctcagcttgcccgtgcttatcccgggtgtaagctgccggatttgcgcggtgtttttatccg

SEQ ID NO: 297409 - DNA, 75 bp, synthetic construct
  source 1..75: mol_type = other DNA
ctgaagcaggcggcgttcgctacgacaccaaagctgatggctctatcgactacagcaacatcactctcggtggtg

SEQ ID NO: 297410 - DNA, 75 bp, synthetic construct
  source 1..75: mol_type = other DNA
ctgtggggtataacactgttgccaaaggcgatagcagcgtggccatcggtcagggcagctacagcggcgttgata

SEQ ID NO: 297411 - DNA, 75 bp, synthetic construct
  source 1..75: mol_type = other DNA
cgtcagatcaccaacgtcgcagcggggtcggcggataccgatgcggttaacgtgggtcagttgaaagtaacggac

SEQ ID NO: 297412 - DNA, 75 bp, synthetic construct
  source 1..75: mol_type = other DNA
ttgctttaggtgtgtcgatggtgagcgccaatggtcgttgggtctacaaattacaaggtagtaccaatagccagg

SEQ ID NO: 297413 - DNA, 75 bp, synthetic construct
  source 1..75: mol_type = other DNA
cagtcggtgaagactcgctggcaatgggcgcgaaaaccatcgttaatggtaatgcgggtattggtatcggcctga

SEQ ID NO: 297414 - DNA, 75 bp, synthetic construct
  source 1..75: mol_type = other DNA
gcagcactgacgccgttaacggctcacagctcaaaaccaccaacgacaacgtgacgaccaacaccaccaacatcg

SEQ ID NO: 297415 - DNA, 75 bp, synthetic construct
  source 1..75: mol_type = other DNA
cgccgctcacggtaccgatgccaccagcaaaatcaccaacgtcaaagacggtgacctgacggctggcagcactga

SEQ ID NO: 297416 - DNA, 75 bp, synthetic construct
  source 1..75: mol_type = other DNA
gcaagtgcagataattacactgggcagccaactgattatggcgatggctcagcaggtgacggctgggttgctatc

SEQ ID NO: 297417 - DNA, 75 bp, synthetic construct
  source 1..75: mol_type = other DNA
gcgattggttctggttccattgctgccgcggataacagcgtcgcactgggtacagggtctgtggcaaccgaagaa

SEQ ID NO: 297418 - DNA, 75 bp, synthetic construct
  source 1..75: mol_type = other DNA
aatcatcaatcagcttgccggtaacaccagcgaaacctacatcgaagataacggtgcgggcattaactatgtacg

SEQ ID NO: 297419 - DNA, 75 bp, synthetic construct
  source 1..75: mol_type = other DNA
tgccgagtacaacaacgtcggtgacgccctggatgcgctcgacgataacgctctgctgtgggatgcaacagccaa

SEQ ID NO: 297420 - DNA, 75 bp, synthetic construct
  source 1..75: mol_type = other DNA
ctgcgccgacttacaccattgcaaatgccgagtacaacaacgtcggtgacgccctggatgcgctcgacgataacg

SEQ ID NO: 297421 - DNA, 75 bp, synthetic construct
  source 1..75: mol_type = other DNA
ttctcaaacaggtgatggttaataccggagggaacaaagagcaggtccccgcaaaacgtcaaaaccgcggctccc

SEQ ID NO: 297422 - DNA, 75 bp, synthetic construct
  source 1..75: mol_type = other DNA
caaagtgtgacgaacgttcgttccgatagcttgcctcaggagctgaagaatcgtttatcttcgttgttattgatg

SEQ ID NO: 297423 - DNA, 75 bp, synthetic construct
  source 1..75: mol_type = other DNA
cgtcttacgacgaactgaaaaaaatgggtatctataagcgtaaagatcccaatggtcattttgtcgcctacaaag

SEQ ID NO: 297424 - DNA, 75 bp, synthetic construct
  source 1..75: mol_type = other DNA
aaggctgggactcccctgaacgtagtaccttcccactgcaactgtttggtttccattacaaatcccgtactcact

SEQ ID NO: 297425 - DNA, 75 bp, synthetic construct
  source 1..75: mol_type = other DNA
atgcctctgcggtgtcggattttgaactgcggtcgccggcggaaggcacaccggcccgctggcaggcagggctga

SEQ ID NO: 297426 - DNA, 75 bp, synthetic construct
  source 1..75: mol_type = other DNA
tgagctgcgtctgccggcagagggtacacctgcggcatggcaggcggggctgaatgtgacagtcacggtacagtg

SEQ ID NO: 297427 - DNA, 75 bp, synthetic construct
  source 1..75: mol_type = other DNA
ggatgtcgctggtcggcggacagagcgtgacggatgtacagtcaggaacgttgccacagtggcttaaaacccgcc

SEQ ID NO: 297428 - DNA, 75 bp, synthetic construct
  source 1..75: mol_type = other DNA
aacactcttattcgcatggggttcacatgggacggtggagcttactggcaagcacctcaacccattttatccggc

SEQ ID NO: 297429 - DNA, 75 bp, synthetic construct
  source 1..75: mol_type = other DNA
atagcgtatggcattatgcgatctgattttgccgtactgatcgccaatattgtcacactgtttctggctgcacca

SEQ ID NO: 297430 - DNA, 75 bp, synthetic construct
  source 1..75: mol_type = other DNA
tgctgattgatgatgatgctgacgtgctggacgcctacacacagttacttgaacagtcaggctatcgggtttttg

SEQ ID NO: 297431 - DNA, 75 bp, synthetic construct
  source 1..75: mol_type = other DNA
taacgtactgaccactcaacgtccgtctcctctcgctaaggggaatccgtcacatacaaaccttgttcaggttga

SEQ ID NO: 297432 - DNA, 75 bp, synthetic construct
  source 1..75: mol_type = other DNA
catttcgtgacgaccccgaggcaaatccacttaaaacgccttccgggaagattgaaatttattccagcaagctgg

SEQ ID NO: 297433 - DNA, 75 bp, synthetic construct
  source 1..75: mol_type = other DNA
gtgataagcccactgccggtttatgcctcaacctttgaaggctgggactcccctgaacgtagtaccttcccactg

SEQ ID NO: 297434 - DNA, 75 bp, synthetic construct
  source 1..75: mol_type = other DNA
agatattcttgatggtggcgaaattcagtttaatggttttgtcactgacgaagctcccaaatggacctggcagat

SEQ ID NO: 297435 - DNA, 75 bp, synthetic construct
  source 1..75: mol_type = other DNA
ttactcattccattcgtcaggaacgcccactgactaacgatgaattagtcaaggttgtaccttctgtgttttcag

SEQ ID NO: 297436 - DNA, 75 bp, synthetic construct
  source 1..75: mol_type = other DNA
cttatcaacccgatcgccttacacaatcccaaccgatgaaggtcggcacaggatactggagcaccgaaattatgt

SEQ ID NO: 297437 - DNA, 75 bp, synthetic construct
  source 1..75: mol_type = other DNA
tgggaaaaagcattgcacttcatgcggaacaggcatctacagtatcgaagaaactgacaagcaatcagatgcgaa

SEQ ID NO: 297438 - DNA, 75 bp, synthetic construct
  source 1..75: mol_type = other DNA
gaataccggggggaacaaagagcaggtccccgcaaaacgtcaaaaccgcggctcccgaaactcaacagatgatgg

SEQ ID NO: 297439 - DNA, 75 bp, synthetic construct
  source 1..75: mol_type = other DNA
cccaaaacccggtaaaaaattttgcgttctgcccaggacaggtgcgtcaggccgtggcagtgatgccccttgcgg

SEQ ID NO: 297440 - DNA, 75 bp, synthetic construct
  source 1..75: mol_type = other DNA
ataacatttcactcgaagctatagagcatgaaatggcgaccccaaaacgcgaatggtcggctaagcaaaaatggc

SEQ ID NO: 297441 - DNA, 75 bp, synthetic construct
  source 1..75: mol_type = other DNA
caaccagaacgtgttggctgacagtagagttatgaatctggctgcatcatatgcctctgatgtttctgattttga

SEQ ID NO: 297442 - DNA, 75 bp, synthetic construct
  source 1..75: mol_type = other DNA
ctattttttttacattgatgacggtgcttctgttttatttttcagcgttacgagcagaggttcttgacggtggtg

SEQ ID NO: 297443 - DNA, 75 bp, synthetic construct
  source 1..75: mol_type = other DNA
accggccggtatgtcgctggtaagtggacaaagtgtgacggatgtacagccgggaagtctgccacaggggctgaa

SEQ ID NO: 297444 - DNA, 75 bp, synthetic construct
  source 1..75: mol_type = other DNA
tgctgtggggcgcgcctggctacctgtttttccaggtcgcacgtaaccagtgcgaaggactggcaaaaaccaagc

SEQ ID NO: 297445 - DNA, 75 bp, synthetic construct
  source 1..75: mol_type = other DNA
gtaacggacagcctttcgccgtaaaggaaggcagtggcactacggcgcaacgttttcgcgcctctgtcccggtgc

SEQ ID NO: 297446 - DNA, 75 bp, synthetic construct
  source 1..75: mol_type = other DNA
atgcttcagctgtgtcggattttgaactgcggctaccggcagagggcacacctgcagcatggcaggccgcgctga

SEQ ID NO: 297447 - DNA, 75 bp, synthetic construct
  source 1..75: mol_type = other DNA
ctaaggatggaaaaaccattcagtatgtcgatgaggtcatcggctctggctcaatgaaagacgtttatttttctc

SEQ ID NO: 297448 - DNA, 75 bp, synthetic construct
  source 1..75: mol_type = other DNA
atttacgccggacatgacaatcatttctatgggcatcggaaaatcctcaagccagaacatttagactggcaagaa

SEQ ID NO: 297449 - DNA, 75 bp, synthetic construct
  source 1..75: mol_type = other DNA
gacaccgcaagcacgttaaaggctgcaagtgaagagattcagcaattagtaaatgatttagcaaaaagtgctatt

SEQ ID NO: 297450 - DNA, 75 bp, synthetic construct
  source 1..75: mol_type = other DNA
cagtcatggtcgaaacattgcttctgtgcttgctgctctcgaatcgaatagcgaatttaaagagcaaatactgga

SEQ ID NO: 297451 - DNA, 75 bp, synthetic construct
  source 1..75: mol_type = other DNA
ataaatttctggatccgcgtgaacgtggcaatacgcttaactatctgaaggtctgcatccttctaacgcgtgcag

SEQ ID NO: 297452 - DNA, 75 bp, synthetic construct
  source 1..75: mol_type = other DNA
ctcatccagccatgccagaacaatgattgtgaccagaaatggtacgtttttaatggcaagaccaaacccgtttgt

SEQ ID NO: 297453 - DNA, 75 bp, synthetic construct
  source 1..75: mol_type = other DNA
ggatgtggacaacgccgatatcaaccaacgcctgctggaggtcattgaacagatcggcagttattcaaaacagat

SEQ ID NO: 297454 - DNA, 75 bp, synthetic construct
  source 1..75: mol_type = other DNA
tgctggtggggtgtttgtatcgcttcctgaaattgaggaagtagagaacgccgatataaaccagcgcctgctgga

SEQ ID NO: 297455 - DNA, 75 bp, synthetic construct
  source 1..75: mol_type = other DNA
cttttgcgctccagaaaagagtgacgccgcgagtgtgcagctccgggcgtcgtggcgttttgtgtctgtggagaa

SEQ ID NO: 297456 - DNA, 75 bp, synthetic construct
  source 1..75: mol_type = other DNA
atcgccaccacgttaaaggttgcaagtgaagagattcagcaattagtagatgatttagcaaaaagtgctattttc

SEQ ID NO: 297457 - DNA, 75 bp, synthetic construct
  source 1..75: mol_type = other DNA
cactggtatcagaaaaaaggcatcgaagttccacaaacccagcaaggggacattggcgcgaaagatatcccctcc

SEQ ID NO: 297458 - DNA, 75 bp, synthetic construct
  source 1..75: mol_type = other DNA
attatcatttagccccacaaaatcgaagaactatcagcgttataacgaacggataaaaggaaaacgtcaggaatg

SEQ ID NO: 297459 - DNA, 75 bp, synthetic construct
  source 1..75: mol_type = other DNA
aaaaggccgtgaaaaggaaggcaaatggtttgccagcgccagcaaccagaataaatttctcgacccacgtgaacg

SEQ ID NO: 297460 - DNA, 75 bp, synthetic construct
  source 1..75: mol_type = other DNA
accgcgctggcgcaaaggcaggctgaggccaggacagaagaacaacgccgacaaggtgaaattgatgcgatcaga

SEQ ID NO: 297461 - DNA, 75 bp, synthetic construct
  source 1..75: mol_type = other DNA
cggtgccggaactcccggcagaagcgaggcaaaagccagcggtgccgcattgcttgccgacctgtttaagcgggc

SEQ ID NO: 297462 - DNA, 75 bp, synthetic construct
  source 1..75: mol_type = other DNA
tttgaggaggcgctgatcaaccacctgatggatttcatgctggaacttggggatgattttgcctttgttggtcga

SEQ ID NO: 297463 - DNA, 75 bp, synthetic construct
  source 1..75: mol_type = other DNA
tatccgcagtggccatcagccaggcgcaggcagcggccagtgccggttttgatttaaacgggataaaacagcaac

SEQ ID NO: 297464 - DNA, 75 bp, synthetic construct
  source 1..75: mol_type = other DNA
gaaagtcgtctgcatcaaaagaataaactggatgctgatacacgtattcagtatgagcaggctcgcgataaagtc

SEQ ID NO: 297465 - DNA, 75 bp, synthetic construct
  source 1..75: mol_type = other DNA
aacgtgcttatcgatccagaaatgggacatgcctgcatcattgacgtagacggcctggttgtccctggaaagtat

SEQ ID NO: 297466 - DNA, 75 bp, synthetic construct
  source 1..75: mol_type = other DNA
aaaggaaacgagttgggtattttgttttccataacgatcagtggtggttagtaaatgaaggcataaatgggctta

SEQ ID NO: 297467 - DNA, 75 bp, synthetic construct
  source 1..75: mol_type = other DNA
aggcaatacgcttacctatctcaaggtctgtctgctgctaacaagagccgtcagaaggatgcatgcggcaggtct

SEQ ID NO: 297468 - DNA, 75 bp, synthetic construct
  source 1..75: mol_type = other DNA
ctggaagagaacaatatcgaattcgtgcgggttgaagaggacgattacgacagccgtttcctgcgctgtgtggag

SEQ ID NO: 297469 - DNA, 75 bp, synthetic construct
  source 1..75: mol_type = other DNA
agcgttaaaaaattgatgattgccttggggattggcgcgggacttacggcgtttaactacctgtttggtcagtcg

SEQ ID NO: 297470 - DNA, 75 bp, synthetic construct
  source 1..75: mol_type = other DNA
aaccagccatctttccaaagaggatccgaaccgcgtattgccaagcattactactgaccgtcatgcgctgtcggt

SEQ ID NO: 297471 - DNA, 75 bp, synthetic construct
  source 1..75: mol_type = other DNA
gctgaactgctggcgctggaagaaaagctggcgcgtccgggaagtgacgtggccctggacgatcaactctatcag

SEQ ID NO: 297472 - DNA, 75 bp, synthetic construct
  source 1..75: mol_type = other DNA
tagctaaaaagtgcactgaaagcaatcgtaatacattatttacattcataactagtgatacaggtgctgtgcaaa

SEQ ID NO: 297473 - DNA, 75 bp, synthetic construct
  source 1..75: mol_type = other DNA
caaagaggtggctgtagcactggcatcagtctgtcagaagctgcgcgctttcgggtatatcagcgcatggggctg

SEQ ID NO: 297474 - DNA, 75 bp, synthetic construct
  source 1..75: mol_type = other DNA
agcgatgccaacagcctcaacaacaaagaaatcacgaccattattcgtcgcaacgggttccgcttctggggcaac

SEQ ID NO: 297475 - DNA, 75 bp, synthetic construct
  source 1..75: mol_type = other DNA
ttccatatagccaggctggcacagtcagacataaagacgcctttgaggcatacatgcttgggtacgactatgcaa

SEQ ID NO: 297476 - DNA, 75 bp, synthetic construct
  source 1..75: mol_type = other DNA
acaggccgccaccgctgcgctgcctgcgcatacgagcttggtgtacttcacgcaatgatcggtattcctaaagct

SEQ ID NO: 297477 - DNA, 75 bp, synthetic construct
  source 1..75: mol_type = other DNA
tgtgttggttaatattagaaacgttcttactggtgggatactcagaaaccctgtaggtcgtgacttcaatgtaaa

SEQ ID NO: 297478 - DNA, 75 bp, synthetic construct
  source 1..75: mol_type = other DNA
aaaagtttttaaacagtaaaaaaacgtttgaatgggatgagctggtcgttttgttttcctctctgggatatgtca

SEQ ID NO: 297479 - DNA, 75 bp, synthetic construct
  source 1..75: mol_type = other DNA
atacttctatcaatggtaaacgctacgtattcaactggaattacgacaaagttccacaccctaaaattatgagtc

SEQ ID NO: 297480 - DNA, 75 bp, synthetic construct
  source 1..75: mol_type = other DNA
aggatgttccatgggaagggcgtcatcgcgaagatattagtggtttttcactgcctacctggaacatggagcaga

SEQ ID NO: 297481 - DNA, 75 bp, synthetic construct
  source 1..75: mol_type = other DNA
gatgcgagcaaaaatcgacgcaacgcagggatggcacaaaaccatttccaacgtgccggtgaataacgtgctggg

SEQ ID NO: 297482 - DNA, 75 bp, synthetic construct
  source 1..75: mol_type = other DNA
cgccagctgctggtatgacccggaaccgaatacctcggaaaccctgcgcaatggtcaactgaccattaagtacaa

SEQ ID NO: 297483 - DNA, 75 bp, synthetic construct
  source 1..75: mol_type = other DNA
cgccgctggcgggcggaagcgggtgatatcgactactacctgtttaccggcgaacgcgtacttgatatcaccaaa

SEQ ID NO: 297484 - DNA, 75 bp, synthetic construct
  source 1..75: mol_type = other DNA
ttatgccatcactcctgcacgcctggctgaactgctggcgctggaagaaaagctggcgcgtccgggaagcgatgt

SEQ ID NO: 297485 - DNA, 75 bp, synthetic construct
  source 1..75: mol_type = other DNA
agctgtcagaaaaactatcgcggcgttgccggagggttacgctgaagctgctgagtggctggatgtaacagagaa

SEQ ID NO: 297486 - DNA, 75 bp, synthetic construct
  source 1..75: mol_type = other DNA
gtgggtaagcatcactggaaaatagaaaaacagcctgagtggtacgtgaaagctgtcagaaaaactatcgcggcg

SEQ ID NO: 297487 - DNA, 75 bp, synthetic construct
  source 1..75: mol_type = other DNA
ctatgtcgataaactcgacggcaaaccgttactgaccggcaaacgttcccctgcaattgaagagtggctgcgcaa

SEQ ID NO: 297488 - DNA, 75 bp, synthetic construct
  source 1..75: mol_type = other DNA
cccagactggcaacccgatgccgactttatccgtcaggcggcattatggggagtggcactaagagagccggtgac

SEQ ID NO: 297489 - DNA, 75 bp, synthetic construct
  source 1..75: mol_type = other DNA
cagaaagtaatgacgcccgcgagtgtgcagctccgggcgtcgtggcgtcgattgcttctggttgtggagaaacta

SEQ ID NO: 297490 - DNA, 75 bp, synthetic construct
  source 1..75: mol_type = other DNA
atgaccaaatggcaggaacacctgacgctgttattccgggtcttctgtgcccctgatgaggtttccagacctcca

SEQ ID NO: 297491 - DNA, 75 bp, synthetic construct
  source 1..75: mol_type = other DNA
gcactggcctttctcacaggttatctgattgagaaatcgctggcggtcgataacgtctttgtctggctgatgttg

SEQ ID NO: 297492 - DNA, 75 bp, synthetic construct
  source 1..75: mol_type = other DNA
ctgactggctggatgtaacagagaacgcattatttaatcgccttcgtgccgatggcgatcagtttttaccgttgg

SEQ ID NO: 297493 - DNA, 75 bp, synthetic construct
  source 1..75: mol_type = other DNA
gtgggtaagcatcactggaaagtggaaaaacagcctgagtggtacgtgaaagctgtcagaaaaactatcgcggcg

SEQ ID NO: 297494 - DNA, 75 bp, synthetic construct
  source 1..75: mol_type = other DNA
gctatcttcgccgtgaccactgatccgtttattgtgctgacctcaaacctgtttgcgatcctcggcctgcgtgcg

SEQ ID NO: 297495 - DNA, 75 bp, synthetic construct
  source 1..75: mol_type = other DNA
ctgtcgttactgtttaacgccgctttctggtggtatctggcgcaggcacagggacgcgaagtcgcggacccgcag

SEQ ID NO: 297496 - DNA, 75 bp, synthetic construct
  source 1..75: mol_type = other DNA
atcggtatcaagatgctgattgtcgacttctaccatattccgatcgccgtctcgctgggcgtggtgtttggcatt

SEQ ID NO: 297497 - DNA, 75 bp, synthetic construct
  source 1..75: mol_type = other DNA
ttagaaacgccagcctgacggtggctgatcgccatttactctatggtgacggtctggttgacgctttacctccac

SEQ ID NO: 297498 - DNA, 75 bp, synthetic construct
  source 1..75: mol_type = other DNA
ttcccaaatggctggcgggcagccaaccgccgcccgcccggcataatggacatatcacgcccattatgccgttac

SEQ ID NO: 297499 - DNA, 75 bp, synthetic construct
  source 1..75: mol_type = other DNA
ggcctggcgcaacatgagttcgaattgttctgccagcctttgcttaatgcgcgcagccagcaatgtattggtgta

SEQ ID NO: 297500 - DNA, 75 bp, synthetic construct
  source 1..75: mol_type = other DNA
ccgtcatcgggtgagcgttatttaagcaccgcattgtttgccgatctcttcactgagaaagaattgcaacagtaa

SEQ ID NO: 297501 - DNA, 75 bp, synthetic construct
  source 1..75: mol_type = other DNA
acaattcagcaacccggcgaacccagaaattcatgaaaaaaccaccggcccggagatttgggaagataccgacgg

SEQ ID NO: 297502 - DNA, 75 bp, synthetic construct
  source 1..75: mol_type = other DNA
cgcaagctgctgaaagctctgggggcaaatttagtgctgactgaaggtgccaaaggtatgaaaggcgccattcaa

SEQ ID NO: 297503 - DNA, 75 bp, synthetic construct
  source 1..75: mol_type = other DNA
cggttaaaaataaaaagataattgcgctacctgagtacttagaaaaccctcttcagttccataccggaggcattc

SEQ ID NO: 297504 - DNA, 75 bp, synthetic construct
  source 1..75: mol_type = other DNA
gggcagtacgtccggctgggtgaggatgggattgtggtggaggcgtcagggcagccggtgttggtgaacagtgcc

SEQ ID NO: 297505 - DNA, 75 bp, synthetic construct
  source 1..75: mol_type = other DNA
gctgaaggtgacgggggatatcacggacaactgtgaaaccaacagcaccacgctgaaggcgctgcgggaggcata

SEQ ID NO: 297506 - DNA, 75 bp, synthetic construct
  source 1..75: mol_type = other DNA
ttttcctggcttgaaacattacgtcctgacgtgctgaaaattgataagtcatttaccgcagctataggttctgac

SEQ ID NO: 297507 - DNA, 75 bp, synthetic construct
  source 1..75: mol_type = other DNA
gattaaaggcagtccggttttgattcaatggacgcctgcagcgggcagtagcaaagctggggtcatggagatgat

SEQ ID NO: 297508 - DNA, 75 bp, synthetic construct
  source 1..75: mol_type = other DNA
gaatattgaactggtggcggagggcgtagaaacgcaagaacaggcaaaatatttacgccgtcatggggtgcatat

SEQ ID NO: 297509 - DNA, 75 bp, synthetic construct
  source 1..75: mol_type = other DNA
caaacctggtgctgaccgaaggcgcgaaaggcatgaaaggcgcaattcaaaaagcagaagaaattgtcgccagca

SEQ ID NO: 297510 - DNA, 75 bp, synthetic construct
  source 1..75: mol_type = other DNA
tgtcttttcacacctcggcggtgatgagatcgcattgcagtattccgactacgataaaatcgcgctgggccacgc

SEQ ID NO: 297511 - DNA, 75 bp, synthetic construct
  source 1..75: mol_type = other DNA
taccagaaatatctcacatacatcatgcacatctgtggcagataggcgaaaaaccagtgttaacactacatatac

SEQ ID NO: 297512 - DNA, 75 bp, synthetic construct
  source 1..75: mol_type = other DNA
agtaacaccaaagtgcgggacgcggccctggggcgttttgccgtccgcaccgtgctgctgttgcttgtgtgtatc

SEQ ID NO: 297513 - DNA, 75 bp, synthetic construct
  source 1..75: mol_type = other DNA
tgaacgccatggtggagttagctaagaacagagtaccgctttaccacattatggatgttgcaaaacaaatggaga

SEQ ID NO: 297514 - DNA, 75 bp, synthetic construct
  source 1..75: mol_type = other DNA
tcgatgaataccgttttgatctggtgatcctgctggaaaacaacactccgtgggtggcggatggtttacgtagcc

SEQ ID NO: 297515 - DNA, 75 bp, synthetic construct
  source 1..75: mol_type = other DNA
acaccgatttcgtaacaactcaggcgttctgcaaaaagtacgaagggcgtgaacatccgttcgtacaggcgctga

SEQ ID NO: 297516 - DNA, 75 bp, synthetic construct
  source 1..75: mol_type = other DNA
gagatacagacaattgccaaccaggttcatgtggcgctgcccagccgggatgcggcccagaagctgaaaataaag

SEQ ID NO: 297517 - DNA, 75 bp, synthetic construct
  source 1..75: mol_type = other DNA
atacccacgatgcttaatttgctgaatgacaggcacaaatatctctctgagcgcgtgtatggctttttttatggc

SEQ ID NO: 297518 - DNA, 75 bp, synthetic construct
  source 1..75: mol_type = other DNA
actatccgaagtcaccaaaggctgctgatgcgatgtttaaagtcggcgtcatcatgcaggacaaaggtgacaccg

SEQ ID NO: 297519 - DNA, 75 bp, synthetic construct
  source 1..75: mol_type = other DNA
aagctaaagacctggtagaatctgctccggctgctctgaaagaaggcgtgagcaaagatgacgctgaagcactga

SEQ ID NO: 297520 - DNA, 75 bp, synthetic construct
  source 1..75: mol_type = other DNA
gcaatggaagaaaaattcggtgtttccgctgccgctgctgtagctgtagctgctggcccggttgaagctgctgaa

SEQ ID NO: 297521 - DNA, 75 bp, synthetic construct
  source 1..75: mol_type = other DNA
acatctgctggtacaggctgcatggcagctcttgatgcggaacgctacctcgacggtttagctgacgcaaaataa

SEQ ID NO: 297522 - DNA, 75 bp, synthetic construct
  source 1..75: mol_type = other DNA
ggcttttcatcggggctaccggcaggtgctgatgtggttattgcatttctgggaggtgatcgttccagccccgtc

SEQ ID NO: 297523 - DNA, 75 bp, synthetic construct
  source 1..75: mol_type = other DNA
ctgttttttacaggttcagtatttagtccggaatacgcatttttaattgtgtgtccgtttatattgcgcaaggcg

SEQ ID NO: 297524 - DNA, 75 bp, synthetic construct
  source 1..75: mol_type = other DNA
tttcttccgtaatgttagtgaattgctggacgtgcttgagcgtggcgaagtacgcactgagctgttgaaagaact

SEQ ID NO: 297525 - DNA, 75 bp, synthetic construct
  source 1..75: mol_type = other DNA
cacagctttatccgcaaatttccggtcataaaagccgttttgcgattcgttttatgccgctggacagtgaaaatg

SEQ ID NO: 297526 - DNA, 75 bp, synthetic construct
  source 1..75: mol_type = other DNA
gtttaactacctgttcggtcaatcactggatgccagtaagtacgtaacgtcagcgatgctgtttgtttataccgt

SEQ ID NO: 297527 - DNA, 75 bp, synthetic construct
  source 1..75: mol_type = other DNA
gttaccgttagcattgatttctctggctgtattcctggttggtgtggtaatcgcgtttccttatatttccacccg

SEQ ID NO: 297528 - DNA, 75 bp, synthetic construct
  source 1..75: mol_type = other DNA
tctgctggttaacgtcaaactcgcccagcttggcgagagcttcccgataactatcgtcaccttcttacccgctct

SEQ ID NO: 297529 - DNA, 75 bp, synthetic construct
  source 1..75: mol_type = other DNA
tctcccgttgtctgacgatgatcgaaagcgtgcaagggcagaagtttagtcgctatgtgccggaagatatcacta

SEQ ID NO: 297530 - DNA, 75 bp, synthetic construct
  source 1..75: mol_type = other DNA
acgcaggacaacaggagacaacggagcatgatgccgtgcgtattaaccagcgttatctggatacggcgtccctgc

SEQ ID NO: 297531 - DNA, 75 bp, synthetic construct
  source 1..75: mol_type = other DNA
gacccgactggcgcgccatgcttgccgggatgacatccaccgaatatgccgactggcgacgtttttactgcacgc

SEQ ID NO: 297532 - DNA, 75 bp, synthetic construct
  source 1..75: mol_type = other DNA
ctgcgcctgaatctggcgctcgattcacagctttatccgcaaatttccggtcataaaagccgttttgcgattcgt

SEQ ID NO: 297533 - DNA, 75 bp, synthetic construct
  source 1..75: mol_type = other DNA
ctggatgttttcgagcgcggagaagtgcgcactgagctgttgaaagagcttgaccgccagcaacgtaaactccag

SEQ ID NO: 297534 - DNA, 75 bp, synthetic construct
  source 1..75: mol_type = other DNA
acctggattggcgtgcctggcgtggaccagagccgtattgaagcattaattcagcagttaaaagcggcggggagc

SEQ ID NO: 297535 - DNA, 75 bp, synthetic construct
  source 1..75: mol_type = other DNA
ggttatgacatttatcctgttctatctgctggagtgggctttccagtacctgaacaaagaagcgatcaagaaaaa

SEQ ID NO: 297536 - DNA, 75 bp, synthetic construct
  source 1..75: mol_type = other DNA
ggttcacgaagatatggcgaagaattttgccgagtacccgcaaaaatggaagttaaagcgcccggacagcaacat

SEQ ID NO: 297537 - DNA, 75 bp, synthetic construct
  source 1..75: mol_type = other DNA
ttacgcccgataacaccatcatggcgctggcagaagattttctttcccgacgccagtacggcattcgttttcgta

SEQ ID NO: 297538 - DNA, 75 bp, synthetic construct
  source 1..75: mol_type = other DNA
catcaccgcgtttttgcagatgattcaggaagggaaggcaatcaccttacgcgatggcgatcagaccatttctct

SEQ ID NO: 297539 - DNA, 75 bp, synthetic construct
  source 1..75: mol_type = other DNA
gccagaaggtcgatttgcagaaactggttcacgaagatatggcgaagaattttgccgattatccgcaaaagtgga

SEQ ID NO: 297540 - DNA, 75 bp, synthetic construct
  source 1..75: mol_type = other DNA
gccgctggtgatacataacattggcgcaggcgcgcaggaagaagatgtactgtttagctggcggatggtggggca

SEQ ID NO: 297541 - DNA, 75 bp, synthetic construct
  source 1..75: mol_type = other DNA
gaaacctggtttacccgccacgataaaacacgccccaccagcaagaaccccagtgactatcaagcgggcgatatt

SEQ ID NO: 297542 - DNA, 75 bp, synthetic construct
  source 1..75: mol_type = other DNA
gtgacggcgagcagaccatttctttgaacggtttaaaagcggcgttgatatttattgatgcccaacaaaagcgcg

SEQ ID NO: 297543 - DNA, 75 bp, synthetic construct
  source 1..75: mol_type = other DNA
ttggcagtgaaaccgcgtggataaagaaaggggacgaaccgccgctcagcgtaccgcccgcgcctgcgctgaaag

SEQ ID NO: 297544 - DNA, 75 bp, synthetic construct
  source 1..75: mol_type = other DNA
ttgcattcccctatattgccgagcgtattggtgatttaggaacggaaggatcgtcatcgtattaccgtataattg

SEQ ID NO: 297545 - DNA, 75 bp, synthetic construct
  source 1..75: mol_type = other DNA
ataatggactggtgatgaccctgagccgcagcgccggggcgcataccgatgccgttttacgtattgagcgcggcg

SEQ ID NO: 297546 - DNA, 75 bp, synthetic construct
  source 1..75: mol_type = other DNA
gaaaggggacgaaccgccgctcagcgtaccgccagcgcctgcgctaaaagaggtcgcggtagtgaacccgacgcc

SEQ ID NO: 297547 - DNA, 75 bp, synthetic construct
  source 1..75: mol_type = other DNA
aatgaactggaactgatgaacgcgacatttgatgaaaaatcgcgtgaactggtgacgttagcgaaaggccgtgga

SEQ ID NO: 297548 - DNA, 75 bp, synthetic construct
  source 1..75: mol_type = other DNA
caacatatcgcgccgcagaaagagatcggcttctcttccggtatttacgcgatgaaagaaaacgatacgttacat

SEQ ID NO: 297549 - DNA, 75 bp, synthetic construct
  source 1..75: mol_type = other DNA
gttttctcaatgtcacgctaaccaataccgattcggggcgtgaagtggccaaattcagtgtgccacttcaaaacc

SEQ ID NO: 297550 - DNA, 75 bp, synthetic construct
  source 1..75: mol_type = other DNA
agaaaatattagtgatgcgatgactggactgtataatcgcaaaattttaacccctgaactggagcagcggttgca

SEQ ID NO: 297551 - DNA, 75 bp, synthetic construct
  source 1..75: mol_type = other DNA
tgcaatcaggaagcattggcattgatcgtaaagatattgaaaaagtgtttaccggacgtactgtgttatcgagca

SEQ ID NO: 297552 - DNA, 75 bp, synthetic construct
  source 1..75: mol_type = other DNA
atgagtttgctgacgccggtatatgtcgcagggcagctaaaagggattgtgctgctggatattaacaaaaacaat

SEQ ID NO: 297553 - DNA, 75 bp, synthetic construct
  source 1..75: mol_type = other DNA
gtatatgtcgcagggcagctaaaagggattgtgctgctggatattaacaaaaacaatctgcggaatatcttttac

SEQ ID NO: 297554 - DNA, 75 bp, synthetic construct
  source 1..75: mol_type = other DNA
gctgtttttggtgtgatcactcatgtcatcaatgatgcccgaagtggggagtttgatgattgtccggtcatttaa

SEQ ID NO: 297555 - DNA, 75 bp, synthetic construct
  source 1..75: mol_type = other DNA
tacacgggtagtaatgctgtttttggtgtgatcacccacattatcaatgacgccaggggcggtgaatttgatgat

SEQ ID NO: 297556 - DNA, 75 bp, synthetic construct
  source 1..75: mol_type = other DNA
actatgtagagcaacgcatatcactagaccagcgcatcataaccaggccagcggctacgtacttcatgcgagcca

SEQ ID NO: 297557 - DNA, 75 bp, synthetic construct
  source 1..75: mol_type = other DNA
gatcgcaaagatattgaaaaagtatttaccgggcgtaccgtattatcgagcatttaccaggatcagcgtactaaa

SEQ ID NO: 297558 - DNA, 75 bp, synthetic construct
  source 1..75: mol_type = other DNA
atggccgaagagaaatttcactattatctcgatctcaatgaccgctatgtctatttttatgagccggttaatgtt

SEQ ID NO: 297559 - DNA, 75 bp, synthetic construct
  source 1..75: mol_type = other DNA
aggatttaagaaccggtaagaaggaagcattgccaaaggatgacgatggatgcacgggcagcaacgccgtgtttg

SEQ ID NO: 297560 - DNA, 75 bp, synthetic construct
  source 1..75: mol_type = other DNA
ggtgcggtaggttactttgtgttaaccaaagcgatggtgaccatcaacccagaaattaacatgggtgtactggcg

SEQ ID NO: 297561 - DNA, 75 bp, synthetic construct
  source 1..75: mol_type = other DNA
gtgcggcgctggcgatgtacttcgcagcaccgaaagagcgtcgtccgatggttggcgggatgctgctttctgttg

SEQ ID NO: 297562 - DNA, 75 bp, synthetic construct
  source 1..75: mol_type = other DNA
tcccgatcatgatgttcggtttgccgggtgcagcgctggcgatgtattttgccgcgccgaaagagcgtcgtccga

SEQ ID NO: 297563 - DNA, 75 bp, synthetic construct
  source 1..75: mol_type = other DNA
aaccttgcgcttatcttcgcgatcggtgtggcatccagttggtcaaaagacagcgcgggcgcggcggcgctggcg

SEQ ID NO: 297564 - DNA, 75 bp, synthetic construct
  source 1..75: mol_type = other DNA
actgcctgccgtactgtttttagtagcagccggcgcaggcactgtattctggatgactcagccagagccggatgt

SEQ ID NO: 297565 - DNA, 75 bp, synthetic construct
  source 1..75: mol_type = other DNA
gccgctatttattattgatgaactgcatctaaccgataaactggctggggaaatgattggtatcgctgccggtct

SEQ ID NO: 297566 - DNA, 75 bp, synthetic construct
  source 1..75: mol_type = other DNA
aggcctcaatcaactggcgaccaactatattgctgcggttggcggcactgacaacctgaaagcaattgacgcctg

SEQ ID NO: 297567 - DNA, 75 bp, synthetic construct
  source 1..75: mol_type = other DNA
gtcaacgatgcgatgtgtaaacgtctgggtgcttctggtgtagtgaaactgaacaaacagactattcaggtgatt

SEQ ID NO: 297568 - DNA, 75 bp, synthetic construct
  source 1..75: mol_type = other DNA
ggtttgcagcaatatcgacgatttcagtggcttgatcattaaagctcagggccatgttgtggcgggggaaaaacc

SEQ ID NO: 297569 - DNA, 75 bp, synthetic construct
  source 1..75: mol_type = other DNA
gttggtgcgaaagcggaatctatcggtgatgcgatgaagaaagtcgttgctcgtggtccggtagctgctgcttct

SEQ ID NO: 297570 - DNA, 75 bp, synthetic construct
  source 1..75: mol_type = other DNA
acgcccgctcgatgattagcccggtggtttgcagcaatatcgacgatttcagcggccttatcattaaagctcagg

SEQ ID NO: 297571 - DNA, 75 bp, synthetic construct
  source 1..75: mol_type = other DNA
ggtatcattaccggtctggtcggtggtgcagcctataaccgttggtctaatatcaaactgccggacttcctgagc

SEQ ID NO: 297572 - DNA, 75 bp, synthetic construct
  source 1..75: mol_type = other DNA
cgtccatatgggtatcgacaccgtagcgctggaaggtaaaggctttaaacgtctggtggaagagggggcgcaggt

SEQ ID NO: 297573 - DNA, 75 bp, synthetic construct
  source 1..75: mol_type = other DNA
gattcctcactcactcctgttgatggttctcttcttgtatgtgctattgatggggaatatcgcgtaaaacgatac

SEQ ID NO: 297574 - DNA, 75 bp, synthetic construct
  source 1..75: mol_type = other DNA
gacctcagctatcgctatctggatgctggtaaatcctccctgtcttacaaggatgcagaaggggataaatataaa

SEQ ID NO: 297575 - DNA, 75 bp, synthetic construct
  source 1..75: mol_type = other DNA
tgttggactgggttatgcacggatacatcataaggcaacatatactgatacctcctggaataaatctggtgaggt

SEQ ID NO: 297576 - DNA, 75 bp, synthetic construct
  source 1..75: mol_type = other DNA
gaatcgttgtcacgttcaggctctgctgacaacttcgcatggagccttggcgcgggtgtccgctatgacgtcacc

SEQ ID NO: 297577 - DNA, 75 bp, synthetic construct
  source 1..75: mol_type = other DNA
gagctataaggacaagtggggtgataaatataaatcagaagttgatgttaaaagtcatgacatcatgcttggtgt

SEQ ID NO: 297578 - DNA, 75 bp, synthetic construct
  source 1..75: mol_type = other DNA
actatgacttccggaatgacagtgcattcacaccatgggtatccgcagggattggttacgccaggattcaccaga

SEQ ID NO: 297579 - DNA, 75 bp, synthetic construct
  source 1..75: mol_type = other DNA
ccggtatcagtacctgggattatgagtacggaagcagtggtcgcgaatcgttgtcacgttcaggctctgctgaca

SEQ ID NO: 297580 - DNA, 75 bp, synthetic construct
  source 1..75: mol_type = other DNA
caggtaatggaaagtctggatcaggcaggctggcgtctggatgccctgcgtttaatcgttgtgacgcatcagtaa

SEQ ID NO: 297581 - DNA, 75 bp, synthetic construct
  source 1..75: mol_type = other DNA
catcgctctcagaaagtgctggtgatctgcgccaaagccgctaccgcgctgcaactggagcaggtactgcgcgag

SEQ ID NO: 297582 - DNA, 75 bp, synthetic construct
  source 1..75: mol_type = other DNA
gagccgcgaatatcaggccattgaacaactggcagagcacgtgccgggcgttctgctgctgaccgcaaccccgga

SEQ ID NO: 297583 - DNA, 75 bp, synthetic construct
  source 1..75: mol_type = other DNA
tacagaaggggataaatataaatcagaggttgatgttaaaagccatgacatcatgcttggtgtgacttattactt

SEQ ID NO: 297584 - DNA, 75 bp, synthetic construct
  source 1..75: mol_type = other DNA
gccgtgcagcaggatgttcacgctatccttcagctgggtgaagcgcagatcgagaaatctgcccgtgcactgatt

SEQ ID NO: 297585 - DNA, 75 bp, synthetic construct
  source 1..75: mol_type = other DNA
atccactccaacggtggcgaaaaagccaggcactggcagaaagcattgaagagcaggatgacgataccaacctga

SEQ ID NO: 297586 - DNA, 75 bp, synthetic construct
  source 1..75: mol_type = other DNA
ttccaaccagcgttttgtcgaaggtgaaggagagtgggcggacagatacaaaggtggcgatgaccatgatacggt

SEQ ID NO: 297587 - DNA, 75 bp, synthetic construct
  source 1..75: mol_type = other DNA
gctgtcatcaccaatcacaacaagttcgatttcgaggagttcaaagcgctgcgcaagacagcgcagaagaaggat

SEQ ID NO: 297588 - DNA, 75 bp, synthetic construct
  source 1..75: mol_type = other DNA
gagcttgattcgaatggaggtactgcaaaaaatcgggcttatggatgaggagttgtttatagatttcgttgatat

SEQ ID NO: 297589 - DNA, 75 bp, synthetic construct
  source 1..75: mol_type = other DNA
tacgccagaattcatcagaaaacaaccggtatcagcacctgggattacgggtacggatacagtggtcgtgaatca

SEQ ID NO: 297590 - DNA, 75 bp, synthetic construct
  source 1..75: mol_type = other DNA
cctacacgccgggagaagataaaagagagcttattgatgctggagttttattcctgctggatgaaaacagtaatg

SEQ ID NO: 297591 - DNA, 75 bp, synthetic construct
  source 1..75: mol_type = other DNA
gacggcaatccagccggatgacttcctgactcaacagcagcgcaaaaccaaggcggaacaaatgctggaggcgct

SEQ ID NO: 297592 - DNA, 75 bp, synthetic construct
  source 1..75: mol_type = other DNA
cttcacgcgtcgccatggagccccccaagcatcaggggtcgtttatccgcggtattcacttcgacggtggcatcc

SEQ ID NO: 297593 - DNA, 75 bp, synthetic construct
  source 1..75: mol_type = other DNA
ggtattgtaaatgaatctggtgaagtttatatgaccggtatgcctgaaaaaggacagttaaaaattaggtggaac

SEQ ID NO: 297594 - DNA, 75 bp, synthetic construct
  source 1..75: mol_type = other DNA
taatgcagataacggcaatgtatggtttaccttgggatctgacaacatttattggacttcagggcgctgagcatt

SEQ ID NO: 297595 - DNA, 75 bp, synthetic construct
  source 1..75: mol_type = other DNA
aaatttaactacatggaccaaggagcatgggcaatcagcagaaagtgaaagtgtttacacatatgcagaacgtgg

SEQ ID NO: 297596 - DNA, 75 bp, synthetic construct
  source 1..75: mol_type = other DNA
tcagcgtcaaaatacgaaaataacctggcatggagccttggtgtcggtgttaaatacgatgtgacgcaggatttc

SEQ ID NO: 297597 - DNA, 75 bp, synthetic construct
  source 1..75: mol_type = other DNA
gcagtttgattccggttactggataaccagtttgtatcaggtaaaagaggccaaatggcagcgcgttcacggctg

SEQ ID NO: 297598 - DNA, 75 bp, synthetic construct
  source 1..75: mol_type = other DNA
atgacctttaatcagcaaggtcgcccgtgtgtttttcagtccgatggtttttataccgcaagtgaaactggcatt

SEQ ID NO: 297599 - DNA, 75 bp, synthetic construct
  source 1..75: mol_type = other DNA
tcaacgcggcggcaggtcccatcagtgcagcgttcgaaccgcttaagcctgtgttccagtggattggcgacaaag

SEQ ID NO: 297600 - DNA, 75 bp, synthetic construct
  source 1..75: mol_type = other DNA
acgggaaatgtcctgaaaacggtagcaggtgcgccggttgcactgttgcggtctggattatccggtttacgtgcg

SEQ ID NO: 297601 - DNA, 75 bp, synthetic construct
  source 1..75: mol_type = other DNA
tgaaaagcatcacgggggcgttgcgccgctgggtggaagctaacccagaactgacaggcacactgatgaaagtag

SEQ ID NO: 297602 - DNA, 75 bp, synthetic construct
  source 1..75: mol_type = other DNA
gctgggcatcaaaacgttaccctccgttacggcagcagtaacacgaaccagcagcgcgttgtcctggctggcagg

SEQ ID NO: 297603 - DNA, 75 bp, synthetic construct
  source 1..75: mol_type = other DNA
cagtgatccgtctgggattctctgtgctgggcatcaaaacgttaccctccgttacggcagcagtaacacgaacca

SEQ ID NO: 297604 - DNA, 75 bp, synthetic construct
  source 1..75: mol_type = other DNA
gtctggattatccggtttacgtgcggttgctgtgatgtttatgaatcctctggcggtactgcgcggtggactgac

SEQ ID NO: 297605 - DNA, 75 bp, synthetic construct
  source 1..75: mol_type = other DNA
agacacagccaggacaaagtgcgcaggatattgcgcgggaggtggcgcgccagcttgatgaacgtgaacgcaggc

SEQ ID NO: 297606 - DNA, 75 bp, synthetic construct
  source 1..75: mol_type = other DNA
cattcagacgcagccaggacaaagtgcgcaggatattgcgcgggaggtggcacgccagcttgatgaacgtgaacg

SEQ ID NO: 297607 - DNA, 75 bp, synthetic construct
  source 1..75: mol_type = other DNA
aggattcaaagcggcggcaggtcccgtcagtgcagcattcgaaccgcttaagccagtgttccagtggattggcga

SEQ ID NO: 297608 - DNA, 75 bp, synthetic construct
  source 1..75: mol_type = other DNA
aatccggcgtatcctggttgctggaaaaactcggcattgtcagtaaagaagccgcaaaggcaaaactgccggaaa

SEQ ID NO: 297609 - DNA, 75 bp, synthetic construct
  source 1..75: mol_type = other DNA
gtcgtgcagccactgtgccgcccgttcaacggattgaggcaccgatgcagatcatcattcagacgcagccaggac

SEQ ID NO: 297610 - DNA, 75 bp, synthetic construct
  source 1..75: mol_type = other DNA
tgcgcgttgccctgtatgccatatctggtctgttaggtgctctgcttagtccgataggtcttgtggttactgcac

SEQ ID NO: 297611 - DNA, 75 bp, synthetic construct
  source 1..75: mol_type = other DNA
gccagcagagcttccaccgttgcatcctttggcgcttcccgcgaaaggcggcgaagcgatggtgagtcgcgcagc

SEQ ID NO: 297612 - DNA, 75 bp, synthetic construct
  source 1..75: mol_type = other DNA
attgcgcgggaggtggcccgccagcttgatgaacgtgaacgcaggttgaaggcaaaagccaggagtaactacagc

SEQ ID NO: 297613 - DNA, 75 bp, synthetic construct
  source 1..75: mol_type = other DNA
catcgggtggttttccatcatggggatatggctttgcggggatgtatgacagcggcgggtatatcccgcgcgggc

SEQ ID NO: 297614 - DNA, 75 bp, synthetic construct
  source 1..75: mol_type = other DNA
cactgtgccgcccgtttaccggattgaggcaccgacgcagatcatcatccagacgcagccaggacaaagtgcgca

SEQ ID NO: 297615 - DNA, 75 bp, synthetic construct
  source 1..75: mol_type = other DNA
ggatttgttacgagcaacgcgattacgccatcaaggtattgcgaggctataacagcgacgtggagggcgcggtaa

SEQ ID NO: 297616 - DNA, 75 bp, synthetic construct
  source 1..75: mol_type = other DNA
cgtaaaaacgcaaaatcaaccctgtcatcgggtatcggcctgtatatgacgggggcagatggtgaaggcggtgct

SEQ ID NO: 297617 - DNA, 75 bp, synthetic construct
  source 1..75: mol_type = other DNA
gaaatactggcagcccatcaccgcatttcttggtggcgtggtggaaggattcaaagccgcggcaggtcccgtcag

SEQ ID NO: 297618 - DNA, 75 bp, synthetic construct
  source 1..75: mol_type = other DNA
aggcgcggctgaagcgactgggtgaagctcagcgcaggatgaatgcggcgcgtgccagttatgcccgttcgctgg

SEQ ID NO: 297619 - DNA, 75 bp, synthetic construct
  source 1..75: mol_type = other DNA
aagaacaacaaaaatacttgcagaagcaaacggtgcttgtgcgtgctgaactgtaccgggcgggaatttctgcga

SEQ ID NO: 297620 - DNA, 75 bp, synthetic construct
  source 1..75: mol_type = other DNA
aaactgacagcgggcaatgatgcgctcggttccatgcagaaagaatccgacatcaacaaggactcactttctgct

SEQ ID NO: 297621 - DNA, 75 bp, synthetic construct
  source 1..75: mol_type = other DNA
agccaccaccacggctgcagggctggccatgggcgcgccagtgatggcggcggtaaaaagctataccagcatgga

SEQ ID NO: 297622 - DNA, 75 bp, synthetic construct
  source 1..75: mol_type = other DNA
gtgcttgcatccggcccgctggcgatgctgcgcgttgccctgtatgccatatctggtctgttaggtgctctgctc

SEQ ID NO: 297623 - DNA, 75 bp, synthetic construct
  source 1..75: mol_type = other DNA
tgacagcggcggctatatcccgcgcgggcagtttggcatcgtaggtgaaaatgggccggaaattgttaacggccc

SEQ ID NO: 297624 - DNA, 75 bp, synthetic construct
  source 1..75: mol_type = other DNA
agcggtgatttgtggcgtgacgcccgctgggccatcagccgggtacaggaacttcagcagacctataacggcttg

SEQ ID NO: 297625 - DNA, 75 bp, synthetic construct
  source 1..75: mol_type = other DNA
ggcagcgatctctatcgcgccgggcagcccgttgagcgcacggcacagcaggctgccgcatttgtgaaagcgtat

SEQ ID NO: 297626 - DNA, 75 bp, synthetic construct
  source 1..75: mol_type = other DNA
ttattttttacgccctcgcaacaccggtattaacgatgatgtcaacacaaccggagaaaaacatcctcctgttat

SEQ ID NO: 297627 - DNA, 75 bp, synthetic construct
  source 1..75: mol_type = other DNA
gtcagtctgccgttatcggttttcgatcccctggactaccatccactgctaattaccgtttccggaaaaaacgtt

SEQ ID NO: 297628 - DNA, 75 bp, synthetic construct
  source 1..75: mol_type = other DNA
cagtgcagcgttcgaaccgcttaagcctgtgttccagtggattggtgacaaagtgcaggcgctgtggggctggtt

SEQ ID NO: 297629 - DNA, 75 bp, synthetic construct
  source 1..75: mol_type = other DNA
agtgatccgccgtgcggtgggctacggcatgaccgtttgccccggctgcgcgacggcgaccgaagcctttaccgc

SEQ ID NO: 297630 - DNA, 75 bp, synthetic construct
  source 1..75: mol_type = other DNA
gcccggactacatcaaagccctgaaggccgttttgccgccggagatcccggttttcgccgttggcggcgtcacgc

SEQ ID NO: 297631 - DNA, 75 bp, synthetic construct
  source 1..75: mol_type = other DNA
aagtaacggccatcgtgtcagtctgccgttatcggttttcgatccccaggactaccatccactgctgattaccgt

SEQ ID NO: 297632 - DNA, 75 bp, synthetic construct
  source 1..75: mol_type = other DNA
gcatccatgggcatcacaacctgtaatcagtgattttctgaaagcctgcgcggaccttcgaaaaccatcaccggt

SEQ ID NO: 297633 - DNA, 75 bp, synthetic construct
  source 1..75: mol_type = other DNA
aagaaatctttaatgttattcctgactttaaccttaaagatggtgcacgctggcttctgtaacccggccactgcc

SEQ ID NO: 297634 - DNA, 75 bp, synthetic construct
  source 1..75: mol_type = other DNA
taacggccatcgtgtcagtctgccgttatcggttttcaatccccaggactaccatccactgctgattaccgtttc

SEQ ID NO: 297635 - DNA, 75 bp, synthetic construct
  source 1..75: mol_type = other DNA
aaagttggcgtagaaaatctggttaatgcggtgccgcaactaaaagacattgcgaacgttaaaggcgagcaggta

SEQ ID NO: 297636 - DNA, 75 bp, synthetic construct
  source 1..75: mol_type = other DNA
gtcagtctgccgttatcggttttcgatccccaggactaccatccactgctgattaccgtttccggaaaaatgtta

SEQ ID NO: 297637 - DNA, 75 bp, synthetic construct
  source 1..75: mol_type = other DNA
accatgcaaagcaagagtttctttgaaggaatgaatctgctgaaactcaatccagaagtgattgaaaagcagatg

SEQ ID NO: 297638 - DNA, 75 bp, synthetic construct
  source 1..75: mol_type = other DNA
ggcactggcggaaggtctgaatatggttatgcatccgctggactccctgaaatccggtgtttcctggttgctgga

SEQ ID NO: 297639 - DNA, 75 bp, synthetic construct
  source 1..75: mol_type = other DNA
aatccggcgtttcctggttgctggaaaaactcggcattgtcagtaaagaggctgcaaaggcaaaactgccggaaa

SEQ ID NO: 297640 - DNA, 75 bp, synthetic construct
  source 1..75: mol_type = other DNA
tttcttggtggcgtggtggagggattcaaagcggcggcaggtcccgtcagtgaagcattcgaaccgcttaagccc

SEQ ID NO: 297641 - DNA, 75 bp, synthetic construct
  source 1..75: mol_type = other DNA
atggcaaccgcaccgcgcgtttttacgaaatgcaggatgccatcaagggtgccagcgaacagttgccgatggaaa

SEQ ID NO: 297642 - DNA, 75 bp, synthetic construct
  source 1..75: mol_type = other DNA
agtttggtgatgacgcggcgaaactggcaaacaaccttccggaactgcagcgccagctaaaactgacagcgggca

SEQ ID NO: 297643 - DNA, 75 bp, synthetic construct
  source 1..75: mol_type = other DNA
acccgcaatattgaacagctcggcgatgcgctgaactatctggatgataatgccatgtcgaaaggggcggacatc

SEQ ID NO: 297644 - DNA, 75 bp, synthetic construct
  source 1..75: mol_type = other DNA
tgcgctgggcaccctggcgattgcgatggcggccattctggggccgctcgccctgctgcgttttggaatgaaaac

SEQ ID NO: 297645 - DNA, 75 bp, synthetic construct
  source 1..75: mol_type = other DNA
gcagacggcgcttgtgcgtgctgaactgtaccgggcgggaatttctgcgaaagacgatgcgggagcaactgcccg

SEQ ID NO: 297646 - DNA, 75 bp, synthetic construct
  source 1..75: mol_type = other DNA
ggtgaatgcggatggtaaagtgatgatgccatcgggtggtttgccgtcatggggatatggctttgcggggatgta

SEQ ID NO: 297647 - DNA, 75 bp, synthetic construct
  source 1..75: mol_type = other DNA
caggtgcgccggttgcactattgcggtctggattatccgctttacatgctgttgctgtgatgtttatgaatcctc

SEQ ID NO: 297648 - DNA, 75 bp, synthetic construct
  source 1..75: mol_type = other DNA
tgcgcgatcgcatcgcaggagccggagccactaccacggctgcagggctggcaatgggggcgccagtgatggcgg

SEQ ID NO: 297649 - DNA, 75 bp, synthetic construct
  source 1..75: mol_type = other DNA
cgccatgtcgaaaggggcggacatcattgatgtgatgcaacgcctgggcggtgtggctgaccgtctcgattatcg

SEQ ID NO: 297650 - DNA, 75 bp, synthetic construct
  source 1..75: mol_type = other DNA
tcgaaccgcttaagcccgtgttccagtggattggcgacaaagtgcaggcgctgtggggctggtttactgatctgc

SEQ ID NO: 297651 - DNA, 75 bp, synthetic construct
  source 1..75: mol_type = other DNA
aagcggtcagaaaagatgtatttggtgcagacagtaataccgtgaaagcgttcatcaacagtgctctgctaaatt

SEQ ID NO: 297652 - DNA, 75 bp, synthetic construct
  source 1..75: mol_type = other DNA
cgcgaagtggcgcggcagctcgatgagcgtgaacgcagggccagagcaaaagcgcgtagtaatttcagtgatcaa

SEQ ID NO: 297653 - DNA, 75 bp, synthetic construct
  source 1..75: mol_type = other DNA
taaaaagcatcacgggggcgttgcgccgctgggtggaagctaacccggaactgacaggcacactgatgaaagtag

SEQ ID NO: 297654 - DNA, 75 bp, synthetic construct
  source 1..75: mol_type = other DNA
cagtaaaaagctataccagcatggaagatgccatgaaaggtgtggcaaagcaggtcaatggtctgcgtgatgata

SEQ ID NO: 297655 - DNA, 75 bp, synthetic construct
  source 1..75: mol_type = other DNA
ggttgaaggtggtgcgcgcatgaacgtcgcaaaccctgacgacagctgggaagaccagaaacgtgacctgctggc

SEQ ID NO: 297656 - DNA, 75 bp, synthetic construct
  source 1..75: mol_type = other DNA
agatgccatgaaaggcgtggcaaaacaggttaacggactgcgtgacgacaacggcaaccgcacaaagcagtttta

SEQ ID NO: 297657 - DNA, 75 bp, synthetic construct
  source 1..75: mol_type = other DNA
gagcagtattcccgccgtcttgaagttcgtgatcgcatcgctggcgccggggcgacaacggcagccgctggcgca

SEQ ID NO: 297658 - DNA, 75 bp, synthetic construct
  source 1..75: mol_type = other DNA
gaacattactgggtgctcaggattttgcgtttgaagatcatgctctggggctacctaccaatcagggatatgcag

SEQ ID NO: 297659 - DNA, 75 bp, synthetic construct
  source 1..75: mol_type = other DNA
cacccattcatatcgttgcccagccgggacagagtgcacaggatattgcccgcgaagtggcgcggcagctcgatg

SEQ ID NO: 297660 - DNA, 75 bp, synthetic construct
  source 1..75: mol_type = other DNA
gcaacggcttttgagctgcccgccgatgaactggcggaggggctggggaaaattgcacagttgtataaagtgcca

SEQ ID NO: 297661 - DNA, 75 bp, synthetic construct
  source 1..75: mol_type = other DNA
agatgccatgaaaggtgtggcaaagcagatgaatggcctgcgtgatgataacgacaaccgtaccagacattatta

SEQ ID NO: 297662 - DNA, 75 bp, synthetic construct
  source 1..75: mol_type = other DNA
gggcagtttggcatcgtcggtgaaaacgggccggaaattgttaacggcccggcaaatgtgaccagccggaaaaat

SEQ ID NO: 297663 - DNA, 75 bp, synthetic construct
  source 1..75: mol_type = other DNA
agcaacctgcgacggtgaatgcagacgggaaagtgatgatcccatcgggtggttttccctcatggggatatggct

SEQ ID NO: 297664 - DNA, 75 bp, synthetic construct
  source 1..75: mol_type = other DNA
agcaacctgcgacggtgaatgcagacgggaaagtgatgataccatcgggtggttttccatcatggggatatggct

SEQ ID NO: 297665 - DNA, 75 bp, synthetic construct
  source 1..75: mol_type = other DNA
agcaacctgcgacggtgaatgcagacggcaaagtgatgatgccatcgggtggttttccctcatggggatatggct

SEQ ID NO: 297666 - DNA, 75 bp, synthetic construct
  source 1..75: mol_type = other DNA
atgatgcgctcggttcgatgcagaaagaatccgacattaacaaggactcactttctgcgcagtggttgctggtca

SEQ ID NO: 297667 - DNA, 75 bp, synthetic construct
  source 1..75: mol_type = other DNA
ccgcttaagcccgtgttccagtggattggcgacaaagtgcaggcgctgtggggctggtttactgatctgctgacg

SEQ ID NO: 297668 - DNA, 75 bp, synthetic construct
  source 1..75: mol_type = other DNA
agcaacctgcgacggtgaatgcagacgggaaagtgatgatgccatcgggtggttttccgtcatggggatatggct

SEQ ID NO: 297669 - DNA, 75 bp, synthetic construct
  source 1..75: mol_type = other DNA
ctgacgggcacactgatgaaagtagccgctattgtggctgcggttaccgtaggcctcggcaccttggctgtggcg

SEQ ID NO: 297670 - DNA, 75 bp, synthetic construct
  source 1..75: mol_type = other DNA
aaccaggaactttcgaaacaagaggcgcggctgaagcgactgggggaagctcagcgcaggatgaatgcggcgcgt

SEQ ID NO: 297671 - DNA, 75 bp, synthetic construct
  source 1..75: mol_type = other DNA
ctggcatccggtccgctggcgatgctgcgcgttgccctgtatgccgtatctggtctgttaggtgctctgctcagt

SEQ ID NO: 297672 - DNA, 75 bp, synthetic construct
  source 1..75: mol_type = other DNA
agcaacctgcgacggtgaatgcagacggtaaagtgatgattccatcgggtggttttccatcatggggatatggct

SEQ ID NO: 297673 - DNA, 75 bp, synthetic construct
  source 1..75: mol_type = other DNA
agcaacctgcgacggtgaatgcagacggaaaagtgatgatgccatcgggtggttttccatcatggggatatggct

SEQ ID NO: 297674 - DNA, 75 bp, synthetic construct
  source 1..75: mol_type = other DNA
ggcaaacgtgaccagtcggaaaaatacagctgcactggctgccgttgtcgccggaatgatgggtgttgctgccgc

SEQ ID NO: 297675 - DNA, 75 bp, synthetic construct
  source 1..75: mol_type = other DNA
taccccaaactggcaaaggcttatcccacgaataaattaccggatttacggggtgaatttatccgtggctgggat

SEQ ID NO: 297676 - DNA, 75 bp, synthetic construct
  source 1..75: mol_type = other DNA
gtgcaggccgaccacgacggcaatgcctgggtgccagaccatagctggggtggtttcgagggcggaattaaccgt

SEQ ID NO: 297677 - DNA, 75 bp, synthetic construct
  source 1..75: mol_type = other DNA
cctcgctggatgatctgcaatggtggggcgatttcacgcccgatctgggctacgtcattcccaatacccgcgaca

SEQ ID NO: 297678 - DNA, 75 bp, synthetic construct
  source 1..75: mol_type = other DNA
catcgccctgaccacgctgacgatgaaaccacctctttcatgcagtttggtatctggtacgaatacggcggcgga

SEQ ID NO: 297679 - DNA, 75 bp, synthetic construct
  source 1..75: mol_type = other DNA
agcgacaatgagcgccatccgcctggcccgtggttttaccggtcgcgacaaaatcattaaatttgaaggttgtta

SEQ ID NO: 297680 - DNA, 75 bp, synthetic construct
  source 1..75: mol_type = other DNA
ctttaggtcaaccaaactcaccgggcgttccggcagatttcgccaaacatacattaacctgtacttataacgatc

SEQ ID NO: 297681 - DNA, 75 bp, synthetic construct
  source 1..75: mol_type = other DNA
gtttgtgcgcccggcatttgatgtgcgcagtgaacaggcagcacaggtggcgattgcacggatgaacagggccat

SEQ ID NO: 297682 - DNA, 75 bp, synthetic construct
  source 1..75: mol_type = other DNA
cggcaccagccgtcgcgtcaccttcacttcctccattgacacaatctacggccagacgactgtaacaagcgaggc

SEQ ID NO: 297683 - DNA, 75 bp, synthetic construct
  source 1..75: mol_type = other DNA
tgggcgatcgggaagctgaactggcaacgctcgaatttttaaaacagtgggtgcctgcgggaaaatcgccgattt

SEQ ID NO: 297684 - DNA, 75 bp, synthetic construct
  source 1..75: mol_type = other DNA
acgcaaaacagttcccctactcccacaatctgggaaaatttggggaagccagacaaaatttgactataggtgaac

SEQ ID NO: 297685 - DNA, 75 bp, synthetic construct
  source 1..75: mol_type = other DNA
atgaaattaatcactgcaccatgcagagcattacttgctctgccgttttgctacgccttttctgcggccgctgaa

SEQ ID NO: 297686 - DNA, 75 bp, synthetic construct
  source 1..75: mol_type = other DNA
gaagtgcgtccggcagaacatgacgacacaaaaacacccgcaattacctcgacatcttctccttcatttcgtttt

SEQ ID NO: 297687 - DNA, 75 bp, synthetic construct
  source 1..75: mol_type = other DNA
ctcgaaacgcggggcgttaaatccattctctctttcaatacgacagtgaatacgacgacgcgccgcgtccagttc

SEQ ID NO: 297688 - DNA, 75 bp, synthetic construct
  source 1..75: mol_type = other DNA
cctgttccgtggccctcagccacacccccaacgggttggctgaaatgtaacggtgcagcattttcttctgaaatg

SEQ ID NO: 297689 - DNA, 75 bp, synthetic construct
  source 1..75: mol_type = other DNA
atgcctcaatctctcccggacactacgccgccgaaaaggcgctttcgctggccgacggggatgccgcagctggta

SEQ ID NO: 297690 - DNA, 75 bp, synthetic construct
  source 1..75: mol_type = other DNA
gacgccaataatgctggattatggctggaactggacgccattcttgcggtggtgatcggcggtggatcactgatg

SEQ ID NO: 297691 - DNA, 75 bp, synthetic construct
  source 1..75: mol_type = other DNA
gatgccaacaacgccggattatggctggagctggacgccattcttgcggtggtgattggcggcggatcgctgatg

SEQ ID NO: 297692 - DNA, 75 bp, synthetic construct
  source 1..75: mol_type = other DNA
ccacggtgttgaacaagctggcggaaaagctggccaaagaccagcacggcgcagatattcctgacccggcgctct

SEQ ID NO: 297693 - DNA, 75 bp, synthetic construct
  source 1..75: mol_type = other DNA
gcaggtggtgcttcaggatgggcgtttgttcggtagccctatcgacattcttaaccgtgcggctcccgttgcgtt

SEQ ID NO: 297694 - DNA, 75 bp, synthetic construct
  source 1..75: mol_type = other DNA
ccgtaggcgcggtgatggctatcgccggagccacaactgccgcgatgacggtagcgggattcagcctgccgattg

SEQ ID NO: 297695 - DNA, 75 bp, synthetic construct
  source 1..75: mol_type = other DNA
agttactgattgttgataccgatgagcagccgcgtaccgatgccagtgccgaagggctggctagtttaaatccgt

SEQ ID NO: 297696 - DNA, 75 bp, synthetic construct
  source 1..75: mol_type = other DNA
gtgattcttggtcaggtgttgactgcaggggcagggcagaatccggcaaggcaatcggctattaaaggtggtctt

SEQ ID NO: 297697 - DNA, 75 bp, synthetic construct
  source 1..75: mol_type = other DNA
cctgttccgtggccctcagccacaccgccaactggctggctgaaatgtaacggtgcagcattttcttctgaaatg

SEQ ID NO: 297698 - DNA, 75 bp, synthetic construct
  source 1..75: mol_type = other DNA
caactgatcacctccgggcagatcgtcacgtttaactcgccggatctctcatggtttggcagtggatcgctgttg

SEQ ID NO: 297699 - DNA, 75 bp, synthetic construct
  source 1..75: mol_type = other DNA
atgctcacttatgtgttgagcgggctgtgtgcggcgattgcgggcattatcgtggcggcggatattcgcggtgcc

SEQ ID NO: 297700 - DNA, 75 bp, synthetic construct
  source 1..75: mol_type = other DNA
actggcgattggtatgacgctggtgatcgccaccggtgggattgatctctccgtaggggcggtgatggctatcgc

SEQ ID NO: 297701 - DNA, 75 bp, synthetic construct
  source 1..75: mol_type = other DNA
aagaaataaatttaatctcacaggacactaaatgtctttactctggcgtgcttacgcagactctttcagataata

SEQ ID NO: 297702 - DNA, 75 bp, synthetic construct
  source 1..75: mol_type = other DNA
taacgatctgggtaataaatccacccgtacaccggggcgtaagatttcagaaaaagcgggtaaatttaatttcct

SEQ ID NO: 297703 - DNA, 75 bp, synthetic construct
  source 1..75: mol_type = other DNA
atgtcgcatttaaaaactgactggctgtgtgttgctaccgaaggggataccgttgacggcagggatattaaacgc

SEQ ID NO: 297704 - DNA, 75 bp, synthetic construct
  source 1..75: mol_type = other DNA
gtggctggattatctggacgcactggaactggtcgatacttccggtacgcccgatattgaatggcctacgcctcc

SEQ ID NO: 297705 - DNA, 75 bp, synthetic construct
  source 1..75: mol_type = other DNA
gaaaattattatcaatagcccggataactaccctgtacttactgaatatccagcgaagacacatgaacaggaaat

SEQ ID NO: 297706 - DNA, 75 bp, synthetic construct
  source 1..75: mol_type = other DNA
gacgcactggaactggttgatacctccagtgcgccagatattgaatggcctacgcctccggcagttcaggccaga

SEQ ID NO: 297707 - DNA, 75 bp, synthetic construct
  source 1..75: mol_type = other DNA
aacaatgataatcagaagaaatctggcaaaagaccgttttacagtaccaaaaacacaggcgggaaccaatcgtgt

SEQ ID NO: 297708 - DNA, 75 bp, synthetic construct
  source 1..75: mol_type = other DNA
gggaagatatagatctgaaaaatggaacaatgataatcagaagaaatctggcaaaagaccgttttacagtaccaa

SEQ ID NO: 297709 - DNA, 75 bp, synthetic construct
  source 1..75: mol_type = other DNA
ttaaggggatctcgccattaaaggaatcaagaaccattccagatcctctttcgcgggaggaatttatccgtctta

SEQ ID NO: 297710 - DNA, 75 bp, synthetic construct
  source 1..75: mol_type = other DNA
tgtacagcaacaggcgcaggcccgtgaggaagtggaagatgcggtggaagtccgcctgagcaaagacgaacaact

SEQ ID NO: 297711 - DNA, 75 bp, synthetic construct
  source 1..75: mol_type = other DNA
ggaaaacagcgacgtcaaaattaccgtgccgatgacgctgattcagcgtccgctgtcggtggaaaaacgtaaggg

SEQ ID NO: 297712 - DNA, 75 bp, synthetic construct
  source 1..75: mol_type = other DNA
tggccgaaaaatttctggctctaaaagaggccgaagttgccagaagttcactcaatacataccgtgccgtcatca

SEQ ID NO: 297713 - DNA, 75 bp, synthetic construct
  source 1..75: mol_type = other DNA
gatccgaatctgaaaaaactgtttgatatcggcgttgcaggtttgacgctgatggtgcctttcctcgccgcttac

SEQ ID NO: 297714 - DNA, 75 bp, synthetic construct
  source 1..75: mol_type = other DNA
ccggtggccgatgccgttgccatgctgctggctggtaacaaactgagcaacgacgagctgaacatgttaggtgaa

SEQ ID NO: 297715 - DNA, 75 bp, synthetic construct
  source 1..75: mol_type = other DNA
gacaggtcgatgtcctggctggcctgggagccatgtctgacaaattcggtaaatccagtaacaaattgacattct

SEQ ID NO: 297716 - DNA, 75 bp, synthetic construct
  source 1..75: mol_type = other DNA
tggctggctgacgcgtcagtcacgccgcaaaggtaaccgtaatacgtccaatctttatcatctgaatgctgatcg

SEQ ID NO: 297717 - DNA, 75 bp, synthetic construct
  source 1..75: mol_type = other DNA
gcgtgaccgcgctgccgcctggtttgctgaagaagacaccggcgcacaggtactgctgtgctcggaaatcggttc

SEQ ID NO: 297718 - DNA, 75 bp, synthetic construct
  source 1..75: mol_type = other DNA
attggtatcaaccaggacgatcgtggcgacaacctgatcgtactgacgccttccgatcatatgctggtgccggac

SEQ ID NO: 297719 - DNA, 75 bp, synthetic construct
  source 1..75: mol_type = other DNA
gctctacccggagcgtatttatcaggaatttgaaggtgataacgccacctggtggaacttcgatccgcgcgttga

SEQ ID NO: 297720 - DNA, 75 bp, synthetic construct
  source 1..75: mol_type = other DNA
atgaaagagtatgatcgcgtgctggcgatggtgcagggggagtctcaggcccagcaacagcttattgacagcctg

SEQ ID NO: 297721 - DNA, 75 bp, synthetic construct
  source 1..75: mol_type = other DNA
atatcggcgttgcgggcttgacgctgatggtgcctttcctcgcagcgtacatcggttattccattgcagagcgtt

SEQ ID NO: 297722 - DNA, 75 bp, synthetic construct
  source 1..75: mol_type = other DNA
gcaagctgggttatatcgcagcagtggctgtcggagcagtggtgacggctgtttgtgtgaacgtgctgaaaagtc

SEQ ID NO: 297723 - DNA, 75 bp, synthetic construct
  source 1..75: mol_type = other DNA
atgaaagtaatctcatttctgaatccgaaagggggttcaggtaaaacaactgccgtaatcaacatagccactgcg

SEQ ID NO: 297724 - DNA, 75 bp, synthetic construct
  source 1..75: mol_type = other DNA
ctctggatttctccgcagcaggaagtgtggttacagtcctggaagcacaggcttacagccgcaaagtagaagccc

SEQ ID NO: 297725 - DNA, 75 bp, synthetic construct
  source 1..75: mol_type = other DNA
gcctacctccagtacacctccggcagcacccgttttccccgtggcgtcattatcacccatcgcgaagtgatggct

SEQ ID NO: 297726 - DNA, 75 bp, synthetic construct
  source 1..75: mol_type = other DNA
tggtgaggcccgacaagatttaaccataaaagaactggctgaaaaatttctggcactgaaagaaactgaagtcgc

SEQ ID NO: 297727 - DNA, 75 bp, synthetic construct
  source 1..75: mol_type = other DNA
gtgcgaatgctcaggctttgcgtgaactggctgatgtggcaggaaccgccgaagcggttgatgtgctgtgcctgt

SEQ ID NO: 297728 - DNA, 75 bp, synthetic construct
  source 1..75: mol_type = other DNA
atgaaatttcaggccattgtattagcaggttttcttgtcatgccttatgcgttggcagatgatcagggaggttta

SEQ ID NO: 297729 - DNA, 75 bp, synthetic construct
  source 1..75: mol_type = other DNA
gcgcactgcgccgggccattgagccgctgggatatctcattcgtgtgtctgagtggtgggagttcgacggcgaac

SEQ ID NO: 297730 - DNA, 75 bp, synthetic construct
  source 1..75: mol_type = other DNA
acccgctgacaggcgcacagcaaggcgcaccaaatttctcctggagtgccgcgcatttgtatatgttgtataacg

SEQ ID NO: 297731 - DNA, 75 bp, synthetic construct
  source 1..75: mol_type = other DNA
ttgcaggagtcggtggatcaggccagctatatgtacagcgataaccattatctggcggagatggcaaccatcctc

SEQ ID NO: 297732 - DNA, 75 bp, synthetic construct
  source 1..75: mol_type = other DNA
cctttgcgccgttctccggtgaaattgcccagatgagcgccaatattcgcgctcaatatgaagcctcgccgcgcc

SEQ ID NO: 297733 - DNA, 75 bp, synthetic construct
  source 1..75: mol_type = other DNA
cactgtgccgcccgtttaccagattgaggcaccaacgcagatcatcatccagacgcagccaggacaaagtgcgca

SEQ ID NO: 297734 - DNA, 75 bp, synthetic construct
  source 1..75: mol_type = other DNA
ctccgcaggcacggtgcttcgtgtgctggcatccggtccgctggcgatgctgcgcgttgccctgtatgccatatc

SEQ ID NO: 297735 - DNA, 75 bp, synthetic construct
  source 1..75: mol_type = other DNA
cgctatgtcgaaaggggcagacatcattgatgtcatgcaacgcctgggcggtgtggctgatcgtctggattatcg

SEQ ID NO: 297736 - DNA, 75 bp, synthetic construct
  source 1..75: mol_type = other DNA
attacccgggacattcccggctatctgttcgccggtggtgtggcttacgacggcgatgtaattacggtttacccc

SEQ ID NO: 297737 - DNA, 75 bp, synthetic construct
  source 1..75: mol_type = other DNA
tgcccggtgcatctgctgccttatctcgcctgggcgttttccgttgaccgctgggatcgcaactggccggaagag

SEQ ID NO: 297738 - DNA, 75 bp, synthetic construct
  source 1..75: mol_type = other DNA
cagccagcaatttcatgcgttgtgccgaagctgtcggaacacgcattacagacattccggtagacctcaacacgc

SEQ ID NO: 297739 - DNA, 75 bp, synthetic construct
  source 1..75: mol_type = other DNA
atgaaaataaaaactattttaacgccagtagcctgtgctctgctgataagtttttccgcccatgccgctaacgcc

SEQ ID NO: 297740 - DNA, 75 bp, synthetic construct
  source 1..75: mol_type = other DNA
cattggtccggatgaagaagcacagctcaagaaaattgcgcaggcgctgcagttgccgctggagcagtatctgtg

SEQ ID NO: 297741 - DNA, 75 bp, synthetic construct
  source 1..75: mol_type = other DNA
atgtttggtattttcaaaaagaaaacccgcaaggccattaccgaggtgaagaagatggagaaccgtgacgcagtg

SEQ ID NO: 297742 - DNA, 75 bp, synthetic construct
  source 1..75: mol_type = other DNA
tatcgctcaggaagaagaagcgcaactgaagaaaattgcgcaggcgctgcagttgccgctggagcagtacctgtg

SEQ ID NO: 297743 - DNA, 75 bp, synthetic construct
  source 1..75: mol_type = other DNA
attggtccggatgaagaagcacagctcaagaaaattgctcaggcgctgcagttaccgctggagcagtacctgtga

SEQ ID NO: 297744 - DNA, 75 bp, synthetic construct
  source 1..75: mol_type = other DNA
gctggctgatgttgccggtactgatgatgcagttaatgtgctgtgcctgtgtctggatatcgctgaccaggatgg

SEQ ID NO: 297745 - DNA, 75 bp, synthetic construct
  source 1..75: mol_type = other DNA
gatcggtgaagaagaagagaaacagctgaagaaaatcgctcaggcgctgcagcttccactggatcagtacctgtg

SEQ ID NO: 297746 - DNA, 75 bp, synthetic construct
  source 1..75: mol_type = other DNA
gccaatgccgacgcggtggtgaaggtgatgctcgatcctaaagagttcaacacctttgtcccgctgggaacggcg

SEQ ID NO: 297747 - DNA, 75 bp, synthetic construct
  source 1..75: mol_type = other DNA
cgactggtggctacgtaaccgcgatcacaacggcaacggcgtaccggaatatggcgcaacccgcgataaagccca

SEQ ID NO: 297748 - DNA, 75 bp, synthetic construct
  source 1..75: mol_type = other DNA
agcaaggagcaccaaatttctcctggagcgccgcgcatttgtatatgttgtataacggttttttccgtaagcagt

SEQ ID NO: 297749 - DNA, 75 bp, synthetic construct
  source 1..75: mol_type = other DNA
atgttaggtttcttcaaaaagaaaactcgtaaagcagttatcgaagtcaaaaaaatggagaaccgtgatgcggtt

SEQ ID NO: 297750 - DNA, 75 bp, synthetic construct
  source 1..75: mol_type = other DNA
aaccgccgatggtccgattcaggagaattacaacccgctgaccggcgcacagcaaggtgcaccaaatttctcctg

SEQ ID NO: 297751 - DNA, 75 bp, synthetic construct
  source 1..75: mol_type = other DNA
tgccgacgcggtggtgaaggtgatgctggacaccaaagagttcaacacctttgtcccgctgggaacggcggcgtt

SEQ ID NO: 297752 - DNA, 75 bp, synthetic construct
  source 1..75: mol_type = other DNA
aggttaagcgtgaaaatccgccagtcgaaaccggagcatggaaagacgctgttgactggatactcaaagaggcct

SEQ ID NO: 297753 - DNA, 75 bp, synthetic construct
  source 1..75: mol_type = other DNA
cggaaattaaatcattcatcactggtttcctgagcgacccggcgcacgataaccaatcttcaagcagtctgcttg

SEQ ID NO: 297754 - DNA, 75 bp, synthetic construct
  source 1..75: mol_type = other DNA
aacaattaatcgaagaagccaaattaaaaatagcgattacgaaatgccaccccaattcagggatggcgcgagtag

SEQ ID NO: 297755 - DNA, 75 bp, synthetic construct
  source 1..75: mol_type = other DNA
aagcgtattgatattgcggcgaatatcggcaccgctctggaagcgccaggcgcgtttgccaacggcgcggaaggc

SEQ ID NO: 297756 - DNA, 75 bp, synthetic construct
  source 1..75: mol_type = other DNA
tttccgttttttgttggtataaaacgctacataaacttgcgctaagcaaagcctatgccttgctcagtatgagtt

SEQ ID NO: 297757 - DNA, 75 bp, synthetic construct
  source 1..75: mol_type = other DNA
ttttcgttaacagcaatggcacagttgctggaagttgggatgtctagcgtattgaaacagtattatagccattct

SEQ ID NO: 297758 - DNA, 75 bp, synthetic construct
  source 1..75: mol_type = other DNA
agatgcccgtctccatactgaatccgatggccgctctgctatccgtttgcgcttcgaatgccctgaaaaagtgga

SEQ ID NO: 297759 - DNA, 75 bp, synthetic construct
  source 1..75: mol_type = other DNA
tgtcagtaccggacgacccgcgatgtgttgctacaaccgctgcaccttgcagatgcccgtctccatactgaatcc

SEQ ID NO: 297760 - DNA, 75 bp, synthetic construct
  source 1..75: mol_type = other DNA
gcgcaacctttgcaagccaacgctgccggtttacccgcctgctgaagaccgtttccactggcgagtactgagcca

SEQ ID NO: 297761 - DNA, 75 bp, synthetic construct
  source 1..75: mol_type = other DNA
tgaaaccggagcatggaaagacgctgttgactgggtactcaaggaggcctgccaggctgtaaacattggcaacaa

SEQ ID NO: 297762 - DNA, 75 bp, synthetic construct
  source 1..75: mol_type = other DNA
ttcaggccttattcactgccccgccagtcccggtgacatcagaaggactggttaaagccgtgcgcttttatgaac

SEQ ID NO: 297763 - DNA, 75 bp, synthetic construct
  source 1..75: mol_type = other DNA
ttaaacgactggtcagccaactgaaaaaagccaagccggactgcaaattaccggagaaggcgatggactacctga

SEQ ID NO: 297764 - DNA, 75 bp, synthetic construct
  source 1..75: mol_type = other DNA
cagtttttgagcctcgatttaaaaaatcttgcgggcatgattctggagaaaaccgggcgcacctcgcataccctg

SEQ ID NO: 297765 - DNA, 75 bp, synthetic construct
  source 1..75: mol_type = other DNA
tggaggagctaaaaggcaccccccaccttcagacagttgttttaatgtctatcattcaggctgctcagcatgcaa

SEQ ID NO: 297766 - DNA, 75 bp, synthetic construct
  source 1..75: mol_type = other DNA
cggcttaggggccattctctcaacctggctgagtaatcaacagggcaatcaatcagttagcggcgagcaactgga

SEQ ID NO: 297767 - DNA, 75 bp, synthetic construct
  source 1..75: mol_type = other DNA
ccaaaaccgataacatccgcatttacctggtattacatgatgagttcacgcagcgactgatagaggaaggaaaga

SEQ ID NO: 297768 - DNA, 75 bp, synthetic construct
  source 1..75: mol_type = other DNA
gcggatgatgtcggctggcggggtctttaataatcaaactgacggggcgattatgagaggtgctgcgctgacagg

SEQ ID NO: 297769 - DNA, 75 bp, synthetic construct
  source 1..75: mol_type = other DNA
agcgtcggcgtgaagtacagcagcaaagaaagttcgctgaatctggatgcgtacaactggaaagaggatggcatc

SEQ ID NO: 297770 - DNA, 75 bp, synthetic construct
  source 1..75: mol_type = other DNA
cggggtggaggcagggctatatagtctgccatcataagcgaagtaatcaaatttcatcattgtcattaccgatgt

SEQ ID NO: 297771 - DNA, 75 bp, synthetic construct
  source 1..75: mol_type = other DNA
aagataaatttggagatgatctgatgataaaagcagaaattactccgcagggggcagatgatgccgcaaaaatca

SEQ ID NO: 297772 - DNA, 75 bp, synthetic construct
  source 1..75: mol_type = other DNA
ccggaactgaagccgcgcaacaatctggtgctggaaaaaccgactattctggtagccgaggatttaaccccaagc

SEQ ID NO: 297773 - DNA, 75 bp, synthetic construct
  source 1..75: mol_type = other DNA
aaccgggcgcacctcgcatacactgattctggcccgtgcctcggcgatcccggtactgagtggcttgccgctgga

SEQ ID NO: 297774 - DNA, 75 bp, synthetic construct
  source 1..75: mol_type = other DNA
cgcactgaatgggtggatgagcgcactactgcgcaaaagatggttgatgcaatggggatttatggccgcgatttt

SEQ ID NO: 297775 - DNA, 75 bp, synthetic construct
  source 1..75: mol_type = other DNA
ctatcaaaaaagtaccggcgagcgtctgtttaaaccctgggcgttgtttaagcgtcaggatctgaaaatcgcggt

SEQ ID NO: 297776 - DNA, 75 bp, synthetic construct
  source 1..75: mol_type = other DNA
gaaatcgctgaaaaccagcaaatgatctcgctgttatcaccgttccagaacaaaggcaaagcgcagctggaagtg

SEQ ID NO: 297777 - DNA, 75 bp, synthetic construct
  source 1..75: mol_type = other DNA
cagcaattacccacctacatgcaacccaagcagtgctgtgctatcgcccaactgccgctatcgcacaatggcaag

SEQ ID NO: 297778 - DNA, 75 bp, synthetic construct
  source 1..75: mol_type = other DNA
gtcatgaacttggcgggataatgtccgtatacaataaacacgactggatagaagctcagcgcaaagcgtatgagc

SEQ ID NO: 297779 - DNA, 75 bp, synthetic construct
  source 1..75: mol_type = other DNA
caaatttatcaggtgaaggggttatgccccacgtcaccgaaaagatgttggggcatgagttgggaggagtgatgg

SEQ ID NO: 297780 - DNA, 75 bp, synthetic construct
  source 1..75: mol_type = other DNA
gatcagtggtgggataagtatgttactgatctgaaacccaatacacagacgctttacagatccgtcgtgtacaac

SEQ ID NO: 297781 - DNA, 75 bp, synthetic construct
  source 1..75: mol_type = other DNA
gtgaccacatattgtccatactcgataaaaccaaagattacccagaaattaaacgtatagttattaatcgtctgc

SEQ ID NO: 297782 - DNA, 75 bp, synthetic construct
  source 1..75: mol_type = other DNA
ttctccatagtcgattatcgaaaaaaaagcgtactatgctgatttccgggctgaatgctcttcctcctgattctc

SEQ ID NO: 297783 - DNA, 75 bp, synthetic construct
  source 1..75: mol_type = other DNA
cagaaagaacgctggaaatgacgtggggcgagttctggaaagcagttaaggccagagacggtaaaatccctgcgc

SEQ ID NO: 297784 - DNA, 75 bp, synthetic construct
  source 1..75: mol_type = other DNA
gcggtgccagcggcgcgatttatggcgtgcgtttattacaggttctgcgcgatgtcacagatatcgaaacgcatc

SEQ ID NO: 297785 - DNA, 75 bp, synthetic construct
  source 1..75: mol_type = other DNA
cgccaacggcttttggtaagacagttaccgcagcggcagtgattgccagacggaaagtgaatacactgatactgg

SEQ ID NO: 297786 - DNA, 75 bp, synthetic construct
  source 1..75: mol_type = other DNA
tgctcagaatgtgggataaacgtcagcggggttataaagcgatggggtacagaattatagctgaggatgatgaac

SEQ ID NO: 297787 - DNA, 75 bp, synthetic construct
  source 1..75: mol_type = other DNA
ctggttgtggatgggtacacggacaagataacgcattaccggaagccaacgaaaaaggagctgcgggagctgaaa

SEQ ID NO: 297788 - DNA, 75 bp, synthetic construct
  source 1..75: mol_type = other DNA
gatggcttactgacccgtgcggcagatgtggtgctgaaagagcgtcgcccgttggtgctctgcgtgcgtgaaaca

SEQ ID NO: 297789 - DNA, 75 bp, synthetic construct
  source 1..75: mol_type = other DNA
gcggtgccagcggcgcgatttatggcgtgcgtttattacaggttctgcgtgatgtcgcagatgttgaaacgcatc

SEQ ID NO: 297790 - DNA, 75 bp, synthetic construct
  source 1..75: mol_type = other DNA
aaacgtatagttattaatcgtctgctctccggctcaatactcacgggtaaagatgaagagtacatatacagccaa

SEQ ID NO: 297791 - DNA, 75 bp, synthetic construct
  source 1..75: mol_type = other DNA
atggaaagagtctttcgcaacctgaaaagtgaatggcttccgaaagatggttatggtgattttagccatgcggta

SEQ ID NO: 297792 - DNA, 75 bp, synthetic construct
  source 1..75: mol_type = other DNA
tgcgtaatgcactggaaacacgaccgcgtgatggccgcctgctgtttcattcagatcaaggtgttcagtataaaa

SEQ ID NO: 297793 - DNA, 75 bp, synthetic construct
  source 1..75: mol_type = other DNA
tacagcgtttatcgacctcacatgaacaacgatgatttaccaccttgcttacatgaagaaaagtggaaacacgtt

SEQ ID NO: 297794 - DNA, 75 bp, synthetic construct
  source 1..75: mol_type = other DNA
ctgccgctaaatcccgcgttgccaacgacccgcctttacgccatgtgtcgtaaagcgcaggtagcgcatatcctt

SEQ ID NO: 297795 - DNA, 75 bp, synthetic construct
  source 1..75: mol_type = other DNA
tatggggggaggaaaaaggcgtaataggcgtgccgttagccaatcggcatactcgcgaggcgcggcgttgctttg

SEQ ID NO: 297796 - DNA, 75 bp, synthetic construct
  source 1..75: mol_type = other DNA
gccgctgacgacggcgaacagggcgagagcgtttggttttctccaccgtggcgacactggtcagataagcggcca

SEQ ID NO: 297797 - DNA, 75 bp, synthetic construct
  source 1..75: mol_type = other DNA
gctgctgaaatttcgtcgtgaattcgaccagtacgtcaacctgcgcccggttcgtctctttcctggcgttccctg

SEQ ID NO: 297798 - DNA, 75 bp, synthetic construct
  source 1..75: mol_type = other DNA
agcagaactgataatattcattttgccttctcttaactatttatctcttggtgatgctgccaacttactgattta

SEQ ID NO: 297799 - DNA, 75 bp, synthetic construct
  source 1..75: mol_type = other DNA
tactggcaatcatagatgatcatgatcgcgcacaaaaaaaacaacgcaacaaaaacgtcttcatttatttatgtc

SEQ ID NO: 297800 - DNA, 75 bp, synthetic construct
  source 1..75: mol_type = other DNA
ccggtggttgtgctatcgaataatgacggttgcgttatcgcccgaaacgctgattatgtggaattgcaagtaaca

SEQ ID NO: 297801 - DNA, 75 bp, synthetic construct
  source 1..75: mol_type = other DNA
agttataacgccgaactcaattaattttgatttccataagattatttataatattatatctcatccttgtgatgg

SEQ ID NO: 297802 - DNA, 75 bp, synthetic construct
  source 1..75: mol_type = other DNA
atggcatgtggcgagttctccctgattgcccgttattttgaccgagtaagaagctctcgtcttgatgtcgaactt

SEQ ID NO: 297803 - DNA, 75 bp, synthetic construct
  source 1..75: mol_type = other DNA
atccgaactggtcgatggggcgtaaaattttctgtcgattcggctaccatgatgaacaaaggtctggaatacatt

SEQ ID NO: 297804 - DNA, 75 bp, synthetic construct
  source 1..75: mol_type = other DNA
ccgcgctatgccgtaatggatgatgaggcgagtgcaaatcttctcaaaacgacgctccgacaacacggtagccgc

SEQ ID NO: 297805 - DNA, 75 bp, synthetic construct
  source 1..75: mol_type = other DNA
aggagccagcggcatttcatgttgatttactggcggcgcactaccgccatgatgcaggtttacttggggctgcgc

SEQ ID NO: 297806 - DNA, 75 bp, synthetic construct
  source 1..75: mol_type = other DNA
aagaaccagatatatacaatgtttctgtttctcccgccagttaccgtaacaatgccggaataattggcgctgcat

SEQ ID NO: 297807 - DNA, 75 bp, synthetic construct
  source 1..75: mol_type = other DNA
gaggaggtattgtcagtaacggggagttgttaactggcccgggggggcttgccgggcacctcggccatatgattg

SEQ ID NO: 297808 - DNA, 75 bp, synthetic construct
  source 1..75: mol_type = other DNA
gaaccgacttactggtttgccaggaataacgttgaatgatgctcaggctgcagcctgggcagagtacaacgctct

SEQ ID NO: 297809 - DNA, 75 bp, synthetic construct
  source 1..75: mol_type = other DNA
aaagcgccacgcgtttcctctcccagggtaaaatgcctgcgttcctcggcggtctgccaggtgctgcattagcca

SEQ ID NO: 297810 - DNA, 75 bp, synthetic construct
  source 1..75: mol_type = other DNA
aacgttcctgcaatcctcgaagcattaggcggtgccgacaatattgtcagcctcgataactgcattacccgtctg

SEQ ID NO: 297811 - DNA, 75 bp, synthetic construct
  source 1..75: mol_type = other DNA
gctgaacactgcgggcgactcgaccatcaccaatggtggtacgggtagccttatcaatggcgataatgcgcgggt

SEQ ID NO: 297812 - DNA, 75 bp, synthetic construct
  source 1..75: mol_type = other DNA
gcaattgcttctggtcgcggcattgcggcggcagcgcagggcgagctggctggcgcggatgctagaactattttc

SEQ ID NO: 297813 - DNA, 75 bp, synthetic construct
  source 1..75: mol_type = other DNA
gtcctgtatgtcatccacgcactgttaaccggcctcggcttcactgtcatgtccgttctcggtgtcaccatcggt

SEQ ID NO: 297814 - DNA, 75 bp, synthetic construct
  source 1..75: mol_type = other DNA
tctggtggcgttaattcgctttaccgacgcgggcggcacgcaggaagtctgcggtcaaaccgtaagcggcgcact

SEQ ID NO: 297815 - DNA, 75 bp, synthetic construct
  source 1..75: mol_type = other DNA
tttactggcggcgcactaccgccacgatgcaggtttacttggggctgcgctgttggcccagggagaaatattatg

SEQ ID NO: 297816 - DNA, 75 bp, synthetic construct
  source 1..75: mol_type = other DNA
accgatgctatgctgctgggcggcctgatgaaagcgttgtttgctcgcggtataacgctggtggcgacgtcaaat

SEQ ID NO: 297817 - DNA, 75 bp, synthetic construct
  source 1..75: mol_type = other DNA
gaaccagacgctggcggtctcttttactaccttgtgcgtcgatgcccgcagtcagcatgactatattgcgctctc

SEQ ID NO: 297818 - DNA, 75 bp, synthetic construct
  source 1..75: mol_type = other DNA
tgctgcgggtgcatgaagaattaaccgcattgcaagggcagagcgatccgctggaaattattgctgatcgtttca

SEQ ID NO: 297819 - DNA, 75 bp, synthetic construct
  source 1..75: mol_type = other DNA
gtatctatgacaaggatgaagccgaacgcattgtcgaaaataccgcatatactacagaacgtcagccggaacgcg

SEQ ID NO: 297820 - DNA, 75 bp, synthetic construct
  source 1..75: mol_type = other DNA
tcgctgcagtcatcactggcttcatcgtatacaacgagcaaggcaaatgggaagaagaggctgcggccgtacaga

SEQ ID NO: 297821 - DNA, 75 bp, synthetic construct
  source 1..75: mol_type = other DNA
ggctttaatgcccagacaccaatgtgggagaaatatcagcgcatgttgaacgtctggcattcctgcccgcgtcag

SEQ ID NO: 297822 - DNA, 75 bp, synthetic construct
  source 1..75: mol_type = other DNA
tttatcactgtttccaccggcgttggcggcggtgtagtgagcggcggtaaactgcgtaccggccctggcggtctg

SEQ ID NO: 297823 - DNA, 75 bp, synthetic construct
  source 1..75: mol_type = other DNA
catcgtcagaactgacacacggcgaagcagtgaaagctcttggattcctgaaacaaaaagccactgaacagaagg

SEQ ID NO: 297824 - DNA, 75 bp, synthetic construct
  source 1..75: mol_type = other DNA
atgaagggggaaatgatgtggctcaccagtcagtcaccggaagacgcgattaactgtcaaattttcgcagctctc

SEQ ID NO: 297825 - DNA, 75 bp, synthetic construct
  source 1..75: mol_type = other DNA
cagcggctataaagagattgggctgacagaaaaagaatttcgtcagcttaaaaagctgaaactcgaaagccgaac

SEQ ID NO: 297826 - DNA, 75 bp, synthetic construct
  source 1..75: mol_type = other DNA
aaccgtcaaaattcgcgaaaccacctttacctacagccaaaatgccgatgggagctacaccttaacggcgcctga

SEQ ID NO: 297827 - DNA, 75 bp, synthetic construct
  source 1..75: mol_type = other DNA
tcgccgggaagggctggcggtttatatgatcaccaaagagggcgatagctttaaaacctggatgtcgccgcagtt

SEQ ID NO: 297828 - DNA, 75 bp, synthetic construct
  source 1..75: mol_type = other DNA
ggcggtagtcgatattaacggtcacgggattagcacctccggcagctaccgtaattattacgaactggatggcaa

SEQ ID NO: 297829 - DNA, 75 bp, synthetic construct
  source 1..75: mol_type = other DNA
tgttggttgcgatcaaaaaacacaacccgccaaaacccacgctactgaagttaccgttcttgaaggcaaaaccat

SEQ ID NO: 297830 - DNA, 75 bp, synthetic construct
  source 1..75: mol_type = other DNA
aaaacctgccggatttatatgtcgatctctccactgtcggcgaaggctatgcggcggatcatctggcacgcttga

SEQ ID NO: 297831 - DNA, 75 bp, synthetic construct
  source 1..75: mol_type = other DNA
agcacctgacggtaattaatcagttgcatcagcaatatctgcaaaaagatgtgccggacttatatgtcgatctct

SEQ ID NO: 297832 - DNA, 75 bp, synthetic construct
  source 1..75: mol_type = other DNA
cgaccgataaagagaacgcggttcaggccgtggtggatatcaacggtcacgggattagcacctccggcagctatc

SEQ ID NO: 297833 - DNA, 75 bp, synthetic construct
  source 1..75: mol_type = other DNA
gccagcatgaacggcgtttccgtcaatactggctttgctgccggtaccaccgataccaccgtcactttcgacaac

SEQ ID NO: 297834 - DNA, 75 bp, synthetic construct
  source 1..75: mol_type = other DNA
cagctatacgctgacggcgaaggatggccgcacaaccatcgttaatagctggcaggtacatgaagctaccaatac

SEQ ID NO: 297835 - DNA, 75 bp, synthetic construct
  source 1..75: mol_type = other DNA
agggtaacaacaccgggatgctggaagttaataataattcagctttcaataaccgcggcgagtttattcttgata

SEQ ID NO: 297836 - DNA, 75 bp, synthetic construct
  source 1..75: mol_type = other DNA
cccgccgccccccaggctactgaagttaccgttcttgaaggtaaaaccatggggaccttctggcgcgccagcatt

SEQ ID NO: 297837 - DNA, 75 bp, synthetic construct
  source 1..75: mol_type = other DNA
atgatcaccaaagaaggcgatagctttaaaacctggatgtcgccgcagtttaaaagcttccttatcagcgaaaaa

SEQ ID NO: 297838 - DNA, 75 bp, synthetic construct
  source 1..75: mol_type = other DNA
agcaaccgctttagtatgctggcagacgccgcgccgcagatgggcaacggtctggcgttcaacgtggtggcgaaa

SEQ ID NO: 297839 - DNA, 75 bp, synthetic construct
  source 1..75: mol_type = other DNA
tcgtcgggaagggctggcggtttatatgatcaccaaagaggacgatagttttaaaacctggatgtcgccgcagtt

SEQ ID NO: 297840 - DNA, 75 bp, synthetic construct
  source 1..75: mol_type = other DNA
gctggacagtccatgacgacagcaacaccgtcatctttgatggcgtaaatacggcaggtggcatcacctggagct

SEQ ID NO: 297841 - DNA, 75 bp, synthetic construct
  source 1..75: mol_type = other DNA
cgtgaagcgcgtgtgttaagcaaccgcttcagcatgctggcggatgccgcgccgaaggtgggcaatggcctggcc

SEQ ID NO: 297842 - DNA, 75 bp, synthetic construct
  source 1..75: mol_type = other DNA
gtcccttatcgcgcgcctcgatgaggacggatattcatttgccagcatcatcaacaccctgaaacaggagggcga

SEQ ID NO: 297843 - DNA, 75 bp, synthetic construct
  source 1..75: mol_type = other DNA
aacgaagggcaaatcaccctggatacgctgtgggtcgatgaaaatgatgagacatcgctgcgtaataatatcgcc

SEQ ID NO: 297844 - DNA, 75 bp, synthetic construct
  source 1..75: mol_type = other DNA
gaagtggaactgaaaaatatcggttttgcggctgcctggaataaagattcaacggtcatcaataacggatccatt

SEQ ID NO: 297845 - DNA, 75 bp, synthetic construct
  source 1..75: mol_type = other DNA
gtgacaacatcaccctcaacaacgacggtaaaacgaccgccatcggcgagggttcggtcgttggtatccttactg

SEQ ID NO: 297846 - DNA, 75 bp, synthetic construct
  source 1..75: mol_type = other DNA
ttggccccgataagcagcccgtgacgatcccctcgcaggcacaaatcgacgctgcaaaagctaaaactggtttgc

SEQ ID NO: 297847 - DNA, 75 bp, synthetic construct
  source 1..75: mol_type = other DNA
gtgggtattgatgagaaacgcagtaacgagttgcgtaatcgcatacagacacaactggatgcagatgatcagttg

SEQ ID NO: 297848 - DNA, 75 bp, synthetic construct
  source 1..75: mol_type = other DNA
cccgacggcgctggaagccgatgcctgggatactggcttgatggtactcgggccggagaaagccaaagaggttgt

SEQ ID NO: 297849 - DNA, 75 bp, synthetic construct
  source 1..75: mol_type = other DNA
ttggagtcattacctgttttcccgaataaattcaaagccgcactggctgcgaaacaggtacaaattggttgctgg

SEQ ID NO: 297850 - DNA, 75 bp, synthetic construct
  source 1..75: mol_type = other DNA
attcgcggcgtctccgtttctcaccgcgccaatatgtttggcaccgtggcggattatttcgctcagtcgaacaag

SEQ ID NO: 297851 - DNA, 75 bp, synthetic construct
  source 1..75: mol_type = other DNA
ttaagcgtcttctggatatcggtttctataacttcctgattccttttgtagaaacaaaagaggaagcagagcagg

SEQ ID NO: 297852 - DNA, 75 bp, synthetic construct
  source 1..75: mol_type = other DNA
ttattccggaaacagcccctatctgcatcgtagccgactctctggcgtcgagggttccgaactcgaaggctgaga

SEQ ID NO: 297853 - DNA, 75 bp, synthetic construct
  source 1..75: mol_type = other DNA
gacatgcactactcgcgatgtagagcataacgttggactcatcaatgaaaatggcgtgatagagaagacctcaca

SEQ ID NO: 297854 - DNA, 75 bp, synthetic construct
  source 1..75: mol_type = other DNA
tgaaaatattgaatggcgtgaaccgacactccaacgccatttacgcattgaggctgagcgtgtcaaacgcgtgct

SEQ ID NO: 297855 - DNA, 75 bp, synthetic construct
  source 1..75: mol_type = other DNA
atgaaaatacatattaccggctgtcattcagtggctctaattacgacctttttatgtcaacgattggtttcgaat

SEQ ID NO: 297856 - DNA, 75 bp, synthetic construct
  source 1..75: mol_type = other DNA
ccacgtcaatgatggtcgctgcattgaggttgtgagcgcgagtgggctgctgctacagcaaattcgcctcatgct

SEQ ID NO: 297857 - DNA, 75 bp, synthetic construct
  source 1..75: mol_type = other DNA
ctgctttttaaagaatatggtctggagtatgagaaagctgctggcaagcaggttccgttgagtgtgcgtcgcgcc

SEQ ID NO: 297858 - DNA, 75 bp, synthetic construct
  source 1..75: mol_type = other DNA
atgattagttacgaaatcatcatctccactacggaatacagaaacgatgtatcagttcgcacggatacgtctgtt

SEQ ID NO: 297859 - DNA, 75 bp, synthetic construct
  source 1..75: mol_type = other DNA
atgattagttacgaaatcatcatctccactgcggaatacagaaacgatgtatcagttcgcacggatgtatctgtc

SEQ ID NO: 297860 - DNA, 75 bp, synthetic construct
  source 1..75: mol_type = other DNA
cgccagcttgctccgcagttaccggatatgcagcaaacattgctggataagcactatctgcgtaaacatggtgcg

SEQ ID NO: 297861 - DNA, 75 bp, synthetic construct
  source 1..75: mol_type = other DNA
cgactaacagtctggcagcggtatggcgaaatggacaaagtgaactgatccccaatgcgttaggcaagtttttaa

SEQ ID NO: 297862 - DNA, 75 bp, synthetic construct
  source 1..75: mol_type = other DNA
gccagtgtgggcgcaattgctggggaagccgtatcaactggtcatatgaccgccgcccgccgtacacaaattctg

SEQ ID NO: 297863 - DNA, 75 bp, synthetic construct
  source 1..75: mol_type = other DNA
ttaacctgtgacgagcttttagctattacggattacaccgaagatgcgcgtttactggatggaatgctggggcag

SEQ ID NO: 297864 - DNA, 75 bp, synthetic construct
  source 1..75: mol_type = other DNA
gagaagccactggctgaaatcattgcggctttgcaggcaatcgacgaccgaagagcaaaagacaaccccaccgag

SEQ ID NO: 297865 - DNA, 75 bp, synthetic construct
  source 1..75: mol_type = other DNA
acaccaactttgcccgaattgccgaagcctgcggcattacgggtattcgtgtagaaaaagcgtctgaaatcgatg

SEQ ID NO: 297866 - DNA, 75 bp, synthetic construct
  source 1..75: mol_type = other DNA
gatggagatgaaggctggtggctacctgactgacggcaccgaactgcatgacaccaactttgcccgcattgctga

SEQ ID NO: 297867 - DNA, 75 bp, synthetic construct
  source 1..75: mol_type = other DNA
ctaatgctatgccacaggcgctgggggcgcaggcaacagagccagaacgtcaggtggtcgccatgtgcggagatg

SEQ ID NO: 297868 - DNA, 75 bp, synthetic construct
  source 1..75: mol_type = other DNA
ttttgttaactctatacttatgttgttattccgcaaatgctgcagataacactggatttgttgttggaaataatg

SEQ ID NO: 297869 - DNA, 75 bp, synthetic construct
  source 1..75: mol_type = other DNA
tgcctctgacagggcaaatccagatggactaatggatattgaaaatgccatggctgattctggtaaaacctatgg

SEQ ID NO: 297870 - DNA, 75 bp, synthetic construct
  source 1..75: mol_type = other DNA
cgacggtccggtgttggtggatgtggtggtcgccaaagaagaattagccattccaccgcagatcaaactcgaaca

SEQ ID NO: 297871 - DNA, 75 bp, synthetic construct
  source 1..75: mol_type = other DNA
gcagcggctgcgcgggggcgcataaagagttagttgagtttgccgggaaaattaaagcgcctattgttcatgccc

SEQ ID NO: 297872 - DNA, 75 bp, synthetic construct
  source 1..75: mol_type = other DNA
aaattggtgacaagaaatacaccaaatcacagatcgtcgagatgtatcgggagaagccactggctgaaatcattg

SEQ ID NO: 297873 - DNA, 75 bp, synthetic construct
  source 1..75: mol_type = other DNA
aggttcgcacaaaaatcggtgtaatgtttggcgaccctactacgtctccaggcggcgattcaccgaagttttacg

SEQ ID NO: 297874 - DNA, 75 bp, synthetic construct
  source 1..75: mol_type = other DNA
gtggaaaaagcctctgaagtcgatgaagccctgcaacgcgccttttccatcgacggtccggtgctggtggatgtg

SEQ ID NO: 297875 - DNA, 75 bp, synthetic construct
  source 1..75: mol_type = other DNA
tgcgcggtaaagaacatgtcgaatacgataatccatatgatgttggaatgacgggattaatcggcttttcgtcag

SEQ ID NO: 297876 - DNA, 75 bp, synthetic construct
  source 1..75: mol_type = other DNA
acagtcttaatcgcatgggcaccatcgagtggatgtccacccgccatgaagaagtggcggcctttgccgctggcg

SEQ ID NO: 297877 - DNA, 75 bp, synthetic construct
  source 1..75: mol_type = other DNA
tggggcaacgtcagcgccgttgatcgcgagcgcggcgtctttgtgatcaaaccttccggcgtcgattacagcgtc

SEQ ID NO: 297878 - DNA, 75 bp, synthetic construct
  source 1..75: mol_type = other DNA
aaaccaggcttgattatgcccaagtgtttaatgctatggatggttttgagtacaacggacttacgttttataacc

SEQ ID NO: 297879 - DNA, 75 bp, synthetic construct
  source 1..75: mol_type = other DNA
gcagttcagccttgcgctggcagaagaagggttgccgctggtggaagtgccgcagacggttcgcaatttctctga

SEQ ID NO: 297880 - DNA, 75 bp, synthetic construct
  source 1..75: mol_type = other DNA
gcgaaagccactcttgggcggatcttcgaattcaacaagctcgctatctaccaggagcaaacggcctccaaattc

SEQ ID NO: 297881 - DNA, 75 bp, synthetic construct
  source 1..75: mol_type = other DNA
aggtgcagggtgagtacgaactgaataccggcaaagtgattatcgaaacgctgggtgacgccgagccgctgcata

SEQ ID NO: 297882 - DNA, 75 bp, synthetic construct
  source 1..75: mol_type = other DNA
gaaaaacttttcctgttcctcatcctaaaaaggacttgccgctaggtactgtcagatcgatcaaaaaaatggcgg

SEQ ID NO: 297883 - DNA, 75 bp, synthetic construct
  source 1..75: mol_type = other DNA
gggggcagatagtgaaggcggagctgaggtgtattcagccgcaaccacgcgtgaccaggccagaatcgtgtttga

SEQ ID NO: 297884 - DNA, 75 bp, synthetic construct
  source 1..75: mol_type = other DNA
tgagccggatgctggtcaatggcggtgaaccggagccggatctgtctgagcatctggtcagcgttggtattcgct

SEQ ID NO: 297885 - DNA, 75 bp, synthetic construct
  source 1..75: mol_type = other DNA
ttcagtctggctctggctgaagaagggataccgctggtggaagttccgcagacggtccgcaatctgtcagaggct

SEQ ID NO: 297886 - DNA, 75 bp, synthetic construct
  source 1..75: mol_type = other DNA
tgagccggatgctggtcaatggtggtgaaccggagctggatctgtctgaacatctggtcagcgtgggcatccgtt

SEQ ID NO: 297887 - DNA, 75 bp, synthetic construct
  source 1..75: mol_type = other DNA
atccacgccagaagcgaaaatagacgggcctgccgccttgtttaccgcaatgagccgcatgcttgtaaacggcgg

SEQ ID NO: 297888 - DNA, 75 bp, synthetic construct
  source 1..75: mol_type = other DNA
tctctgcgcgggtgaatttttttaccaaacacatgaatgtgtgggtcactgccgaatctgcctggatggatatga

SEQ ID NO: 297889 - DNA, 75 bp, synthetic construct
  source 1..75: mol_type = other DNA
tcatccggtcatgaactggatgatgtctaacgttacggtaaaaccggacaaaaacgacaatatcttcccgaataa

SEQ ID NO: 297890 - DNA, 75 bp, synthetic construct
  source 1..75: mol_type = other DNA
atgaaaaacgaacatgaagatcccggcagctttggcgaaacaacgacaccggcatccggcaaatccttcctgaaa

SEQ ID NO: 297891 - DNA, 75 bp, synthetic construct
  source 1..75: mol_type = other DNA
agtcaacggttttatgacacacccattcctcagaaaaagcataaaaagtctaactaacgggaatggcacatcatt

SEQ ID NO: 297892 - DNA, 75 bp, synthetic construct
  source 1..75: mol_type = other DNA
ttggcgaagaaaataatggaaggtgggagtttatttgccttgcacttgaaggaagagggcttgccaatatttaac

SEQ ID NO: 297893 - DNA, 75 bp, synthetic construct
  source 1..75: mol_type = other DNA
ctgaacaatcacatctttccggtcatcgggaacctacctgtatcagaacttaaaccccgtcatttcattgacctg

SEQ ID NO: 297894 - DNA, 75 bp, synthetic construct
  source 1..75: mol_type = other DNA
ggtatcgatccggaagcgtatctgcgccatattctgagcgtactgccggaatggccttccaaccgagttggcgaa

SEQ ID NO: 297895 - DNA, 75 bp, synthetic construct
  source 1..75: mol_type = other DNA
ggtgagcggggagcgctactgtacagcctgatcgggatgtgcaaactgaatgacgtggatccagaaagctacctt

SEQ ID NO: 297896 - DNA, 75 bp, synthetic construct
  source 1..75: mol_type = other DNA
aacgtgccgctgaacgcggctcgcgcatgcaggagaaaatgtttaaatccgtggcactggagtggcacagtagca

SEQ ID NO: 297897 - DNA, 75 bp, synthetic construct
  source 1..75: mol_type = other DNA
ccaggagcagagcgcatcaaaatttgaaccgctttcctcggatgcaaacaacctggatggtctgaacatccactg

SEQ ID NO: 297898 - DNA, 75 bp, synthetic construct
  source 1..75: mol_type = other DNA
tgagccggatgctggtcaatggtggtgaaccggagccggatctgtctgaacatctggtcagcgtgggcatccgct

SEQ ID NO: 297899 - DNA, 75 bp, synthetic construct
  source 1..75: mol_type = other DNA
tgcagggcatgaaaatcatgtcggtggaaaaaggaatggcctggatccgctggcagggtagcgcctgggcagtac

SEQ ID NO: 297900 - DNA, 75 bp, synthetic construct
  source 1..75: mol_type = other DNA
tataccaaagaaagtgtttaaaaacgtggcactggcgtggcataagagcaataaaaaatggtcacagaacaccgc

SEQ ID NO: 297901 - DNA, 75 bp, synthetic construct
  source 1..75: mol_type = other DNA
agcatctggaggccagaaaggccatgatgcagtggtggtcggattatctggatgtgtgccgcgaggggtatgtcg

SEQ ID NO: 297902 - DNA, 75 bp, synthetic construct
  source 1..75: mol_type = other DNA
accacggctggctttaacaaggaagggatttgttacgagcaacgcgattacgccatcaaggtattgcgaggctat

SEQ ID NO: 297903 - DNA, 75 bp, synthetic construct
  source 1..75: mol_type = other DNA
aattgatgaatggccaaatacgtctgttcttatagcagcaactaaccatgcggagctgcttgatcctgctgcatg

SEQ ID NO: 297904 - DNA, 75 bp, synthetic construct
  source 1..75: mol_type = other DNA
tcattgatgttgtcagtgatgctcttaccgggaagagggaaagtctcctcatgcggttgcggattatggcaaaaa

SEQ ID NO: 297905 - DNA, 75 bp, synthetic construct
  source 1..75: mol_type = other DNA
caaagcggtagacggtgaaatgatcacagttaccgtcgaaggtaaagtcgaaggtaaagatgaagtgttcgcgct

SEQ ID NO: 297906 - DNA, 75 bp, synthetic construct
  source 1..75: mol_type = other DNA
ggtggagaaagttattgaaggggcttacgaggtggtgggggtttttgaccggattgaggaaaagcgtgatgccat

SEQ ID NO: 297907 - DNA, 75 bp, synthetic construct
  source 1..75: mol_type = other DNA
gacgatacaacaggaggagtttacccggatcaagatacaggtataacataccctctccatttccaggccacgcta

SEQ ID NO: 297908 - DNA, 75 bp, synthetic construct
  source 1..75: mol_type = other DNA
tcaaaaatggagagaaacggggccgaatggcgatgctactgtcatattcagatatgcaacaagtacaaataattt

SEQ ID NO: 297909 - DNA, 75 bp, synthetic construct
  source 1..75: mol_type = other DNA
cagtgtgctcaaagtttatactgttccaaacttcagtattcgtgcctatatgaaagttgcagagcgtaaatcagc

SEQ ID NO: 297910 - DNA, 75 bp, synthetic construct
  source 1..75: mol_type = other DNA
aaatcaggtggtgatacgccggtaacttattctgagcgtataaaagtacctgcagcgccattgtggacacaaacg

SEQ ID NO: 297911 - DNA, 75 bp, synthetic construct
  source 1..75: mol_type = other DNA
ccatagcaaaacggaaaatcagcgtaaaatcttgggtatacaaattcccggagccacgcctgaatacaaaactga

SEQ ID NO: 297912 - DNA, 75 bp, synthetic construct
  source 1..75: mol_type = other DNA
cccagagcttgcggattatcaatcaatttatctgatacgaaagagtgtggctgcaagacaaaaagagatgctgga

SEQ ID NO: 297913 - DNA, 75 bp, synthetic construct
  source 1..75: mol_type = other DNA
gcgcagtcaatttttccaacgtcgtgaccgtcgataatcagggcaatatttttattcccgatgtcgggccgatta

SEQ ID NO: 297914 - DNA, 75 bp, synthetic construct
  source 1..75: mol_type = other DNA
ctgggcgggcggctataccgaccgtgcaaacgacaagcgcattgccgtggtgcatgccaacgggctgatggagtt

SEQ ID NO: 297915 - DNA, 75 bp, synthetic construct
  source 1..75: mol_type = other DNA
gggtggaaccactatggaaaagtattttgagcaacaaaggattaatgccgctgttatggcgttttttccctgatc

SEQ ID NO: 297916 - DNA, 75 bp, synthetic construct
  source 1..75: mol_type = other DNA
gggagcgcctggataaagtcggtcgttggttttgggccgtgacctgtcagcagctcaaacaatatgctgattttg

SEQ ID NO: 297917 - DNA, 75 bp, synthetic construct
  source 1..75: mol_type = other DNA
attgatgtcatgatggcatcaggcgatgacctgacaggcatccggctgactgatgcgcgcaagaaatatggcaaa

SEQ ID NO: 297918 - DNA, 75 bp, synthetic construct
  source 1..75: mol_type = other DNA
atgacctgacaggcataaaactgacagacgcgcggaaaagatacggtaaaaccatagaagaacgttacgggttca

SEQ ID NO: 297919 - DNA, 75 bp, synthetic construct
  source 1..75: mol_type = other DNA
ttgaccaccctccgctggatacgctgattcttgccatgcctgtgtcatggaaagggacgttacagcagtatgcag

SEQ ID NO: 297920 - DNA, 75 bp, synthetic construct
  source 1..75: mol_type = other DNA
aagagtcgtttagaaaggttaaagctggaaggtatcgttgaagatgatatgaacatcatccaacagatcataatg

SEQ ID NO: 297921 - DNA, 75 bp, synthetic construct
  source 1..75: mol_type = other DNA
acttgatcttactcaagaacaggcaaattgacgccaggcttgcggaagttttggagcagaacaatgtcctttttg

SEQ ID NO: 297922 - DNA, 75 bp, synthetic construct
  source 1..75: mol_type = other DNA
ctgaagaggttgaggagctggaacaacagcgtcgtatggaagccgagcgtttagcgcaaatgcagcagcttagcc

SEQ ID NO: 297923 - DNA, 75 bp, synthetic construct
  source 1..75: mol_type = other DNA
tggttcttaacgaacgctgcatcgccgaaatgcgtaccggtgaaggaaaaaccctgaccgcaacgctgcctgctt

SEQ ID NO: 297924 - DNA, 75 bp, synthetic construct
  source 1..75: mol_type = other DNA
tgaagcttacgcagctgacatcacttacggtacgaacaacgaatacggctttgactacctgcgcgacaacatggc

SEQ ID NO: 297925 - DNA, 75 bp, synthetic construct
  source 1..75: mol_type = other DNA
tgcgctgatgcgtattttcgcctctgatcgcgtttccggcatgatgcgtaaactcgggatgaaaccaggcgaagc

SEQ ID NO: 297926 - DNA, 75 bp, synthetic construct
  source 1..75: mol_type = other DNA
cgagctgaccaaagccggtatcaaacacaacgttctgaacgccaaattccacgctaacgaagcagcgattgttgc

SEQ ID NO: 297927 - DNA, 75 bp, synthetic construct
  source 1..75: mol_type = other DNA
ttcagctccatctacaagctggataccgtcgttgttccgaccaaccgtccaatgattcgtaaagatctgccggac

SEQ ID NO: 297928 - DNA, 75 bp, synthetic construct
  source 1..75: mol_type = other DNA
cagcagtcctctgataatggtcaaacctggaatatgctttccgacatgaccggaaagagaagtgtaagtatcaaa

SEQ ID NO: 297929 - DNA, 75 bp, synthetic construct
  source 1..75: mol_type = other DNA
tccaggcaacattaaagcaagacgggaatattgctatcgaacccggcgaatttaaagccaccagtactttccagg

SEQ ID NO: 297930 - DNA, 75 bp, synthetic construct
  source 1..75: mol_type = other DNA
gcagccaaaggcgttggcgtactcattgaaggattagcaaccagtaaaaatccgctaatgacattaaaacctaac

SEQ ID NO: 297931 - DNA, 75 bp, synthetic construct
  source 1..75: mol_type = other DNA
acatcaacagcaagcaacttggttttttataaacccacgcagctcggcccgactggggtaaaaatgtactggtca

SEQ ID NO: 297932 - DNA, 75 bp, synthetic construct
  source 1..75: mol_type = other DNA
ttttaactggcgcggcgaaagcgagcaaacactatattggtcttgcaacaacgcgaatagcagcaaaaaatactg

SEQ ID NO: 297933 - DNA, 75 bp, synthetic construct
  source 1..75: mol_type = other DNA
tttttttagcactgtgctcttgttgttataccgcaacagctaataacgtcagctatgttgttggcaataattacg

SEQ ID NO: 297934 - DNA, 75 bp, synthetic construct
  source 1..75: mol_type = other DNA
ccgactttaacccgacaacgaatcaacgggtaacattatccagaacagataattacctctactcattcaaagcat

SEQ ID NO: 297935 - DNA, 75 bp, synthetic construct
  source 1..75: mol_type = other DNA
actgatattaacccatcaggcatatatattggagacgctacagaacatttttttcactggcatgccgagagtgag

SEQ ID NO: 297936 - DNA, 75 bp, synthetic construct
  source 1..75: mol_type = other DNA
atattggcgattctacagaacaatattttaactggcgaggccaaagcgagcaaacactatattggtcttgcaaca

SEQ ID NO: 297937 - DNA, 75 bp, synthetic construct
  source 1..75: mol_type = other DNA
gcaagggtagtattccgatatgcaacaagtaccaataatttagtattttataaacccacacaacttggcccaaca

SEQ ID NO: 297938 - DNA, 75 bp, synthetic construct
  source 1..75: mol_type = other DNA
tgctggaggttgcgtcccgcacacggcagcacctgagtaacataatgcgccatgcggtccatcaggagttaatcg

SEQ ID NO: 297939 - DNA, 75 bp, synthetic construct
  source 1..75: mol_type = other DNA
cgccattctgaaacagattaaggatatcaccggtaataatgaactgatcttccccggcgaccataacccgtataa

SEQ ID NO: 297940 - DNA, 75 bp, synthetic construct
  source 1..75: mol_type = other DNA
caccgccgaccgtctgcttgccagcctgaacaatcacatctttccggtcatcgggaacctacctgtatcagaact

SEQ ID NO: 297941 - DNA, 75 bp, synthetic construct
  source 1..75: mol_type = other DNA
ggccgttggtggcgttatgcaaacgctcacgattgaattttataccgataccaactttggtgatgctgccaactt

SEQ ID NO: 297942 - DNA, 75 bp, synthetic construct
  source 1..75: mol_type = other DNA
cttattctcgggaatggatctacgataaggacaatatctcagttttaaaagatgatggtgatacgaaagaatttg

SEQ ID NO: 297943 - DNA, 75 bp, synthetic construct
  source 1..75: mol_type = other DNA
caacgttgttattgaagaacgtcgtgaagatgctgaacgtgaagcggctgaacgagcagagcgtgaacggaaacg

SEQ ID NO: 297944 - DNA, 75 bp, synthetic construct
  source 1..75: mol_type = other DNA
ggagacaacagctaatatctcttctatcgttgtcggtaatcgcacggatggttggtatgatggcttccgttttca

SEQ ID NO: 297945 - DNA, 75 bp, synthetic construct
  source 1..75: mol_type = other DNA
gtggtggctgaaaacctttatggaaaaaacgtaaatttcagtaccgtgttcacttatcaacctactggattcact

SEQ ID NO: 297946 - DNA, 75 bp, synthetic construct
  source 1..75: mol_type = other DNA
ctctggccaaacgagctcctgtgtatttcttaaatgaaattattgttgccgcattccagggccaggccggagtcg

SEQ ID NO: 297947 - DNA, 75 bp, synthetic construct
  source 1..75: mol_type = other DNA
tggttcttatgccgcctcgttcacggtagagaacaatagcaagaatacctctacgtacaatgagcctgaaagcaa

SEQ ID NO: 297948 - DNA, 75 bp, synthetic construct
  source 1..75: mol_type = other DNA
acggtaccgacacgatggaagaaaccgcttacttcctcgacctgacggtgaaatgagacaaaccggtggtgatgg

SEQ ID NO: 297949 - DNA, 75 bp, synthetic construct
  source 1..75: mol_type = other DNA
acggtaccgacacgatggaagaaactgcttacttccttgacctgacggtgaaatgcgacaaaccggtggtgatgg

SEQ ID NO: 297950 - DNA, 75 bp, synthetic construct
  source 1..75: mol_type = other DNA
acggtaccgacacgatggaagaaacagcttacttcctggacctgacggtgaaatgcgacaaaccggtggtgatgg

SEQ ID NO: 297951 - DNA, 75 bp, synthetic construct
  source 1..75: mol_type = other DNA
attgaaacaaaaatgacatcgacaaaagttgggatttcaaatcgacagttgctgggtaatacattaacaagttca

SEQ ID NO: 297952 - DNA, 75 bp, synthetic construct
  source 1..75: mol_type = other DNA
aagcgttgattggcgcaggtacggtactgaaacctgagcaggttgatacgctcgccaggatgggctgccagctca

SEQ ID NO: 297953 - DNA, 75 bp, synthetic construct
  source 1..75: mol_type = other DNA
acggtaccgacacgatggaagaaacggcttacttcctagacctgacggtgaaatgcgacaaaccggtggtgatgg

SEQ ID NO: 297954 - DNA, 75 bp, synthetic construct
  source 1..75: mol_type = other DNA
cttgatgcccgcgagtttttacgcgctgaacgtgccgcgcaaccacaggttgatgaaggcctttcgtacccattg

SEQ ID NO: 297955 - DNA, 75 bp, synthetic construct
  source 1..75: mol_type = other DNA
gtggaactgagtcgttcactcctgtcgggctgggttgatgcatgttgccggctgctgtccccactggaagaggcg

SEQ ID NO: 297956 - DNA, 75 bp, synthetic construct
  source 1..75: mol_type = other DNA
ggtatcgccggaccggggctgctggcccgcataatcatggctaagttcgccgagcatctgccgctgtaccgtcag

SEQ ID NO: 297957 - DNA, 75 bp, synthetic construct
  source 1..75: mol_type = other DNA
catgtgcttggcgtcatagcagactggtgtcaacgacggatgaaaagtgatccacttatatctccaccaacggcc

SEQ ID NO: 297958 - DNA, 75 bp, synthetic construct
  source 1..75: mol_type = other DNA
acatggacaccggaacgcctgatcgagcagggaaaacgtacgggcccgtccactggccgggtggttgaatccatg

SEQ ID NO: 297959 - DNA, 75 bp, synthetic construct
  source 1..75: mol_type = other DNA
gtacgtgaaaagcatgcctgtactcagtgcgatgccatcgtgcaggccccgcgccttcacggcccatcgagcggg

SEQ ID NO: 297960 - DNA, 75 bp, synthetic construct
  source 1..75: mol_type = other DNA
gccacggttcagataccaaattcaatctgttcaacagccgtcgtatcgatgccatcgacgtaaccagcaaaacgg

SEQ ID NO: 297961 - DNA, 75 bp, synthetic construct
  source 1..75: mol_type = other DNA
tgtccttgacgtcatagccgactggccgataaaccgggtcggcgaattgctcccctggcgcgtagcactgccgac

SEQ ID NO: 297962 - DNA, 75 bp, synthetic construct
  source 1..75: mol_type = other DNA
ttcgccatgtgcttggcgtcatagccgactggccgataaaccgggtcggcgaactgctcccctggcgcgtagcac

SEQ ID NO: 297963 - DNA, 75 bp, synthetic construct
  source 1..75: mol_type = other DNA
tgctggcgatgcgtcattataaacgtgctgaaaccgttgacggtaaagtcgatacccgtgcgctggaagaggtcg

SEQ ID NO: 297964 - DNA, 75 bp, synthetic construct
  source 1..75: mol_type = other DNA
cagcagtcgccggtttataaaatggcgatggaatggaaactggcgctgccgctgcatccggaatatcgcacgctg

SEQ ID NO: 297965 - DNA, 75 bp, synthetic construct
  source 1..75: mol_type = other DNA
tcgtcctgatcgaccaggataaatgccgtggctggcgtatgtgcatcaccggatgcccgtacaaaaaaatctact

SEQ ID NO: 297966 - DNA, 75 bp, synthetic construct
  source 1..75: mol_type = other DNA
ccagacacgctactggtttaacccggcggcgattagccagcactttattatccccggtgcggtgaccattatcat

SEQ ID NO: 297967 - DNA, 75 bp, synthetic construct
  source 1..75: mol_type = other DNA
aacgcgaaatagaccatctgcaggcacagctggataagctgcgccggatgaacgtcggcagcagctcggaaaaag

SEQ ID NO: 297968 - DNA, 75 bp, synthetic construct
  source 1..75: mol_type = other DNA
aacgcgaaatagaccatctgcaggcacagctggataagctgcgccggatgaacctcggcagcagctccgaaaaag

SEQ ID NO: 297969 - DNA, 75 bp, synthetic construct
  source 1..75: mol_type = other DNA
aacgcgaaatagaccatctgcaggcacagctggataagctgcgccggatgaacatcggcagcggctcggaaaaag

SEQ ID NO: 297970 - DNA, 75 bp, synthetic construct
  source 1..75: mol_type = other DNA
tgtactcagtgcgatgccatcgtgcaggcacctgcaccttcgcggcccatcgagcggggtatcgccagaccgggg

SEQ ID NO: 297971 - DNA, 75 bp, synthetic construct
  source 1..75: mol_type = other DNA
aagtatgcagagcacaccccgctgtatcgccagtcagaaatatacggccggcaaggtgtggagctgagccgttca

SEQ ID NO: 297972 - DNA, 75 bp, synthetic construct
  source 1..75: mol_type = other DNA
gccgtgctgcccgaactgcggcggttcactgagttatctgggcgaggataccgccgaacagctggagttgatgcg

SEQ ID NO: 297973 - DNA, 75 bp, synthetic construct
  source 1..75: mol_type = other DNA
gtggaaattgacaacaacatcgctgaaaatgccctgcgggcggtcagtctgggtcgtaaaaacttcctgttcttc

SEQ ID NO: 297974 - DNA, 75 bp, synthetic construct
  source 1..75: mol_type = other DNA
gttttttatctccagcctgtttttactcagtaccctggggatggggctgctgatttccacgattacccgcaacca

SEQ ID NO: 297975 - DNA, 75 bp, synthetic construct
  source 1..75: mol_type = other DNA
ccgagtagctggctgattgcggtggtgatcccgctgttgctgctgtttatttttggctacggcattaacctcgac

SEQ ID NO: 297976 - DNA, 75 bp, synthetic construct
  source 1..75: mol_type = other DNA
aacgcgaaatagaccatctgcaggcacagctggataagctgcgccggatgaacatcggcagccgctccgaaaaag

SEQ ID NO: 297977 - DNA, 75 bp, synthetic construct
  source 1..75: mol_type = other DNA
aacgcgaaatagaccatctgcaggcacagctggataagctgcgccggatgaacatcggcagctgctctgaaaaag

SEQ ID NO: 297978 - DNA, 75 bp, synthetic construct
  source 1..75: mol_type = other DNA
aacgcgaaatagaccatctgcaggcacagctggataagctgcgccggatgaacatcggcagcagctcagaaaaag

SEQ ID NO: 297979 - DNA, 75 bp, synthetic construct
  source 1..75: mol_type = other DNA
gcttctgccggaggagtatggcccagccttcccagcaatcgtcgattgttataccagtccacccacgttagtgtg

SEQ ID NO: 297980 - DNA, 75 bp, synthetic construct
  source 1..75: mol_type = other DNA
tacgtatcgttatcaacaaccaggttggcttcaccacctctaatccgctggatgcccgttctacgccgtactgta

SEQ ID NO: 297981 - DNA, 75 bp, synthetic construct
  source 1..75: mol_type = other DNA
cgccgtatctcaaccacgaatgggatgaagaatacccgaacaaggttgagatgaagcgtttgcaggaactggcaa

SEQ ID NO: 297982 - DNA, 75 bp, synthetic construct
  source 1..75: mol_type = other DNA
tgctcaggtggttatcgaccagttcatctcctctggcgaacagaaatggggccggatgtgtggcctggtgatgtt

SEQ ID NO: 297983 - DNA, 75 bp, synthetic construct
  source 1..75: mol_type = other DNA
agtgaaaattttccttgacgcctcctcggaagaacgtgcgcatcgccgcatgctacagttgcaggagaagggctt

SEQ ID NO: 297984 - DNA, 75 bp, synthetic construct
  source 1..75: mol_type = other DNA
tcacaagtcgcggcattcccacgcgttcgtgaagcattattgcgtcgccaacgcgcgtttcgcgaattaccaggc

SEQ ID NO: 297985 - DNA, 75 bp, synthetic construct
  source 1..75: mol_type = other DNA
agctatggcttcttgcccgcatccgtaatgaaaccttccacacgctcagggcgctgaatgcacgccttcgggagt

SEQ ID NO: 297986 - DNA, 75 bp, synthetic construct
  source 1..75: mol_type = other DNA
atgttcgcttcactgatttccggaaaattatcgtactccagtgtccggacggtacgggaaaaacatgcctgtact

SEQ ID NO: 297987 - DNA, 75 bp, synthetic construct
  source 1..75: mol_type = other DNA
aaaaggcatccatccgcagactcatcttgcttgcttcagcggtgtgctgcaagcggtgcgtacgccgggttcaac

SEQ ID NO: 297988 - DNA, 75 bp, synthetic construct
  source 1..75: mol_type = other DNA
tcgcgacacttagagttggcgaaggcgttcgcgtacgcacttaaccagtggccggcactgacgtactatgcgaac

SEQ ID NO: 297989 - DNA, 75 bp, synthetic construct
  source 1..75: mol_type = other DNA
aagatttatggcgatcgccaggcgatggctgccggtgagaaactgttcgactggggcggtgcggaaaacctcgct

SEQ ID NO: 297990 - DNA, 75 bp, synthetic construct
  source 1..75: mol_type = other DNA
ctccggcggtaggggatatgtccgttcaccagaaacagcagcaagatctggttaatgacgcgctgaacgtcgaat

SEQ ID NO: 297991 - DNA, 75 bp, synthetic construct
  source 1..75: mol_type = other DNA
ttcgacgttccagcagttacctggtacgggagtcaaaccggatcaattccactctcaaacgcgtgaatatttccg

SEQ ID NO: 297992 - DNA, 75 bp, synthetic construct
  source 1..75: mol_type = other DNA
tcacaagtcgcggcatttccccgtgttcgcgaagcattattgcgtcgccaacgcgcatttcgcgaattacctggc

SEQ ID NO: 297993 - DNA, 75 bp, synthetic construct
  source 1..75: mol_type = other DNA
tggcttatcgtgcagttctggggctgctggcacttcagaaagaaagtgatacccttaccggtcgggttgacgacc

SEQ ID NO: 297994 - DNA, 75 bp, synthetic construct
  source 1..75: mol_type = other DNA
catcttgcttgcttcagcggtgtgctgcaagcggatgcgtacgccgggttcaacgagctgtatcgcaatggtggg

SEQ ID NO: 297995 - DNA, 75 bp, synthetic construct
  source 1..75: mol_type = other DNA
cccgcgtgctgacctcgaagtatgcagagcacaccccgctgtattgccagtcagaaatatacggccggcaaggtg

SEQ ID NO: 297996 - DNA, 75 bp, synthetic construct
  source 1..75: mol_type = other DNA
acggccggcaaggtgtggagctgagccgttcactgctgtcgggctgggtggatgcatgctgccggctgctgtctc

SEQ ID NO: 297997 - DNA, 75 bp, synthetic construct
  source 1..75: mol_type = other DNA
gtgccacttcagacggtacgggaaaaacatgcctgtactcagtgcgatgccatcgtgcaggcacctgcaccttcg

SEQ ID NO: 297998 - DNA, 75 bp, synthetic construct
  source 1..75: mol_type = other DNA
ccatcgaggcagagataaggggaatgacggcggagcagcgccttgccgaacgtcagttgaaaacgaaaccgctgc

SEQ ID NO: 297999 - DNA, 75 bp, synthetic construct
  source 1..75: mol_type = other DNA
agactcagatgaaaacactgtcgcgtcactcggatacggcaaaagcgttcgcatacctgctgaaacagtgggagg

SEQ ID NO: 298000 - DNA, 75 bp, synthetic construct
  source 1..75: mol_type = other DNA
tggaaaaaaacccgaagcgcttttgaagcggattttcgaaatgtgtacgcgagaaggcgatttagtctttgattc

SEQ ID NO: 298001 - DNA, 75 bp, synthetic construct
  source 1..75: mol_type = other DNA
ggcatgacaatgtcaaacagtcaaagattgtggcgttgacggtcagtctgggtcgtaaaaacttcctgttcttcg

SEQ ID NO: 298002 - DNA, 75 bp, synthetic construct
  source 1..75: mol_type = other DNA
gcgccagctgttgtggatggaatacaaggcacaggcgggtgacaaagcgatgggatactcgcacttctgccgttg

SEQ ID NO: 298003 - DNA, 75 bp, synthetic construct
  source 1..75: mol_type = other DNA
gggctgggtggatgcatgctgccggcttctgtctccgctggaagaggcgcttcatggctatgtgctgactgacgg

SEQ ID NO: 298004 - DNA, 75 bp, synthetic construct
  source 1..75: mol_type = other DNA
acgaagggcacattacacaaaacctgggtttaacggagacactactcgatgacggtaacctgagctacagcgtgc

SEQ ID NO: 298005 - DNA, 75 bp, synthetic construct
  source 1..75: mol_type = other DNA
atgaaagaatataaagagatattgaataataaaaatgaaaagctatttgttacattgttggctcgtacaaaaatt

SEQ ID NO: 298006 - DNA, 75 bp, synthetic construct
  source 1..75: mol_type = other DNA
actcgctgatcaacacatgccgtctgaacaatgtggaaccagaaaaatggctgcgttacgtcattgagcatatcc

SEQ ID NO: 298007 - DNA, 75 bp, synthetic construct
  source 1..75: mol_type = other DNA
cctggccggttacagcggtgtgcttcaggcagatgcttacggtggctaccgggcgttatacgaatccggcagaat

SEQ ID NO: 298008 - DNA, 75 bp, synthetic construct
  source 1..75: mol_type = other DNA
ggctcatgcccggagaaaaatccacgatgtgcatgcaagagtgcccaccgacatcaccacggaagccctgcagcg

SEQ ID NO: 298009 - DNA, 75 bp, synthetic construct
  source 1..75: mol_type = other DNA
ccggaccggaaaggcgtccatccacagaatcatctggccggttacagcggtgtgcttcaggccgatgcttacggt

SEQ ID NO: 298010 - DNA, 75 bp, synthetic construct
  source 1..75: mol_type = other DNA
gctgcgtcaaacccgcacccgcaaaccgttccccgaatcactcccccgcgatgaaaaacggctgctgcgggcagc

SEQ ID NO: 298011 - DNA, 75 bp, synthetic construct
  source 1..75: mol_type = other DNA
ggttcagaggtgtcctgcaggcggatgcgtacgccgggttcaacgagctgtatcgcaatggtgggataacggaag

SEQ ID NO: 298012 - DNA, 75 bp, synthetic construct
  source 1..75: mol_type = other DNA
gcttcagcggtgtcctgcaagcggatgcgtacgccgggttcaacgagctgtatcgcaatggtgggataacggaag

SEQ ID NO: 298013 - DNA, 75 bp, synthetic construct
  source 1..75: mol_type = other DNA
gcttcagaggtgtcctgcacgcggatgcgtacgccgggttcaacgagctgtatcgcaatggtgggataacggaag

SEQ ID NO: 298014 - DNA, 75 bp, synthetic construct
  source 1..75: mol_type = other DNA
catcgctgaaaatgcgttgcggatggtcagtctgggccgcaaaaactacctgttcttcggttcggatcatggagg

SEQ ID NO: 298015 - DNA, 75 bp, synthetic construct
  source 1..75: mol_type = other DNA
ggttcaggggtgtcctgcaagcggatgcgtacgccgggttcaacgagctgtatcgcaatggtgggataacggaag

SEQ ID NO: 298016 - DNA, 75 bp, synthetic construct
  source 1..75: mol_type = other DNA
ggttcagtggtgtcctgcatgcggatgcgtacgccgggttcaacgagctgtatcgcaatggtgggataacggaag

SEQ ID NO: 298017 - DNA, 75 bp, synthetic construct
  source 1..75: mol_type = other DNA
ctgaaacagtgggatggcctgaacgtgtactgcagtaatggctgggtggaaatcgacaacaacatcgcagagaac

SEQ ID NO: 298018 - DNA, 75 bp, synthetic construct
  source 1..75: mol_type = other DNA
gaatcatgtccagttgcataccgacttattaaaatcactgattttcaagagatggagtcgacccgtgtgcttgta

SEQ ID NO: 298019 - DNA, 75 bp, synthetic construct
  source 1..75: mol_type = other DNA
cgtaataaacgccagcgcggcgagttacgagtcaacaatctcagcgaacaatataaggagatgaaagaagaactg

SEQ ID NO: 298020 - DNA, 75 bp, synthetic construct
  source 1..75: mol_type = other DNA
ccgcggcgctgatggactcacatcagcaaaaacagtggcacaaagcgcagaagaaaaagcacaagcaagaagcga

SEQ ID NO: 298021 - DNA, 75 bp, synthetic construct
  source 1..75: mol_type = other DNA
gcacaagattttctcgcgttgttgagcgaagcattagcaggcgagacaactaccgacaaagcggccccccaggtg

SEQ ID NO: 298022 - DNA, 75 bp, synthetic construct
  source 1..75: mol_type = other DNA
ccgccgacgttgataccaccacattgcctggcggcaaagccagcgatgctgcacaagattttctcgcgttgttga

SEQ ID NO: 298023 - DNA, 75 bp, synthetic construct
  source 1..75: mol_type = other DNA
ctggtggcaacagataagcccacggcaaaaggcgagccgctggtcagcgatattctttcagacgcgcaacaagca

SEQ ID NO: 298024 - DNA, 75 bp, synthetic construct
  source 1..75: mol_type = other DNA
cactcagatacggcaaaagcgttcgcatacctgctgaaacagtgggatgcactgaacgtgtactgcagtaatggc

SEQ ID NO: 298025 - DNA, 75 bp, synthetic construct
  source 1..75: mol_type = other DNA
aatgacgtggctccagaaagctaccttcgccatgtgcttggcgtcatagcagactggccggtcaaccgggtcagc

SEQ ID NO: 298026 - DNA, 75 bp, synthetic construct
  source 1..75: mol_type = other DNA
tcttcctgctgaaacagcgcctggccgaacaggaagcgctgatccacgccctgcaggaaaagattagcaaccggg

SEQ ID NO: 298027 - DNA, 75 bp, synthetic construct
  source 1..75: mol_type = other DNA
ggtacacaccagaaaattattgatatggccatgaatggcgtcggatgccgggcaactgcccgcattatgggcgtt

SEQ ID NO: 298028 - DNA, 75 bp, synthetic construct
  source 1..75: mol_type = other DNA
tacgccatcgaggcagagataaggggaatgacggcggaacagcgccttgccgaacgtcagttgaaaacgaaaccg

SEQ ID NO: 298029 - DNA, 75 bp, synthetic construct
  source 1..75: mol_type = other DNA
gattcagaggtgtcctgcaagcggatgcgtacgccgggttcaacgagctgtatcgcaatggtgggataacggaag

SEQ ID NO: 298030 - DNA, 75 bp, synthetic construct
  source 1..75: mol_type = other DNA
ctgctgtacagcctgatcgggacgtgcaaactgaacggagtggagccagaaagctacctccgctatgtccttgac

SEQ ID NO: 298031 - DNA, 75 bp, synthetic construct
  source 1..75: mol_type = other DNA
cctgtcccggtgctgttgccgggcaataagaagacgaagaccgggcgcttatggacgtacgttcgagacgaccgc

SEQ ID NO: 298032 - DNA, 75 bp, synthetic construct
  source 1..75: mol_type = other DNA
acctccgctatgtccttgacgtcatagccgactggccgataaaccgggtcggcgaactgctcccctggcgcgtag

SEQ ID NO: 298033 - DNA, 75 bp, synthetic construct
  source 1..75: mol_type = other DNA
gaaagcgatacgctgaccggccgggtggatgacccggcagtgcagcgcccgctgcgtcagacccgcacccgcaaa

SEQ ID NO: 298034 - DNA, 75 bp, synthetic construct
  source 1..75: mol_type = other DNA
acctttgccatcacggcggtgcagcacgtaccggaaaagaagccatcgtggataacggtgcccgctttgagccgc

SEQ ID NO: 298035 - DNA, 75 bp, synthetic construct
  source 1..75: mol_type = other DNA
agagcagaggaacggcaggcagtccggcaccaaaaagtgctgccgctgctggcgtcactggaggggtggctgcgg

SEQ ID NO: 298036 - DNA, 75 bp, synthetic construct
  source 1..75: mol_type = other DNA
acgacggcagaagaagccctgaagcgtatcagtgaactgtacgccatcgaggatgaaatacggggcttaccggag

SEQ ID NO: 298037 - DNA, 75 bp, synthetic construct
  source 1..75: mol_type = other DNA
aaagtgctggcaccgggcagaaaaaaggcaaaaacaggacgcatctggacgtatgtccgggatgaccggaatgcg

SEQ ID NO: 298038 - DNA, 75 bp, synthetic construct
  source 1..75: mol_type = other DNA
ttgacgacccggccgtgcagcgcccgctgcgtcaaacccgcacccgcaaaccgttccccgaatcactcccccgcg

SEQ ID NO: 298039 - DNA, 75 bp, synthetic construct
  source 1..75: mol_type = other DNA
actgacgtactatgcgaacgatggctgggtggaaatcgacaacaacatcgctgaaaatgccctgcgggcggtcag

SEQ ID NO: 298040 - DNA, 75 bp, synthetic construct
  source 1..75: mol_type = other DNA
ggtggaaatcgacaacaacatcgctgaaaatgccttgcgggcggtcagtctgggtcgtaaaaacttcctgttctt

SEQ ID NO: 298041 - DNA, 75 bp, synthetic construct
  source 1..75: mol_type = other DNA
acaccgttcgtcggcgtgccggtgggtattttcgtcggcatttatgtctttgccaaagtgggtgatgctgccaac

SEQ ID NO: 298042 - DNA, 75 bp, synthetic construct
  source 1..75: mol_type = other DNA
tacctgtcgagggaaaacaggaaacattaaaattatggaaaatcaatgttgctccatacgcgctacatagctcgc

SEQ ID NO: 298043 - DNA, 75 bp, synthetic construct
  source 1..75: mol_type = other DNA
gttatcgactacctgcattactaccgctccttcaaaaccgagtacgaactggcctgtatgcgtgaagcgcagaaa

SEQ ID NO: 298044 - DNA, 75 bp, synthetic construct
  source 1..75: mol_type = other DNA
cttcctgctggatgccggggccgaatataacggctatgcggctgacctgacccgtacctggtcggcaaaaagtga

SEQ ID NO: 298045 - DNA, 75 bp, synthetic construct
  source 1..75: mol_type = other DNA
actgaagatgtggaagtgatcgcgctgccgaaagccgatggcattggtagcctgctgcctgctgcgcgcggcaat

SEQ ID NO: 298046 - DNA, 75 bp, synthetic construct
  source 1..75: mol_type = other DNA
atatacggccggcaaggtgtggagctgagccgttcactgctgtcgggctgggtggatgcatgctgccggctgctg

SEQ ID NO: 298047 - DNA, 75 bp, synthetic construct
  source 1..75: mol_type = other DNA
gggctgggtggatgcatgctgccggcagctgtctccgctggaggaggcgcttcatggctatgtgctgactgacgg

SEQ ID NO: 298048 - DNA, 75 bp, synthetic construct
  source 1..75: mol_type = other DNA
ctgctggaaaagctgaacgagcgtgaacgcgaaatagaccatctgcaggcacagctggataagctgcgccggatg

SEQ ID NO: 298049 - DNA, 75 bp, synthetic construct
  source 1..75: mol_type = other DNA
ttgcggatggtcagtctgggccgcaaaaactacctgttcttcggttcggatcatggaggagagcggggagcgctg

SEQ ID NO: 298050 - DNA, 75 bp, synthetic construct
  source 1..75: mol_type = other DNA
tacgccatcgaggcagagataaggggaatgacggcggagcaacgccttgccgaacgtcagttgaaaacgaaaccg

SEQ ID NO: 298051 - DNA, 75 bp, synthetic construct
  source 1..75: mol_type = other DNA
gctatgtcatgactgacggcaaactccatgccgatgataccccggtccaggtactgctgccgggtaataagaaga

SEQ ID NO: 298052 - DNA, 75 bp, synthetic construct
  source 1..75: mol_type = other DNA
tatctgactgcgaccggtcatcgtgataccgacgtaccttacagcaacattgtggcgcttaacgaacacgctgcg

SEQ ID NO: 298053 - DNA, 75 bp, synthetic construct
  source 1..75: mol_type = other DNA
tgccggttgattactggcacaacgtcgaaccgctgccgacctccttctggactgaagatgtggaagtgatcgcgc

SEQ ID NO: 298054 - DNA, 75 bp, synthetic construct
  source 1..75: mol_type = other DNA
tctcgacgatcatccctatccgtttaaagtgaacccgcaattcaaagcgtgggtgccggtaactcaggtgccaaa

SEQ ID NO: 298055 - DNA, 75 bp, synthetic construct
  source 1..75: mol_type = other DNA
attcagatagttcagcagtatgcactttatttgatgttgatgcactttctcgcgtggttaatgacggttcagttc

SEQ ID NO: 298056 - DNA, 75 bp, synthetic construct
  source 1..75: mol_type = other DNA
cgatatgcggatgtcgaagtcatgaaaatagctggagatgcccagctttctactccctgtactgacagcatcata

SEQ ID NO: 298057 - DNA, 75 bp, synthetic construct
  source 1..75: mol_type = other DNA
cgtctggagccgggtatctgcctgcatttaatcgccaaagaacaagcagaacgcgccgcggcgcaaagtgaaccg

SEQ ID NO: 298058 - DNA, 75 bp, synthetic construct
  source 1..75: mol_type = other DNA
cgttatcccaaacatgtctggccggacgacccggcaaacactgcaccgacgcgacggacgaaaaagtattcgtga

SEQ ID NO: 298059 - DNA, 75 bp, synthetic construct
  source 1..75: mol_type = other DNA
gccgaaatgctgcgtcaggaaagtggatcattactgttatttttacctggcgtcggagaaattcagcgtgtgcag

SEQ ID NO: 298060 - DNA, 75 bp, synthetic construct
  source 1..75: mol_type = other DNA
tgcattggaacgtttagttcgtgaagacttacctcatccattgacacgagaggaaataacggaatcaatgattgt

SEQ ID NO: 298061 - DNA, 75 bp, synthetic construct
  source 1..75: mol_type = other DNA
atgataaaaaaaacggctgcgccgttgccgtttaacctggtcagactccagcaatacatgaacaaaaagttcaaa

SEQ ID NO: 298062 - DNA, 75 bp, synthetic construct
  source 1..75: mol_type = other DNA
catttaacctggtcaggctccagcaatacatgaacaaaaagttcaaaatgacagcacaaaaaacgctggatgtta

SEQ ID NO: 298063 - DNA, 75 bp, synthetic construct
  source 1..75: mol_type = other DNA
atgccattaacctcaggtattaattcatcttcgttcagccttggaatggaggttcttcgtactcaagttgcagcc

SEQ ID NO: 298064 - DNA, 75 bp, synthetic construct
  source 1..75: mol_type = other DNA
atgccattaacctcaggtattaattcatcttcattcagccttggaatggaggttcttcgtgctcaagttgcagcc

SEQ ID NO: 298065 - DNA, 75 bp, synthetic construct
  source 1..75: mol_type = other DNA
atgcctggattaatatcatatgtgtcatcggcttcattcatgaatgagatgatggggctgcgtcagcaggtaatg

SEQ ID NO: 298066 - DNA, 75 bp, synthetic construct
  source 1..75: mol_type = other DNA
cggcggcaaatgcaggcccgacgggtgttacagcagatgagtgatgaacggttgagggaaaatgggttaagctgg

SEQ ID NO: 298067 - DNA, 75 bp, synthetic construct
  source 1..75: mol_type = other DNA
atgtttagtccaatgacaatgacaatggcaggcagatcgttagttcaggcgactgcacagacgcttaaacctgcg

SEQ ID NO: 298068 - DNA, 75 bp, synthetic construct
  source 1..75: mol_type = other DNA
tgcaggctgtagccaaacaaactcgtaatggcgatacccaacaatggttccagcaggagcagacgacttatatat

SEQ ID NO: 298069 - DNA, 75 bp, synthetic construct
  source 1..75: mol_type = other DNA
cgtgcagtcgaactttgtgattaatcatggcaaactgactaaccaactcctgcaggctgtagccaaacaaactcg

SEQ ID NO: 298070 - DNA, 75 bp, synthetic construct
  source 1..75: mol_type = other DNA
gccgggtcaacgctggcgccggcggtgtggttcgtcttatcaacaatcgacatctccattatatcaatcataaca

SEQ ID NO: 298071 - DNA, 75 bp, synthetic construct
  source 1..75: mol_type = other DNA
agaattttggcaccgtgaaagtcagtgatatcaaggcgctaacagagaaggcgattgcagaaaatgtgcaggata

SEQ ID NO: 298072 - DNA, 75 bp, synthetic construct
  source 1..75: mol_type = other DNA
gtagatcgttagctcaggcggctacacaaactcttagacctgcggtcaccagagctgcgacacaagcgggggtgg

SEQ ID NO: 298073 - DNA, 75 bp, synthetic construct
  source 1..75: mol_type = other DNA
cggcggcaaatgcaggcccgacgggtgttacagcagatgagtgatgaacggttgagggagaatgggttaggctgg

SEQ ID NO: 298074 - DNA, 75 bp, synthetic construct
  source 1..75: mol_type = other DNA
cggcggcaaatgcaggcccgacgggtgttacagcagatgagtgatgaacggttgagggacactgggttaagctgg

SEQ ID NO: 298075 - DNA, 75 bp, synthetic construct
  source 1..75: mol_type = other DNA
cggcggcaaatgcaggcccgacgggtgttacagcagatgagtgatgaacggttgagggacaatgggttacgctgg

SEQ ID NO: 298076 - DNA, 75 bp, synthetic construct
  source 1..75: mol_type = other DNA
atggaatttcacgaaaacaaagctaaagcaccgtttattggacttgtgcaactctggcaggtgatgaggcgttgg

SEQ ID NO: 298077 - DNA, 75 bp, synthetic construct
  source 1..75: mol_type = other DNA
cggcggcaaatgcaggcccgacgggtgttacagcagatgagtgatgaacggttgagggagagtgggttaagctgg

SEQ ID NO: 298078 - DNA, 75 bp, synthetic construct
  source 1..75: mol_type = other DNA
cggcggcaaatgcaggcccgacgggtgttacagcagatgagtgatgaacggttgagggagattgggttatgctgg

SEQ ID NO: 298079 - DNA, 75 bp, synthetic construct
  source 1..75: mol_type = other DNA
catgatggctggtttgaaagtgataacgccattgtgactaactgttttggtcatattatcgaatcacaaccgccg

SEQ ID NO: 298080 - DNA, 75 bp, synthetic construct
  source 1..75: mol_type = other DNA
tttatttgtaatccagttttcaaacgaaagtcagttaaaaaatctgcctggatataacgaaggtagagcggggaa

SEQ ID NO: 298081 - DNA, 75 bp, synthetic construct
  source 1..75: mol_type = other DNA
gcgctgccattctggaaacgctgaagaagagaaactatatcacgctcgaaaaagggaaacttattccgactgata

SEQ ID NO: 298082 - DNA, 75 bp, synthetic construct
  source 1..75: mol_type = other DNA
tgggcgtgtccagacacctgttcttggcctgattgtgaatcgtacccgtgctaacaaaaatcataaatccagtgt

SEQ ID NO: 298083 - DNA, 75 bp, synthetic construct
  source 1..75: mol_type = other DNA
aataaaagtttcccccagcgcgccgtctggtcagtcacaacgcttgtcctctccttgtccttcctgtggtaaaca

SEQ ID NO: 298084 - DNA, 75 bp, synthetic construct
  source 1..75: mol_type = other DNA
gaataaagaattttcggctaaagttaaattgcttgataaagcaacaggaaaattagggtttgaatttgcccccaa

SEQ ID NO: 298085 - DNA, 75 bp, synthetic construct
  source 1..75: mol_type = other DNA
caccgccgccgttattcaccgaagcctccttgcttgctgcgcttgttcgtgtcgcggattttgtcactgatccag

SEQ ID NO: 298086 - DNA, 75 bp, synthetic construct
  source 1..75: mol_type = other DNA
tggttattctggttgcgcataccatccgtttcgaaagcggaaatgaaattattcgaatcatcagtgcacgaaaag

SEQ ID NO: 298087 - DNA, 75 bp, synthetic construct
  source 1..75: mol_type = other DNA
cagtgggtggtcacgaaagccaaacccttcagggcaaacaaacaggctgaatgcgattatctgttcagtgcacta

SEQ ID NO: 298088 - DNA, 75 bp, synthetic construct
  source 1..75: mol_type = other DNA
atgcagaacgtcagacacccgaaaacacacagggaactgtgtgagctggcctgccgttttctccgcaacaacggt

SEQ ID NO: 298089 - DNA, 75 bp, synthetic construct
  source 1..75: mol_type = other DNA
tccctctattgcagtaaaccccgatatgactgcattgtgggctgaaaagcagacagctattgaaaatggcgatct

SEQ ID NO: 298090 - DNA, 75 bp, synthetic construct
  source 1..75: mol_type = other DNA
taactgatgttgacctgggtgatatgaagattgaacccgcagcgccagcgggacaatctcagcgactggagtcgc

SEQ ID NO: 298091 - DNA, 75 bp, synthetic construct
  source 1..75: mol_type = other DNA
gtccgccaaaacggttgattttcgacaggcagctgcgagaagccaagcggctgctgctgttttctgataacgccg

SEQ ID NO: 298092 - DNA, 75 bp, synthetic construct
  source 1..75: mol_type = other DNA
cgctggcgcgttcagttgctgatgccgtctatggcttctccatgacgcgtgcttacaccattccggcaaaagcca

SEQ ID NO: 298093 - DNA, 75 bp, synthetic construct
  source 1..75: mol_type = other DNA
agcgcgccgtctggtcagtcacaacgcctgtcctctccttgtccttcctgtggtaaacagattgttatcaggcca

SEQ ID NO: 298094 - DNA, 75 bp, synthetic construct
  source 1..75: mol_type = other DNA
aacaaacaaagaattttcagcaaaagtaaaactggttgacaaagcaaccgggaaactgggatttgagtttacaca

SEQ ID NO: 298095 - DNA, 75 bp, synthetic construct
  source 1..75: mol_type = other DNA
gggaaacttattccgactgataccggatatgcgcttattgatgccctgcctggtatagcggttaatcctgatatg

SEQ ID NO: 298096 - DNA, 75 bp, synthetic construct
  source 1..75: mol_type = other DNA
tggtcatattatcgaatcacaaccgccggaaaactataatcctgaatacaaagcctggaaggttgaaacgcttcc

SEQ ID NO: 298097 - DNA, 75 bp, synthetic construct
  source 1..75: mol_type = other DNA
atgaaatcgctgcgtttattgttatgcgctatgccgttgatgctaactggctgttccactatgtcgtcagttaac

SEQ ID NO: 298098 - DNA, 75 bp, synthetic construct
  source 1..75: mol_type = other DNA
ttggtcattgccaaaaagctgagggtgacgataatcgtgctgtcgaatgtaaagccgaaggcagccaacatatta

SEQ ID NO: 298099 - DNA, 75 bp, synthetic construct
  source 1..75: mol_type = other DNA
ataccgggtatgcgcttattgatgctctgccggatatagctgttaatccagatatgacggcattatgggcggaaa

SEQ ID NO: 298100 - DNA, 75 bp, synthetic construct
  source 1..75: mol_type = other DNA
ccgcagtagcgaatgatattgttaaggcgcttggtggcaattttactcgccatgatggctggtttgaaagtgata

SEQ ID NO: 298101 - DNA, 75 bp, synthetic construct
  source 1..75: mol_type = other DNA
ctaaacgcattgtttttttttatatatttatttgtaatccagttttggaaaaacgccagttttcaaacgaaagtc

SEQ ID NO: 298102 - DNA, 75 bp, synthetic construct
  source 1..75: mol_type = other DNA
tggaacgtatgatacagttcttgttcttgaggataagaaaacagggaagctgggttttccggcaagggctaagaa

SEQ ID NO: 298103 - DNA, 75 bp, synthetic construct
  source 1..75: mol_type = other DNA
ctgatgttgacctgggcgagatgaaaattgaacccgcagcgccagcaggacaatctcaacgcctgagttctccct

SEQ ID NO: 298104 - DNA, 75 bp, synthetic construct
  source 1..75: mol_type = other DNA
acgcctttatcctgtgaaatatcagcctgtggaaagggcttcaaaacagcttaaaacgattatagaacttattaa

SEQ ID NO: 298105 - DNA, 75 bp, synthetic construct
  source 1..75: mol_type = other DNA
ctcagtgcgatgccatcgtgcaggcccccgcgccttcacggcccatcgagcggggtatcgcaggaccggggctgc

SEQ ID NO: 298106 - DNA, 75 bp, synthetic construct
  source 1..75: mol_type = other DNA
tgaaggcaggtcttgtcgttcttgatgcttcgcaaaacggcaatggtggtgattatggttatcttgcctttgcgt

SEQ ID NO: 298107 - DNA, 75 bp, synthetic construct
  source 1..75: mol_type = other DNA
agatattgatatcgaactgcacactgccgggcagtataagcgtactctgaccttgctgggtgaaaataccgaaga

SEQ ID NO: 298108 - DNA, 75 bp, synthetic construct
  source 1..75: mol_type = other DNA
gctgaaatccctggaaagctggctgcgtgaaaagatgaaaaccctgtcgcgacactcagaactggcgaaagcgtt

SEQ ID NO: 298109 - DNA, 75 bp, synthetic construct
  source 1..75: mol_type = other DNA
taagctccatgctgatgaaacgcctgtcccggtgctgttgccaggcaataagaaaacgaagaccgggcggttatg

SEQ ID NO: 298110 - DNA, 75 bp, synthetic construct
  source 1..75: mol_type = other DNA
ctgcaggatcagcaggaagaaacatccgtgacattatttcagggaaaaatgagtaccgacggaaataactattac

SEQ ID NO: 298111 - DNA, 75 bp, synthetic construct
  source 1..75: mol_type = other DNA
caggaaggagtgtccgttaaacacgaaaagcgactgttgcctgcggcgccgtgctgcccgaactgcggcggttca

SEQ ID NO: 298112 - DNA, 75 bp, synthetic construct
  source 1..75: mol_type = other DNA
atacgctgactggtagggtgtatgacccggcagtacagcgtccgttgcgtcagacccgcacccgtaagccgttcc

SEQ ID NO: 298113 - DNA, 75 bp, synthetic construct
  source 1..75: mol_type = other DNA
tccggattacttgcccgcgtgttaacgggaaaatactgcgaacatctgccactgtatcgtcagagtgaaatcttt

SEQ ID NO: 298114 - DNA, 75 bp, synthetic construct
  source 1..75: mol_type = other DNA
gccattattgtcaatgttgctcaacgtaataaacgccagcgtggcgagttacgagtcaacaatctcagcgaacag

SEQ ID NO: 298115 - DNA, 75 bp, synthetic construct
  source 1..75: mol_type = other DNA
aaatggctgctctttatgatggccaagagcgagaggatataatcaatcagggaaattatatggctgaacagattg

SEQ ID NO: 298116 - DNA, 75 bp, synthetic construct
  source 1..75: mol_type = other DNA
gcgttaagcgaagaagaaagcagtgtggcgcacagttgcccgatcaattacaccctcatttcaaatggtctggct

SEQ ID NO: 298117 - DNA, 75 bp, synthetic construct
  source 1..75: mol_type = other DNA
cgagctgtatcgcaatggtcggataacggaagctgcctgcagggctcatgcccgccgaaagatccacgatgtgca

SEQ ID NO: 298118 - DNA, 75 bp, synthetic construct
  source 1..75: mol_type = other DNA
aagtgatcgatatcgaccaaagcccaattggtcgtaccccacgttccaatccggcgacctataccggcgtgttta

SEQ ID NO: 298119 - DNA, 75 bp, synthetic construct
  source 1..75: mol_type = other DNA
gaaattcctcgttaacgtcgggctgaactacctgacactttcccgctcggcagaaaccctttccggcggtgaagc

SEQ ID NO: 298120 - DNA, 75 bp, synthetic construct
  source 1..75: mol_type = other DNA
tcgctggcgggcggcgcgatccgcggctgggatcgccgtaatttttattacttccagatgctgaaatcactggca

SEQ ID NO: 298121 - DNA, 75 bp, synthetic construct
  source 1..75: mol_type = other DNA
tctcccgccgtatcgcacaaatggaagccgatctgaaccggcttcagaaagagagcgatacactgactggtaggg

SEQ ID NO: 298122 - DNA, 75 bp, synthetic construct
  source 1..75: mol_type = other DNA
gaactgtacgccatcgaggcagagataaggggaatgacggcggagcagcgccttgccggacgtcagcagaaagct

SEQ ID NO: 298123 - DNA, 75 bp, synthetic construct
  source 1..75: mol_type = other DNA
ccgccgaacagctggaactgatgcgcagtgccttccgggttatccggactgtacgtgaaaagcatgcctgttgtc

SEQ ID NO: 298124 - DNA, 75 bp, synthetic construct
  source 1..75: mol_type = other DNA
cgcctgctgggtacgcttatccatctgcgcgatctcggtaataccgtgattgtggtggagcacgacgaagacgcg

SEQ ID NO: 298125 - DNA, 75 bp, synthetic construct
  source 1..75: mol_type = other DNA
atacatgaaagcgagaaacgtactgattaacgcctcgccgattgtccgcctggtgacgcatcttgacgtctcgcg

SEQ ID NO: 298126 - DNA, 75 bp, synthetic construct
  source 1..75: mol_type = other DNA
attaacgcctcaccgattgttcgcctggtaacacatctcgacgtctcgcgtgaacaactggctgaagtcgccgcc

SEQ ID NO: 298127 - DNA, 75 bp, synthetic construct
  source 1..75: mol_type = other DNA
cccgcacccataatctcaagaatatcaacctcgttatcccccgcgacaaactgattgtcgtcaccgggctttcgg

SEQ ID NO: 298128 - DNA, 75 bp, synthetic construct
  source 1..75: mol_type = other DNA
tccttaaagagattggcgatcgcctgaaattcctcgttaacgtcgggctgaattacctgacgctttcccgctcgg

SEQ ID NO: 298129 - DNA, 75 bp, synthetic construct
  source 1..75: mol_type = other DNA
gtgaagggacacgtctgcgccgggaagcgcgccatgtgttcgttgagaatacgccgctgcccgccatctccgaca

SEQ ID NO: 298130 - DNA, 75 bp, synthetic construct
  source 1..75: mol_type = other DNA
tgtaccgccagtctgaaatatacgcccgccagggtgtggagctgagccgttcactgctgtcgggctgggtggatg

SEQ ID NO: 298131 - DNA, 75 bp, synthetic construct
  source 1..75: mol_type = other DNA
cgcagcgccttccgggttatccggacagtccgtgaaaagcatgcctgccgtcggtgcgatcgcatcgttcaggcc

SEQ ID NO: 298132 - DNA, 75 bp, synthetic construct
  source 1..75: mol_type = other DNA
acgcacttaaccagtggccggcactgacgtactatgcgaacgatggctgggtggaaatcgacaacaacatcgctg

SEQ ID NO: 298133 - DNA, 75 bp, synthetic construct
  source 1..75: mol_type = other DNA
ctattaccgtttaaacttaatgataagaaaatggcttctgtagttctatatccaaatcaatttaacttcgaatgc

SEQ ID NO: 298134 - DNA, 75 bp, synthetic construct
  source 1..75: mol_type = other DNA
cggcagcgggatgaaacgcaacacgctgacggcgatggcaggcaccgcgatccgggaaacggcacggatcgacaa

SEQ ID NO: 298135 - DNA, 75 bp, synthetic construct
  source 1..75: mol_type = other DNA
tcttgatctcgacgatctgatcgctgacgtcgctcgtgagatccatcattttttcggtctggcttcagtcagtat

SEQ ID NO: 298136 - DNA, 75 bp, synthetic construct
  source 1..75: mol_type = other DNA
gaaaaggcatccatccgcagactcatcttgcttgcttcagcggtgtgctgcaagcggatgcgtacgccgggttca

SEQ ID NO: 298137 - DNA, 75 bp, synthetic construct
  source 1..75: mol_type = other DNA
aagctacctacgcaatgtacttgacgtcatagctgactggccgctgaaccgggtcagcgaactgctcccatggcg

SEQ ID NO: 298138 - DNA, 75 bp, synthetic construct
  source 1..75: mol_type = other DNA
aagctacctacgcaatgtacttgacgtcatagcagactggccgctgaaccgggtcagcgaactgctcccttggcg

SEQ ID NO: 298139 - DNA, 75 bp, synthetic construct
  source 1..75: mol_type = other DNA
ttgcttcagcggtgtgctgcaagcggatgcgtacgccgggttcaacgagctgtatcgcaatggtgggataacgga

SEQ ID NO: 298140 - DNA, 75 bp, synthetic construct
  source 1..75: mol_type = other DNA
ctgaaatccctggaaagctggctgcgtgaaaagatgaaaaccctgtcgcgacactcagaactggcgaaagcgttc

SEQ ID NO: 298141 - DNA, 75 bp, synthetic construct
  source 1..75: mol_type = other DNA
aggaagcgctcagacggatagcagagttgtacgctatagaaacggagatacgcagcagtccggcagaggagcgac

SEQ ID NO: 298142 - DNA, 75 bp, synthetic construct
  source 1..75: mol_type = other DNA
aagctacctacgcaatgtacttgacgtcatagcggactggccgttgaaccgggtcagcgaactgctcccgtggcg

SEQ ID NO: 298143 - DNA, 75 bp, synthetic construct
  source 1..75: mol_type = other DNA
gcgctgaaccagtggccggcgctgacccgctatgcagaagatggctgggtggaggtggataataacattgccgaa

SEQ ID NO: 298144 - DNA, 75 bp, synthetic construct
  source 1..75: mol_type = other DNA
aaagcgttcgcatacgccctgaaccagtggccggcgctgacgtactatgcagatgatggctgggctgaggcggac

SEQ ID NO: 298145 - DNA, 75 bp, synthetic construct
  source 1..75: mol_type = other DNA
gcatagtacagttgaattatatgttaaagacatgagatcaatctttaatgaaataaaacaacatatcgaaatcaa

SEQ ID NO: 298146 - DNA, 75 bp, synthetic construct
  source 1..75: mol_type = other DNA
ctggttgcgtgaaaagatgaagaccctgtcgcgacactcagagttggcgaaggcgttcgcgtacgcacttaacca

SEQ ID NO: 298147 - DNA, 75 bp, synthetic construct
  source 1..75: mol_type = other DNA
taataaaggccagtcctgtcttcactggcagcgctacgccatagattgtgcggaactcctcataaacgcgggcat

SEQ ID NO: 298148 - DNA, 75 bp, synthetic construct
  source 1..75: mol_type = other DNA
gtatctgcgccatatcctgagcgtactgccggaatggccctccaaccgtgttgacgaactgctgccatggaacgt

SEQ ID NO: 298149 - DNA, 75 bp, synthetic construct
  source 1..75: mol_type = other DNA
ccattgatggcccaagcggtgcagggaaaggcaccttgtgtaaggctatggcggaagcgttgcaatggcatctgc

SEQ ID NO: 298150 - DNA, 75 bp, synthetic construct
  source 1..75: mol_type = other DNA
agtggccggcgctgacgtactatgcagatgatggctgggctgaggcggacaataacatcgctgaaaatgcgttgc

SEQ ID NO: 298151 - DNA, 75 bp, synthetic construct
  source 1..75: mol_type = other DNA
ctaaaagacagtgaggttacgttcccggagaatgcggcaggcgttattatcgatgttgaaaaatgtgacaagtct

SEQ ID NO: 298152 - DNA, 75 bp, synthetic construct
  source 1..75: mol_type = other DNA
gcctgcgtaaccgggtcatccttgaggtgctctggagtaccgggatccggcggatggagctggcgaacctgatgc

SEQ ID NO: 298153 - DNA, 75 bp, synthetic construct
  source 1..75: mol_type = other DNA
gatgggccatgcagatgcgcaaatggtatttcaggtatacggaaaatggatgtctgaaaacaataatgcacaggt

SEQ ID NO: 298154 - DNA, 75 bp, synthetic construct
  source 1..75: mol_type = other DNA
ggacggtacgtgaaaagcatgcctgtactcagtgcgatgccatcgtgcaggcccccgcgccttcacggcccatcg

SEQ ID NO: 298155 - DNA, 75 bp, synthetic construct
  source 1..75: mol_type = other DNA
gtgaaaacgctgtcgcgacactcagaactggcgaaagcgttcacgtacgtactgaaccagtggccagcgctggct

SEQ ID NO: 298156 - DNA, 75 bp, synthetic construct
  source 1..75: mol_type = other DNA
aggcagatatctgtgaatcgcttcacgaccacgccgacgagctttaccgcagctgcctcgcacgcttcgggaatg

SEQ ID NO: 298157 - DNA, 75 bp, synthetic construct
  source 1..75: mol_type = other DNA
acgcgcactctaccgcactactgccagcagcagatcgccatcatcgatgcgcggtgtgaattcctctatcaacaa

SEQ ID NO: 298158 - DNA, 75 bp, synthetic construct
  source 1..75: mol_type = other DNA
ggcctgcagcggaccactccgcttgcagctctggccgggcagcgaatggccagtgaactgctccccagaatgccc

SEQ ID NO: 298159 - DNA, 75 bp, synthetic construct
  source 1..75: mol_type = other DNA
ccagacgctaaccctgctggaaaaactcaacgatctggacgcggacgaacaggcagacatctgcgaatcacttca

SEQ ID NO: 298160 - DNA, 75 bp, synthetic construct
  source 1..75: mol_type = other DNA
acggtgtccaatctgtttggtcttgtcaccgggatggcggaggacctgcagagcctggtgggggccacggtggtc

SEQ ID NO: 298161 - DNA, 75 bp, synthetic construct
  source 1..75: mol_type = other DNA
atcgacctgacggtgcagggcggtgagcggtattttttctgtaatgagctgaatgaaaaaggggaggcggtcacc

SEQ ID NO: 298162 - DNA, 75 bp, synthetic construct
  source 1..75: mol_type = other DNA
cacagtcggggatcagttccgatatcggcaccacgccgggcgcgcgtttgccgtatggcgatgagccagatccga

SEQ ID NO: 298163 - DNA, 75 bp, synthetic construct
  source 1..75: mol_type = other DNA
gaacgaaaaaggtgaaccagtcacctggcaggggcggcagtatcaggcctatcccattcagggaagtggatttga

SEQ ID NO: 298164 - DNA, 75 bp, synthetic construct
  source 1..75: mol_type = other DNA
tgatgcaggtcttccgttgggctatagaacgcggccagaaggttgagaacccggccgatctggtgcgcccgtcga

SEQ ID NO: 298165 - DNA, 75 bp, synthetic construct
  source 1..75: mol_type = other DNA
aaatataaatatttatcgttgagtgaaatacataaaactttaacaaatagcaattcatttgcagatatttctata

SEQ ID NO: 298166 - DNA, 75 bp, synthetic construct
  source 1..75: mol_type = other DNA
tatatatatatcagaaaaatcaaatggcaaccatattattttaggtgagacgcactctcgcttatctattgaatg

SEQ ID NO: 298167 - DNA, 75 bp, synthetic construct
  source 1..75: mol_type = other DNA
ggcaatgaaacaggccgttatcgaacgcgatatcatgccggttctgggtaacaagatgatggctgagataaccac

SEQ ID NO: 298168 - DNA, 75 bp, synthetic construct
  source 1..75: mol_type = other DNA
ggaggatttgttatatcaatatcaaataatactacaaatgaactggcagacattaatgtgttccgaaaaaacatg

SEQ ID NO: 298169 - DNA, 75 bp, synthetic construct
  source 1..75: mol_type = other DNA
atatcaaacaaaatataatgacaatataaaattatctaatcgcgatgatttctttttaagaaaaacacaacgtat

SEQ ID NO: 298170 - DNA, 75 bp, synthetic construct
  source 1..75: mol_type = other DNA
atacaattgttgaacaagcaaagtataatttactttcatggaatgatttttataactctcatgcgtcaatatggg

SEQ ID NO: 298171 - DNA, 75 bp, synthetic construct
  source 1..75: mol_type = other DNA
ttgcccatgaacaaaaaggggtacgagctgtttataacaaggcagaatatcgtgagcagagggctgagatgctac

SEQ ID NO: 298172 - DNA, 75 bp, synthetic construct
  source 1..75: mol_type = other DNA
acttttggccgctatggtgtgggagggatcacgcttgcagaagcgcgtgaacggctcaatgaagccaaaaaaatg

SEQ ID NO: 298173 - DNA, 75 bp, synthetic construct
  source 1..75: mol_type = other DNA
cttcggccgctacggtgtcggagggatcacgctagcggaagctcgcgaacggctgggcgaagccaagaagatgat

SEQ ID NO: 298174 - DNA, 75 bp, synthetic construct
  source 1..75: mol_type = other DNA
ctggattagcggggagcacaccgatctggtgccattctccccgtcgaagtttgagcgatggatgagtgaaggtga

SEQ ID NO: 298175 - DNA, 75 bp, synthetic construct
  source 1..75: mol_type = other DNA
cgacggcggtgcaggcaagagagataatcagcagcgtataccgttatgcgaatgaccgcgggcacggcctgttta

SEQ ID NO: 298176 - DNA, 75 bp, synthetic construct
  source 1..75: mol_type = other DNA
tggtgacgtttcgctatgactatcgaatcaatggtcgtcgtgaaacgttaacgattggtcgctatggtgacggta

SEQ ID NO: 298177 - DNA, 75 bp, synthetic construct
  source 1..75: mol_type = other DNA
ataacggtcctgcggtggcggatgagttcgataaacccaccaccgatatccgtaaggacagatgcagcaagtgca

SEQ ID NO: 298178 - DNA, 75 bp, synthetic construct
  source 1..75: mol_type = other DNA
gtgccgccgtcgctgacggtgtcaatctgttggtctgtcaccgggatggcggaggatttgcagagcctggtgggt

SEQ ID NO: 298179 - DNA, 75 bp, synthetic construct
  source 1..75: mol_type = other DNA
tgggggccacggtggtccgccgccgggtgtatgcccgttttctggatgcggtgaattttgtggcgggcaatccgg

SEQ ID NO: 298180 - DNA, 75 bp, synthetic construct
  source 1..75: mol_type = other DNA
tgctgaccgccatgacggcctcgtttgtgctggccacaccgaccgagacggacggggcgctgtttcccggtcgta

SEQ ID NO: 298181 - DNA, 75 bp, synthetic construct
  source 1..75: mol_type = other DNA
tgtttggccttgtcaccggaatggcggaggacctgcagagcctggtgggggccacggtggtccgccgccgggtgt

SEQ ID NO: 298182 - DNA, 75 bp, synthetic construct
  source 1..75: mol_type = other DNA
tgaacgagtcggttaagtcagagcagtcaccgcgggtggtactctgggaaatcgacctgacgatacagggtggtg

SEQ ID NO: 298183 - DNA, 75 bp, synthetic construct
  source 1..75: mol_type = other DNA
gtggtactctgggaaatcgacctgacggtacagggtggtgagcggtattttttctgtaatgagctgaatgaaaaa

SEQ ID NO: 298184 - DNA, 75 bp, synthetic construct
  source 1..75: mol_type = other DNA
catcatgagacgacacgcctcactcagtcagcccaggtggtgctctgggaaatcgatctgacagaggtcggtggt

SEQ ID NO: 298185 - DNA, 75 bp, synthetic construct
  source 1..75: mol_type = other DNA
aagggcagcagtgcctgcccgtcgctgacggtgtcgaatctgttcggtctggtcaccgggatggcggaggacctg

SEQ ID NO: 298186 - DNA, 75 bp, synthetic construct
  source 1..75: mol_type = other DNA
aagggcagcagtgcctgtccgtcgctgacggtgtcgaatctgtttggtctggtcaccgggatggcggaggacctg

SEQ ID NO: 298187 - DNA, 75 bp, synthetic construct
  source 1..75: mol_type = other DNA
aagggcagcagtgcctgaccgtcgctgacggtgtcgaatctgttgggtctggtcaccggaatggcggaggacctg

SEQ ID NO: 298188 - DNA, 75 bp, synthetic construct
  source 1..75: mol_type = other DNA
atgacggcctcgtttgtgctggccacaccgaccgagacggacggggcgctgtttcccggtcgcatcatgctggcg

SEQ ID NO: 298189 - DNA, 75 bp, synthetic construct
  source 1..75: mol_type = other DNA
aagggcagcagtgcctggccgtcgctgacggtgtcgaatctgttgggtctggtcaccgggatggcggaggacctg

SEQ ID NO: 298190 - DNA, 75 bp, synthetic construct
  source 1..75: mol_type = other DNA
aagggcagcagtgcctgcccgtcgctgacggtgtcgaatctgttgggtctggtcaccggcatggcggaggacctg

SEQ ID NO: 298191 - DNA, 75 bp, synthetic construct
  source 1..75: mol_type = other DNA
aagggcagcagtgcctgaccgtcgctgacggtgtcgaatctgttaggtctggtcaccgggatggcggaggacctg

SEQ ID NO: 298192 - DNA, 75 bp, synthetic construct
  source 1..75: mol_type = other DNA
gttcgataaacccaccacggatatccgtaaggacagatgcagcaagtgcatgcgcgggtgtgagatgcgcggcat

SEQ ID NO: 298193 - DNA, 75 bp, synthetic construct
  source 1..75: mol_type = other DNA
aaatttacatgggaaacgtatggtgatatcgtggtatcacctgaagatagaatttctcatctggaattagatgga

SEQ ID NO: 298194 - DNA, 75 bp, synthetic construct
  source 1..75: mol_type = other DNA
aaatcctccgatattacatggtgaaaaatcatataatagcgggaagaatattggaagtcatccagatatgactga

SEQ ID NO: 298195 - DNA, 75 bp, synthetic construct
  source 1..75: mol_type = other DNA
actaaatcagttaaataacatattgagtgaaatagaaaaactgacgatagatgattattttaaacccgttgagac

SEQ ID NO: 298196 - DNA, 75 bp, synthetic construct
  source 1..75: mol_type = other DNA
ttgtaaaattcataagcacctcaaaagaatatttaagcaatatggatgtgattaacaatgttattgttcctcaaa

SEQ ID NO: 298197 - DNA, 75 bp, synthetic construct
  source 1..75: mol_type = other DNA
atggtgatatcgttgtatcacctgaagatagaatttctcatctggagttagatgggtttaattatttttcacaac

SEQ ID NO: 298198 - DNA, 75 bp, synthetic construct
  source 1..75: mol_type = other DNA
tctatctgtttattcaatagatatgattgcctggaaggataaaaataaaactgaaaaagagcctttaccacttga

SEQ ID NO: 298199 - DNA, 75 bp, synthetic construct
  source 1..75: mol_type = other DNA
caggatgaagtgctgaggctgaaacagattagcgggctgacagagttgtttcaggaagaggatttcagctcggct

SEQ ID NO: 298200 - DNA, 75 bp, synthetic construct
  source 1..75: mol_type = other DNA
gctggtgaacgtcctgatatgcgctgccgttctctgggctcggggaaatgtagcgcgcctggttgatgcactgag

SEQ ID NO: 298201 - DNA, 75 bp, synthetic construct
  source 1..75: mol_type = other DNA
agatgagatgagaacaaaaataaaatttgggaaactaattctgttcgcatccctggcaacgcagttacttttttt

SEQ ID NO: 298202 - DNA, 75 bp, synthetic construct
  source 1..75: mol_type = other DNA
tatatatttgacaactccagagagattatccgcaactggagattcattaaatattatgggacatttagtgcctgt

SEQ ID NO: 298203 - DNA, 75 bp, synthetic construct
  source 1..75: mol_type = other DNA
tacatataaagattatacctacctgctctggattgatcctaatgcctttggtgcggccaagtttagtgggatttt

SEQ ID NO: 298204 - DNA, 75 bp, synthetic construct
  source 1..75: mol_type = other DNA
atatcaaagagcgaatagcctttctcgacatatcccactacgcatatccaggtagtttattagaaaaattacagt

SEQ ID NO: 298205 - DNA, 75 bp, synthetic construct
  source 1..75: mol_type = other DNA
gagctcaatgacatcatacattcatatgaaaatatgcaaactaaaaatagccgaaaaggtatagaaatattagtt

SEQ ID NO: 298206 - DNA, 75 bp, synthetic construct
  source 1..75: mol_type = other DNA
tatcacaagattgttgcgacagcatagcaagtaaatcttttgaaaagcttttggagctaagaaattcaaatccaa

SEQ ID NO: 298207 - DNA, 75 bp, synthetic construct
  source 1..75: mol_type = other DNA
gctcagtatgatgaattttctaaaagtggtgaattgaatttaataagagaaaactgcttggagtattttaaaagc

SEQ ID NO: 298208 - DNA, 75 bp, synthetic construct
  source 1..75: mol_type = other DNA
gcagggtggcaatcagttcagctgcggcgcgcagtctcgcccgcagcagtccgctccggcagcgccgtctaacga

SEQ ID NO: 298209 - DNA, 75 bp, synthetic construct
  source 1..75: mol_type = other DNA
atatagcatctaaattacagcacaaggcacccaaaaattctataatgcttggggaaagtttagttaataaattag

SEQ ID NO: 298210 - DNA, 75 bp, synthetic construct
  source 1..75: mol_type = other DNA
atgaaatcgttgttccacaaattaaagaagtcgctgatgagaatattggtattagaattggcatagatatcggtg

SEQ ID NO: 298211 - DNA, 75 bp, synthetic construct
  source 1..75: mol_type = other DNA
gcatagaattatgggagatgctgttatggctttcttccgaagcaatgaaaatgaaaaccttaatacattagaaaa

SEQ ID NO: 298212 - DNA, 75 bp, synthetic construct
  source 1..75: mol_type = other DNA
tacaattcaataatggaaaaaaatgtattcctccgagaggttatatcatgtgttttatggactaaaaaagtagac

SEQ ID NO: 298213 - DNA, 75 bp, synthetic construct
  source 1..75: mol_type = other DNA
aaaagttttaactggctgaatccagtgagtgttggtgttaatgatattacaccggatgatgaaagctcatgggct

SEQ ID NO: 298214 - DNA, 75 bp, synthetic construct
  source 1..75: mol_type = other DNA
aacagttgtcagagatacttttaaaattttcaaaagatatcaaaaatggacagaaaacagctggaatattagagg

SEQ ID NO: 298215 - DNA, 75 bp, synthetic construct
  source 1..75: mol_type = other DNA
tgctggcgggaatgatagaaccgaccagcggcgagttattgattgacgatcatccgctgcattttggcgattatt

SEQ ID NO: 298216 - DNA, 75 bp, synthetic construct
  source 1..75: mol_type = other DNA
ccggaccggctggtttcgtcgtcagaccgtagaagcggtaaaacccttgagctttacgctacgtgaaggccagac

SEQ ID NO: 298217 - DNA, 75 bp, synthetic construct
  source 1..75: mol_type = other DNA
tgagaaaatcatgcgcatctatgagaactctaatatgacaaaggaagatttagagcaaattctaagcaaactgcc

SEQ ID NO: 298218 - DNA, 75 bp, synthetic construct
  source 1..75: mol_type = other DNA
gggaaaattgccttgtgtagtgcttttattttcttggttctttttgctaaaaatgagttgagaacaaaaataaaa

SEQ ID NO: 298219 - DNA, 75 bp, synthetic construct
  source 1..75: mol_type = other DNA
ctgacgcggtgaatgcgccggaatggcggtattactggcaggtcaacatgccagccgccaccaacaccacctgga

SEQ ID NO: 298220 - DNA, 75 bp, synthetic construct
  source 1..75: mol_type = other DNA
atggacgtgacaaacgatgattacatccgtctgttgtcagcactgttgccgcccggtccggcgtggtcagccagc

SEQ ID NO: 298221 - DNA, 75 bp, synthetic construct
  source 1..75: mol_type = other DNA
tgtagactccccacttttgccggagcagcacatcatcttcggcggacggcgctggaaagtgacagagatcgaggt

SEQ ID NO: 298222 - DNA, 75 bp, synthetic construct
  source 1..75: mol_type = other DNA
gagaatattcggtgaactgcagactgtagatgaagatcaaccagcactgggctattcactttgcgcaacagccat

SEQ ID NO: 298223 - DNA, 75 bp, synthetic construct
  source 1..75: mol_type = other DNA
gatccgcgcaccaccactgaactgataaaccgctgggagcgtctgtgcggtctgccggatgaatgtattcccgca

SEQ ID NO: 298224 - DNA, 75 bp, synthetic construct
  source 1..75: mol_type = other DNA
gggacgcagacccttcgccagcgtcagcaacggctggatgcgaaggttaacctggcgggcggcatcaatgaggat

SEQ ID NO: 298225 - DNA, 75 bp, synthetic construct
  source 1..75: mol_type = other DNA
aatgtgtccagcttcttgcactcttccttatcagaagaacaaaaaaaaatattgagtgatataaaattagaaatt

SEQ ID NO: 298226 - DNA, 75 bp, synthetic construct
  source 1..75: mol_type = other DNA
tagaataaatataacaccaatggggataaagatacatgaaatagtcaatgggaatgataagttgtttttttatcc

SEQ ID NO: 298227 - DNA, 75 bp, synthetic construct
  source 1..75: mol_type = other DNA
acatataagtgaagttcaacagccccttcattctattatttcacggcagaaagaacatgtaaaaaacttactatc

SEQ ID NO: 298228 - DNA, 75 bp, synthetic construct
  source 1..75: mol_type = other DNA
cgtaccagtgttaccgggccgtttgcgtataccgcatcaattattggtttggttgctgccggtgcaatgctgatt

SEQ ID NO: 298229 - DNA, 75 bp, synthetic construct
  source 1..75: mol_type = other DNA
ggcttgacttttaaagaggggataaatagtttatctgaagcactcgaacacatgaatatagatgcaattatgtct

SEQ ID NO: 298230 - DNA, 75 bp, synthetic construct
  source 1..75: mol_type = other DNA
atcagttattggcattaaatactctgttgattttgatagatacaatgagaatttatttttgtctttacctataaa

SEQ ID NO: 298231 - DNA, 75 bp, synthetic construct
  source 1..75: mol_type = other DNA
tatgatccggaggtgctgcagcaggcggtgaatgatgcggtcgcgaaaataccggtaccggcggacggtaaaagt

SEQ ID NO: 298232 - DNA, 75 bp, synthetic construct
  source 1..75: mol_type = other DNA
cactcaagttctgaagaggctccaggctgcagagggatttatcgacggctgcctggctatgctggacgtggttct

SEQ ID NO: 298233 - DNA, 75 bp, synthetic construct
  source 1..75: mol_type = other DNA
tccaggcattaattcgaatcaaaatgcgtaataacaatccaggagaattacgcgagtttattttcacccgcaaag

SEQ ID NO: 298234 - DNA, 75 bp, synthetic construct
  source 1..75: mol_type = other DNA
tccaggcattaattcggattaaagagcgtaatagcaatggtggagacttgcgcgaatttatttgcgcgcgcgaag

SEQ ID NO: 298235 - DNA, 75 bp, synthetic construct
  source 1..75: mol_type = other DNA
caacaaagtttcttcatgcagctggaattatatctgcattgtattttctaataacaccaaaaaaaacaataacta

SEQ ID NO: 298236 - DNA, 75 bp, synthetic construct
  source 1..75: mol_type = other DNA
actggcaaacattcttatctgcggcgcggttctctggttcagggggaatatagcgcgtctggttgatgcactgag

SEQ ID NO: 298237 - DNA, 75 bp, synthetic construct
  source 1..75: mol_type = other DNA
aaggaagaaaatatatagggcaactggaaatcaaaggccctcgtcataatcctctaattctccagttctggaagg

SEQ ID NO: 298238 - DNA, 75 bp, synthetic construct
  source 1..75: mol_type = other DNA
cacagtatcaagtaagcccggggacttcttcctatagatcgtattatcaacgtattcagacacagtcagcaggtg

SEQ ID NO: 298239 - DNA, 75 bp, synthetic construct
  source 1..75: mol_type = other DNA
gtgcagcgaaagggaaaggtaaggctgcaggtaaaaaatctaacactgctccgcagcaaccaccttcgcagcctg

SEQ ID NO: 298240 - DNA, 75 bp, synthetic construct
  source 1..75: mol_type = other DNA
atctggtctggagaagtacgttacagaagttgtggttaacgttgggggcaccatgcagatgctgggcggccgccg

SEQ ID NO: 298241 - DNA, 75 bp, synthetic construct
  source 1..75: mol_type = other DNA
tgttcaagctgggatgtggactgatacttatgcatgctcaaggctttctgatgtgatttcatggacgcaaaccac

SEQ ID NO: 298242 - DNA, 75 bp, synthetic construct
  source 1..75: mol_type = other DNA
acgaagaaattattccggtactggatttgccacgcgatgagctggagtctttcgccagtgcagtcaccggacgtt

SEQ ID NO: 298243 - DNA, 75 bp, synthetic construct
  source 1..75: mol_type = other DNA
ttggatcaggctaacagcttctgttctacgctggtggaccgtatcgttaccggttatccgcgtgatgaagtggct

SEQ ID NO: 298244 - DNA, 75 bp, synthetic construct
  source 1..75: mol_type = other DNA
tgttgtatcttgctatccctgaaaaatttagagaggagtcgagagttatatccttcatgtatgataagaataaag

SEQ ID NO: 298245 - DNA, 75 bp, synthetic construct
  source 1..75: mol_type = other DNA
cggagacacagaaactaaaggatgtcctctctgtagagggagttaatatcccgccgttattacaggtcataaagc

SEQ ID NO: 298246 - DNA, 75 bp, synthetic construct
  source 1..75: mol_type = other DNA
tgatgggccaagcatgcgcgacaagccagagtggatacgtcgcgactcagtgcgaacatcggttagtaaggcact

SEQ ID NO: 298247 - DNA, 75 bp, synthetic construct
  source 1..75: mol_type = other DNA
gaagttttctctagaaccaatgatgcaaatgtagaaattaaactgttaactaatgattattatatatttgaggtg

SEQ ID NO: 298248 - DNA, 75 bp, synthetic construct
  source 1..75: mol_type = other DNA
tttgtcacagtagtgattattctgttcgccttcagttctatcgtcgccaactacatttatgccgaaaataacctc

SEQ ID NO: 298249 - DNA, 75 bp, synthetic construct
  source 1..75: mol_type = other DNA
tatgttttctaatgaggcgggaatggggtcgataccaaatgcagcggcggcggcagcatcctggccgccgcatcc

SEQ ID NO: 298250 - DNA, 75 bp, synthetic construct
  source 1..75: mol_type = other DNA
acggtgctgtttttccggggcgcatcatgctggctaatacctgcacctggacctatcgcggtgatgagtgcggtt

SEQ ID NO: 298251 - DNA, 75 bp, synthetic construct
  source 1..75: mol_type = other DNA
atggaccagatagccaacctggtcattgatttggggattgatgcggcagagtttaaaaatgaaattccccgtatt

SEQ ID NO: 298252 - DNA, 75 bp, synthetic construct
  source 1..75: mol_type = other DNA
tgatgacccaaaccagtcaggggcatgggagcatgattgtcgttgcggaagatgcggcctgcgaggcgaatcgac

SEQ ID NO: 298253 - DNA, 75 bp, synthetic construct
  source 1..75: mol_type = other DNA
gaatgaaaaaggtgaaccggttacctggcaggggcgaaagtatcaggcgtaccccattcagggaagcggctttga

SEQ ID NO: 298254 - DNA, 75 bp, synthetic construct
  source 1..75: mol_type = other DNA
tggtgtataccatagatataaatcgttataatctctcagctatagcctcagtaataggactgttcaaaaaagagt

SEQ ID NO: 298255 - DNA, 75 bp, synthetic construct
  source 1..75: mol_type = other DNA
cagggtaacagtattgttattacctacactcgggatgaagggatgaccagagtcatccctgcaaatcccaaataa

SEQ ID NO: 298256 - DNA, 75 bp, synthetic construct
  source 1..75: mol_type = other DNA
cgaaatgttggacggatacttgtcgccacccaggtcgtggaacaatcactcgacgttgattttgattggttaatt

SEQ ID NO: 298257 - DNA, 75 bp, synthetic construct
  source 1..75: mol_type = other DNA
ctcaccgcgggtggtgctctgggaaatcgacctgacggtgcagggcggtgagcggtattttttctgcaatgagct

SEQ ID NO: 298258 - DNA, 75 bp, synthetic construct
  source 1..75: mol_type = other DNA
ttcacgaccgacactgacggtttctaacctggacggtatggtcaccggaatggcggaagatctgcagagtctggt

SEQ ID NO: 298259 - DNA, 75 bp, synthetic construct
  source 1..75: mol_type = other DNA
ttcacgacccacactgacggtttctaacctggacggtatggtcaccggaatggcggaagatgtgcagagtctggt

SEQ ID NO: 298260 - DNA, 75 bp, synthetic construct
  source 1..75: mol_type = other DNA
accgtggattgggatgaaaactgctgacggttgctttgtaccgtggctggcatctcaaaccgatctgctatctga

SEQ ID NO: 298261 - DNA, 75 bp, synthetic construct
  source 1..75: mol_type = other DNA
cgtccagcctacgcaggcagaactgacggcgcatccgctgccgcgttcattaagccgccttaacccggatttact

SEQ ID NO: 298262 - DNA, 75 bp, synthetic construct
  source 1..75: mol_type = other DNA
ttcataccattgccagtgattatctacgccagcgtaaactcggcgtgcgcccggtgtttgatccgttgcgttatc

SEQ ID NO: 298263 - DNA, 75 bp, synthetic construct
  source 1..75: mol_type = other DNA
tgttcggccttgtcaccgggatggcggaagacctgcagagtctggtgggggccacggtggtccgccgccgggtgt

SEQ ID NO: 298264 - DNA, 75 bp, synthetic construct
  source 1..75: mol_type = other DNA
accccattcaggggacgggatttgaactgaatggcaagggcagtgctgcccgtccgacactgacggtttctaacc

SEQ ID NO: 298265 - DNA, 75 bp, synthetic construct
  source 1..75: mol_type = other DNA
cgtaacgccggaggtgagcagcgcgctgtcaagccagatctggacttcaacaacactgactgggcctatggggtg

SEQ ID NO: 298266 - DNA, 75 bp, synthetic construct
  source 1..75: mol_type = other DNA
ggatggtcgccagaagaagttgatggtgctcctgcccgcccccagttttcggcgactgaagattttgttattcac

SEQ ID NO: 298267 - DNA, 75 bp, synthetic construct
  source 1..75: mol_type = other DNA
tggcaggggagagagtatcaggcgtatcccattcaggggagtggttttgaacggaatggcaaaggtgccagtacg

SEQ ID NO: 298268 - DNA, 75 bp, synthetic construct
  source 1..75: mol_type = other DNA
tagcggcggtagtccgggaacgccggtgacgacgctgcaaccggcggtactgaagacaccggggggggagaagag

SEQ ID NO: 298269 - DNA, 75 bp, synthetic construct
  source 1..75: mol_type = other DNA
agcgattctggcgcatgccggcggtgtgcgcctgcggagtcgtgcgcttcgtgataagcacgtcggaggggagtg

SEQ ID NO: 298270 - DNA, 75 bp, synthetic construct
  source 1..75: mol_type = other DNA
aaaccggcggggctgcgctacgatccgcaagcacaatcgctggtgtgcctgcccacgcaaacccgaacgggctag

SEQ ID NO: 298271 - DNA, 75 bp, synthetic construct
  source 1..75: mol_type = other DNA
ccgccagtccgctaatcacttcgcaccagacgcagccactgcccaccgtcgcagcgcctgttttgagtgcaccgc

SEQ ID NO: 298272 - DNA, 75 bp, synthetic construct
  source 1..75: mol_type = other DNA
tgttttgaggcggtgatctggcttacctacggctggaacaagaaacaggaccgcgttacgaatacagtgatcgcc

SEQ ID NO: 298273 - DNA, 75 bp, synthetic construct
  source 1..75: mol_type = other DNA
gctgggtggtggagcagatgtcagagctgacggccatgacggcctcgtttgtgctggcaacaccgacggagacgg

SEQ ID NO: 298274 - DNA, 75 bp, synthetic construct
  source 1..75: mol_type = other DNA
tgcctggaagcggtgatctggcttacctacggatggaacaagaaacaggaccgggttaccaacaccgtcatcgcc

SEQ ID NO: 298275 - DNA, 75 bp, synthetic construct
  source 1..75: mol_type = other DNA
gcagccttctcccgatattacaaacgagctagctaacgagttattgaaaagagcgtccacagaagataaagaact

SEQ ID NO: 298276 - DNA, 75 bp, synthetic construct
  source 1..75: mol_type = other DNA
cacttgtcgcccagcgactggaagccgcagcgatggcaagccacaaacgcgagaaagagatccagcaggagtttg

SEQ ID NO: 298277 - DNA, 75 bp, synthetic construct
  source 1..75: mol_type = other DNA
atgtacccgctcaactgggcatctggtgacaaaggggaaagtgaaacgtttatgagcgcggaaatgtactgcgga

SEQ ID NO: 298278 - DNA, 75 bp, synthetic construct
  source 1..75: mol_type = other DNA
cttctggatgtgggttgccgcgtttatcggcatggcgacctcttttgctgaatgctccctcgcccagctttataa

SEQ ID NO: 298279 - DNA, 75 bp, synthetic construct
  source 1..75: mol_type = other DNA
gggcgttctgttcgccgtctttttgctcatcgcctacggcataattttcagcggagttcaggcgaacgccgttgc

SEQ ID NO: 298280 - DNA, 75 bp, synthetic construct
  source 1..75: mol_type = other DNA
tattctcgctgtctttgctctgctggcaatcactcgcggtcttcatggcgtcgcccggctcatgcaggggtttgt

SEQ ID NO: 298281 - DNA, 75 bp, synthetic construct
  source 1..75: mol_type = other DNA
acgggctgggtcgccaggtggtcagaccgttgccacgccggagcaagaaacgaagcctgtaaacaagaaatcagc

SEQ ID NO: 298282 - DNA, 75 bp, synthetic construct
  source 1..75: mol_type = other DNA
gcctaaacatcagggaatcgcttaaagatgttatatgtatggctctagatggtaatgaagaaaccgacaaagaga

SEQ ID NO: 298283 - DNA, 75 bp, synthetic construct
  source 1..75: mol_type = other DNA
ctttagttgaccgaggaaaagaaagttttagagagcgtttagtaaaactaataggtgggcgcagtgtcagaactg

SEQ ID NO: 298284 - DNA, 75 bp, synthetic construct
  source 1..75: mol_type = other DNA
atgtccaacatttggggtgcagttcaggggcgacagtatcaggcgtatcccattcaggggagtggtttcgaactg

SEQ ID NO: 298285 - DNA, 75 bp, synthetic construct
  source 1..75: mol_type = other DNA
ggatgaacgcggaagacctggtgataatcgctgctcgtcctggtatggggaaagcaatggcgctaagcgaaggga

SEQ ID NO: 298286 - DNA, 75 bp, synthetic construct
  source 1..75: mol_type = other DNA
ggctgggtcgccaggtggtcagaccgctgccacgccggaacaagaaacgaagcctgtaagcaaaaaatcagcatg

SEQ ID NO: 298287 - DNA, 75 bp, synthetic construct
  source 1..75: mol_type = other DNA
tgagcgagtcggttaagtcagagcagtcaccgcgggtggtactctgggaaatcgacctgacggtacagggtggtg

SEQ ID NO: 298288 - DNA, 75 bp, synthetic construct
  source 1..75: mol_type = other DNA
gtacggggcaatttgttactgcagcattaaaacgagaagttgaatatcgccagcggcgcaaggccaaagaaccag

SEQ ID NO: 298289 - DNA, 75 bp, synthetic construct
  source 1..75: mol_type = other DNA
caagatattcctttccctgggctgcgcgaacagttgcagaaaacaggcgaggaaatccctgatgttggtgaagat

SEQ ID NO: 298290 - DNA, 75 bp, synthetic construct
  source 1..75: mol_type = other DNA
aaccattacgcatcgtcacagaacaggctttaaatagagaaatagaaaaaggtgcagacggtctgttggatcggg

SEQ ID NO: 298291 - DNA, 75 bp, synthetic construct
  source 1..75: mol_type = other DNA
cgcccgtcgctgacggtgtccaatctgttcggtctggtcaccggaatggcggaggacctgcagagcctggtgggg

SEQ ID NO: 298292 - DNA, 75 bp, synthetic construct
  source 1..75: mol_type = other DNA
ggtgatcggctaagctcgaaagggcagaacatggcgacgctgggtaacgacccgcgtttagcggcaatgctggtg

SEQ ID NO: 298293 - DNA, 75 bp, synthetic construct
  source 1..75: mol_type = other DNA
cgtcggctgcaaatcggtctgctgacggtgaaagtgcagccgctggcgaaaccctcggaagacgagttgcatcag

SEQ ID NO: 298294 - DNA, 75 bp, synthetic construct
  source 1..75: mol_type = other DNA
aaatgctgggggcgctggagggtgaacggcttagtgcgcaggggcaaaaaatggcagcgctgggtaacgatccgc

SEQ ID NO: 298295 - DNA, 75 bp, synthetic construct
  source 1..75: mol_type = other DNA
ggccaccattaatgcttcaacaggacaaatatcgattgaagggtccaccactacatctccaacgttctacataga

SEQ ID NO: 298296 - DNA, 75 bp, synthetic construct
  source 1..75: mol_type = other DNA
caaagaagatgcaccttcaggcatacaagcgctaagaacatattttcaggatagacagcaggatgcgtgtcgggt

SEQ ID NO: 298297 - DNA, 75 bp, synthetic construct
  source 1..75: mol_type = other DNA
taccgtgaggtgcaaaaagagatgaaagggcgttatcccaaacatgtctggccggacgacccggcaaacactgca

SEQ ID NO: 298298 - DNA, 75 bp, synthetic construct
  source 1..75: mol_type = other DNA
ttacggcatgtgcagaaattggtgaggcgatggctcgggcggtcgtaaagcctgcatcccgtgctcgtcggcgtc

SEQ ID NO: 298299 - DNA, 75 bp, synthetic construct
  source 1..75: mol_type = other DNA
ttcccgacctaccctgacggtttctaacctggacggtatggtcaccgggatggcggaagagctgcagagtctggt

SEQ ID NO: 298300 - DNA, 75 bp, synthetic construct
  source 1..75: mol_type = other DNA
ttcccgtcccaccctgacggtttctaacctgaacggtatggtcaccgggatggcggaagagctgcagagtctggt

SEQ ID NO: 298301 - DNA, 75 bp, synthetic construct
  source 1..75: mol_type = other DNA
gtgaaagaagggctgattaaccctgaacgttttgtgccaatgtttggcatgtacggactggcagaagcggttaac

SEQ ID NO: 298302 - DNA, 75 bp, synthetic construct
  source 1..75: mol_type = other DNA
acccgattgatggcagcggctttgaaatgaacgggaaaggcagcagtgccagaccgtcgctgacggtgtccaatc

SEQ ID NO: 298303 - DNA, 75 bp, synthetic construct
  source 1..75: mol_type = other DNA
atgaacggccggggcagcagtgcccgcccgtcgctgacggtgtccaatctgtttggccttgtcaccgggatggcg

SEQ ID NO: 298304 - DNA, 75 bp, synthetic construct
  source 1..75: mol_type = other DNA
aagggcgttatcccaaacacgtctggccggacgacccggcgaataccgcaccgacgcgacggacgaaaaagtatt

SEQ ID NO: 298305 - DNA, 75 bp, synthetic construct
  source 1..75: mol_type = other DNA
agtgctcaaggctcaggctgatgtgggagggagtgttatgatcttacccagcaatagtggacacgcggctaagtg

SEQ ID NO: 298306 - DNA, 75 bp, synthetic construct
  source 1..75: mol_type = other DNA
cccaaatcttattcttgctcatggcaattcacggtttaaccacctctttcaatcaataaaatcacgcgcgattac

SEQ ID NO: 298307 - DNA, 75 bp, synthetic construct
  source 1..75: mol_type = other DNA
gctgacagccatgacggcctcgtttgtgctggccacaccgaccgagacggagggggcgctgtttcccggtcgtat

SEQ ID NO: 298308 - DNA, 75 bp, synthetic construct
  source 1..75: mol_type = other DNA
gatgaacgggaaagggagcagtgcccgcccgtcactgacggtgtcgaatctgttcgggctggtcaccgggatggc

SEQ ID NO: 298309 - DNA, 75 bp, synthetic construct
  source 1..75: mol_type = other DNA
atgcaggagatcaacgaagaaagcctgaatgagtcggttaaatcagagcagtcaccgcgggtggtactctgggaa

SEQ ID NO: 298310 - DNA, 75 bp, synthetic construct
  source 1..75: mol_type = other DNA
gaatgaaaaaagggagccggtgacctggcaggggcggaatatcaggcatacccgattgacggcagcggctttgag

SEQ ID NO: 298311 - DNA, 75 bp, synthetic construct
  source 1..75: mol_type = other DNA
tggcaggggcggaagtatgaggcgtacccgattgagggcagcggctttgagatgaacggaaagggcagcagtgcc

SEQ ID NO: 298312 - DNA, 75 bp, synthetic construct
  source 1..75: mol_type = other DNA
gctggcgcatcgagcagtgcagcgaactgaacgcggctagcgcggcctttgtgctgtctactccgacggaaacgg

SEQ ID NO: 298313 - DNA, 75 bp, synthetic construct
  source 1..75: mol_type = other DNA
gtggtactctgggaaatcgacctgacggtgcagggcggtgagcggtattttttctgcaatgagctgaatgaaaaa

SEQ ID NO: 298314 - DNA, 75 bp, synthetic construct
  source 1..75: mol_type = other DNA
agcggtattttttctgtaatgagctgaatgaaaaaggggagcggtcacctggcaggggcgggaatatcaggcata

SEQ ID NO: 298315 - DNA, 75 bp, synthetic construct
  source 1..75: mol_type = other DNA
gctgacagccatgacggcctcgtttgtgctggcgacaccgaccgagacggatggggcgctgtttcccggtcgcat

SEQ ID NO: 298316 - DNA, 75 bp, synthetic construct
  source 1..75: mol_type = other DNA
cggatgctgggggcgctggacggtgaacggcttagtgcgcaagggcaaaaaatggcagcgctgggtaacgatccg

SEQ ID NO: 298317 - DNA, 75 bp, synthetic construct
  source 1..75: mol_type = other DNA
aacgtcgctatttatcgctgcctgcccatcaacgttttgatgaagctgtcgcggtcgctaccgccgaattactgc

SEQ ID NO: 298318 - DNA, 75 bp, synthetic construct
  source 1..75: mol_type = other DNA
gatgacgcgcaaggtacgctgaaagcctggcgtcggctgcaaatcggtcagttgacggtgaaagtgcagccgctg

SEQ ID NO: 298319 - DNA, 75 bp, synthetic construct
  source 1..75: mol_type = other DNA
gcgctggcggtgagaatgcaggagatgtttggtgaggccactaatccgacgatcgcccaggggcgcgtgccgctg

SEQ ID NO: 298320 - DNA, 75 bp, synthetic construct
  source 1..75: mol_type = other DNA
tgaatctactggccgcgaaacgtctgttacaaatgctgggggcgctggacggtgaacggcttagtgcgcaagggc

SEQ ID NO: 298321 - DNA, 75 bp, synthetic construct
  source 1..75: mol_type = other DNA
cacgtaatcaaccttcctggcagcaacgcagtcagcaactattaaaacgcttaaatgtacgcgacggcgaggccg

SEQ ID NO: 298322 - DNA, 75 bp, synthetic construct
  source 1..75: mol_type = other DNA
tggcaggggcgtcagtatcaggcatacccgatagagggcagcggctttgagatgaacggcaagggcagcagtgcg

SEQ ID NO: 298323 - DNA, 75 bp, synthetic construct
  source 1..75: mol_type = other DNA
gttattgaaagtggaatggggataactgaaaccttgcatggacgcaccacacagggtggcaaagaagtcatagct

SEQ ID NO: 298324 - DNA, 75 bp, synthetic construct
  source 1..75: mol_type = other DNA
agtagcgttcgctgattgtgtcatcgttccatctaaggactctcttacagaacggattgggcttatgcactttga

SEQ ID NO: 298325 - DNA, 75 bp, synthetic construct
  source 1..75: mol_type = other DNA
tgggctggtgattctcgatgaatttcatgaacgcagcttgcaggcggatttggcgttggcactattacttgatgt

SEQ ID NO: 298326 - DNA, 75 bp, synthetic construct
  source 1..75: mol_type = other DNA
atttttacctggcgtcggagaaattcagcgtgtgcaggaacaactggcttcgcgcatcggcagtgatgtattgct

SEQ ID NO: 298327 - DNA, 75 bp, synthetic construct
  source 1..75: mol_type = other DNA
cggaaggacagatgcagtcaaggcttgcgcgggtggggagagcgcgagaggggggtcaatttcgtcggtttctgt

SEQ ID NO: 298328 - DNA, 75 bp, synthetic construct
  source 1..75: mol_type = other DNA
ccagttgttaaccttccactctcttcaccagcggttaacccggtctatgccaaatcctgtctgaaggagaaggga

SEQ ID NO: 298329 - DNA, 75 bp, synthetic construct
  source 1..75: mol_type = other DNA
actggtaaaggcgttaatctacaggggctacaattttgcaaactcattgataaaagctcaccgctactgtctaat

SEQ ID NO: 298330 - DNA, 75 bp, synthetic construct
  source 1..75: mol_type = other DNA
taatcggtgagaagcagggcgatatttcttcaggctgtgggacgtatgcgtcggttggtaatcgctggcaggttg

SEQ ID NO: 298331 - DNA, 75 bp, synthetic construct
  source 1..75: mol_type = other DNA
atgagtcatcaacataccacccagacttctggtcaggggatgctggaacgcgtgtttaaactgcgtgaacatggc

SEQ ID NO: 298332 - DNA, 75 bp, synthetic construct
  source 1..75: mol_type = other DNA
ctttgtatattccctctgcgggcgagggcagtgctcgtgtgcctggacgtgatgagttctggtatgaggaagaac

SEQ ID NO: 298333 - DNA, 75 bp, synthetic construct
  source 1..75: mol_type = other DNA
ttcccggttcctgatccgaaagaattcaacgattatattctggtttttccggcgggatccggtattaagcctatc

SEQ ID NO: 298334 - DNA, 75 bp, synthetic construct
  source 1..75: mol_type = other DNA
gattgggctatcgaaccggaagactttgaacaacttcacattgacggaaaagtaattgtcagttggcctatgaca

SEQ ID NO: 298335 - DNA, 75 bp, synthetic construct
  source 1..75: mol_type = other DNA
tattgccgcccgacgatgccgcgaatgtgacacggtactggttgatccagacgacatgttaaaagcggcgctacg

SEQ ID NO: 298336 - DNA, 75 bp, synthetic construct
  source 1..75: mol_type = other DNA
acacggctatctgacgccaccagaacggcttgatatgccggtagtgcaatacgatttcagccgcttgcaggcaca

SEQ ID NO: 298337 - DNA, 75 bp, synthetic construct
  source 1..75: mol_type = other DNA
gctgactatctggcgaaggagcataccaaagctcactgcaccgatgagcgcaactttggctgcagtcgtggctga

SEQ ID NO: 298338 - DNA, 75 bp, synthetic construct
  source 1..75: mol_type = other DNA
taagcgccagcaggcacctgacggcaccccgtatgccgccagaaagcgccagccggtgcggagcaagagaggccg

SEQ ID NO: 298339 - DNA, 75 bp, synthetic construct
  source 1..75: mol_type = other DNA
tacaataaattactgaatcgtctcgactacctagctaaactcgatacaaaagcatatggagatggcgaccgtagc

SEQ ID NO: 298340 - DNA, 75 bp, synthetic construct
  source 1..75: mol_type = other DNA
tgggactgaaaaacgcaggtgtgattgtcgctaacccggaaacgctggtgagcatcggtaatctgacttctcaca

SEQ ID NO: 298341 - DNA, 75 bp, synthetic construct
  source 1..75: mol_type = other DNA
tgattaacgaactggccaaaaacctcaaaacctctgaagacctcagccagtttgatcggctgctgaaaaagctca

SEQ ID NO: 298342 - DNA, 75 bp, synthetic construct
  source 1..75: mol_type = other DNA
acgcgcttgttaaatcgccagaaattacagtaaaagaaatcgcggcccgttttaaagtttctcgacctacgattt

SEQ ID NO: 298343 - DNA, 75 bp, synthetic construct
  source 1..75: mol_type = other DNA
actctcttgcagctcttgcagctcatgaatgagctacgcagtaaaggtattcactttgagagcctcaaagagcgc

SEQ ID NO: 298344 - DNA, 75 bp, synthetic construct
  source 1..75: mol_type = other DNA
aaacaaggcgctaacggcattgaagggcgtttaacggcggatcaactcaatagtgcaaccgcctgtatttttgcg

SEQ ID NO: 298345 - DNA, 75 bp, synthetic construct
  source 1..75: mol_type = other DNA
cacgcgttgactcaacgtcttgctgctctggggaaaatttccagtactgagcaatttctggaagaagtgtatcgc

SEQ ID NO: 298346 - DNA, 75 bp, synthetic construct
  source 1..75: mol_type = other DNA
gcttgctggtggccgcagaactaatcaaggaagagaccgggtactggctactaaagcctcgtgaccagaagatgc

SEQ ID NO: 298347 - DNA, 75 bp, synthetic construct
  source 1..75: mol_type = other DNA
gttgatgacctcaagtcttgctcgcgtgaactggcaggatcttactgaatgtgttccggcgtttattaccgctgt

SEQ ID NO: 298348 - DNA, 75 bp, synthetic construct
  source 1..75: mol_type = other DNA
attctgatggggctgtttgctaacctgccagtcgcgctggctcccgctatgggtctgaatgcgttcttcgccttt

SEQ ID NO: 298349 - DNA, 75 bp, synthetic construct
  source 1..75: mol_type = other DNA
accgataaagcaggtctggcggatgagaaggggaaattcccgcgcatgaagcaggcgctgtatgtcgacagtatc

SEQ ID NO: 298350 - DNA, 75 bp, synthetic construct
  source 1..75: mol_type = other DNA
agaatcttacttgctgatcctgaaatgacagttggtgcagttgctaagcgcttcaacgggcactgttgcaaatag

SEQ ID NO: 298351 - DNA, 75 bp, synthetic construct
  source 1..75: mol_type = other DNA
gggcctgaatgcgttcttcgcttttgtcgttgtgcaggcgatgggcttgccgtggcaggtcgggatgggcgcaat

SEQ ID NO: 298352 - DNA, 75 bp, synthetic construct
  source 1..75: mol_type = other DNA
gtttattaccgctgtgatgatgccgttcagcttctcgattactgaaggtatcgcgctgggctttatctcctactg

SEQ ID NO: 298353 - DNA, 75 bp, synthetic construct
  source 1..75: mol_type = other DNA
gaatgaaaggccagtactggcaggttcgtgaaaaagtgttcgattacgaaggccgttttcgtcgggcgcacgaat

SEQ ID NO: 298354 - DNA, 75 bp, synthetic construct
  source 1..75: mol_type = other DNA
catattgatgatgttaataaagatacccctgtgcaaaatttaagctcaggagaaaaaagaaaagcattgctagat

SEQ ID NO: 298355 - DNA, 75 bp, synthetic construct
  source 1..75: mol_type = other DNA
atgctctggggcaatttgttggcgaaaatggacaatggcagctgaaaatagatactccagaaatcgttatgcctg

SEQ ID NO: 298356 - DNA, 75 bp, synthetic construct
  source 1..75: mol_type = other DNA
gttatcccgagcagctactttcccaggtgcgcacgctgattaatgaacaacgtctgggcgatgtgctggcaaaac

SEQ ID NO: 298357 - DNA, 75 bp, synthetic construct
  source 1..75: mol_type = other DNA
acgtaaaccaacgcgcgacgaacgccatgctatccgtgacttcttaatcagcattgaacgctgggagacagatta

SEQ ID NO: 298358 - DNA, 75 bp, synthetic construct
  source 1..75: mol_type = other DNA
agtagattacctgaactatgatatctttaatgaattaatgaaaaaaaacactggctattacttaatatctattta

SEQ ID NO: 298359 - DNA, 75 bp, synthetic construct
  source 1..75: mol_type = other DNA
tatttagatactttagaagtgaaaagcaatcatgatcttgttcaatccataataacttcaattacatcacaaaat

SEQ ID NO: 298360 - DNA, 75 bp, synthetic construct
  source 1..75: mol_type = other DNA
gcgggtaattcgctggaagaagcctgcttctttgccaatgcggcggcaggcgtagtggtcggcaaactggggaca

SEQ ID NO: 298361 - DNA, 75 bp, synthetic construct
  source 1..75: mol_type = other DNA
tccacggtttcgccgatcgagctggaaaatgcagtacgtggacgtgcagataccggctttggtgtgatgaccgaa

SEQ ID NO: 298362 - DNA, 75 bp, synthetic construct
  source 1..75: mol_type = other DNA
acatcgcttctcttggtgctaacgctcgcctggtcgggctgaccggtattgatgatgcggcgcgcgcgctgagta

SEQ ID NO: 298363 - DNA, 75 bp, synthetic construct
  source 1..75: mol_type = other DNA
tgcgcaatgccccgccgatcaataaagtgatgtatgacaataagatccacgtgctgaaaaacgcgctcggattac

SEQ ID NO: 298364 - DNA, 75 bp, synthetic construct
  source 1..75: mol_type = other DNA
acatgacaacaaatttcgtattgataaagaacgtttcacgtgtgtgggatgtgaccctacttgccaaatatcccc

SEQ ID NO: 298365 - DNA, 75 bp, synthetic construct
  source 1..75: mol_type = other DNA
gttgagcttattgctggccctctcattaagggggccagcaattatgcacgtgctaaacatcccagagttctgcat

SEQ ID NO: 298366 - DNA, 75 bp, synthetic construct
  source 1..75: mol_type = other DNA
ggttcgattttaaaatttaccgtaagcgcaaaccaacgcgcgacgagcgccacgctatccgtgactttttaatca

SEQ ID NO: 298367 - DNA, 75 bp, synthetic construct
  source 1..75: mol_type = other DNA
acgttttcgcgaggttgatgcggtgctttcctggctgttagaatacgccccgtcgcgcctgactgggacaggggc

SEQ ID NO: 298368 - DNA, 75 bp, synthetic construct
  source 1..75: mol_type = other DNA
ttcttgattacggcgacactatcagcattgagcttcgtgacgatggggatattcgcctgttaacgcctgttgaag

SEQ ID NO: 298369 - DNA, 75 bp, synthetic construct
  source 1..75: mol_type = other DNA
tcctccggggaggggccgctgttgcgcttcgacgaacgtaagcaggtgctggcgacgttggtcaacgcggcgcaa

SEQ ID NO: 298370 - DNA, 75 bp, synthetic construct
  source 1..75: mol_type = other DNA
gagaaaatatcaattcatgactttaaagttaaagacagagtaacacttactacaatacataaggcgaagggaaat

SEQ ID NO: 298371 - DNA, 75 bp, synthetic construct
  source 1..75: mol_type = other DNA
cagcatcaggttacggggtgactcacgtaagggacaggcagatgacagctcagccacaggcagcactgcaggaaa

SEQ ID NO: 298372 - DNA, 75 bp, synthetic construct
  source 1..75: mol_type = other DNA
ctgcatcgggttacggggcgacttatgtaaggaacaggcagatggcagctcagccacagaccgtacagcaggaaa

SEQ ID NO: 298373 - DNA, 75 bp, synthetic construct
  source 1..75: mol_type = other DNA
gtcggttttaacggtggcggcgtggcggtgggtaaccctacaccagatatcgacgccgttgccagccaggggctg

SEQ ID NO: 298374 - DNA, 75 bp, synthetic construct
  source 1..75: mol_type = other DNA
ttacctgacccaggacgagatcgcggaagaaatccgccaggaccgtgagaacggttattgcagccacggtattga

SEQ ID NO: 298375 - DNA, 75 bp, synthetic construct
  source 1..75: mol_type = other DNA
atggatgaagaaagggtgttttcactcagctatgagcaactgacccgaatagcggaaaaaaatatccgtgaatgt

SEQ ID NO: 298376 - DNA, 75 bp, synthetic construct
  source 1..75: mol_type = other DNA
cgtcagcgacaggcattactggcagaaggtgtgatggtgtcaggaagagggcaaatcgacttgcagcgttatcgc

SEQ ID NO: 298377 - DNA, 75 bp, synthetic construct
  source 1..75: mol_type = other DNA
ttcgctaaccggaccggatttacagcgtcaacgacaggcattactggcagaaggtgtgatggtatcgggaagcgg

SEQ ID NO: 298378 - DNA, 75 bp, synthetic construct
  source 1..75: mol_type = other DNA
cgcgcggtcttttcccggcgcgggcagacaggcatttatcctcccgcctgcccggcgtcatcaggcacgcagacg

SEQ ID NO: 298379 - DNA, 75 bp, synthetic construct
  source 1..75: mol_type = other DNA
tggctgaaacagggcggtgccagctggttgggcgagaaggaaacgcatacgctgtcggtggataatctgaccgcg

SEQ ID NO: 298380 - DNA, 75 bp, synthetic construct
  source 1..75: mol_type = other DNA
atgggttaataatcccggaaatcaacggacatcgctgaaaggaaaactgcgcggacagaaaattgatgctgccgc

SEQ ID NO: 298381 - DNA, 75 bp, synthetic construct
  source 1..75: mol_type = other DNA
cccaggttgaggcgcaagggcgtgaaatcaacgccacgctggcgatgcgtaataacgcgccgtggctggcgaata

SEQ ID NO: 298382 - DNA, 75 bp, synthetic construct
  source 1..75: mol_type = other DNA
gccaattccgtggtgtgaagaaggtttctggattgaacgcgacaatgaagatgcattgccattgggtagtaccgc

SEQ ID NO: 298383 - DNA, 75 bp, synthetic construct
  source 1..75: mol_type = other DNA
tccgttgctgatttcctgcaattaaccgctccttatggctggacgcttacgccaattccgtggtgtgaagaaggt

SEQ ID NO: 298384 - DNA, 75 bp, synthetic construct
  source 1..75: mol_type = other DNA
cggaatataaggatgtggtttcatttgccctgctgattctggtgctgctggtgatgccgaccggtattctgggtc

SEQ ID NO: 298385 - DNA, 75 bp, synthetic construct
  source 1..75: mol_type = other DNA
aatctgggcggcgtgcgcgcgagtaatctcaccgcagtgatccctgactactcgaaagaaaaactgctgattgac

SEQ ID NO: 298386 - DNA, 75 bp, synthetic construct
  source 1..75: mol_type = other DNA
aaagccgtccatgcgcgcggcggttttcgttacctgcaacctgctaacgatgaaccctggctgggtattctggct

SEQ ID NO: 298387 - DNA, 75 bp, synthetic construct
  source 1..75: mol_type = other DNA
ggcatacgcccgctggccgcgaaactttcacctgcactgggtgatgtttggcgctccacacaaccgagcggcaag

SEQ ID NO: 298388 - DNA, 75 bp, synthetic construct
  source 1..75: mol_type = other DNA
cttactttgatgagacaccgctgaaagattctctgggtgcgaccctgcaagaactccagctcgacggcgatgtga

SEQ ID NO: 298389 - DNA, 75 bp, synthetic construct
  source 1..75: mol_type = other DNA
ggatgtctggcagagcctgctgcatatgcgctggcagtttcgcgatctcactttctggcaactgcgctttcgcac

SEQ ID NO: 298390 - DNA, 75 bp, synthetic construct
  source 1..75: mol_type = other DNA
acgccgtcatcacctttcccgacaacggagcgcattaacttccgtggctggccggacgcacaaatacgatgcaca

SEQ ID NO: 298391 - DNA, 75 bp, synthetic construct
  source 1..75: mol_type = other DNA
gtggcaatatccagttcaggctccacacgcgatctgctgcatgtggttaaactggcgcgtaagcaaggtgtacgc

SEQ ID NO: 298392 - DNA, 75 bp, synthetic construct
  source 1..75: mol_type = other DNA
gacagccaggcacagacgtatccgcccgaccgtgaccgctgtggatcagtgctggagcatggatttcgttgctga

SEQ ID NO: 298393 - DNA, 75 bp, synthetic construct
  source 1..75: mol_type = other DNA
taaatactttaagtaatttgataattgctgaggggctgaatgtacctgtggatggcgatatggcacttctagaat

SEQ ID NO: 298394 - DNA, 75 bp, synthetic construct
  source 1..75: mol_type = other DNA
agcagagacgccgctgcgtgagggtgaacccggaagcgggacggttcggagaggattcgagctggatgatactgg

SEQ ID NO: 298395 - DNA, 75 bp, synthetic construct
  source 1..75: mol_type = other DNA
gaatccgatgatatcggggtggctgaattattacgcgaaatactacaagtcagcgggtgatgctgccaacttact

SEQ ID NO: 298396 - DNA, 75 bp, synthetic construct
  source 1..75: mol_type = other DNA
tccgcctgaatgtggcgttacagatccttgtcggtccggcctggcagttgtgggtggatgatgtgcaacgggaag

SEQ ID NO: 298397 - DNA, 75 bp, synthetic construct
  source 1..75: mol_type = other DNA
ggcagagccggcgtgatgacagggcaataaccctgcgcattcgtgagatagcagaaagccggatacgttacggtt

SEQ ID NO: 298398 - DNA, 75 bp, synthetic construct
  source 1..75: mol_type = other DNA
gctaaccgcgtcgtggcgctgctgggcggtaaaacgccgcacattcagaacctggcggtaggtggtgtcgcgaac

SEQ ID NO: 298399 - DNA, 75 bp, synthetic construct
  source 1..75: mol_type = other DNA
tgctgaaccttgagcgcctgatatacatcaagtctttcatcgacaagctgagcgactttgttgaacaggtttata

SEQ ID NO: 298400 - DNA, 75 bp, synthetic construct
  source 1..75: mol_type = other DNA
tgctgaaccttgagcgcctaatgtacatcaagtctttcatcgacaaactgagcgactttgttgagcaggtttata

SEQ ID NO: 298401 - DNA, 75 bp, synthetic construct
  source 1..75: mol_type = other DNA
ggtatcatttacacgagtcatgttgatgcctaaaaaacaacgcgctcgttgggtaagtcccgatcgtggaattct

SEQ ID NO: 298402 - DNA, 75 bp, synthetic construct
  source 1..75: mol_type = other DNA
catcagcaactaccaggcggttgttccatcaacctggaactctggcccgcgtaacttcaatgatgacgtcggtcc

SEQ ID NO: 298403 - DNA, 75 bp, synthetic construct
  source 1..75: mol_type = other DNA
agcgactttgttgagcaggtttacaaggttgataccgcagttatcgccgcgttctacccggaatggctgacgcgc

SEQ ID NO: 298404 - DNA, 75 bp, synthetic construct
  source 1..75: mol_type = other DNA
gaactgaaaaactatcttaccagtctgtgtgcagaggaaggggtaactcaggcagagttgatagaaaggcttatc

SEQ ID NO: 298405 - DNA, 75 bp, synthetic construct
  source 1..75: mol_type = other DNA
acagcacgcgctggcatcggctgataaaacgggcggctgacgcccatctcaccccgtcggccgtactgttgtcgg

SEQ ID NO: 298406 - DNA, 75 bp, synthetic construct
  source 1..75: mol_type = other DNA
cgggtcacaccgctggcgccgatcctctccccctgatgaactcactcgctatccagccgcgctggcaggccgtgg

SEQ ID NO: 298407 - DNA, 75 bp, synthetic construct
  source 1..75: mol_type = other DNA
atatcgcatcgagctgggcgaaatcgaaagcgcgctcagccagctggcgggggtgaaacaagcaaccgttctggc

SEQ ID NO: 298408 - DNA, 75 bp, synthetic construct
  source 1..75: mol_type = other DNA
catggcgatgaggtcgcgggttacaacgcttcctcgtacaatgtcctgacaggcaggtgcgccgcgatccccgtc

SEQ ID NO: 298409 - DNA, 75 bp, synthetic construct
  source 1..75: mol_type = other DNA
gcaaaacgtgcccgccattccgatgcccgtcgtctttaccagcgcactgggctttgagcaggataacttcctcgc

SEQ ID NO: 298410 - DNA, 75 bp, synthetic construct
  source 1..75: mol_type = other DNA
gccgcccccacgctggcggcatggagccagttaatgctcagccggtcgccggagaacgcggaagaagaaacgccg

SEQ ID NO: 298411 - DNA, 75 bp, synthetic construct
  source 1..75: mol_type = other DNA
ctcaggtttacagcggttacggcgaatcgctcatcgactataacttcaaccagacccgcgttggtgtgggggtta

SEQ ID NO: 298412 - DNA, 75 bp, synthetic construct
  source 1..75: mol_type = other DNA
ggcgatcccgatggcgattgaagatccgctgcgggttattggttcgtttgtgctgggctctatggtaacgggcgc

SEQ ID NO: 298413 - DNA, 75 bp, synthetic construct
  source 1..75: mol_type = other DNA
cagataaaccggcgttagcgccaggctttgcggctggacttgccgccaacatgatcggttccgggtttctcggcg

SEQ ID NO: 298414 - DNA, 75 bp, synthetic construct
  source 1..75: mol_type = other DNA
gctcatttgtcagcacgacgccagcgccgggtcagacgatattcccgtccttgcctggcagcaggccattgaggc

SEQ ID NO: 298415 - DNA, 75 bp, synthetic construct
  source 1..75: mol_type = other DNA
gcccgccgttgcgcgggcaggttaatcgagtgcggggttcagcccggcgataatgtggctatcacgatgtcgaaa

SEQ ID NO: 298416 - DNA, 75 bp, synthetic construct
  source 1..75: mol_type = other DNA
agtcaaaccgtggtatgtagtgggtaatacagacgataacccggatatcaccaaatatatggggtactaccagct

SEQ ID NO: 298417 - DNA, 75 bp, synthetic construct
  source 1..75: mol_type = other DNA
aggctttttgcgttaccgatcatcgggacccggcactgccgcaggtgtggcacacgcttgcgggaacgttgccct

SEQ ID NO: 298418 - DNA, 75 bp, synthetic construct
  source 1..75: mol_type = other DNA
taagtgtgattttgccgcaaagtaaaaatagccaaacatcttcgttatgggatgcatttgcctatacgttagcaa

SEQ ID NO: 298419 - DNA, 75 bp, synthetic construct
  source 1..75: mol_type = other DNA
cagttatcgaaaaagtttcgtgccagcgtcagctatatttgtcatgagtttactaaagaatatcgaatttcccct

SEQ ID NO: 298420 - DNA, 75 bp, synthetic construct
  source 1..75: mol_type = other DNA
atgttgcggaatcaacccgcctggggccgctttctggcgaagtccgggcaggggagatcctgcatctggtggggc

SEQ ID NO: 298421 - DNA, 75 bp, synthetic construct
  source 1..75: mol_type = other DNA
atgtagcggaatcaacccgcctggggccgctttcgggtgaggttcgggcaggggagatcctgcatctggtggggc

SEQ ID NO: 298422 - DNA, 75 bp, synthetic construct
  source 1..75: mol_type = other DNA
agcggtaagggaagcattcagttcgcggggcaaccactggaagcatggtccgcaacaaaactcgcgctgcatcgc

SEQ ID NO: 298423 - DNA, 75 bp, synthetic construct
  source 1..75: mol_type = other DNA
ggccaggtcattggctatgtggcatttagtccggttgatgtgcagggcgaagacctgcaatgggtcggtatggcg

SEQ ID NO: 298424 - DNA, 75 bp, synthetic construct
  source 1..75: mol_type = other DNA
tggccgcttatctgaccagtgtcgccacggtggagaaaaccaaacgctctcgccctgttcgccgtcgtcagcggc

SEQ ID NO: 298425 - DNA, 75 bp, synthetic construct
  source 1..75: mol_type = other DNA
gcgactgaagcccgctgctgaaggttatcaggtctgcgctggtgaagaacgcgaggatgagcacccgcacttcag

SEQ ID NO: 298426 - DNA, 75 bp, synthetic construct
  source 1..75: mol_type = other DNA
gcgtcagttatatttgccatgaatttaccaaagagtatcgcatttcccctattaaggaaggtgcgaacaagtccc

SEQ ID NO: 298427 - DNA, 75 bp, synthetic construct
  source 1..75: mol_type = other DNA
aattgccgcagggcagggaaaagaggtcattaaaaccttatttaatgagctaagcgttattttgccgcaaagtaa

SEQ ID NO: 298428 - DNA, 75 bp, synthetic construct
  source 1..75: mol_type = other DNA
gcacatcacgatctgcgttgccgctggccgggcactgaaagcgccttccaggtacatcgtttagcggatgacgcg

SEQ ID NO: 298429 - DNA, 75 bp, synthetic construct
  source 1..75: mol_type = other DNA
aagcaggacccgaaacgcaccacccttatcaggcacgtcccgtgttaagcgtacctttcgtagccgcacactcgc

SEQ ID NO: 298430 - DNA, 75 bp, synthetic construct
  source 1..75: mol_type = other DNA
taaagacgatacaaagtggcgtttgttatatgagtttcaaaggcttgtaagtgatgtaatgccagagcttgtgac

SEQ ID NO: 298431 - DNA, 75 bp, synthetic construct
  source 1..75: mol_type = other DNA
aaccagtcagttactgaactgcaatccagcgatgtgtctgctatgttcaaggaaggaaatattagattacttgca

SEQ ID NO: 298432 - DNA, 75 bp, synthetic construct
  source 1..75: mol_type = other DNA
taccgatgtctgcgcggcagtggcgcaactgcgtgaatcggattgcgatggcgtcgtcgcttttggtggcggatc

SEQ ID NO: 298433 - DNA, 75 bp, synthetic construct
  source 1..75: mol_type = other DNA
acccatgccattgaagcatacagcgccctgaacgctacaccgtttaccgacagcctggcgattggtgccattgcg

SEQ ID NO: 298434 - DNA, 75 bp, synthetic construct
  source 1..75: mol_type = other DNA
gtgccgtcgcatgtcacggcgatgaccggcattgatgcgttaacccatgccattgaagcatacagcgccctgaac

SEQ ID NO: 298435 - DNA, 75 bp, synthetic construct
  source 1..75: mol_type = other DNA
tggggcaattgctgtcgggcttggggcagatgcgtctacccggtctaccttttgccaagtatgcctatgcgtccg

SEQ ID NO: 298436 - DNA, 75 bp, synthetic construct
  source 1..75: mol_type = other DNA
gtcgcttttgccaaactgcacgatcgccaccaggcgcaggcattgcaagctaaggaagcggaggcggcggcactg

SEQ ID NO: 298437 - DNA, 75 bp, synthetic construct
  source 1..75: mol_type = other DNA
actgtcgacggcggcggatcatgtggcccgcgccctgttagcgctgggcgtgcagcatggcgaccgcgtggcggt

SEQ ID NO: 298438 - DNA, 75 bp, synthetic construct
  source 1..75: mol_type = other DNA
tcttaaacgaatcatgcattctttacctggtggtacgtgggatgactggcctgaagaaattagagcagactgtca

SEQ ID NO: 298439 - DNA, 75 bp, synthetic construct
  source 1..75: mol_type = other DNA
ataattaaaaacgatgcacaccgggtttttaccgcgttaatgattcgcgggtttatcccggtgcgatggtggaag

SEQ ID NO: 298440 - DNA, 75 bp, synthetic construct
  source 1..75: mol_type = other DNA
gaggcggcaagtgctgcagcattgctgcgcgatttctccacctatgagaaaccgaaggaaaccgctgcgccgctg

SEQ ID NO: 298441 - DNA, 75 bp, synthetic construct
  source 1..75: mol_type = other DNA
agccttcaaacaggcgggaaaagagctaaatatccccattgagtggggcggcgactggaagacgctgaaagatgg

SEQ ID NO: 298442 - DNA, 75 bp, synthetic construct
  source 1..75: mol_type = other DNA
aggtgatggccgaacaggcaaaaggtgcccagaaaaacgccatgaattcctggacgggaatgacgtccatgatgg

SEQ ID NO: 298443 - DNA, 75 bp, synthetic construct
  source 1..75: mol_type = other DNA
tggaaatgcagcacgccgggccggtcaggaaacagaacttgtcggctcccgtatgcagcgaacgcttgccggtgt

SEQ ID NO: 298444 - DNA, 75 bp, synthetic construct
  source 1..75: mol_type = other DNA
atggcaaaaaacctgaaagcctccctgattgtcgatttactcggcaatatttctgccaaatcccgccagtggtca

SEQ ID NO: 298445 - DNA, 75 bp, synthetic construct
  source 1..75: mol_type = other DNA
ccttatctggtggagaaaatcacgccggacagtgtggtactggagcagtccggcatcagaaaaaccctgcgacca

SEQ ID NO: 298446 - DNA, 75 bp, synthetic construct
  source 1..75: mol_type = other DNA
tgatagtcgatttgctcggcaatatctctgccaaatcccgccagtggtctcaggagctgggggcattctcacgtt

SEQ ID NO: 298447 - DNA, 75 bp, synthetic construct
  source 1..75: mol_type = other DNA
ccccggaagggtggcaggctcgcagtattgatattgatgacacgtccggtcacggactggatgtgaatgtctgga

SEQ ID NO: 298448 - DNA, 75 bp, synthetic construct
  source 1..75: mol_type = other DNA
ggccgatcccctccagccgtcggggaagtgagttcaaaaatcaggaagagatcctctctcatttggggggagaat

SEQ ID NO: 298449 - DNA, 75 bp, synthetic construct
  source 1..75: mol_type = other DNA
gcgaacaactggcagagagtgccggtaaacagggcttcttcggtcgaatgatgagccgtgccggtggtctgcttt

SEQ ID NO: 298450 - DNA, 75 bp, synthetic construct
  source 1..75: mol_type = other DNA
atgagcaacacatttaaattcagcagccgaagcgaaaagaatttgcagggtgtaaatcctgatctggtgaaagtg

SEQ ID NO: 298451 - DNA, 75 bp, synthetic construct
  source 1..75: mol_type = other DNA
cgaaattttgtcaccatgcttcaggatcagggtgccgtgggcggctggtcactgtccgatgcacagggggcatcc

SEQ ID NO: 298452 - DNA, 75 bp, synthetic construct
  source 1..75: mol_type = other DNA
gggctatggtgatgcgctggatcgcattggtcagggggcacagaccgccgcgaaatacctgctgtacatgtatct

SEQ ID NO: 298453 - DNA, 75 bp, synthetic construct
  source 1..75: mol_type = other DNA
tttaccagcatgttttaagactcattcaacgtttttatcgtgaatttcatgatgactcgactaacctcgatcgag

SEQ ID NO: 298454 - DNA, 75 bp, synthetic construct
  source 1..75: mol_type = other DNA
ctggcggatgatgagatacgggcgcgtatacagtcggcgacgacgcctgatgaattgctctcggcgctggatgac

SEQ ID NO: 298455 - DNA, 75 bp, synthetic construct
  source 1..75: mol_type = other DNA
atcacactctgctgccgggtatgttcgtgcgtgcacgtctggaagaagggcttaatccaaacgctattttagtcc

SEQ ID NO: 298456 - DNA, 75 bp, synthetic construct
  source 1..75: mol_type = other DNA
cagatcacgactgagcttccgggtcgcaccagcgcctaccggatcgcagaagttcgtcctcaagttagtgggata

SEQ ID NO: 298457 - DNA, 75 bp, synthetic construct
  source 1..75: mol_type = other DNA
cggcactgagtaaatctattcaggagctaggtaatgactccaacttattgatagtgttttatgttcagataatgc

SEQ ID NO: 298458 - DNA, 75 bp, synthetic construct
  source 1..75: mol_type = other DNA
tttgtgtacggcgacgctgattgcacccaatctggcattaacggcaggacactgtttattgacacctccaaaggg

SEQ ID NO: 298459 - DNA, 75 bp, synthetic construct
  source 1..75: mol_type = other DNA
tgattatcagtttactagcgaaagctggtaatgactccaacttattgatagtgttttatgttcagataatgcccg

SEQ ID NO: 298460 - DNA, 75 bp, synthetic construct
  source 1..75: mol_type = other DNA
taaagtgtcgctgatcaccagtgacggtattaagttcccgcaggatggtacgctggagttctctgacgttaccgt

SEQ ID NO: 298461 - DNA, 75 bp, synthetic construct
  source 1..75: mol_type = other DNA
ggcggagtgaacgcatattcatcgctaccgcgcgatccggatttttatcgtaagttaccagatatgcctacgccg

SEQ ID NO: 298462 - DNA, 75 bp, synthetic construct
  source 1..75: mol_type = other DNA
tgttgtgttcaacggtggagatcgtttttactgccgcaatcgacaataccaggcttactaccagacaccgaaaga

SEQ ID NO: 298463 - DNA, 75 bp, synthetic construct
  source 1..75: mol_type = other DNA
ttaatggggtttattatggggagatgatttttaacaagataaaaaaagataaaaaagattgtattatgctatcaa

SEQ ID NO: 298464 - DNA, 75 bp, synthetic construct
  source 1..75: mol_type = other DNA
tggcttactaccaaacgccgaaagagtttcccggttggttgcgagatctccaccgacaatatgactttgatacca

SEQ ID NO: 298465 - DNA, 75 bp, synthetic construct
  source 1..75: mol_type = other DNA
tattatccggtaaaaaatatctgctattgcagggaccaatgggaccttttttcaatgacatcgcggaatggttag

SEQ ID NO: 298466 - DNA, 75 bp, synthetic construct
  source 1..75: mol_type = other DNA
tatgaaactgtttaagaagtttcgtgggtatttattggttaagacgcaggttaatgggggttattattctaaata

SEQ ID NO: 298467 - DNA, 75 bp, synthetic construct
  source 1..75: mol_type = other DNA
cgatacgttgtacagtcatcaaaattgcgaaataaccggctgggcgcaaacctcggtaatgtcgcaccagtgcga

SEQ ID NO: 298468 - DNA, 75 bp, synthetic construct
  source 1..75: mol_type = other DNA
aatgattggattaaaaatgataaatgttgatttatcatatccaatactcgaaaccagtctgatcctacccacgta

SEQ ID NO: 298469 - DNA, 75 bp, synthetic construct
  source 1..75: mol_type = other DNA
actgacgtcggatgaaatccctgatggcacacgtgaccgccggggatggtggggagacagttttcgcccgcgccc

SEQ ID NO: 298470 - DNA, 75 bp, synthetic construct
  source 1..75: mol_type = other DNA
tgataagccgtgcccgtgtttacgcggatgaggcgctgggctggctcagtcaggatggcgtggcgtcatccgtgg

SEQ ID NO: 298471 - DNA, 75 bp, synthetic construct
  source 1..75: mol_type = other DNA
tgagtttcaaatttatgttggctcggaactcaataacgtcgtcggtaaaaacatttgctgggctacttctgtatt

SEQ ID NO: 298472 - DNA, 75 bp, synthetic construct
  source 1..75: mol_type = other DNA
cctatcaggattatgaaaatgcgctaggtgacggcatagggttgggctatgggcaaagttatcaaccctggctta

SEQ ID NO: 298473 - DNA, 75 bp, synthetic construct
  source 1..75: mol_type = other DNA
acataacgagagcatacctgaacgcgaagcccaaaaacttgaaatagagaggatgttttggcagttgggtaatgg

SEQ ID NO: 298474 - DNA, 75 bp, synthetic construct
  source 1..75: mol_type = other DNA
ctctattcctgtcatttctgactgtgttgcaatggccattgaaagtcgcttcaaatatatgatgctactttttta

SEQ ID NO: 298475 - DNA, 75 bp, synthetic construct
  source 1..75: mol_type = other DNA
cctgaaatgtggttcttacggggaaatgaaaacaaggatgtaacccttgttattacgattggtaataaccatcaa

SEQ ID NO: 298476 - DNA, 75 bp, synthetic construct
  source 1..75: mol_type = other DNA
atcaatctcatcgcaaacagtgcataacatatattaacaatatgtttctgcgttatttatcattattacaggagt

SEQ ID NO: 298477 - DNA, 75 bp, synthetic construct
  source 1..75: mol_type = other DNA
cactgcacctgtttatgcagctgatgaaggatccggtgaaattcactttaaaggtgaagttattgaagcaccgtg

SEQ ID NO: 298478 - DNA, 75 bp, synthetic construct
  source 1..75: mol_type = other DNA
ggtttcaacggcacgtctcacgcggatgagtccaacttcagcaccaacaagctgcttcaggacgttaacgtgggg

SEQ ID NO: 298479 - DNA, 75 bp, synthetic construct
  source 1..75: mol_type = other DNA
ccggtcagttgatcgcatcgcgtaagacgatcggcaacctgccttcgtttatcgcgcctttcttccctgatggca

SEQ ID NO: 298480 - DNA, 75 bp, synthetic construct
  source 1..75: mol_type = other DNA
atctatcagtccgttaacgactgctatgtggttgaggaccatggtaagtgcgcactgattgagaatatcagcttt

SEQ ID NO: 298481 - DNA, 75 bp, synthetic construct
  source 1..75: mol_type = other DNA
cgttcgtcaggggcgcaaccaggttcccggcgaagaagaggaagccgcgctctggaaccgctggcaggagatcaa

SEQ ID NO: 298482 - DNA, 75 bp, synthetic construct
  source 1..75: mol_type = other DNA
aggagatcctcgctgcgctgggtacgggtgatgcgctggcgtcgaagtatcgccgccagctgtatgcattgttgt

SEQ ID NO: 298483 - DNA, 75 bp, synthetic construct
  source 1..75: mol_type = other DNA
ttcaagcacccgagattttctaaataccgcgactggtttctgtttgatgaagttgaacccaaggccgggcaggtt

SEQ ID NO: 298484 - DNA, 75 bp, synthetic construct
  source 1..75: mol_type = other DNA
ttgcggtcaccacgatgcgccaggcattaaacgacgttgcttttcgtgggcgagtggttatcggcgagggggaac

SEQ ID NO: 298485 - DNA, 75 bp, synthetic construct
  source 1..75: mol_type = other DNA
tggcactcagtaatattcatctgacacaccgtaaacgtaataaaatcatcagcagtattttacgcgatatctccg

SEQ ID NO: 298486 - DNA, 75 bp, synthetic construct
  source 1..75: mol_type = other DNA
cgacgacggcctttcccggcgctggctgtctctgcgccgcgatcaacttattcagcttaatgctgtgggctatgt

SEQ ID NO: 298487 - DNA, 75 bp, synthetic construct
  source 1..75: mol_type = other DNA
gcgagcaggtgaactacgataccttcatcagctacgcacagattgacgcatggagcagccagaaaaactttcagc

SEQ ID NO: 298488 - DNA, 75 bp, synthetic construct
  source 1..75: mol_type = other DNA
ggtatcacaacagagcgcctgggtaaaaccttcagcgtggatccatccattcagcagaagatggagaacgccatc

SEQ ID NO: 298489 - DNA, 75 bp, synthetic construct
  source 1..75: mol_type = other DNA
gatggcctggcggtcaccgcgatgcgccaggcattaaacgacgtcgcttttcgtggacgagtggttatcggctaa

SEQ ID NO: 298490 - DNA, 75 bp, synthetic construct
  source 1..75: mol_type = other DNA
aaaatatgcttggccaccggcgcacgctggagcgaagccgaaaacttacagagtcatcaggtatcaaaataccgt

SEQ ID NO: 298491 - DNA, 75 bp, synthetic construct
  source 1..75: mol_type = other DNA
gtcaggggcatgtacttaaacatgatgatgccgtttcacttggaattctgcagcctgatgaaacgaaccataaag

SEQ ID NO: 298492 - DNA, 75 bp, synthetic construct
  source 1..75: mol_type = other DNA
gctgctgtcggcaatatggggatggccggcggcggcgttaacgccctgcgcggtcactccaatattcaggggctg

SEQ ID NO: 298493 - DNA, 75 bp, synthetic construct
  source 1..75: mol_type = other DNA
tatccatggttctcgccgattactcctggttctgctggctggcgctgtgattgtatttccgtcaggggtttactt

SEQ ID NO: 298494 - DNA, 75 bp, synthetic construct
  source 1..75: mol_type = other DNA
ggtgaagtgctggtgctcaacttcgaagatggttgctcgacaaccaacatcatcaagaagatccaacaggataaa

SEQ ID NO: 298495 - DNA, 75 bp, synthetic construct
  source 1..75: mol_type = other DNA
ggggaaagcgccgctgcatatgccaactcaggcgcaggaagtttatgacgtaactggcgcaggcgatacggtgat

SEQ ID NO: 298496 - DNA, 75 bp, synthetic construct
  source 1..75: mol_type = other DNA
ggcgaagtgctggtgctcaacttcgaagacggttgctcgaccactaacattatcaagaagatccaacaggataaa

SEQ ID NO: 298497 - DNA, 75 bp, synthetic construct
  source 1..75: mol_type = other DNA
gccgaggcattcgaagcatttacgaaaagcgagagtgaagataagccgtggctcggcaagaaagaagaccgccga

SEQ ID NO: 298498 - DNA, 75 bp, synthetic construct
  source 1..75: mol_type = other DNA
aggccatcagttatcaaaatatcggatcacctataccaaaaccaaaggcaagaaaaaccgaactgtaccgatatc

SEQ ID NO: 298499 - DNA, 75 bp, synthetic construct
  source 1..75: mol_type = other DNA
gtattgagggatattttaggacacgctgatattaaaatgaccatgatttatgcccattttgcaccggatcatctg

SEQ ID NO: 298500 - DNA, 75 bp, synthetic construct
  source 1..75: mol_type = other DNA
gcggttggatttgtgagctctacccaaacggtgcaaaaggcaaacgtatcagaaagaaattcgctactaaaggcg

SEQ ID NO: 298501 - DNA, 75 bp, synthetic construct
  source 1..75: mol_type = other DNA
tggctcggcaaaaaagaagatcgccgacgcttaagcgagttgattcaactctggcataacctgcatggacaggct

SEQ ID NO: 298502 - DNA, 75 bp, synthetic construct
  source 1..75: mol_type = other DNA
tgttaaggtgtgcctggctactggcgcacgatggggagaagctgagagacttacacgtccccaactttccccctg

SEQ ID NO: 298503 - DNA, 75 bp, synthetic construct
  source 1..75: mol_type = other DNA
cattgccagtacaggctgagcatgctatttacgatatgtttgacaggctggagcaaaaaggaattctttttatcg

SEQ ID NO: 298504 - DNA, 75 bp, synthetic construct
  source 1..75: mol_type = other DNA
tgttcttctcaccgctggtggcgatggttcctccttacgcaaccgccggagcgttaatctttgttggcgtattga

SEQ ID NO: 298505 - DNA, 75 bp, synthetic construct
  source 1..75: mol_type = other DNA
aatccatatggttaatcagaagaaagatcgcctgcttaacgagtatctgtctccgctggatattaccgcggcaca

SEQ ID NO: 298506 - DNA, 75 bp, synthetic construct
  source 1..75: mol_type = other DNA
gacatatgaaaggagttgtcacgaacggtgcaatagtgatccacacccaacgcctgaaatcagatccagggggta

SEQ ID NO: 298507 - DNA, 75 bp, synthetic construct
  source 1..75: mol_type = other DNA
gaataggaaccagtcttgaacagttgttgaacaagcctactgagttgaaagaaaaatcgattgaaaactgggata

SEQ ID NO: 298508 - DNA, 75 bp, synthetic construct
  source 1..75: mol_type = other DNA
atgcaagcgctatggacatcctcttcggcctggtgatatctgggttgaaattggcaagattatttattactcata

SEQ ID NO: 298509 - DNA, 75 bp, synthetic construct
  source 1..75: mol_type = other DNA
tcttcctactcttacttgttgtccttgtgtatgccgggttagtaaagggggatgtgtttcctgaatggatcatga

SEQ ID NO: 298510 - DNA, 75 bp, synthetic construct
  source 1..75: mol_type = other DNA
gctaccgcctgaaagggctgcagacgggtgaggtggctgtctatgacgatcaggggcagtccgtgacgctgaccc

SEQ ID NO: 298511 - DNA, 75 bp, synthetic construct
  source 1..75: mol_type = other DNA
gcaacgaattagaggtctagctggctctggaaaaactgttattttggcgatgaaagttgctcaaactcttttaag

SEQ ID NO: 298512 - DNA, 75 bp, synthetic construct
  source 1..75: mol_type = other DNA
cgtactgcgctacggcattgaagatgtggtgacaaatctcgacgtgctggaacgtatgcagccttcggaaaagta

SEQ ID NO: 298513 - DNA, 75 bp, synthetic construct
  source 1..75: mol_type = other DNA
gggaggggatcgtggtggacggtgcaggtaaaacgatcacgtttcgcaattcacctaaagcacgttttgaaatgg

SEQ ID NO: 298514 - DNA, 75 bp, synthetic construct
  source 1..75: mol_type = other DNA
gtggtccgaaccgtttccggaaaaaggataaaatcaactggttactggatttactgtatgaacaaaacagagttg

SEQ ID NO: 298515 - DNA, 75 bp, synthetic construct
  source 1..75: mol_type = other DNA
acattgagtcaacgggacagattaaagacctctgcgattctggtggtctgacaatgtcagacatgcgcgttgcct

SEQ ID NO: 298516 - DNA, 75 bp, synthetic construct
  source 1..75: mol_type = other DNA
gaatcggaacaagtcttgagcagttgctaaataagcccactgaattaaaagaaaaattagctgaaaattggggta

SEQ ID NO: 298517 - DNA, 75 bp, synthetic construct
  source 1..75: mol_type = other DNA
agaggacgaagagctgcagaatgccgttctggttgatgagattggttttacgttcagtgagtcaggtgtttctgc

SEQ ID NO: 298518 - DNA, 75 bp, synthetic construct
  source 1..75: mol_type = other DNA
gtttaaggtgctctgctctatccgctgcgcggcgtgtattactccggttgaactgaaaaaagtgttgtcggtcga

SEQ ID NO: 298519 - DNA, 75 bp, synthetic construct
  source 1..75: mol_type = other DNA
ctacaccaacaacaccacgctggtggtcatgctgatggcgctggctttttttggcaaaggatttggtgctctggg

SEQ ID NO: 298520 - DNA, 75 bp, synthetic construct
  source 1..75: mol_type = other DNA
tggtattagaatgaataaaataaacggggagtcgctttttaatatttcgtcattgccagtacaggctgagcatgc

SEQ ID NO: 298521 - DNA, 75 bp, synthetic construct
  source 1..75: mol_type = other DNA
ttaatcgcggtgctgagctacctggtgctggtgggcgatatcaagcgtatcgagctgaaacctgtcgcggggcaa

SEQ ID NO: 298522 - DNA, 75 bp, synthetic construct
  source 1..75: mol_type = other DNA
cgtaaaacaccgatcgtaatgggcatgttgctgtcgatggtgatggtgttctgcaactacgtcaacgttgagtgg

SEQ ID NO: 298523 - DNA, 75 bp, synthetic construct
  source 1..75: mol_type = other DNA
gcactgcaactgcaccaggttgggcgcaatgaagaggcgctggagttactgtttgggcatctgcgtaaagatctc

SEQ ID NO: 298524 - DNA, 75 bp, synthetic construct
  source 1..75: mol_type = other DNA
tggctggacagccttacaccagaagcccgcaaaagcggccaacgcgtggcttttctggccgggctggcactactg

SEQ ID NO: 298525 - DNA, 75 bp, synthetic construct
  source 1..75: mol_type = other DNA
tgccattgctgaaagacgcctggcagttgtcgaatcagaacggggaaatcggcctgctgttggcagaaacgctga

SEQ ID NO: 298526 - DNA, 75 bp, synthetic construct
  source 1..75: mol_type = other DNA
tggtgcatagaaatttatggcaggaatcaggtattccacctttggactactgcacgatagagcgagcatcaaaat

SEQ ID NO: 298527 - DNA, 75 bp, synthetic construct
  source 1..75: mol_type = other DNA
cacagaaagggcagggtttgatgatgaagaaaaatgcctaattacggcacagaaaggtgacattaattatttaga

SEQ ID NO: 298528 - DNA, 75 bp, synthetic construct
  source 1..75: mol_type = other DNA
atgaaacacggaattaaagcactgctcattaccctgtctctggcttgtgccggaatgtctcatagcgcgctggcg

SEQ ID NO: 298529 - DNA, 75 bp, synthetic construct
  source 1..75: mol_type = other DNA
gtcaggtttcttctggcggaatccggggctggggctgtttttgctgctgcttggcccgttgatgtggtttggcat

SEQ ID NO: 298530 - DNA, 75 bp, synthetic construct
  source 1..75: mol_type = other DNA
ctgcgcgccccggcatggggaagatgtcgggttttttctggcgtaaaccggggcttggattgtttttactgctgc

SEQ ID NO: 298531 - DNA, 75 bp, synthetic construct
  source 1..75: mol_type = other DNA
gtccggtttcttctggcgtaatccggggctggggctgtttttgctgctgcttggcccgctaatgtggtttggcat

SEQ ID NO: 298532 - DNA, 75 bp, synthetic construct
  source 1..75: mol_type = other DNA
taaacaggcgaagaaatttgccgatatgaccaacgtgcgtattccggcgtggatggcacaaatgtttgacgggct

SEQ ID NO: 298533 - DNA, 75 bp, synthetic construct
  source 1..75: mol_type = other DNA
cacttctatacgcttaaccgcgctgaaatgagttacgcgatttgccatacgctgggtgttcgacctggtttataa

SEQ ID NO: 298534 - DNA, 75 bp, synthetic construct
  source 1..75: mol_type = other DNA
ctaacgctgggcgactttatcgttccgcaattggtggggccgccggggtattttatcggcaacatggtctactcc

SEQ ID NO: 298535 - DNA, 75 bp, synthetic construct
  source 1..75: mol_type = other DNA
accaagactatgacgccacggcgtctggtgtgaagcggggcgaggaactggcggaagcaagcggggatttgtggc

SEQ ID NO: 298536 - DNA, 75 bp, synthetic construct
  source 1..75: mol_type = other DNA
gacctgtcggagttccgcagtgtgatgcgcactgacggcacggtgacacagccgcgtttaaagcaggttgcgctg

SEQ ID NO: 298537 - DNA, 75 bp, synthetic construct
  source 1..75: mol_type = other DNA
caccggaacaggcggaaatcatcaggaatacgccgttctggcctgatgtggagctgtcggagtttcgcagcgtga

SEQ ID NO: 298538 - DNA, 75 bp, synthetic construct
  source 1..75: mol_type = other DNA
gatggctgtggtagtgactattgccagcgctattcttgcctttccaatggcgtggtatatggcacgttacaccag

SEQ ID NO: 298539 - DNA, 75 bp, synthetic construct
  source 1..75: mol_type = other DNA
tccaggactatgacgccacggcatccggtgcgaagcggggcgaagaactggcggaagcaagcggtgatttgtggc

SEQ ID NO: 298540 - DNA, 75 bp, synthetic construct
  source 1..75: mol_type = other DNA
gcagatgctgggatatgcctcgctggcagaggttccggcagaacatctggacgggaaaagtgagcgcattcagca

SEQ ID NO: 298541 - DNA, 75 bp, synthetic construct
  source 1..75: mol_type = other DNA
ctgtgactgcagccgatatcacccacgacggtgatgtcgaaatcgtcaatccgcagcacgtgatctgccacctga

SEQ ID NO: 298542 - DNA, 75 bp, synthetic construct
  source 1..75: mol_type = other DNA
atgtcgtcgttgctgctgtatggtcgctataagcgccagcaagcggcggatagtccggtgctggcgaaaccactg

SEQ ID NO: 298543 - DNA, 75 bp, synthetic construct
  source 1..75: mol_type = other DNA
tgccgggcatatgatctcgtattatgcgctgggggtggtggtcggtgcgccaatcatcgcactcttttccagccg

SEQ ID NO: 298544 - DNA, 75 bp, synthetic construct
  source 1..75: mol_type = other DNA
attatcaaacccggaaaagtcaccgccgccgtggcggggatggtttccgggatgacagtcgccaatttgctgggc

SEQ ID NO: 298545 - DNA, 75 bp, synthetic construct
  source 1..75: mol_type = other DNA
ggtcacctgcaaactgaacgaagtggagccggaggactggttgcgcgaagtgatcgtgaagctcaatgactggcc

SEQ ID NO: 298546 - DNA, 75 bp, synthetic construct
  source 1..75: mol_type = other DNA
gagacggagaataccaatttacaagcatcaaccaggaccacaggccaataacgttgccttatcatcaagtagcaa

SEQ ID NO: 298547 - DNA, 75 bp, synthetic construct
  source 1..75: mol_type = other DNA
tttcagcaccactgcaaatattgttactgcaaaatgccaaaggcggagagttattaggtgccgcaggtgggcaaa

SEQ ID NO: 298548 - DNA, 75 bp, synthetic construct
  source 1..75: mol_type = other DNA
ccgcatcctggcacgttcagaaaaccgcgagcttcacgacggtgagagacgggcactggacagcgtgagacagga

SEQ ID NO: 298549 - DNA, 75 bp, synthetic construct
  source 1..75: mol_type = other DNA
taatctgaaacgcaaagtcgatgccggagccaaccgcgcgattactcagttcttctttgatgtcgaaagctacct

SEQ ID NO: 298550 - DNA, 75 bp, synthetic construct
  source 1..75: mol_type = other DNA
cattcgctggcggaaaatgacaggtggcgggatgcgccagtccggcattctggctgccgccggaatatatgccct

SEQ ID NO: 298551 - DNA, 75 bp, synthetic construct
  source 1..75: mol_type = other DNA
gccaaaggcggagagttattaggtgccgcaggtgggcaaatagcgtttaacctcggtagcgccgtcggcgcatat

SEQ ID NO: 298552 - DNA, 75 bp, synthetic construct
  source 1..75: mol_type = other DNA
gccgccgtggcagggatggtttccgggatgacagtcgccaatttgctgggcattccactgggaacgtatttaagt

SEQ ID NO: 298553 - DNA, 75 bp, synthetic construct
  source 1..75: mol_type = other DNA
caccgtcgccgcatggagcgtgcgcaggtccgccgcaatgcgctgattgcacagattctggcacaggccggaacg

SEQ ID NO: 298554 - DNA, 75 bp, synthetic construct
  source 1..75: mol_type = other DNA
gacctgtcggagtttcgcagtgtgatgcgcactgacggcacggtgacgcagctgcgtttaaaacaggttgccctg

SEQ ID NO: 298555 - DNA, 75 bp, synthetic construct
  source 1..75: mol_type = other DNA
agaatggtcgggtgctctgaaggcaatggcgttgactggggtcctgtatttaacaactatacaggaggaagatat

SEQ ID NO: 298556 - DNA, 75 bp, synthetic construct
  source 1..75: mol_type = other DNA
tcactgtagattccagggattcaagggtatttcgatccgcgcccatgatgtattccgaattacagcggtaacgtc

SEQ ID NO: 298557 - DNA, 75 bp, synthetic construct
  source 1..75: mol_type = other DNA
cactgcgtcagcgcgagtttgtgctggcatcgcggctgtccggcgcgggccatgtgcgggtatttgttgaccatc

SEQ ID NO: 298558 - DNA, 75 bp, synthetic construct
  source 1..75: mol_type = other DNA
ccgatgacattactggtgccagaagtggcggccgaagtgatcaaagatctcgtcaataccgtgcgctcttatgac

SEQ ID NO: 298559 - DNA, 75 bp, synthetic construct
  source 1..75: mol_type = other DNA
ccgtcaccaataacagtaatggtgtttctgtcgattatgaaacagagacgccgatgactttgctggtgccagaag

SEQ ID NO: 298560 - DNA, 75 bp, synthetic construct
  source 1..75: mol_type = other DNA
aatccaaaatctcaacaaattcagcatatagccatgatctgttaagtgctagtctatttgaggtcacccaatggg

SEQ ID NO: 298561 - DNA, 75 bp, synthetic construct
  source 1..75: mol_type = other DNA
cgataccgcagcggtagaaacgttggggcctgttctggaaagccacgagcgtttcccggagcgcgctaacatcgg

SEQ ID NO: 298562 - DNA, 75 bp, synthetic construct
  source 1..75: mol_type = other DNA
cgcggtaacgcagaatgtctttttttcaccggagctgattcgtcgcctggctgatcggcacctgggggtagggtt

SEQ ID NO: 298563 - DNA, 75 bp, synthetic construct
  source 1..75: mol_type = other DNA
ttctcgcctgctttcgccagatgcgcagcactggttgggcactgatcatttaggccgcgatattttctcgcggct

SEQ ID NO: 298564 - DNA, 75 bp, synthetic construct
  source 1..75: mol_type = other DNA
cctgcgtactttaataaaaccagtattacttcagattgttggcaaattctctttttttcacccgatcattttaat

SEQ ID NO: 298565 - DNA, 75 bp, synthetic construct
  source 1..75: mol_type = other DNA
cgcggtaacgcagaatgtctttttttcaccggatctgattcgtcgcctggcggatcggcacctgggtgtgggttt

SEQ ID NO: 298566 - DNA, 75 bp, synthetic construct
  source 1..75: mol_type = other DNA
atggtgaggaaactaacgtttgaactaagaagccacatccatcagcagaacgccattcaagctatccagcaaatt

SEQ ID NO: 298567 - DNA, 75 bp, synthetic construct
  source 1..75: mol_type = other DNA
accgcgcatggcggtcgcgagttcggcttcatcggcgcgcgtatgcgtcagcaacatgccgtcgttaccggtcac

SEQ ID NO: 298568 - DNA, 75 bp, synthetic construct
  source 1..75: mol_type = other DNA
aaaccgctgggcaccacgccggatgaaatcaccgctatttgccgtgacgcgaattacgacgatcgttgcgctggt

SEQ ID NO: 298569 - DNA, 75 bp, synthetic construct
  source 1..75: mol_type = other DNA
atgctgggatatgcctcgctggcagaggttccggcagaacatctggacgggaaaagtgagcgcattcagcactat

SEQ ID NO: 298570 - DNA, 75 bp, synthetic construct
  source 1..75: mol_type = other DNA
acgctcagtcttcttacagggttgttgacagaagaaattccaatgattttgagattcagaggttaaataaatttg

SEQ ID NO: 298571 - DNA, 75 bp, synthetic construct
  source 1..75: mol_type = other DNA
gacctgtcggagtttcgcagtgtcatgcgcactgacggcacggtgatgcagccgcgtttaaagcaggttgcgctg

SEQ ID NO: 298572 - DNA, 75 bp, synthetic construct
  source 1..75: mol_type = other DNA
gggcggttggcgacctggtgcaggtggttaactcgatcagcgatggcgatgtcaacgcgctggttgatgagtacg

SEQ ID NO: 298573 - DNA, 75 bp, synthetic construct
  source 1..75: mol_type = other DNA
ggcattcggtacagaacgtggcgttaagtggtcagacgaagcgcgactggctctcgaatggaaagcgcgatgggg

SEQ ID NO: 298574 - DNA, 75 bp, synthetic construct
  source 1..75: mol_type = other DNA
cagggcggcacctcttttatggaggactatacctaccacttcgagaaaggtaatgacctggtgctcggctcccac

SEQ ID NO: 298575 - DNA, 75 bp, synthetic construct
  source 1..75: mol_type = other DNA
atacctgggcggttggcgatctggtgcaggtggtgaactccatcagcgacggcgatgttaacgcgctggtcgatg

SEQ ID NO: 298576 - DNA, 75 bp, synthetic construct
  source 1..75: mol_type = other DNA
gtgctcggctcccatatgctggaagtctgcccgtcgatcgccgcagaagagaaaccgatcctcgacgttcagcat

SEQ ID NO: 298577 - DNA, 75 bp, synthetic construct
  source 1..75: mol_type = other DNA
cagcacgatcgaaatcgtaacgaacgagatgaatgtcgcctgcaaaccgaaacggccaacaaagccgatttcctg

SEQ ID NO: 298578 - DNA, 75 bp, synthetic construct
  source 1..75: mol_type = other DNA
cagcttgaggcagagttacagaaacctcttccgaacaagagtcacctgacctgtgcgatgttgaaggacttaaat

SEQ ID NO: 298579 - DNA, 75 bp, synthetic construct
  source 1..75: mol_type = other DNA
ctgaaagtaaacgctttcgtaatcaaaccgactattttagaaatgcatacgtcaatcagttttctgcgcctgtga

SEQ ID NO: 298580 - DNA, 75 bp, synthetic construct
  source 1..75: mol_type = other DNA
atgtcagatgcaaaatcaatctcgacgaatgattcgcaaaactcacaaaatcaaactgtgctgttagatccaaca

SEQ ID NO: 298581 - DNA, 75 bp, synthetic construct
  source 1..75: mol_type = other DNA
gcggcgttagcgagcgtctggtctggcaatggcttgatgagggcattcttcttaaagctccgaccaaagactttt

SEQ ID NO: 298582 - DNA, 75 bp, synthetic construct
  source 1..75: mol_type = other DNA
tgttgatgaacgccgctggatgcgcttcggttgcgctactcgcccaatcccgaatctaccagaggcgcgcgccag

SEQ ID NO: 298583 - DNA, 75 bp, synthetic construct
  source 1..75: mol_type = other DNA
aaaaaaacaagaggtatgtttaatgcagatgaaagattatggaagtcatttgaaaaagaaaatcataaaataaga

SEQ ID NO: 298584 - DNA, 75 bp, synthetic construct
  source 1..75: mol_type = other DNA
atctgatataaagcagcttagtgatagggctagcactatatcatttttagaagatgcaaagtcatacaaagatga

SEQ ID NO: 298585 - DNA, 75 bp, synthetic construct
  source 1..75: mol_type = other DNA
ggtggctgtacgtaataggatgaaaatattttaccgcccagagacgttatcaggtaatccacttgacgcttatca

SEQ ID NO: 298586 - DNA, 75 bp, synthetic construct
  source 1..75: mol_type = other DNA
ataatgctttacctgcatggaaagtaaagatgaatctgttgcagatggatgtgtcaggttcacaggttaaaacgg

SEQ ID NO: 298587 - DNA, 75 bp, synthetic construct
  source 1..75: mol_type = other DNA
cgcgttttgcgtatccggaaaatcagtcctcaatatctgttgaactcaaaaacacttcagacagagatatgttag

SEQ ID NO: 298588 - DNA, 75 bp, synthetic construct
  source 1..75: mol_type = other DNA
ttagccatcgccaacaatcatggtgtaaatcgcaaggggtttgtgaaatagcatggcaatttataataatgcttt

SEQ ID NO: 298589 - DNA, 75 bp, synthetic construct
  source 1..75: mol_type = other DNA
aatcaaaaaatttgggaaagtagcgatattaacgttacggtttattgtgacaatgcgctgggctggactcagggt

SEQ ID NO: 298590 - DNA, 75 bp, synthetic construct
  source 1..75: mol_type = other DNA
tcaaatttgctcgatacgggagcggtggattagttggtggaggcggaaaggagcaatatgttgagaatttagcgc

SEQ ID NO: 298591 - DNA, 75 bp, synthetic construct
  source 1..75: mol_type = other DNA
gaaaaagaagaagaacagtaacaggcacggtaaccacagaaaaataacatcagaaaaaaacattccggacacatc

SEQ ID NO: 298592 - DNA, 75 bp, synthetic construct
  source 1..75: mol_type = other DNA
ggtggcgcaggcagcgcatgctttccttctttggcatggtgttctgcccgacgtggaaccggtcattaaacaatt

SEQ ID NO: 298593 - DNA, 75 bp, synthetic construct
  source 1..75: mol_type = other DNA
ttaaaacggcagaaggctttattgacgaataccggcgccttcttgtgctgtaccgtgccgcgtttcaacgggcaa

SEQ ID NO: 298594 - DNA, 75 bp, synthetic construct
  source 1..75: mol_type = other DNA
cgacggggatatgcgcacagctaaagcgtgccggggtgcagagtttgccgctactgccggttttatcgccgggaa

SEQ ID NO: 298595 - DNA, 75 bp, synthetic construct
  source 1..75: mol_type = other DNA
ccggttttatcgccgggaaaaacgccagactgcatcagggggttaatggtcagagcaacagaccgctggcactgg

SEQ ID NO: 298596 - DNA, 75 bp, synthetic construct
  source 1..75: mol_type = other DNA
cgtgctgctctacgacgccgaccgcatcgaagaagcagcgagtaccgaacgagaggtcgatctctatgaacgcca

SEQ ID NO: 298597 - DNA, 75 bp, synthetic construct
  source 1..75: mol_type = other DNA
ggatcaaattaccccaaataaatagtgccgacatgttgaataatccatatttaacctttggcgtgacttataatg

SEQ ID NO: 298598 - DNA, 75 bp, synthetic construct
  source 1..75: mol_type = other DNA
tacttcagatacattatatgacaatacgcatctggaaataggtaacggcttgctcatgcgaattactgatcaaaa

SEQ ID NO: 298599 - DNA, 75 bp, synthetic construct
  source 1..75: mol_type = other DNA
ggcacaggcggctcatgccttccttctttggcatggcgttctgcctgatgtagaaccagttataaagcaattgca

SEQ ID NO: 298600 - DNA, 75 bp, synthetic construct
  source 1..75: mol_type = other DNA
ctcggattgataagcagctggcgttagaggtgattgagctaacctttgaacaatatcgacaacgtcgggttcagg

SEQ ID NO: 298601 - DNA, 75 bp, synthetic construct
  source 1..75: mol_type = other DNA
tgccggtgataccggtccggtactgcgggcgctgaaacggatgatggcgatgcgccactatatgcgttcacaaac

SEQ ID NO: 298602 - DNA, 75 bp, synthetic construct
  source 1..75: mol_type = other DNA
tcccagcctttacttccagataaggcgtttattgccacaccaccattattggtacttaaacaagataaaaatacc

SEQ ID NO: 298603 - DNA, 75 bp, synthetic construct
  source 1..75: mol_type = other DNA
tggccccggggaacggaaagacgaaaacgggtcgtctgtgggtatacgtcagggatgatcgtaatgcgggttcat

SEQ ID NO: 298604 - DNA, 75 bp, synthetic construct
  source 1..75: mol_type = other DNA
catgcggagatggcgaaggcattcgactatatcctgaatcactggaatgcgctgaacgagttctgtcgtgacggc

SEQ ID NO: 298605 - DNA, 75 bp, synthetic construct
  source 1..75: mol_type = other DNA
tacgacaacccggatgacacctgtgccgtcgttcagccgcagaccgtcacgctgtgcgccactgtcattatgcgc

SEQ ID NO: 298606 - DNA, 75 bp, synthetic construct
  source 1..75: mol_type = other DNA
ttttactgtggggtgagttgtttaaacttgttggcatcacgtttttcaaaacgctcttttttgcaaccgactggt

SEQ ID NO: 298607 - DNA, 75 bp, synthetic construct
  source 1..75: mol_type = other DNA
atgctcgaacagagcggtcgctatggacgtgcggcgcttgagtcgctgaaaagcgatgccgggtttatgaaagac

SEQ ID NO: 298608 - DNA, 75 bp, synthetic construct
  source 1..75: mol_type = other DNA
atgaatacacaacaattggcaaaactgcgttccatcgtgcccgaaatgcgtcgcgttcggcacatacattttgtc

SEQ ID NO: 298609 - DNA, 75 bp, synthetic construct
  source 1..75: mol_type = other DNA
atgtcagagtgctgttctggatgcaaagcgccgctggccaggatacagaattaacggatgttactactgctgtaa

SEQ ID NO: 298610 - DNA, 75 bp, synthetic construct
  source 1..75: mol_type = other DNA
ttattcaaaatgttaatattgataacaatactgctaccattggtggtggtaagataactattggcaatacaactc

SEQ ID NO: 298611 - DNA, 75 bp, synthetic construct
  source 1..75: mol_type = other DNA
aaaaaggaaacgacaaaaacggtctgaacatcgatctggttaaggctcctgagaataccagtaaggatgtcttca

SEQ ID NO: 298612 - DNA, 75 bp, synthetic construct
  source 1..75: mol_type = other DNA
tgatcgtgaagctaaatgactggccgtcgaaccgtgtgcatgaactgctgccctggaacttatcggctgtaaaat

SEQ ID NO: 298613 - DNA, 75 bp, synthetic construct
  source 1..75: mol_type = other DNA
ccatagaagcggagatacgcggcagtccggcagaggagcggcttgcggtcaggaaagccagaagcatccagttga

SEQ ID NO: 298614 - DNA, 75 bp, synthetic construct
  source 1..75: mol_type = other DNA
gacgcaacaggagaccatccgccagatggccgaatacaaccgcctgctctcacagcgggtggcggcttacgcttc

SEQ ID NO: 298615 - DNA, 75 bp, synthetic construct
  source 1..75: mol_type = other DNA
tcattgctaaccctgatgtttattatcaccctgccgtttgcgggcctgaacgcgatttctcgccacatttccgct

SEQ ID NO: 298616 - DNA, 75 bp, synthetic construct
  source 1..75: mol_type = other DNA
ataacgtttccttcgggcttgccgtactgaaatattacctccgtttcaattcgaaaaacaacctgcaggatgcaa

SEQ ID NO: 298617 - DNA, 75 bp, synthetic construct
  source 1..75: mol_type = other DNA
tgaacaagcggaaaatatgcggatccgtgccgagcttgtaacgatcattaataactggattgaacaacaagggtt

SEQ ID NO: 298618 - DNA, 75 bp, synthetic construct
  source 1..75: mol_type = other DNA
ctgaacttgccagaggtaagatccagatctttagtatcgataaattgatcaccatgatggctcatgcaggattgc

SEQ ID NO: 298619 - DNA, 75 bp, synthetic construct
  source 1..75: mol_type = other DNA
actacgcgctgtatccgcatatgacggtctacgacaacatggcgtttggcctgaagatgcaaaaaaatcgccaga

SEQ ID NO: 298620 - DNA, 75 bp, synthetic construct
  source 1..75: mol_type = other DNA
gcaatgcttaataacattcttgaaaccagaaataaactagatcgaagagtattcactgctaacaaaatcttagaa

SEQ ID NO: 298621 - DNA, 75 bp, synthetic construct
  source 1..75: mol_type = other DNA
atatattagactttgatgacctagctaaactgttatcgaaaagtcaggataaactgagtaaagcagaatccgaac

SEQ ID NO: 298622 - DNA, 75 bp, synthetic construct
  source 1..75: mol_type = other DNA
gcaagatctgaatagtgatggcagggcagagcggatcctgtttgcctttaatgatgaaagatacattgtctatgg

SEQ ID NO: 298623 - DNA, 75 bp, synthetic construct
  source 1..75: mol_type = other DNA
actcactgccgcgaaggaaagaaaactgggaacgaagcctaaaacgtggcgcaatcttacggtggatggtgaaac

SEQ ID NO: 298624 - DNA, 75 bp, synthetic construct
  source 1..75: mol_type = other DNA
tgaacagccatatggcgcgttatcagagcggcaaaaacacgtcagaccaggtaactatctacatgctcgagcaga

SEQ ID NO: 298625 - DNA, 75 bp, synthetic construct
  source 1..75: mol_type = other DNA
atgaaaattgaaacctttgatagtgtgtgggatgcggtgagtgacacccctgaacaagcggaaaatatgcggatc

SEQ ID NO: 298626 - DNA, 75 bp, synthetic construct
  source 1..75: mol_type = other DNA
tccgaacgaaataacgaaagaaaaattaactcacagctgcgaaggatggaaaactggggacgaggccgaaagcgt

SEQ ID NO: 298627 - DNA, 75 bp, synthetic construct
  source 1..75: mol_type = other DNA
attgtccgcgatccgcaaaaagcgtcacttccctggacggggccgttgcgttgcctgattaaaaccgctttgctg

SEQ ID NO: 298628 - DNA, 75 bp, synthetic construct
  source 1..75: mol_type = other DNA
ttacgtggtaaaggggattattccggcatcgtcgctatgcagcatatacggggcgagcggttcctataaatcatt

SEQ ID NO: 298629 - DNA, 75 bp, synthetic construct
  source 1..75: mol_type = other DNA
caggtgaaaaatctgtatctggtaaaccgtcccatctttccggctgccccgcttgatgttgatgaaatggttatc

SEQ ID NO: 298630 - DNA, 75 bp, synthetic construct
  source 1..75: mol_type = other DNA
gagcgccggagtccaggaggcgcggctactttctgaaaatttcgaattgctggaggaatggagcgaccagcttcc

SEQ ID NO: 298631 - DNA, 75 bp, synthetic construct
  source 1..75: mol_type = other DNA
ttccgcgtcgtgtaaaagcctgggaggttgtgcacgatgagcaggtgaaaaatctgtatctggtaaaccgcccca

SEQ ID NO: 298632 - DNA, 75 bp, synthetic construct
  source 1..75: mol_type = other DNA
tgccgatgtgggcgagctacattgttaaagcctatgcctggacgttattgctggcaaaagatggcgtggcgcagt

SEQ ID NO: 298633 - DNA, 75 bp, synthetic construct
  source 1..75: mol_type = other DNA
ggccgttatcagttaagcgaactggataacttgcagattgttgatgaggggcggtacagggcgacagtgatacgc

SEQ ID NO: 298634 - DNA, 75 bp, synthetic construct
  source 1..75: mol_type = other DNA
atgttgtcggtgaaggtggcattggtgtcccccgccgtatcaaggcatgggaaatcgttaatgatgaacgggtgg

SEQ ID NO: 298635 - DNA, 75 bp, synthetic construct
  source 1..75: mol_type = other DNA
ttcattgtgcagcacatacggcgcgagcggttcctataaatcgttcctcgcgtgttcctgggcgtgtcatgttgc

SEQ ID NO: 298636 - DNA, 75 bp, synthetic construct
  source 1..75: mol_type = other DNA
acctgccaaaagaaaaattcacggaggcagttatttttgccgggtcagaagcatacgcccatgcgaagggttggg

SEQ ID NO: 298637 - DNA, 75 bp, synthetic construct
  source 1..75: mol_type = other DNA
gcgatacagggcgacggtgatacgcgccggaaatattgaagagccgcagctgttaaccatcgccacgaaactggc

SEQ ID NO: 298638 - DNA, 75 bp, synthetic construct
  source 1..75: mol_type = other DNA
acgtcgctggtggtggtggataagccgcgtcctcccgttgaactggagcgcatcgaagaggctggcaacaagacg

SEQ ID NO: 298639 - DNA, 75 bp, synthetic construct
  source 1..75: mol_type = other DNA
cgtgggcgtgtcacgtttccacgggccgccagtggggaggccgcagggtggcgcatggtgctgttctctatgtgg

SEQ ID NO: 298640 - DNA, 75 bp, synthetic construct
  source 1..75: mol_type = other DNA
cgacaagtgcacgatcccgctgttacgtgatgacatgaaaaagctggggtatgaaatgaaaaacttccggcgctg

SEQ ID NO: 298641 - DNA, 75 bp, synthetic construct
  source 1..75: mol_type = other DNA
ggttacccgctacgctaaggagcgcgagcagaatcgtatccctgttgagattgctgcgggccagcaaataaccct

SEQ ID NO: 298642 - DNA, 75 bp, synthetic construct
  source 1..75: mol_type = other DNA
ggtatgggtggctgatgcaccttctcaccttattcacttcaacggagtgagatttcttggcccctactccactga

SEQ ID NO: 298643 - DNA, 75 bp, synthetic construct
  source 1..75: mol_type = other DNA
tgctggaaggctgcgcccagcctacgctttcgcccaacaccaacgcggcaactgcgcgagtgctggatcgtctgg

SEQ ID NO: 298644 - DNA, 75 bp, synthetic construct
  source 1..75: mol_type = other DNA
atgaaacttgcaccgaacgtaaaacgattaccgaaagacaaatacaccgaagcaattattttcgcggggaatgat

SEQ ID NO: 298645 - DNA, 75 bp, synthetic construct
  source 1..75: mol_type = other DNA
accgtcccatctttccggctgtcccgcttgatgttgatgaactgattattgctgccagtcaggtggagagggaaa

SEQ ID NO: 298646 - DNA, 75 bp, synthetic construct
  source 1..75: mol_type = other DNA
gcatcgttaacgcgcctgtcttccctgcatcgcctgactatgtggagcaggttatcaggactgccggacttgtta

SEQ ID NO: 298647 - DNA, 75 bp, synthetic construct
  source 1..75: mol_type = other DNA
agctattcgccggatcgaccgccgggctagtctatgtgactgccttcccaaaccgggccatcatgggccgctacc

SEQ ID NO: 298648 - DNA, 75 bp, synthetic construct
  source 1..75: mol_type = other DNA
atccgggacatcatcgaggattttgcaccgcgttttgcgccgggtagcgttctgatatatgccggcgacacaggt

SEQ ID NO: 298649 - DNA, 75 bp, synthetic construct
  source 1..75: mol_type = other DNA
gaggaggcaggcaacaagacggaaaaccataccgcgctatgggggtgcatccgttcacgcacacagaacggcgac

SEQ ID NO: 298650 - DNA, 75 bp, synthetic construct
  source 1..75: mol_type = other DNA
ggaactggcgcggctggcgcgtggtcgcgtgctggtgctggcacacgttaaagagctggtggcgcaaaaccatgc

SEQ ID NO: 298651 - DNA, 75 bp, synthetic construct
  source 1..75: mol_type = other DNA
cggatgaccatcatcgcccggaagggggtgacctcattgcgcttgcgccgggggaatcaacaacctcagagatgt

SEQ ID NO: 298652 - DNA, 75 bp, synthetic construct
  source 1..75: mol_type = other DNA
gggcgctaaagcttgaggtttccgatcagggcggtgtaattgaaggcttctggcgtgacgccgccccgctgctgc

SEQ ID NO: 298653 - DNA, 75 bp, synthetic construct
  source 1..75: mol_type = other DNA
ccagggcggtgtcatcgaaggtttctggcgtgatacgacgccgctcttacgtcctggtaaaaaaagcggtgtggc

SEQ ID NO: 298654 - DNA, 75 bp, synthetic construct
  source 1..75: mol_type = other DNA
gaattgagaaaaataacagcgcgaaatcctggtcaatgtactgtgatattgctgcagacaaggcaaaactgttac

SEQ ID NO: 298655 - DNA, 75 bp, synthetic construct
  source 1..75: mol_type = other DNA
tggtgaaggtcttccgctgccggagacatatgaccgtccggacccgcgcattaagcagctggcgcgccgcagtac

SEQ ID NO: 298656 - DNA, 75 bp, synthetic construct
  source 1..75: mol_type = other DNA
gttccgtttgctaatcgggtgagcggtaatcgttttgtctggcagggacgtgaatatcaactacaaccgaatgtt

SEQ ID NO: 298657 - DNA, 75 bp, synthetic construct
  source 1..75: mol_type = other DNA
cgctgattgcgtgggcgagaaagaaatacaagaccctgcggtataaaaagacgaaggcgtgtcagttaatggaaa

SEQ ID NO: 298658 - DNA, 75 bp, synthetic construct
  source 1..75: mol_type = other DNA
gaataagctggcaaaacgttttcaggaatgtggactggaattacatccggagaaaacgaaaatagtttactgcaa

SEQ ID NO: 298659 - DNA, 75 bp, synthetic construct
  source 1..75: mol_type = other DNA
gctgccggagtagataaccagacgctgaaagattttgagcgggatctgaaaggaaatctgtacaaaatctggaac

SEQ ID NO: 298660 - DNA, 75 bp, synthetic construct
  source 1..75: mol_type = other DNA
ggccgctaaagctggacgtttctgatcagggcggcgtaatcgaaggcttctggcgcgatacgacgccgctgctac

SEQ ID NO: 298661 - DNA, 75 bp, synthetic construct
  source 1..75: mol_type = other DNA
ggagcagtggctggcgggtgagttttgcgagcagctaccgcaagagctggatttcaaccagctcgcgccgttgcc

SEQ ID NO: 298662 - DNA, 75 bp, synthetic construct
  source 1..75: mol_type = other DNA
gggttacgctatcactatggaaacgatgccgcccgcgccgtgctatttcatctttgtctccgaccccgcgtttga

SEQ ID NO: 298663 - DNA, 75 bp, synthetic construct
  source 1..75: mol_type = other DNA
ttgatggtgtggatggacaggcgtttgacctggtgaaatgggccaatactgctaatgaactcaacaggtttgtca

SEQ ID NO: 298664 - DNA, 75 bp, synthetic construct
  source 1..75: mol_type = other DNA
aacgtaaagcccaaaagctggcacaaaaactctcaacagagaactcattcgaagccatatgtcgagaatggcaca

SEQ ID NO: 298665 - DNA, 75 bp, synthetic construct
  source 1..75: mol_type = other DNA
atgctgctatctgacatccaaataaaacgcgcaaaaccgaaggacaaaccttatacgcttaacgatggtatgggg

SEQ ID NO: 298666 - DNA, 75 bp, synthetic construct
  source 1..75: mol_type = other DNA
aattgaactacgtgcagcggaatgggctgagtttgatttagataatgccttatgggagatccccaaagaacggat

SEQ ID NO: 298667 - DNA, 75 bp, synthetic construct
  source 1..75: mol_type = other DNA
gaagagagccagtatcagcaaatcctcactcacctgactaaagtgaatccccacttacgcctgctggggctgact

SEQ ID NO: 298668 - DNA, 75 bp, synthetic construct
  source 1..75: mol_type = other DNA
gcaggggtttgatagtgcatggattgagatgcaattagcacatgtggacaaaaacagtattcgtgggacatataa

SEQ ID NO: 298669 - DNA, 75 bp, synthetic construct
  source 1..75: mol_type = other DNA
tagagaaaacacgtaaggtacgtcagagatgcggtgaggtttatcgttacgcaatcataactggtcgcgcggaat

SEQ ID NO: 298670 - DNA, 75 bp, synthetic construct
  source 1..75: mol_type = other DNA
gtgaacctacaaattgagttttctcatggcggagctgaggtactagatagagttatccaagcgtatggattcaac

SEQ ID NO: 298671 - DNA, 75 bp, synthetic construct
  source 1..75: mol_type = other DNA
cagggtgatcgaggcttacggatttacgcagaagttacagctcgcggaacatctggacatggcagccagttctct

SEQ ID NO: 298672 - DNA, 75 bp, synthetic construct
  source 1..75: mol_type = other DNA
gaatattactttgtcattgcgctggccggacagtcaaacggcatggcgtatggtgaaggcctgccgctgccggag

SEQ ID NO: 298673 - DNA, 75 bp, synthetic construct
  source 1..75: mol_type = other DNA
gggttatgcaaaagaggttctcaattgtatggaaaaggatatttttccttttatcggccagcgcccaattgagca

SEQ ID NO: 298674 - DNA, 75 bp, synthetic construct
  source 1..75: mol_type = other DNA
taacatcgagtactatactgaccttacttataggatgttcaagtactgaaacaaacaaaaacattgtttacaaag

SEQ ID NO: 298675 - DNA, 75 bp, synthetic construct
  source 1..75: mol_type = other DNA
tgctcaaatgtcagttctttatacgataaaaacgctctgactgaaattctccggcgcaatgctacacatccactc

SEQ ID NO: 298676 - DNA, 75 bp, synthetic construct
  source 1..75: mol_type = other DNA
caccttcggcaagctgaagatgctgcggccttttaacggcgacatctcccgtgaaattcatgcattactgacggt

SEQ ID NO: 298677 - DNA, 75 bp, synthetic construct
  source 1..75: mol_type = other DNA
aggtgcagcgggtaaacaattggctatgggtgagcgttctcagctggaggcattccagactgcggcgcagcaaat

SEQ ID NO: 298678 - DNA, 75 bp, synthetic construct
  source 1..75: mol_type = other DNA
gtgctggaagttcacgtgtgctccgattgctgcgcagagctgatgagcgatccgaatagctcaatgtacgaggaa

SEQ ID NO: 298679 - DNA, 75 bp, synthetic construct
  source 1..75: mol_type = other DNA
cacgcaggctgcagaatacttaccggttcgcatgccccgtctctgctctgcagaacgtctctctgaaagtatggt

SEQ ID NO: 298680 - DNA, 75 bp, synthetic construct
  source 1..75: mol_type = other DNA
tcttcgggggggattttaggaactatcgggagtgctattagtaaatttattccgaatgcaaagggcggtgtttat

SEQ ID NO: 298681 - DNA, 75 bp, synthetic construct
  source 1..75: mol_type = other DNA
gcgctggaaaaagacgccgcagcggttaaagcgctgggcgagctggaaagcatctggcaaatgccggaaccttat

SEQ ID NO: 298682 - DNA, 75 bp, synthetic construct
  source 1..75: mol_type = other DNA
agcggtacttatcgataccgctgggcgctatgcccgccatgatgacggcggagaaacgaacgcgacacagcgtaa

SEQ ID NO: 298683 - DNA, 75 bp, synthetic construct
  source 1..75: mol_type = other DNA
cactggtggatgatcgttttgccgcattgcgggaagtggtttccgggcgtacggacagcgcacaagggggcagcg

SEQ ID NO: 298684 - DNA, 75 bp, synthetic construct
  source 1..75: mol_type = other DNA
aaaaccactgcgctgcttaacaccgggctacagtttccgctggcggagcagatggagcagaccgcgcatatcctc

SEQ ID NO: 298685 - DNA, 75 bp, synthetic construct
  source 1..75: mol_type = other DNA
ctggtcgtatcacgccaatggcaattatggggatagacaatattaatgaatctgatcgtatgaatatactgggag

SEQ ID NO: 298686 - DNA, 75 bp, synthetic construct
  source 1..75: mol_type = other DNA
cacagatcagcatggtttcaggggccagcattggcgcattcaatggtgccattatcgcggcctctcccgatctgt

SEQ ID NO: 298687 - DNA, 75 bp, synthetic construct
  source 1..75: mol_type = other DNA
gacaacggatcccacgccgggtgcatcatctacatcggtgcagcgcaggtaaaccgcgaaagcatggactccctg

SEQ ID NO: 298688 - DNA, 75 bp, synthetic construct
  source 1..75: mol_type = other DNA
aggattgcgccaggtagtgccgcgtccggcggtctttcgcgcattgacgcaggtagggctggtgctgcgaccgtt

SEQ ID NO: 298689 - DNA, 75 bp, synthetic construct
  source 1..75: mol_type = other DNA
ttcccgacagccatctgtgctgcgggtcggcgggaacatatgcgttaacgcatcccgatctggcgcgccagctgc

SEQ ID NO: 298690 - DNA, 75 bp, synthetic construct
  source 1..75: mol_type = other DNA
tgcgtcagaacgcgcgggcgctggaagcagacagcatcctgcgcacctgtgttcactgcggattttgtaccgcaa

SEQ ID NO: 298691 - DNA, 75 bp, synthetic construct
  source 1..75: mol_type = other DNA
ttggctctgcatcgtatgcgcatgcgccgttttccacatccgtggggatgtcagcttacgtaaatccggaggcgt

SEQ ID NO: 298692 - DNA, 75 bp, synthetic construct
  source 1..75: mol_type = other DNA
agggaattttttatcccggagaacaggaagagtgtaccgacccatgatgagtcctgggtgattatctgtgatgct

SEQ ID NO: 298693 - DNA, 75 bp, synthetic construct
  source 1..75: mol_type = other DNA
gaaatattcggagacagcggctctggagcatacttatatgataacaaactagaaaaatgggtattagtcggaaca

SEQ ID NO: 298694 - DNA, 75 bp, synthetic construct
  source 1..75: mol_type = other DNA
ccaggttaaccagctactggatattctcagacataaagcattaacgcagatggcacaggagagtggcggtagtgc

SEQ ID NO: 298695 - DNA, 75 bp, synthetic construct
  source 1..75: mol_type = other DNA
aactcagatacaacgaaagaagccgttctggcaatcaataacgaagactcctacatatatcatgggaacataaat

SEQ ID NO: 298696 - DNA, 75 bp, synthetic construct
  source 1..75: mol_type = other DNA
taatttctggctttgcactggcgtttctgaccccgccatgcatttatgccatttataaggggctttctttcacta

SEQ ID NO: 298697 - DNA, 75 bp, synthetic construct
  source 1..75: mol_type = other DNA
atgagactgtatttcacaatagtaattttactggcaattatcgcatgtatttacggattacttgttccgttcctt

SEQ ID NO: 298698 - DNA, 75 bp, synthetic construct
  source 1..75: mol_type = other DNA
ttgagtagcgccacgctggtgaatgatctgcttgagcagctggaaaatagccctctaccaccacggttattacat

SEQ ID NO: 298699 - DNA, 75 bp, synthetic construct
  source 1..75: mol_type = other DNA
tgacgggcgctacccctttaccgacagcccgcaggaggtcagcgcggacgattttaaccgtatctttgccagcgg

SEQ ID NO: 298700 - DNA, 75 bp, synthetic construct
  source 1..75: mol_type = other DNA
tattaccccgagggaatgcacagccagaagcgggaggagtggcgcgaatatctggagcgtgagcgccagaaaaaa

SEQ ID NO: 298701 - DNA, 75 bp, synthetic construct
  source 1..75: mol_type = other DNA
tgaaacgacgcacaggggccacggtgctggtggttcaccattccggcaaggatgagacgaaaggcgcgcgcggtt

SEQ ID NO: 298702 - DNA, 75 bp, synthetic construct
  source 1..75: mol_type = other DNA
ggtcattatttttgtgggtagtgatgcctgggcacacgcgaagcagtggcaggagcaggagggccgacttgctgg

SEQ ID NO: 298703 - DNA, 75 bp, synthetic construct
  source 1..75: mol_type = other DNA
aatttgacggcaaactactaaagacactgttcctgatccgctacgtcgatgtgctgaaaagtactctcgacaatc

SEQ ID NO: 298704 - DNA, 75 bp, synthetic construct
  source 1..75: mol_type = other DNA
cgaacgactgaacagctgggttgaggaacagcgtaagaaagtgcctgaccccaaaaaaccgcctaagccaggaat

SEQ ID NO: 298705 - DNA, 75 bp, synthetic construct
  source 1..75: mol_type = other DNA
gaggtgtatgctcccgccacaggccccggtcggttgcaacttgccgataagatgggggtttgggtttccggcttc

SEQ ID NO: 298706 - DNA, 75 bp, synthetic construct
  source 1..75: mol_type = other DNA
gtatgagatgaaaaacttccggcgctggctgtacaagctggaaagagacggcgttatcgctattgacggtgatga

SEQ ID NO: 298707 - DNA, 75 bp, synthetic construct
  source 1..75: mol_type = other DNA
tgttgctgatgatattgctcagattggactggatcttcaagcggatgaatgtaacccagaagctacgcgtgaggt

SEQ ID NO: 298708 - DNA, 75 bp, synthetic construct
  source 1..75: mol_type = other DNA
aaacaaaattcaggacagcgaccagagcaagaacaccttctccgcgaaaagcagatggaaaatatggagcgtgaa

SEQ ID NO: 298709 - DNA, 75 bp, synthetic construct
  source 1..75: mol_type = other DNA
aatcgcaggagtccaggaagcgcgcctgttttctgaaaatttcgaattgctggaggaatggagcgaccagcttcc

SEQ ID NO: 298710 - DNA, 75 bp, synthetic construct
  source 1..75: mol_type = other DNA
tattaccctgatggaatgcacagccagaagctggagaactggcacgactacctgcaacggatccgcgaacaggca

SEQ ID NO: 298711 - DNA, 75 bp, synthetic construct
  source 1..75: mol_type = other DNA
gaagaaaaacaccaccagcgaaaaaccacgctaccaatgagcgtgggatctgccggatacgacacacaacttgat

SEQ ID NO: 298712 - DNA, 75 bp, synthetic construct
  source 1..75: mol_type = other DNA
gctgggcgaacggctggataagaaatcctcttcgccgttagctatcgtggatgcagcctgcggttacgttatcga

SEQ ID NO: 298713 - DNA, 75 bp, synthetic construct
  source 1..75: mol_type = other DNA
tttcccgccgcgcgctggctgttgtcggcgtggcggtactggcgctgctggtctggtttatcgggccgctggtgg

SEQ ID NO: 298714 - DNA, 75 bp, synthetic construct
  source 1..75: mol_type = other DNA
caggccgctaaaagtgaactggccggggccgcgcaacggctcaatggcggaaatcaccgccagcccgcgcatccg

SEQ ID NO: 298715 - DNA, 75 bp, synthetic construct
  source 1..75: mol_type = other DNA
tgctgcgttacgctcacggcccggtcaggccgctaaaagtgaactggccggggccgcgcaacggctcaatggcgg

SEQ ID NO: 298716 - DNA, 75 bp, synthetic construct
  source 1..75: mol_type = other DNA
aacgggccatgggcgctgtttcacctgctggatgcggggaaagcgcaggagacggcggtgcggggaacacagcag

SEQ ID NO: 298717 - DNA, 75 bp, synthetic construct
  source 1..75: mol_type = other DNA
caggacgcggcattgatccgccaggcgcgggccttcctcgacggtcataccagcaccgagcgtatctacgcccgg

SEQ ID NO: 298718 - DNA, 75 bp, synthetic construct
  source 1..75: mol_type = other DNA
gggctttacggagtatttccacgggctgaccagccacctgcgcgcccaggtctggggctttactctgccatacag

SEQ ID NO: 298719 - DNA, 75 bp, synthetic construct
  source 1..75: mol_type = other DNA
attgcgactggtggtttaccaacgaagcggtacttatcgataccgctgggcgctatgcccgccacgatgatggcg

SEQ ID NO: 298720 - DNA, 75 bp, synthetic construct
  source 1..75: mol_type = other DNA
tagcggctgttgaaaagggaatgcccccggtcttcccggtcatgccgttcgcgttgttccctgagtttatgacgc

SEQ ID NO: 298721 - DNA, 75 bp, synthetic construct
  source 1..75: mol_type = other DNA
agcttctacaaaaaccaatacgctacctggcagcgcttgagtatggcgttgaatggcagttttaaagctaaccgt

SEQ ID NO: 298722 - DNA, 75 bp, synthetic construct
  source 1..75: mol_type = other DNA
gacggcgaagctgttccaggacatccatccagaagaacgtctggagaaaacgctggtggatgatcgttttgccgc

SEQ ID NO: 298723 - DNA, 75 bp, synthetic construct
  source 1..75: mol_type = other DNA
cgcctgtacctgactgaatatgcccgccggtggcaggattttctggtcagtattcacagcatcaacagcgccggg

SEQ ID NO: 298724 - DNA, 75 bp, synthetic construct
  source 1..75: mol_type = other DNA
aggaactggcaaatctgacgctgcggctggatcaggggctggatacccggttgcaggaagagtacgaccttaaaa

SEQ ID NO: 298725 - DNA, 75 bp, synthetic construct
  source 1..75: mol_type = other DNA
gagaaaccgttgatgcacacgtatcccgcgtatttcaaagcctgattgacgccagaaagaaacctgcttttatct

SEQ ID NO: 298726 - DNA, 75 bp, synthetic construct
  source 1..75: mol_type = other DNA
gaaagggaaactatgcgggctgaaagcgaacggcgcaagcaactggcaaaggagcgttccaaagaatacaaagag

SEQ ID NO: 298727 - DNA, 75 bp, synthetic construct
  source 1..75: mol_type = other DNA
cgtcatgatgctgtgtaccggtttgaagcctgtatctggaaaatgaacggtaaaaccttctttgggtgtaatgcc

SEQ ID NO: 298728 - DNA, 75 bp, synthetic construct
  source 1..75: mol_type = other DNA
acgacgtgaagcgcggtttgcgaaacggcgttgctccttacatacccgcggccttttgccgggatgcccggagcg

SEQ ID NO: 298729 - DNA, 75 bp, synthetic construct
  source 1..75: mol_type = other DNA
taaaccagtccggtcaatcagtgtaggtgatgataactcatacgaagtgtccgttcctgctgagccggttagatt

SEQ ID NO: 298730 - DNA, 75 bp, synthetic construct
  source 1..75: mol_type = other DNA
tgcttttccggcaacaagcaggaatctcagcgctgaggcaggaattagaggtaaaaacgccctaccgggccatga

SEQ ID NO: 298731 - DNA, 75 bp, synthetic construct
  source 1..75: mol_type = other DNA
cggccttcaccagtatgaatcttgaagagttatcgatgccggggaatactttttctgtccgtcagcttaatcatt

SEQ ID NO: 298732 - DNA, 75 bp, synthetic construct
  source 1..75: mol_type = other DNA
ggattgctatttgcgttaagcgcacctgttaccgcgctcggtttaccggtagcgtttgtgttggtggcgttgagc

SEQ ID NO: 298733 - DNA, 75 bp, synthetic construct
  source 1..75: mol_type = other DNA
agaggtgatgactgcctttatccctccttataaacaaccgcttgtcgaagacaacaatattcgcggtaattcctc

SEQ ID NO: 298734 - DNA, 75 bp, synthetic construct
  source 1..75: mol_type = other DNA
tatggaaaccgcatttgctgaactcagcaaggatgccaccaaactgccgggcaacaatccggccggtggcgaaac

SEQ ID NO: 298735 - DNA, 75 bp, synthetic construct
  source 1..75: mol_type = other DNA
atgggcagccgtcttgctgtgggcgtcatcgttggcttgcttacctggatcagctatcaaatcatggtcaatctg

SEQ ID NO: 298736 - DNA, 75 bp, synthetic construct
  source 1..75: mol_type = other DNA
ggcctggggcaactatcgaaaaacagcgaacttaccgccattcgtagcacgggtttttctattttccgtattgca

SEQ ID NO: 298737 - DNA, 75 bp, synthetic construct
  source 1..75: mol_type = other DNA
gaaagagctgaagcgggttaccgacgaacgggacatattaaaaaaagccgttgtagatcaattggtcaacgcaac

SEQ ID NO: 298738 - DNA, 75 bp, synthetic construct
  source 1..75: mol_type = other DNA
gaaagagctgaagcgggttaccgacgaacgggacatattaaaaaactgtccatgggtgaaaccccgtcctgagtc

SEQ ID NO: 298739 - DNA, 75 bp, synthetic construct
  source 1..75: mol_type = other DNA
ggtgcgctgatggtctcctccgaaggagcgtgcgccgcgtggtatcagtatcgtcagcaggagagtgaagcgtga

SEQ ID NO: 298740 - DNA, 75 bp, synthetic construct
  source 1..75: mol_type = other DNA
atggatgcgttgaaactggcgcaggagaatccaacccgtaaagtggtgttcttcggcttaggttttgaaaccacc

SEQ ID NO: 298741 - DNA, 75 bp, synthetic construct
  source 1..75: mol_type = other DNA
atgtcgctaagggtatggatggtgacaggtggcatgatgttgatgtgtggatgggcaaaatatgctatttccgat

SEQ ID NO: 298742 - DNA, 75 bp, synthetic construct
  source 1..75: mol_type = other DNA
gaaagagctgaaacgggttaccgacgaacgggacatattaaaaaagccgcggcgtacttcgcaaagctgtccgac

SEQ ID NO: 298743 - DNA, 75 bp, synthetic construct
  source 1..75: mol_type = other DNA
ttgatactccagttctggcactcgcaactgatgcttattcatcactaaaaaatatcctcaatgacaatgggacaa

SEQ ID NO: 298744 - DNA, 75 bp, synthetic construct
  source 1..75: mol_type = other DNA
ttcggcctcgaccagttgctgccggaaaacgttgagtttatccacggtccgggttgcccggtgtgcgtactgccg

SEQ ID NO: 298745 - DNA, 75 bp, synthetic construct
  source 1..75: mol_type = other DNA
gaacgggacatattaaaaaaagccgctgtagattcaattggtcaacgcaacagttatgtgaaaacatggggttgc

SEQ ID NO: 298746 - DNA, 75 bp, synthetic construct
  source 1..75: mol_type = other DNA
cgtctccagaaagagctgaagcgggttaccgacgaacgggacatattaaaaaaagcggcactgttgcaaagttag

SEQ ID NO: 298747 - DNA, 75 bp, synthetic construct
  source 1..75: mol_type = other DNA
cacgtcagtatggttatcggcaccgacgcctataattttatcgccagcgattttcatcgtccgctggtggtcgct

SEQ ID NO: 298748 - DNA, 75 bp, synthetic construct
  source 1..75: mol_type = other DNA
ttttaatcgtccgctggtggtcgctggtttcgaaccacttgatctactacaaggcgtggtgatgctggtagagca

SEQ ID NO: 298749 - DNA, 75 bp, synthetic construct
  source 1..75: mol_type = other DNA
gtcaacggcgacagcgaatggcgcggcttaggcgtgattgaatcttctggtgtacacctgacgccagattatcaa

SEQ ID NO: 298750 - DNA, 75 bp, synthetic construct
  source 1..75: mol_type = other DNA
tggcgaaaacctacggcatcacccgagaacagcaagatgcattagcgcaccgttcgcatcagcgtgccgctcagg

SEQ ID NO: 298751 - DNA, 75 bp, synthetic construct
  source 1..75: mol_type = other DNA
ctgtgcagtgaactggtatttccgctggaaagaacgggaggatcggcgcaatggctatgtctctaaagctgaaga

SEQ ID NO: 298752 - DNA, 75 bp, synthetic construct
  source 1..75: mol_type = other DNA
acggccctgcgcgcgatggaaaagaggcactttccatcccgaccaacggcgacggggtacagggttacaaacttc

SEQ ID NO: 298753 - DNA, 75 bp, synthetic construct
  source 1..75: mol_type = other DNA
cagatgccgaccgtggtcgctatatcggtattgaaattacgccaaccacgcagaccggtacgccaaacgtcggga

SEQ ID NO: 298754 - DNA, 75 bp, synthetic construct
  source 1..75: mol_type = other DNA
gcacgaagcctttgcagctcagacactggcgaatattcagttgctgggtagtgaacgttttgctcgtgaagtact

SEQ ID NO: 298755 - DNA, 75 bp, synthetic construct
  source 1..75: mol_type = other DNA
aacggcggcaaacagtacgccgctgaccgatggcgcggcagcggtgatcctgatgactgaatcccgggcgaaaga

SEQ ID NO: 298756 - DNA, 75 bp, synthetic construct
  source 1..75: mol_type = other DNA
gcgataacgcaaagactatcgatactatccgctggatgagctacaaggacgctcaggggggcgatccgaaagagc

SEQ ID NO: 298757 - DNA, 75 bp, synthetic construct
  source 1..75: mol_type = other DNA
actcttggaataatctactacagaaataccaaccagaataaagtaaatgactccagcaacaataagaaagaaaag

SEQ ID NO: 298758 - DNA, 75 bp, synthetic construct
  source 1..75: mol_type = other DNA
atgtatatacataacgtatatcccaaaaagggggctatggaaactactgtatttttaagtaatcgcagtcaggcc

SEQ ID NO: 298759 - DNA, 75 bp, synthetic construct
  source 1..75: mol_type = other DNA
ttttatcagtgaggagaattggttctcactgctggaaaaggtgagtgcttttgataaggtcagacaatgggctga

SEQ ID NO: 298760 - DNA, 75 bp, synthetic construct
  source 1..75: mol_type = other DNA
agtgaccgtaatggtaagaccggccttgcaatcccggcaaacggcgacggcgttcagggctatacgctgtctatc

SEQ ID NO: 298761 - DNA, 75 bp, synthetic construct
  source 1..75: mol_type = other DNA
ccctgggccggatttattggtggcgtgattgagtcatcgaaactgacgccgacggcgagcagggaagatctccag

SEQ ID NO: 298762 - DNA, 75 bp, synthetic construct
  source 1..75: mol_type = other DNA
ccacctcgtggcaaacgccagatcagagctggaaataccactctaccgacgggcaaaaatataccgttacgccgc

SEQ ID NO: 298763 - DNA, 75 bp, synthetic construct
  source 1..75: mol_type = other DNA
attaggactggtgccgctgggatatctgcgcagttacgcgtttaccgctattgatgtctggcaggacatgttgct

SEQ ID NO: 298764 - DNA, 75 bp, synthetic construct
  source 1..75: mol_type = other DNA
gtggacgatagcaaatttaacgtgcttggtggctcgattgcatacgggcatccctttgcggcgaccggcgcgcga

SEQ ID NO: 298765 - DNA, 75 bp, synthetic construct
  source 1..75: mol_type = other DNA
cccgtcacggcgatcgtatcgccattgtcagtgggctacgtacgccttttgcccgtcaggcgacggcatttcatg

SEQ ID NO: 298766 - DNA, 75 bp, synthetic construct
  source 1..75: mol_type = other DNA
attagggctggtaccgctggggtatctgcgcagctacgcatttactgcgatagatgtctggcaggacatgttgct

SEQ ID NO: 298767 - DNA, 75 bp, synthetic construct
  source 1..75: mol_type = other DNA
cttaatgcccgtaccgcctgcggtagcagaatattctaccggcttgcggatgggtgacaccgcagagcaaatggc

SEQ ID NO: 298768 - DNA, 75 bp, synthetic construct
  source 1..75: mol_type = other DNA
tgcgccgccgtggcggtggatttggtttggtgaccgcctgtgccgcaggtggacttggcgcagcaatggttctgg

SEQ ID NO: 298769 - DNA, 75 bp, synthetic construct
  source 1..75: mol_type = other DNA
tgagcgatctgacattgattgatatgcacgaagcctttgctgcccagacgctggcgaatattcagttgctgggta

SEQ ID NO: 298770 - DNA, 75 bp, synthetic construct
  source 1..75: mol_type = other DNA
ttacagcgtcagccgcgcttgcgctaccagttttcaggcggttgcaaacgtcgcagaaagcctgatggcgggaac

SEQ ID NO: 298771 - DNA, 75 bp, synthetic construct
  source 1..75: mol_type = other DNA
aacggcagcaaacagtacaccgctgaccgatggcgcagcggcggtgatcctgatgactgaatcgcgggcgaaaga

SEQ ID NO: 298772 - DNA, 75 bp, synthetic construct
  source 1..75: mol_type = other DNA
ctgcgcagctacgcatttactgcgattgatgtctggcaggacatgttgctcggtccagcctggtcaacaccgctg

SEQ ID NO: 298773 - DNA, 75 bp, synthetic construct
  source 1..75: mol_type = other DNA
cgcacaatgagccagcgcctgaaactcttctctcgcctgcgtttgcgcgacttaatgcccgtaccgcctgcggta

SEQ ID NO: 298774 - DNA, 75 bp, synthetic construct
  source 1..75: mol_type = other DNA
atgattacccagacattgcatgaacttcgccgtcgcggcggtggatttggtttagtgaccgcctgtgctgccggt

SEQ ID NO: 298775 - DNA, 75 bp, synthetic construct
  source 1..75: mol_type = other DNA
gtaatgaccgcctacgttcctccttataaacaaccgctcgcggaagacaacaatattcgcggcaattccacgctt

SEQ ID NO: 298776 - DNA, 75 bp, synthetic construct
  source 1..75: mol_type = other DNA
gttccattgctccaaagaatggctgtacgccagagactctgcgtgtctgggttcgccaggatgagcgggataccg

SEQ ID NO: 298777 - DNA, 75 bp, synthetic construct
  source 1..75: mol_type = other DNA
actatttgcaacagtgccctggaaagtcagggcgaatatgactcacaatgggcggcaatttgttccattgctcca

SEQ ID NO: 298778 - DNA, 75 bp, synthetic construct
  source 1..75: mol_type = other DNA
tacgccagagactctgcgtgtgtgggttcgtcagcatgagcgggataccgggagtggtgatggtggattcaccac

SEQ ID NO: 298779 - DNA, 75 bp, synthetic construct
  source 1..75: mol_type = other DNA
gttccattgctccaaagattggctgtacgcctgagactctgcgtgtctgggttcgccaggatgagcgggataccg

SEQ ID NO: 298780 - DNA, 75 bp, synthetic construct
  source 1..75: mol_type = other DNA
gttccattgctccaaagaatggctgtacgccggagactctgcgtgtctgggttcgccagaatgagcgggataccg

SEQ ID NO: 298781 - DNA, 75 bp, synthetic construct
  source 1..75: mol_type = other DNA
gttccattgctccaaagaatggctgtacgcctgagactctgcgtgtctgggttcgccagtatgagcgggataccg

SEQ ID NO: 298782 - DNA, 75 bp, synthetic construct
  source 1..75: mol_type = other DNA
gttatgagttcttccttgccgatctcgatggcgaagtccgtgcggatgcatgggcaaaagaagccgtgcgtatgg

SEQ ID NO: 298783 - DNA, 75 bp, synthetic construct
  source 1..75: mol_type = other DNA
tcagcctgctggcgctggaacagagtgcgcaagcggcgcgcaccatcgtccgtgatagtggtgatggcaaagtac

SEQ ID NO: 298784 - DNA, 75 bp, synthetic construct
  source 1..75: mol_type = other DNA
ggggcggtgatggagggctcaccaccgctgaacgtcagcgtctgaaagagccggagcgtgaaaatcgtgaactgc

SEQ ID NO: 298785 - DNA, 75 bp, synthetic construct
  source 1..75: mol_type = other DNA
tggattcgccagcatgagcgggataccgggggcggtgatggtgggctcaccaccgctgaacgtcagcgtctgaaa

SEQ ID NO: 298786 - DNA, 75 bp, synthetic construct
  source 1..75: mol_type = other DNA
gtatggcgctggtcaatctttctgccgtcgccgcaccagcgggcaccatgccggtagtacttggcgcaggttggc

SEQ ID NO: 298787 - DNA, 75 bp, synthetic construct
  source 1..75: mol_type = other DNA
cggtctggaaggcgacttcaaccgccgtggcacttcagtatttagtgggcaggtcggggagctggtggcttcaga

SEQ ID NO: 298788 - DNA, 75 bp, synthetic construct
  source 1..75: mol_type = other DNA
gttccattgctccaaagattggctgtacgccggagactctgcgtgtctgggttcgccagtatgagcgggataccg

SEQ ID NO: 298789 - DNA, 75 bp, synthetic construct
  source 1..75: mol_type = other DNA
aggtgaaaacctgattgttaatcgcctcgccatcccacattgctggagcgaacaggaacgacgttttcgtggatt

SEQ ID NO: 298790 - DNA, 75 bp, synthetic construct
  source 1..75: mol_type = other DNA
tattaccctcgcccaaccagttgaggtgaataacgaagtcattaaccatgtcttgatcgcctgcgccgccgccga

SEQ ID NO: 298791 - DNA, 75 bp, synthetic construct
  source 1..75: mol_type = other DNA
tgccgggcattgcgtcattgaatattattgatacgcaactggttgagaatattaccgggcatttattacgttgcc

SEQ ID NO: 298792 - DNA, 75 bp, synthetic construct
  source 1..75: mol_type = other DNA
caacaccatattaccgccgatgaagcacaacgcatcatcgcccgcgaaggcgaaggtgaaaacctgattgttaat

SEQ ID NO: 298793 - DNA, 75 bp, synthetic construct
  source 1..75: mol_type = other DNA
gcccgtcgccccggcttaggtcattacatagatgagacgcaagagaaacgcattattttgctggcaaatctgtta

SEQ ID NO: 298794 - DNA, 75 bp, synthetic construct
  source 1..75: mol_type = other DNA
tatcagcatccggcggaaactattgtcggactaacggggtatgaagggtttatggcgttacttcgccaggggtga

SEQ ID NO: 298795 - DNA, 75 bp, synthetic construct
  source 1..75: mol_type = other DNA
gttccattgctccaaagagtggctgtacgccggagactctgcgtgtctgggttcgccaggatgagcgggataccg

SEQ ID NO: 298796 - DNA, 75 bp, synthetic construct
  source 1..75: mol_type = other DNA
gttccattgctccaaagactggctgtacgccggagactctgcgtgtctgggttcgccagcatgagcgggataccg

SEQ ID NO: 298797 - DNA, 75 bp, synthetic construct
  source 1..75: mol_type = other DNA
gttccattgctccaaagactggctgtacgcccgagactctgcgtgtctgggttcgccaggatgagcgggataccg

SEQ ID NO: 298798 - DNA, 75 bp, synthetic construct
  source 1..75: mol_type = other DNA
ttgccgcaccggtgtggattgctgagcaccgccaaagcagcatgaataacctgaaagccgcctggcctgcggcct

SEQ ID NO: 298799 - DNA, 75 bp, synthetic construct
  source 1..75: mol_type = other DNA
cgcaaagatccgtttttaattccgctggcgggcataacacgagacaaccttcagcatttatccacggcctgcgac

SEQ ID NO: 298800 - DNA, 75 bp, synthetic construct
  source 1..75: mol_type = other DNA
ggggcggtgatggtgggctcaccaccgctgaacgtcagcgtctgaaagagctggaacgtgaaaatcgtgaactgc

SEQ ID NO: 298801 - DNA, 75 bp, synthetic construct
  source 1..75: mol_type = other DNA
caccaccgctgaacgtcagcgtctgaaagagctggaacgtgaaaatcgtgaactgcgccgcagtaacgatatcct

SEQ ID NO: 298802 - DNA, 75 bp, synthetic construct
  source 1..75: mol_type = other DNA
tacaccggagactctgcgtgtctgggtacgccagcatgagcgggataccggaggcggtgatggtgggctcaccac

SEQ ID NO: 298803 - DNA, 75 bp, synthetic construct
  source 1..75: mol_type = other DNA
aatggaagacacaaagaaaatattgaatttcaggtagtaataaatttaagccctatttatttagataattttcgc

SEQ ID NO: 298804 - DNA, 75 bp, synthetic construct
  source 1..75: mol_type = other DNA
gcggttgtggggcgtgtcatgcgccattgaaactgccggagacgcgccagccagctgttaccactggcgaaattg

SEQ ID NO: 298805 - DNA, 75 bp, synthetic construct
  source 1..75: mol_type = other DNA
acctgccgcccgcctcgccgatgacctggggcgagcaaaccgacgtaccggaatctgccgactggtataactcca

SEQ ID NO: 298806 - DNA, 75 bp, synthetic construct
  source 1..75: mol_type = other DNA
tttgttccattgccccaaagattgactgtacaccggagactctgcgtgtctgggtacgccagcatgagcgggata

SEQ ID NO: 298807 - DNA, 75 bp, synthetic construct
  source 1..75: mol_type = other DNA
ggaacgtgaaaatcgtgaactgcaccgcagtaacgatatccttcgccaggcttccgcttattttgcgaaggcgga

SEQ ID NO: 298808 - DNA, 75 bp, synthetic construct
  source 1..75: mol_type = other DNA
ccgcgatgacgtggcgcgtattttcaacattcagcgctattcgctgaatgacggcgaaggcatccgcacggtggt

SEQ ID NO: 298809 - DNA, 75 bp, synthetic construct
  source 1..75: mol_type = other DNA
tgatcccgcgtttaccgctgatccctggtttcacactcagccgggagaatatgcagcaggcgctggacgtgctga

SEQ ID NO: 298810 - DNA, 75 bp, synthetic construct
  source 1..75: mol_type = other DNA
caagcagatattgagaactcaatgaatgataaagacgtccaaactaaaaacaaagaattacaacaaaaattaagc

SEQ ID NO: 298811 - DNA, 75 bp, synthetic construct
  source 1..75: mol_type = other DNA
gcgaatggtcgatgaaagatataccggcaacgtcgtcagccgatgtggcattgatgcgtgaaatggctgaacagg

SEQ ID NO: 298812 - DNA, 75 bp, synthetic construct
  source 1..75: mol_type = other DNA
aaacatggtcgatgaaagaggtttctgcgccgtcgtcagccgatgtggcaacgatgcgcgaaatggcagaacggg

SEQ ID NO: 298813 - DNA, 75 bp, synthetic construct
  source 1..75: mol_type = other DNA
attgtgcgatgaagtgttgttcgatttaaaaattatggacgcgactcaggcgcgggatgtggtgaagatgaacct

SEQ ID NO: 298814 - DNA, 75 bp, synthetic construct
  source 1..75: mol_type = other DNA
accaaaactatcgccattaccccggactactcggaagtagcaaaactgtgcgaccagtggctggcgccaaagcaa

SEQ ID NO: 298815 - DNA, 75 bp, synthetic construct
  source 1..75: mol_type = other DNA
agcgtgatggcccggcacaggggcgaccgctgattgacaccgccattgacgcatcagaagtgattctggcgctgg

SEQ ID NO: 298816 - DNA, 75 bp, synthetic construct
  source 1..75: mol_type = other DNA
acgcatggcctgcgaacagccggacaacggcagcaatcatccgcgtaacctgtttgtctggcgctctaacctgct

SEQ ID NO: 298817 - DNA, 75 bp, synthetic construct
  source 1..75: mol_type = other DNA
aaccctgcttggtcaacatgatgccgttgcaggcgtggccttcccctactttggcggcattgaaaatccgcattt

SEQ ID NO: 298818 - DNA, 75 bp, synthetic construct
  source 1..75: mol_type = other DNA
gttcgccagcatgagcgggataccgggggcggtgatggaggactcaccaccgctgaacgtcagcgtctgaaagag

SEQ ID NO: 298819 - DNA, 75 bp, synthetic construct
  source 1..75: mol_type = other DNA
tacgtacccgggcgcatgatccgcgcgtctgacctggtagatggactgggcgaaagcaataatccgcagtggaaa

SEQ ID NO: 298820 - DNA, 75 bp, synthetic construct
  source 1..75: mol_type = other DNA
ccactgctgcatgactccccggcagagctttcacagccgtgtgaagtgctcgactggcgcaaaggtgaatgcgat

SEQ ID NO: 298821 - DNA, 75 bp, synthetic construct
  source 1..75: mol_type = other DNA
catttttttacaatcactcaagccagtggcgctatgaaaaagtcaccgctcaggaattgctctcaccgctcgccg

SEQ ID NO: 298822 - DNA, 75 bp, synthetic construct
  source 1..75: mol_type = other DNA
ggcctttgcgcttgactggaaccgcccaccgcgccagatgaacagcacctcatttttttacaatcactcaagcca

SEQ ID NO: 298823 - DNA, 75 bp, synthetic construct
  source 1..75: mol_type = other DNA
agattcgctttcgcgatattcaggcgcagccgcgtaaaattatctccagccccacctggtccggtctggaaagcg

SEQ ID NO: 298824 - DNA, 75 bp, synthetic construct
  source 1..75: mol_type = other DNA
ggcgttaactgtactggctcctgtagctggaaaatctatgtcaaaaacggcctggtaacgtgggaaatccagcag

SEQ ID NO: 298825 - DNA, 75 bp, synthetic construct
  source 1..75: mol_type = other DNA
gatatgcatccgtttattcatccactttctgcggcggtcgatcccgcctgggaatcacgcagcgactgggaaatc

SEQ ID NO: 298826 - DNA, 75 bp, synthetic construct
  source 1..75: mol_type = other DNA
tccagtacctgcctgttctccgatatcgttctgcccaccgccacctggtacgaaaaagacgatatgaacacctcg

SEQ ID NO: 298827 - DNA, 75 bp, synthetic construct
  source 1..75: mol_type = other DNA
attgctgccacgctgccggggtttcagcagcttcacacctccgtggagggactgaaactgattgccgattacgaa

SEQ ID NO: 298828 - DNA, 75 bp, synthetic construct
  source 1..75: mol_type = other DNA
ggaggcaatcaagcagactgagtttgatacagtgttcagtgtggcctgcattccaagcagctttcatgaaagcat

SEQ ID NO: 298829 - DNA, 75 bp, synthetic construct
  source 1..75: mol_type = other DNA
cggcaaaaccattacggaacgacaggcagcagaaggactgatttccaacgtgctgcgtgtggagcgagcgctgga

SEQ ID NO: 298830 - DNA, 75 bp, synthetic construct
  source 1..75: mol_type = other DNA
aaagtgtatgacgcggtggtgtcatttgccttcaacgtggggacaggcaatgcctgcagctccacgctggtgaaa

SEQ ID NO: 298831 - DNA, 75 bp, synthetic construct
  source 1..75: mol_type = other DNA
tgaaactgattgccgattacgaaggctgtcgtctacagccgtatcagtgtagtgcgggtgtatggactgacggca

SEQ ID NO: 298832 - DNA, 75 bp, synthetic construct
  source 1..75: mol_type = other DNA
agcagcttcacacctccgtggagggactgaaactgattgccgattacgaaggctgtcgtctgcagccgtatcagt

SEQ ID NO: 298833 - DNA, 75 bp, synthetic construct
  source 1..75: mol_type = other DNA
tcaggaaacagccaacagcagcaaagtagcaatcatcaaaatcatcctgaatacgacgattcaattcccttctaa

SEQ ID NO: 298834 - DNA, 75 bp, synthetic construct
  source 1..75: mol_type = other DNA
tgcaggaaggtttccttgcggcggcagcggaataccccggccaggtgggcgttcagattggctatcacgaagcat

SEQ ID NO: 298835 - DNA, 75 bp, synthetic construct
  source 1..75: mol_type = other DNA
aataagcgccagttacaaatcgcaatggggcttaaggttgacgataaagtgccgctttttgcagtggtgagccgt

SEQ ID NO: 298836 - DNA, 75 bp, synthetic construct
  source 1..75: mol_type = other DNA
aaggtgtgtgaagcaacagccgccgcagaaggtgtatgacgcggcggtgtcgtttgccttcaacgtgggtacggg

SEQ ID NO: 298837 - DNA, 75 bp, synthetic construct
  source 1..75: mol_type = other DNA
cggatgcgtgccgacagttaccgcgctgggtttatgtaaaaggtgtgtttaatcaggggctggataaccgccgtg

SEQ ID NO: 298838 - DNA, 75 bp, synthetic construct
  source 1..75: mol_type = other DNA
tgaacaccgagcgccgtctcgcggtctgcgtgccggtcaccatgccgcaacaggtttacgacgcgctggtcagtt

SEQ ID NO: 298839 - DNA, 75 bp, synthetic construct
  source 1..75: mol_type = other DNA
atgtttataagctttgataatcaaggaggatttgttatatcaatattaaataatgctacaagtgaaacggcaaat

SEQ ID NO: 298840 - DNA, 75 bp, synthetic construct
  source 1..75: mol_type = other DNA
agccatcaaaaaagccgctgaaagccgcccggctccgttcctgattcatcaggagagcaacgtaatcgttcgcgc

SEQ ID NO: 298841 - DNA, 75 bp, synthetic construct
  source 1..75: mol_type = other DNA
atttcgatgcgccgcatacgccaatgtatatgcaggaatacctctattcactgaaaaatcatcgctataccgcca

SEQ ID NO: 298842 - DNA, 75 bp, synthetic construct
  source 1..75: mol_type = other DNA
ggataaattccgcagtttccgcccggccgatttcgctgacgtttttcgtcgctatccaccttccggtcgttcgcc

SEQ ID NO: 298843 - DNA, 75 bp, synthetic construct
  source 1..75: mol_type = other DNA
atgctgccgaagctgcatgaagaagcgatggcgctgccgtctgaagaagagttcgctgaacgtaagcgtccggaa

SEQ ID NO: 298844 - DNA, 75 bp, synthetic construct
  source 1..75: mol_type = other DNA
atcgctgtcgctctctattctgcgtttgatcgaagaagaagcgctgaaagagaacacccaggaagttcacgccat

SEQ ID NO: 298845 - DNA, 75 bp, synthetic construct
  source 1..75: mol_type = other DNA
catcacgtctgtccgcgttgctctggtactggcaccgtacgtgacaacgagtccctgtcactctctattctgcgc

SEQ ID NO: 298846 - DNA, 75 bp, synthetic construct
  source 1..75: mol_type = other DNA
gtattactggccggaggagcaaactttccgggggctgccagtaattacgcaaaaggtaaaaactggtcacatgca

SEQ ID NO: 298847 - DNA, 75 bp, synthetic construct
  source 1..75: mol_type = other DNA
gcctgcattgcggcgcttcagtctccgctgcatactgtccaggtgagcgcgggtgatggcataacagaggaaaga

SEQ ID NO: 298848 - DNA, 75 bp, synthetic construct
  source 1..75: mol_type = other DNA
tgtccagaggtagaaaattgtttaaattaaatgtagaaaagaaacctgacattgatgatatcatcaacgtggcta

SEQ ID NO: 298849 - DNA, 75 bp, synthetic construct
  source 1..75: mol_type = other DNA
atggaagaaaaacaacaaaacataacacataaaaaagtaagagtgttgctaaccattgaaaatggtgaagtaatt

SEQ ID NO: 298850 - DNA, 75 bp, synthetic construct
  source 1..75: mol_type = other DNA
atggctgacacctgccgggatacgatcgtcctgctggaaaaaaacctcacccgggtgatgcgcctgaaaaaacgt

SEQ ID NO: 298851 - DNA, 75 bp, synthetic construct
  source 1..75: mol_type = other DNA
atgtttatgttcttaagaatgctaaatggactaaagctggcgttttgcctgaagggcttgcatatggtgtttcgc

SEQ ID NO: 298852 - DNA, 75 bp, synthetic construct
  source 1..75: mol_type = other DNA
aaaatctggagtccagagacggacttactgttggcctcgcgttacacccgcgatacgttggaagataaagcggaa

SEQ ID NO: 298853 - DNA, 75 bp, synthetic construct
  source 1..75: mol_type = other DNA
gtgataaagaatttagattttaacgcaattgatgaagatgaacttatagatattaaaacaatcatgcctatcaag

SEQ ID NO: 298854 - DNA, 75 bp, synthetic construct
  source 1..75: mol_type = other DNA
aaacggcggagattaacggcatcagttatgacgtgataccggagtatgagtctgcggatatgggggcgctttccg

SEQ ID NO: 298855 - DNA, 75 bp, synthetic construct
  source 1..75: mol_type = other DNA
acaggaaatatctgattatgaaaaacagttaaaaaaaatgagagatatacgcattgaactagctgatttaaataa

SEQ ID NO: 298856 - DNA, 75 bp, synthetic construct
  source 1..75: mol_type = other DNA
ccttgtatgactggactgtagaaatcattggtaaaaccgttttggttaaagctcgccatgtagaaaatgattggg

SEQ ID NO: 298857 - DNA, 75 bp, synthetic construct
  source 1..75: mol_type = other DNA
ctctcttgatgatattgttgagtgggaaaatgcacatcgtcaaaacaaacttaaaggtgatataaatggttacta

SEQ ID NO: 298858 - DNA, 75 bp, synthetic construct
  source 1..75: mol_type = other DNA
aaatgataaaactcaaaaataatccaaaaaagttttttaaggactccaaaaaaggatatattagagttttatcca

SEQ ID NO: 298859 - DNA, 75 bp, synthetic construct
  source 1..75: mol_type = other DNA
ctgcccttttatgccggacaagggacaaactttgtcgttaacggaagtttgattctggcgtttttttatttggtg

SEQ ID NO: 298860 - DNA, 75 bp, synthetic construct
  source 1..75: mol_type = other DNA
tttccagggggatgtggtgccgtcagcctctgtgtatattccggacagcgagaaaagttgcgacagtgatccagt

SEQ ID NO: 298861 - DNA, 75 bp, synthetic construct
  source 1..75: mol_type = other DNA
cagccggtcaggaagctcacgcccggatggatacgctgaagagaaaggatggcctgctgggaaccgactggcagg

SEQ ID NO: 298862 - DNA, 75 bp, synthetic construct
  source 1..75: mol_type = other DNA
caaatctgcgagggcgcataatagcacatccatatgcacatactttaggctctgtggatatcaaaggtcccacaa

SEQ ID NO: 298863 - DNA, 75 bp, synthetic construct
  source 1..75: mol_type = other DNA
attgcattggaaataaactagctgcataccgaatttcaaataattctctttcttctaataaaatgaaagtggtaa

SEQ ID NO: 298864 - DNA, 75 bp, synthetic construct
  source 1..75: mol_type = other DNA
tggttagggacactattgattctttcatcagtaatattaatttctgtagattcccgccgccgcgccagaaaaatt

SEQ ID NO: 298865 - DNA, 75 bp, synthetic construct
  source 1..75: mol_type = other DNA
atgatggacagcctgtttgatttccggatcgccagaatacgcatactgtcagggctgggaaacgatgctctcggt

SEQ ID NO: 298866 - DNA, 75 bp, synthetic construct
  source 1..75: mol_type = other DNA
atgcgctttcagaaccgggctaacttcgaagcaatgattgatgcgaatatgcgtccttgtgggatcaatcccacc

SEQ ID NO: 298867 - DNA, 75 bp, synthetic construct
  source 1..75: mol_type = other DNA
tgaattactgaatgcaaagattggatttgcaacttcaggaaacagccaacagcaacaaagtagcaatcatcaaaa

SEQ ID NO: 298868 - DNA, 75 bp, synthetic construct
  source 1..75: mol_type = other DNA
acgacgtgaagcgcggtttgcgaaacggcgttgctccttacataccggcggccttttgccgggatgccgggagcg

SEQ ID NO: 298869 - DNA, 75 bp, synthetic construct
  source 1..75: mol_type = other DNA
ttaatattcatgggctggaattcaacggacaaatctctttcctgaaggccggtctgtactatgccgatcacatta

SEQ ID NO: 298870 - DNA, 75 bp, synthetic construct
  source 1..75: mol_type = other DNA
tttacagcttcaggaaatggcccgcagcagcaaagtagtaaccagcagaacactcctgtatacgacgattccatc

SEQ ID NO: 298871 - DNA, 75 bp, synthetic construct
  source 1..75: mol_type = other DNA
ggcaaaatggtcaatcaatcactcttgaattactgaatgcaaagattggatttgcagcttcaggaaatggcccgc

SEQ ID NO: 298872 - DNA, 75 bp, synthetic construct
  source 1..75: mol_type = other DNA
acgacgtgaagcgcggtttgcgaaacggcgttgctccttacataccggcggccttttgcggggatgcccggagcg

SEQ ID NO: 298873 - DNA, 75 bp, synthetic construct
  source 1..75: mol_type = other DNA
agtaatgcctggtcgctgttacgggctattcggcgtgcttttgtactgtggtcccgtccttcactgtggcggttt

SEQ ID NO: 298874 - DNA, 75 bp, synthetic construct
  source 1..75: mol_type = other DNA
gtcaaaggtaaatacatcactatcgaaaataacgatgcgctggcccagcttgctggtcatacgcgtaacgttgcc

SEQ ID NO: 298875 - DNA, 75 bp, synthetic construct
  source 1..75: mol_type = other DNA
tgcgttgattgttcactcaaaagcattgagtgacgatgaactggcgcaatttatggataacattcccggtatggt

SEQ ID NO: 298876 - DNA, 75 bp, synthetic construct
  source 1..75: mol_type = other DNA
agacgtcaactagttttgccgactcgcgccaactatactggccgcacccttcagtgcgacatcaagtcgcgcttg

SEQ ID NO: 298877 - DNA, 75 bp, synthetic construct
  source 1..75: mol_type = other DNA
tggtgctggaggccttaccgggccttctggaacaggggggacaactggcgttactcggcgcgggcgatccggtgt

SEQ ID NO: 298878 - DNA, 75 bp, synthetic construct
  source 1..75: mol_type = other DNA
tttagacggcaatctggcggcagccacgtccacaggcggaatgaccaataaattacccggacgagttggcgatag

SEQ ID NO: 298879 - DNA, 75 bp, synthetic construct
  source 1..75: mol_type = other DNA
tgtggttacgctgttaactgaaatgctcgaacccttccagggcaaaatttatgacccgtgctgcggctcggcagg

SEQ ID NO: 298880 - DNA, 75 bp, synthetic construct
  source 1..75: mol_type = other DNA
gtgaattgtcgaagacgttgtttgagcagatgaagcaggcggaagaactggatcgtgcgattcgccagaatctgg

SEQ ID NO: 298881 - DNA, 75 bp, synthetic construct
  source 1..75: mol_type = other DNA
ggaaccgtgcgcttttataaagcggttactgatggggctggtaagccgattcctggctatccgattactcactgg

SEQ ID NO: 298882 - DNA, 75 bp, synthetic construct
  source 1..75: mol_type = other DNA
gcttctaacctcgctaactttgttgtagagcgtgagtcttatgactggaactcaattcaaaacagtcttgaccag

SEQ ID NO: 298883 - DNA, 75 bp, synthetic construct
  source 1..75: mol_type = other DNA
cgcgatagagtttcagaacagcgccgtatgatgtggattgcttttggatttggtggaatcggtatcgttgcggcg

SEQ ID NO: 298884 - DNA, 75 bp, synthetic construct
  source 1..75: mol_type = other DNA
gtggactggcctacaaagcacatagagtcctacaggctcgcatgcacctcactcggggcggaaaaggttgaggtc

SEQ ID NO: 298885 - DNA, 75 bp, synthetic construct
  source 1..75: mol_type = other DNA
ggcaatagttgaaatgctcggcgggcgcgtcatggaggagttggactatggattcttagcggagatcggggatga

SEQ ID NO: 298886 - DNA, 75 bp, synthetic construct
  source 1..75: mol_type = other DNA
ggtaaaggtggtggtgaattctatacccctaaagcagtggtgactttgcttgctgaaatgctcgaaccctatcaa

SEQ ID NO: 298887 - DNA, 75 bp, synthetic construct
  source 1..75: mol_type = other DNA
aaaccgggcaacccagcagcgaacaccgccttgcactgtgggaaaaactgggacaacccatcttgaccctggcga

SEQ ID NO: 298888 - DNA, 75 bp, synthetic construct
  source 1..75: mol_type = other DNA
aaacggatcgatgagttctaacaccagcggcgaaggagagatccgtgcacagatgatcgaaaatgatctaatcga

SEQ ID NO: 298889 - DNA, 75 bp, synthetic construct
  source 1..75: mol_type = other DNA
cccggcaaacactttctttagcgaccagcacccggacctgaaagccgactacattctggcgaacccgccgttcaa

SEQ ID NO: 298890 - DNA, 75 bp, synthetic construct
  source 1..75: mol_type = other DNA
atcttacaaaaaacgccgttgttctctctgggggatcctgttcatgattcggaacagaaaatcatcgaggcaggg

SEQ ID NO: 298891 - DNA, 75 bp, synthetic construct
  source 1..75: mol_type = other DNA
caagtttaccgctatagatggcatccggcatggtgttaccccatccgaatacaaacgggattacattcagtttgt

SEQ ID NO: 298892 - DNA, 75 bp, synthetic construct
  source 1..75: mol_type = other DNA
cagacggcccgcaggattaacaatgtgctgtttgatggcagtggcgatatcacgattcctgcaggaatgagtcag

SEQ ID NO: 298893 - DNA, 75 bp, synthetic construct
  source 1..75: mol_type = other DNA
tacgtgacacggtagataaagccagtcgtgccgtaccgaatacccgcagggtcaacaacatgcccctgacttcgg

SEQ ID NO: 298894 - DNA, 75 bp, synthetic construct
  source 1..75: mol_type = other DNA
ttgaagatgtcaggaaatcagaggatatactgaaccgactggagtttatcgacagaagatttcgggaattcatca

SEQ ID NO: 298895 - DNA, 75 bp, synthetic construct
  source 1..75: mol_type = other DNA
ggcaggagagtcctgggacagctggttcgatggcgacagtgtcagcgcagatttcatgaatgacagggaacaacc

SEQ ID NO: 298896 - DNA, 75 bp, synthetic construct
  source 1..75: mol_type = other DNA
ctggacgctgaggggcggttgctagtatgcgaccctaatgtgtgttatcccaacgaggtgctcacggaatattcg

SEQ ID NO: 298897 - DNA, 75 bp, synthetic construct
  source 1..75: mol_type = other DNA
cgtgcatggcaactactggtaacacctgcacagcaattactgcactaaatgctgttaacagttcagataacgaaa

SEQ ID NO: 298898 - DNA, 75 bp, synthetic construct
  source 1..75: mol_type = other DNA
ggcgaaaacttcgccattacaaggccacgttccccagtatctcccaccacgccatcaatgaccaaaacccccgtt

SEQ ID NO: 298899 - DNA, 75 bp, synthetic construct
  source 1..75: mol_type = other DNA
catcgcgatttactgcaaaaacagctcgatgttcctgtcttgctgtctaacgtattgattgcacggctggctgcg

SEQ ID NO: 298900 - DNA, 75 bp, synthetic construct
  source 1..75: mol_type = other DNA
gtacaaaacgggaagaatacctgttgatgagtggtgatgagttcatggaaaggttctcctggcatgtggcggata

SEQ ID NO: 298901 - DNA, 75 bp, synthetic construct
  source 1..75: mol_type = other DNA
ggcaccatcgaagagttgcaaaacattcagcagccattactgatgggccccccccccccccccccccccgccgcg

SEQ ID NO: 298902 - DNA, 75 bp, synthetic construct
  source 1..75: mol_type = other DNA
cgcgatcaacaaccatgctgtaaatatgaatttcaaagatagccaattgtcgtgtatggcaactactggtaacac

SEQ ID NO: 298903 - DNA, 75 bp, synthetic construct
  source 1..75: mol_type = other DNA
gatatcgctaccatagccgataccttccacgcctggcgcagtagcgagagcgaactcaagcgtcgtatcgaatct

SEQ ID NO: 298904 - DNA, 75 bp, synthetic construct
  source 1..75: mol_type = other DNA
cggtcaataattgtatcaccgtaaaaaacattattactgccgccggtatcgaacaaataaaacattttcttgcga

SEQ ID NO: 298905 - DNA, 75 bp, synthetic construct
  source 1..75: mol_type = other DNA
ttgccgcaccagtgtggattgctgagcaccgccagagcagcatgaataacctgaaagccgcctggcctgcggcct

SEQ ID NO: 298906 - DNA, 75 bp, synthetic construct
  source 1..75: mol_type = other DNA
tcagcatttatccacggcctgcgacaaccaacaccgctggccgctcatgcagggtgattatctctccagcctgat

SEQ ID NO: 298907 - DNA, 75 bp, synthetic construct
  source 1..75: mol_type = other DNA
cgaagccctgaaaactattctcggcaaaatgcatcaggacgccgcaccgccagatagcgtggaagtcttctgtta

SEQ ID NO: 298908 - DNA, 75 bp, synthetic construct
  source 1..75: mol_type = other DNA
gcgaaaagctcagccgtgaacgcgcctgcgtaggctggcgtcgcgcagtgttgagccagttagtgagcgagtggg

SEQ ID NO: 298909 - DNA, 75 bp, synthetic construct
  source 1..75: mol_type = other DNA
aggtgaaaacctgatcgttaatcgcctcgccatccctcattgctggagcgagcaagagcgacgttttcgtggatt

SEQ ID NO: 298910 - DNA, 75 bp, synthetic construct
  source 1..75: mol_type = other DNA
ccttcgaaggtaaaggtgctgcaggtggtcatacggcaacgcatcatgcctctgccgctcctgcgcgtccgcaac

SEQ ID NO: 298911 - DNA, 75 bp, synthetic construct
  source 1..75: mol_type = other DNA
tggcatgccacgtcgttctcgtcgttcgcctcgtcacctgcgcgtaagtggccagcgtcgtcgccgctatcgtga

SEQ ID NO: 298912 - DNA, 75 bp, synthetic construct
  source 1..75: mol_type = other DNA
cccggctgaaactgtagcaccggcagcaaccccagcaccgaaagctgcgccgacaacgcctgctgctccagcaca

SEQ ID NO: 298913 - DNA, 75 bp, synthetic construct
  source 1..75: mol_type = other DNA
ttgtcgatctgctggagcaacagccgcacacgccaggtgagctggcgcaacaaacgggcgtttccggcaggacca

SEQ ID NO: 298914 - DNA, 75 bp, synthetic construct
  source 1..75: mol_type = other DNA
cgtcgtgagcgtagtcgtcgccgcaacgatgataaacgtcaggtacaacaagaagcgaaggcactgaatgttgag

SEQ ID NO: 298915 - DNA, 75 bp, synthetic construct
  source 1..75: mol_type = other DNA
gccgaacctgttatgccggaagcgcctgcccagcgtactgaactggtgaaagtaccattgccagtcgttgcacaa

SEQ ID NO: 298916 - DNA, 75 bp, synthetic construct
  source 1..75: mol_type = other DNA
tcatggaatgaagtgcgcacgctgcatttcaacggcgagcagtcgatgattgaagccctgaaaaccatcctcggc

SEQ ID NO: 298917 - DNA, 75 bp, synthetic construct
  source 1..75: mol_type = other DNA
tgatgtctcggttgaccaactggcgcattacattgatccgaacgcggcgatgacgttgctcaccaacttgctgac

SEQ ID NO: 298918 - DNA, 75 bp, synthetic construct
  source 1..75: mol_type = other DNA
ttcgcttttgtctggggattgctggcctttgcgcttaattacatccctaatattggttcagttctcgcggcaatc

SEQ ID NO: 298919 - DNA, 75 bp, synthetic construct
  source 1..75: mol_type = other DNA
atggtccgctggcgtgtgccgcgtgtactggcggtgtcgattttgatgaccatcatcgtgatggcgatggtgttg

SEQ ID NO: 298920 - DNA, 75 bp, synthetic construct
  source 1..75: mol_type = other DNA
atggtgcttatgctggcctatctcggctcaacactcaatgaactgacccgcactttgccacagtatcgcagctca

SEQ ID NO: 298921 - DNA, 75 bp, synthetic construct
  source 1..75: mol_type = other DNA
ttttggggatggttgttaggaccggtgggaatgctgctttccgtgccgttgacgattattgtcaaaattgcgctt

SEQ ID NO: 298922 - DNA, 75 bp, synthetic construct
  source 1..75: mol_type = other DNA
attacatccctaacattggttcggttctcgcggctatcccccctatcgctcaggtactggtgtttaatggtttct

SEQ ID NO: 298923 - DNA, 75 bp, synthetic construct
  source 1..75: mol_type = other DNA
ctttgcgccagttagtcgagcaacagatcctcgaaagcattcagggcagcgggacttacgtcaaagaagagcggg

SEQ ID NO: 298924 - DNA, 75 bp, synthetic construct
  source 1..75: mol_type = other DNA
ttaaaggcaacggcattgtcgatctgcctaagttgcaagagatggtggctgatgtgtcgcaccatttcccgttgc

SEQ ID NO: 298925 - DNA, 75 bp, synthetic construct
  source 1..75: mol_type = other DNA
ttaagccaactggtaaaagagtggggatgggacgaagcccgtctggcgatgctcgataatcgcgccaactggaag

SEQ ID NO: 298926 - DNA, 75 bp, synthetic construct
  source 1..75: mol_type = other DNA
gaaaactcgcagcaacttttgccagcactggaactccctcgttttttgttcacggtactgaagccgtacacggcg

SEQ ID NO: 298927 - DNA, 75 bp, synthetic construct
  source 1..75: mol_type = other DNA
gtcggtaagtccggtattattgcccgaaaactcgccgcaacatttgccagcactggaactccctcgttttttgtt

SEQ ID NO: 298928 - DNA, 75 bp, synthetic construct
  source 1..75: mol_type = other DNA
tggcgtaccaatatattgcgagttcaacagtacaagcggtaaacatcggcctgcagtgctaaagtcgtcggtagg

SEQ ID NO: 298929 - DNA, 75 bp, synthetic construct
  source 1..75: mol_type = other DNA
gctgtaccatccgcagggctgccccgcctgtaatcacaaaggttttcgcggacgtactgccatccatgagctgat

SEQ ID NO: 298930 - DNA, 75 bp, synthetic construct
  source 1..75: mol_type = other DNA
agcaacggtattgagaaagtgctcgccggagaaacctctctcgatgaagttctgcgggtaaccatggaggcgtaa

SEQ ID NO: 298931 - DNA, 75 bp, synthetic construct
  source 1..75: mol_type = other DNA
aaattgaggtcatcagcatcgatccggttgttacatccacccatgagtatctggggcgcgagcatgtgaagcaca

SEQ ID NO: 298932 - DNA, 75 bp, synthetic construct
  source 1..75: mol_type = other DNA
gtgccatcaatgtggtgcgccatcgcagtgatgtaaacccacaacggctggtgctgttcgggcagagtattggcg

SEQ ID NO: 298933 - DNA, 75 bp, synthetic construct
  source 1..75: mol_type = other DNA
tgattgtggtggacgccacattgcgtgatttgatccaccgtcaggccggggaactggagctggaacgttatgtcc

SEQ ID NO: 298934 - DNA, 75 bp, synthetic construct
  source 1..75: mol_type = other DNA
gggcgatcacgcgtttgcaggatatgggcgttgagcctttcctgctctcttccagtctgactggcgtgatggcgc

SEQ ID NO: 298935 - DNA, 75 bp, synthetic construct
  source 1..75: mol_type = other DNA
ccgagtgccttgttgaccgccagtggttggcagtcgacggggatgttccataacgcgtcggggatgttggcgaaa

SEQ ID NO: 298936 - DNA, 75 bp, synthetic construct
  source 1..75: mol_type = other DNA
gcgatccggataaggttgtcaaaacatcgcagccgcaaccgcgaccacgtgctagcacaactattaatgacccgt

SEQ ID NO: 298937 - DNA, 75 bp, synthetic construct
  source 1..75: mol_type = other DNA
cggtgctgcgcaggtgatcctgccgcgtgtggttggctcaatggaagtgtatgaacagcaaacctcctggccgct

SEQ ID NO: 298938 - DNA, 75 bp, synthetic construct
  source 1..75: mol_type = other DNA
cgactgggcagaaaaactgtgtggtattgacgccgaaacgattcgcgcgctggcgcggaaaatggcgggcaacag

SEQ ID NO: 298939 - DNA, 75 bp, synthetic construct
  source 1..75: mol_type = other DNA
cagcgtatgcagcacggtgaacagtgggcgtggatgattgtggttctggcggcgatgctggggcaaattggcctg

SEQ ID NO: 298940 - DNA, 75 bp, synthetic construct
  source 1..75: mol_type = other DNA
gctgcaatctcacggttcaatgcttcacttaatgcgaagataaagcactatgagcttaaacagaaaaaggcaggt

SEQ ID NO: 298941 - DNA, 75 bp, synthetic construct
  source 1..75: mol_type = other DNA
tggtaccgtcagcatcatgctgacagcaactggtatgaaaacgtgtatgaagacttcagggaggtctgtggcatt

SEQ ID NO: 298942 - DNA, 75 bp, synthetic construct
  source 1..75: mol_type = other DNA
tgtatacactgaatgagctatccgccaccgcacaggaaaaagcccgcgactggtaccgtcagcatcatgctgaca

SEQ ID NO: 298943 - DNA, 75 bp, synthetic construct
  source 1..75: mol_type = other DNA
ctggcagccagcggccccccggaaaatcagggaatatgccccgcaggaccgtgagcttcatcgtatcgcggatgc

SEQ ID NO: 298944 - DNA, 75 bp, synthetic construct
  source 1..75: mol_type = other DNA
tgaaaatataaagtttagtcgtgaaaaatatatttatcgacagcaaaaaaaagaaataactgatgtgatgtttgt

SEQ ID NO: 298945 - DNA, 75 bp, synthetic construct
  source 1..75: mol_type = other DNA
agtttgataagaaaagaacgccagatgatggccgtattagtttgttatatgaaaacgcgattaagtatgatatgt

SEQ ID NO: 298946 - DNA, 75 bp, synthetic construct
  source 1..75: mol_type = other DNA
acaagtacgactggctgccctcagaccccgctgtggatgaggcccttctcatcaacgaatataccttcaccgaag

SEQ ID NO: 298947 - DNA, 75 bp, synthetic construct
  source 1..75: mol_type = other DNA
ggatgatgactgggacgaagacgacgaagaagcgttgagttcatttacaagcgttaatcagcaaaaccccggcca

SEQ ID NO: 298948 - DNA, 75 bp, synthetic construct
  source 1..75: mol_type = other DNA
gccaaacgcgggtaaatcgacctttattcgcgcggtatcggcggctaaaccgaaagtggcggattatccgtttac

SEQ ID NO: 298949 - DNA, 75 bp, synthetic construct
  source 1..75: mol_type = other DNA
agcagcttgaagagattgctgaagaggatgatgaggactgggatgatgactgggacgaagacgacgaagaaggcg

SEQ ID NO: 298950 - DNA, 75 bp, synthetic construct
  source 1..75: mol_type = other DNA
tagcaatattaggggcgtggtatacgctggactgagtcgtgatattagaaaagaactggtcggtgatgctgccaa

SEQ ID NO: 298951 - DNA, 75 bp, synthetic construct
  source 1..75: mol_type = other DNA
atggaagagccgtgcatctggttcagcggattctgcagccagggggacggagcctgttttgaaggacgctggcac

SEQ ID NO: 298952 - DNA, 75 bp, synthetic construct
  source 1..75: mol_type = other DNA
tcgtatcgcggatgccctgcaggcggtgcagaaacgtaacttctggcaactgcaggctgaaatccaccaccgggg

SEQ ID NO: 298953 - DNA, 75 bp, synthetic construct
  source 1..75: mol_type = other DNA
catcgcagccgcagccgcgaccacgtgcgagcacaactattaatgaccagtcgctggatgctctgcttgaggatt

SEQ ID NO: 298954 - DNA, 75 bp, synthetic construct
  source 1..75: mol_type = other DNA
cggtaatcatcgggagtaaaaaagccggtttgattcaaactatcctgggcgcagtattagtgattgcatcgatct

SEQ ID NO: 298955 - DNA, 75 bp, synthetic construct
  source 1..75: mol_type = other DNA
ttgaagagatagctgcgacatctagtccgattgcaaccacaccatctcaatttcaaagtaatagcaaattcttat

SEQ ID NO: 298956 - DNA, 75 bp, synthetic construct
  source 1..75: mol_type = other DNA
atgaatcgcacatcgcttattaaattaatccatgtcgcccgtcgggagctacaactcgacgacgacacctaccgt

SEQ ID NO: 298957 - DNA, 75 bp, synthetic construct
  source 1..75: mol_type = other DNA
gaactggcgaatgatatctacctgaatggtgaattattcgcgcgggtagatgctgtctggcagcggcgcgaaacg

SEQ ID NO: 298958 - DNA, 75 bp, synthetic construct
  source 1..75: mol_type = other DNA
ttctggctctcgaaaagagcggggaattactcactcgtgttaccagcgtcttctttgccatgacctcggcgcata

SEQ ID NO: 298959 - DNA, 75 bp, synthetic construct
  source 1..75: mol_type = other DNA
ggatgccaggtctgagtatagctgccagcaatatgatgtttgctgctggtgcgtccataacgctggggggggtag

SEQ ID NO: 298960 - DNA, 75 bp, synthetic construct
  source 1..75: mol_type = other DNA
ggcgggagctgcgcggctatgatgcactgaccagtgcgtatgcccgcgcacgaaacagcgggagaattgctgtat

SEQ ID NO: 298961 - DNA, 75 bp, synthetic construct
  source 1..75: mol_type = other DNA
atgagtcgcacatccctgattaaattaattcatgtcgcccgtcgggagctacaactcgacgacgacacttaccgc

SEQ ID NO: 298962 - DNA, 75 bp, synthetic construct
  source 1..75: mol_type = other DNA
tctgtactgatgcgagtgacgggaaagcaaagctgtcgtgacctgagagtcggccaactggaggatgtgctgaag

SEQ ID NO: 298963 - DNA, 75 bp, synthetic construct
  source 1..75: mol_type = other DNA
ctggcatttcaggataatcggggttatgacgccatcaacagcctgtattccagtaaagtaagaaaggtgcgcaca

SEQ ID NO: 298964 - DNA, 75 bp, synthetic construct
  source 1..75: mol_type = other DNA
cgcagagcactctgccatatatggctccccattttgatctgattgagaataaccactatcgcccggcattcgacg

SEQ ID NO: 298965 - DNA, 75 bp, synthetic construct
  source 1..75: mol_type = other DNA
cctgctggtggtgaacctggtgtatgccttcttcgaccccttcccggtgatcgacgccgccacgtccggcgggcc

SEQ ID NO: 298966 - DNA, 75 bp, synthetic construct
  source 1..75: mol_type = other DNA
ccgccgttgccgccgtattgtggatcttcctgtttaaccccggtcgcgggctgatcacccattttctcgctgagt

SEQ ID NO: 298967 - DNA, 75 bp, synthetic construct
  source 1..75: mol_type = other DNA
ataaaattcagcacctttgtcaccgtcagcggtttgctggtgtcgctgttcttcgcggcgctggtggagtacatc

SEQ ID NO: 298968 - DNA, 75 bp, synthetic construct
  source 1..75: mol_type = other DNA
gtaaaatcgatctggttgcccggcagggcggagatgagtttatccttattctgccggatatttatgtgcgtaaag

SEQ ID NO: 298969 - DNA, 75 bp, synthetic construct
  source 1..75: mol_type = other DNA
atcactgtgacgaggcgcaagggtatttcatcgggaagcctgtcgcgcttgatgcgttaaatttggcactgttgc

SEQ ID NO: 298970 - DNA, 75 bp, synthetic construct
  source 1..75: mol_type = other DNA
gttcacgctgccggaaaatattctgaagggagagttgaggccattaaatttcaattcaaacaatgaattattgcc

SEQ ID NO: 298971 - DNA, 75 bp, synthetic construct
  source 1..75: mol_type = other DNA
ggtaacagcgaagatctggaacgcctgtatcgacaatggcgcggtaaggctcctcagattatgccgatgctgcaa

SEQ ID NO: 298972 - DNA, 75 bp, synthetic construct
  source 1..75: mol_type = other DNA
gtctggtggttgataatgttcaacaactggcgggaatgagcgagcaagatattgcgctggcggcagaggcggcgc

SEQ ID NO: 298973 - DNA, 75 bp, synthetic construct
  source 1..75: mol_type = other DNA
ttttgtccttgccggagccagactggatgaagccgataaagcaaaattaaaagtactgaataccgaagcggcgac

SEQ ID NO: 298974 - DNA, 75 bp, synthetic construct
  source 1..75: mol_type = other DNA
agcaccgatattcgcatagcaccagtgatggaaggggcaaaaaaagctggtttgttccagacgatattgggtgct

SEQ ID NO: 298975 - DNA, 75 bp, synthetic construct
  source 1..75: mol_type = other DNA
atgcgggaaattgttccggcggcgcgtcagcgtgcgagcgatgaattagcgtctattcaggcgattatcggaaaa

SEQ ID NO: 298976 - DNA, 75 bp, synthetic construct
  source 1..75: mol_type = other DNA
cctgaccagccagtttaaccagcggttactggcagcaaataaatccggcggtctggttctggacgatattgcgca

SEQ ID NO: 298977 - DNA, 75 bp, synthetic construct
  source 1..75: mol_type = other DNA
gataaagttattcctgagctgaaactgtggcaacaacgtccgctggaagcggtctatccctttgtctggctggat

SEQ ID NO: 298978 - DNA, 75 bp, synthetic construct
  source 1..75: mol_type = other DNA
cctacaaatattcgttttttcctgttaagcaatacaactccggcatacagccatggtcagcaattttcggttggt

SEQ ID NO: 298979 - DNA, 75 bp, synthetic construct
  source 1..75: mol_type = other DNA
aatcgcttaaggcactccagtccggccaagcattaaccggcaaggatggtatcctaacgccattaatcaaacagt

SEQ ID NO: 298980 - DNA, 75 bp, synthetic construct
  source 1..75: mol_type = other DNA
taatttccgtctgaataacctgcaaacatggaattttcaggagtgtccagagtgtaactggcattcagtaatcta

SEQ ID NO: 298981 - DNA, 75 bp, synthetic construct
  source 1..75: mol_type = other DNA
atgtgaacttataaaaactcatcaccggagtgaattttcggatcatgggttacagttgatgagagctgtagcaca

SEQ ID NO: 298982 - DNA, 75 bp, synthetic construct
  source 1..75: mol_type = other DNA
tcgaagcatcacaaggcgtttatggctgatttaaaaccggtttatcgtgcggtatcaaaagaggcagcggaaatt

SEQ ID NO: 298983 - DNA, 75 bp, synthetic construct
  source 1..75: mol_type = other DNA
agccgcaagaatccgtttggcgatatcaaatcggacggcacggtgaaaacggctctcgaaaaccttggtttgggg

SEQ ID NO: 298984 - DNA, 75 bp, synthetic construct
  source 1..75: mol_type = other DNA
gaggcggtggacgcgcaggcgctggcggtggtgttagcggtaaggcatatggttcaggtggcggtggtgcatacg

SEQ ID NO: 298985 - DNA, 75 bp, synthetic construct
  source 1..75: mol_type = other DNA
tgccggttgcccgcccgtcatgggagcattctcgtctggaatcacgcattgtgcatctcggttgcggggcgtttc

SEQ ID NO: 298986 - DNA, 75 bp, synthetic construct
  source 1..75: mol_type = other DNA
gcacccttaaccgggttcgcgccagcgttaaattcacctcccattctgaactgaatgtgtccgcctcatttctgg

SEQ ID NO: 298987 - DNA, 75 bp, synthetic construct
  source 1..75: mol_type = other DNA
atgactttgattaatacacagatcggcaaactgtccgatggtgtggagtttaacggcatcattcataaaaacttt

SEQ ID NO: 298988 - DNA, 75 bp, synthetic construct
  source 1..75: mol_type = other DNA
ggaacaaaacggatcagggtcacaataacgggcggcggtggcggagggggcggctgtaaggctatatccaataat

SEQ ID NO: 298989 - DNA, 75 bp, synthetic construct
  source 1..75: mol_type = other DNA
atgtcaattataaaaaactgcttatcattaattaataatgcattaaatatacaaaaaacatcatattctctgaca

SEQ ID NO: 298990 - DNA, 75 bp, synthetic construct
  source 1..75: mol_type = other DNA
ttgttgttgcgcaggaattattgcctggcgcagatatcgtccccgccgctacctgaaaagctggatatcagcgag

SEQ ID NO: 298991 - DNA, 75 bp, synthetic construct
  source 1..75: mol_type = other DNA
gtgatgggggcgggcgatattacagatgcacaacgggagtggcttttacgacgacgggcatattgcatggcgcag

SEQ ID NO: 298992 - DNA, 75 bp, synthetic construct
  source 1..75: mol_type = other DNA
agctgcagatgagaccctgaagcgtatgggaattgcagatctgtcagaagagatgttcagaaaaagaccatcata

SEQ ID NO: 298993 - DNA, 75 bp, synthetic construct
  source 1..75: mol_type = other DNA
tgcacattggccactggtcagttggttacccgaacgcaatttcaacgtgtttatgtttgattatcgtgggtttgg

SEQ ID NO: 298994 - DNA, 75 bp, synthetic construct
  source 1..75: mol_type = other DNA
ggattttaccggacggctgatgtcggttctggctgatggcgtactggtggcgatggtgatggtcgttctctggcc

SEQ ID NO: 298995 - DNA, 75 bp, synthetic construct
  source 1..75: mol_type = other DNA
atgtcggtgctggcagatggtgtgctggtggcgatggcgctggccgtactctggcctttactgcgtaaatctgaa

SEQ ID NO: 298996 - DNA, 75 bp, synthetic construct
  source 1..75: mol_type = other DNA
accaacgccatatctggcacccatacacatccatgacctcccctctgccggtttatccggtggtgagcgccgaag

SEQ ID NO: 298997 - DNA, 75 bp, synthetic construct
  source 1..75: mol_type = other DNA
gatatagcaaaagaagagcacagaaatgcactaaatttcatgataatggaaaaaaacacatttcatgaaaaaatc

SEQ ID NO: 298998 - DNA, 75 bp, synthetic construct
  source 1..75: mol_type = other DNA
aattcaaggccatcaaaacacagttgccagtgtcatggattggtataatcccaaaaaaaatgctttgggtataac

SEQ ID NO: 298999 - DNA, 75 bp, synthetic construct
  source 1..75: mol_type = other DNA
ataaaattctggtggatgagtttttgagtacgcagaagagagcactggaagcagtggatgatctgatcgcactga

SEQ ID NO: 299000 - DNA, 75 bp, synthetic construct
  source 1..75: mol_type = other DNA
cttttatgggcaatccgctggcctgcgcggcagcaaacgccagcctggcgattctcgaatctggcgactggcagc

SEQ ID NO: 299001 - DNA, 75 bp, synthetic construct
  source 1..75: mol_type = other DNA
tgcgcgtactgggggccattggcgtggtcgaaaccactcgcccggtgaatatggcggcgctgcaaaaattctttg

SEQ ID NO: 299002 - DNA, 75 bp, synthetic construct
  source 1..75: mol_type = other DNA
gagaaagtggttactgacgacggttcggaatctacggccccccctgtggagaaagaaaccgagagtggaaaggaa

SEQ ID NO: 299003 - DNA, 75 bp, synthetic construct
  source 1..75: mol_type = other DNA
aacaatgcaacatgagcgattagcgaaagcggtatcgatgaccgattttctgatgctggcacttccttgccatgc

SEQ ID NO: 299004 - DNA, 75 bp, synthetic construct
  source 1..75: mol_type = other DNA
tgcacgctggatattttaagtgaaacgccgctggaagtggtttatagcccaacgttctccgcgctgcctcccgcg

SEQ ID NO: 299005 - DNA, 75 bp, synthetic construct
  source 1..75: mol_type = other DNA
tcccacgagctgcgaactccgctcaatggcgttattggctttacccgtctgacgctgaaaacagaattaacacca

SEQ ID NO: 299006 - DNA, 75 bp, synthetic construct
  source 1..75: mol_type = other DNA
agaagatttggagccagagcttctggaactgctggacgagatggataatgtggcgcgcgaagccagcaaaattct

SEQ ID NO: 299007 - DNA, 75 bp, synthetic construct
  source 1..75: mol_type = other DNA
ttgaacgttcggcaaataacttactggcaatcattaacgatgtcctcgacttctcaaaactggaagctggcaaac

SEQ ID NO: 299008 - DNA, 75 bp, synthetic construct
  source 1..75: mol_type = other DNA
ccactgcgattacagcaaatcatcactaacctggtggggaatgcaattaaattcaccgagaatggcaacattgat

SEQ ID NO: 299009 - DNA, 75 bp, synthetic construct
  source 1..75: mol_type = other DNA
gtgatctccatcgtatcgcggatgccctgcaggcggtgcagaaacgtaacttctggcagttacaggctgaaatca

SEQ ID NO: 299010 - DNA, 75 bp, synthetic construct
  source 1..75: mol_type = other DNA
gtgaactccatcgtatcgcggatgccctgcaggcggttcagaaacgtaacttctggcagttacaggctgaaatca

SEQ ID NO: 299011 - DNA, 75 bp, synthetic construct
  source 1..75: mol_type = other DNA
aatggaatagtattttggagtattgctactggaagtatacttcagcaactaaaagagagagattgagtcaagatg

SEQ ID NO: 299012 - DNA, 75 bp, synthetic construct
  source 1..75: mol_type = other DNA
gttctgttcaaaataaaaatacagatgttctcacatcatttgataattcagatagtggtaaatctgtaactgaca

SEQ ID NO: 299013 - DNA, 75 bp, synthetic construct
  source 1..75: mol_type = other DNA
gtgagcttcatcgtatcgcggatgccctgcaggcggtccagaaacgtaacttctggcagttacaggctgaaatca

SEQ ID NO: 299014 - DNA, 75 bp, synthetic construct
  source 1..75: mol_type = other DNA
gtgacctacatcgtatcgcggatgccctgcaggcggttcagaaacgtaacttctggcagttacaggctgaaatca

SEQ ID NO: 299015 - DNA, 75 bp, synthetic construct
  source 1..75: mol_type = other DNA
acttattattcttatcttaagaaaactctttatgcgggaaatgttcgagttttgggtaatgctgccaacttactg

SEQ ID NO: 299016 - DNA, 75 bp, synthetic construct
  source 1..75: mol_type = other DNA
atgaacttaatatattctcttcgttacagtagagctgctggctgtttaatcgcggtttctgaactcacaaaaaag

SEQ ID NO: 299017 - DNA, 75 bp, synthetic construct
  source 1..75: mol_type = other DNA
aaactaatcaaaccagcgtgatgcctgagaaaactgacgcttacgggagttctcggtttagcattgctcctatgc

SEQ ID NO: 299018 - DNA, 75 bp, synthetic construct
  source 1..75: mol_type = other DNA
ggcgttgcagttgggtggaagcgatccggcggcgctggcgcaatgtgcgaagctggcacaagcgcgcggatacga

SEQ ID NO: 299019 - DNA, 75 bp, synthetic construct
  source 1..75: mol_type = other DNA
caacagtccaatgaagaagggtcaacgcaagcctttagtagcgttaacatcgcagggggcacatcgtctgttatt

SEQ ID NO: 299020 - DNA, 75 bp, synthetic construct
  source 1..75: mol_type = other DNA
gcttgttgatgatgtgttccagggggctggttatttaagattcttagacaactatacagtcacagccataaacaa

SEQ ID NO: 299021 - DNA, 75 bp, synthetic construct
  source 1..75: mol_type = other DNA
gtgatggcgataactattatagtattgtagatcgtaataacgcacctgaccttgactttcatataccaagactaa

SEQ ID NO: 299022 - DNA, 75 bp, synthetic construct
  source 1..75: mol_type = other DNA
tgaccgtgggcgagactatgaagattcgcgcgacgacggttggcaacgccaggtgagcgacgatcgtcgcaagca

SEQ ID NO: 299023 - DNA, 75 bp, synthetic construct
  source 1..75: mol_type = other DNA
atatgacgaccgccgccgccagtttgaagatcgccgcaggcagctggacgatcgccagcgccagcttgatcagga

SEQ ID NO: 299024 - DNA, 75 bp, synthetic construct
  source 1..75: mol_type = other DNA
aggataagaaatctgatcgtgcgacagttaaccggaaatacatcaacgagcttgaaacccagatctgcaccgatt

SEQ ID NO: 299025 - DNA, 75 bp, synthetic construct
  source 1..75: mol_type = other DNA
cggcggtagatcgagagatctttggttcctcggataccgatgccgatccggtggcggtggtgcgtgctatgtacc

SEQ ID NO: 299026 - DNA, 75 bp, synthetic construct
  source 1..75: mol_type = other DNA
gcgtaccagaatccggggattctggcggcggtagatcgagagatctttggttcctcggataccgatgccgatccg

SEQ ID NO: 299027 - DNA, 75 bp, synthetic construct
  source 1..75: mol_type = other DNA
atgcacggtaattctgaaatgcaaaaaatcaaccaaaccagcgcaatgcctgaaaaaactggagtttactggaat

SEQ ID NO: 299028 - DNA, 75 bp, synthetic construct
  source 1..75: mol_type = other DNA
attccgtcagggggagggcgggccaggctgccggggcttcaacggcggctaattttattctcgcagcgccgatgg

SEQ ID NO: 299029 - DNA, 75 bp, synthetic construct
  source 1..75: mol_type = other DNA
taagttcttcgatgcggttaacaagacgtttgctccagaaaacgtgaagtatgacgtagtggatagcttcagtaa

SEQ ID NO: 299030 - DNA, 75 bp, synthetic construct
  source 1..75: mol_type = other DNA
tccagcctgacgggcgtgatggcgcagcgactggtccgcacgctgtgcaccgactgccgccaggctgcgcctgcc

SEQ ID NO: 299031 - DNA, 75 bp, synthetic construct
  source 1..75: mol_type = other DNA
tatgggtctgcgtcaatcccgatgaagaggatatcatcgagtctgctattggcgaaatcatacctggaaccctaa

SEQ ID NO: 299032 - DNA, 75 bp, synthetic construct
  source 1..75: mol_type = other DNA
tctatcaatcatactcgcgaactgaacccttcagtcttccttactgcgcatttatcatcccatgattgccctgat

SEQ ID NO: 299033 - DNA, 75 bp, synthetic construct
  source 1..75: mol_type = other DNA
tcaggatagctggtgacaattactttctctatatcaaacgattgtctgccaatgatactggcgcaacaggtggac

SEQ ID NO: 299034 - DNA, 75 bp, synthetic construct
  source 1..75: mol_type = other DNA
cgacatacagcagaaaacggtgcagccactgatggcagccctgtgccttgcggacaatatcaccctgagcttcag

SEQ ID NO: 299035 - DNA, 75 bp, synthetic construct
  source 1..75: mol_type = other DNA
tctgagcgcctgcgatgacaggagtgatgacctgaaggccatcagcaaattcaaggatctcacgcctccgcgctt

SEQ ID NO: 299036 - DNA, 75 bp, synthetic construct
  source 1..75: mol_type = other DNA
aaggaagatgcgggtgtgaaaacgatagccaggtttaaggacctgactccgccaccgttcagcaaggttgtgtcg

SEQ ID NO: 299037 - DNA, 75 bp, synthetic construct
  source 1..75: mol_type = other DNA
atggcgcctgtagcacaggaaaccacggctaacgccgtgcgcctgccctacagtttcagccgtcggtttagcctg

SEQ ID NO: 299038 - DNA, 75 bp, synthetic construct
  source 1..75: mol_type = other DNA
cgtggtggatgccacattgcgtgatttgatccaccgtcaggccggggaactggagctggaacgttatgtccggca

SEQ ID NO: 299039 - DNA, 75 bp, synthetic construct
  source 1..75: mol_type = other DNA
cgtctggttcgtcgactgtgtccgcaatgccgacaattcacgcccgtatcaccccaacaagcgcagatgtttaaa

SEQ ID NO: 299040 - DNA, 75 bp, synthetic construct
  source 1..75: mol_type = other DNA
tgaccgtcggcgtgtcgagtatgatatttttctactcgtcgaggaattacatgttcttgatattattaagaaagg

SEQ ID NO: 299041 - DNA, 75 bp, synthetic construct
  source 1..75: mol_type = other DNA
gggaacttggcccgggtttacccgtcatggacatgaagaacatgccggcaaaaccgctagggaaggtgcgaacaa

SEQ ID NO: 299042 - DNA, 75 bp, synthetic construct
  source 1..75: mol_type = other DNA
ttgatcgcaggtctgtttggtagtgctattaccgggatgatggctgccctgcccgtaagttggatccagatgctg

SEQ ID NO: 299043 - DNA, 75 bp, synthetic construct
  source 1..75: mol_type = other DNA
acgctggtcgggattggttctgcgttctggggattaattgccggaggcgtttgttacgtggtgttgaatttaatc

SEQ ID NO: 299044 - DNA, 75 bp, synthetic construct
  source 1..75: mol_type = other DNA
gaaccgctggttttccagtcgggtacaaaaagtgcagggctggagctggttgatatatatctctggatcttcaaa

SEQ ID NO: 299045 - DNA, 75 bp, synthetic construct
  source 1..75: mol_type = other DNA
gtaagaaaggaattttacctgtccacgaagtgcgtggccagaggaatagtaaatctatttattattcaaaatcgg

SEQ ID NO: 299046 - DNA, 75 bp, synthetic construct
  source 1..75: mol_type = other DNA
catggacatgaagaacatgccggcaaaaccgctggtcttccagtcgggcacgaaaagcgcggggctggagctggt

SEQ ID NO: 299047 - DNA, 75 bp, synthetic construct
  source 1..75: mol_type = other DNA
ttcagtgacggtgtccgcacccagctggcgaacggtcaggcactgaaagaggctcagtgcagctgcggggccagc

SEQ ID NO: 299048 - DNA, 75 bp, synthetic construct
  source 1..75: mol_type = other DNA
catgtcgtactggctgtgcaagccttcgtcgaggccaaaactcagcaagcggaatttactcatttaatctggcag

SEQ ID NO: 299049 - DNA, 75 bp, synthetic construct
  source 1..75: mol_type = other DNA
acgatactgagtttcccgtagaaaatctgcgcatgctggcagtcaagactacctgtaaggatcgctggcgtcaga

SEQ ID NO: 299050 - DNA, 75 bp, synthetic construct
  source 1..75: mol_type = other DNA
caagaagaacgtcaggctaaactggaagccttccgccagaaactgttagaagatggcattgatccggcagaactc

SEQ ID NO: 299051 - DNA, 75 bp, synthetic construct
  source 1..75: mol_type = other DNA
acaatattcgtacacttcgcgcacatgctcgtgaaacagatctgacaactctggaagagatgctggaaaagctct

SEQ ID NO: 299052 - DNA, 75 bp, synthetic construct
  source 1..75: mol_type = other DNA
agatggcatagacccggcagagttgctttcaactgttagcccatcttcttccaagacaggagcgaaacgcgcccc

SEQ ID NO: 299053 - DNA, 75 bp, synthetic construct
  source 1..75: mol_type = other DNA
ttgccgttctgaccgttatcggtgcaatgagtgcctctggctgcgacagcaaggaagatgctggcgtgaaagcga

SEQ ID NO: 299054 - DNA, 75 bp, synthetic construct
  source 1..75: mol_type = other DNA
taacattgatgataaaagcgagcaggaatctctgatggggaagattaggcagcttgagaagcattttagtcttta

SEQ ID NO: 299055 - DNA, 75 bp, synthetic construct
  source 1..75: mol_type = other DNA
agcggcagctatgaacaacttaaaaatgatcttggtctgaacagcggtgcgtggcgttctgaagccgatatgttg

SEQ ID NO: 299056 - DNA, 75 bp, synthetic construct
  source 1..75: mol_type = other DNA
caacaacaactaagccgcagcccatttctataccggagcttccacaacctggagtattagcactgactcccagta

SEQ ID NO: 299057 - DNA, 75 bp, synthetic construct
  source 1..75: mol_type = other DNA
tgaaggcgtattctggactgcgaatcagctcttcggtattaagtttgtcgaacgttttgatattcctgtctacca

SEQ ID NO: 299058 - DNA, 75 bp, synthetic construct
  source 1..75: mol_type = other DNA
ccttacagttcgggcgcgacacacaaggccggacgcaccaaccagggcagccacgcaaaatatctgaacggcgag

SEQ ID NO: 299059 - DNA, 75 bp, synthetic construct
  source 1..75: mol_type = other DNA
cggaagcccaagctctcagcctgacgatggttccccgtcgtattccgcccagagaagtctttctcaagctcgatg

SEQ ID NO: 299060 - DNA, 75 bp, synthetic construct
  source 1..75: mol_type = other DNA
gcgatgcgtgaggcgggttatatccccgtgcgcacccgtaaattgaccgggaagctggcaagttactggctgtat

SEQ ID NO: 299061 - DNA, 75 bp, synthetic construct
  source 1..75: mol_type = other DNA
aactagctggttacccgccagaagtgcaaaacttggtagtcgcacttacgctggatctgttttacgcgcagatgc

SEQ ID NO: 299062 - DNA, 75 bp, synthetic construct
  source 1..75: mol_type = other DNA
gttccattgccccaaagattggctgtacaccagagactctgcgtgtgtgggttcgccagcatgagcgggataccg

SEQ ID NO: 299063 - DNA, 75 bp, synthetic construct
  source 1..75: mol_type = other DNA
cttgatttcaggtgactcccgtttactgtttaacatcgaaggtccaggagcagaggaaggattaacactgcctct

SEQ ID NO: 299064 - DNA, 75 bp, synthetic construct
  source 1..75: mol_type = other DNA
aaacgagatatcagtgtcctggttcaggttctaccggggcagtcacaagttgagctggagtttatcttccagggt

SEQ ID NO: 299065 - DNA, 75 bp, synthetic construct
  source 1..75: mol_type = other DNA
ggaaataaactagaaattgcaccggagcaatttcttacctacgtccaatgtaataatatccagcttattccggta

SEQ ID NO: 299066 - DNA, 75 bp, synthetic construct
  source 1..75: mol_type = other DNA
acaccacataccgggtatttccggcatcagtgtgaatacatcgtctggggcagcaaaggccatttagataaatcg

SEQ ID NO: 299067 - DNA, 75 bp, synthetic construct
  source 1..75: mol_type = other DNA
gggtacaccgtgcgccttaatcaggatgttgaatcccagcagcttgcccgctcgcatttgcaggaagctatcagg

SEQ ID NO: 299068 - DNA, 75 bp, synthetic construct
  source 1..75: mol_type = other DNA
ggttgaatacctgcgccaggcggcagtgttgaacccgaaaaaagcaggcgtaacccgtgatattgagcttctgca

SEQ ID NO: 299069 - DNA, 75 bp, synthetic construct
  source 1..75: mol_type = other DNA
gtggaacaaaggaagggggtcacgaacaccccatacggggtatttccggcatcagtgcgaatacatcgtctgggg

SEQ ID NO: 299070 - DNA, 75 bp, synthetic construct
  source 1..75: mol_type = other DNA
aactggctaaagaagttgcaaaagacgctctgtacagtgcccaggaggtaagagcgattcatgaccggctggaga

SEQ ID NO: 299071 - DNA, 75 bp, synthetic construct
  source 1..75: mol_type = other DNA
aattatcaccgacaacggtattttcagcagtgtaacggagatggaaaaacgtctggcgcgaaaggttttacggga

SEQ ID NO: 299072 - DNA, 75 bp, synthetic construct
  source 1..75: mol_type = other DNA
ctgatcttaaccaagcgcattcatgcagagcgtccctgggcgcatattgcccatttcatggagaaattcttcgta

SEQ ID NO: 299073 - DNA, 75 bp, synthetic construct
  source 1..75: mol_type = other DNA
ggtcaggcagggacaattctggctagacgatattcagcattgtttccgtatcgagccaggtaaaccacaaatcac

SEQ ID NO: 299074 - DNA, 75 bp, synthetic construct
  source 1..75: mol_type = other DNA
cgaagtttatgaataccaacactggcatcatcggtacgatgggaaccgggaaaacgcaatttaccaaatcgctgg

SEQ ID NO: 299075 - DNA, 75 bp, synthetic construct
  source 1..75: mol_type = other DNA
ctgctgggtaccgctatctgtagccgaaatgattcgcgtatctggtaacgtcgggctaaagatgaaggaaagcga

SEQ ID NO: 299076 - DNA, 75 bp, synthetic construct
  source 1..75: mol_type = other DNA
aaccagtgatcattattttgaggtagcagcgcagcggcttcgggggactattaccacaaccatttcgactacata

SEQ ID NO: 299077 - DNA, 75 bp, synthetic construct
  source 1..75: mol_type = other DNA
ccggcttgatgccgttcgtttaccacagtgaacacgaatacgcacagttgcaaccggtggaagaaaatcgcttct

SEQ ID NO: 299078 - DNA, 75 bp, synthetic construct
  source 1..75: mol_type = other DNA
tattccaaagccgacaccagaggtcagcactgtacccttacaagtattatttggtcatgacgctacacggcaaac

SEQ ID NO: 299079 - DNA, 75 bp, synthetic construct
  source 1..75: mol_type = other DNA
attgcccgtcaggagagcgcctggaatccgaaagtgaaatcaccggtaggggccagcggcctgatgcagattatg

SEQ ID NO: 299080 - DNA, 75 bp, synthetic construct
  source 1..75: mol_type = other DNA
gctgaagattgataaagcgccgcagaatgttgacagcgccctgactcaggggccggagatggcgcgcgtgcgcga

SEQ ID NO: 299081 - DNA, 75 bp, synthetic construct
  source 1..75: mol_type = other DNA
gtaatcgggcagtatgggcgtgacggtatcagcctggcagaagcgcgagaagaactgattgctgcaaagaagctg

SEQ ID NO: 299082 - DNA, 75 bp, synthetic construct
  source 1..75: mol_type = other DNA
acgcggacgtgaagctgaagcgaaagagattttgcatcaactcatgcaacagcgtggtttctacccgatggttgc

SEQ ID NO: 299083 - DNA, 75 bp, synthetic construct
  source 1..75: mol_type = other DNA
gtagtcgttacgcgcaaatcaagcaggcctgggataatcgacaaatggatgtggtcgaacaaatgatgcctggac

SEQ ID NO: 299084 - DNA, 75 bp, synthetic construct
  source 1..75: mol_type = other DNA
tcagcggaatgcctttagtgaaccgccccgggtttcctggagagtgttttatctgtgaactcaggctgccagatc

SEQ ID NO: 299085 - DNA, 75 bp, synthetic construct
  source 1..75: mol_type = other DNA
gaattgtgggattcagggattaatgccggattgctcaattataacttcaccgggaatagcgtgcagaatagcatt

SEQ ID NO: 299086 - DNA, 75 bp, synthetic construct
  source 1..75: mol_type = other DNA
ctccacggccttccagctggctggacaatatatggtggaacgcaactggcagatcgttatcgtgcttttaatttt

SEQ ID NO: 299087 - DNA, 75 bp, synthetic construct
  source 1..75: mol_type = other DNA
gattcagtggtgcaaaaatcacggggccaaaaacgaaaatattaaaacattaccggcgaagcggaatgagcagga

SEQ ID NO: 299088 - DNA, 75 bp, synthetic construct
  source 1..75: mol_type = other DNA
gaatgtgtatttatcagcaacttaccttaatacgctggccagtaaaaacgagaaggtcaacgatgacgccattat

SEQ ID NO: 299089 - DNA, 75 bp, synthetic construct
  source 1..75: mol_type = other DNA
attgagcatcttgccctcctgaaacggcgggcagaagaggctgaagccagcggcaacctgcaggtgagcgtggaa

SEQ ID NO: 299090 - DNA, 75 bp, synthetic construct
  source 1..75: mol_type = other DNA
ttgataattgcgtttgctttatcttccatcctattctatacaatagaaaagccttttgttaatctaggaagaaag

SEQ ID NO: 299091 - DNA, 75 bp, synthetic construct
  source 1..75: mol_type = other DNA
gccgctaatgccgggacatttttaagcagtcagccagatagcgatgcgacacgtaactttattaccggaatggcc

SEQ ID NO: 299092 - DNA, 75 bp, synthetic construct
  source 1..75: mol_type = other DNA
aggtgacctatacgccagtgcctcttctgacactgagcgccgggcataagcagggcaagagtggtgagaatgaca

SEQ ID NO: 299093 - DNA, 75 bp, synthetic construct
  source 1..75: mol_type = other DNA
tatctggtgcagaaaatatagtaaaaaatgatgcagcccatttctgtgttactcagggcaaaaaaatgcagatag

SEQ ID NO: 299094 - DNA, 75 bp, synthetic construct
  source 1..75: mol_type = other DNA
gcagggtatcagtgcaataaggtcaacggcgtatatcccgctcaattcagccgttcatttaacgtcttctgcgat

SEQ ID NO: 299095 - DNA, 75 bp, synthetic construct
  source 1..75: mol_type = other DNA
atgaaaaagattgttgcgatatttctgggggttagcatgtccaattgcgtgctggcgggtgatggttcgcctgaa

SEQ ID NO: 299096 - DNA, 75 bp, synthetic construct
  source 1..75: mol_type = other DNA
ggcatgctggtggtgtttgctgtgctttttatcgcctgtgccatttttgtcccaaatttgccaccttcattaata

SEQ ID NO: 299097 - DNA, 75 bp, synthetic construct
  source 1..75: mol_type = other DNA
gacgtcagacgttaatgctggagttgcaggaagcaagccgtttaccggaacgtctgggcgatgattttgttcgcg

SEQ ID NO: 299098 - DNA, 75 bp, synthetic construct
  source 1..75: mol_type = other DNA
ttccttccgcatttttaaggatgataatacaggcgggtttgatttttatttgttttctgttttaggtaataatgc

SEQ ID NO: 299099 - DNA, 75 bp, synthetic construct
  source 1..75: mol_type = other DNA
ccagcggttttattgctattcccctggttgacagcgtcacgctggtggtacttttttcgcactcatcaactgcgc

SEQ ID NO: 299100 - DNA, 75 bp, synthetic construct
  source 1..75: mol_type = other DNA
aagagagatgccagtataaatctaaatggaaaggttagtgattgcaatggggaaatcatatggtgtcgacatata

SEQ ID NO: 299101 - DNA, 75 bp, synthetic construct
  source 1..75: mol_type = other DNA
atgttaataatgttcctgggttgcttttagctctacaaaatggacatgataatgtaattgatgaatatggtactt

SEQ ID NO: 299102 - DNA, 75 bp, synthetic construct
  source 1..75: mol_type = other DNA
tatagatttagagtatttgctttcagcatttaaatatgaggcacatagctctaataaatatactcctggattatt

SEQ ID NO: 299103 - DNA, 75 bp, synthetic construct
  source 1..75: mol_type = other DNA
tggtggcgatgtctctgtggcataaccatccacagaagacaaagctgccgtccatgaatgaagccattacgcaga

SEQ ID NO: 299104 - DNA, 75 bp, synthetic construct
  source 1..75: mol_type = other DNA
atttggcctgacggatgccaatgcaccctgtacgcatgcttggatggaaaatggaaaacgctacgaagttaacta

SEQ ID NO: 299105 - DNA, 75 bp, synthetic construct
  source 1..75: mol_type = other DNA
agtcattctttttccaggtaatgaaaaaaggaaatattattcaaaatcagaccttagtctttaccttaaaaatga

SEQ ID NO: 299106 - DNA, 75 bp, synthetic construct
  source 1..75: mol_type = other DNA
ctttagttgaaaacatattcaaatcggttaagtcgctaacatttgagttacgaaagcatctcaaatacttacgtt

SEQ ID NO: 299107 - DNA, 75 bp, synthetic construct
  source 1..75: mol_type = other DNA
cgttaaaatgttgaccgcaccaatacgcagacatcttacctatctacgggcaaagtcttttgatgattacctgcc

SEQ ID NO: 299108 - DNA, 75 bp, synthetic construct
  source 1..75: mol_type = other DNA
ctggccgacatcgaaaaacggttacatcaactcaaggcaatacaagcacaatggcagcgtcgagctaaaactcaa

SEQ ID NO: 299109 - DNA, 75 bp, synthetic construct
  source 1..75: mol_type = other DNA
gccaacctgcatacttttgacgatcgggatgatgtagccagattcatcgaggcgtcatttgctgacggtctattt

SEQ ID NO: 299110 - DNA, 75 bp, synthetic construct
  source 1..75: mol_type = other DNA
gtctcgatatggagcagttcaaagtcctatccgataaccagctacgcacgagagaaatggttctgaaagcacgac

SEQ ID NO: 299111 - DNA, 75 bp, synthetic construct
  source 1..75: mol_type = other DNA
ttctgcctagcctcaaagggacttttggctctaacccaaccgaaggggaaagggctgcccttatgcaatctcaaa

SEQ ID NO: 299112 - DNA, 75 bp, synthetic construct
  source 1..75: mol_type = other DNA
gggatataactgcaaaaccggtaaacaaaagctgcagatcatgcccaatatggttggatttcagttcgtattgcg

SEQ ID NO: 299113 - DNA, 75 bp, synthetic construct
  source 1..75: mol_type = other DNA
ctggagagataaaagtggaaggtgaaattcgtactttagctcaattatttgcccttgagcaccataaaaacaaag

SEQ ID NO: 299114 - DNA, 75 bp, synthetic construct
  source 1..75: mol_type = other DNA
ccaatttgacccggaaagccctggaaacaatagccctcaaacacaaggacaggctggatgatacagccactgatg

SEQ ID NO: 299115 - DNA, 75 bp, synthetic construct
  source 1..75: mol_type = other DNA
ttggttcgaagagaatctggcagcagattttgcagaatcatgggatagtcttgtctggatatgtgggaaaaaagg

SEQ ID NO: 299116 - DNA, 75 bp, synthetic construct
  source 1..75: mol_type = other DNA
gcatagaaaacagggtaggccagggtagaccagtgccaattttattaggtgaaatgaaagttggttcaaacgtcg

SEQ ID NO: 299117 - DNA, 75 bp, synthetic construct
  source 1..75: mol_type = other DNA
acgacgtgaagcgcggtttgcgaaacggcgttgctccttacataccagcggccttttgccgggatgccaggagcg

SEQ ID NO: 299118 - DNA, 75 bp, synthetic construct
  source 1..75: mol_type = other DNA
acgacgtgaagcgcggtttgcgaaacggcgttgctccttacatacctgcggccttttgctgggatgcccggagcg

SEQ ID NO: 299119 - DNA, 75 bp, synthetic construct
  source 1..75: mol_type = other DNA
cagtaaccggaagtttactgtggaagacgtcatcagaaccggcgcttttgtggtggcgatgtccctgtggcataa

SEQ ID NO: 299120 - DNA, 75 bp, synthetic construct
  source 1..75: mol_type = other DNA
acgacgtgaagcgcggtttgcgaaacggcgttgctccttacataccagcggccttttgcagggatgcccggagcg

SEQ ID NO: 299121 - DNA, 75 bp, synthetic construct
  source 1..75: mol_type = other DNA
tgccgaaagagtggacaattaaccgaggactgtatgcctctttccgctatgaaggtgaagtggtcaacaaaaact

SEQ ID NO: 299122 - DNA, 75 bp, synthetic construct
  source 1..75: mol_type = other DNA
agaatgaacggcagtgatattgagcggttttattacaatgaagatttcgtagaaaaggatagcaatgatgttgtt

SEQ ID NO: 299123 - DNA, 75 bp, synthetic construct
  source 1..75: mol_type = other DNA
atcgcaggaagggattgtgatgaaaaaaattgcgtagtggctgttaataacaaatatccagacggaacgacaatt

SEQ ID NO: 299124 - DNA, 75 bp, synthetic construct
  source 1..75: mol_type = other DNA
aaaatatggatcttcctgctataccgccacgctatcgcagcagttattttgcccatatcttcggcggcggctacg

SEQ ID NO: 299125 - DNA, 75 bp, synthetic construct
  source 1..75: mol_type = other DNA
cgttattttacggtgatttcttcgcccgtgattcaaaaagcggcggtgcatggatgggcaattttgttgagcaat

SEQ ID NO: 299126 - DNA, 75 bp, synthetic construct
  source 1..75: mol_type = other DNA
acggtgaattattcgcgcgggtagatgctgtctggcagcgccgtgaatccctggggcttgatagtgaatccatcc

SEQ ID NO: 299127 - DNA, 75 bp, synthetic construct
  source 1..75: mol_type = other DNA
gatggcattctattattgaagctatttaatttcgttaatgggacgaaaattaaacggcatagttttgattatagt

SEQ ID NO: 299128 - DNA, 75 bp, synthetic construct
  source 1..75: mol_type = other DNA
ctacactattggtggtactgactacactaacgtcggtgatgctctggcagccattaacacatcatttagcacatc

SEQ ID NO: 299129 - DNA, 75 bp, synthetic construct
  source 1..75: mol_type = other DNA
tcaaactggctacaccgcctacaacatggacgcaccacagaactctgtgggtgagttctctgtcggcagtgaaga

SEQ ID NO: 299130 - DNA, 75 bp, synthetic construct
  source 1..75: mol_type = other DNA
tcaaaggataaaacgaccagtaatatgattataacgcatgtaatggatcatgagtttgtttgtaagctaatcgat

SEQ ID NO: 299131 - DNA, 75 bp, synthetic construct
  source 1..75: mol_type = other DNA
gaaacgaagcaatacaccgatcagcggatggttgagatggataacaaactgtctaaaactgaaagcaagttgagc

SEQ ID NO: 299132 - DNA, 75 bp, synthetic construct
  source 1..75: mol_type = other DNA
ggtagcactaagtacttcaagaccaacaccgatggcgcagatgccaacgcgcagggtaaagacagtgttgcgatt

SEQ ID NO: 299133 - DNA, 75 bp, synthetic construct
  source 1..75: mol_type = other DNA
accaccaacgacaacgtgacgaccaacaccaccaacatcgccactaacaccaccaatatcaccaacctgactgac

SEQ ID NO: 299134 - DNA, 75 bp, synthetic construct
  source 1..75: mol_type = other DNA
agcaggcggcgttcgctacgacaccaaagctgatggctctatcgactacagcaacatcactctcggtggtggtaa

SEQ ID NO: 299135 - DNA, 75 bp, synthetic construct
  source 1..75: mol_type = other DNA
caccgatggcgcagatgccaacgcgcagggtaaagacagtgttgcgattggttctggttccattgctgccgctga

SEQ ID NO: 299136 - DNA, 75 bp, synthetic construct
  source 1..75: mol_type = other DNA
tgattacaccgcctacaacatggacgcaccgcagaattctgtcggtgaattctctgtcggcagtgaagacggtca

SEQ ID NO: 299137 - DNA, 75 bp, synthetic construct
  source 1..75: mol_type = other DNA
ttggcgaaggcagcactgacgccatcaacggttctcagctgtttaacaccaatatgctgatccagcagaacagcg

SEQ ID NO: 299138 - DNA, 75 bp, synthetic construct
  source 1..75: mol_type = other DNA
cagcagcgacgctattaacggctcacagctctatgacaccagcaagtacattgccgatactctgggtggtgacgc

SEQ ID NO: 299139 - DNA, 75 bp, synthetic construct
  source 1..75: mol_type = other DNA
gaacactggtcacaattaaccgcaaagcggcaattgcccgctatgtgcattcagccgctggcagacaatcacgca

SEQ ID NO: 299140 - DNA, 75 bp, synthetic construct
  source 1..75: mol_type = other DNA
gcttcaacgctggcaaccaccggtttctccaccctgtggggctacgcgcaactgctggtggtgctggttggctgt

SEQ ID NO: 299141 - DNA, 75 bp, synthetic construct
  source 1..75: mol_type = other DNA
gtcggtgccctgaaagccgtagcgccagttctggtaatgatgctggttatggcttccatcgctaatcaccaacac

SEQ ID NO: 299142 - DNA, 75 bp, synthetic construct
  source 1..75: mol_type = other DNA
tctccacactgtggggctacgcgcaactgctggtcgtgctggttggctgtatgttactggtggcgctggtggtta

SEQ ID NO: 299143 - DNA, 75 bp, synthetic construct
  source 1..75: mol_type = other DNA
gttcaacagcattgggttgatcttgctaaacgtgcgccaacagaaaaaaatccgtcacgtacagagttggagcgt

SEQ ID NO: 299144 - DNA, 75 bp, synthetic construct
  source 1..75: mol_type = other DNA
actgatgcgggagtggaccctgctgatagcccaaaagtacaggagcttaaaaagcaactggcggctatggcatcc

SEQ ID NO: 299145 - DNA, 75 bp, synthetic construct
  source 1..75: mol_type = other DNA
aaaccgcgctgaactcttcaactgacgtgttattcaccgcagcagcgtgccaggctgaagatactcgcctggcga

SEQ ID NO: 299146 - DNA, 75 bp, synthetic construct
  source 1..75: mol_type = other DNA
ttaattaacagccaatttcaatatataggtaacacggcggagggtatgcagttacggctgggatatacagcccgt

SEQ ID NO: 299147 - DNA, 75 bp, synthetic construct
  source 1..75: mol_type = other DNA
tgattataacgcatgtaatggatcatgagtttgtctgtaggttaatcgatctggcgatgaggaatgctgagaagc

SEQ ID NO: 299148 - DNA, 75 bp, synthetic construct
  source 1..75: mol_type = other DNA
atttcggcaataaccagatgccacgcacttacatttcaatgagctttgtagtggcattttcagttctgattatat

SEQ ID NO: 299149 - DNA, 75 bp, synthetic construct
  source 1..75: mol_type = other DNA
tcttctaccctggcaaccaccggtttctccacactgtggggctacgcgcaactgctggtcgtgctggttggctgt

SEQ ID NO: 299150 - DNA, 75 bp, synthetic construct
  source 1..75: mol_type = other DNA
cgaaaacttcgggcgcactagtgacggggtggagttcggcggcggcacggggaatggtgaatattgggatccaaa

SEQ ID NO: 299151 - DNA, 75 bp, synthetic construct
  source 1..75: mol_type = other DNA
cgcggagccggaattcttgcgcacagcattcgaagatccaaacaacgccgacgatatttataaagagattgtaga

SEQ ID NO: 299152 - DNA, 75 bp, synthetic construct
  source 1..75: mol_type = other DNA
atggctcacaactttatagtttagctgattcatttacgtcataccttggcggtggtgctgatatcaacaatgcgg

SEQ ID NO: 299153 - DNA, 75 bp, synthetic construct
  source 1..75: mol_type = other DNA
aatacgacgcttctgccggagaaatattttagttggttaaaagaaaatgaaagagcgacgttctggctatggggc

SEQ ID NO: 299154 - DNA, 75 bp, synthetic construct
  source 1..75: mol_type = other DNA
tcctgtcattgagcgccaaacaagagaagagattcttccgtaccttggtttcagacatattactggtgtcaaaca

SEQ ID NO: 299155 - DNA, 75 bp, synthetic construct
  source 1..75: mol_type = other DNA
agccctgttcaggcgcgggcgttattacaacaacgtccggcgaagggctgggaagatgtcgatcagtttcttgca

SEQ ID NO: 299156 - DNA, 75 bp, synthetic construct
  source 1..75: mol_type = other DNA
gcgggaaataaagtcgccgtcgcccgtgttgaactgcacaatgaagaacagctttatattgccagtgccaccgcc

SEQ ID NO: 299157 - DNA, 75 bp, synthetic construct
  source 1..75: mol_type = other DNA
ctaaaaaccgtcctgagcgtggacagcaattacttctggctgcgttcagatatcaccgtgaatgagattgaactg

SEQ ID NO: 299158 - DNA, 75 bp, synthetic construct
  source 1..75: mol_type = other DNA
agctgaaagcctgtgggagtttattgacgaggaccgcagcatacagacacgtctgggccgtgaagacagcgagta

SEQ ID NO: 299159 - DNA, 75 bp, synthetic construct
  source 1..75: mol_type = other DNA
acccaggcactttgtaccggaccagtggatgccgtcattatgggaagttttaaagtttttatatgcggcaaacca

SEQ ID NO: 299160 - DNA, 75 bp, synthetic construct
  source 1..75: mol_type = other DNA
atatatatagagccaagaaaaaaaatggaatactagggggaaatctcaaatataagtgtgcttatgaaagatttg

SEQ ID NO: 299161 - DNA, 75 bp, synthetic construct
  source 1..75: mol_type = other DNA
gtcgctggctacagaaatgtacgacatggctgtggcagcatcgctgacacaagaacgggggcgagtggctgcggt

SEQ ID NO: 299162 - DNA, 75 bp, synthetic construct
  source 1..75: mol_type = other DNA
accatcacgctttccgggcggatgcagcaacaacttgggcgaacgcgcagccagcaggagtaccagcaggcgctg

SEQ ID NO: 299163 - DNA, 75 bp, synthetic construct
  source 1..75: mol_type = other DNA
gaatggcactggtcgtggtgctggtattgctggcggttatgatgctggtaaccatcacgctttccgggcggatgc

SEQ ID NO: 299164 - DNA, 75 bp, synthetic construct
  source 1..75: mol_type = other DNA
gatgatgatcacatattttatgtgacagttgctgattatattaaatgggtccaggttaagtctgatgctgcttat

SEQ ID NO: 299165 - DNA, 75 bp, synthetic construct
  source 1..75: mol_type = other DNA
gactctttatatcccaatcaacaaagatgggtcagtccattatgcgtacccagaagtagtctgtatggctattct

SEQ ID NO: 299166 - DNA, 75 bp, synthetic construct
  source 1..75: mol_type = other DNA
tgcccggagttttcaccgggggcgtggtgtacacgaaaaacacggccttcgggcaggtgctccgcacactcgaac

SEQ ID NO: 299167 - DNA, 75 bp, synthetic construct
  source 1..75: mol_type = other DNA
aaaaccaccattacagatatactcaacagacggccgggaaatgaacataagagctggattgtctcagttcgtacc

SEQ ID NO: 299168 - DNA, 75 bp, synthetic construct
  source 1..75: mol_type = other DNA
tgtggctggactttgccgaggatcaggcccgtcgtcgtcagcaagtctttttgcgcgactggcaggataagctgg

SEQ ID NO: 299169 - DNA, 75 bp, synthetic construct
  source 1..75: mol_type = other DNA
gaattattatttattcaaaatacagagctaacgaatttaacagagatgatgtatacagagagagttacagcctaa

SEQ ID NO: 299170 - DNA, 75 bp, synthetic construct
  source 1..75: mol_type = other DNA
cagacgcgcaatttatcgttactgccatgcgcggcgaaataaaacgccgccagcgccgcaagaccaaagaagcgg

SEQ ID NO: 299171 - DNA, 75 bp, synthetic construct
  source 1..75: mol_type = other DNA
tcatacccgtttcagacgcgaagacatccccgcgccggaaattgaccccgtgctgaaagccttcgggcgacacat

SEQ ID NO: 299172 - DNA, 75 bp, synthetic construct
  source 1..75: mol_type = other DNA
ctgttggcaattaccgggccggggcgatttctctcgatcgccgttaggaaagatgccggatgtggcgtgaacgcc

SEQ ID NO: 299173 - DNA, 75 bp, synthetic construct
  source 1..75: mol_type = other DNA
atggcaacgaaagcagttaatggaaaatccaaaaaacttgaggcacgagtcccccatgcaatagctgacgctgta

SEQ ID NO: 299174 - DNA, 75 bp, synthetic construct
  source 1..75: mol_type = other DNA
gttcctgctggacacttcattgtattcaatgaaattgccggtttaatggtagacctcatccatgctggattagca

SEQ ID NO: 299175 - DNA, 75 bp, synthetic construct
  source 1..75: mol_type = other DNA
cgaaagcgcaatttattgttaccgctgtaaaaggcgagattaaacgccgacagcgcaggaaaaataagctagagc

SEQ ID NO: 299176 - DNA, 75 bp, synthetic construct
  source 1..75: mol_type = other DNA
ttggtgctgcccgccccgttttgttattaattgcccgtatcgccgtggtcttaattttcattatttttggttttc

SEQ ID NO: 299177 - DNA, 75 bp, synthetic construct
  source 1..75: mol_type = other DNA
caaatatgattaatttctggaagaatgtcagtatcgctggcgcattcctgctgttggcaattaccgggccggggg

SEQ ID NO: 299178 - DNA, 75 bp, synthetic construct
  source 1..75: mol_type = other DNA
gtttacgcctgcgatcactatgtttatccgcaatatcggctggggaatatgcaccagcaaacaattgcagaaatg

SEQ ID NO: 299179 - DNA, 75 bp, synthetic construct
  source 1..75: mol_type = other DNA
tgctgctggatgacgaatggtgcgcgtttctcgcggagcatcattttcttgttggtttatcgctggatggcccgc

SEQ ID NO: 299180 - DNA, 75 bp, synthetic construct
  source 1..75: mol_type = other DNA
gtttatccgcaatatcgactggggaatatgcttcagcagacaattgcagaaatggtagattccccgcaacagcag

SEQ ID NO: 299181 - DNA, 75 bp, synthetic construct
  source 1..75: mol_type = other DNA
gcatgcgcctggtgatattcagggtgagctaacggaatggtcggtgcgccccgaggagttcggtgaatttctggt

SEQ ID NO: 299182 - DNA, 75 bp, synthetic construct
  source 1..75: mol_type = other DNA
aaaatatggtgcaggcaggcgggtaagtaacagcttccagactaacggcgtgctgctggatgacgaatggtgtgc

SEQ ID NO: 299183 - DNA, 75 bp, synthetic construct
  source 1..75: mol_type = other DNA
tcctgcaaaaacatcatgtcgactataacgtgctggtctgcgtcaatcgcaccagtgcgttacaacctttgcaag

SEQ ID NO: 299184 - DNA, 75 bp, synthetic construct
  source 1..75: mol_type = other DNA
aaaagatgtgctgctgttaggtgctggtagtgtcctgctaaaatatgacctgaaaaaacatttgaatatcaggac

SEQ ID NO: 299185 - DNA, 75 bp, synthetic construct
  source 1..75: mol_type = other DNA
agcgaatggctggagaacgtgcgggcttatgagaaagaaattttgagtcgccgcgggcaaacactgccggatgcg

SEQ ID NO: 299186 - DNA, 75 bp, synthetic construct
  source 1..75: mol_type = other DNA
ggcaggcggtctgggaaatgtattgccaacgtcacgataccccagtgggtagcgaatggctggaaagcgtgcggg

SEQ ID NO: 299187 - DNA, 75 bp, synthetic construct
  source 1..75: mol_type = other DNA
gtggtcgagcgcctggctgatgaaacggctgctcatgctggacttaagctacatgctcccggcgatattcagggc

SEQ ID NO: 299188 - DNA, 75 bp, synthetic construct
  source 1..75: mol_type = other DNA
gaccaaaggtggcagaccaacgcataagctggtgatgcgtgccctgacgctgctgcaaaaacatcatgtcgacta

SEQ ID NO: 299189 - DNA, 75 bp, synthetic construct
  source 1..75: mol_type = other DNA
gaatgcaagtcaccttattgctcctggcgacagtgttgttggttggttttgttgtgacctggctatgggcaccag

SEQ ID NO: 299190 - DNA, 75 bp, synthetic construct
  source 1..75: mol_type = other DNA
ggcgattttcgaccactggattaagcgcgacgtcggcaagattttcgtaatgaatatcgaatgggcgttcgccaa

SEQ ID NO: 299191 - DNA, 75 bp, synthetic construct
  source 1..75: mol_type = other DNA
aaaatgaaaagattacaaagaatgcttgagaaaatggcatgtgaccgggtttcgccagaagatctaaaggaatga

SEQ ID NO: 299192 - DNA, 75 bp, synthetic construct
  source 1..75: mol_type = other DNA
atatgtataaaaaaatccaagcggaagccgcaaccactgacatcaaaacacttgaacagcttttgaaaaagttca

SEQ ID NO: 299193 - DNA, 75 bp, synthetic construct
  source 1..75: mol_type = other DNA
ttaatggacacagaaatattattctgtggcaattttatgatgctgctcatgttcgtcataaagacagttataatc

SEQ ID NO: 299194 - DNA, 75 bp, synthetic construct
  source 1..75: mol_type = other DNA
aatttggccttctggaagccggttacaaagccgatttaaccatttgcgattacaactcgccgacaccgctgctgg

SEQ ID NO: 299195 - DNA, 75 bp, synthetic construct
  source 1..75: mol_type = other DNA
tctgtcgaaagaggatatcgccctgcttaatcagcatgacgcgttcctggtacataacgcccgctccaacatgaa

SEQ ID NO: 299196 - DNA, 75 bp, synthetic construct
  source 1..75: mol_type = other DNA
cacagcgtgatggtcaacggtgtgatggtctatgaagaccgtcagtttaacttcgattgcgattccatttatgca

SEQ ID NO: 299197 - DNA, 75 bp, synthetic construct
  source 1..75: mol_type = other DNA
atccacggtaaagcgatgccgcagttgctggaagaatttatcgacaccatcgttgagtttgccaacggtaagcaa

SEQ ID NO: 299198 - DNA, 75 bp, synthetic construct
  source 1..75: mol_type = other DNA
ggttgcagatggctggcgtgcccaatcaggtatccagtgcactctcgggcgcattgctaattgtcgttgtcgtag

SEQ ID NO: 299199 - DNA, 75 bp, synthetic construct
  source 1..75: mol_type = other DNA
atgactcgtttacatcgttacggctgggaactggcgctcgccgcgctactgatgattgaaattctgggattcggc

SEQ ID NO: 299200 - DNA, 75 bp, synthetic construct
  source 1..75: mol_type = other DNA
caccgtgctgaccgaagtaccagagatgttcggcgcggaacagcttctgatgagccattgccgtgacgaagcgac

SEQ ID NO: 299201 - DNA, 75 bp, synthetic construct
  source 1..75: mol_type = other DNA
acgcgttcatttcatgatctgccaacagcaggatgatgagatcgaagccgggatcgcgcatttgcatcagttgta

SEQ ID NO: 299202 - DNA, 75 bp, synthetic construct
  source 1..75: mol_type = other DNA
taaatttgcgttaacggatatcgcaaaaggggccaacgtcattaaatatggcctgccgattggttatgcattggc

SEQ ID NO: 299203 - DNA, 75 bp, synthetic construct
  source 1..75: mol_type = other DNA
cctgtttttcgcatccgctaagcgccgatggctttacgctttcccatgccgacgaccgcattcgccagttctgga

SEQ ID NO: 299204 - DNA, 75 bp, synthetic construct
  source 1..75: mol_type = other DNA
tggtgcttaacctcgataaatgtatcggctgccatacctgttcggtgacctgtaacaacgtctggaccggacgcg

SEQ ID NO: 299205 - DNA, 75 bp, synthetic construct
  source 1..75: mol_type = other DNA
ggttacccgaaaaactgggaagatcaggatgagtggcaaggcggctgggtgcgtgatgtgaatggcaagatacgc

SEQ ID NO: 299206 - DNA, 75 bp, synthetic construct
  source 1..75: mol_type = other DNA
tggctggcgtttgtgcataagcggttgtccgtcaaaaaaatctacttcaactggaaaagcggcaagtcagaaaaa

SEQ ID NO: 299207 - DNA, 75 bp, synthetic construct
  source 1..75: mol_type = other DNA
tatggctggattatctggacgcactggaactggttgatccctccagtgctccagatattgaatggcctacgcctc

SEQ ID NO: 299208 - DNA, 75 bp, synthetic construct
  source 1..75: mol_type = other DNA
tgcattggcggatttgaaaaaaagaaaacttattaatgaagccaacgagcacatgaacagcagacaatggccagg

SEQ ID NO: 299209 - DNA, 75 bp, synthetic construct
  source 1..75: mol_type = other DNA
gcgaacactgcctcaatcccagctgcgtggcgacctgcccaagcggcgctatctacaaacgcgaagaagacggca

SEQ ID NO: 299210 - DNA, 75 bp, synthetic construct
  source 1..75: mol_type = other DNA
gaactgccgaacggtcagcgctggaaccctggccacatgtacaaattcaatggccagcagccgcgtcgcccgtgg

SEQ ID NO: 299211 - DNA, 75 bp, synthetic construct
  source 1..75: mol_type = other DNA
ttaccttgcctagagtaaaaaaagctatttttacaactgattggaagtatggaaaagcactaagctgtaatccag

SEQ ID NO: 299212 - DNA, 75 bp, synthetic construct
  source 1..75: mol_type = other DNA
tgaaaatgaatatgagcgactttatttaattaataaacagttaggtcttatcgatgcagggacaattatttggga

SEQ ID NO: 299213 - DNA, 75 bp, synthetic construct
  source 1..75: mol_type = other DNA
atgaagttcagggtatgaaggaaaaagataaggccgctgataaaaaagagaacttcaaaaaagaattcagctttg

SEQ ID NO: 299214 - DNA, 75 bp, synthetic construct
  source 1..75: mol_type = other DNA
aactacgaaatggatattgcgacggattccgccggtgccactgagcgtaaaaacatcgatttagttgaaactttc

SEQ ID NO: 299215 - DNA, 75 bp, synthetic construct
  source 1..75: mol_type = other DNA
taatctctgtatgaaatttatcaatgttgaaatgggtactcatttcaatacagtagttattccaagattgaagaa

SEQ ID NO: 299216 - DNA, 75 bp, synthetic construct
  source 1..75: mol_type = other DNA
acctgcaaaacaccgatgccgccgccggtatgaccaaagaactggcgcaggaaggggaaattaccgaacgtgata

SEQ ID NO: 299217 - DNA, 75 bp, synthetic construct
  source 1..75: mol_type = other DNA
gtttgcaatgatggccagaaaatttggtaaacaacttattgtcgctgtaagtgaaaaggatgccatcaaattaaa

SEQ ID NO: 299218 - DNA, 75 bp, synthetic construct
  source 1..75: mol_type = other DNA
cacaattatttttaattgtgttgggtggtctgatttagggacgaagtcagccgtatcacagtttgtaatgatggc

SEQ ID NO: 299219 - DNA, 75 bp, synthetic construct
  source 1..75: mol_type = other DNA
gcctaaaaagcaactagaaaacgcaatggaaaattgtattggtatagatattggggagtcgacactaatacactc

SEQ ID NO: 299220 - DNA, 75 bp, synthetic construct
  source 1..75: mol_type = other DNA
cgattacactgcgcgtctggcgctactggaagagcagaaatcgttgtcgtggggcggtatgggaaatgtattgtc

SEQ ID NO: 299221 - DNA, 75 bp, synthetic construct
  source 1..75: mol_type = other DNA
cgtcgcatcaggcgttacatacctgatgcggctacttagcgacgaaatccgtaatacacttcgttccagcgcagc

SEQ ID NO: 299222 - DNA, 75 bp, synthetic construct
  source 1..75: mol_type = other DNA
ccggcacccttgctcgcatgaaggtgcccggcatgtcagcggaagcggtggctaaggctgacgcgccaatagcgg

SEQ ID NO: 299223 - DNA, 75 bp, synthetic construct
  source 1..75: mol_type = other DNA
gcaaagttggcgcggcgtgctgccgtgtgctgattgcgaagggatcgaaacctctttgtttcttgaaaaagacgg

SEQ ID NO: 299224 - DNA, 75 bp, synthetic construct
  source 1..75: mol_type = other DNA
accgatagcaaaggtgaaaagtcatattatcgcgcgaaaggagatgcgctggagatgctcgatcgtgaaggtaat

SEQ ID NO: 299225 - DNA, 75 bp, synthetic construct
  source 1..75: mol_type = other DNA
atgaaaggtgcaagagatatcagtcccttgggaattaggattccagactatttaaagaaacgcattcagcaggaa

SEQ ID NO: 299226 - DNA, 75 bp, synthetic construct
  source 1..75: mol_type = other DNA
tgcgttcatatgaatatcacaatgctgcacgacggtacgttggttgctctctttcgcagccgttgggcagacaac

SEQ ID NO: 299227 - DNA, 75 bp, synthetic construct
  source 1..75: mol_type = other DNA
agcaaccgaattgcccaacaacaattcgtctattcaggtaacgacgcttgccagcggcgaactggcgctggtgta

SEQ ID NO: 299228 - DNA, 75 bp, synthetic construct
  source 1..75: mol_type = other DNA
cactttacgcttgaggctaatccggataccggtgcgccgaccaaagtattagcgcccgatacggcgggtaaattt

SEQ ID NO: 299229 - DNA, 75 bp, synthetic construct
  source 1..75: mol_type = other DNA
atgagccatgtctggggactgttttcccatcccgatcgtgaaatgcaggtgattaatcgcgaaaacgaaacgatt

SEQ ID NO: 299230 - DNA, 75 bp, synthetic construct
  source 1..75: mol_type = other DNA
aattatcctgacttctcttgccattaaccgccgtctgtgggcgcatcacgactgcgacaatgctgcgctgacgca

SEQ ID NO: 299231 - DNA, 75 bp, synthetic construct
  source 1..75: mol_type = other DNA
tatttagttcacaagcggcaacgaatgacgatattgcaacgcttatacagaatgaaatcagcgggaatacacaat

SEQ ID NO: 299232 - DNA, 75 bp, synthetic construct
  source 1..75: mol_type = other DNA
gtgccgatgccgcaggcatcattctgacttcccttgtgattaaccgccagttgtggctgtaccacgacagcggta

SEQ ID NO: 299233 - DNA, 75 bp, synthetic construct
  source 1..75: mol_type = other DNA
aagaggaaggtcttagcttctccagttcgacgctggcgattggcgtactggtgctggaagtgctgctcgctatta

SEQ ID NO: 299234 - DNA, 75 bp, synthetic construct
  source 1..75: mol_type = other DNA
gatggcgcgtaattatccgcagcgtccgtcacttgcgcactgcatggtcttcgcgggctacgttgcaactccgct

SEQ ID NO: 299235 - DNA, 75 bp, synthetic construct
  source 1..75: mol_type = other DNA
ggcttgatcttaattacgggaaaaagaaaaaagtcagcgtgaaacgccgcaaaccgaaaaaagagaaaagcagca

SEQ ID NO: 299236 - DNA, 75 bp, synthetic construct
  source 1..75: mol_type = other DNA
cgagcacaccattgataacagcggctttaccacgcagcttgagcttgaagcaaaaatcccggagtggatagcaga

SEQ ID NO: 299237 - DNA, 75 bp, synthetic construct
  source 1..75: mol_type = other DNA
cccgcgaacctgcgaagaaagaaagtaccacggtgaagcgtaagcgcaggactaagaagcagaagaaagagccgg

SEQ ID NO: 299238 - DNA, 75 bp, synthetic construct
  source 1..75: mol_type = other DNA
gaagaaatcgactgtctgtcttttctgccttacctgtttggcaacgattttctgtatgccgaggcatctgtgtac

SEQ ID NO: 299239 - DNA, 75 bp, synthetic construct
  source 1..75: mol_type = other DNA
atgcagtatgcaaaatctgtcattctgaacgttgaagaactcgactgtctgtcttttctgccttacctgtttggc

SEQ ID NO: 299240 - DNA, 75 bp, synthetic construct
  source 1..75: mol_type = other DNA
actttgatgcatattgtcctcacgcatttcgcgcttttgcaggtattgatggtgctctttttgatgtttgtaatc

SEQ ID NO: 299241 - DNA, 75 bp, synthetic construct
  source 1..75: mol_type = other DNA
ggactgggtgttcagaaatggaaagaggcttttgccttgttttatcctcgatttggagcgggcaaaactgccagc

SEQ ID NO: 299242 - DNA, 75 bp, synthetic construct
  source 1..75: mol_type = other DNA
atgcaagattttaagtcctggctgaacaaacaggtggtgctgtgttcagtgctctggcaggaggaagtctctttt

SEQ ID NO: 299243 - DNA, 75 bp, synthetic construct
  source 1..75: mol_type = other DNA
gtcacaccgagagacattcagcgatggcgacgtcatatgcttaaagatcaggggcgttcagtaaacacctggaat

SEQ ID NO: 299244 - DNA, 75 bp, synthetic construct
  source 1..75: mol_type = other DNA
cgtgggaggaattactctttgagtacttccttgagaaaaatcttaaacctgatactgaacacagctaccgcaaag

SEQ ID NO: 299245 - DNA, 75 bp, synthetic construct
  source 1..75: mol_type = other DNA
gcagaagtaccacgaagaacaggcacacaaacacaacgcagcgctggccagaacactgaatgtcgtcaatcgcaa

SEQ ID NO: 299246 - DNA, 75 bp, synthetic construct
  source 1..75: mol_type = other DNA
tattcgtaacctgaccacaaaaacattcattactgaccgcatgattaaagtcttcctcggtcgtgatggtttacc

SEQ ID NO: 299247 - DNA, 75 bp, synthetic construct
  source 1..75: mol_type = other DNA
atagaaagttccttgacctatgcagtatcagggcttgtagtcgggcgagtaatatccttaattttgtcttttttg

SEQ ID NO: 299248 - DNA, 75 bp, synthetic construct
  source 1..75: mol_type = other DNA
atgcagtatgcgaaacctgtcactctgaacgttgaagagtgcgaccgtctctccttcctgccttatctgtttggc

SEQ ID NO: 299249 - DNA, 75 bp, synthetic construct
  source 1..75: mol_type = other DNA
ctgtgtacgcgctggcgaaacaaatgatgccggaatatgaaggcggattctggcacttcatccgcctgccggacg

SEQ ID NO: 299250 - DNA, 75 bp, synthetic construct
  source 1..75: mol_type = other DNA
tgtaccggatgcgtgatgcgcagttgtggagccacatcgaatttcaccccgaatgtaacgcgatttacgcggcgc

SEQ ID NO: 299251 - DNA, 75 bp, synthetic construct
  source 1..75: mol_type = other DNA
gaccgctgacgtgggatgagaaaggcgacctgaaaggctttgagttcggtgtatttgactggcacgccaacggca

SEQ ID NO: 299252 - DNA, 75 bp, synthetic construct
  source 1..75: mol_type = other DNA
ttttattcggctggtttctctggtgtctgcgttttcgcatcaaagcggcaatgatgttgtttgctcttcttgctg

SEQ ID NO: 299253 - DNA, 75 bp, synthetic construct
  source 1..75: mol_type = other DNA
gatgcgcgatgcgcagttgtggagccacatcgaatttcaccccgaatgcaacgcgatttacgcggcgctggactg

SEQ ID NO: 299254 - DNA, 75 bp, synthetic construct
  source 1..75: mol_type = other DNA
ccgtgaaaaatcgtggcataagaccaccgtcggggaagtggtgaaggaaatagccgctcggcacaagctgaagat

SEQ ID NO: 299255 - DNA, 75 bp, synthetic construct
  source 1..75: mol_type = other DNA
caggaaaacagtgaaaaactggccgccgatatgataatcagtcagaaacgcatgggaggcctgcaggccgtgcgt

SEQ ID NO: 299256 - DNA, 75 bp, synthetic construct
  source 1..75: mol_type = other DNA
caggaaaacagtgaaaaactggcagccgatatgatcatcagtcagaaacgcatgggaggcctgcaggccgtgcgt

SEQ ID NO: 299257 - DNA, 75 bp, synthetic construct
  source 1..75: mol_type = other DNA
caggaaaacagtgaaaaactggcagccgatatgataatcagtcagaaacgcatgggcggcctgcaggccgtgcgt

SEQ ID NO: 299258 - DNA, 75 bp, synthetic construct
  source 1..75: mol_type = other DNA
ggacaagggagcgttcatcgttgacgaggtgacacacgagggaccgccggacagactcaccattacggccagcag

SEQ ID NO: 299259 - DNA, 75 bp, synthetic construct
  source 1..75: mol_type = other DNA
gttaattttaatcgcaattgcaataaactctatttataacataatttatcagattatgttaataaaacaaaaagc

SEQ ID NO: 299260 - DNA, 75 bp, synthetic construct
  source 1..75: mol_type = other DNA
caggaaaacagtgaaaaactggcggccgatatgatgatcagtcagaaacgcatggggggcctgcaggccgtgcgt

SEQ ID NO: 299261 - DNA, 75 bp, synthetic construct
  source 1..75: mol_type = other DNA
ctggttaacagcgaaaggtcgccatgttcaggctgagaaagtcgttgcggcgtttgagaaagaagcgctgcagcg

SEQ ID NO: 299262 - DNA, 75 bp, synthetic construct
  source 1..75: mol_type = other DNA
taaaaataacacctgctccccctcaaaccagggcgataatcgcgcatcgcccttctgcacaatagtgcacaaatt

SEQ ID NO: 299263 - DNA, 75 bp, synthetic construct
  source 1..75: mol_type = other DNA
gaaatggacattatcgccgagctgctggaagagctggaaaccaaagacaacaggatcgctgaactggaaaaaatc

SEQ ID NO: 299264 - DNA, 75 bp, synthetic construct
  source 1..75: mol_type = other DNA
cattatcagccagaaacgcatgggtggcctgcaggcggtccgcgcgccgttcttcccggcaaatgccctgctgat

SEQ ID NO: 299265 - DNA, 75 bp, synthetic construct
  source 1..75: mol_type = other DNA
gcttacaccattatcgcgatagcttttgcgctaccgcaactcactcaggaatggggattaacaccaaccttcatc

SEQ ID NO: 299266 - DNA, 75 bp, synthetic construct
  source 1..75: mol_type = other DNA
ttattgtgttcgcagtcatcgcgttaataggcggcctggttacctatttgttcgctattgaaacgaagggaaaat

SEQ ID NO: 299267 - DNA, 75 bp, synthetic construct
  source 1..75: mol_type = other DNA
gtccttccttacacgcatggcggaaatgctgggcgcaatcaccacggtaaaaagcggtaatctgttattcatcat

SEQ ID NO: 299268 - DNA, 75 bp, synthetic construct
  source 1..75: mol_type = other DNA
agaccagatccagcagtccgccgctttcctgacactgattaacgtcacgccagtgactgagcagtccggtcagct

SEQ ID NO: 299269 - DNA, 75 bp, synthetic construct
  source 1..75: mol_type = other DNA
catggggggcctgcaggccgtgcgtgcgccgtttttcccgccgaatgcgctgctgatcacccgtctggataacct

SEQ ID NO: 299270 - DNA, 75 bp, synthetic construct
  source 1..75: mol_type = other DNA
ccgatctgatcatcagtcagaaacgcatgggcggcctgcaggccgttcgcgcgcctttcttcccggcaaatgcgc

SEQ ID NO: 299271 - DNA, 75 bp, synthetic construct
  source 1..75: mol_type = other DNA
ggccggggccgaaggtaacgtttttgttatccgtaaaaccttcaagacggaaaaggcggcgaagcgggccgctgc

SEQ ID NO: 299272 - DNA, 75 bp, synthetic construct
  source 1..75: mol_type = other DNA
gtggtatccgccatcgctcatcggtatggtctgaaaccgcaaatcagcgaaatgctgatggatatcgaaatcgac

SEQ ID NO: 299273 - DNA, 75 bp, synthetic construct
  source 1..75: mol_type = other DNA
tgaatctgttaacgaagcctatgtggttgaggactaccgctgcgctgcgctgcgctggtggaaaacatccagatt

SEQ ID NO: 299274 - DNA, 75 bp, synthetic construct
  source 1..75: mol_type = other DNA
tgcaaaagccgagcacaccattgataacagcggctttaccacgcagcttgagcttgaggcaaaaatcccggaatg

SEQ ID NO: 299275 - DNA, 75 bp, synthetic construct
  source 1..75: mol_type = other DNA
gcttgatcttaattacgggaaaaagaaaaagtcagcgtgaaacgccgcaaaccgccaaaaccgaaaaaagagaaa

SEQ ID NO: 299276 - DNA, 75 bp, synthetic construct
  source 1..75: mol_type = other DNA
aaagcggcaatctgttattcatcatgcctggtggtggcgtgaacgcacagggccagccgttgccctcgttcgcca

SEQ ID NO: 299277 - DNA, 75 bp, synthetic construct
  source 1..75: mol_type = other DNA
atgaccgacaccaccatgcaattgctcagtcaaggcacagaccctgtaaaaatgccggattttgatattctcgcg

SEQ ID NO: 299278 - DNA, 75 bp, synthetic construct
  source 1..75: mol_type = other DNA
cttacaacatcatgggctggcgttatcaggggatcgtgaaggcgctgaaagaaggcgatatccagaccgcgcaga

SEQ ID NO: 299279 - DNA, 75 bp, synthetic construct
  source 1..75: mol_type = other DNA
caacgcggagccgcatcattctccatcacgctggcacgtggacgcgcagaactctaccccgaaatgcatggcacg

SEQ ID NO: 299280 - DNA, 75 bp, synthetic construct
  source 1..75: mol_type = other DNA
atataaacaataagcttggtttcaatctttcactcggttctgaaacagaaaattataaagaacggtgcttttgta

SEQ ID NO: 299281 - DNA, 75 bp, synthetic construct
  source 1..75: mol_type = other DNA
tattggtaatgttcgttgggtagtggattctaattttgatgttatattgggccccgtagactataaaaaagcatt

SEQ ID NO: 299282 - DNA, 75 bp, synthetic construct
  source 1..75: mol_type = other DNA
acggtaaggacggaaagtatcatctcacattatttgataatggattgaccggggctgcaggggttcttcctgtcg

SEQ ID NO: 299283 - DNA, 75 bp, synthetic construct
  source 1..75: mol_type = other DNA
tggcatttgaatttcgtgctatgagttggagtgggcctgagtgggttgatgaacatatcacaatagcttcgaaac

SEQ ID NO: 299284 - DNA, 75 bp, synthetic construct
  source 1..75: mol_type = other DNA
ggagctgcaggggttcttcctgtagcatatacagaatggctgattgaaagaaaattacgttataacgatgatgct

SEQ ID NO: 299285 - DNA, 75 bp, synthetic construct
  source 1..75: mol_type = other DNA
atataaataacaagctcggttttaatatctcaattggctctgaaatagaaagtaaaaaagagcgatgcttttgta

SEQ ID NO: 299286 - DNA, 75 bp, synthetic construct
  source 1..75: mol_type = other DNA
ctgccctcacgaatcatggtaccctggccgcagggaaaaccctttccgtcacgtcgcaaaatgccatcaccaacg

SEQ ID NO: 299287 - DNA, 75 bp, synthetic construct
  source 1..75: mol_type = other DNA
aaccagcatggtgatatcctggccgacaacagtctgtgggtacagaaggacagcagcgggacggcaaacagcgaa

SEQ ID NO: 299288 - DNA, 75 bp, synthetic construct
  source 1..75: mol_type = other DNA
aatagcaggtaagctggtgctactgactgcgctgcgctatggcccggctggggtagcagggtgggcggtgaagtc

SEQ ID NO: 299289 - DNA, 75 bp, synthetic construct
  source 1..75: mol_type = other DNA
tcatctgggtcttcaagttcaggaacaagtccctcatcgtcctcttcctctgtgcgttcgcttcgttctaacgac

SEQ ID NO: 299290 - DNA, 75 bp, synthetic construct
  source 1..75: mol_type = other DNA
acagagttgcatatgggcttcctactccagtaagagaaacattagatgctcagttattgaactctttgaatatac

SEQ ID NO: 299291 - DNA, 75 bp, synthetic construct
  source 1..75: mol_type = other DNA
tgtcggggaatcgcgtgaccgttaacgccggcgataacctgacggtagagggttcggatgtggtggctgagccgg

SEQ ID NO: 299292 - DNA, 75 bp, synthetic construct
  source 1..75: mol_type = other DNA
taccttatgggcgttatttcaaagatggctgggtaaaacataaccaccttctgataacgtcggctgccaatacat

SEQ ID NO: 299293 - DNA, 75 bp, synthetic construct
  source 1..75: mol_type = other DNA
atggcgggtgaactggatgcgcggctggtttaccgtaaacgccttcgccgtccgctgagcgaatatcagcgtaat

SEQ ID NO: 299294 - DNA, 75 bp, synthetic construct
  source 1..75: mol_type = other DNA
atgaaaaagtatttattaatgatggtctgtttcgcactttcttcatcagccttagccgcagagaagtttaaagag

SEQ ID NO: 299295 - DNA, 75 bp, synthetic construct
  source 1..75: mol_type = other DNA
aatggccgctgacctttgagcatgcaaaggtatcttgtgtaaatagtcactacgtttttgtttatgacattgata

SEQ ID NO: 299296 - DNA, 75 bp, synthetic construct
  source 1..75: mol_type = other DNA
gaagcgccttactcaactctgcccagtattggtttgtgaattgaccgagcataaggaatggggcagttctccaga

SEQ ID NO: 299297 - DNA, 75 bp, synthetic construct
  source 1..75: mol_type = other DNA
tggttcagtctctgctcaatggcaacaaaatcctctgttgtggtaatggaacctccgctgccaatgcacagcatt

SEQ ID NO: 299298 - DNA, 75 bp, synthetic construct
  source 1..75: mol_type = other DNA
tggaaatccgcattccttcgcatcgtagtgctcgcattcaggaaatgcatatgctgacggtaaattgcctgtgcg

SEQ ID NO: 299299 - DNA, 75 bp, synthetic construct
  source 1..75: mol_type = other DNA
cgcggtgagcgtaacggagaaacatatccggtacaggacgatgcacactggctggaacgttatcagcaactctgg

SEQ ID NO: 299300 - DNA, 75 bp, synthetic construct
  source 1..75: mol_type = other DNA
gtcgagcaggtggctaatgacctggatgcgattctcgaaaaagggatgcgcgaagctgtacgtccgttgtgctaa

SEQ ID NO: 299301 - DNA, 75 bp, synthetic construct
  source 1..75: mol_type = other DNA
acggaaacaccggttaaagtgtcaggctttaagcgcgtcatagacgagcaggactggacaatcactaaggtgaca

SEQ ID NO: 299302 - DNA, 75 bp, synthetic construct
  source 1..75: mol_type = other DNA
atgaaacgtaaactctttttagctatgcttcttaccttttcttttggctccttagccgctgaaaaaacacaggat

SEQ ID NO: 299303 - DNA, 75 bp, synthetic construct
  source 1..75: mol_type = other DNA
catgaagatcaaccagcacgggccattgcgtaactcaggtgaattccaggttacctgctctgaaaccatcgaagg

SEQ ID NO: 299304 - DNA, 75 bp, synthetic construct
  source 1..75: mol_type = other DNA
taccacgcaagaaggaaactgtggtgatattaatcaggtcaactttgaacaagtagcagccctgctggtagggta

SEQ ID NO: 299305 - DNA, 75 bp, synthetic construct
  source 1..75: mol_type = other DNA
ggcaaagggttaagccgggcattaaaatagcaggtaagctggtgctactgactgcgctgcgctatggcccggctg

SEQ ID NO: 299306 - DNA, 75 bp, synthetic construct
  source 1..75: mol_type = other DNA
tcggcttggtgatgaaggtataaaagtctctgaccagtacaacaaagacgccgccgctatgcgtaaagcactgga

SEQ ID NO: 299307 - DNA, 75 bp, synthetic construct
  source 1..75: mol_type = other DNA
atcttttcggcatatcagatggcgttgtgtcggcaatagacttaatcactggtggcgttgagggattaggtaaag

SEQ ID NO: 299308 - DNA, 75 bp, synthetic construct
  source 1..75: mol_type = other DNA
atgtccaccagtttaggtacaatttattacgaagttgatgcaaaaactggtcaacttctagtcgctcagcgacag

SEQ ID NO: 299309 - DNA, 75 bp, synthetic construct
  source 1..75: mol_type = other DNA
gagtttatcgacatgtttgatgatgttgctgttaaagctggtgaggtggcggaagagattatcaggatggtaacg

SEQ ID NO: 299310 - DNA, 75 bp, synthetic construct
  source 1..75: mol_type = other DNA
ttgagtacaaggccgcgcagaaaggtataggcaaggaactgaaggacgaattggcgcaaatccctgttgatgagc

SEQ ID NO: 299311 - DNA, 75 bp, synthetic construct
  source 1..75: mol_type = other DNA
agtcgcagacttgaacagacgatggaacgcgtcgcgatgaaaatgatggcaagggaatcgcagcgacccggagga

SEQ ID NO: 299312 - DNA, 75 bp, synthetic construct
  source 1..75: mol_type = other DNA
cagggcgaggttgtcgagcgaggcagcaccgcggatgtgctggcatcgccgctgcatgaactcaccaaacggctg

SEQ ID NO: 299313 - DNA, 75 bp, synthetic construct
  source 1..75: mol_type = other DNA
atgaaataccacgtcagtgtgtgactcctggtgattatgttcttcatgaaggccggacatatatcgcctcggcaa

SEQ ID NO: 299314 - DNA, 75 bp, synthetic construct
  source 1..75: mol_type = other DNA
tgactacaaaaacatgcatttctgactgcatgattaaagtcttcctcggtcgtgatggtttacctgtaaaggcgg

SEQ ID NO: 299315 - DNA, 75 bp, synthetic construct
  source 1..75: mol_type = other DNA
aggggatcccaataccgccaattacaaaggacgttgtgtcagtctgcaaaaactggttaatcaccagtcattcac

SEQ ID NO: 299316 - DNA, 75 bp, synthetic construct
  source 1..75: mol_type = other DNA
agcaggatacggtggcctttgaagtggcgcagtttgtcgaaaaaccaaatctggaaaccgcgcaggcctatgtag

SEQ ID NO: 299317 - DNA, 75 bp, synthetic construct
  source 1..75: mol_type = other DNA
gctgcatgaactcaccaaacggctgatcgccggtcattttggcgaggcattgacggcggatgcgtggcgtaagga

SEQ ID NO: 299318 - DNA, 75 bp, synthetic construct
  source 1..75: mol_type = other DNA
caccggattcgacaagccagttgataagcctaaaaagggtaagaagactggcagcaagaaaagcaaagaggatac

SEQ ID NO: 299319 - DNA, 75 bp, synthetic construct
  source 1..75: mol_type = other DNA
gagtcaaatccggaagggtatgttatcagtcatatcttaggtcgtaatgcagctgaaatggtagctgttttttcc

SEQ ID NO: 299320 - DNA, 75 bp, synthetic construct
  source 1..75: mol_type = other DNA
atcaaacgcaaaaatgtacatgccacaaacaggcatgaatgaaatctccagtgcctcagtagaggccttgacaag

SEQ ID NO: 299321 - DNA, 75 bp, synthetic construct
  source 1..75: mol_type = other DNA
ttaatggccttaaaggtggtatgagcaatgcacttgttggcctgttaaacggtactcaatcattgagcgatgttt

SEQ ID NO: 299322 - DNA, 75 bp, synthetic construct
  source 1..75: mol_type = other DNA
ggcaaagggttaagcctggctttaaaatagcaggtaagctggtgcttctgaccgcgctgcgctacggcccggcgg

SEQ ID NO: 299323 - DNA, 75 bp, synthetic construct
  source 1..75: mol_type = other DNA
tcgataagattattaagcggtatcaggagcagaaaatgaagtgccataaggttattctggttacccattcaatgg

SEQ ID NO: 299324 - DNA, 75 bp, synthetic construct
  source 1..75: mol_type = other DNA
tgatgcgctacagacagcactgtaccgggataagcccacgagaaaagacaataccctgagtgcgacctatcagaa

SEQ ID NO: 299325 - DNA, 75 bp, synthetic construct
  source 1..75: mol_type = other DNA
gagtaatgcgcttgttggcctgttaaacggcactcaatcattgagtgatgtttttgctaacttaggaagcaatat

SEQ ID NO: 299326 - DNA, 75 bp, synthetic construct
  source 1..75: mol_type = other DNA
tgtttcagctatcgacttgatcacgaaaggcgttaaagggcttggcgatggcgctaaattcgctaaaacctgctt

SEQ ID NO: 299327 - DNA, 75 bp, synthetic construct
  source 1..75: mol_type = other DNA
gcgcaacagaaacaggcattgttagcctatgagcaacagatccgcgatctgaaatgggagcaatggcaggcgcaa

SEQ ID NO: 299328 - DNA, 75 bp, synthetic construct
  source 1..75: mol_type = other DNA
ccgtcggcaaggtcatgacgtttgcaaacgatattaaaaacgcgactgccgcttatgatgagttcatgcagaaac

SEQ ID NO: 299329 - DNA, 75 bp, synthetic construct
  source 1..75: mol_type = other DNA
caatgcgcttgttggcctgcttaacggtactcaatcattgagcgatgtttttgctaacttaggcagcaatatact

SEQ ID NO: 299330 - DNA, 75 bp, synthetic construct
  source 1..75: mol_type = other DNA
atatgatccctggcgagaacggcagagttattccgggccgtgatattggcggcggtggcggtattagtatgcctg

SEQ ID NO: 299331 - DNA, 75 bp, synthetic construct
  source 1..75: mol_type = other DNA
cgaacaaaacgccgtggtgatccccaccgccgccctgcaaatgggcaacgaaggccattttgtctgggtgctgaa

SEQ ID NO: 299332 - DNA, 75 bp, synthetic construct
  source 1..75: mol_type = other DNA
tggcaaaagataaagccacacttgccaacgcgcgccgtgatttggcgcgttatcaacaactggcaaaaaccaatc

SEQ ID NO: 299333 - DNA, 75 bp, synthetic construct
  source 1..75: mol_type = other DNA
tagcaccagtacaggcggcaaccgccattgaacaggccgttccacgttatctcaccgggcttggcactattaccg

SEQ ID NO: 299334 - DNA, 75 bp, synthetic construct
  source 1..75: mol_type = other DNA
agtgattttgtctgcactgtgtataaaaatcctaacttttcttaataaccaggacctgaacaccctgttcggttt

SEQ ID NO: 299335 - DNA, 75 bp, synthetic construct
  source 1..75: mol_type = other DNA
gtgcagttctcggcggaggcctgctgggttcagtcctgtatggtgtctttactcatacagatttcggcgtggtgt

SEQ ID NO: 299336 - DNA, 75 bp, synthetic construct
  source 1..75: mol_type = other DNA
gcgaaagtggaagtggtggaagcccagagcgccaccactccggaagagaaagccaccagccgcgaatacgcgaaa

SEQ ID NO: 299337 - DNA, 75 bp, synthetic construct
  source 1..75: mol_type = other DNA
atccagctcgcgcacgggctgggcatggatgtcattttcagaagacgactgcaccagttgattgggcgtaatggc

SEQ ID NO: 299338 - DNA, 75 bp, synthetic construct
  source 1..75: mol_type = other DNA
agttcctgccgctggccgagtcgttcggcctgatgccggaaataggcgcgtgggtgctgggcgaggcctgtcgcc

SEQ ID NO: 299339 - DNA, 75 bp, synthetic construct
  source 1..75: mol_type = other DNA
gagtttatctgtattgataccggcgggattgacggaacagaagacggtgtagaaacccgcatggcggaacagtcg

SEQ ID NO: 299340 - DNA, 75 bp, synthetic construct
  source 1..75: mol_type = other DNA
cggttcaggcggcgaccgccgtagaacaggcagttccgcgttacctcaccgggcttggcaccattaccgccgcta

SEQ ID NO: 299341 - DNA, 75 bp, synthetic construct
  source 1..75: mol_type = other DNA
actcgactggagccgcatcaccgcaccagtcgatggtcgcgttggtctcaagcaggttgatgttggtaaccaaat

SEQ ID NO: 299342 - DNA, 75 bp, synthetic construct
  source 1..75: mol_type = other DNA
tggctgcacataatttacaaattttgacttcttatcagaagagaacctacaaggcacagaaagaacttattgctc

SEQ ID NO: 299343 - DNA, 75 bp, synthetic construct
  source 1..75: mol_type = other DNA
aagctgctgacgttcgttaacagccaggatttgggtagcctgtttggaattctctcgcgtttacgtggtggaggg

SEQ ID NO: 299344 - DNA, 75 bp, synthetic construct
  source 1..75: mol_type = other DNA
aaagacacgcctgcgtgggaagtggttaactttattggttcctcaccgattgcgatgtttattgcgatggtagtt

SEQ ID NO: 299345 - DNA, 75 bp, synthetic construct
  source 1..75: mol_type = other DNA
cgtctggcgacgggtcagggtgtggtttcagcgatgaccgccgccgggattatcagtgctgcggtaatgactcca

SEQ ID NO: 299346 - DNA, 75 bp, synthetic construct
  source 1..75: mol_type = other DNA
ggcatttcgattctggttccgctgatcccggcgatcattatgatatccacgaccatcgccaacatctggctggtc

SEQ ID NO: 299347 - DNA, 75 bp, synthetic construct
  source 1..75: mol_type = other DNA
acgatggttcagcagggctatgactatcgtcgtgatgacgatatggcgttatggagctctgcggatttgacttat

SEQ ID NO: 299348 - DNA, 75 bp, synthetic construct
  source 1..75: mol_type = other DNA
agcgtctgagatggtacaaaggcatgcggtattgcatccattaaaactgggctcctgcatgagagacgttaactt

SEQ ID NO: 299349 - DNA, 75 bp, synthetic construct
  source 1..75: mol_type = other DNA
atatcgcaaaacatctgattcaggttcacttcattgatgagaacacaggtgaagtggtggataagcaacttcgcg

SEQ ID NO: 299350 - DNA, 75 bp, synthetic construct
  source 1..75: mol_type = other DNA
gggcaacacactagagcaggtgcttgacaacaaatgtgtttttgctatggaggtaacggaccttgctaaagcaaa

SEQ ID NO: 299351 - DNA, 75 bp, synthetic construct
  source 1..75: mol_type = other DNA
agatcactcataaagattggctgctcaactacatgcgacaaggcatcgattgtgtcgctgtcacggaccataatt

SEQ ID NO: 299352 - DNA, 75 bp, synthetic construct
  source 1..75: mol_type = other DNA
acgatggttacgcagggctatgactatcgtcgtgatgacgatatggcgttatggagttctgcagatctgacttat

SEQ ID NO: 299353 - DNA, 75 bp, synthetic construct
  source 1..75: mol_type = other DNA
ttaaccggctcaaagggatcgatgatcgccatacagtatccgagccttatcagttgttcatgaaagcgatgctgg

SEQ ID NO: 299354 - DNA, 75 bp, synthetic construct
  source 1..75: mol_type = other DNA
gtcaccagacataataaagaaaaaaacaaacgacattctacccttctcaaaaatcccctttttaattttcattga

SEQ ID NO: 299355 - DNA, 75 bp, synthetic construct
  source 1..75: mol_type = other DNA
gggctttatcgacttcgcccgtgtgcattttatctctgcattacacggcagcggcgttggtaacctgtttgagtc

SEQ ID NO: 299356 - DNA, 75 bp, synthetic construct
  source 1..75: mol_type = other DNA
attgtcggatttatcgcctggtatctgatggcgcgcgcagaaaaacagcggatacgcgacatccagcgtgcaaga

SEQ ID NO: 299357 - DNA, 75 bp, synthetic construct
  source 1..75: mol_type = other DNA
ccaatgctgatgttggttatctattcgtttaacagctcgaagctggtgacggtgtgggcaggctggtcaacgcgc

SEQ ID NO: 299358 - DNA, 75 bp, synthetic construct
  source 1..75: mol_type = other DNA
aagcctgacaattgcggcctgtgcggcgacggcggcggcgatcctcgggacgattgcggcggtcgtgctggtgcg

SEQ ID NO: 299359 - DNA, 75 bp, synthetic construct
  source 1..75: mol_type = other DNA
taatgaatatgctgttcatgagcaagttggggcatttaccaaccagcatttgaacggccatgccggattaatact

SEQ ID NO: 299360 - DNA, 75 bp, synthetic construct
  source 1..75: mol_type = other DNA
tgaacggtcatgccggattaatactcaacccgcgcgcgctggatttgcgactgtttctcaatcagtgggacagtg

SEQ ID NO: 299361 - DNA, 75 bp, synthetic construct
  source 1..75: mol_type = other DNA
ctggaattgtttgcccatgatggtacgcagatagcgcaactttatggtcaacgtacagaaggtgaacaggagcaa

SEQ ID NO: 299362 - DNA, 75 bp, synthetic construct
  source 1..75: mol_type = other DNA
gagtgataattcgtttgtgttgctggcgacacaacgaaatctactgacgctgaaccgtgcttcagccgaggaaat

SEQ ID NO: 299363 - DNA, 75 bp, synthetic construct
  source 1..75: mol_type = other DNA
ttttggttggcctggcaggcgcgtgattttatgagcaaaaaatacggccagccggttcccgatcgcgcggtttct

SEQ ID NO: 299364 - DNA, 75 bp, synthetic construct
  source 1..75: mol_type = other DNA
gggcggattacaggggcatgaatacctggcgcgtcgggtaactgaaagcgaattagtacaacgtagtccgtttat

SEQ ID NO: 299365 - DNA, 75 bp, synthetic construct
  source 1..75: mol_type = other DNA
acagtggttgacgacacacctggcgaagtcgcgttcgtgcatactcctctttcgatcgcaatgtataacgatgaa

SEQ ID NO: 299366 - DNA, 75 bp, synthetic construct
  source 1..75: mol_type = other DNA
cggatatctacatcttcagcgatggtggtaacactcgttatcagatcctgagagaactgtgggaggagaccggcg

SEQ ID NO: 299367 - DNA, 75 bp, synthetic construct
  source 1..75: mol_type = other DNA
agattgtccttgagcaatgtttgcccaatcagcagcaaaaccaaaacccttcgccatgtgtggaggtaaaaccta

SEQ ID NO: 299368 - DNA, 75 bp, synthetic construct
  source 1..75: mol_type = other DNA
caaattttcacgggtgtggtagaaaaagtggtgccaatgaaaggctggctgaatattttcaacccaacatttact

SEQ ID NO: 299369 - DNA, 75 bp, synthetic construct
  source 1..75: mol_type = other DNA
aagcgtaataccctgacgccaacccagatgcgcaagcgtaagcgcctgatgaagcatatcaagaaaagtaagtaa

SEQ ID NO: 299370 - DNA, 75 bp, synthetic construct
  source 1..75: mol_type = other DNA
tcgccgattcgtattcagttcaaagaaggggaaaacccgtatgcgaacaagcgtaataccctgacgccaacccag

SEQ ID NO: 299371 - DNA, 75 bp, synthetic construct
  source 1..75: mol_type = other DNA
cattccaatggaacgcgatggacgtgagtatgtgctcattgacaccgctggcgtacgtaaacgcggcaaaatcac

SEQ ID NO: 299372 - DNA, 75 bp, synthetic construct
  source 1..75: mol_type = other DNA
ctggcacgacgcgtgacagtatctacattccaatggaacgcgatggacgtgagtatgtgctcattgacaccgctg

SEQ ID NO: 299373 - DNA, 75 bp, synthetic construct
  source 1..75: mol_type = other DNA
tgaaacccgcatggcggaacagtcgctgctggcgattgaagaagctgacgttgtactgtttatggttgatgcccg

SEQ ID NO: 299374 - DNA, 75 bp, synthetic construct
  source 1..75: mol_type = other DNA
gagtttatctgtattgataccggcgggattgacggtacagaagacggggtagaaacccgcatggcggaacaatcg

SEQ ID NO: 299375 - DNA, 75 bp, synthetic construct
  source 1..75: mol_type = other DNA
accttaatctggtacggcggtattatcggcttaagctccttattatcgaaagttaaattcttcgaatggttagct

SEQ ID NO: 299376 - DNA, 75 bp, synthetic construct
  source 1..75: mol_type = other DNA
acgacattctgcacctgcaaattagctggggtggatgggcgctagccgccggattgccgggcatcattatgctgc

SEQ ID NO: 299377 - DNA, 75 bp, synthetic construct
  source 1..75: mol_type = other DNA
cattgtggggctggttatcaagcctttcccggaacctgtcgtactgttaattgccgtcgccgcatcgatggtagt

SEQ ID NO: 299378 - DNA, 75 bp, synthetic construct
  source 1..75: mol_type = other DNA
ctgagccaggaagtgaaagagcaggtgaaagaaacgctggacttccgtctgggctttatcgattttgctcgtgtg

SEQ ID NO: 299379 - DNA, 75 bp, synthetic construct
  source 1..75: mol_type = other DNA
ggacattacctgatgatgtccatttacatggtcactaaaaccaccagctatatgttctttaccgcaatggcgggg

SEQ ID NO: 299380 - DNA, 75 bp, synthetic construct
  source 1..75: mol_type = other DNA
tggtcactccactggtgatttacaccatgtatccaccagaaatcaaaaaagtggataacaaaaccatcgccaaag

SEQ ID NO: 299381 - DNA, 75 bp, synthetic construct
  source 1..75: mol_type = other DNA
tgctggctttatcctgctgaaaaagcataaagaccgtgatcaaaaagtcgaagttctctatgggtatccagcgaa

SEQ ID NO: 299382 - DNA, 75 bp, synthetic construct
  source 1..75: mol_type = other DNA
catattccgatcgtattcaatggctctgccagtatacaacgatgcacatgcggaaaaaaaataaattcttcaaag

SEQ ID NO: 299383 - DNA, 75 bp, synthetic construct
  source 1..75: mol_type = other DNA
aaaacatattctgagagaatacaatggctatgtaattatgtgtatgaagataagaaaataaagacaaaactccta

SEQ ID NO: 299384 - DNA, 75 bp, synthetic construct
  source 1..75: mol_type = other DNA
gcaaccagagtaaagatgaactgtctgcattcattggtgagcgtgttattgacaggatgaatgatggcggcggat

SEQ ID NO: 299385 - DNA, 75 bp, synthetic construct
  source 1..75: mol_type = other DNA
tggcactgcaaaggcaacttgtagactcaaaaatcaatgacatttctgatctgaaacagaaacttgagtttagca

SEQ ID NO: 299386 - DNA, 75 bp, synthetic construct
  source 1..75: mol_type = other DNA
tattcgaatgggatgatctgttcgctgaaaagcgaccaaagtcatggggagacatcagcgaatgcatgatgtttg

SEQ ID NO: 299387 - DNA, 75 bp, synthetic construct
  source 1..75: mol_type = other DNA
aacattctgacagaagaaaatattttgctttgttagcggtagttttatttattgcgttttcaggtgcctatgcct

SEQ ID NO: 299388 - DNA, 75 bp, synthetic construct
  source 1..75: mol_type = other DNA
ttcagcgtgtaccggttgaagtttctcttgatccaaaagaactcatggaacatcccttgcgtattggtttatcga

SEQ ID NO: 299389 - DNA, 75 bp, synthetic construct
  source 1..75: mol_type = other DNA
tattttatttgataaggtggtgtgtaattcaagtattccatcatgccctaatgatataattgattacatgatatc

SEQ ID NO: 299390 - DNA, 75 bp, synthetic construct
  source 1..75: mol_type = other DNA
tatatatagatacaaagataaaaggtgcatttgagcaacttattcgttactttcaatcacaagtatttaataaca

SEQ ID NO: 299391 - DNA, 75 bp, synthetic construct
  source 1..75: mol_type = other DNA
attcgatattagaaatgggaaagtaattaaattaggaaatactttcattgggcataattattttcagtttgatgt

SEQ ID NO: 299392 - DNA, 75 bp, synthetic construct
  source 1..75: mol_type = other DNA
ggttacagaaaggcggtgggctggttatgtgtggaaagcctggtactggaaagaatcatcttgcactggctatcg

SEQ ID NO: 299393 - DNA, 75 bp, synthetic construct
  source 1..75: mol_type = other DNA
taacagtcgggaaaaattagtcggcgtaagaaagacgccgcgtattcctgccgttccgctcacggaacttaaccg

SEQ ID NO: 299394 - DNA, 75 bp, synthetic construct
  source 1..75: mol_type = other DNA
acgaactgcgcgcctggcagcgtaaggaagctatcagcgacgatctcagccagtacaacaagaccagtcttcgcc

SEQ ID NO: 299395 - DNA, 75 bp, synthetic construct
  source 1..75: mol_type = other DNA
aactggtcctgatggccggggttatgttctctgtggcattggaagtgaggctgtcgctaccagctttgatgtcaa

SEQ ID NO: 299396 - DNA, 75 bp, synthetic construct
  source 1..75: mol_type = other DNA
tgccggatattttcgacatcagcgatgcggcatacagtctttacggcctgctgtatacggcagatatccggacca

SEQ ID NO: 299397 - DNA, 75 bp, synthetic construct
  source 1..75: mol_type = other DNA
cgctgagacaccgaaacaaggaacccccgttcctgccgtcggcacagacaataaattgttctttgacgaactcct

SEQ ID NO: 299398 - DNA, 75 bp, synthetic construct
  source 1..75: mol_type = other DNA
gtcagaaagacgccgcgtattccggctgttcccctcgcagaacttaaccgcgagcagaagtggcagatgatgttg

SEQ ID NO: 299399 - DNA, 75 bp, synthetic construct
  source 1..75: mol_type = other DNA
agtctgcatttaactggcacccttccggggaatggctgggctttgtgctggataatcgaattgcttgcgtcgatg

SEQ ID NO: 299400 - DNA, 75 bp, synthetic construct
  source 1..75: mol_type = other DNA
ggcagccatgtgcatgtttttagcccgaacggtgaaatggtgagttttacctataacgaccatgtaatgcatgaa

SEQ ID NO: 299401 - DNA, 75 bp, synthetic construct
  source 1..75: mol_type = other DNA
agcgctgcgcggcggcagccatgtgcatgtctttagcccgaacggtgaaagggtgagctttacctataacgacca

SEQ ID NO: 299402 - DNA, 75 bp, synthetic construct
  source 1..75: mol_type = other DNA
gtttattggcgacacgctttcgcaaaagggcgagaaagtgccggagctgtttattgttgagctgccgcaagatga

SEQ ID NO: 299403 - DNA, 75 bp, synthetic construct
  source 1..75: mol_type = other DNA
tgtgaatatccataccggcgaggtcgaggttatctatcgcgcgtcacagggcgcgtacgtcggcgtggtgaccgt

SEQ ID NO: 299404 - DNA, 75 bp, synthetic construct
  source 1..75: mol_type = other DNA
tatgttttcatccacggcccggaaaatcctgatgaaacatggtattacgacttccatcatcggcgcggagtgatt

SEQ ID NO: 299405 - DNA, 75 bp, synthetic construct
  source 1..75: mol_type = other DNA
gaagcctggttggcgcttaaacgtacggatattaagagtccggttaccggctatattgcccagagaagtgttcag

SEQ ID NO: 299406 - DNA, 75 bp, synthetic construct
  source 1..75: mol_type = other DNA
gacgggcttcccgcaagcaaaaatcgattttagctctggctggctacaggatgagatcaccttacgcgatctgcc

SEQ ID NO: 299407 - DNA, 75 bp, synthetic construct
  source 1..75: mol_type = other DNA
gaaccaaaaaatccgcagaccgttgaggcttctgatagcagcaacccgatggttgatcgctcaacgattcaacgt

SEQ ID NO: 299408 - DNA, 75 bp, synthetic construct
  source 1..75: mol_type = other DNA
tacagcaaacaacctggctatggtgtgaatgatttctacgtcagttatcaaggacaacaggcgctcaaaggcatg

SEQ ID NO: 299409 - DNA, 75 bp, synthetic construct
  source 1..75: mol_type = other DNA
ccaatctgcggcgcgctgaccgttggcgcactgtgggtgaacctggaagagagctctatggttctgggcctgatc

SEQ ID NO: 299410 - DNA, 75 bp, synthetic construct
  source 1..75: mol_type = other DNA
ggcataaccctgcgactgaaagatgaagctacccgctcgcggctgagtgagtatttgccggaagtccgtagtcgc

SEQ ID NO: 299411 - DNA, 75 bp, synthetic construct
  source 1..75: mol_type = other DNA
aaaccacccgttcgcgcctgagcgagtatttgccggaagtccgtagtcgcttgctgttactgttttcgcgtcagg

SEQ ID NO: 299412 - DNA, 75 bp, synthetic construct
  source 1..75: mol_type = other DNA
gagcttgatcagtggatggaaagccggatttatccggagatgactgcgatcccggcactggctggactgattacc

SEQ ID NO: 299413 - DNA, 75 bp, synthetic construct
  source 1..75: mol_type = other DNA
aatcttggtcagccagcaggcacgacaccggaagccgattcagcgtatgcgctgaaagccgattcgggcgctgtg

SEQ ID NO: 299414 - DNA, 75 bp, synthetic construct
  source 1..75: mol_type = other DNA
tgcagatgcaaaaatttactggtcggaagtccgtattaatgcgcaaaacacggggagttccggcgagtatcgtga

SEQ ID NO: 299415 - DNA, 75 bp, synthetic construct
  source 1..75: mol_type = other DNA
ctgcccagactctgagtggattagtgcgttattacaataacgacgcgcgcgaaccaaaaaatccgcagaccgttg

SEQ ID NO: 299416 - DNA, 75 bp, synthetic construct
  source 1..75: mol_type = other DNA
agtataccggtgaagagctggatgcagatacctggcgggccacgctgcatattgaggtgtttttaccggcacagg

SEQ ID NO: 299417 - DNA, 75 bp, synthetic construct
  source 1..75: mol_type = other DNA
tgggccggtatcggtctgatctacctggcctgtgtgaccaaaagcttccgcaacccggttccgcagtacgaagat

SEQ ID NO: 299418 - DNA, 75 bp, synthetic construct
  source 1..75: mol_type = other DNA
tggctagtgttgatgcagattactgctactcttttccagctatacgtggcattcaggctggtcgtcctttctaca

SEQ ID NO: 299419 - DNA, 75 bp, synthetic construct
  source 1..75: mol_type = other DNA
tccccaaaatttttagctttgatgaaaatgatgtccccccggagttgcgggcgcaacgcaccctcaataaatctc

SEQ ID NO: 299420 - DNA, 75 bp, synthetic construct
  source 1..75: mol_type = other DNA
gccttttgctgggatgcctggagcgcaggccacggcgcgacagaggcggcgcgaccggaacggtcgctgcaagcc

SEQ ID NO: 299421 - DNA, 75 bp, synthetic construct
  source 1..75: mol_type = other DNA
ctgccattttatgccagacaagggacaaattttgtggttaatggcagtttgattctggcgtttttttatttggtg

SEQ ID NO: 299422 - DNA, 75 bp, synthetic construct
  source 1..75: mol_type = other DNA
ggcatcgttgtatgatcatcgggatgccagttcaaatttggcgcgttatctggcaatgtccgtagagccgtttgc

SEQ ID NO: 299423 - DNA, 75 bp, synthetic construct
  source 1..75: mol_type = other DNA
ccagttcaaatctggcacgttacctggcgatgtccatagagccctttgttggaatgacagaactggaaaaatctg

SEQ ID NO: 299424 - DNA, 75 bp, synthetic construct
  source 1..75: mol_type = other DNA
gggccacactgcatattgaggtgtttttaccggcacaggtaccggattcagagctcgatcagtggatggaaagcc

SEQ ID NO: 299425 - DNA, 75 bp, synthetic construct
  source 1..75: mol_type = other DNA
gatggaaagccggatttatccggcgatgactgcgatcccggcactggcagacctgattaccacgatggttacgca

SEQ ID NO: 299426 - DNA, 75 bp, synthetic construct
  source 1..75: mol_type = other DNA
atcatgctgtatgttgcaggtaaagcattccaggttggtgcgctgatcttctccaccattaccgtactggcgtcc

SEQ ID NO: 299427 - DNA, 75 bp, synthetic construct
  source 1..75: mol_type = other DNA
aggctgataccaatcttcttatctggcgcgcatgggattttgaaccggactttgaatataattttaagcagcagc

SEQ ID NO: 299428 - DNA, 75 bp, synthetic construct
  source 1..75: mol_type = other DNA
tccgtgtgttaacccacaagggcagccgaaccagcaaaagactaaacaacctaggtttaagcgataaaaaaacag

SEQ ID NO: 299429 - DNA, 75 bp, synthetic construct
  source 1..75: mol_type = other DNA
gatcccggcactggcaggactgattaccacgatggttacgcagggctatgagtatcgtcgtgatgacgatatggc

SEQ ID NO: 299430 - DNA, 75 bp, synthetic construct
  source 1..75: mol_type = other DNA
aagaacagcgtcgggaaaaagcgttgtcgatgatggcgaaagtcggcctgaaaaccgagcattacgatcgctatc

SEQ ID NO: 299431 - DNA, 75 bp, synthetic construct
  source 1..75: mol_type = other DNA
atttacccttgaacgtggcaaaacgctggcggtagtaggtgaatctggctgtggtaaatcgacccttggtcgatt

SEQ ID NO: 299432 - DNA, 75 bp, synthetic construct
  source 1..75: mol_type = other DNA
cagttgcagccgcagctaaaagactacggcggtcaactggtagcttgttttgctgttgatcaggatgaaaatccg

SEQ ID NO: 299433 - DNA, 75 bp, synthetic construct
  source 1..75: mol_type = other DNA
atgctggagtgtatcaactcatatatccgcgatgtttatggaagcttcctttgtacttcaaaagagaggtacgaa

SEQ ID NO: 299434 - DNA, 75 bp, synthetic construct
  source 1..75: mol_type = other DNA
ggttataaactggtagcggtgggaaatacgtttgtcttccccatggcgggctattccaaaaaaatcaaaaccgtg

SEQ ID NO: 299435 - DNA, 75 bp, synthetic construct
  source 1..75: mol_type = other DNA
ttgccgatgagccggtttctgcgctggacgtctcagtgcgtgcgcaggtgctgaatctgatgatggatttgcagc

SEQ ID NO: 299436 - DNA, 75 bp, synthetic construct
  source 1..75: mol_type = other DNA
gcgatggtaatagcggaagtacaggctacgccacgctgaattatcgcggtggttacggcaatgccaatatcggtt

SEQ ID NO: 299437 - DNA, 75 bp, synthetic construct
  source 1..75: mol_type = other DNA
tattccattacggcaggagaataccgtagtggaaatgcgcagcaggaaaaaccccgctttttccagagtacatta

SEQ ID NO: 299438 - DNA, 75 bp, synthetic construct
  source 1..75: mol_type = other DNA
aggcggcatgaccaacctatcaggggtttatggcactctgctgccggataataacctgaattatagcgttcaggt

SEQ ID NO: 299439 - DNA, 75 bp, synthetic construct
  source 1..75: mol_type = other DNA
aaaggtatgttcgcgccggaacgtctggtgaaggcgctggacggcgtttcgtttaaccttgaacgtggcaaaacg

SEQ ID NO: 299440 - DNA, 75 bp, synthetic construct
  source 1..75: mol_type = other DNA
gtggtgaaatacccctccattttgctgtcggtatcacagatggcagaagtgggctttatactgactatcccattc

SEQ ID NO: 299441 - DNA, 75 bp, synthetic construct
  source 1..75: mol_type = other DNA
taacgtcgatttagataacgcggtcgctaacgttgttcccactcgtggggcgatcgtgcgagcagagtttaaagc

SEQ ID NO: 299442 - DNA, 75 bp, synthetic construct
  source 1..75: mol_type = other DNA
aagagggaaaagggttattacctaccgcgctggatataaccgataatcctcgtcatttgcagattatggaactcg

SEQ ID NO: 299443 - DNA, 75 bp, synthetic construct
  source 1..75: mol_type = other DNA
aggttatacctactggtgagtttaaaactgatgactttctgatttcgctaaaagatgcttttaaacaacactggc

SEQ ID NO: 299444 - DNA, 75 bp, synthetic construct
  source 1..75: mol_type = other DNA
ttgctgtgcctgccgaaaataaagaagcctatcgagaaatggccgctaaggcggcaccgctgtttaaagagtttg

SEQ ID NO: 299445 - DNA, 75 bp, synthetic construct
  source 1..75: mol_type = other DNA
ctttagctggattgaatacccttcaaaagaggtccgcgacgctgctaatcaaaagatgatgtcggacccacggat

SEQ ID NO: 299446 - DNA, 75 bp, synthetic construct
  source 1..75: mol_type = other DNA
aacattccttcactgtaaaccaaagaaaggagttattgcgcaatagttttagaaaaggttttgttgatagagttt

SEQ ID NO: 299447 - DNA, 75 bp, synthetic construct
  source 1..75: mol_type = other DNA
acgaaatacaataattagtgagcttaaaatttatttggaagaaggtactccattcaaaatatatcgtttggatat

SEQ ID NO: 299448 - DNA, 75 bp, synthetic construct
  source 1..75: mol_type = other DNA
aagcggacatccgtgtgcaatttaatcgcgcaattgacctggcacgtcgcaacggttcaaccattgccattgggc

SEQ ID NO: 299449 - DNA, 75 bp, synthetic construct
  source 1..75: mol_type = other DNA
tgtcggtcagagcgggggcggctgggcgcactatgtaggtcaggaaaaactgcgtccgcaaaccggctggcagcc

SEQ ID NO: 299450 - DNA, 75 bp, synthetic construct
  source 1..75: mol_type = other DNA
ccttgaacaggataatcaggctcatggttacaagctggtggcggtgggaaatacctttgtctttccgatggctgg

SEQ ID NO: 299451 - DNA, 75 bp, synthetic construct
  source 1..75: mol_type = other DNA
cgtcatttgcagattatggaactcgagggggcgcagctcccgcgcgtactggatgatcccaaagttgatgtagcg

SEQ ID NO: 299452 - DNA, 75 bp, synthetic construct
  source 1..75: mol_type = other DNA
gctggcgtttgccctcgactggcagcgtccggcgcgtcacatgaacagtacctcttatttctataaccactccag

SEQ ID NO: 299453 - DNA, 75 bp, synthetic construct
  source 1..75: mol_type = other DNA
cgagaagattcgcttccgcgatattcaggcacagccgcgcaaaatcatctccagcccgacatggtctggccttga

SEQ ID NO: 299454 - DNA, 75 bp, synthetic construct
  source 1..75: mol_type = other DNA
ttctataatcactccagccagtggcgttatgaaaccgtgactgcggaagaactgctgtcgccgatggcggataaa

SEQ ID NO: 299455 - DNA, 75 bp, synthetic construct
  source 1..75: mol_type = other DNA
gtacggtaataaaagcgttccattcggtgcaattgtcactcacggagagaataaaaatggcagcattgtcgcgga

SEQ ID NO: 299456 - DNA, 75 bp, synthetic construct
  source 1..75: mol_type = other DNA
caactatccggtaactccggatggttggataagctgtagtgatcgaatgccggacgacaggcaggaggtgaatca

SEQ ID NO: 299457 - DNA, 75 bp, synthetic construct
  source 1..75: mol_type = other DNA
tatcactcctccggaaaaactgaactttgccgagatcgcgacatacaatgatcaccggatggcgatgtgtttctc

SEQ ID NO: 299458 - DNA, 75 bp, synthetic construct
  source 1..75: mol_type = other DNA
aaaggcaccaccacgctgcgcaatatctataactggcgtgttaaagagaccgatcgcctgtttgcgatggcaaca

SEQ ID NO: 299459 - DNA, 75 bp, synthetic construct
  source 1..75: mol_type = other DNA
ggaaaccttttttgcctgtctgggcggacagcgggatcagactgtggtgcttgtggtggaagaccggcgcagccg

SEQ ID NO: 299460 - DNA, 75 bp, synthetic construct
  source 1..75: mol_type = other DNA
tgcgggtggatacgccggaagccacctttacgggcaatgtgacggtggataagaacctgcatgttaagggtaatt

SEQ ID NO: 299461 - DNA, 75 bp, synthetic construct
  source 1..75: mol_type = other DNA
ccgcccatccgggctgacttccggcgacagtgggctttatcactacgaagggcaccgcattcgcctgacaaaaga

SEQ ID NO: 299462 - DNA, 75 bp, synthetic construct
  source 1..75: mol_type = other DNA
gttccctggaagcgattaagagcggatgtacatcggttatcgatcaccatgcctctccggcgtatatcggcgggt

SEQ ID NO: 299463 - DNA, 75 bp, synthetic construct
  source 1..75: mol_type = other DNA
gtctggagatgctgcgtgaagccgtgaaagccacaggccgtggtttacatattcacgctgcggaagacctttacg

SEQ ID NO: 299464 - DNA, 75 bp, synthetic construct
  source 1..75: mol_type = other DNA
catgcctctccggcttatatcggcggatcgctctcgacgttgcgcaacgcatttctaaaagttggtctacgtgcg

SEQ ID NO: 299465 - DNA, 75 bp, synthetic construct
  source 1..75: mol_type = other DNA
gaagtaatgatattgtcctgactggtgagcctcgtatgaaagagcgcccgatcggtcatctggtggatgcgctgc

SEQ ID NO: 299466 - DNA, 75 bp, synthetic construct
  source 1..75: mol_type = other DNA
atatgtacaaaaaaatccaagccgaagctcaggcaacagatatgaaaacactggaacgtttattgaagaagttcc

SEQ ID NO: 299467 - DNA, 75 bp, synthetic construct
  source 1..75: mol_type = other DNA
atgttgattctgaagaatgtcactgcggtacagctacacccggcaaaagtgcaggaaggcgttgatatcgccatc

SEQ ID NO: 299468 - DNA, 75 bp, synthetic construct
  source 1..75: mol_type = other DNA
ttcaggtggatacaccggaagccaccttcacgggcaatgtcacggtggataaaaacctgcatatcaaaggtaatc

SEQ ID NO: 299469 - DNA, 75 bp, synthetic construct
  source 1..75: mol_type = other DNA
gtgcgaacggagccaccacctcatttcgcggcgcgggtgggggctaaagatggctttctctttgcgctggagctg

SEQ ID NO: 299470 - DNA, 75 bp, synthetic construct
  source 1..75: mol_type = other DNA
ctgaacggatcgtttgggcagttacctggtgcgaatggagccaccacctcatttcgcggggcgggtggcgcgggg

SEQ ID NO: 299471 - DNA, 75 bp, synthetic construct
  source 1..75: mol_type = other DNA
aggaaggggaaattaccgaacgcgataaagtgattttcgccgcatatcaaaccagcggtagcgccatcatcacca

SEQ ID NO: 299472 - DNA, 75 bp, synthetic construct
  source 1..75: mol_type = other DNA
gtctacagcaaatccttctaccagacgggaaccaatatccaggtcgcaggatatcgctattctacgcaaggtttt

SEQ ID NO: 299473 - DNA, 75 bp, synthetic construct
  source 1..75: mol_type = other DNA
gtctaaaaactagtattaagactatcacttatttaagtgatattggttgtctggagattcagggggccagtctaa

SEQ ID NO: 299474 - DNA, 75 bp, synthetic construct
  source 1..75: mol_type = other DNA
tacaacacgcaaattaaagatctctcgctgggggtttcctggaactacagtaagtcccgtggtcaacctgatgct

SEQ ID NO: 299475 - DNA, 75 bp, synthetic construct
  source 1..75: mol_type = other DNA
gtttgaccgggtacacattggtctcgacttctttgatgcctccatcaaccgcattgccgcgtgggttattggcac

SEQ ID NO: 299476 - DNA, 75 bp, synthetic construct
  source 1..75: mol_type = other DNA
gacttcttcgatgcctctatcaaccgcattgccgcgtgggtcattggtacacgcaatatgaaaaaagccctgcta

SEQ ID NO: 299477 - DNA, 75 bp, synthetic construct
  source 1..75: mol_type = other DNA
tcgtccgaccggactgaccaccggagataccggcgtgtatcaccacgaggggcaccgtatacgtctgacaaagga

SEQ ID NO: 299478 - DNA, 75 bp, synthetic construct
  source 1..75: mol_type = other DNA
gtctggtattcagcttgtacagtgggttatctatagcagcaacagcaaatccaacacctggttctttaactaata

SEQ ID NO: 299479 - DNA, 75 bp, synthetic construct
  source 1..75: mol_type = other DNA
caaagcgcgtaatgccagtgagctacgtgccgatctggaacaggctatgcggctgattccggggccgaaacggct

SEQ ID NO: 299480 - DNA, 75 bp, synthetic construct
  source 1..75: mol_type = other DNA
ggcaggcggtctgggaaatgtattgtcagcgtcacgatacgccagcgggtagcgaatggctggagagcgtgcggg

SEQ ID NO: 299481 - DNA, 75 bp, synthetic construct
  source 1..75: mol_type = other DNA
gatgatcaatatgctgatcttctgcggttgtgtcgggcaaagcggtggcggctgggcacactatgtcggtcagga

SEQ ID NO: 299482 - DNA, 75 bp, synthetic construct
  source 1..75: mol_type = other DNA
ccgctttttcaaaagaggagcaggacaaagttgccgtcgataaggtggccgcttccgttgcctggcaggagcgca

SEQ ID NO: 299483 - DNA, 75 bp, synthetic construct
  source 1..75: mol_type = other DNA
cagtatttccatgaacggcttgaagttcatcggcagaacagtcagcagctgccgcgcgcaaatgcgcccgaatat

SEQ ID NO: 299484 - DNA, 75 bp, synthetic construct
  source 1..75: mol_type = other DNA
ggtgttaactgtacaggctcctgcagctggaaaatctacgttaaaaatggtctggtcacctgggaaacccaacag

SEQ ID NO: 299485 - DNA, 75 bp, synthetic construct
  source 1..75: mol_type = other DNA
aaattaccggcgtaccgcgccagtatattgaaaacatcgctcgtgaatttgccgataccgctaataaaacgcatg

SEQ ID NO: 299486 - DNA, 75 bp, synthetic construct
  source 1..75: mol_type = other DNA
tgtttgtctggcgttctaacctgcttggctcctccggcaaaggccacgagtatatgcagaagtatctgctgggga

SEQ ID NO: 299487 - DNA, 75 bp, synthetic construct
  source 1..75: mol_type = other DNA
gtgaaggaattaatattgatgctaatgataccataacaactattgggagtggattggttgtgggtagggatgtag

SEQ ID NO: 299488 - DNA, 75 bp, synthetic construct
  source 1..75: mol_type = other DNA
acattcggtatcatgaaacattgcataatatctcattggccaagatttataacgaggtaattaataaatataacg

SEQ ID NO: 299489 - DNA, 75 bp, synthetic construct
  source 1..75: mol_type = other DNA
ggcgatcccggcagtagcagctgccactaccgcacattcactgttcccaccgcagccgggtccggtggcgctggt

SEQ ID NO: 299490 - DNA, 75 bp, synthetic construct
  source 1..75: mol_type = other DNA
tcccggataaccctattaggctgtttgacaagcacttttacaatgcagacctgctgctgacgctgagcctgcagg

SEQ ID NO: 299491 - DNA, 75 bp, synthetic construct
  source 1..75: mol_type = other DNA
caatgggtggcaccggggtggcatcctcccattatggtgtggctcctctggcaaacccggctttactgacaaagc

SEQ ID NO: 299492 - DNA, 75 bp, synthetic construct
  source 1..75: mol_type = other DNA
ctacagaatccgtccgcaggccactgccggtgtgtcctggcacaacgacctgttcaccactgcacttgatgttga

SEQ ID NO: 299493 - DNA, 75 bp, synthetic construct
  source 1..75: mol_type = other DNA
ggtgttaactgtacaggctcctgcagctggaaaatctacgttaaaaacggtctggtcacctgggaaatccaacag

SEQ ID NO: 299494 - DNA, 75 bp, synthetic construct
  source 1..75: mol_type = other DNA
aagttcgcggtgaactgacttttattgagaaggcgcagggggtccacaaggcaagacaaatccatgaggaacaac

SEQ ID NO: 299495 - DNA, 75 bp, synthetic construct
  source 1..75: mol_type = other DNA
atgaacatgccgtgaagctgctgcgtcttctgagtgtgctgcgccgtctgcgcgccctgcagcgcagtgtgttac

SEQ ID NO: 299496 - DNA, 75 bp, synthetic construct
  source 1..75: mol_type = other DNA
actcatctgtcagcaggatggagcatactctgaaatatctgtatccgtggatccccgatcttctggaatcaggat

SEQ ID NO: 299497 - DNA, 75 bp, synthetic construct
  source 1..75: mol_type = other DNA
cccggggcaccggtatccgggatccggtctgaagtaccggagtgtcaaccggatacggatacagaggcgatgccg

SEQ ID NO: 299498 - DNA, 75 bp, synthetic construct
  source 1..75: mol_type = other DNA
gccggctgtgctgaagagattgccatggacagggaaagcgacctgtctgccggtttcggggcagcagtggagaaa

SEQ ID NO: 299499 - DNA, 75 bp, synthetic construct
  source 1..75: mol_type = other DNA
tcagcagaatggaagatgccctgaagtatctgtacccctggatccccgacctgatggaatcaggactggggcgtc

SEQ ID NO: 299500 - DNA, 75 bp, synthetic construct
  source 1..75: mol_type = other DNA
catcagcccacaggctatggcaattcaccgaattaccgaagccatggtcgccgacaagccgtggattgaagaggt

SEQ ID NO: 299501 - DNA, 75 bp, synthetic construct
  source 1..75: mol_type = other DNA
caccgcggccttacttatcgatattatgaacacatccggctggacggtagaacaaatggcggatatcaccgggcg

SEQ ID NO: 299502 - DNA, 75 bp, synthetic construct
  source 1..75: mol_type = other DNA
ggtgttaactgtacaggctcctgcagctggaaaatctacgttaaaaagggtctggttacctgggaaagccaacag

SEQ ID NO: 299503 - DNA, 75 bp, synthetic construct
  source 1..75: mol_type = other DNA
gtgacggtggagaaggacagcggaagggagcagtctgtgatttccgcaccggctgaccatgacacagtcatgaat

SEQ ID NO: 299504 - DNA, 75 bp, synthetic construct
  source 1..75: mol_type = other DNA
atgtcaattaaacgaaatcattccgttgatctgggggctgccatcatgcaaccgggccgtcaggccagcacggca

SEQ ID NO: 299505 - DNA, 75 bp, synthetic construct
  source 1..75: mol_type = other DNA
caccgctgccttgcttatcgatattatgaacacatccggctggacggtggaacaaatggcggatatcactggacg

SEQ ID NO: 299506 - DNA, 75 bp, synthetic construct
  source 1..75: mol_type = other DNA
caatggccttaacaggatgccaacagctcaatgatggcgtgagtaaagtcaatggggcaatcagctcttctttgt

SEQ ID NO: 299507 - DNA, 75 bp, synthetic construct
  source 1..75: mol_type = other DNA
gactatacactttcttaatactgctgatgccggactgatatcaggatatacgtcagggcgaggctctacattatt

SEQ ID NO: 299508 - DNA, 75 bp, synthetic construct
  source 1..75: mol_type = other DNA
cccacctataatgttgtaactcgagaggtcactaatcctcaggaaatggccgatgctaccaaggatgtacctatt

SEQ ID NO: 299509 - DNA, 75 bp, synthetic construct
  source 1..75: mol_type = other DNA
acaacctgctgaatttgccctttacggcacagttggtaccggatggtagcggtaatgctgtcggtgttggaacct

SEQ ID NO: 299510 - DNA, 75 bp, synthetic construct
  source 1..75: mol_type = other DNA
aaaactgattgaacacggaatgccttgcgaaatgccggtggcgattgtcgaaaacggtacggcggtaacgcaacg

SEQ ID NO: 299511 - DNA, 75 bp, synthetic construct
  source 1..75: mol_type = other DNA
acttgaatcactgctgccgttacatctgggccaggtagcgaaatacgccgggcaattacgcggtcgagtgaaaca

SEQ ID NO: 299512 - DNA, 75 bp, synthetic construct
  source 1..75: mol_type = other DNA
gaattcaagccccaaaatggtgttacaagcggaacgttgagaccgggtcgaatggcttcatggtatataggtatt

SEQ ID NO: 299513 - DNA, 75 bp, synthetic construct
  source 1..75: mol_type = other DNA
cgtttgtgctgctgatattcctcggcgggcgaatgattattgagggttttcgtggcgcagatgatgaagatgaag

SEQ ID NO: 299514 - DNA, 75 bp, synthetic construct
  source 1..75: mol_type = other DNA
ggcggagatgatgaagatgaaaagccacgtagtcgtcatggtttttggttgctggtcaccacagccatcgcaacc

SEQ ID NO: 299515 - DNA, 75 bp, synthetic construct
  source 1..75: mol_type = other DNA
ctatatttggcagcatttgatagtagtattcatcggcattcagaagtgttttattactctcgctttgtagatgat

SEQ ID NO: 299516 - DNA, 75 bp, synthetic construct
  source 1..75: mol_type = other DNA
gtggcgatcttgctttggaagcatgtcattatgactaatgcatacattactagctatgcgtccggttccgccatt

SEQ ID NO: 299517 - DNA, 75 bp, synthetic construct
  source 1..75: mol_type = other DNA
cggagggactgagatcgtcagtgataactgcagccgtatgggagaaatcaataatcccaaccgtccatatttcta

SEQ ID NO: 299518 - DNA, 75 bp, synthetic construct
  source 1..75: mol_type = other DNA
tgactaccgcaattgccaccagcctggatgcaatggctgttggtgttggtctggccttcctgcaagtgaacatta

SEQ ID NO: 299519 - DNA, 75 bp, synthetic construct
  source 1..75: mol_type = other DNA
caggcgctcgcttaacggtgaatgcattagcgtttattccgcagttcaccgcatgggcagatgcaggcatgttaa

SEQ ID NO: 299520 - DNA, 75 bp, synthetic construct
  source 1..75: mol_type = other DNA
ggatgctggcgatagcgctggagtggttgggtgatgcgtttttctggcagaacacctgcgccagccacagtgaac

SEQ ID NO: 299521 - DNA, 75 bp, synthetic construct
  source 1..75: mol_type = other DNA
accagaaaaaacggaatgggccgtaggtgataaacctcctgttaatgtgtggcttgattgtgtaggtatgaccag

SEQ ID NO: 299522 - DNA, 75 bp, synthetic construct
  source 1..75: mol_type = other DNA
cggtatgaataaagaaagtgaagttattgatgaattaatcgaagatgaacgctgcgactgcgaaacgcaaccaga

SEQ ID NO: 299523 - DNA, 75 bp, synthetic construct
  source 1..75: mol_type = other DNA
gctcaatgatggcgtgaatacagttaatggagcaatcaattcttcgttgtcatcagtaaacaaagcactgggggg

SEQ ID NO: 299524 - DNA, 75 bp, synthetic construct
  source 1..75: mol_type = other DNA
atgaaaggacataacttcttaccactggcggtctatctgatgtttctttctggctgccagcagctcaacgaaagc

SEQ ID NO: 299525 - DNA, 75 bp, synthetic construct
  source 1..75: mol_type = other DNA
gggctgattgacggactggtacgccgcgacttacggcgattcggcgcagaccatgagtccgggtttgtttatcat

SEQ ID NO: 299526 - DNA, 75 bp, synthetic construct
  source 1..75: mol_type = other DNA
gtaccgaatctgcggtgcgtattactcacatcccgaccgggattgtgacccagtgccagaacgaccgttcccagc

SEQ ID NO: 299527 - DNA, 75 bp, synthetic construct
  source 1..75: mol_type = other DNA
gaatgagctgggaatccactattccttactatcgtctgataaatgaaggcattaaacagcggcttggtgggcttc

SEQ ID NO: 299528 - DNA, 75 bp, synthetic construct
  source 1..75: mol_type = other DNA
aaggtctgcaacaaattcagcaggcagatgtggtggtctacgaccgtctggtttctgacgatattatgaatctgg

SEQ ID NO: 299529 - DNA, 75 bp, synthetic construct
  source 1..75: mol_type = other DNA
atcgcattcaggacctcacggaacgctccgacgttcttagggggtatcttgactacgacgccaagaaagagcgtc

SEQ ID NO: 299530 - DNA, 75 bp, synthetic construct
  source 1..75: mol_type = other DNA
atatcgaaatcaatccggcggatctgcgcatcgacgtttatcgcgcgtccggcgcgggcggtcagcacgttaacc

SEQ ID NO: 299531 - DNA, 75 bp, synthetic construct
  source 1..75: mol_type = other DNA
aagatctgcgcaccggggttgaaacccgcaatacgcaggccgtgctggacggcagcctggatcaatttatcgaag

SEQ ID NO: 299532 - DNA, 75 bp, synthetic construct
  source 1..75: mol_type = other DNA
tctggcaggccgattttaaaccggatatgaaactgtttaagaagtttcgtgggtatttattggtgaagacgcagg

SEQ ID NO: 299533 - DNA, 75 bp, synthetic construct
  source 1..75: mol_type = other DNA
atgtgtatctaccttaacttaatgattttgataaaaatcattaggggattcatcagtgctgagtatgtccgcctg

SEQ ID NO: 299534 - DNA, 75 bp, synthetic construct
  source 1..75: mol_type = other DNA
tcacgcctgaaatctgtcactcactttgaagacgaagactgggcacgtttctctcaaggggtggggcggatgacc

SEQ ID NO: 299535 - DNA, 75 bp, synthetic construct
  source 1..75: mol_type = other DNA
gggcgtcacgaccttgcggtgggggaaatctcaaagggacttaaaagcctggcaaaatccggcggttttccgctg

SEQ ID NO: 299536 - DNA, 75 bp, synthetic construct
  source 1..75: mol_type = other DNA
atcgcagaaatcaatatcacgaaacaacgtaacggttctctggggacgatttaccggcgtttttataacggacat

SEQ ID NO: 299537 - DNA, 75 bp, synthetic construct
  source 1..75: mol_type = other DNA
cgatgaagaacgttgcgccaggtttattctcgcccatgcgattttgttaagtttccccggtgtgccagcgatata

SEQ ID NO: 299538 - DNA, 75 bp, synthetic construct
  source 1..75: mol_type = other DNA
attcagcaactcggtgaatgcagccatttaatgtttgattttgtctgcaaccatatgtcggcaaaaagtgaatgg

SEQ ID NO: 299539 - DNA, 75 bp, synthetic construct
  source 1..75: mol_type = other DNA
tcacgcctgaaatctgtcactcactttgaagatgaagactgggcgcgtttctcacaaggggtgggacggatgacc

SEQ ID NO: 299540 - DNA, 75 bp, synthetic construct
  source 1..75: mol_type = other DNA
atacactgcgggggccggtctctctttttttcctgacgcttgccgagtccggagaacgaaaaccgcagtggacaa

SEQ ID NO: 299541 - DNA, 75 bp, synthetic construct
  source 1..75: mol_type = other DNA
gggcgtaatatctggatggtggaccaggcaaacctgaccattgatgagatatgtgcaaccacgaagcaccaccgg

SEQ ID NO: 299542 - DNA, 75 bp, synthetic construct
  source 1..75: mol_type = other DNA
tgaaggatgtgcagaacatgatggcctcactgtcgaccggaaagggcgtcattcagccggttcacattgatgatg

SEQ ID NO: 299543 - DNA, 75 bp, synthetic construct
  source 1..75: mol_type = other DNA
aggggcttaaaggcctggcaaaatctggtggttttcccttaattgcgctgagccagctctcccgtggtgtggagt

SEQ ID NO: 299544 - DNA, 75 bp, synthetic construct
  source 1..75: mol_type = other DNA
acgagcgtatcgggatatctacacaggcatctgcagacaggcccgtgtttcaggcgtgattgaccctgtgctgtt

SEQ ID NO: 299545 - DNA, 75 bp, synthetic construct
  source 1..75: mol_type = other DNA
gtcactggagcactatgttacggcgttgcggcgcaatgcagcactgcgcgatgcagaaaaaacactgaatgaggc

SEQ ID NO: 299546 - DNA, 75 bp, synthetic construct
  source 1..75: mol_type = other DNA
aacctcatgcgttaaccgcaattttaggtccaaatggaagcggaaaatcaacaatactccatgccatagcaagca

SEQ ID NO: 299547 - DNA, 75 bp, synthetic construct
  source 1..75: mol_type = other DNA
taaaattaacaaactaaaatgtataaatggattaaacgagattatttttaaacctcatgcgttaaccgcaatttt

SEQ ID NO: 299548 - DNA, 75 bp, synthetic construct
  source 1..75: mol_type = other DNA
ttgaagaaacaaaacctgatgctataaacagattaacaggtgaatcaacgacgcctattgaaatatatgtagaag

SEQ ID NO: 299549 - DNA, 75 bp, synthetic construct
  source 1..75: mol_type = other DNA
tggattaactgcccacctgataacttcgaaatattaggtgagctaataaccattaatagaattatcaaaaagtaa

SEQ ID NO: 299550 - DNA, 75 bp, synthetic construct
  source 1..75: mol_type = other DNA
acggaggactgggagcatcgccactggtccggcgtcgaattactccgtgaactcaaacgccagcagcgctacccc

SEQ ID NO: 299551 - DNA, 75 bp, synthetic construct
  source 1..75: mol_type = other DNA
aggccagcagatatgtgaaaatatttaaatttggcgcagcttcaaacgcattcactctacttgccagtacactta

SEQ ID NO: 299552 - DNA, 75 bp, synthetic construct
  source 1..75: mol_type = other DNA
gctgctgtcagcattgatgttcgcaatatgccagagtcgcctgaaatattcgaacaggcgatgaacaatctacct

SEQ ID NO: 299553 - DNA, 75 bp, synthetic construct
  source 1..75: mol_type = other DNA
aacgtaacggttctctggggacgatttaccgacgtttttataacggacattttctgcctgtagaccaggaaagcg

SEQ ID NO: 299554 - DNA, 75 bp, synthetic construct
  source 1..75: mol_type = other DNA
acctgtgacgcagctgaagatgccctgaaggatgcgcagaacatgattgtctcattatcaaccggaaagggcgtc

SEQ ID NO: 299555 - DNA, 75 bp, synthetic construct
  source 1..75: mol_type = other DNA
ggagaacgggccgcagtgcggcggcagacaggcagagacagctgcgccatcaggcgcagtggccttacacaccgt

SEQ ID NO: 299556 - DNA, 75 bp, synthetic construct
  source 1..75: mol_type = other DNA
caaccagaaaaagtgaaatttcttcactttttcacacttatttatcgcgctgatttggtgattatgatgataaaa

SEQ ID NO: 299557 - DNA, 75 bp, synthetic construct
  source 1..75: mol_type = other DNA
acaacaacggcatgcgctggtcactggtacaccactcccgcacaggtgaaaacagagaaaaccgcacgacatctg

SEQ ID NO: 299558 - DNA, 75 bp, synthetic construct
  source 1..75: mol_type = other DNA
gtacatattgatgatgtgcttccggaagtggttgaacgtgttgaatgccggaatcagggactggagaaatccagg

SEQ ID NO: 299559 - DNA, 75 bp, synthetic construct
  source 1..75: mol_type = other DNA
aaaaccctgaaagactctttgaaaacgcaagaagtggtggcacaggagcaaaaagatctgcgtatccgccagatt

SEQ ID NO: 299560 - DNA, 75 bp, synthetic construct
  source 1..75: mol_type = other DNA
tatattcagcaagttgatgaacaggtgaatgaagagctggaaaaagacctgaaagacaacatcgcactgcgtgtg

SEQ ID NO: 299561 - DNA, 75 bp, synthetic construct
  source 1..75: mol_type = other DNA
tcagcagactggtgaaaatattactcaggatacgttgcttttgttaggtagtgaagcactggagtcgatgattaa

SEQ ID NO: 299562 - DNA, 75 bp, synthetic construct
  source 1..75: mol_type = other DNA
tggccaagttctatttggacatggctgaaaatatgttcccagtcatagaggtagacgctgcaaggaaaattgaag

SEQ ID NO: 299563 - DNA, 75 bp, synthetic construct
  source 1..75: mol_type = other DNA
ttcaggacggctaagcccaggttcgccttcaataccaagtgaggttaatgcggagttggctcgccttcgagcgga

SEQ ID NO: 299564 - DNA, 75 bp, synthetic construct
  source 1..75: mol_type = other DNA
ggcaggcttccttggtggcgtttccgaagcctttgacgtcaatcctgtgccggtcgttagcactaaccctggctc

SEQ ID NO: 299565 - DNA, 75 bp, synthetic construct
  source 1..75: mol_type = other DNA
aaaaatcagtcattacctttagcagtttcttatgttggtgaaacagctgaaggtgcgcagaagcagctggcgaag

SEQ ID NO: 299566 - DNA, 75 bp, synthetic construct
  source 1..75: mol_type = other DNA
atgagagtagaaaataataatgtttctgggcaaaaccttgacccggaacagattgatttgattgatttactggtg

SEQ ID NO: 299567 - DNA, 75 bp, synthetic construct
  source 1..75: mol_type = other DNA
ttcgtcgcgatagcccgaaaaaggcaattaccttgattctggcggtgctgctgggcggcatggttggcgcgggga

SEQ ID NO: 299568 - DNA, 75 bp, synthetic construct
  source 1..75: mol_type = other DNA
aaaaatcagccgttaccgttagctgtttcttatgtcgggcacactgcggcggacgcacagcaaaagcttgctcaa

SEQ ID NO: 299569 - DNA, 75 bp, synthetic construct
  source 1..75: mol_type = other DNA
cgcactggctatcggatatctggtggtagcgaaagagaaatggacgtcgacagccattattactcagccagatgt

SEQ ID NO: 299570 - DNA, 75 bp, synthetic construct
  source 1..75: mol_type = other DNA
aaaaacttgcaggattctctgaaaacccaggaagtggtcgcgcaggagcagaaagatctgcgtatccgtcagatt

SEQ ID NO: 299571 - DNA, 75 bp, synthetic construct
  source 1..75: mol_type = other DNA
atgaaaacaacagctctgcgtctttatggtaaacgtgatttacgcctggaaacctttgaccttcctgaaatgcag

SEQ ID NO: 299572 - DNA, 75 bp, synthetic construct
  source 1..75: mol_type = other DNA
gcgacagcggcgaaattaaaagcaaatccgcaaccagagttgttgaagcataaagtcattgccagctgtttcttc

SEQ ID NO: 299573 - DNA, 75 bp, synthetic construct
  source 1..75: mol_type = other DNA
cataaaaaaaagccggcatcatgccggcccaaaaaaatataaacaagacgataaaaggctaataacggaggcatg

SEQ ID NO: 299574 - DNA, 75 bp, synthetic construct
  source 1..75: mol_type = other DNA
cgccgtggcggaagccgtgggtaacagccacgttgccgtgcgcctgtcaccgttcggccgcatttatgacctcgc

SEQ ID NO: 299575 - DNA, 75 bp, synthetic construct
  source 1..75: mol_type = other DNA
ggcgtaatgatgacctggaaggtgcagtgattggcgcgttttttctgcgtggggctgatccggaagtgatggata

SEQ ID NO: 299576 - DNA, 75 bp, synthetic construct
  source 1..75: mol_type = other DNA
atgaagaaaaaaattgaatcctaccagggtgctgcaggtggttggggtgctgtcaaatccgtagcgaatgcagta

SEQ ID NO: 299577 - DNA, 75 bp, synthetic construct
  source 1..75: mol_type = other DNA
cgtggcttgctggaagaagatgcatttatcgaacgtggcgaacgtcgtcagccggtagccagcttcgagcaggcg

SEQ ID NO: 299578 - DNA, 75 bp, synthetic construct
  source 1..75: mol_type = other DNA
gtggtagaagatgccattatgaccactactgtcacaacagattcaggtgaactattccctaccttccacccgtgg

SEQ ID NO: 299579 - DNA, 75 bp, synthetic construct
  source 1..75: mol_type = other DNA
gcaaaaagctggtgtataccgggaaatacctgccgctgacgtcactcacgcagattcaggatcaagcactggcgg

SEQ ID NO: 299580 - DNA, 75 bp, synthetic construct
  source 1..75: mol_type = other DNA
atcatcatcggccacgagttttgcggcgatattctggccgtgggtaaaaagtggcagcacaaattccagccgggt

SEQ ID NO: 299581 - DNA, 75 bp, synthetic construct
  source 1..75: mol_type = other DNA
ctcatcaccgaaggtatgcctgtttcagaagaaggccgtggctatctctatactccgggcatttacaatgacgca

SEQ ID NO: 299582 - DNA, 75 bp, synthetic construct
  source 1..75: mol_type = other DNA
ttttctgctggggggcatatcgcctcaacgggtggggaatcagattagtgatttcaaacgttcttctgacagtaa

SEQ ID NO: 299583 - DNA, 75 bp, synthetic construct
  source 1..75: mol_type = other DNA
ctactgtcacaacagattcaggtgaaccattccctaccttccacccgtggtatacagatgatttatcagggcgtt

SEQ ID NO: 299584 - DNA, 75 bp, synthetic construct
  source 1..75: mol_type = other DNA
gcaccagtacgccggggctgggcctgctgttgtggatgcaaaaagtctatggcgatgacgccccacaagcctggc

SEQ ID NO: 299585 - DNA, 75 bp, synthetic construct
  source 1..75: mol_type = other DNA
agcctttgaagcagactgtaattgcgaactgaaactggtggcgctggaagatggcgtttcgctgctcaaccgtct

SEQ ID NO: 299586 - DNA, 75 bp, synthetic construct
  source 1..75: mol_type = other DNA
ccttgtatattccaagaagcaatttataggcgatactgagataactgtgcatctttgcccacaatgctttggaaa

SEQ ID NO: 299587 - DNA, 75 bp, synthetic construct
  source 1..75: mol_type = other DNA
ctgtacggtaatgacaaagatgtcgacgccgtcaaaacgcgactgcaaaaagcaggttttacgcatatctccatt

SEQ ID NO: 299588 - DNA, 75 bp, synthetic construct
  source 1..75: mol_type = other DNA
cccgtcttgataccgcgctagaaactttctggcaggcacttcaccgccgtgatgttcaggttcctgaccttcttt

SEQ ID NO: 299589 - DNA, 75 bp, synthetic construct
  source 1..75: mol_type = other DNA
gtctacaaagccgcctattccggcgcactgaaaacgctcctcgacctgctgccagaacgcgcgctgcaaggcaaa

SEQ ID NO: 299590 - DNA, 75 bp, synthetic construct
  source 1..75: mol_type = other DNA
ttatttgttttgttagtgtatccagttatgttggggtggcggtatgcacaggatatattcaagtttatacttgtg

SEQ ID NO: 299591 - DNA, 75 bp, synthetic construct
  source 1..75: mol_type = other DNA
ttgttggtttacttttggtcgtttacagtgccgaccgcctggtttttgccgcgtccattctttgccgaacctttg

SEQ ID NO: 299592 - DNA, 75 bp, synthetic construct
  source 1..75: mol_type = other DNA
ccagggagcaacttgcagaactgccgcgtgaaggtggtttacccgttgcttttttatggctcggcattgcactga

SEQ ID NO: 299593 - DNA, 75 bp, synthetic construct
  source 1..75: mol_type = other DNA
gtggtgtacatcaccggccaatccggttcaggtaaatccgttgtgttgcgcgagctgcaacgccagatgaaggat

SEQ ID NO: 299594 - DNA, 75 bp, synthetic construct
  source 1..75: mol_type = other DNA
aatggcgttcagacgctgcttaccacgctgaaacaggatccgtatgcactcgaaacggcttacgtgtcagtgatc

SEQ ID NO: 299595 - DNA, 75 bp, synthetic construct
  source 1..75: mol_type = other DNA
cactcgttttcctgatgacggatggtggccctactgatgactggcgtaaaggacttaatgaattcaaagcagcca

SEQ ID NO: 299596 - DNA, 75 bp, synthetic construct
  source 1..75: mol_type = other DNA
actgcggcaccggctggcgcgcgtccgaaacctttatgtacgcacgcgccatgggttggaagaatgtttccgtgt

SEQ ID NO: 299597 - DNA, 75 bp, synthetic construct
  source 1..75: mol_type = other DNA
tgaccattgccgacatccagcacattaaccgtttgtgcattgttgagcacatgaacaacgcgcagattgctgatg

SEQ ID NO: 299598 - DNA, 75 bp, synthetic construct
  source 1..75: mol_type = other DNA
gcgtccctgttgaggccatcgcgcatgtgcaacgctgcctgagaaatcgatggagctatcccgacattctggaat

SEQ ID NO: 299599 - DNA, 75 bp, synthetic construct
  source 1..75: mol_type = other DNA
tatgctgattcgccctgagactgtgctggctatcgcacattcccgctttcagaacgcccacacccacccggtgcc

SEQ ID NO: 299600 - DNA, 75 bp, synthetic construct
  source 1..75: mol_type = other DNA
atgaggtgccggagccgctgcgcagctatttcgattttgaagcttatgcgcgagacctgttcagcagcggctatg

SEQ ID NO: 299601 - DNA, 75 bp, synthetic construct
  source 1..75: mol_type = other DNA
tggagtatgctgaaaagagagcagaaattgataaataccggactgagagcaaactgacagataaatcccgggcat

SEQ ID NO: 299602 - DNA, 75 bp, synthetic construct
  source 1..75: mol_type = other DNA
gagtacttaaatcaacaatgtaccgatatggcatgccaatcacgcaggatggtttcgggcgttattttgataaaa

SEQ ID NO: 299603 - DNA, 75 bp, synthetic construct
  source 1..75: mol_type = other DNA
gtcattctgtacgggcgagacgtttacgcagcagcacgtgtggcgcagattatgctgtacgcaggggtgaaagat

SEQ ID NO: 299604 - DNA, 75 bp, synthetic construct
  source 1..75: mol_type = other DNA
tgagcaccgaacagctcaacgcgtggatcaagcaacataacctgaaagccgatgccccggtggcgctgtacggta

SEQ ID NO: 299605 - DNA, 75 bp, synthetic construct
  source 1..75: mol_type = other DNA
ctggaaagtcattgaagcggcctggggcgctcctaagctttaccttatcagccatattcccggcgctgactacat

SEQ ID NO: 299606 - DNA, 75 bp, synthetic construct
  source 1..75: mol_type = other DNA
tataacggctggccacaaaccttaaatggcccttccggtcatgaacctgccgccttaaacctttctgctagctgg

SEQ ID NO: 299607 - DNA, 75 bp, synthetic construct
  source 1..75: mol_type = other DNA
tctgatgaacaactaaaagcgatgctggcaaaacacggcattcgccatgacaccacggtcattctgtacgggcgt

SEQ ID NO: 299608 - DNA, 75 bp, synthetic construct
  source 1..75: mol_type = other DNA
aaacctggtctgatgcgggtctgcccgttgaacgcggtacgccaccgacagtgaaacccgaacctgacttcggcg

SEQ ID NO: 299609 - DNA, 75 bp, synthetic construct
  source 1..75: mol_type = other DNA
tcaaacattatcaacatattactgattctcggtctggccgcgctggtgcgcccttttaccgtccattccgatgtt

SEQ ID NO: 299610 - DNA, 75 bp, synthetic construct
  source 1..75: mol_type = other DNA
ggctttgcaacagcaaacgttccgcaactggaatggcgcggtggtggaaatcgacatccgaaagtatttcaacac

SEQ ID NO: 299611 - DNA, 75 bp, synthetic construct
  source 1..75: mol_type = other DNA
tcgtgcatcgaggataaactggtgcaacttgctgtcagcgatattctcagcagtgtctatgagccactgtttctg

SEQ ID NO: 299612 - DNA, 75 bp, synthetic construct
  source 1..75: mol_type = other DNA
caaaatgctgggatacccatcgcgatggagaactcagtcaatgttccattctcgctgaatatgtgtgggggcact

SEQ ID NO: 299613 - DNA, 75 bp, synthetic construct
  source 1..75: mol_type = other DNA
cttaaattcatccattgaagatttggttcctttattatctattggcactctctttctttgtcttcagttaatacc

SEQ ID NO: 299614 - DNA, 75 bp, synthetic construct
  source 1..75: mol_type = other DNA
gacacgggtctaccaattaagctttctgccaatatatacaccaagtatcagtggcaaaactatggtgccgctaat

SEQ ID NO: 299615 - DNA, 75 bp, synthetic construct
  source 1..75: mol_type = other DNA
gaaggaccgctttgcggccaagctgaaaggcctgagagacttcctgtggaagagcctcaatgccaacagaaggca

SEQ ID NO: 299616 - DNA, 75 bp, synthetic construct
  source 1..75: mol_type = other DNA
tccaaaagttcgcaaccctaagctgcaaggcgtcgcctgtaaacatgtgatccactcaatgacacgactacagtc

SEQ ID NO: 299617 - DNA, 75 bp, synthetic construct
  source 1..75: mol_type = other DNA
acgggcgatatatcactgacggcctgtcctctaaggatttcacacgcgtatttgaactcatcaggaaagagcaaa

SEQ ID NO: 299618 - DNA, 75 bp, synthetic construct
  source 1..75: mol_type = other DNA
aatggtacattttttaccgtgaaaattcaggcgaggatattttgcttgaaatgtcatcatttaaggaatgtcttt

SEQ ID NO: 299619 - DNA, 75 bp, synthetic construct
  source 1..75: mol_type = other DNA
cggtctatcagggtgaagaccaggggaaagggtgttacttcactatcatcgatacccagtatcagctggagctgg

SEQ ID NO: 299620 - DNA, 75 bp, synthetic construct
  source 1..75: mol_type = other DNA
gcgttggctcctatttcccggaattccagaaatacgcccttgagatgatcaaagcacaaggtgccattttcggtt

SEQ ID NO: 299621 - DNA, 75 bp, synthetic construct
  source 1..75: mol_type = other DNA
aagttgcctttggtgacgatcgccgccgctcgacaaaacacttcacaaaagaagacgagaaggcgttcaatcgaa

SEQ ID NO: 299622 - DNA, 75 bp, synthetic construct
  source 1..75: mol_type = other DNA
gatttttcagcttggccatatatccgttgcttttggtctacttttgtaaggtactgggggttacaggggcaacaa

SEQ ID NO: 299623 - DNA, 75 bp, synthetic construct
  source 1..75: mol_type = other DNA
agaaacccagatttataccgtcatacgcgaacagcgccgtctgcatctggcaagaacgcaaccgccacttttctg

SEQ ID NO: 299624 - DNA, 75 bp, synthetic construct
  source 1..75: mol_type = other DNA
agtcagggcgaaaaaattgaaaccctgcgccgccactaccagatgtcagagacgcagatttactccgttatccgt

SEQ ID NO: 299625 - DNA, 75 bp, synthetic construct
  source 1..75: mol_type = other DNA
cgggaatgcttgcccgtaaggttgcagccgcacaggccgggtacatgggcgggcgtggttactatctcccggtcg

SEQ ID NO: 299626 - DNA, 75 bp, synthetic construct
  source 1..75: mol_type = other DNA
gcaaccgcaatagcgggggttcgcaaaggtgaaaacgacattgctgtcggaaatatcattggcgcaaacattttt

SEQ ID NO: 299627 - DNA, 75 bp, synthetic construct
  source 1..75: mol_type = other DNA
gcgaattactttgccatcagcgagttgacgatgggtctgacggcaattgctatcggaaccagcctgccggaactg

SEQ ID NO: 299628 - DNA, 75 bp, synthetic construct
  source 1..75: mol_type = other DNA
ttaccagaaatcatcgtttcgcttgccgcatcactgcacgaacaacgcgatttagccgttggtgtagccctcgga

SEQ ID NO: 299629 - DNA, 75 bp, synthetic construct
  source 1..75: mol_type = other DNA
agaactggcggcaaattatccgtttatcgaccctgataaaaaaatgattctggtgaccggtcacagacgtgagag

SEQ ID NO: 299630 - DNA, 75 bp, synthetic construct
  source 1..75: mol_type = other DNA
acataatgcagccaggacagggcctgacagagataacctgtcggattctggaagggctaaaacctattcttgccg

SEQ ID NO: 299631 - DNA, 75 bp, synthetic construct
  source 1..75: mol_type = other DNA
taacctgtcggattctggaagggctaaaacctattcttgccgagttcaaaccagacgtcgtgctggttcacggcg

SEQ ID NO: 299632 - DNA, 75 bp, synthetic construct
  source 1..75: mol_type = other DNA
ttggtgacagcgaacagctgcacgcgctgattgaccgtctggatgacattcctgatgatgagctgaaaaagaact

SEQ ID NO: 299633 - DNA, 75 bp, synthetic construct
  source 1..75: mol_type = other DNA
cagcgtcaggggattgagccggtactggccggtaaactggcacgcaaggtggctgcggctcaggccgcctatatg

SEQ ID NO: 299634 - DNA, 75 bp, synthetic construct
  source 1..75: mol_type = other DNA
tgcgccgccattacaggatgtcagaaacccagatttataccgtcatacgcgaacagcgccgtctgcatctggcaa

SEQ ID NO: 299635 - DNA, 75 bp, synthetic construct
  source 1..75: mol_type = other DNA
ctgatcaccgatgaagggtcggtcaatgagaaacaggaaacatttattgtaccgatgcgtaatgctggcgagctg

SEQ ID NO: 299636 - DNA, 75 bp, synthetic construct
  source 1..75: mol_type = other DNA
gattttcgccatgccagcgccagttcacggacgttatcaggtgtatatcaactactatggcggacgcagcgaaac

SEQ ID NO: 299637 - DNA, 75 bp, synthetic construct
  source 1..75: mol_type = other DNA
acccgcattttgatgaagcctgtagagcttttgcacttcgtcataatatggcgaagctggcagaacgtgcaggaa

SEQ ID NO: 299638 - DNA, 75 bp, synthetic construct
  source 1..75: mol_type = other DNA
acggacaataccgacctcgaccttcacgttgttacacctgatggcgaacacgcctggtacggtaacaccgtgctg

SEQ ID NO: 299639 - DNA, 75 bp, synthetic construct
  source 1..75: mol_type = other DNA
gccgcagagaattgaatcagatggttcttttgcacgcccttatattttcactgaaggcagcaacagtgtgcaggt

SEQ ID NO: 299640 - DNA, 75 bp, synthetic construct
  source 1..75: mol_type = other DNA
gagaaacaggaaacatttattgtaccgatgcgtaatgctggcgagctgacgctggtgaaaagttttgactggtga

SEQ ID NO: 299641 - DNA, 75 bp, synthetic construct
  source 1..75: mol_type = other DNA
cgaatgaaaaccgtcaccgcacgctggccggaaatgcagcaggagacaggcgcagcgttctccatgccgacgctg

SEQ ID NO: 299642 - DNA, 75 bp, synthetic construct
  source 1..75: mol_type = other DNA
ttcccggcgatggtgccaatgtggatgttcccgatagctctggcgacaggcaacaccttcgtgctgaaaccgtcg

SEQ ID NO: 299643 - DNA, 75 bp, synthetic construct
  source 1..75: mol_type = other DNA
ccggccactggcgagcagattcgccaggtggtgatgagtacggcacaggaaaccgaacaggcgattgccgcagca

SEQ ID NO: 299644 - DNA, 75 bp, synthetic construct
  source 1..75: mol_type = other DNA
ttaatgagctggctaaagacaaattacagtcttacgtcatgcgcgcaatgcgtgaactcggcgagcttgcgagcg

SEQ ID NO: 299645 - DNA, 75 bp, synthetic construct
  source 1..75: mol_type = other DNA
acttaacccggaacagcctcaccagttcacaccgcctgagttatggctgctgactgatctgaccgaagactcaac

SEQ ID NO: 299646 - DNA, 75 bp, synthetic construct
  source 1..75: mol_type = other DNA
atgtttgattttcaaatttccaaacatccccactatgacgaagcgtgccgggctttcgcgcagcgtcacaatatg

SEQ ID NO: 299647 - DNA, 75 bp, synthetic construct
  source 1..75: mol_type = other DNA
atgtcgtcacgccggatggtgaacacgcctggtacggtaatacagcgctgaaaaatagtggcgcactggatatgg

SEQ ID NO: 299648 - DNA, 75 bp, synthetic construct
  source 1..75: mol_type = other DNA
aagcaaaagagatcatggaaatgacaggccgtagtgaaaggactgttagaaaatatttttctcaacctcgtgaag

SEQ ID NO: 299649 - DNA, 75 bp, synthetic construct
  source 1..75: mol_type = other DNA
aagcgaaagatttagcgaaattagcagaagtatcacgttcaactgttattaaatactatggtatttctcgtgagg

SEQ ID NO: 299650 - DNA, 75 bp, synthetic construct
  source 1..75: mol_type = other DNA
atgatcactattaccaaagagcgactgctgacaatcaagcagtggcgcgaaacatacggaccgggtagcaacgtt

SEQ ID NO: 299651 - DNA, 75 bp, synthetic construct
  source 1..75: mol_type = other DNA
atgatctcctggatgttctcagcatctcaaaacgtgcttattatgactttttagataatggcgatgaacacgctc

SEQ ID NO: 299652 - DNA, 75 bp, synthetic construct
  source 1..75: mol_type = other DNA
ttacaaccaggctgtgcaggctttacgcagcaacgactgggatctctggcaggcagaagtcgctatacgtagcaa

SEQ ID NO: 299653 - DNA, 75 bp, synthetic construct
  source 1..75: mol_type = other DNA
tcatttccgcgatattaattatatttggtgttgctacaatgtacattcagttttatgactcagaaaagcagagtt

SEQ ID NO: 299654 - DNA, 75 bp, synthetic construct
  source 1..75: mol_type = other DNA
tgaaaccattatcaaaacagcaacgtatgaaggggttatccgcaagcaggccacctttgccagcgggccggtgac

SEQ ID NO: 299655 - DNA, 75 bp, synthetic construct
  source 1..75: mol_type = other DNA
tactggtggcgctttcgcctgttgctcacggcgaagatgtgcaggaagtcgagattgatgcgccgctctcaggct

SEQ ID NO: 299656 - DNA, 75 bp, synthetic construct
  source 1..75: mol_type = other DNA
actactatggcggacgcagcgaaacggaattgacgaccgcccaactgacgctgatcaccgatgaaggatcggtca

SEQ ID NO: 299657 - DNA, 75 bp, synthetic construct
  source 1..75: mol_type = other DNA
acttgccagccatcataggcatgatgttgatttgtgccggtgtgttagtcattaacttgttgtcacgaagtgcac

SEQ ID NO: 299658 - DNA, 75 bp, synthetic construct
  source 1..75: mol_type = other DNA
aattattaatgaagcccctgtaccagcaggagatgcagttatattccagatacaaaagtgaactggctgtctgga

SEQ ID NO: 299659 - DNA, 75 bp, synthetic construct
  source 1..75: mol_type = other DNA
atgagtgaagtaacagatttagttgttattgaaaaagcaaatgcaatgactgtatttcagtctgccgaccagatt

SEQ ID NO: 299660 - DNA, 75 bp, synthetic construct
  source 1..75: mol_type = other DNA
acccggatgaaaaccgttaccgcacgctggccgaacggtcagcagatcgcatccgagttcagtatgcctacgcta

SEQ ID NO: 299661 - DNA, 75 bp, synthetic construct
  source 1..75: mol_type = other DNA
ataaatgcattcaaaggaaatgttgtggttgaatcagcagatacaggaccttctgcggctgcaggttcctcattc

SEQ ID NO: 299662 - DNA, 75 bp, synthetic construct
  source 1..75: mol_type = other DNA
acaaactctgtagctgttcaggcaaaaatattcccagataacatgttaagtggttctggttcttcagcaacacca

SEQ ID NO: 299663 - DNA, 75 bp, synthetic construct
  source 1..75: mol_type = other DNA
tggcgaaagtttttgataccacagtcgatttttggctaaacctccaggcggcagttgatctttgggaagttgaaa

SEQ ID NO: 299664 - DNA, 75 bp, synthetic construct
  source 1..75: mol_type = other DNA
gcacaggaagtggcgaaggctccgtattaaccggcggtaaagccatcagtgcggggccgggtggcattgcggcag

SEQ ID NO: 299665 - DNA, 75 bp, synthetic construct
  source 1..75: mol_type = other DNA
aatgtgtgaaaataaccactgcggcggcaggcaacttttataccgctaaagtgggttcaaaagttgtgaaggctt

SEQ ID NO: 299666 - DNA, 75 bp, synthetic construct
  source 1..75: mol_type = other DNA
gagagtaataacatcgcaacaatccaagctggtgttaaagccctttatacttccgcttcaagctttactggtttg

SEQ ID NO: 299667 - DNA, 75 bp, synthetic construct
  source 1..75: mol_type = other DNA
gtatttgtgacgcaagaaggtgtggctgaaggtgagaatggcgtcagttttgtctggcagaaaacgcttagttaa

SEQ ID NO: 299668 - DNA, 75 bp, synthetic construct
  source 1..75: mol_type = other DNA
cacggtttaagtgacaatgccgacgcctgggttaggcattgcgagaacatctgccaacagtggcaggtgccgctg

SEQ ID NO: 299669 - DNA, 75 bp, synthetic construct
  source 1..75: mol_type = other DNA
cagcccgcagcgccgcactttgcgctgaacaagagagcctgttagatgaactgctggcggatgatttagcgcact

SEQ ID NO: 299670 - DNA, 75 bp, synthetic construct
  source 1..75: mol_type = other DNA
acaggaacgattcgtgcacgtttacggctggttctctcgtgggatacggacaatacggtgatgctgccaacttac

SEQ ID NO: 299671 - DNA, 75 bp, synthetic construct
  source 1..75: mol_type = other DNA
atggcggtcagatattggggttggatgttaaaaaaggtgaatcattggggagtgccgttaagcggtatatgtcaa

SEQ ID NO: 299672 - DNA, 75 bp, synthetic construct
  source 1..75: mol_type = other DNA
ctgaacgatatcgttagttctccttcacttaagagcattacaggcttacgtggagtaatccccaacgttccaggc

SEQ ID NO: 299673 - DNA, 75 bp, synthetic construct
  source 1..75: mol_type = other DNA
gcgcggcacttattggtgttgcggcggttggcgcaacggtcaatgtcgtaatgggggttgcgaaatttatctggg

SEQ ID NO: 299674 - DNA, 75 bp, synthetic construct
  source 1..75: mol_type = other DNA
tgcggctcccgacgatgtactggcccccaactatgcccgggaagaaggctggcagtggtacaacccgaatgcgga

SEQ ID NO: 299675 - DNA, 75 bp, synthetic construct
  source 1..75: mol_type = other DNA
ggacggtaaaatcagcgatcagctcccgcagagtcgcccggacagcggacaggctgaacagatgcgcgccacgca

SEQ ID NO: 299676 - DNA, 75 bp, synthetic construct
  source 1..75: mol_type = other DNA
gcgccgacttttcaggaacgtctggccagcatgacaccatctgaacagaaaaaggtcctgcaacaggcgacacgg

SEQ ID NO: 299677 - DNA, 75 bp, synthetic construct
  source 1..75: mol_type = other DNA
agggtaaaacgagactgagcaacagtggtgaaacactaccggtgactaaccctgcaaccggagaagtgattcgcc

SEQ ID NO: 299678 - DNA, 75 bp, synthetic construct
  source 1..75: mol_type = other DNA
gcgcgcgaattcgcccagtcggttgaagccgggatggtcggtattaatattccagttccggttccgatggcattt

SEQ ID NO: 299679 - DNA, 75 bp, synthetic construct
  source 1..75: mol_type = other DNA
tgtcttttgttacatgggaactaccagaaatgccatcacctgatgatgcgctttatatgttaaggatcattattg

SEQ ID NO: 299680 - DNA, 75 bp, synthetic construct
  source 1..75: mol_type = other DNA
cagctattcgggaagaacctgaatggataaatggcgaatataaaaagcatgagaagaaagttaaaatgcttcagg

SEQ ID NO: 299681 - DNA, 75 bp, synthetic construct
  source 1..75: mol_type = other DNA
gctcaaacacgtagaagcaacctttgaaagtcagcatcagtttattgatgcggtgataacccttaaaccgataat

SEQ ID NO: 299682 - DNA, 75 bp, synthetic construct
  source 1..75: mol_type = other DNA
tcaaaactacaggatcttctgttaaacactgtaaagccatctacattgcatgttgttgagtctaagatacaattt

SEQ ID NO: 299683 - DNA, 75 bp, synthetic construct
  source 1..75: mol_type = other DNA
cttcccggctacgtttctggtcgacccgaaaactcaccagtggcaaccccttgcatgggggtttatgagccacga

SEQ ID NO: 299684 - DNA, 75 bp, synthetic construct
  source 1..75: mol_type = other DNA
acgtttatttgctttaggcaatgcgcttgtggtaatgattggccaacaaagtttcaggatattaaaattgaaagg

SEQ ID NO: 299685 - DNA, 75 bp, synthetic construct
  source 1..75: mol_type = other DNA
taaagaaaatcatctaacattaaaggagtctccttcccttgtttatctgttttgcttatgtgtctctgtaattaa

SEQ ID NO: 299686 - DNA, 75 bp, synthetic construct
  source 1..75: mol_type = other DNA
gaagatgaaaggcagggacggaacttccttcgacttctcaacgattattataagcaaggaatgactacaaagaaa

SEQ ID NO: 299687 - DNA, 75 bp, synthetic construct
  source 1..75: mol_type = other DNA
acagataaagagttaagatcatttgatggcagcgcagtcaattttgatgacaaaatcgattgtatttatataaaa

SEQ ID NO: 299688 - DNA, 75 bp, synthetic construct
  source 1..75: mol_type = other DNA
cccctgatgagtgctgggaaggatggtcagaagatacggagcatggatgggttgaagtccctgtgggtatgcatc

SEQ ID NO: 299689 - DNA, 75 bp, synthetic construct
  source 1..75: mol_type = other DNA
tttgcccgcaccttgttgcccggtgaagtgctggttacagcgcaacatctcgacgatcaatgtgaaacctttctg

SEQ ID NO: 299690 - DNA, 75 bp, synthetic construct
  source 1..75: mol_type = other DNA
aagtgctggttaccgcgcagcatcttgacgatcaatgtgaaacctttctgctggcgctaaaacgcggtagcggcc

SEQ ID NO: 299691 - DNA, 75 bp, synthetic construct
  source 1..75: mol_type = other DNA
accgttctgctgcatcagttggtgcagtggcggacggaaaatccgggcgtcactctgcgcgctattcatgtgcat

SEQ ID NO: 299692 - DNA, 75 bp, synthetic construct
  source 1..75: mol_type = other DNA
tcgcccggtattgccggaaatgaccgacgtgcatctgccgctcaacctgaacattgaagagtttaagggcgagca

SEQ ID NO: 299693 - DNA, 75 bp, synthetic construct
  source 1..75: mol_type = other DNA
aacggcattaacaccgccaaagagttcccggagtggccgtcgaaactcaatggcttgattaaaacccgcggtagc

SEQ ID NO: 299694 - DNA, 75 bp, synthetic construct
  source 1..75: mol_type = other DNA
caattcggcacggttgttacgcaactccgccgtcagattcagcgtctgaaacgccacgggcagcgccgcatcgtt

SEQ ID NO: 299695 - DNA, 75 bp, synthetic construct
  source 1..75: mol_type = other DNA
tgcgtggttgacgacggaaaatggtgtgattgtggatgtttcctttatgagtacgttatcgcggcgattacctga

SEQ ID NO: 299696 - DNA, 75 bp, synthetic construct
  source 1..75: mol_type = other DNA
aacagctttactggccgtttactggcgagaagcagtatcaggcggatgatctgaaactgaaactcaccggaaaaa

SEQ ID NO: 299697 - DNA, 75 bp, synthetic construct
  source 1..75: mol_type = other DNA
agttgtcgaaccgaagattgaaaatccgcagccggatgaaaaaccgctgggcgaaacgctgaaagatctcttttc

SEQ ID NO: 299698 - DNA, 75 bp, synthetic construct
  source 1..75: mol_type = other DNA
ccgcacgcggggggaactggagcagtgggcattagcgcatggtttacgctggattgaagacgaaagtaatcagga

SEQ ID NO: 299699 - DNA, 75 bp, synthetic construct
  source 1..75: mol_type = other DNA
attcagccttactaaggcatcattttctacagcgttttttattatctccttcgcaatacagaaaaaacagccgtc

SEQ ID NO: 299700 - DNA, 75 bp, synthetic construct
  source 1..75: mol_type = other DNA
tttgagagttcacggacttttgaaagtgatggtggtgggggaagccgctcgggaaccccaccaggggtaattcaa

SEQ ID NO: 299701 - DNA, 75 bp, synthetic construct
  source 1..75: mol_type = other DNA
tcgtttgagaattcaggggcttttgaaagcgatggtggtgggggaaggattcgaaccttcgaagtcgatgacggc

SEQ ID NO: 299702 - DNA, 75 bp, synthetic construct
  source 1..75: mol_type = other DNA
aacgtttttacgatgagatgctcccgatcgcagaccgggaattcacgaactggctgaacacattaaaagagaagg

SEQ ID NO: 299703 - DNA, 75 bp, synthetic construct
  source 1..75: mol_type = other DNA
atgaattcttatcttaaaatatcacttgcagaaataacaatgttatcctgcctgtcacctacactagtctgtgca

SEQ ID NO: 299704 - DNA, 75 bp, synthetic construct
  source 1..75: mol_type = other DNA
acgagattatcaatctctcgttatccaacggtgcgacgctggatgaaggtgagcaagttgttaatctgccaaacg

SEQ ID NO: 299705 - DNA, 75 bp, synthetic construct
  source 1..75: mol_type = other DNA
ctctggctaaaaacctgatgtttgctcagaccaccaaaggtgttctggaaacaggtatctaccgtggcgtagtca

SEQ ID NO: 299706 - DNA, 75 bp, synthetic construct
  source 1..75: mol_type = other DNA
tcaaaccaccaaaggtgttctggaaacaggtatctaccgtggcgtagtaagcatttatctgtctcaggatatcta

SEQ ID NO: 299707 - DNA, 75 bp, synthetic construct
  source 1..75: mol_type = other DNA
tcaagccaccaaaggtgttctggaaacaggtatttacagtggcgtagtcagcatttatctgtcccaggatatcta

SEQ ID NO: 299708 - DNA, 75 bp, synthetic construct
  source 1..75: mol_type = other DNA
gagaattccggggcttttgaaagtgatggtggtgggggaaggattactcagcgctgcgcgcttcgcccttcgggt

SEQ ID NO: 299709 - DNA, 75 bp, synthetic construct
  source 1..75: mol_type = other DNA
tttgagagttcagggacttttgaaagtgatggtggtgggggaaggattcgaaccttggtcgaagcttctcatcct

SEQ ID NO: 299710 - DNA, 75 bp, synthetic construct
  source 1..75: mol_type = other DNA
cgcacgcgatccttcgctctatggccggatggattttgcctggtgtggcaatgcgccggtgaagctgctggagta

SEQ ID NO: 299711 - DNA, 75 bp, synthetic construct
  source 1..75: mol_type = other DNA
tggtacgaatggatgtatcaccagatgttgtattcgaggctacaccaaacctgtttactctcgacggtcgcgtgg

SEQ ID NO: 299712 - DNA, 75 bp, synthetic construct
  source 1..75: mol_type = other DNA
gcgttggcgctacttgaattaggtattgagctttttgccgtgctgatgtttttcgtcacgatgctggggaaattt

SEQ ID NO: 299713 - DNA, 75 bp, synthetic construct
  source 1..75: mol_type = other DNA
accagccatctgtgaacgagatcggtctgttctatgtgctgtttttcggggcgttggcgctacttgaacttggta

SEQ ID NO: 299714 - DNA, 75 bp, synthetic construct
  source 1..75: mol_type = other DNA
gcgccgatgatattaccgccatgtggaaagcatggaatatcaaaccagatcagcaagtttcattctactgcggca

SEQ ID NO: 299715 - DNA, 75 bp, synthetic construct
  source 1..75: mol_type = other DNA
aatcaaaggttctgatacccaggactgctttgtctatcgcaccattgaagacctcaacgccattgaatcctgcgc

SEQ ID NO: 299716 - DNA, 75 bp, synthetic construct
  source 1..75: mol_type = other DNA
gtaagccgtctatcggtgttgataaactgccggacagcgcgcaaatctgctcctgcttcgacgtcaccaaaggtg

SEQ ID NO: 299717 - DNA, 75 bp, synthetic construct
  source 1..75: mol_type = other DNA
tgaccttagcgccaagctgaaactgctgggcgtagacgtaggcggtattggtgatgcgcacggtcgcacgcctgg

SEQ ID NO: 299718 - DNA, 75 bp, synthetic construct
  source 1..75: mol_type = other DNA
cgtcatatgttgccaaatgccatggtcgctaccctcacctttttaccgtttattttatgtagttcgataaccacc

SEQ ID NO: 299719 - DNA, 75 bp, synthetic construct
  source 1..75: mol_type = other DNA
actcggtgaactgctgttacaagggaaaataaccttcaggccccgtggcttgggatcaccgccttcttgtcggtg

SEQ ID NO: 299720 - DNA, 75 bp, synthetic construct
  source 1..75: mol_type = other DNA
aggcccgttgggcgcgttttcgccataaccgtcgcggctactggtcgttatggattttcctcgtcttgtttggtt

SEQ ID NO: 299721 - DNA, 75 bp, synthetic construct
  source 1..75: mol_type = other DNA
gtgtctctggctacgccgtgcgcttcaacgcactgacccgtgaacagcaacaggatgttatttcacgtactttta

SEQ ID NO: 299722 - DNA, 75 bp, synthetic construct
  source 1..75: mol_type = other DNA
acgaagcttcgctgatggcgctacatgatcgtgatgtctatcgcaccatggcgtgcggcatcgcgggcctgtcgg

SEQ ID NO: 299723 - DNA, 75 bp, synthetic construct
  source 1..75: mol_type = other DNA
cggcgaactgctgttacaagggaaaaataaccttcaggccccgtggcttgggatcaccgccttcttgtcggtggc

SEQ ID NO: 299724 - DNA, 75 bp, synthetic construct
  source 1..75: mol_type = other DNA
gttctggtcggtgagcgcgcgattaccatcaaccgtcaggagaaggtgatccactccagcgccggacgtaccgtt

SEQ ID NO: 299725 - DNA, 75 bp, synthetic construct
  source 1..75: mol_type = other DNA
ccaaaggtaatgaacagcaggtcaatctcgacaaacttaccgtcgcggcgctggaagggaaaacggaacttaagg

SEQ ID NO: 299726 - DNA, 75 bp, synthetic construct
  source 1..75: mol_type = other DNA
aaccattgatgccggagcggaaggacatgcggtggtcaatctcaaccgttttgacctcgcgatgctgaaaccgtt

SEQ ID NO: 299727 - DNA, 75 bp, synthetic construct
  source 1..75: mol_type = other DNA
ggacccagcagggtgaaatctacctgaacggtgatgccgactggagccaaattgaaaactggcgggcgcgggtaa

SEQ ID NO: 299728 - DNA, 75 bp, synthetic construct
  source 1..75: mol_type = other DNA
ggcctgaacgggcagatcaacatccctgaagggcgcttccatgcctatggtcaggatctgattgtgcgtaagggt

SEQ ID NO: 299729 - DNA, 75 bp, synthetic construct
  source 1..75: mol_type = other DNA
attaacagcaacctgattgtccacgttggcaacaatgtgcgcattgacgcctttggcctgaaagcgcggctgacg

SEQ ID NO: 299730 - DNA, 75 bp, synthetic construct
  source 1..75: mol_type = other DNA
ggcgatctcaacgtcgtacaggacaagcaaggtctggggctgaatgggcagatcaacattcctgatgggcgcttc

SEQ ID NO: 299731 - DNA, 75 bp, synthetic construct
  source 1..75: mol_type = other DNA
gtgaaaaagcggcgggtatggtgagcgccaacttacgtctgggcggtgatgtgcagagcccgcagttgtttggtc

SEQ ID NO: 299732 - DNA, 75 bp, synthetic construct
  source 1..75: mol_type = other DNA
cctgctcggtgcggtactggtgggtgataccagcgactacggtaacctgctgcaactggtgctgaacgctatcga

SEQ ID NO: 299733 - DNA, 75 bp, synthetic construct
  source 1..75: mol_type = other DNA
cggttcgctgctggcctcctgctggaacgaatacattctgaagccggaacatactccgctgcaggattctaacga

SEQ ID NO: 299734 - DNA, 75 bp, synthetic construct
  source 1..75: mol_type = other DNA
atacggcgtgggtatatttgactctatagcaacactcacgttacgttatcgcctgatgcctaagctatatctgga

SEQ ID NO: 299735 - DNA, 75 bp, synthetic construct
  source 1..75: mol_type = other DNA
tgagaggcagtatcaggcggatgatctgaaattgaaactcaccggtaaaatgaccgattacacgatctctatgcg

SEQ ID NO: 299736 - DNA, 75 bp, synthetic construct
  source 1..75: mol_type = other DNA
tggatgtaccgtgggcgcgcattgtggtgcacgatctaccggaaagtgcggtgggcgtctccagcgatgtggtaa

SEQ ID NO: 299737 - DNA, 75 bp, synthetic construct
  source 1..75: mol_type = other DNA
gcaaagcagaagaattagcgcgcgtggtcaaaccgggaggatgggtcattaccgctaccccgggaccacgacatt

SEQ ID NO: 299738 - DNA, 75 bp, synthetic construct
  source 1..75: mol_type = other DNA
atgttaatttgctgcccgttcagcataaacgatcccgcgatccgggtgatagtgcggaaatgatgcaagcgcggc

SEQ ID NO: 299739 - DNA, 75 bp, synthetic construct
  source 1..75: mol_type = other DNA
accgccacaccgggaccgcgacatttgatggaactgaaggggctaatctacgatgaagtgcatcttcatgcgcct

SEQ ID NO: 299740 - DNA, 75 bp, synthetic construct
  source 1..75: mol_type = other DNA
ctgccggagacatatgaccgtccggacccgcgtattaaacagctggcgcgtcgcagcactgtcacgccgggtggt

SEQ ID NO: 299741 - DNA, 75 bp, synthetic construct
  source 1..75: mol_type = other DNA
agtatgttatggcgttttactggccggtatcttcactgccacagggcgttgccctgaccggagacggggggaata

SEQ ID NO: 299742 - DNA, 75 bp, synthetic construct
  source 1..75: mol_type = other DNA
ccgcagaatgccgggatacttctggtgccctgttgccgtggcgggtcagcattcaccagcgggccggacggttca

SEQ ID NO: 299743 - DNA, 75 bp, synthetic construct
  source 1..75: mol_type = other DNA
gtgtacgccagccagtatgccccacatcacggagacagcacccaaaacgtcagctcctatggtacgttaggcttt

SEQ ID NO: 299744 - DNA, 75 bp, synthetic construct
  source 1..75: mol_type = other DNA
ctttcattcgatgtcaccggcgcagaagcctctctgcaacaacagaatagcgataaattacgcggctatagttat

SEQ ID NO: 299745 - DNA, 75 bp, synthetic construct
  source 1..75: mol_type = other DNA
ctcgactacaacctgtacgccagtcagtatgcgccacatcacggcgacagcacccaaaatatcagttcctacggc

SEQ ID NO: 299746 - DNA, 75 bp, synthetic construct
  source 1..75: mol_type = other DNA
ctcgaaggtagcgataaaagcggcggcgaaacgctatccgcaggtcactctttgtgtcgcttccagccaccgttt

SEQ ID NO: 299747 - DNA, 75 bp, synthetic construct
  source 1..75: mol_type = other DNA
catgcagaacaactggaaggttttacattacagcagagtgatgagttgtgttatctgatgcgtcttcgcggtgat

SEQ ID NO: 299748 - DNA, 75 bp, synthetic construct
  source 1..75: mol_type = other DNA
ttcggtgcatttaataacgaatggcatacgctggcattccgttttgccggtaataacagcattcaggtgacgccg

SEQ ID NO: 299749 - DNA, 75 bp, synthetic construct
  source 1..75: mol_type = other DNA
actccggcgatgtccacgctgtttgcctatcgcgcagcagaatcaggtggtgccctgtcgcagcagggatggaca

SEQ ID NO: 299750 - DNA, 75 bp, synthetic construct
  source 1..75: mol_type = other DNA
caacacgccatcgggtccgtctgcagatacgtccgttcgcacaatctccctgctgccggcagccggagaggctgc

SEQ ID NO: 299751 - DNA, 75 bp, synthetic construct
  source 1..75: mol_type = other DNA
tactggccgggcagtccaatgccatggcttacggtgaagggcttccgctgccggattcatacgatgctccggatc

SEQ ID NO: 299752 - DNA, 75 bp, synthetic construct
  source 1..75: mol_type = other DNA
atgacatttgctgactgtctcatcagttttaatacacaggattgcctgtgggtaaggccagtatccggtgatccg

SEQ ID NO: 299753 - DNA, 75 bp, synthetic construct
  source 1..75: mol_type = other DNA
aacacgaagctggggtcattcggcgcatttgataacgaatggcatacgctgggcttccgttttgccggtaataac

SEQ ID NO: 299754 - DNA, 75 bp, synthetic construct
  source 1..75: mol_type = other DNA
ttctcacaaggaaggcatatttttaaaggggagttgctgtcagcagttttagctgatgatagcaatcaccagctt

SEQ ID NO: 299755 - DNA, 75 bp, synthetic construct
  source 1..75: mol_type = other DNA
acatattgccaaaaaactgcttccgtatatcccgaataacgcggggatcctgctggtaccatgctgtcgtggtgg

SEQ ID NO: 299756 - DNA, 75 bp, synthetic construct
  source 1..75: mol_type = other DNA
gcgccatgcgggaagagtggcgctaaacgcgggggcatcatcgacagtatcagaggtgcgcccttcatcgccttc

SEQ ID NO: 299757 - DNA, 75 bp, synthetic construct
  source 1..75: mol_type = other DNA
ggataaactgcatgtgacagacattaccaggaatgcgacttacccggtactgatagacagcattgtggtggaagt

SEQ ID NO: 299758 - DNA, 75 bp, synthetic construct
  source 1..75: mol_type = other DNA
tgcatgatgtgcaggacatgagccgtcttaaccatccgaaagcggacctgtcaaaggggcagtacggaaccgtgg

SEQ ID NO: 299759 - DNA, 75 bp, synthetic construct
  source 1..75: mol_type = other DNA
ctgcttgctgtggtgtggatgcagggcgagtttgatattgatgcgaagccgacggagcattctgcgctgtttctg

SEQ ID NO: 299760 - DNA, 75 bp, synthetic construct
  source 1..75: mol_type = other DNA
ttctgaaactgaagcaccaacgccgtcaccttcagaagctgaagcagtaaccacaacactgctgtcttaccgcgt

SEQ ID NO: 299761 - DNA, 75 bp, synthetic construct
  source 1..75: mol_type = other DNA
tggacatctgcggaccgggcgagccatttcagtgcctgggcgcgtcgtggaattatctctgaccgtctggccacg

SEQ ID NO: 299762 - DNA, 75 bp, synthetic construct
  source 1..75: mol_type = other DNA
caatacctcgcagatggtctcctggtatgactcatcagatcgcaacaatatctggaatatttctgcttcagcaac

SEQ ID NO: 299763 - DNA, 75 bp, synthetic construct
  source 1..75: mol_type = other DNA
atcatcaaaccgcccgacacatttcagttcatgggcgcgcaggagcattattccggatcgtatggcaaccgctat

SEQ ID NO: 299764 - DNA, 75 bp, synthetic construct
  source 1..75: mol_type = other DNA
acacgccatcggggccgtctgaagatgcatccatacgcacaatctccctgttgccgacagccggagacgctgctg

SEQ ID NO: 299765 - DNA, 75 bp, synthetic construct
  source 1..75: mol_type = other DNA
gctgaatgcgctgacgctgacggatattaccaaaaatgcagcgtatggcgttgagatagaaagtctggtgctgga

SEQ ID NO: 299766 - DNA, 75 bp, synthetic construct
  source 1..75: mol_type = other DNA
tctccgccatgcccggagagttttcagtcaaggttgccggtggcacggtggcatttattgaaagtcctttcaggc

SEQ ID NO: 299767 - DNA, 75 bp, synthetic construct
  source 1..75: mol_type = other DNA
gtcagaagacccggatattccggcatcaggatattacggtgcagcctcccggacgtcggcaaactggacgtcagc

SEQ ID NO: 299768 - DNA, 75 bp, synthetic construct
  source 1..75: mol_type = other DNA
cgtcgtggcgatggccgggactggtaacccgttcctgatgtcgttcttcacccagaccacagacggcaaactgaa

SEQ ID NO: 299769 - DNA, 75 bp, synthetic construct
  source 1..75: mol_type = other DNA
acggaaagcccgcagccctccacatctgcacctcagccgggcgcaggcacacagccatcaccggaagttccaccg

SEQ ID NO: 299770 - DNA, 75 bp, synthetic construct
  source 1..75: mol_type = other DNA
ctgaccgtctggcaacggcgatcctgatgcatgcagggaagacagccgccttcctgaaaggcacacccgcaccgt

SEQ ID NO: 299771 - DNA, 75 bp, synthetic construct
  source 1..75: mol_type = other DNA
tgaagccgtcggctggagaaggcacagtaatcagcgccaccagagacccggagtattactttgttgtggttctgg

SEQ ID NO: 299772 - DNA, 75 bp, synthetic construct
  source 1..75: mol_type = other DNA
tgcggagcgactgacacaaaaactgaaggaggggtggcagccatttggcagtccggtggccatcacgccttatac

SEQ ID NO: 299773 - DNA, 75 bp, synthetic construct
  source 1..75: mol_type = other DNA
ggagaaggtgatgcggcagtggggacgcatgcgcagcatccggggctgtttagtgcgatggtgaatcagttcaga

SEQ ID NO: 299774 - DNA, 75 bp, synthetic construct
  source 1..75: mol_type = other DNA
gtgacagctcagccacctggacgtcacaggacagggcgagccatttcagttcatgggctcgccgtgggattattt

SEQ ID NO: 299775 - DNA, 75 bp, synthetic construct
  source 1..75: mol_type = other DNA
aaggaaggctggcagccgtttggcagtccggttgctattacgccttataccctgatgcaggcgattgcagcggag

SEQ ID NO: 299776 - DNA, 75 bp, synthetic construct
  source 1..75: mol_type = other DNA
gttaccgcaggctggtacggttcacttaccgctacacgtcatggtgtcgcccttcacgattatagctatggcgat

SEQ ID NO: 299777 - DNA, 75 bp, synthetic construct
  source 1..75: mol_type = other DNA
caagcgtggttaaaataccaggcaacaaactggacgccaccagagttttgggatgccggtatcgccgggtttatt

SEQ ID NO: 299778 - DNA, 75 bp, synthetic construct
  source 1..75: mol_type = other DNA
gtcaccctgacaggggatgcagggaataatctgctggcatcgttttacatccagacagacgcaaaagacctgaat

SEQ ID NO: 299779 - DNA, 75 bp, synthetic construct
  source 1..75: mol_type = other DNA
gtggcacaaaatggtcgtgtactttatcaaaccactgtcgcgccaggcccttttactatttctgatttggggcaa

SEQ ID NO: 299780 - DNA, 75 bp, synthetic construct
  source 1..75: mol_type = other DNA
gattacgtgtcaatgaatgagtacctcaactcacgtaatggtgatgagtcaatcgataacgaaaaagaaagttat

SEQ ID NO: 299781 - DNA, 75 bp, synthetic construct
  source 1..75: mol_type = other DNA
aagtggttcgttactctgcttaaccaaagaaaacctgactaatttcggccttaatacggactttattgaatcatt

SEQ ID NO: 299782 - DNA, 75 bp, synthetic construct
  source 1..75: mol_type = other DNA
ttgagaaaaataacagcgcgaaatcctggtcaatgtactgtgatattgctgcagacaaggcaaaacttttactgg

SEQ ID NO: 299783 - DNA, 75 bp, synthetic construct
  source 1..75: mol_type = other DNA
ctcagagtctgtaattttttacgatgccaaaaaagcttcagacaatcagctgaaaccttatggctgggacggtat

SEQ ID NO: 299784 - DNA, 75 bp, synthetic construct
  source 1..75: mol_type = other DNA
gatatggtgggacagtgcgctggtggttctgctgacggtgttccctggatatgtggagacacaacttatttctgg

SEQ ID NO: 299785 - DNA, 75 bp, synthetic construct
  source 1..75: mol_type = other DNA
ttgatgacagcggcaataaagctctgcgaattgagaaaaataacagctcgaaatcctggtcaatgtactgtgagg

SEQ ID NO: 299786 - DNA, 75 bp, synthetic construct
  source 1..75: mol_type = other DNA
gggatggtcagccagtggcggcagggcagaagtggtcagcgatgcggagggaaccggaggtaaggcagtgaagct

SEQ ID NO: 299787 - DNA, 75 bp, synthetic construct
  source 1..75: mol_type = other DNA
cctgatgcaggccattgcggcggaaggtgatgtcaccacacctgtggtggtgaagccgtcggatggagaaggcgc

SEQ ID NO: 299788 - DNA, 75 bp, synthetic construct
  source 1..75: mol_type = other DNA
aatcacacttgcaggcgctgcgtctggcgcaacagcacggctggcaaaactatctgctgctggaagatgacgcgg

SEQ ID NO: 299789 - DNA, 75 bp, synthetic construct
  source 1..75: mol_type = other DNA
ccgataacagtggctttattttcgatgctattcacgttgataagcggttgatcctgctagactttccgggcatga

SEQ ID NO: 299790 - DNA, 75 bp, synthetic construct
  source 1..75: mol_type = other DNA
ttggcgggcgtaccgatgtagtggaatatgcacgcgctgagcgtgttgctggcgattcaaaattcaatggatgga

SEQ ID NO: 299791 - DNA, 75 bp, synthetic construct
  source 1..75: mol_type = other DNA
aatcacacttgcaggcgctgcgtctggcgcaacagcacggctggcaaaactacctgttgctggaagatgacgcgg

SEQ ID NO: 299792 - DNA, 75 bp, synthetic construct
  source 1..75: mol_type = other DNA
ggcagcgcaaaagtggtcggcaatccgcgcttcgacgcctggcataacggcacgttcgaccgcgctctgccggaa

SEQ ID NO: 299793 - DNA, 75 bp, synthetic construct
  source 1..75: mol_type = other DNA
gtgaattgctcgacggcgagaaaagctactccacgccggagagcgccgatcagcaaatccgcgaaatattgccgg

SEQ ID NO: 299794 - DNA, 75 bp, synthetic construct
  source 1..75: mol_type = other DNA
ctggatacccttcaattcttgtatcaatattatttcttggcggcatccagttaattggtattggagtgctaggtg

SEQ ID NO: 299795 - DNA, 75 bp, synthetic construct
  source 1..75: mol_type = other DNA
ctggatacccatctattttagtgtcaattttgtttctgggcggcattcagttaattggcataggtgtgttagggg

SEQ ID NO: 299796 - DNA, 75 bp, synthetic construct
  source 1..75: mol_type = other DNA
tgatttgaaagccatcgtcaaaaccagccatttggtgaaaatcgattatccgaaatttatcgttcacggtaagaa

SEQ ID NO: 299797 - DNA, 75 bp, synthetic construct
  source 1..75: mol_type = other DNA
aataaccagcttctctacattcccattacgcatctggacttacatcggtcttctcgttgctggagtttcgttcct

SEQ ID NO: 299798 - DNA, 75 bp, synthetic construct
  source 1..75: mol_type = other DNA
attaatgcacttgctgtagctgacgataaagttaaggcactgtcgtttacgcgtaacttcggaaaagaacccgca

SEQ ID NO: 299799 - DNA, 75 bp, synthetic construct
  source 1..75: mol_type = other DNA
tgtctcgcgaagtagtagaaaatattaagctcatgccagaacgaaacctgtttatgaagggtgtgctgagctggg

SEQ ID NO: 299800 - DNA, 75 bp, synthetic construct
  source 1..75: mol_type = other DNA
tggggtgcggtgcatgcgaggcttactgagattcgccatcactattgcgatgcgtttatggatggcaaagcggga

SEQ ID NO: 299801 - DNA, 75 bp, synthetic construct
  source 1..75: mol_type = other DNA
ctgagtggttctataaattacacaacaaaataagcaccccaaagatcgaggaaaatgtcggagattttcgactca

SEQ ID NO: 299802 - DNA, 75 bp, synthetic construct
  source 1..75: mol_type = other DNA
ctgagtggttctataagcttcacaataaaataagcaatccaaagattgaagagaatgtcggcgatttccgcctga

SEQ ID NO: 299803 - DNA, 75 bp, synthetic construct
  source 1..75: mol_type = other DNA
tgttgacctgcaagacccgattgaggttattcctcatcttattgaaaagtggcaggcaggtgctgatatggtgct

SEQ ID NO: 299804 - DNA, 75 bp, synthetic construct
  source 1..75: mol_type = other DNA
attaatgctctggctgtggccgatccgcttgtcgttcctctttccttcacccgtaatttcggtaaagagcccgct

SEQ ID NO: 299805 - DNA, 75 bp, synthetic construct
  source 1..75: mol_type = other DNA
ttgcgcatgtggacatacatcggacttgctgtcgccagcctgtcattcatttatggcgcgtggatgattttagat

SEQ ID NO: 299806 - DNA, 75 bp, synthetic construct
  source 1..75: mol_type = other DNA
atttacgctctggctgtttctgatccgctagttgttccgctgtcatttacgcgcaactttggtaaagaaccagca

SEQ ID NO: 299807 - DNA, 75 bp, synthetic construct
  source 1..75: mol_type = other DNA
ggcaaagcgttcagaccgctctacagatggacgtctgaagcgaaaaactgctgagtggttctataagctccacaa

SEQ ID NO: 299808 - DNA, 75 bp, synthetic construct
  source 1..75: mol_type = other DNA
ctgcgcatatggacttatatcgggttagtggtagctggcctagcatttctgtatggcgcatggatgatatttgac

SEQ ID NO: 299809 - DNA, 75 bp, synthetic construct
  source 1..75: mol_type = other DNA
aattacaagcttctcaacatttcctcttcgcatatggacatatatcggattatttgttgctggaatatcttttct

SEQ ID NO: 299810 - DNA, 75 bp, synthetic construct
  source 1..75: mol_type = other DNA
taagctcatgccagagcgcaacctgtttatgaagggcgtgctgagctgggttggcggacgcaccgatgtcgttga

SEQ ID NO: 299811 - DNA, 75 bp, synthetic construct
  source 1..75: mol_type = other DNA
ccggggatgctgtaattccaattgatgttgacctgcaagacccgattgaggttattcctcatctgattgaaaagt

SEQ ID NO: 299812 - DNA, 75 bp, synthetic construct
  source 1..75: mol_type = other DNA
cagcaaagacgctacggagtcaattattaatgctctggctgtttcagatcctctagttgttccgctgtcatttac

SEQ ID NO: 299813 - DNA, 75 bp, synthetic construct
  source 1..75: mol_type = other DNA
agtcattttgactattaccgcccggaagcggaatccaaacctggactgccgcaggatggcgcgctctatggcctt

SEQ ID NO: 299814 - DNA, 75 bp, synthetic construct
  source 1..75: mol_type = other DNA
cgtggtgtggatgcagggggaatttgactttgacggaacgccagcaaatcacacagcccgttttacagaagtagt

SEQ ID NO: 299815 - DNA, 75 bp, synthetic construct
  source 1..75: mol_type = other DNA
gcagataaactccacgtaacagacgtcactaaaaacgccacttaccctgtgctgattgacagcattgccgtggaa

SEQ ID NO: 299816 - DNA, 75 bp, synthetic construct
  source 1..75: mol_type = other DNA
acagtcacctgtcggaatatttactgcagataaactccacgtaacagacgtcactaaaaacgccacttaccctgt

SEQ ID NO: 299817 - DNA, 75 bp, synthetic construct
  source 1..75: mol_type = other DNA
aaattttctttgtaccgttcctgacggatgagaatggacagagcacgccaacgaatgctccggcggaagacccgg

SEQ ID NO: 299818 - DNA, 75 bp, synthetic construct
  source 1..75: mol_type = other DNA
catgtcgtatggtgaaggtcttccgctgccggagacatatgaccgtccggacccgcgcattaagcagctggcgcg

SEQ ID NO: 299819 - DNA, 75 bp, synthetic construct
  source 1..75: mol_type = other DNA
atgacatttaaacactacgatgtggtcagggcggcgtcgccgtcagaccttgctgatgcacttgctcaaaaaatt

SEQ ID NO: 299820 - DNA, 75 bp, synthetic construct
  source 1..75: mol_type = other DNA
gacgggacgccgttcatgctgtcacagtcaccggtcggcacgtttacggcagacaaattgcgcgtgaccgatatc

SEQ ID NO: 299821 - DNA, 75 bp, synthetic construct
  source 1..75: mol_type = other DNA
agaattcaacccgctggggtgtggacaagccgctgtataaggaccttatcggtcgaacaaaagcagcactgaaga

SEQ ID NO: 299822 - DNA, 75 bp, synthetic construct
  source 1..75: mol_type = other DNA
accacaagggtaatccaggccagaacacgaagctgggttcattcggtgcatttaataacgaatggcatacgctgg

SEQ ID NO: 299823 - DNA, 75 bp, synthetic construct
  source 1..75: mol_type = other DNA
cgctggcgaagaacccgaaaaacaaacttctggcagtggtctggatgcagggagaggcagaccttgcatcgggaa

SEQ ID NO: 299824 - DNA, 75 bp, synthetic construct
  source 1..75: mol_type = other DNA
tattgaggtgacgccggtcattgatggtcaggacgggacgccgttcatgctgtcgcagttacctgtcggttcttt

SEQ ID NO: 299825 - DNA, 75 bp, synthetic construct
  source 1..75: mol_type = other DNA
ggaagaagacccggacattccgggtatcggttattacggttcgaaatggcgtgacagctcagccacctggacgtc

SEQ ID NO: 299826 - DNA, 75 bp, synthetic construct
  source 1..75: mol_type = other DNA
tttgtttcgacacagcgtgacagccatttcagctcatgggcacgcaggggcgtcatttcagaccgtctggcctca

SEQ ID NO: 299827 - DNA, 75 bp, synthetic construct
  source 1..75: mol_type = other DNA
ctggaaggtaatgccggtcataacctgctggcatcgttctacgtacagagcgatgccacagaccttaacgtgatg

SEQ ID NO: 299828 - DNA, 75 bp, synthetic construct
  source 1..75: mol_type = other DNA
gtgccgacctgctgggtaaaggcggccttgtcagctgccggtttaaggttgacggcacactgacggctaatcagt

SEQ ID NO: 299829 - DNA, 75 bp, synthetic construct
  source 1..75: mol_type = other DNA
tggggagttggtaaacctctgtatcaggacctggtaagtcgtaccagagcggcgctggcgaagaacccgaaaaac

SEQ ID NO: 299830 - DNA, 75 bp, synthetic construct
  source 1..75: mol_type = other DNA
tcaccaccggtgcaccaaattacgtcaaggaatctgaagttcttactaatctggaaatccttgaacgcggttttg

SEQ ID NO: 299831 - DNA, 75 bp, synthetic construct
  source 1..75: mol_type = other DNA
tttctctgttcggtcgcccggatcacgtcgcttatgacatccgcagcctgcgtaataaagccaatcctgacgaca

SEQ ID NO: 299832 - DNA, 75 bp, synthetic construct
  source 1..75: mol_type = other DNA
cgtcgcttatgacatccgcagcctgcgtaataaagccaatcctgacgacacctttgaagcgcagctgttttatgg

SEQ ID NO: 299833 - DNA, 75 bp, synthetic construct
  source 1..75: mol_type = other DNA
gatgaagctgagtaaggagacaggagtgggggcatggtatctggagcatgatgccggtactggcgctgaactact

SEQ ID NO: 299834 - DNA, 75 bp, synthetic construct
  source 1..75: mol_type = other DNA
ccgtttataccggcgaatgcgggcattctgctggttccgtgctgtcgtggtggttcagcgttcaccaccggagct

SEQ ID NO: 299835 - DNA, 75 bp, synthetic construct
  source 1..75: mol_type = other DNA
gcgtacggtttaagttgccgggttcactggtgccgaatcagtttgccctgggcatttactggcagttgtcgtccc

SEQ ID NO: 299836 - DNA, 75 bp, synthetic construct
  source 1..75: mol_type = other DNA
ttgcggcagacaagttacgcatgaccgatatcactaacggtgcaacatacccggtgctgattgacagcattgtgg

SEQ ID NO: 299837 - DNA, 75 bp, synthetic construct
  source 1..75: mol_type = other DNA
atgtcagactccaagtggaaaatgctctccgccatgcccggagagttttcagtcaaggttgccggtggcacggtg

SEQ ID NO: 299838 - DNA, 75 bp, synthetic construct
  source 1..75: mol_type = other DNA
cggcaaatcacgcagcacagtttggtgcgctggttgataaattccgtgcagacctgacggatatggcaggtcagt

SEQ ID NO: 299839 - DNA, 75 bp, synthetic construct
  source 1..75: mol_type = other DNA
ataacttcaaactcgcaccttccctgactctgggttgtggttcttggggaggtaactccatctctgaaaacgttg

SEQ ID NO: 299840 - DNA, 75 bp, synthetic construct
  source 1..75: mol_type = other DNA
tggctggaaacgctgaaagcagaactgggtattccgaaatctatccgtgaggctggcgttcaggaagctgacttc

SEQ ID NO: 299841 - DNA, 75 bp, synthetic construct
  source 1..75: mol_type = other DNA
gccgcgaagatcatgtgggttatgtatgaacatccggaaactcacttcgaagagctggcgctgcgctttatggat

SEQ ID NO: 299842 - DNA, 75 bp, synthetic construct
  source 1..75: mol_type = other DNA
ggaaattattaccggtctgttcaaccgtctgcaaaaaacgctccgggccatgcctccggacgaccgtgacaacct

SEQ ID NO: 299843 - DNA, 75 bp, synthetic construct
  source 1..75: mol_type = other DNA
ggacccgaccctgagcatcgttcgtaaaggtgcagaactggcaaactccttcaaaccagacgtgattatcgcgct

SEQ ID NO: 299844 - DNA, 75 bp, synthetic construct
  source 1..75: mol_type = other DNA
gttgatgaaagcgaaccgttcgcacatgaaaaactgtccccgactctggcaatgtaccgtgctaaagatttcgaa

SEQ ID NO: 299845 - DNA, 75 bp, synthetic construct
  source 1..75: mol_type = other DNA
cgcagatgctcgaatcccactcgcgaaaatggccgttgctgaatccggcatgggtattgttgaagacaaagtgat

SEQ ID NO: 299846 - DNA, 75 bp, synthetic construct
  source 1..75: mol_type = other DNA
gctgggtggtggttccccgatggacgccgcgaagatcatgtgggttatgtacgaacatccggaaactcacttcga

SEQ ID NO: 299847 - DNA, 75 bp, synthetic construct
  source 1..75: mol_type = other DNA
cagtatggctcccacaatctcacctggcgaccttctttttcttgataagacagtaacttattttgatggcgatgg

SEQ ID NO: 299848 - DNA, 75 bp, synthetic construct
  source 1..75: mol_type = other DNA
tcgtatcctgattaacaccccggcttctcaggggggtatcggtgacctgtataacttcaaactcgcaccttccct

SEQ ID NO: 299849 - DNA, 75 bp, synthetic construct
  source 1..75: mol_type = other DNA
gtagacaaaattttccgcgccgccgctctggctgctgctggtgctcgcatcccgctcgcaaaaatggccgttgcc

SEQ ID NO: 299850 - DNA, 75 bp, synthetic construct
  source 1..75: mol_type = other DNA
tggttgcaatgggcggtatcggtcacacctcctgcctgtacaccgaccaggacaaccagccggaacgcgtgaact

SEQ ID NO: 299851 - DNA, 75 bp, synthetic construct
  source 1..75: mol_type = other DNA
cagggcgaagcgtcgtctccggtaacccttccggctcaggcactccggtctgatgcttcggatgttcaggaacat

SEQ ID NO: 299852 - DNA, 75 bp, synthetic construct
  source 1..75: mol_type = other DNA
aatgaaaggcatcggcggcttcacgaaagagttgacgctgcagccattcaatcactgggcgttcattcctgtcaa

SEQ ID NO: 299853 - DNA, 75 bp, synthetic construct
  source 1..75: mol_type = other DNA
ttctcgctggtggatccacaaaaccccccagccaccttctggacaatcaatattgactccatgttcttctcggtg

SEQ ID NO: 299854 - DNA, 75 bp, synthetic construct
  source 1..75: mol_type = other DNA
agtcagtccacacaaattcctgtatctctggggataaaaacaccttctcgatttaaaagaatgttaatagtaggg

SEQ ID NO: 299855 - DNA, 75 bp, synthetic construct
  source 1..75: mol_type = other DNA
atgttggactggccccctgttttattgcccgaaggccctttctcacgcgaacaggcggttggcgtcacaacagct

SEQ ID NO: 299856 - DNA, 75 bp, synthetic construct
  source 1..75: mol_type = other DNA
gtgccaggtaagtttcagaccgcgattgagctggtgatcggctttgttaatggtagcgtgaaagacatgtaccat

SEQ ID NO: 299857 - DNA, 75 bp, synthetic construct
  source 1..75: mol_type = other DNA
attgctccgctggccctgactattttcgtctgggtattcctgatgaacctgatggatttactgcctatcgatctg

SEQ ID NO: 299858 - DNA, 75 bp, synthetic construct
  source 1..75: mol_type = other DNA
tacaatgcgggtaacgtgagcgtaacgcgtctggaagatggcctgccagtgggcgtcgtcgatgtggtcgagggg

SEQ ID NO: 299859 - DNA, 75 bp, synthetic construct
  source 1..75: mol_type = other DNA
tccgtcgcgctctggaaaacggcgaacaggtgaaactctctggttttgggaacttcgatctgcgtgataagaatc

SEQ ID NO: 299860 - DNA, 75 bp, synthetic construct
  source 1..75: mol_type = other DNA
gatgcgtctatataacctattgtctgaataacgaagagtctctggctggttttactggaccgcacgatcttttca

SEQ ID NO: 299861 - DNA, 75 bp, synthetic construct
  source 1..75: mol_type = other DNA
tatgttggcgttcgtccggagtttcgcgtactggcgtatcgcatcgcaccagacgatggcgcactgacattcgcc

SEQ ID NO: 299862 - DNA, 75 bp, synthetic construct
  source 1..75: mol_type = other DNA
tgggcagaaatcacaccacattgcggtatacgaaattgtcggcgaacagggactgttgcatgaaaaaggtcgcta

SEQ ID NO: 299863 - DNA, 75 bp, synthetic construct
  source 1..75: mol_type = other DNA
gtgtacgaaattgtcggtgagcaggggctgctgcatgaaaaaggtcgctatgcggtcggacaggggccaatgtgg

SEQ ID NO: 299864 - DNA, 75 bp, synthetic construct
  source 1..75: mol_type = other DNA
tttactaatagtagaacgtcttaaaagcgaacttcaggaaatatgtgaaattaaaatctatcagtatactagtca

SEQ ID NO: 299865 - DNA, 75 bp, synthetic construct
  source 1..75: mol_type = other DNA
aggtaacgtcaccaaactggcaaatcaggtcattgtggcgctgaatattgccgcgatgtcagaagcgttaacgct

SEQ ID NO: 299866 - DNA, 75 bp, synthetic construct
  source 1..75: mol_type = other DNA
ctcttgatgcgaagagatggcggggctttagccgtgccagacgatgagcatcaagatcagattgtgaatgtgatt

SEQ ID NO: 299867 - DNA, 75 bp, synthetic construct
  source 1..75: mol_type = other DNA
ttactttgattatgaatcctatgcgcgcgatttattcagtagcggttatgtgttccatgaaggatacgttttcag

SEQ ID NO: 299868 - DNA, 75 bp, synthetic construct
  source 1..75: mol_type = other DNA
ccacccgttttcagcaggcccgcctggccatgcagggggtgaatgacattgtccgccgtccggtggagcgggaaa

SEQ ID NO: 299869 - DNA, 75 bp, synthetic construct
  source 1..75: mol_type = other DNA
attgttgaccgtattatcgtgatgaatgaaggccgggtaatgatggatggtccccgcgatgaaatactgaaaaaa

SEQ ID NO: 299870 - DNA, 75 bp, synthetic construct
  source 1..75: mol_type = other DNA
gcctgggtattatgggtaaaccaatgagtaaaaaccttctgaaagcgggttactcgctggtggtttctgaccgta

SEQ ID NO: 299871 - DNA, 75 bp, synthetic construct
  source 1..75: mol_type = other DNA
ccccagttcacgccaaatctacaaacccgtcttgataccgcgctagaaactttctggcaggcattgcaccgccgc

SEQ ID NO: 299872 - DNA, 75 bp, synthetic construct
  source 1..75: mol_type = other DNA
cggtggaagcatcgctggccgctggtttgacctgacaacatttgatgatgaacgcgactttttcgccgcctgccg

SEQ ID NO: 299873 - DNA, 75 bp, synthetic construct
  source 1..75: mol_type = other DNA
ctacttcgattttgaggcttatgcgcgtgatctgttcagcagcggctatgtgttccatgacggccatgtcttcag

SEQ ID NO: 299874 - DNA, 75 bp, synthetic construct
  source 1..75: mol_type = other DNA
caccctgacgttgcttgacctcttcacccacccttctcctgctgccctggccgattatctggccggcgtcgccac

SEQ ID NO: 299875 - DNA, 75 bp, synthetic construct
  source 1..75: mol_type = other DNA
actgggaagggatcccgtctcagtttgcctctgaatcctctgttaagtgggcgtttatcgaggcattccggcagg

SEQ ID NO: 299876 - DNA, 75 bp, synthetic construct
  source 1..75: mol_type = other DNA
gtcctcgctttccttctcgctccagttctttgctggaatatgcgcgagaaaaattgaatggcctggatgtcgagg

SEQ ID NO: 299877 - DNA, 75 bp, synthetic construct
  source 1..75: mol_type = other DNA
gggtgatggcggtgaaaatgtcggacagaccagcatcttccggttcatacgccagcaatttgcgggaatatgagt

SEQ ID NO: 299878 - DNA, 75 bp, synthetic construct
  source 1..75: mol_type = other DNA
gctgttgatgatgcggtgtggtgcaactggcgtcgctcattaccctgggtggaaggtaataccatccccgcgctg

SEQ ID NO: 299879 - DNA, 75 bp, synthetic construct
  source 1..75: mol_type = other DNA
cccgctgttgataatgctcaatggtgcgcgttccgccgctctttgccctggctggaaggcaatgccattccggca

SEQ ID NO: 299880 - DNA, 75 bp, synthetic construct
  source 1..75: mol_type = other DNA
atgaagggcgggtaatgatggacggtccccgcgatgaaatactgaaaaaactgtcaggaaaacagcagagtgaag

SEQ ID NO: 299881 - DNA, 75 bp, synthetic construct
  source 1..75: mol_type = other DNA
aagcgcctcatgaaatcacctttaatcttgatggagaaccgttaagcgggcaacgttttcatatcgaaatacttc

SEQ ID NO: 299882 - DNA, 75 bp, synthetic construct
  source 1..75: mol_type = other DNA
acgccggaaaaattaaaagcagcgctgggtggcgtctcttacatcattcacggcttaatgcgcatggatacactg

SEQ ID NO: 299883 - DNA, 75 bp, synthetic construct
  source 1..75: mol_type = other DNA
atgattgatgcaaaagtgcttgaaggggttaaaaactggctgagtatttacgggcgtctgacctgcggagttctg

SEQ ID NO: 299884 - DNA, 75 bp, synthetic construct
  source 1..75: mol_type = other DNA
gatgctgagtatcggggtgattgtcgctattatttttgagtgtactgcgaaactaatccggagttatctgacgga

SEQ ID NO: 299885 - DNA, 75 bp, synthetic construct
  source 1..75: mol_type = other DNA
cattctgggtacgtaccttattcacagtgatgacccacacaaccgaatcaccatgggggcactgattgccgcagt

SEQ ID NO: 299886 - DNA, 75 bp, synthetic construct
  source 1..75: mol_type = other DNA
ccgggattgattttcgttctgttggcgagtttcttcgcagtgaagggtttgataatcatctttcccggcgggctc

SEQ ID NO: 299887 - DNA, 75 bp, synthetic construct
  source 1..75: mol_type = other DNA
gaaaatgatggtggggctgtaccgtcagaacagggggcaaattactcttgacggggttgcgatgcagcaactgga

SEQ ID NO: 299888 - DNA, 75 bp, synthetic construct
  source 1..75: mol_type = other DNA
tttctgcttgagcagaatccccggctttttctgggtaccctgcgtgaaaatctgcagctttcccgtctgccgggc

SEQ ID NO: 299889 - DNA, 75 bp, synthetic construct
  source 1..75: mol_type = other DNA
tactgcagcgaccgctttcccgtcatattaatgcctccatgcgggaatcatcgcagcgccagggattacttgtgg

SEQ ID NO: 299890 - DNA, 75 bp, synthetic construct
  source 1..75: mol_type = other DNA
cctccaaaaccgcggccgattataaccaggctgtaaaaaatggtatgagttctgaagctgcactgactgtagcta

SEQ ID NO: 299891 - DNA, 75 bp, synthetic construct
  source 1..75: mol_type = other DNA
gcatcaaagcaaacgttgatgcagtttccaaagttattacctccaaaaccgcagccgattataaccaggctgtca

SEQ ID NO: 299892 - DNA, 75 bp, synthetic construct
  source 1..75: mol_type = other DNA
aatgagcagaccgcagcgaaagcgggtattgcagcaagcgacggtgacgtttcttacaacgtgggcgttaacttc

SEQ ID NO: 299893 - DNA, 75 bp, synthetic construct
  source 1..75: mol_type = other DNA
cgcaattatcaattttcgttatcggttttccattaacgctgacggtcggcatttcattaatggcagcattaatgc

SEQ ID NO: 299894 - DNA, 75 bp, synthetic construct
  source 1..75: mol_type = other DNA
gaatctggcattaggtttacttaatcgtatggccccgcaattatccatttttgttattggatttccattaactct

SEQ ID NO: 299895 - DNA, 75 bp, synthetic construct
  source 1..75: mol_type = other DNA
gggctaccgtttcaatgagcagaccgcagcgaaagcgggtattgcagcaagcgacggtgacgtttcttacaacgt

SEQ ID NO: 299896 - DNA, 75 bp, synthetic construct
  source 1..75: mol_type = other DNA
atagtaaaagcaaaaggaaatgaagaggttttaggtgctataaatacaactgtaggtagtgtcatgacttggaac

SEQ ID NO: 299897 - DNA, 75 bp, synthetic construct
  source 1..75: mol_type = other DNA
tgctattccagacccgttacatgacggtgaattgctggcggtattgttgatcgctgatgctgttacttataaagg

SEQ ID NO: 299898 - DNA, 75 bp, synthetic construct
  source 1..75: mol_type = other DNA
tggtattccagatccgttacatgacggtgagatgttggcggtgttgttgatctctgatgctgttacttataaggg

SEQ ID NO: 299899 - DNA, 75 bp, synthetic construct
  source 1..75: mol_type = other DNA
gcgctgtccggtctgttccagccgtacagtgtgggtaaattcaacgccacggcagccctgggtggttacagtgac

SEQ ID NO: 299900 - DNA, 75 bp, synthetic construct
  source 1..75: mol_type = other DNA
aatgatccagtaattgcaggaattaatacaaaaacaggtagtgcgataactattaaccaaaaagagttattggat

SEQ ID NO: 299901 - DNA, 75 bp, synthetic construct
  source 1..75: mol_type = other DNA
atgggtcaatgcttgtgtccgaaatgctcgaatcaaaccctagccggccaatgatggcgaggtgctacgtcaaat

SEQ ID NO: 299902 - DNA, 75 bp, synthetic construct
  source 1..75: mol_type = other DNA
aaactttacacccgcctgtttgggctgagtcgtgtgaactccgttgtcgcatcatcggtcagtggcgcattcttg

SEQ ID NO: 299903 - DNA, 75 bp, synthetic construct
  source 1..75: mol_type = other DNA
tggcagtgatatcgggtaccagttgcctctatctggtacgcagagtgattaatcgtggtattgtggagaaagaag

SEQ ID NO: 299904 - DNA, 75 bp, synthetic construct
  source 1..75: mol_type = other DNA
tccttcttcctgcagacggatgcgacgaacctgaacgcgatgtaccacaagaagccgaatgcgaagctggatacg

SEQ ID NO: 299905 - DNA, 75 bp, synthetic construct
  source 1..75: mol_type = other DNA
ggggaatttgattttggcggcacgcccggaaatcacgcagcacagtttggtgcgctggttgataaattccgtgca

SEQ ID NO: 299906 - DNA, 75 bp, synthetic construct
  source 1..75: mol_type = other DNA
tgccaaaaaactgctgccgtttataccggcgaatgcgggcattctgctggttccgtgctgtcgtggtggttcagc

SEQ ID NO: 299907 - DNA, 75 bp, synthetic construct
  source 1..75: mol_type = other DNA
aaggaggggtggcagccatttggcagcccggtggccatcacgccttataccctgatgcaggccattgcggcggaa

SEQ ID NO: 299908 - DNA, 75 bp, synthetic construct
  source 1..75: mol_type = other DNA
ctgcaactgacagacatatcaaaggcggcgacatatacgttgctgattgacagtgtgaaggtggaagtgaacaac

SEQ ID NO: 299909 - DNA, 75 bp, synthetic construct
  source 1..75: mol_type = other DNA
aagcagatcgcattattcgcctggttgccgttcctcgccgctgatcttggcagtattgccagcggctatctgacc

SEQ ID NO: 299910 - DNA, 75 bp, synthetic construct
  source 1..75: mol_type = other DNA
cttaatcagttaagacattgtagtagaatgattatggatttgcttccttactatgtgtgtgacgatataggtgat

SEQ ID NO: 299911 - DNA, 75 bp, synthetic construct
  source 1..75: mol_type = other DNA
cgtccttatctccatcggcggcttcggtcaccagatcatctcctgcatgctgagcgcactggtggtggaatcctt

SEQ ID NO: 299912 - DNA, 75 bp, synthetic construct
  source 1..75: mol_type = other DNA
gccctgggcatttactggcagttgtcgtccctgccggagggggtgacgctgtcaggagaaggtaacgatatgctg

SEQ ID NO: 299913 - DNA, 75 bp, synthetic construct
  source 1..75: mol_type = other DNA
cattattcccgatcgtatggcaaccgctattctgaacgcagccgggcgcacctcagccttcatcagtggtaaggc

SEQ ID NO: 299914 - DNA, 75 bp, synthetic construct
  source 1..75: mol_type = other DNA
aaacgtgtctccgcttggaagtattaacacaatcaaaccagacgaagccgttaaaaatggagcagctactggcgt

SEQ ID NO: 299915 - DNA, 75 bp, synthetic construct
  source 1..75: mol_type = other DNA
ggatgtatcgttattcacgaagggcgaagaaatagatcttaaattgctttttggtatgtttgagccacacgaaaa

SEQ ID NO: 299916 - DNA, 75 bp, synthetic construct
  source 1..75: mol_type = other DNA
gcgatctggtactgagttacaccacttctccggcttatcacattctcgaagagaagaaagataactacgccgccg

SEQ ID NO: 299917 - DNA, 75 bp, synthetic construct
  source 1..75: mol_type = other DNA
gaactgaaactggtggcgctggaagatggcgtttcgcttctcaaccgtctgcggatggaaggcaaaaacagtaaa

SEQ ID NO: 299918 - DNA, 75 bp, synthetic construct
  source 1..75: mol_type = other DNA
gtggcagcggatgccgttaacgttcccggcggctggaataatgacactttcgtaccgtttgattacggctacttc

SEQ ID NO: 299919 - DNA, 75 bp, synthetic construct
  source 1..75: mol_type = other DNA
cgctggcggtactggaattttgaatccgatgccggcaaacagcttaatgtgtggctcgccagtgaagggcttctc

SEQ ID NO: 299920 - DNA, 75 bp, synthetic construct
  source 1..75: mol_type = other DNA
atgaccggggccttttactttcagggagtaacagatatgccgggttgtacatcacgtttattgcccgaaggccct

SEQ ID NO: 299921 - DNA, 75 bp, synthetic construct
  source 1..75: mol_type = other DNA
accacgttggagttcacgccagccgaagtggcggcacaacgtcaggcatggattagcgaatggcaacgcgccgtc

SEQ ID NO: 299922 - DNA, 75 bp, synthetic construct
  source 1..75: mol_type = other DNA
atccgcaacgcggaaggtcagcgacgctggcgctgccggaatactgaaccctgtgccggaaagcagcttaatgcg

SEQ ID NO: 299923 - DNA, 75 bp, synthetic construct
  source 1..75: mol_type = other DNA
tcaccgttgcctgatattctttacccccggcgtaccgtcggagtttaaggtgatggtggagcatgaaatcctgcc

SEQ ID NO: 299924 - DNA, 75 bp, synthetic construct
  source 1..75: mol_type = other DNA
atgtcggactgtcgccctgttttattgcccgaaggccctttctcacgcgaacaggcggttggcgtcacaacagct

SEQ ID NO: 299925 - DNA, 75 bp, synthetic construct
  source 1..75: mol_type = other DNA
gtgatttatcaggatccgcgcaccagtacaccggggctgggtctgttgctatggatgcaaaaagtctatggcgat

SEQ ID NO: 299926 - DNA, 75 bp, synthetic construct
  source 1..75: mol_type = other DNA
tgatgttttccgggctggcacctgctcaggttcaggtatttcatcagccgcccggcacgataacggctcatcggg

SEQ ID NO: 299927 - DNA, 75 bp, synthetic construct
  source 1..75: mol_type = other DNA
tgcgcgcgcccgcagagccccgactttggttccacgcccggcgtatttcgctgcacaacctgactcgtgccggat

SEQ ID NO: 299928 - DNA, 75 bp, synthetic construct
  source 1..75: mol_type = other DNA
attgaaatttcaagagattaaaagtgcgtatgcggatgaacttcctactgaaatgctacaagaaatcaaaatgga

SEQ ID NO: 299929 - DNA, 75 bp, synthetic construct
  source 1..75: mol_type = other DNA
tattcgcaatgctgaagggcagctacgctggcggtgctggaattttgaacctgataccggaaaacagcttaatgt

SEQ ID NO: 299930 - DNA, 75 bp, synthetic construct
  source 1..75: mol_type = other DNA
tttatcgaagatgaccagggtactcatttccggcgggttatccgcaacgcagagactgatgccggaaggttcgcc

SEQ ID NO: 299931 - DNA, 75 bp, synthetic construct
  source 1..75: mol_type = other DNA
atcagggaacgcatttccggctggttatccgcaatgctgaagggcagctacgctggcggtgccggaactctgaag

SEQ ID NO: 299932 - DNA, 75 bp, synthetic construct
  source 1..75: mol_type = other DNA
ggtcgtcatcgcaccaaaaaattcgctaacaccactaaatgtcaacgacggatgaaaagtgatccacttatatct

SEQ ID NO: 299933 - DNA, 75 bp, synthetic construct
  source 1..75: mol_type = other DNA
atgaagtatgtgaatctgggtcgtagcggtttgaaagtctcccgtctttgcctcggttgtatgagctatggtgaa

SEQ ID NO: 299934 - DNA, 75 bp, synthetic construct
  source 1..75: mol_type = other DNA
ctgaaggatctttctcatacgggcaggcggttgctgtcataaccgcttaccgcaatgtgtttatccaggatgacc

SEQ ID NO: 299935 - DNA, 75 bp, synthetic construct
  source 1..75: mol_type = other DNA
agtacgacgataactttatgtctgtggtgcgcaaggctattgagcaggatgcgaaagccgcgccagatgttcagc

SEQ ID NO: 299936 - DNA, 75 bp, synthetic construct
  source 1..75: mol_type = other DNA
ccggatgcagaagcacgtaccacttacgtgattaaagagctgaacgacaaaggcattaaaactgaacagttacag

SEQ ID NO: 299937 - DNA, 75 bp, synthetic construct
  source 1..75: mol_type = other DNA
atgaataagaaggtgttaaccctgtctgctgtgatggccagcatgttattcggtgccgctgcacacgctgctgat

SEQ ID NO: 299938 - DNA, 75 bp, synthetic construct
  source 1..75: mol_type = other DNA
tgaaggcgcgaagccaggtacggtattgatcgatatgagttctatcgcaccgctggcaagccgtgaaatcagcga

SEQ ID NO: 299939 - DNA, 75 bp, synthetic construct
  source 1..75: mol_type = other DNA
ggcaaatgcgctggatacctcccacggcgttggtgcgcaattgccgctaactgctgcggttatggagatgatgca

SEQ ID NO: 299940 - DNA, 75 bp, synthetic construct
  source 1..75: mol_type = other DNA
acaaagacggtcagattcagttcgtactgctgaaaggcgaaccgggtcatccggatgcagaagcgcgcactacgt

SEQ ID NO: 299941 - DNA, 75 bp, synthetic construct
  source 1..75: mol_type = other DNA
gaccgggcgaacatcaatattcgaagacaatgaaaactgggcgctgtttacccaaacccaggcgaactcaaccag

SEQ ID NO: 299942 - DNA, 75 bp, synthetic construct
  source 1..75: mol_type = other DNA
gatcgtgatggcaacccgctggcgggcgaagcgataacgctcaggcgtgataatgcgatgagccgctcaggaacc

SEQ ID NO: 299943 - DNA, 75 bp, synthetic construct
  source 1..75: mol_type = other DNA
aagattatctgcaacatcaaaaaaagctgctggccgtattcggtaaggtgctggccgattctgtaaaaccagagc

SEQ ID NO: 299944 - DNA, 75 bp, synthetic construct
  source 1..75: mol_type = other DNA
agtggtaatgcgatgggtacagtgcagggatggccggtagcaaccagttatctcaccaatacaccgagtgatacg

SEQ ID NO: 299945 - DNA, 75 bp, synthetic construct
  source 1..75: mol_type = other DNA
ttgcgcgcaaggtctggccgggcgttcgctggtggcctggccgcagatagatacacaacaaaccattccactgct

SEQ ID NO: 299946 - DNA, 75 bp, synthetic construct
  source 1..75: mol_type = other DNA
cggcgcaggacgcagcaaaatcagccagcaatggtggtcgaccgagcgccgtagcgaagaaaggcgagacgattc

SEQ ID NO: 299947 - DNA, 75 bp, synthetic construct
  source 1..75: mol_type = other DNA
aaagctgctggccgtattcggtaaggtgctggccgattctgtaaaaccagagcacatcagacgatacatggacaa

SEQ ID NO: 299948 - DNA, 75 bp, synthetic construct
  source 1..75: mol_type = other DNA
tgttctgccgaataccattaactactatgtaatctttacggttcccaccagcccggatgtgatgggagcgagaat

SEQ ID NO: 299949 - DNA, 75 bp, synthetic construct
  source 1..75: mol_type = other DNA
cggcgaaagtgaagaagggcgaggcaatgccagtcaccgtgacggtgaaagacagcgccgggaaacctgtgccaa

SEQ ID NO: 299950 - DNA, 75 bp, synthetic construct
  source 1..75: mol_type = other DNA
tcacactaaccgccatcaaggatggtttagctgctttatggaaaaagtatgaggaaactgtaaataatcgcgatc

SEQ ID NO: 299951 - DNA, 75 bp, synthetic construct
  source 1..75: mol_type = other DNA
attaccgacagattttccggagaacgtggtgacggcagttgaaaccaatgtgttgaggttgcatggacggttaag

SEQ ID NO: 299952 - DNA, 75 bp, synthetic construct
  source 1..75: mol_type = other DNA
agattcttcaatatattgaagataatttagatatctataatatagatatagatagccttgttacccgttctgggt

SEQ ID NO: 299953 - DNA, 75 bp, synthetic construct
  source 1..75: mol_type = other DNA
tgcgtctgacgatcaccgacaataaaaacaacgatcaaccgctggcgtattattacttctcgctgcatctggatg

SEQ ID NO: 299954 - DNA, 75 bp, synthetic construct
  source 1..75: mol_type = other DNA
gttaacgacgacggataccgaataccatggcacttctgatgccaacggcacggccaccatcacggtgagccaacc

SEQ ID NO: 299955 - DNA, 75 bp, synthetic construct
  source 1..75: mol_type = other DNA
cgtcagcctggtgtgggccgatgccgccacgcccgatgtgccccttaacccacaacccattgctaaccgtagctt

SEQ ID NO: 299956 - DNA, 75 bp, synthetic construct
  source 1..75: mol_type = other DNA
ggtacacaatggcttggtttcaccggtagcgatggtacggcgacattcaatgttgaacagcctgatactgtcggc

SEQ ID NO: 299957 - DNA, 75 bp, synthetic construct
  source 1..75: mol_type = other DNA
atcaggggcgtcaaagcacttatcgtgtattcacactggatgataagccggaattacttgtaagacctacatcac

SEQ ID NO: 299958 - DNA, 75 bp, synthetic construct
  source 1..75: mol_type = other DNA
atgtcatcagtaccagtgacaaaatgtcataggggtagtgacaaaatgtcacccgtgttagataagttattagat

SEQ ID NO: 299959 - DNA, 75 bp, synthetic construct
  source 1..75: mol_type = other DNA
tccgtttacagggacgcagagcacaaccatgggataaaacaaccactcataaacatcgtcccggtcaatattatg

SEQ ID NO: 299960 - DNA, 75 bp, synthetic construct
  source 1..75: mol_type = other DNA
ggttggccaacacagcgtcagccttactggagcaactcaccggcagataaaactccacactttttcacgatagcg

SEQ ID NO: 299961 - DNA, 75 bp, synthetic construct
  source 1..75: mol_type = other DNA
aaagatgcgcaaggaaacccggtgggtaatacgccgtttacactgaagcgcagcagttctttcaatcgccagaat

SEQ ID NO: 299962 - DNA, 75 bp, synthetic construct
  source 1..75: mol_type = other DNA
gataccattttcaccgtgccgaccagtccgaatgttgccacggcttatttctggggacatatggcggataccgcc

SEQ ID NO: 299963 - DNA, 75 bp, synthetic construct
  source 1..75: mol_type = other DNA
tgaaggcatgaccgacgccaacggccaggcttcgctcaccctgagccagcccggcggcgcgggggtgaaaaccca

SEQ ID NO: 299964 - DNA, 75 bp, synthetic construct
  source 1..75: mol_type = other DNA
tcgctggtggcctggccgcagattgatgcgcagcaaaccctcccactgctctacctgctgacctcgaccggttat

SEQ ID NO: 299965 - DNA, 75 bp, synthetic construct
  source 1..75: mol_type = other DNA
cagttcagagaacggggaaagctgggtacgattcacctggaatcagtcgacagatccttctgtaagcggctgcgg

SEQ ID NO: 299966 - DNA, 75 bp, synthetic construct
  source 1..75: mol_type = other DNA
caggcaactctgctgctgacgcagcctgacggcgcaggcgttaaaacgcatattacggcgaaaatgcgcagtaat

SEQ ID NO: 299967 - DNA, 75 bp, synthetic construct
  source 1..75: mol_type = other DNA
tagcggcttccagtatggtttcacctttgatgatcaggtgaatgaaggcgatatgaccatcgaaaaacagggcgt

SEQ ID NO: 299968 - DNA, 75 bp, synthetic construct
  source 1..75: mol_type = other DNA
gatacaaaagcactgtatgacgtaataggattcaaacctgaaacgtcagttaaagagggggtaaagaactttgta

SEQ ID NO: 299969 - DNA, 75 bp, synthetic construct
  source 1..75: mol_type = other DNA
agccacgcaagcaccttaaaatcaccatcatacactaaatcagtaagttggcagcattacctgatgtcgcatact

SEQ ID NO: 299970 - DNA, 75 bp, synthetic construct
  source 1..75: mol_type = other DNA
ttaacggaactgtagtagatgcaccatgtggtattgatgctcagtctgctgatcaatctattgattttggacaag

SEQ ID NO: 299971 - DNA, 75 bp, synthetic construct
  source 1..75: mol_type = other DNA
atgagtgatgacgtagcactgccgctggaatttaccgacgcagcagccaacaaagttaaaagcctgatcgctgat

SEQ ID NO: 299972 - DNA, 75 bp, synthetic construct
  source 1..75: mol_type = other DNA
ctgcaatatctggtcggcggttccgttgactataccgaaggtctggaaggttctcgtttcatcgtgaccaacccg

SEQ ID NO: 299973 - DNA, 75 bp, synthetic construct
  source 1..75: mol_type = other DNA
gaataacaaactgctgcaggctgtcctggcgaaacaggaagcttgggaatatgtgaccttccaggacgacgcaga

SEQ ID NO: 299974 - DNA, 75 bp, synthetic construct
  source 1..75: mol_type = other DNA
gaagacggcctgcgttttgaagacgagtttgtgcgtcacaaaatgctcgatgcgatcggtgacttgtttatgtgt

SEQ ID NO: 299975 - DNA, 75 bp, synthetic construct
  source 1..75: mol_type = other DNA
gccaaaaaatttgttcgcatcaaagagactgttcgtatcgaagatggcgataagtgggctgaatttaagccgtac

SEQ ID NO: 299976 - DNA, 75 bp, synthetic construct
  source 1..75: mol_type = other DNA
tatgctgccaccaagaaagctaatgaactgatggcgcacacctattcccacctgtacggcatcccgaccaccggg

SEQ ID NO: 299977 - DNA, 75 bp, synthetic construct
  source 1..75: mol_type = other DNA
tgttgacgattatcgcgtgctgaacgaagacggtctgcgttttgaagacgagtttgtacgtcacaaaatgctcga

SEQ ID NO: 299978 - DNA, 75 bp, synthetic construct
  source 1..75: mol_type = other DNA
aacttctctgctgatgcttttatgcgccagattagccgggcgcgtaccttcggtttcatgcgtgatatcgaatat

SEQ ID NO: 299979 - DNA, 75 bp, synthetic construct
  source 1..75: mol_type = other DNA
cgcagttatgaaagatggtagtggcaaccatgtaaaagagggggccttctcagccgttgcgaatttcaacctgac

SEQ ID NO: 299980 - DNA, 75 bp, synthetic construct
  source 1..75: mol_type = other DNA
caatatcacgttgaccgttaccaccaaagactgcagcggcaacgttgcaggaaatattccttttattatcaaacg

SEQ ID NO: 299981 - DNA, 75 bp, synthetic construct
  source 1..75: mol_type = other DNA
agtcttctgacgcttgtcgataaaaaagtgacgttaaatattgcaccggcccagggcgacttaatttctgtcagc

SEQ ID NO: 299982 - DNA, 75 bp, synthetic construct
  source 1..75: mol_type = other DNA
taacgttcaatattacacaaaaaaataccatcggcctggtaacgccgtttacagcctcattggggcgaaatccgc

SEQ ID NO: 299983 - DNA, 75 bp, synthetic construct
  source 1..75: mol_type = other DNA
gacagtacacggctggccaaccctgcgtgagccgtactggagtagttcccctgcggataaagttcctcattttta

SEQ ID NO: 299984 - DNA, 75 bp, synthetic construct
  source 1..75: mol_type = other DNA
ggggaagaagcgtctctgcgtgtaaccatcaccgataacaaaaacaataatcaaccgctggcgtattactacttt

SEQ ID NO: 299985 - DNA, 75 bp, synthetic construct
  source 1..75: mol_type = other DNA
gatgtttccaaccgtagcgaagcgcaaaaaccggacgatacgacgtttattgtcagttgcgtcgataaagaagct

SEQ ID NO: 299986 - DNA, 75 bp, synthetic construct
  source 1..75: mol_type = other DNA
ctggggcgcgtgcgtctgcgtcagttggcgcgtcgcgactggcttaccgccttgatgctcaccatgatgggcaac

SEQ ID NO: 299987 - DNA, 75 bp, synthetic construct
  source 1..75: mol_type = other DNA
ttaacggaactgttgttgctgctccatgcagcatttctcagaaatcagctgatcagtctattgattttgggcagc

SEQ ID NO: 299988 - DNA, 75 bp, synthetic construct
  source 1..75: mol_type = other DNA
atccacatggctcgcgtgtgaagtttgacggtaaaacgtcaacggggccttctaatctggttgatggtaataata

SEQ ID NO: 299989 - DNA, 75 bp, synthetic construct
  source 1..75: mol_type = other DNA
gtgccattcaacgtactggcgcgcctgtttccacgatgattatcggcaccctgccggtggtgattcctgtctttg

SEQ ID NO: 299990 - DNA, 75 bp, synthetic construct
  source 1..75: mol_type = other DNA
cgcaacgcccgctggctgcgggaaaatccagacaaacatccaatgatgtgggcgacggcgcaggcgctggtcacg

SEQ ID NO: 299991 - DNA, 75 bp, synthetic construct
  source 1..75: mol_type = other DNA
atgattagcggcgtgctgtacgccctgttagcagggttgatgtgggggcttatttttgtcgggccgttgatcgtg

SEQ ID NO: 299992 - DNA, 75 bp, synthetic construct
  source 1..75: mol_type = other DNA
agtcatagaagacaatgaaacgtgggtattgttgaaatcggcaacaaagggggatgcagataaaagcgggtgcga

SEQ ID NO: 299993 - DNA, 75 bp, synthetic construct
  source 1..75: mol_type = other DNA
gcgtcaggcgctgcaattagtacaaaacgagttaccgggttcagggtttgagccttccagcagcgagcgcgtatt

SEQ ID NO: 299994 - DNA, 75 bp, synthetic construct
  source 1..75: mol_type = other DNA
cagagattgcggagattgtggagttaagcaagccacagttgcgtatggtcgatttaaacttattaaccgttttcg

SEQ ID NO: 299995 - DNA, 75 bp, synthetic construct
  source 1..75: mol_type = other DNA
agcagtataggactgctaagttgtcgggctaccccagtggcggtgaccagccacattattgttgaagcgaacgat

SEQ ID NO: 299996 - DNA, 75 bp, synthetic construct
  source 1..75: mol_type = other DNA
gttgtcaaagcgaaaaaaggggaagaagtcgtggttcgcgtgaccactaaagattcgcagggtaacccggtggga

SEQ ID NO: 299997 - DNA, 75 bp, synthetic construct
  source 1..75: mol_type = other DNA
gaataagccctcatctacttcggcagatgatcttattgtagatgtcgtcacaccgacagcagccagcatttcctt

SEQ ID NO: 299998 - DNA, 75 bp, synthetic construct
  source 1..75: mol_type = other DNA
ggaaatatcgctgtagcttgtcttgacggttcagacaattgcgatcaaacacacccaaccttgacatccatccgt

SEQ ID NO: 299999 - DNA, 75 bp, synthetic construct
  source 1..75: mol_type = other DNA
tttaaaaatgaagatataatagaacaaccagaagctgataatgatacagcagtgcagattcataaaataggtgca

SEQ ID NO: 300000 - DNA, 75 bp, synthetic construct
  source 1..75: mol_type = other DNA
ccgtttctggcgtagtcgttgcggttgccgggatggcgaagatctcaccatttgaagtcgtaaaacgcacctcgg

SEQ ID NO: 300001 - DNA, 75 bp, synthetic construct
  source 1..75: mol_type = other DNA
gcagaacctgttacctctcctggcatgaggctgccgggcgtgataaaggccatcaatggatggaagagcaattag

SEQ ID NO: 300002 - DNA, 75 bp, synthetic construct
  source 1..75: mol_type = other DNA
tcgcaaacgcatctggttgctattgcgccgcgttggctggctgaagagttcgctgagtccttagagttacaggta

SEQ ID NO: 300003 - DNA, 75 bp, synthetic construct
  source 1..75: mol_type = other DNA
gagtgcgaaaagaaacttcgcaacattcagccagtacaagcagaaccacagccgcaattcacagccgaggaaatc

SEQ ID NO: 300004 - DNA, 75 bp, synthetic construct
  source 1..75: mol_type = other DNA
atgcgggtaactggtacgatcaatatatttatctgttaaatggatcaagtggaagagcgtcttcaaccacctcgg

SEQ ID NO: 300005 - DNA, 75 bp, synthetic construct
  source 1..75: mol_type = other DNA
ctcgccaacctcgccgcttgctcatggtccggtcaccttagaacagcttgctgccgcaccgtggatcctgcgtga

SEQ ID NO: 300006 - DNA, 75 bp, synthetic construct
  source 1..75: mol_type = other DNA
tgagcgcagccttgaccgacctggaagggcagcttggcgtgcaactgtttgatcgcgtggggaaaagactggtag

SEQ ID NO: 300007 - DNA, 75 bp, synthetic construct
  source 1..75: mol_type = other DNA
attaggtaactccgaggcaatcaaacatgcggtgcgtcatgggttgggaattagttgcctgtcgcgacgggtgat

SEQ ID NO: 300008 - DNA, 75 bp, synthetic construct
  source 1..75: mol_type = other DNA
gccgccggcagatggagctggatattctgaaaaaggcggaggaaatcataaaaaatctatggtcaccccccgttt

SEQ ID NO: 300009 - DNA, 75 bp, synthetic construct
  source 1..75: mol_type = other DNA
gctggtgatgcaattacagccaccgatacccttttcgtctacctcacgttgttgctgtgtttttgggggcggtgg

SEQ ID NO: 300010 - DNA, 75 bp, synthetic construct
  source 1..75: mol_type = other DNA
ttacgtgaagttgctgtcccgctgccgcgcctgatgcgcacgctgtggcgtattcatcatcggcaaaaacacctt

SEQ ID NO: 300011 - DNA, 75 bp, synthetic construct
  source 1..75: mol_type = other DNA
tacggtaaaacaagatgattctatgggcctggtaaccaatatgtacgcccagttgtatcagctgacgatagaatc

SEQ ID NO: 300012 - DNA, 75 bp, synthetic construct
  source 1..75: mol_type = other DNA
aattaagcaatcgcaaggtgtgggcttatcgacgccgctaaatattgtgcctgtgaactcctatattcccaatac

SEQ ID NO: 300013 - DNA, 75 bp, synthetic construct
  source 1..75: mol_type = other DNA
ggaatggtcactgttctcgccggaccagtcgaacaacacatctgtaaatggttgcggtgcaggatatgtcccggc

SEQ ID NO: 300014 - DNA, 75 bp, synthetic construct
  source 1..75: mol_type = other DNA
acgtggttccggcacacgagagattgtcgactatctgttattgtcgcatctgccgaagtttgaaatggcgatgga

SEQ ID NO: 300015 - DNA, 75 bp, synthetic construct
  source 1..75: mol_type = other DNA
cccgttatcgccatgattatccgcagttgccgattgaacttagcgttgggaacagccaggacgtgatgcaagcgg

SEQ ID NO: 300016 - DNA, 75 bp, synthetic construct
  source 1..75: mol_type = other DNA
ttgaaattaccggtaaatcagtctgcctggatgtgctgacgcagtggattgaaggatgtgagacaccgcgttacc

SEQ ID NO: 300017 - DNA, 75 bp, synthetic construct
  source 1..75: mol_type = other DNA
gttgggctggtgattgttatcgttgctacagagctgatggtgccaggaacggcagcagcggtcacaggcaagtaa

SEQ ID NO: 300018 - DNA, 75 bp, synthetic construct
  source 1..75: mol_type = other DNA
aacgcccacggctggcggatgaaaccgacaacgaactgggatcggtgcgggaaaataacgaagactgggcgctgt

SEQ ID NO: 300019 - DNA, 75 bp, synthetic construct
  source 1..75: mol_type = other DNA
cgggactgcgttggatcgtgcaaaaaacaggctagattctacgtatgatgatcttactatcgtgccggtcacccc

SEQ ID NO: 300020 - DNA, 75 bp, synthetic construct
  source 1..75: mol_type = other DNA
aaaacggccagcaacgatggtcgccctagtgcaacggcggcgaaaggtacggcgatccggatgacggtgattgtg

SEQ ID NO: 300021 - DNA, 75 bp, synthetic construct
  source 1..75: mol_type = other DNA
cttatcaccgtagagcgatagatcgctggtatgacaccaccgttgaatgttcagaggattcgttctggttagacg

SEQ ID NO: 300022 - DNA, 75 bp, synthetic construct
  source 1..75: mol_type = other DNA
ttgtgttttgcgcattgctgataagcgcaatgctgcctgagggggcatgggcagaatctgcatggcaagactctt

SEQ ID NO: 300023 - DNA, 75 bp, synthetic construct
  source 1..75: mol_type = other DNA
acggcgcaatttgtcaaagttgacgacaccttgagtgcgttgaaagtgaaaaaaggcgaagacgcggtgattcgc

SEQ ID NO: 300024 - DNA, 75 bp, synthetic construct
  source 1..75: mol_type = other DNA
ccctgaagaggaattgaaacgtgaacagcgtaaagcagaaattaaagaaagattcagaaatgcgaagctaaagaa

SEQ ID NO: 300025 - DNA, 75 bp, synthetic construct
  source 1..75: mol_type = other DNA
ctggtgtttcaaagagaacggcaatcagagctattgagacacttgaaaaacacggtttaattcaggtgcaaaaga

SEQ ID NO: 300026 - DNA, 75 bp, synthetic construct
  source 1..75: mol_type = other DNA
tcaactttcagaagaaattaacgcagcagcaagattgatttatatggtcatggttcatagctgtgatttctatga

SEQ ID NO: 300027 - DNA, 75 bp, synthetic construct
  source 1..75: mol_type = other DNA
aataccgcatttaccctcaaacgaaacaccagcgtgaacagggccaatgtgtcaactacgacgtcgattgcttca

SEQ ID NO: 300028 - DNA, 75 bp, synthetic construct
  source 1..75: mol_type = other DNA
cgccgtgagcgcccgttaacggatgacgaattaatgcagtttgttccatctgtcttttctggtgataaacatgaa

SEQ ID NO: 300029 - DNA, 75 bp, synthetic construct
  source 1..75: mol_type = other DNA
cagagtcgggttcgtgatttgggacgccgcgaatacagtaaacatatgttacgtcttcgcagggaagggcatatt

SEQ ID NO: 300030 - DNA, 75 bp, synthetic construct
  source 1..75: mol_type = other DNA
atagcaaaaatttttaaaattctacaaatgccaggttttgtggttgacgctgacggcgcagtgagcgacgcaaga

SEQ ID NO: 300031 - DNA, 75 bp, synthetic construct
  source 1..75: mol_type = other DNA
atgctacaggatgtattcgagtcagaagaatttgctgccacgctggtattaactccgcagcaggagagccactac

SEQ ID NO: 300032 - DNA, 75 bp, synthetic construct
  source 1..75: mol_type = other DNA
atgctacaggacgtattattcgagtcagaagaatttgctgccgcgccggtattaaccccgcagcaggagagccac

SEQ ID NO: 300033 - DNA, 75 bp, synthetic construct
  source 1..75: mol_type = other DNA
tcataaaccggggcagatgattgtggatgagtgcttcggcccaggcactgacgcccgttcgctgactggcgggca

SEQ ID NO: 300034 - DNA, 75 bp, synthetic construct
  source 1..75: mol_type = other DNA
tctcttccgcaaccggtctgggtgttttgctgatggcaaccctgtttccggtgatggtaaacgttggtatcagtc

SEQ ID NO: 300035 - DNA, 75 bp, synthetic construct
  source 1..75: mol_type = other DNA
gtcgcctgtctgatgtcactggcagtctcttctgcaaccggcctgggtgttttactgatggcaaccctgttcccg

SEQ ID NO: 300036 - DNA, 75 bp, synthetic construct
  source 1..75: mol_type = other DNA
ggtggcgacctcggcatgatgatcatgatgctgtgtggctttgccgcttacatgacccatatcggcgcaaacgat

SEQ ID NO: 300037 - DNA, 75 bp, synthetic construct
  source 1..75: mol_type = other DNA
cctgatcttctgagcgcgattatctcccggcgcgactactacaccgatgcctggtggatggtggcggtggcaaca

SEQ ID NO: 300038 - DNA, 75 bp, synthetic construct
  source 1..75: mol_type = other DNA
atgaatgggaatgcccacctcccgcttttggcatctcaattctgctcatactgatatgcagtggcttattaaccg

SEQ ID NO: 300039 - DNA, 75 bp, synthetic construct
  source 1..75: mol_type = other DNA
tggtgctgataatactgattgcgggttatatcgcgaccagcacatacattgtttatctgaacggggaatgcccga

SEQ ID NO: 300040 - DNA, 75 bp, synthetic construct
  source 1..75: mol_type = other DNA
gcataccaacagtatcaggatagtttccgcgaactgaaagtctcactcccgaaacttcaggatgaatgctggtgg

SEQ ID NO: 300041 - DNA, 75 bp, synthetic construct
  source 1..75: mol_type = other DNA
tgttcctttaaatcgtcagcagtggctgtttggggaacgcaccgtcaatcaggggccgtggctcagcaaggagga

SEQ ID NO: 300042 - DNA, 75 bp, synthetic construct
  source 1..75: mol_type = other DNA
gcataccaacagtatcaggatcatttccgcaaactgaaagtctcactcccaaaacttcaggatgaatgctggtgg

SEQ ID NO: 300043 - DNA, 75 bp, synthetic construct
  source 1..75: mol_type = other DNA
acgactcacaaggctaccaattacattaatatcagaaagactttgttatgactcacaacaaacattcacacgaga

SEQ ID NO: 300044 - DNA, 75 bp, synthetic construct
  source 1..75: mol_type = other DNA
catatacttgttcaatactcaggttatagccgtagatacttacagttactcttctgtaaagagctgggcattcca

SEQ ID NO: 300045 - DNA, 75 bp, synthetic construct
  source 1..75: mol_type = other DNA
atgaaacagctggatgatatttgcgaagcattgagttatgtcaattatgccgaggcaaaattactcaccgggaaa

SEQ ID NO: 300046 - DNA, 75 bp, synthetic construct
  source 1..75: mol_type = other DNA
tctctgcgcgtaccggatttgaatttgtgctggcaggtgtggtggacagccgccgtagtctgctgagctatgaag

SEQ ID NO: 300047 - DNA, 75 bp, synthetic construct
  source 1..75: mol_type = other DNA
gagaatattactttgaatattacttgcctatatataatacatcatgccgtataccatgccacatacgtaatatag

SEQ ID NO: 300048 - DNA, 75 bp, synthetic construct
  source 1..75: mol_type = other DNA
cccaagtgtttttttcaggaaaatctatcaactatctaggaaaaattccacatacatacgaaaatgcaaaaaaaa

SEQ ID NO: 300049 - DNA, 75 bp, synthetic construct
  source 1..75: mol_type = other DNA
ctatatataacgccacgttattattatcgttacttaccgtaactaacattctggcgagtgtatatctgaagaaac

SEQ ID NO: 300050 - DNA, 75 bp, synthetic construct
  source 1..75: mol_type = other DNA
atcgttaagaaaattacaggaaagttaatcaagttgttcgcaatgttaacgattttcgtttttattgtcgaatat

SEQ ID NO: 300051 - DNA, 75 bp, synthetic construct
  source 1..75: mol_type = other DNA
caacaaagctgaacagcaggcgaaaatcgatgctgaaaaactgctggttgatctgaaagcgggcaagggtgcgga

SEQ ID NO: 300052 - DNA, 75 bp, synthetic construct
  source 1..75: mol_type = other DNA
agaagcctgttggtaacatcaggctatctgataaaaaacttaaaccgttgaaaaaagtttccgcattgctcaaaa

SEQ ID NO: 300053 - DNA, 75 bp, synthetic construct
  source 1..75: mol_type = other DNA
aggaagtttaccctaaggtatgggaataaatttgatttttactctaagtatgctgatgatcaattacagaataaa

SEQ ID NO: 300054 - DNA, 75 bp, synthetic construct
  source 1..75: mol_type = other DNA
ccttcgattagatattaaaaattttttccactctatccctgtaagagaagttaactcccttctcgaaggcctatt

SEQ ID NO: 300055 - DNA, 75 bp, synthetic construct
  source 1..75: mol_type = other DNA
tgatccgtgggccaggcgctgggcgcgacgtcaccgccggggcgattcagtcagatattaaccgcctggcgcagt

SEQ ID NO: 300056 - DNA, 75 bp, synthetic construct
  source 1..75: mol_type = other DNA
gtgaaccttgcgggtgttcattacataacggtacagggcatcattcaccggtgtcattaactggcagcacgcgtc

SEQ ID NO: 300057 - DNA, 75 bp, synthetic construct
  source 1..75: mol_type = other DNA
gtttaaaaaaaaatccggctacacaccattacagtacagaaaatataaggtatggacatttaaatatcaaacagg

SEQ ID NO: 300058 - DNA, 75 bp, synthetic construct
  source 1..75: mol_type = other DNA
agcgcgagctgtttgatctcatcaaagcctgtacccaaccggtgctgggcatctgcttagggatgcaattgctgg

SEQ ID NO: 300059 - DNA, 75 bp, synthetic construct
  source 1..75: mol_type = other DNA
aaagaatcattaaaaaacccgctgccttttggaccatttctggcggctgcgggtttcgttgttggctgggatagt

SEQ ID NO: 300060 - DNA, 75 bp, synthetic construct
  source 1..75: mol_type = other DNA
agtggctgacagtgcgctgaaaatcctcgacgaagcgggattacctggcgaactgcgcctgcgtcaggggctggc

SEQ ID NO: 300061 - DNA, 75 bp, synthetic construct
  source 1..75: mol_type = other DNA
cagtactgcgcaccggcccgaccgaaagcctgattcaggggctgcatcagtccgtcttccgcgcagaaaaacgca

SEQ ID NO: 300062 - DNA, 75 bp, synthetic construct
  source 1..75: mol_type = other DNA
caagcagcgatggatcaggtgcgtgagcgcgagctgtttgatctcatcaaagcctgtacccaaccggtgctgggc

SEQ ID NO: 300063 - DNA, 75 bp, synthetic construct
  source 1..75: mol_type = other DNA
ctatattatcatatattgaagaaaatattgaaatcacctcaattaatatagatactcttgtgcagtattccggat

SEQ ID NO: 300064 - DNA, 75 bp, synthetic construct
  source 1..75: mol_type = other DNA
agtgaaagatgcctgcctgctgccattgctgcgtcttgatgaggccagcgagctggcgcgtctggcggctcccgt

SEQ ID NO: 300065 - DNA, 75 bp, synthetic construct
  source 1..75: mol_type = other DNA
gctgcgccaatctgaactcggtgaagtctgccattgcgcgtcacggttatgaacccaaagtcagccgtgacccgg

SEQ ID NO: 300066 - DNA, 75 bp, synthetic construct
  source 1..75: mol_type = other DNA
caggcggcgatggatcagatccacgagcgtgaactggtcgatctcatcaaagcctgtacccagccagtgctcggg

SEQ ID NO: 300067 - DNA, 75 bp, synthetic construct
  source 1..75: mol_type = other DNA
ctggaaccgcgtttacccgcaggcaggcaaccgcctgtttcaggggattgaagacggcgcgtacttttactttgt

SEQ ID NO: 300068 - DNA, 75 bp, synthetic construct
  source 1..75: mol_type = other DNA
gaactgaaaaatgctggtctgaaagaaaaaggccaactgtctggtgtcatcaaatcttcggtcggtttcctgatt

SEQ ID NO: 300069 - DNA, 75 bp, synthetic construct
  source 1..75: mol_type = other DNA
gaaaatgcacttctgcgcccggcatctgtccgccataaacgacacgctgaaaacgtatcagtttggcgtgcgttc

SEQ ID NO: 300070 - DNA, 75 bp, synthetic construct
  source 1..75: mol_type = other DNA
ttcaaaactaacagtgttccccagggggtccgcgatcgggcattcgaagaatgggagcagatcattatagataat

SEQ ID NO: 300071 - DNA, 75 bp, synthetic construct
  source 1..75: mol_type = other DNA
gttctcgggcctggtatcgctggacgctctttctcacatcgaagacggcacctacaaagggcgtaccctactgcg

SEQ ID NO: 300072 - DNA, 75 bp, synthetic construct
  source 1..75: mol_type = other DNA
tccggcaccgatttattattactggaaccaggaaaaacgcatcgcctgttttttaatattcacgggcagcacaat

SEQ ID NO: 300073 - DNA, 75 bp, synthetic construct
  source 1..75: mol_type = other DNA
tgttgcgatcaaccctgggtacaaatttatagcggtgaaaaattacagcgtcagggactggcagttgaacctatg

SEQ ID NO: 300074 - DNA, 75 bp, synthetic construct
  source 1..75: mol_type = other DNA
agttgcccacctaacgcctttaattcaggtctcgacttattattactggaaccagggaaaacgcaccgcctgttt

SEQ ID NO: 300075 - DNA, 75 bp, synthetic construct
  source 1..75: mol_type = other DNA
ccgttgtggttattgatgaaaatgacaatgtgattttcagccagctggtggatgaaatcaccaccgagccggatt

SEQ ID NO: 300076 - DNA, 75 bp, synthetic construct
  source 1..75: mol_type = other DNA
caatgtaatttttagccagctggtagatgaaatcactaccgagccgaattacgaagcagcactgactgtacttaa

SEQ ID NO: 300077 - DNA, 75 bp, synthetic construct
  source 1..75: mol_type = other DNA
tgatccgtgggcctggcgctgggcgcgacgtcaccgccggggcgattcagtcggatatcaaccggctggcgcagt

SEQ ID NO: 300078 - DNA, 75 bp, synthetic construct
  source 1..75: mol_type = other DNA
ttggcggtacgctggcgcagggcattgcggcgcgactgcgtgcccgtggcgaacaggtggcatttcttggcttgc

SEQ ID NO: 300079 - DNA, 75 bp, synthetic construct
  source 1..75: mol_type = other DNA
cgtcaggattgtgcgcatgtggatattatttccccggagtattttaaagaaataggaccactaataaatacacaa

SEQ ID NO: 300080 - DNA, 75 bp, synthetic construct
  source 1..75: mol_type = other DNA
ggtctggacccggaagtgctggcggagattaaccgcgagcgcgaggccttcctggcggcacagcagggaagtact

SEQ ID NO: 300081 - DNA, 75 bp, synthetic construct
  source 1..75: mol_type = other DNA
caggaatatcagttacccattaatgaacatggttcaaaagccgctattcacgggctgcttgcctggcgtgactgg

SEQ ID NO: 300082 - DNA, 75 bp, synthetic construct
  source 1..75: mol_type = other DNA
cgaagaagccgatagcctcattagtgcctttatcagcgatcttgagcgcctggcggcgctgctcgacagcggtat

SEQ ID NO: 300083 - DNA, 75 bp, synthetic construct
  source 1..75: mol_type = other DNA
cgataacgtctttgccatcgaaagccgctggtatcgcgacaacccgctggtgatccgcgggccaggtgcagggcg

SEQ ID NO: 300084 - DNA, 75 bp, synthetic construct
  source 1..75: mol_type = other DNA
aagcctgattcaggggctgcatcagtccgtcttccgcgcggaaaaacgcatcggcctggtattgttcggtaaggg

SEQ ID NO: 300085 - DNA, 75 bp, synthetic construct
  source 1..75: mol_type = other DNA
aaataaccctttctgagaatttaacgaagacgattgctaaacttcgtttgattgtacgaaaggatttagatgaaa

SEQ ID NO: 300086 - DNA, 75 bp, synthetic construct
  source 1..75: mol_type = other DNA
gcaagaataatgccgatatcgaacgcttatataagcttgttccagagtctcaaattattgattttgatgatgtga

SEQ ID NO: 300087 - DNA, 75 bp, synthetic construct
  source 1..75: mol_type = other DNA
gtgctatcgacgcagatttactactggcttgggatattgaccgtactgtaaaggatgttaaaacattaggcttgg

SEQ ID NO: 300088 - DNA, 75 bp, synthetic construct
  source 1..75: mol_type = other DNA
gagatcgcaagccagaatatcggcactgtcgcagcgccttatggcgtgggtattcatccttatttaacctgcaac

SEQ ID NO: 300089 - DNA, 75 bp, synthetic construct
  source 1..75: mol_type = other DNA
atgcaaatcaccaacatgcattgcagtggacaaaccgtttcacttgccgcgggggattatcacgcgaccattgtg

SEQ ID NO: 300090 - DNA, 75 bp, synthetic construct
  source 1..75: mol_type = other DNA
ttccagcttccggcaaaccaggtttatgccgtcgatgagcacgctaatccgacaacgcttcaccacgttgatgag

SEQ ID NO: 300091 - DNA, 75 bp, synthetic construct
  source 1..75: mol_type = other DNA
gtaaccatctggagcgacgtcgccggggtatatagcgccgacccgcgtaaagtgaaagatgcctgcctgctgccg

SEQ ID NO: 300092 - DNA, 75 bp, synthetic construct
  source 1..75: mol_type = other DNA
taacccgctgcattgccaccgcttctggcagcaactgaaaggccagccggtcgaatttacctggcagtccgatga

SEQ ID NO: 300093 - DNA, 75 bp, synthetic construct
  source 1..75: mol_type = other DNA
agatattgccattgcacaaaaaggcgtaaaatcacttaagattgatctcccgtctgattggaatgaatttctaat

SEQ ID NO: 300094 - DNA, 75 bp, synthetic construct
  source 1..75: mol_type = other DNA
aaaaaaaatattaaaatagccgttattcaggttggtctttattttgagcagcatgatagcatttcttcatttttt

SEQ ID NO: 300095 - DNA, 75 bp, synthetic construct
  source 1..75: mol_type = other DNA
cagacgccgcaggtggcgctggacgtgcgtctgatgaccgacagcgcgggcaatctgcggctggttgcggactat

SEQ ID NO: 300096 - DNA, 75 bp, synthetic construct
  source 1..75: mol_type = other DNA
gtggccgctgggcggcgtgtcgatgcatgatttcagaacctttcgcggaccgctggaaccgtcgcgtttctgtca

SEQ ID NO: 300097 - DNA, 75 bp, synthetic construct
  source 1..75: mol_type = other DNA
gatatgttcgtaatgtgcaacttggtgctcagagccgccactctcctgcgggtaatgaagtcacctgggattata

SEQ ID NO: 300098 - DNA, 75 bp, synthetic construct
  source 1..75: mol_type = other DNA
aacacgcgggcaagtaatccggggcccgcgataccacgctctatcgcggcgggacggcgtcggtgcttcaacgat

SEQ ID NO: 300099 - DNA, 75 bp, synthetic construct
  source 1..75: mol_type = other DNA
gagcggtatcgcgctgttagtggttggcgtggtcattgcggtcagagcaaaaccggaaaaacccttaattgaacc

SEQ ID NO: 300100 - DNA, 75 bp, synthetic construct
  source 1..75: mol_type = other DNA
ggaaaaagatgcgatcggctggagtcgtctggtagaacagcaccgggttacgctctggtgttcagtacctgcgat

SEQ ID NO: 300101 - DNA, 75 bp, synthetic construct
  source 1..75: mol_type = other DNA
ccgttgatgccggctcatttcgcatccttatggaggatctggcgcgtttttatgcctcgccacctaatgatgtta

SEQ ID NO: 300102 - DNA, 75 bp, synthetic construct
  source 1..75: mol_type = other DNA
cttattggcagggtgtgactatattgaaaaagcgagtaaggtcgacgacctcgttacacagcaagagttgcaaaa

SEQ ID NO: 300103 - DNA, 75 bp, synthetic construct
  source 1..75: mol_type = other DNA
gagaacgtcttaatgccgagtttggctgtcgcctggccgggcacgatctgattaagtgcaaaaatatccgagacg

SEQ ID NO: 300104 - DNA, 75 bp, synthetic construct
  source 1..75: mol_type = other DNA
cacgcacgagagacgatggagcagcttcatgaacgggtcgcacacggccactatcctggtgtcagcgttatgcgc

SEQ ID NO: 300105 - DNA, 75 bp, synthetic construct
  source 1..75: mol_type = other DNA
atgcaaatgaaaaatctctcggagcaatttgccgtatcggtgacaatgtcatgccgggaataacggaactgcgta

SEQ ID NO: 300106 - DNA, 75 bp, synthetic construct
  source 1..75: mol_type = other DNA
gcagcccaaaaataaagacgtggatgggatattgtctcatgaagaaataaccgctggattatggggtcctctgcc

SEQ ID NO: 300107 - DNA, 75 bp, synthetic construct
  source 1..75: mol_type = other DNA
tcatccttgagcctgttgggcgtaacactgcccctgcaattgcattagcggcgttgctgatgtctaagtctgata

SEQ ID NO: 300108 - DNA, 75 bp, synthetic construct
  source 1..75: mol_type = other DNA
aaccgggttattggtgatattgaagcatcggagggcatgggggcgctgaaactcttcctttcgcgagcgtttaat

SEQ ID NO: 300109 - DNA, 75 bp, synthetic construct
  source 1..75: mol_type = other DNA
ccaccgcctttaagttgatggctcaacgtatcaatgatgagttacagcaccagggccaggcgctgggggatatgt

SEQ ID NO: 300110 - DNA, 75 bp, synthetic construct
  source 1..75: mol_type = other DNA
aaaataaagagatctatacagatgcctttgtttttagcaagaagaagaaaaataatgctgttcctaatgctaaaa

SEQ ID NO: 300111 - DNA, 75 bp, synthetic construct
  source 1..75: mol_type = other DNA
ggacatatctaagaatgaattccgtgtgttgacttatatcttagaatatatggagtttggaaacctaatcaacct

SEQ ID NO: 300112 - DNA, 75 bp, synthetic construct
  source 1..75: mol_type = other DNA
ggtgcttcataacacaacactctggcagccgccatttgtggggggaatgttgacacttgaggcgttccctttggt

SEQ ID NO: 300113 - DNA, 75 bp, synthetic construct
  source 1..75: mol_type = other DNA
ccagtgcaagtgtcagtgaactgaaaaaaaatcctatggctacagtcaatgccgaagatggttactctgtcgcca

SEQ ID NO: 300114 - DNA, 75 bp, synthetic construct
  source 1..75: mol_type = other DNA
agaagacaccatagccttttgtgaagcctgtggttatgcttcaaacatagagttaacccctgcagaaacttcaga

SEQ ID NO: 300115 - DNA, 75 bp, synthetic construct
  source 1..75: mol_type = other DNA
aagaagatagaacaaatagtgagagaggaaatgaataaggcaggtgctcttgaaatacttatgcctttggtccag

SEQ ID NO: 300116 - DNA, 75 bp, synthetic construct
  source 1..75: mol_type = other DNA
ggcgtggcaagcctgaatggtgcttcagatctcgattgagtaatatttatatggcgaaggtatacccgccagtct

SEQ ID NO: 300117 - DNA, 75 bp, synthetic construct
  source 1..75: mol_type = other DNA
cgcgaataaccgtagcgcgaagcgtatggccaccgcctttaagttgatggctcaacgtatcaatgatgagttaca

SEQ ID NO: 300118 - DNA, 75 bp, synthetic construct
  source 1..75: mol_type = other DNA
cgatctttgccaaggcatataaggatgcgcgcctggtaaggatggttgcagaagaacctgatccggatatgcgta

SEQ ID NO: 300119 - DNA, 75 bp, synthetic construct
  source 1..75: mol_type = other DNA
gcgtgttaataatagtgcctctctgcttattggcagggtgtgactatattgaaaaagcgagtaaggtcgacgacc

SEQ ID NO: 300120 - DNA, 75 bp, synthetic construct
  source 1..75: mol_type = other DNA
tgaagaattttatataaaagagcaaaaatcacattctgaaagtgaaatgagaggactattttcatcacttgccga

SEQ ID NO: 300121 - DNA, 75 bp, synthetic construct
  source 1..75: mol_type = other DNA
atgaaaaaaacactgcaagtcgcaatgttcagtctgtttaccgttattggctttaatgcccaggctaacgaacat

SEQ ID NO: 300122 - DNA, 75 bp, synthetic construct
  source 1..75: mol_type = other DNA
ttaaaaccggcgacaaagtggcgtttaattttgtccagcagggcaatctctctttattacaggatattaaagtca

SEQ ID NO: 300123 - DNA, 75 bp, synthetic construct
  source 1..75: mol_type = other DNA
cctatcagcaagccaccatgttacttacagttgcggagggttatcaaacaaaaggcgatataaaaaacgctattc

SEQ ID NO: 300124 - DNA, 75 bp, synthetic construct
  source 1..75: mol_type = other DNA
atcatattttataaaaacgtttagagagtattatggcttaactccaaaacagctaattattggatttcgggatat

SEQ ID NO: 300125 - DNA, 75 bp, synthetic construct
  source 1..75: mol_type = other DNA
gctaggggttgatattaacaaattattattaaagagagcgttgagtaatagggtcttttttataaaagatggtta

SEQ ID NO: 300126 - DNA, 75 bp, synthetic construct
  source 1..75: mol_type = other DNA
actttttttctgggatgcaaagcatggcttgttacctgacagatttacctgcccgttactctggtcaggtctttt

SEQ ID NO: 300127 - DNA, 75 bp, synthetic construct
  source 1..75: mol_type = other DNA
accgcgtataaggatgaactgttaacgaaaaccggtatacgcgatgttcaggggctggtacaggatgctcagtct

SEQ ID NO: 300128 - DNA, 75 bp, synthetic construct
  source 1..75: mol_type = other DNA
cgttatcggaacaggccaaatcgttattgtcagattacaaagtaacggatacctgccagaacctgggatattctg

SEQ ID NO: 300129 - DNA, 75 bp, synthetic construct
  source 1..75: mol_type = other DNA
gctttcagaaaacagcaacgtgaagccgtgccaccttcttacagaaaagcttatatggcaatgaaatcatatgag

SEQ ID NO: 300130 - DNA, 75 bp, synthetic construct
  source 1..75: mol_type = other DNA
gcagttgccatgttttacggcagtgcgagcagagatagcgctgatgtccggcagtgcttttgccgttacgcacca

SEQ ID NO: 300131 - DNA, 75 bp, synthetic construct
  source 1..75: mol_type = other DNA
ggcggaaggcagggatatccttaaagagcacggcataacgccagagtttattgatgagatcaggactgatatgca

SEQ ID NO: 300132 - DNA, 75 bp, synthetic construct
  source 1..75: mol_type = other DNA
caatcgatttgctgcgcgcagaggcgaccgactgcattcacgtaaattacgaacctttaatgagccgccgttccg

SEQ ID NO: 300133 - DNA, 75 bp, synthetic construct
  source 1..75: mol_type = other DNA
gtttacctctttctcagggagtttagtctccaggatttccggggcggttcacatatctcggtgcaaccctcgcag

SEQ ID NO: 300134 - DNA, 75 bp, synthetic construct
  source 1..75: mol_type = other DNA
gaaaaagcgagtaaggtcgacgatctcgttacacagcaagagttacaaaaaagcaaaatcgaggcgcttgaaaaa

SEQ ID NO: 300135 - DNA, 75 bp, synthetic construct
  source 1..75: mol_type = other DNA
attaccatcatgaagagaatatttttacgctgtggcgcagtttacgctttggcgataatctccaggcatggctgg

SEQ ID NO: 300136 - DNA, 75 bp, synthetic construct
  source 1..75: mol_type = other DNA
ttaccggtggggagagtttcgcggagatcgcccgtcgcccggccgggacagtggtgatactcagcctgaacaccg

SEQ ID NO: 300137 - DNA, 75 bp, synthetic construct
  source 1..75: mol_type = other DNA
cgaatactacccgaaactggcggcacaaacgcatattccactggcggcgggtgagcgcatgttctcacgtttcga

SEQ ID NO: 300138 - DNA, 75 bp, synthetic construct
  source 1..75: mol_type = other DNA
cggattttatcgtggcggtccaatcctgatgagcgccatcgccgggatcgaccaggcgttatgggatatcaaagg

SEQ ID NO: 300139 - DNA, 75 bp, synthetic construct
  source 1..75: mol_type = other DNA
ggcgcaaattcgtgaagcctttggtaatcagattgagtttggtctggacttccatggtcgcgtcagcgcgccgat

SEQ ID NO: 300140 - DNA, 75 bp, synthetic construct
  source 1..75: mol_type = other DNA
gcggcaggcctggtgaagaagtcaaacagcggttacgtactggcacggtggtaaccacagatgacaggaactggg

SEQ ID NO: 300141 - DNA, 75 bp, synthetic construct
  source 1..75: mol_type = other DNA
gtgaatattggcgtggggccgtcaaatgcaaaaaccatctgtgatcatctggcggtgctacgtccggatgtctgg

SEQ ID NO: 300142 - DNA, 75 bp, synthetic construct
  source 1..75: mol_type = other DNA
gcggcttctttaaaccgttaacgaaaccgggcttaggcgtggaaatcgacgaagctaaagttattgagttcagta

SEQ ID NO: 300143 - DNA, 75 bp, synthetic construct
  source 1..75: mol_type = other DNA
ggcatgcaatggtggccagttacgagatgatcttcacgcagccggacagtgtcacctacagcaaaacggggatgc

SEQ ID NO: 300144 - DNA, 75 bp, synthetic construct
  source 1..75: mol_type = other DNA
ttattgtggcgataccagatcaggcagagtatgagccggcgcggaaactgctgggataacagcccaatggaacgc

SEQ ID NO: 300145 - DNA, 75 bp, synthetic construct
  source 1..75: mol_type = other DNA
cgttgttctcgacctgttcgcaagaaaaccagtgggctgggccatgtcgttctcgccggacagcaggctcaccat

SEQ ID NO: 300146 - DNA, 75 bp, synthetic construct
  source 1..75: mol_type = other DNA
agtaatatccgtaatgatgtaaaacatcaggttgataatatggtcacagaatataaagggaatataggtgatact

SEQ ID NO: 300147 - DNA, 75 bp, synthetic construct
  source 1..75: mol_type = other DNA
agttgtctgcagccctgaactcagcgaaacagagttacgaccagtacacgacgaatatgacccgcagccatgaat

SEQ ID NO: 300148 - DNA, 75 bp, synthetic construct
  source 1..75: mol_type = other DNA
gcgtgaatcccgtggcgatatcggtaaaggaatggagagcgtaccttcgggtggtggcagccaggatattattgc

SEQ ID NO: 300149 - DNA, 75 bp, synthetic construct
  source 1..75: mol_type = other DNA
ttgaaaaaggttgcgccgaagcctggctggctggaaaccggtgcttctgtttttccggtactggctatcgtattg

SEQ ID NO: 300150 - DNA, 75 bp, synthetic construct
  source 1..75: mol_type = other DNA
aacagcttctctggcgttacaggataaagcaaagtgtcagccgacggggaaactgctgggataacagtcctatgg

SEQ ID NO: 300151 - DNA, 75 bp, synthetic construct
  source 1..75: mol_type = other DNA
atgagacgcgtggtcagccgcgggacgtcatgttccatagcgaccagggaagccagtataccggcctgaaatatc

SEQ ID NO: 300152 - DNA, 75 bp, synthetic construct
  source 1..75: mol_type = other DNA
aatggtggggaagcgaccagcggattctttgaagtgccgaaaaacgaaaccaaagaaaatggaattcgtctttcc

SEQ ID NO: 300153 - DNA, 75 bp, synthetic construct
  source 1..75: mol_type = other DNA
cctactcaaacgtggaaccgagcgatttcgttcagaccttctcacgccgtaatggtggggaagcgaccagcggat

SEQ ID NO: 300154 - DNA, 75 bp, synthetic construct
  source 1..75: mol_type = other DNA
ttttgtgcaggaacaggtgcagcctggtgttgataatgcctggcgtgaatcccgtggggatattggtaaaggaat

SEQ ID NO: 300155 - DNA, 75 bp, synthetic construct
  source 1..75: mol_type = other DNA
gcgcacgctggctgacatgctgacccaaaacggcgtcccgatgagccgttaccgtgccgggcggctgatgaaaca

SEQ ID NO: 300156 - DNA, 75 bp, synthetic construct
  source 1..75: mol_type = other DNA
tcagacagaatatgagccggcgcggaaactgctgggataacagcccaatggaacgcttcttcaggagtctgaaga

SEQ ID NO: 300157 - DNA, 75 bp, synthetic construct
  source 1..75: mol_type = other DNA
tcggctggagcctgtcagcgaatgccgatactgccctgataagcagtgccttgcggatggcgtatgaggtgcgtg

SEQ ID NO: 300158 - DNA, 75 bp, synthetic construct
  source 1..75: mol_type = other DNA
ccaccacctcatcaatggagaaacagcgactggcgcacgtctctgtcggacatgtaataatgcgaaacctgccga

SEQ ID NO: 300159 - DNA, 75 bp, synthetic construct
  source 1..75: mol_type = other DNA
agattgcgctcacattatctgctctcgcagtggctgtgatgtgggtacaacggcacaacgtgatggatttgctgg

SEQ ID NO: 300160 - DNA, 75 bp, synthetic construct
  source 1..75: mol_type = other DNA
gtggtgagtggttgcggaataacctgaatgccattgccgcctttatggggacccggacgtgggattccattgaaa

SEQ ID NO: 300161 - DNA, 75 bp, synthetic construct
  source 1..75: mol_type = other DNA
agaatgcccggggctgacagtccacaggaactgatgaaaagagcaaaggagtatcaggataagcacaagcaataa

SEQ ID NO: 300162 - DNA, 75 bp, synthetic construct
  source 1..75: mol_type = other DNA
attactcctacggcaacatgcagacggaaaacgtgaacggcttcagctggagtaccaacagcaccacgtcattcg

SEQ ID NO: 300163 - DNA, 75 bp, synthetic construct
  source 1..75: mol_type = other DNA
catgatatcgatgctaaagccagtaaggactttaaagaggccagcgattactttatgagtcgcaaggtcagcgaa

SEQ ID NO: 300164 - DNA, 75 bp, synthetic construct
  source 1..75: mol_type = other DNA
tctgggcaggaaatcgctggtgctatctggcggttgttatggatctttttgcccgcagggttatcggctggagcc

SEQ ID NO: 300165 - DNA, 75 bp, synthetic construct
  source 1..75: mol_type = other DNA
atgctgacccaaaacggcgtcccgatgagccgttatcgtgccgtgccgaatctgctcgagcgtcagttcgctgta

SEQ ID NO: 300166 - DNA, 75 bp, synthetic construct
  source 1..75: mol_type = other DNA
ttgccgaatctgctcgagcgtcagttcgctgtaccggagccagacagggtatggtgcggagatattacgtatatc

SEQ ID NO: 300167 - DNA, 75 bp, synthetic construct
  source 1..75: mol_type = other DNA
ctgttctgctctggaaatacaccgcagcagttaccggtactggcgaaaacgacgcgatacggttaatccggcgcg

SEQ ID NO: 300168 - DNA, 75 bp, synthetic construct
  source 1..75: mol_type = other DNA
aaataccataattaatggtggcacacagaatattaataattatggcatagccacaggcaccaatatcaacagcgt

SEQ ID NO: 300169 - DNA, 75 bp, synthetic construct
  source 1..75: mol_type = other DNA
tgccagtcatattatgcgccagaacgtcaccatgaatgccctgaaagagggtatcaccagtaatgcagcccgtaa

SEQ ID NO: 300170 - DNA, 75 bp, synthetic construct
  source 1..75: mol_type = other DNA
cgtatacagccactttgcgtcttcttccatcacgccaaccgccagtgcggcaggcagtgtggttgacggtaatta

SEQ ID NO: 300171 - DNA, 75 bp, synthetic construct
  source 1..75: mol_type = other DNA
cgccttgcagcttgcaacgcagatcgctggaggcccggatttgttggaagtcggagaatttactgttgggccagt

SEQ ID NO: 300172 - DNA, 75 bp, synthetic construct
  source 1..75: mol_type = other DNA
acggtaattactcctacggcaacatgcagacggaaaacgtgaacggcttcagctggagcaccaacagcaccacgt

SEQ ID NO: 300173 - DNA, 75 bp, synthetic construct
  source 1..75: mol_type = other DNA
acgctggaggagctgatggcctccgctgatccctacacgctgattttttcccgccccagcccgctgcggggcgtt

SEQ ID NO: 300174 - DNA, 75 bp, synthetic construct
  source 1..75: mol_type = other DNA
ttttatcgggatgcactgttggtgattatgttcgtccattgttgcccggtaatatatatttacaagacgcacggg

SEQ ID NO: 300175 - DNA, 75 bp, synthetic construct
  source 1..75: mol_type = other DNA
cagaacagcatacgtggcgaggaaaatattgtaagaggacagtattctgaactgcagaatcaccataaaacagag

SEQ ID NO: 300176 - DNA, 75 bp, synthetic construct
  source 1..75: mol_type = other DNA
cagatacagcctggtgttgataatgcctggcgggaatcccgtggcgatattggtaaaggaatggagagcgtacct

SEQ ID NO: 300177 - DNA, 75 bp, synthetic construct
  source 1..75: mol_type = other DNA
catgtgataatgcgaaacctgccgatggtccagaccattctgaccggaataaccattggtattttcccgcttctg

SEQ ID NO: 300178 - DNA, 75 bp, synthetic construct
  source 1..75: mol_type = other DNA
gacagtacgatgagcgcacaggactccatgatggccagccgtatgcgcagtgcagtggaaagctatgcgaaggcg

SEQ ID NO: 300179 - DNA, 75 bp, synthetic construct
  source 1..75: mol_type = other DNA
acccggacgtgggattccatcgaaaaaattgcgctcacattgtctgttctcgcggtggccgtgatgtgggtacag

SEQ ID NO: 300180 - DNA, 75 bp, synthetic construct
  source 1..75: mol_type = other DNA
accgggtgctctatcgtgttcctgcaccatgccagcaagggcgcggccatgatgggcgcaggcgaccagcagcag

SEQ ID NO: 300181 - DNA, 75 bp, synthetic construct
  source 1..75: mol_type = other DNA
caggactgaaatatcaacagtttctctggcgttacaggataaagcaaagtgtcagccgacggggaaactgctggg

SEQ ID NO: 300182 - DNA, 75 bp, synthetic construct
  source 1..75: mol_type = other DNA
ccgtgccgggcggctgatgaaacatctgaatctgagcagttgtcagcccggaaaacatcagtacaaaaatgcccg

SEQ ID NO: 300183 - DNA, 75 bp, synthetic construct
  source 1..75: mol_type = other DNA
cttgccatcatggtgaatttatttaacccacaaaaaatactgattggctcaccgttaagtaaagcggcagatatc

SEQ ID NO: 300184 - DNA, 75 bp, synthetic construct
  source 1..75: mol_type = other DNA
agtcagtatacaggactgaaatatcaacagcttctctggcgttacaggataaagcaaagtgtcagccgacgggga

SEQ ID NO: 300185 - DNA, 75 bp, synthetic construct
  source 1..75: mol_type = other DNA
acgcttaaaaagagaagctgaagagaaagccagagcagaagccgaagcaaaggcaaaagccgaaattgaagcagc

SEQ ID NO: 300186 - DNA, 75 bp, synthetic construct
  source 1..75: mol_type = other DNA
aaattagcggttatatcctgaattattacaataacgtcaggcctcaccattacaacggtgggttgacgccggaag

SEQ ID NO: 300187 - DNA, 75 bp, synthetic construct
  source 1..75: mol_type = other DNA
gcctacggcggaaattgaagctgctaagaacgatatggaccccaaatcgttcgctcaggagtacctggccagctt

SEQ ID NO: 300188 - DNA, 75 bp, synthetic construct
  source 1..75: mol_type = other DNA
ttgtgcaactgcattctggacagatgaaagtcttccagtctccgcatcgatttaaagttgtttgtgctggtcgac

SEQ ID NO: 300189 - DNA, 75 bp, synthetic construct
  source 1..75: mol_type = other DNA
ccacacagattgtctgataaattgttaaagagcagtgccgcttcgctttttctcagcggcgcggggtgtgcataa

SEQ ID NO: 300190 - DNA, 75 bp, synthetic construct
  source 1..75: mol_type = other DNA
ggcgccagccagtatcaccaaaattgtccgtgaaatgctcgaagcgcacctggtgcaagagctggaaattaaaga

SEQ ID NO: 300191 - DNA, 75 bp, synthetic construct
  source 1..75: mol_type = other DNA
cggaaaatggtattgtacatcgtatgccgttctacgaggacgtaaaagagatgccgctcggtgaagcgcttgagc

SEQ ID NO: 300192 - DNA, 75 bp, synthetic construct
  source 1..75: mol_type = other DNA
ttcaaagtggtgtgtgcgggtcgacgctggggtaaatcccggttgtcgatctccaccatcatccgcgcggcagcc

SEQ ID NO: 300193 - DNA, 75 bp, synthetic construct
  source 1..75: mol_type = other DNA
aatgctattttttctggtgttgatacattaaaatataatgaagatttaacgcaaaaaattataaaatatatagtt

SEQ ID NO: 300194 - DNA, 75 bp, synthetic construct
  source 1..75: mol_type = other DNA
cgccactgccgccggatattcgtcatgctgcatataacgatattaactctgccagcgcgctgattgacgactcta

SEQ ID NO: 300195 - DNA, 75 bp, synthetic construct
  source 1..75: mol_type = other DNA
tgcattgctgattttcgatgaggtacaaaccggcgtcgggcgcaccggtgaactgtatgcctatatgcactacgg

SEQ ID NO: 300196 - DNA, 75 bp, synthetic construct
  source 1..75: mol_type = other DNA
cgatcaaccggtcgaaaaccccggcattgccgcccgttttacattggggccggaagcagttgtggctaaagtgcg

SEQ ID NO: 300197 - DNA, 75 bp, synthetic construct
  source 1..75: mol_type = other DNA
ttttgagtttaagtcaaagccgtcatatttagttctatcatttgctgaaatatcatctgtagtctttatcctaat

SEQ ID NO: 300198 - DNA, 75 bp, synthetic construct
  source 1..75: mol_type = other DNA
atgatatgcgcgtccaggaagagttaagtcgtatcaatactgctgaaaaatttatttctcagcggaacctgaata

SEQ ID NO: 300199 - DNA, 75 bp, synthetic construct
  source 1..75: mol_type = other DNA
tgcgactggcgaaaaaacttatcgacgcgacgtttgccgatcgcgtgttcttttgtaactccggtgcggaggcca

SEQ ID NO: 300200 - DNA, 75 bp, synthetic construct
  source 1..75: mol_type = other DNA
ttcgcgaactgtgtgaccgccacaacgcattgctgatttttgatgaagtacaaacgggcgtcgggcgtaccgggg

SEQ ID NO: 300201 - DNA, 75 bp, synthetic construct
  source 1..75: mol_type = other DNA
gcgccagcactgaatgtcagcgaagaagaggtcactactggcctggatcgttttgcggtggcctgtgaacgcgtt

SEQ ID NO: 300202 - DNA, 75 bp, synthetic construct
  source 1..75: mol_type = other DNA
tgccttgctgatttttgatgaggtacaaaccggcgtcgggcgcactggtgagctgtatgcctatatgcactacgg

SEQ ID NO: 300203 - DNA, 75 bp, synthetic construct
  source 1..75: mol_type = other DNA
agttcgcggcttaggtcttttgattggctgtgtactgaatgccgattacgccgggcaagcgaaacagatctctca

SEQ ID NO: 300204 - DNA, 75 bp, synthetic construct
  source 1..75: mol_type = other DNA
gccagtgcgctgattgacgacgccacctgcgcggtaattgtcgagccagtgcagggtgaaggcggcgtggtgcca

SEQ ID NO: 300205 - DNA, 75 bp, synthetic construct
  source 1..75: mol_type = other DNA
cggaattaaagtcagcctgatcgaacccggtcccattcgtactcgcttcaccgacaacgtcaaccagacgcaaag

SEQ ID NO: 300206 - DNA, 75 bp, synthetic construct
  source 1..75: mol_type = other DNA
gttcgcagccgattaacaggaaaagagcagcgccagttatataactcagcacaacgtattcagggcagaatgcag

SEQ ID NO: 300207 - DNA, 75 bp, synthetic construct
  source 1..75: mol_type = other DNA
caatccgcagcaatcatgctggcgaggcgctaacagcacgaggccagaacatcacgatgcgcggtcaggacttat

SEQ ID NO: 300208 - DNA, 75 bp, synthetic construct
  source 1..75: mol_type = other DNA
cagcaagcgcgcagaattacgcaatgaagaaagatcttgatgcaatttctggtgcatcaattgacgatcttggct

SEQ ID NO: 300209 - DNA, 75 bp, synthetic construct
  source 1..75: mol_type = other DNA
cgcggggggaactggagcagtgggcgttggcgcatggtttacgctggattgaagacgaaagtaatcaggatgata

SEQ ID NO: 300210 - DNA, 75 bp, synthetic construct
  source 1..75: mol_type = other DNA
aagaggggctaggtattgaggcccaggcgcggcaggcacgttatcaggcatttgcccgcaccttgttgcccggtg

SEQ ID NO: 300211 - DNA, 75 bp, synthetic construct
  source 1..75: mol_type = other DNA
atggctacttggcaacaaggaatcaactcaggcggttttcttgctggcatcggtgcgcaaaatgagaatgcgcca

SEQ ID NO: 300212 - DNA, 75 bp, synthetic construct
  source 1..75: mol_type = other DNA
ttggtagtgtcgctcaaacatatcaagctgcaaagcaacaggaagcggatgctgcattccaaaaagaatatgcgg

SEQ ID NO: 300213 - DNA, 75 bp, synthetic construct
  source 1..75: mol_type = other DNA
tgacaggtaaagttatgccaaaatcggtcttaattaccggatgttccagtggaattggcctagaaagcgcgctcg

SEQ ID NO: 300214 - DNA, 75 bp, synthetic construct
  source 1..75: mol_type = other DNA
ttgatcgatctggattcgccagaaagtgttgatcgcgcagccgacgaagtgatcgccctgaccgataattgtctg

SEQ ID NO: 300215 - DNA, 75 bp, synthetic construct
  source 1..75: mol_type = other DNA
actggcacttgataagcagaaattcggttttgaagtacaacaggcacaaaagaaggccgatgaacttattaatgc

SEQ ID NO: 300216 - DNA, 75 bp, synthetic construct
  source 1..75: mol_type = other DNA
cccaaatcagtctgaaaaatcagccagagcagctatcaaaacaatcataaaaaccactgagatggctcagaaacg

SEQ ID NO: 300217 - DNA, 75 bp, synthetic construct
  source 1..75: mol_type = other DNA
atccagatacgtggacagaacatcagcgcacagaatgctgctctttcccgagaaatacaaagagcagaattacaa

SEQ ID NO: 300218 - DNA, 75 bp, synthetic construct
  source 1..75: mol_type = other DNA
acgaagcggcgctgaaactggcgcgtaaatttgcccacgaccgctacggcagccataagagcggcatcgtggcgt

SEQ ID NO: 300219 - DNA, 75 bp, synthetic construct
  source 1..75: mol_type = other DNA
ctgcctaacacctggatcaatatcgataaactgattttttctccctggcaggaatggcagggaaaactctctctc

SEQ ID NO: 300220 - DNA, 75 bp, synthetic construct
  source 1..75: mol_type = other DNA
acgcattgcattagatgaaagcccgcgcatcacgcgtaaaggtttaattattcccgatctccgttatctggtggc

SEQ ID NO: 300221 - DNA, 75 bp, synthetic construct
  source 1..75: mol_type = other DNA
ggctggcaaactcaggccccatgactttacgtctggataaagacacggcggatgcagtagcaaaagacaatatga

SEQ ID NO: 300222 - DNA, 75 bp, synthetic construct
  source 1..75: mol_type = other DNA
ggcatttagtggtgcattgccgttatggctaaacaacgaaaaatggatagtgaaagatggttggctggcaaatag

SEQ ID NO: 300223 - DNA, 75 bp, synthetic construct
  source 1..75: mol_type = other DNA
cgccgcgcttaattcttgataaacccgttatctgggtgcgcgacgcccagaatccgtcttttagtggtgcgcttt

SEQ ID NO: 300224 - DNA, 75 bp, synthetic construct
  source 1..75: mol_type = other DNA
gtgaagcaaaacaggctgatctcattctgtatgcccgcttaccggcacagctaagcggaagtctgactgacccaa

SEQ ID NO: 300225 - DNA, 75 bp, synthetic construct
  source 1..75: mol_type = other DNA
cgacgcgatacggttaatccggcacgagtcaggttgtgcagcgaaatacgccgggcgtggaaccaaagtcggggc

SEQ ID NO: 300226 - DNA, 75 bp, synthetic construct
  source 1..75: mol_type = other DNA
tgttcggggcgaacctgattgtgaaaagcaccgatttcctgtcccggaatccggaaatcatcaatctgttccagg

SEQ ID NO: 300227 - DNA, 75 bp, synthetic construct
  source 1..75: mol_type = other DNA
gatgatgtaccagaccggcagtggcgcaaccgccacacagacccgtgacggtaatatggtgatggatgcaagcgg

SEQ ID NO: 300228 - DNA, 75 bp, synthetic construct
  source 1..75: mol_type = other DNA
taacggcgatccattgctcgatttaccatgggaaattacacgtcagcaattgacggtaagtgatggtcgctggag

SEQ ID NO: 300229 - DNA, 75 bp, synthetic construct
  source 1..75: mol_type = other DNA
gatctggatgcactaaacgaactttccgagctgatctgtgccgcagaatgcggggaacatattgaaccgtataag

SEQ ID NO: 300230 - DNA, 75 bp, synthetic construct
  source 1..75: mol_type = other DNA
gatctggatgcacttaacgaactttccgaactcgtctgcgccgcagaatgcggagaacatattgaaccgtataag

SEQ ID NO: 300231 - DNA, 75 bp, synthetic construct
  source 1..75: mol_type = other DNA
cacctgactggaagatgaacctacgcgatggcgagctgtatgctcaggtagccttttccgctgcgcctgatcaag

SEQ ID NO: 300232 - DNA, 75 bp, synthetic construct
  source 1..75: mol_type = other DNA
gtaagtgctcaatgtggcttccggttctcttccgcttcctcgcccactcgctcactacgttcggtcgctggggct

SEQ ID NO: 300233 - DNA, 75 bp, synthetic construct
  source 1..75: mol_type = other DNA
aacatcaaggactccctggaaaaccaggagaccgttgctcaggaacaaaaagacctgcgtattaagcagatcacc

SEQ ID NO: 300234 - DNA, 75 bp, synthetic construct
  source 1..75: mol_type = other DNA
agcagcgtcacgactggtttgttgagcgtcttaataccattaatcaccgctacggtttgttcagtgaagttcgcg

SEQ ID NO: 300235 - DNA, 75 bp, synthetic construct
  source 1..75: mol_type = other DNA
ggcactcatggcaccacctatggcggcaatccgctggcctcggcggtggcaggcaaagtgctggagctcatcaat

SEQ ID NO: 300236 - DNA, 75 bp, synthetic construct
  source 1..75: mol_type = other DNA
gtatgacgtagctttttacgctgatgatctggatgcacttaacgaactttccgagctgatctgtgccgcagaatg

SEQ ID NO: 300237 - DNA, 75 bp, synthetic construct
  source 1..75: mol_type = other DNA
atggacaaagaatataaaacactcatcaacaaagcacttgagcgtttctattttcgcttaagtgcatcaggcgtt

SEQ ID NO: 300238 - DNA, 75 bp, synthetic construct
  source 1..75: mol_type = other DNA
gatccggacgcgctcgacgagctttccatactcgtctgcgccgcagaaaacggggaccacattgaaccgtataac

SEQ ID NO: 300239 - DNA, 75 bp, synthetic construct
  source 1..75: mol_type = other DNA
gaggtgattatcggtaaaaaccgttctggcggggcaggtgaaattatttatcaggaattccggaatgggcatttc

SEQ ID NO: 300240 - DNA, 75 bp, synthetic construct
  source 1..75: mol_type = other DNA
tgttgtttatcagcgaagcgctgggcggttccagccttgcggatctgtctcaaatatcccggatcccggcaacgg

SEQ ID NO: 300241 - DNA, 75 bp, synthetic construct
  source 1..75: mol_type = other DNA
gatctggatgcacttaacgaactttccgagctgatctgtgccgcagtggatttgcccctatatttccagacatct

SEQ ID NO: 300242 - DNA, 75 bp, synthetic construct
  source 1..75: mol_type = other DNA
ttgctacggtatcggcgtaacgcgcgtagtagctgcggcaattgagcagaactacgacgaacgcggcatcgtatg

SEQ ID NO: 300243 - DNA, 75 bp, synthetic construct
  source 1..75: mol_type = other DNA
tccccgattcgcgacacaccttaggttgctcaaccattggttcatctgaagctgctatgctcggccgcttggcgt

SEQ ID NO: 300244 - DNA, 75 bp, synthetic construct
  source 1..75: mol_type = other DNA
accagcgatttgatcgagatggtcggcggcgcgccgctggtggtcaaactggtcgaaggcacacagggaattgga

SEQ ID NO: 300245 - DNA, 75 bp, synthetic construct
  source 1..75: mol_type = other DNA
tcgccccgacaccccgtatcagtgcgtacgtgctcaatgtggtttccagttctcttccgcttcctcgcccactcg

SEQ ID NO: 300246 - DNA, 75 bp, synthetic construct
  source 1..75: mol_type = other DNA
tccctcgcctgactgagataccgcaggagccggaaccgcaaccagttcgtgaatccagacctgtgcgcaatttct

SEQ ID NO: 300247 - DNA, 75 bp, synthetic construct
  source 1..75: mol_type = other DNA
atgagtctgttcaatgacgttcagaaattcattgaagcccatccggggtgtacttccggcgacattgcggatgct

SEQ ID NO: 300248 - DNA, 75 bp, synthetic construct
  source 1..75: mol_type = other DNA
atgagtctcttgaatgacgttcagaaattcattgaagcccatccggggtgtacttccggcgacattgcggatgct

SEQ ID NO: 300249 - DNA, 75 bp, synthetic construct
  source 1..75: mol_type = other DNA
aaaggtcgcaagcttccccattttgatgcggtgatcccgcgcattggcaccgccattaccttttatggaacggcg

SEQ ID NO: 300250 - DNA, 75 bp, synthetic construct
  source 1..75: mol_type = other DNA
ggcggcattccgtgaaagccactcccagccagaacgaaacaattttctggcgcgtcgtgaacggtgtttacggaa

SEQ ID NO: 300251 - DNA, 75 bp, synthetic construct
  source 1..75: mol_type = other DNA
aaaagcagcctttatcagcgacttccagctcggcgattttgaccgtgaatctggtgggttatttcctgtgtgccc

SEQ ID NO: 300252 - DNA, 75 bp, synthetic construct
  source 1..75: mol_type = other DNA
aagcaggagacagcgccagctccctgcaaaggccgtttgcacaggaataacaacgatgatctcattactggaact

SEQ ID NO: 300253 - DNA, 75 bp, synthetic construct
  source 1..75: mol_type = other DNA
ggtaaaggtctggctggatgtgtgctggacgggggcgttgaccagtgtctggaatgttcagagcaagattaccgt

SEQ ID NO: 300254 - DNA, 75 bp, synthetic construct
  source 1..75: mol_type = other DNA
aaggcaaaagccaggaaaagcctggatctgggggaactggccgttttaagccgtagtgatgttcttcctgttggt

SEQ ID NO: 300255 - DNA, 75 bp, synthetic construct
  source 1..75: mol_type = other DNA
ggcgcacacaatcacaccgtaggtattggcgctcactctcataccgtagcaattggcgcacacagtcacaccatt

SEQ ID NO: 300256 - DNA, 75 bp, synthetic construct
  source 1..75: mol_type = other DNA
cagctataactttttctaacgagtcaccaaaagtctttttcaaagatggtcgcttggtaaccacctctcaagctg

SEQ ID NO: 300257 - DNA, 75 bp, synthetic construct
  source 1..75: mol_type = other DNA
accagccttcacatattgaaccggccaaagtatcggtatttaaaaccgcatatacccctggtgcttatcgtcgag

SEQ ID NO: 300258 - DNA, 75 bp, synthetic construct
  source 1..75: mol_type = other DNA
ttgcagtggccagcattgatgtgaatggaaatatcgccgatttgcggccaaaagggacgctgaatgagcaacagg

SEQ ID NO: 300259 - DNA, 75 bp, synthetic construct
  source 1..75: mol_type = other DNA
atgcaaacgtccaagatttaaacatgatgaagataaatttatccgaaaaaatgccagaacgatgaccggtaagca

SEQ ID NO: 300260 - DNA, 75 bp, synthetic construct
  source 1..75: mol_type = other DNA
atgcaaacaccccagatttaaacctgatgaagataaatttatccgaaaaaatgccagaacgatgaccagcaggca

SEQ ID NO: 300261 - DNA, 75 bp, synthetic construct
  source 1..75: mol_type = other DNA
attggcgaaaagtttggcatatctgaacattctgctcacgctgtttattaccgtcgccggactgccgaggacgct

SEQ ID NO: 300262 - DNA, 75 bp, synthetic construct
  source 1..75: mol_type = other DNA
gctaaataaggccagcggtacgctggcaatgattgtccatgcaccatcacagcagaaactgaaaacaaaagaagg

SEQ ID NO: 300263 - DNA, 75 bp, synthetic construct
  source 1..75: mol_type = other DNA
tcagttgttgagtatccaggatttaccggttttcatgctgacctgaatattgctgacaacataaaaagagttgct

SEQ ID NO: 300264 - DNA, 75 bp, synthetic construct
  source 1..75: mol_type = other DNA
gatgaaatactggcctataattttaaaacagtaaaagtattacgtaatattgatgataccaaagtatcgttgatt

SEQ ID NO: 300265 - DNA, 75 bp, synthetic construct
  source 1..75: mol_type = other DNA
atgagtctcttcaatgacgttcagaaattcattgaagcccatccggggtgtacttccggggacattgcggatgct

SEQ ID NO: 300266 - DNA, 75 bp, synthetic construct
  source 1..75: mol_type = other DNA
cctgttatcccggaagtaacaaaccagtcttgcttcctggttcaggggctggacaccacagtgatgctggcggca

SEQ ID NO: 300267 - DNA, 75 bp, synthetic construct
  source 1..75: mol_type = other DNA
ttccattatgcctggtaaggttaaccctgttatcccggaagtaacaaaccagtcttgcttcctggttcaggggct

SEQ ID NO: 300268 - DNA, 75 bp, synthetic construct
  source 1..75: mol_type = other DNA
ggcgtgttgagtctgttaattgcacgcttacttggtatgccagccggggcgatgtggcattttcgtgtagaccag

SEQ ID NO: 300269 - DNA, 75 bp, synthetic construct
  source 1..75: mol_type = other DNA
gtaagctactcacacaggaagaatgggagaagacattcaatctggataatctgattgctccgaagttcgaacaat

SEQ ID NO: 300270 - DNA, 75 bp, synthetic construct
  source 1..75: mol_type = other DNA
gagttcagcacagtgctcaagatgggacgtactcacctgcaggatgcagtgccaatgactctcggccaggagttc

SEQ ID NO: 300271 - DNA, 75 bp, synthetic construct
  source 1..75: mol_type = other DNA
tgcttgaggctgttgaacaccttgttggggcattctacaaaaaggctgacgaattcagcagagtactcaagatgg

SEQ ID NO: 300272 - DNA, 75 bp, synthetic construct
  source 1..75: mol_type = other DNA
ggcgctggcttctgccgacattttaaccaacggcactaaagtgggtatgaaaccccttgaaaatgaatcattggt

SEQ ID NO: 300273 - DNA, 75 bp, synthetic construct
  source 1..75: mol_type = other DNA
tcgccgatcagcaggcctttgccgaggcgctggcttctgccgacattttaaccaacggcactaaagtgggtatga

SEQ ID NO: 300274 - DNA, 75 bp, synthetic construct
  source 1..75: mol_type = other DNA
gcccgctcgctgggttaatgaactttatcccgacagacgacgtatatttaccagtaaggccaacccggttgcgcc

SEQ ID NO: 300275 - DNA, 75 bp, synthetic construct
  source 1..75: mol_type = other DNA
ggcttaaggaatatcagcaatataaaaatatattagtcgtcagccatcagggcgtgttgagcctgttaattgccc

SEQ ID NO: 300276 - DNA, 75 bp, synthetic construct
  source 1..75: mol_type = other DNA
gtcagcttgggaagaaatgacctgcttattcgcaccttccttagaaaaagcgggattgccatttacctatatggc

SEQ ID NO: 300277 - DNA, 75 bp, synthetic construct
  source 1..75: mol_type = other DNA
taaaaatgcgcggaactggtgtatcaatgccgaacaaacaactggcgtgtgaatatgttgatgaattaacgccag

SEQ ID NO: 300278 - DNA, 75 bp, synthetic construct
  source 1..75: mol_type = other DNA
ttgatttcactcgatcgtcaggaacgtggtcgcggtgagatttccgcgattcaggaagttgagcgtgattacaac

SEQ ID NO: 300279 - DNA, 75 bp, synthetic construct
  source 1..75: mol_type = other DNA
tgcggcaattgatgaccagtcaattaggcaaagttagtcatacatttgcccatatgccgcaggacgatccgcaaa

SEQ ID NO: 300280 - DNA, 75 bp, synthetic construct
  source 1..75: mol_type = other DNA
ctgggccttttgcgcaacgccgttgtttgacagcaagggccgattgacgggaacaatagcgctggcgtgtccggt

SEQ ID NO: 300281 - DNA, 75 bp, synthetic construct
  source 1..75: mol_type = other DNA
gattcataatgaaagcgaacgcgctgcaggtccctatatcgccgtcaattgcgagttatatggtgatgcgacgct

SEQ ID NO: 300282 - DNA, 75 bp, synthetic construct
  source 1..75: mol_type = other DNA
tctctacaacgccaggagttgagcgacaattttcataccattaaagataactggcatcgtttaatgaatcgtcag

SEQ ID NO: 300283 - DNA, 75 bp, synthetic construct
  source 1..75: mol_type = other DNA
aacgtattcgtccgcttaatgtggaaaaacaacgtagcgaagcgacatttcgaactaatcttgtgcagcataata

SEQ ID NO: 300284 - DNA, 75 bp, synthetic construct
  source 1..75: mol_type = other DNA
gtcctgctttgtggagaagagggcgtgggcaaggcactgctaagtcaggcaattcataatgaaagcgagcgtgca

SEQ ID NO: 300285 - DNA, 75 bp, synthetic construct
  source 1..75: mol_type = other DNA
ctgctggcaacgagctactgccacaagcaaaagacccggaaaccacggcgaagtggattgaacgttgcctggctg

SEQ ID NO: 300286 - DNA, 75 bp, synthetic construct
  source 1..75: mol_type = other DNA
cgaaggtgaggcgctgcgtctttccagcgtttcgcatccggaatacattggacgcgtcgcgaagttctttagcga

SEQ ID NO: 300287 - DNA, 75 bp, synthetic construct
  source 1..75: mol_type = other DNA
cgggcgcgacctggcactgttaggccgtttttacgctgaagcgttggtggattctggcattgagttcgatctgct

SEQ ID NO: 300288 - DNA, 75 bp, synthetic construct
  source 1..75: mol_type = other DNA
cagtttgctggctgaaactaatcggcatttaaatcagcttaacgccctgttagaaagtatggacgatggcgtgat

SEQ ID NO: 300289 - DNA, 75 bp, synthetic construct
  source 1..75: mol_type = other DNA
ggcggcattccgtgaaagccactcccagccagagcgaaacaattttcttgcgcgtcgtgaaggccgcaaaaacgt

SEQ ID NO: 300290 - DNA, 75 bp, synthetic construct
  source 1..75: mol_type = other DNA
taaacaggctaacctgacgccgttgctggcgattctgctgcataaacttggttttcctgtggtggttcacggcgt

SEQ ID NO: 300291 - DNA, 75 bp, synthetic construct
  source 1..75: mol_type = other DNA
aagcccggatcagcaatcaatgctggaacgcatcgatctgttcgagctgttttgccatgagcaacaatgctgggg

SEQ ID NO: 300292 - DNA, 75 bp, synthetic construct
  source 1..75: mol_type = other DNA
tccccgctcaacagcaggaagttttatgggcggcggcgttattgcatgacgttgaaaagcgcagtactaccgtgc

SEQ ID NO: 300293 - DNA, 75 bp, synthetic construct
  source 1..75: mol_type = other DNA
atatcccaacgccgttcgtgctgcgcgagcaaattgttgcactggtgcgtctgcatgggttaccgctatggttac

SEQ ID NO: 300294 - DNA, 75 bp, synthetic construct
  source 1..75: mol_type = other DNA
gaacaggtacagcctggtgttgataatgcctggcgtgaatcccgtggggacatcggtaaaggaatggagagcgta

SEQ ID NO: 300295 - DNA, 75 bp, synthetic construct
  source 1..75: mol_type = other DNA
gaataacgtgaacggattcagctggagcaccaacagtaccacgtcatttggtcagatgacgcaccagaccggtag

SEQ ID NO: 300296 - DNA, 75 bp, synthetic construct
  source 1..75: mol_type = other DNA
acggcaacatgcagacggaaaacgtgaacggcttcagctggagcaccaacagcaccacgtcgtttggtcagatga

SEQ ID NO: 300297 - DNA, 75 bp, synthetic construct
  source 1..75: mol_type = other DNA
tgccctgcatggtttcagcagcagtattgccagtgcctggaacacgctcagccagtttggctctaaccggggaag

SEQ ID NO: 300298 - DNA, 75 bp, synthetic construct
  source 1..75: mol_type = other DNA
gtggtgagtggttgcggaataacctgaatgccattgccgcctttatgggaacccggacgtgggattccattgaga

SEQ ID NO: 300299 - DNA, 75 bp, synthetic construct
  source 1..75: mol_type = other DNA
atagccagtgcgcagcaacagatggcccgtgagtctgatgtccaggccgaaagtgcgctgcatggctataacagc

SEQ ID NO: 300300 - DNA, 75 bp, synthetic construct
  source 1..75: mol_type = other DNA
aaaagtgcgctcgttcgtgtctgattccgcacgctggcattacctgacccatgagcaaaattctcctgattttgt

SEQ ID NO: 300301 - DNA, 75 bp, synthetic construct
  source 1..75: mol_type = other DNA
ttttagctgggttgaggagatgcatcacacgccacaagaccctgagcatcatggtgaaggcgacgtcggcgtgca

SEQ ID NO: 300302 - DNA, 75 bp, synthetic construct
  source 1..75: mol_type = other DNA
aaaaattatctatctggaagtgccgtgggcacaatggaagcagcaaaatgccaggcgtgtgtatgcagttcctga

SEQ ID NO: 300303 - DNA, 75 bp, synthetic construct
  source 1..75: mol_type = other DNA
caacttggcgtgcgtgtgtttgctattcctgatggtgacgttgccgcctcaattctcacctgtatgccggatagt

SEQ ID NO: 300304 - DNA, 75 bp, synthetic construct
  source 1..75: mol_type = other DNA
aatgccaacaccgtctgaagatgcgttaaaacagatggtggatgataagaaagaacgattgaaggggccattatg

SEQ ID NO: 300305 - DNA, 75 bp, synthetic construct
  source 1..75: mol_type = other DNA
aataccagcgccgtcagaagatgcgttaaaacagatggttgatggtaagaaggaacgattgaaggggccattatg

SEQ ID NO: 300306 - DNA, 75 bp, synthetic construct
  source 1..75: mol_type = other DNA
gcggagcgatgtcccgtttaccggtcggtatcaatgcaacgcgtcagattgcggcggcacaacaggaaatggccc

SEQ ID NO: 300307 - DNA, 75 bp, synthetic construct
  source 1..75: mol_type = other DNA
cctggtactggcggctgtattcaacaaactgacgctgtccgtcctgaaaggctatgtgtttgccctgatgtggtt

SEQ ID NO: 300308 - DNA, 75 bp, synthetic construct
  source 1..75: mol_type = other DNA
ctggccaccacgtcatcgatggagaaacaacgtctggcacatgtatcaatcggtcatgtggcgatgcggacactg

SEQ ID NO: 300309 - DNA, 75 bp, synthetic construct
  source 1..75: mol_type = other DNA
gccattggtattttcccgcttctggtactggcagctgtcttcaacaaactgacactgtccgtcctgaaaggctat

SEQ ID NO: 300310 - DNA, 75 bp, synthetic construct
  source 1..75: mol_type = other DNA
tgcggcggtgatccgtgcattagatggcgatatgaacggccgtctgctggcacgccatgatgtcaaaggtgataa

SEQ ID NO: 300311 - DNA, 75 bp, synthetic construct
  source 1..75: mol_type = other DNA
acctgaatctgccgctggcggataacctgcgcaatgttgcaacggcactcggcaaaccgttaagcgaactgacgg

SEQ ID NO: 300312 - DNA, 75 bp, synthetic construct
  source 1..75: mol_type = other DNA
tgggtatcgaagccggtaaagtgctgcgtctgggtgatatggcgcgcagcgataacgttattttctccgcaaccg

SEQ ID NO: 300313 - DNA, 75 bp, synthetic construct
  source 1..75: mol_type = other DNA
ccgggagccggcaggttgttgagaaagatggtacggcaattggcagcaatattagcgccggaggctcgctgattg

SEQ ID NO: 300314 - DNA, 75 bp, synthetic construct
  source 1..75: mol_type = other DNA
cctcccttcccctgtgctacacttcgcgccattccttactgcttagagtttgctatgagacgagaacttgccatc

SEQ ID NO: 300315 - DNA, 75 bp, synthetic construct
  source 1..75: mol_type = other DNA
gacaacgtcatcttttctgccaccggcatcaccaaaggtgatctgctggaaggtattagccgcaaaggcaatatc

SEQ ID NO: 300316 - DNA, 75 bp, synthetic construct
  source 1..75: mol_type = other DNA
tctgaaatcggctctcgcgctggatactcagacaggcggtaaaacctggaactactatgttcgtcagttgtttgg

SEQ ID NO: 300317 - DNA, 75 bp, synthetic construct
  source 1..75: mol_type = other DNA
aaacgggtcattcgcttttacgacactaagaatcgaaatgatcatgagcttccgatttgtgatgctgtgaaacga

SEQ ID NO: 300318 - DNA, 75 bp, synthetic construct
  source 1..75: mol_type = other DNA
taaatatgttgttgacttcacctgagttatataattcattattagcgtcatccaagtatccaccaattctcaagg

SEQ ID NO: 300319 - DNA, 75 bp, synthetic construct
  source 1..75: mol_type = other DNA
tggtaatgaaattcttaggaagtttgatgagattgcttcaagagccagaacagcagcggaacagacctttaggtg

SEQ ID NO: 300320 - DNA, 75 bp, synthetic construct
  source 1..75: mol_type = other DNA
ggctttggtgtgaaggtcagtttgacgaaaaaaacctatgtgatccagcgaagagtagcctcatcagatcgtaat

SEQ ID NO: 300321 - DNA, 75 bp, synthetic construct
  source 1..75: mol_type = other DNA
gtgaaaagattgcttaaccaccgtaataccacagaccctactgaaagatatgctgagcctgataaagagcgggta

SEQ ID NO: 300322 - DNA, 75 bp, synthetic construct
  source 1..75: mol_type = other DNA
cagtgcaacgaaaaagacctatatcgttcagcgacgagtgtcttctcctggcaatcgtcctaagacaggggggaa

SEQ ID NO: 300323 - DNA, 75 bp, synthetic construct
  source 1..75: mol_type = other DNA
caggccgcccgtaaggaggtggcgcatacctcacgacataatgagttttctatcggtgccagcgcctcgttgtgg

SEQ ID NO: 300324 - DNA, 75 bp, synthetic construct
  source 1..75: mol_type = other DNA
cgcgagcaaggagaccatgcgtgaatctggctttgcagtctcatctctttttttgtggcttgcgtcctggcaacc

SEQ ID NO: 300325 - DNA, 75 bp, synthetic construct
  source 1..75: mol_type = other DNA
cgatggtatgcactctggaacggtttaaattttatctggagcaacacgggtggatcgttgcccgtaaagaacaac

SEQ ID NO: 300326 - DNA, 75 bp, synthetic construct
  source 1..75: mol_type = other DNA
tgggtagagcgaaaccagctaaacccaacaccttggctgtattagataaagcagaaaacaggctttctgagtggg

SEQ ID NO: 300327 - DNA, 75 bp, synthetic construct
  source 1..75: mol_type = other DNA
atacctcacgacataatgagttttctatcggtgccagcgcctcgttgtgggaatgtatgcttaatcagtggctgg

SEQ ID NO: 300328 - DNA, 75 bp, synthetic construct
  source 1..75: mol_type = other DNA
aggcggcctgcataccgttgtcgatagcacaacactttcacggccgctttatgccatatggctgcaaaatagcga

SEQ ID NO: 300329 - DNA, 75 bp, synthetic construct
  source 1..75: mol_type = other DNA
gcttttattatcaataagttaagcattgatgtgaagcctgcccttaaccatgctggaaaagtcgttttcgaagct

SEQ ID NO: 300330 - DNA, 75 bp, synthetic construct
  source 1..75: mol_type = other DNA
cgcgtcgtgagcagtgcttacagaaaagcagcaagcgcgctgcatcgggtgaagagtggtatctgtcagggaatt

SEQ ID NO: 300331 - DNA, 75 bp, synthetic construct
  source 1..75: mol_type = other DNA
ttcagaaattcattgaagcccatccgggctgtacttccggagacattgcggatgcttttgccggttactcacggc

SEQ ID NO: 300332 - DNA, 75 bp, synthetic construct
  source 1..75: mol_type = other DNA
aaccagacctgtgcgcaatttctatgtcggcactaacgacccgcgggagattttgtgcctgacccgccaggcgga

SEQ ID NO: 300333 - DNA, 75 bp, synthetic construct
  source 1..75: mol_type = other DNA
gtatcattctcatttcaaattcttgttatgcttctgattgttttgaaattactggaaaagcatataatatagacc

SEQ ID NO: 300334 - DNA, 75 bp, synthetic construct
  source 1..75: mol_type = other DNA
tgcaggttactttaatacaccaaatgcagtagaactcagaaggcaatacgcaatgaaaatatataaaacatataa

SEQ ID NO: 300335 - DNA, 75 bp, synthetic construct
  source 1..75: mol_type = other DNA
ggaatctgtcacttgataccgaatgcccaaaatgcggtcacaatttcgatctgctttgtgacgctgatttctggg

SEQ ID NO: 300336 - DNA, 75 bp, synthetic construct
  source 1..75: mol_type = other DNA
ccgacagccaggggcgcgtggtttacgctcataaaccggggcagatgattgtggatgagtgcttcggtgcaggca

SEQ ID NO: 300337 - DNA, 75 bp, synthetic construct
  source 1..75: mol_type = other DNA
cgctctctcaatcgctgggggattttgtcgttgccagcgccgggccgcacctcgaatccgtgatcgccggtcacg

SEQ ID NO: 300338 - DNA, 75 bp, synthetic construct
  source 1..75: mol_type = other DNA
atttatgaggcacttcaaagtattgagctccatatgcttatgactgcaccagagttatataatacacttctggct

SEQ ID NO: 300339 - DNA, 75 bp, synthetic construct
  source 1..75: mol_type = other DNA
aacttaaaaatctggcccgctttcctcattttcatcttattaaaattaatggatttgatgagttcatggctgaat

SEQ ID NO: 300340 - DNA, 75 bp, synthetic construct
  source 1..75: mol_type = other DNA
gctgaagaagtgctatcagcattagatgaaactgagatagttacaatattgacgcaatcaatgccgatttttgac

SEQ ID NO: 300341 - DNA, 75 bp, synthetic construct
  source 1..75: mol_type = other DNA
gaaattagctggcaaagcccggtattctttacccctgtcgataaacagggtggtttaaaagaagcggaactgaaa

SEQ ID NO: 300342 - DNA, 75 bp, synthetic construct
  source 1..75: mol_type = other DNA
tgaccgtgcaagaaagcataagactactccacgtcaggataatatttttaaacgcttcactgccctcttagttga

SEQ ID NO: 300343 - DNA, 75 bp, synthetic construct
  source 1..75: mol_type = other DNA
tatctcgaatccgctggttcatcagaacgtattgatcatcgttctcttcaggcccagcatgaggaagcattagag

SEQ ID NO: 300344 - DNA, 75 bp, synthetic construct
  source 1..75: mol_type = other DNA
ggcccagcatgaagaagcattagaaaaagcggcggttgctctggataatgaagaaaaagcactatggcttgccaa

SEQ ID NO: 300345 - DNA, 75 bp, synthetic construct
  source 1..75: mol_type = other DNA
cgtgacgagcgttatccaacccagtcgccaatgccgttgaccgtagcgtgcgcgtctccggaactggcctctggc

SEQ ID NO: 300346 - DNA, 75 bp, synthetic construct
  source 1..75: mol_type = other DNA
aaaacaggacatccagaagcgcccctgaacatattaagaggcaacagactactacacatcaagataatgttttta

SEQ ID NO: 300347 - DNA, 75 bp, synthetic construct
  source 1..75: mol_type = other DNA
atgctcacgttatgttgaccttaaaaacaataggcccggaaggttttggcaaaaaggaaagaagctggaacgaca

SEQ ID NO: 300348 - DNA, 75 bp, synthetic construct
  source 1..75: mol_type = other DNA
gtgcgccacgccaagtttggtgaaggcactatcgtcaatatggaaggcagcggcgagcatagccgtttgcaggtg

SEQ ID NO: 300349 - DNA, 75 bp, synthetic construct
  source 1..75: mol_type = other DNA
agtgatgatcgttggcgatgacgaccagtcaatctacggctggcgcggggcgcaggtggagaatattcagcgttt

SEQ ID NO: 300350 - DNA, 75 bp, synthetic construct
  source 1..75: mol_type = other DNA
aggatttccagatcctcgacagtgaagaccagctacgtctgcttaagcgtttgatcaaggcgatgaacctcgacg

SEQ ID NO: 300351 - DNA, 75 bp, synthetic construct
  source 1..75: mol_type = other DNA
attgtcagaaaaatttcgttgataaaggtatgattgctgatatcgctttccatgatctcgatagcgacaacccac

SEQ ID NO: 300352 - DNA, 75 bp, synthetic construct
  source 1..75: mol_type = other DNA
taaacagggcatccagaagcgcccctgaacgtgttaagagaaaacaggctattccacgtcaggataatattttta

SEQ ID NO: 300353 - DNA, 75 bp, synthetic construct
  source 1..75: mol_type = other DNA
tacactcggcgaaaggtctggagtttccgcaggtgtttatcgttggtatggaagagggcatgttcccaagccaga

SEQ ID NO: 300354 - DNA, 75 bp, synthetic construct
  source 1..75: mol_type = other DNA
aaagtaaatgtttcagggaagaaatcccctgttctggttgctcctgaaccaactgcatccactaaattgaaaacc

SEQ ID NO: 300355 - DNA, 75 bp, synthetic construct
  source 1..75: mol_type = other DNA
taatccaggctatgagattattgcattacttcaaccaacgtcaccgttccggactgcaaatcatattaaacaatc

SEQ ID NO: 300356 - DNA, 75 bp, synthetic construct
  source 1..75: mol_type = other DNA
tccaccgattcagaaagatataaaacgatagcagagtactatggtgcagaagtcatactacgtagtgcagaatta

SEQ ID NO: 300357 - DNA, 75 bp, synthetic construct
  source 1..75: mol_type = other DNA
tacctgcacgagcgggctctaagggattgccagataagaatgttttaatgcttctagatcgtccgttaattgcgt

SEQ ID NO: 300358 - DNA, 75 bp, synthetic construct
  source 1..75: mol_type = other DNA
cgcggcggctggacggagctggacctcgcccagactaactatctgcgtgaactggtggaactgccaccagaaacc

SEQ ID NO: 300359 - DNA, 75 bp, synthetic construct
  source 1..75: mol_type = other DNA
aataaagaggattctatagatatagacgaccatttagacttttgtactgcgattgcgatacaatctaataaatca

SEQ ID NO: 300360 - DNA, 75 bp, synthetic construct
  source 1..75: mol_type = other DNA
ttagtaattatcgtcgtcaaaattgcagacaatattcaccgaatggagccatatttttagcatatgtatcagact

SEQ ID NO: 300361 - DNA, 75 bp, synthetic construct
  source 1..75: mol_type = other DNA
gtcatgggccacgatgtcaaacagctaccttgaagccgcaggcagtgaagaacgtatcgatcaccgttctctcag

SEQ ID NO: 300362 - DNA, 75 bp, synthetic construct
  source 1..75: mol_type = other DNA
catacagaagaccagccgtaaaatcttaccatgcccccaataaggtcagtaaagttggtgctgcagctaagaaat

SEQ ID NO: 300363 - DNA, 75 bp, synthetic construct
  source 1..75: mol_type = other DNA
aaatacatcccagtatgcacataacgatacacctctacagacagcaagtaagttaaccaccacatcaaagctaag

SEQ ID NO: 300364 - DNA, 75 bp, synthetic construct
  source 1..75: mol_type = other DNA
catgacttggatagtaagaatccccatgctcacgtcatgttaaccctgaaaaccattggtccagacggcttcggt

SEQ ID NO: 300365 - DNA, 75 bp, synthetic construct
  source 1..75: mol_type = other DNA
gttttccaagccgtcctacacatgaacaaccgaattttgatagaaacatggatctcacaccatcaagcccctcag

SEQ ID NO: 300366 - DNA, 75 bp, synthetic construct
  source 1..75: mol_type = other DNA
cacacagaagaccagccgtaaaatcttaccgtgaccccagtaaggtcagtagagtaaatgtatcagcgaagaaat

SEQ ID NO: 300367 - DNA, 75 bp, synthetic construct
  source 1..75: mol_type = other DNA
gcaggacaacggcggggcgctcgctgagtgcgccattctctaccgcagcaacgcccagtcgcgtgtgctggaaga

SEQ ID NO: 300368 - DNA, 75 bp, synthetic construct
  source 1..75: mol_type = other DNA
tatcttttcctgaaaaatctgggagcaattcgcttaaaccggaagcggtcaactgtaatttgttgtccctgtgtg

SEQ ID NO: 300369 - DNA, 75 bp, synthetic construct
  source 1..75: mol_type = other DNA
gtgtgctggcaccggtattctgtacacccaaaaagctggctgaagtttccagggagatcatcgtatccggcgcac

SEQ ID NO: 300370 - DNA, 75 bp, synthetic construct
  source 1..75: mol_type = other DNA
tgaagctgcccgtttgactgttgaccgtcaaaagggcgtgaattcacagttaacccagcaactccccgcaggacc

SEQ ID NO: 300371 - DNA, 75 bp, synthetic construct
  source 1..75: mol_type = other DNA
cagtattcacacgagagtgactggtctgaaatattgcgcctgactgatatcgtgctggaaaaagtttcttccggc

SEQ ID NO: 300372 - DNA, 75 bp, synthetic construct
  source 1..75: mol_type = other DNA
cagaaagctggctgaagtctccagggagatcatcgtggcgagtgcgcaggaaattgcatggacgccggggagcag

SEQ ID NO: 300373 - DNA, 75 bp, synthetic construct
  source 1..75: mol_type = other DNA
aaattgcatggacgccggggagcagtcgtattgatggtcatcagggcgaaaatattacctggtctctgtcgtcac

SEQ ID NO: 300374 - DNA, 75 bp, synthetic construct
  source 1..75: mol_type = other DNA
agacgcggcgcgctcctctctggaaagcctctcccggtttgttcgtaacaatccgggtgcggaaggcttcctgaa

SEQ ID NO: 300375 - DNA, 75 bp, synthetic construct
  source 1..75: mol_type = other DNA
cggaaaccttaattttgctggtcaggcgggtgctgagcttgagcgccccggcggcaggtttgcccgattcgaaac

SEQ ID NO: 300376 - DNA, 75 bp, synthetic construct
  source 1..75: mol_type = other DNA
tatggcatggggctaatgccgcaggaaacgcgtaactacattccgaaagtgatgagcaatatgcccaacagcgcc

SEQ ID NO: 300377 - DNA, 75 bp, synthetic construct
  source 1..75: mol_type = other DNA
agccgctaagtacctcagccagctgttgcggcagaacggcggagaccttagcaaagcactggcatcatataactg

SEQ ID NO: 300378 - DNA, 75 bp, synthetic construct
  source 1..75: mol_type = other DNA
cgaggcggccagaagctccaataagttcatgacctccctgcgtgagttcggcgcgatggcaggcatggcccgtga

SEQ ID NO: 300379 - DNA, 75 bp, synthetic construct
  source 1..75: mol_type = other DNA
catcgaccagatgggcgagttcagcaaaatgctgaatatgattgccgacctgctcaacgccattaaagatggccg

SEQ ID NO: 300380 - DNA, 75 bp, synthetic construct
  source 1..75: mol_type = other DNA
tcgatccccgcagcgtgggccggacggtacgcggctggtttggggatgatgagccggaacaatatgcacaggcta

SEQ ID NO: 300381 - DNA, 75 bp, synthetic construct
  source 1..75: mol_type = other DNA
ctttattaattctctcaggcataaggaattaactgaaatactggaaaaaatatcttttcctgaaaaatccgggag

SEQ ID NO: 300382 - DNA, 75 bp, synthetic construct
  source 1..75: mol_type = other DNA
cgggcacggctctggattatcgtgaacgggtacgcctttttgttcagatccagtattcacacgagagtgactggt

SEQ ID NO: 300383 - DNA, 75 bp, synthetic construct
  source 1..75: mol_type = other DNA
ccgtattgatggtgagcaggaagaaaatattacctggtctctgtcgtcacagactcatgccgataaatacgatcg

SEQ ID NO: 300384 - DNA, 75 bp, synthetic construct
  source 1..75: mol_type = other DNA
gcgacaccggcaaagtgatgatcgtcggtgatgacgaccagtcaatctacggctggcgcggggcgcaggtggaga

SEQ ID NO: 300385 - DNA, 75 bp, synthetic construct
  source 1..75: mol_type = other DNA
gtacgccacgctaagtttggtgaaggcaccatcgtcaatatggaaggcagcggcgagcatagccgtttgcaggtg

SEQ ID NO: 300386 - DNA, 75 bp, synthetic construct
  source 1..75: mol_type = other DNA
tacaacgaagaagatgaagatttaatgccgctgcaggcattcctctcccatgcggcgctggaagcgggcgagggg

SEQ ID NO: 300387 - DNA, 75 bp, synthetic construct
  source 1..75: mol_type = other DNA
gtcgatgccgcgttgaagatggttcgtgaccttaaaacaaccgttaacgacctggcgaaagcgctggcgaaacta

SEQ ID NO: 300388 - DNA, 75 bp, synthetic construct
  source 1..75: mol_type = other DNA
tcgcctgggcgtacagacccgtgatgccagcggtaacatgcgtgacatggctgctatctttacgggcgttggaca

SEQ ID NO: 300389 - DNA, 75 bp, synthetic construct
  source 1..75: mol_type = other DNA
gtggccttcacggctaagatcgcctccggcctggataatctttactgggcgtcacagcgcaccggcgcgacagtc

SEQ ID NO: 300390 - DNA, 75 bp, synthetic construct
  source 1..75: mol_type = other DNA
cgtgctggaaaaagtttcttccggcaggccagcaggcggctatcaccaccggtatacagggtatacagggtatac

SEQ ID NO: 300391 - DNA, 75 bp, synthetic construct
  source 1..75: mol_type = other DNA
aaattgcatggacgccggggagcagtcgtattgatggtcatcagggcgaaaatattacctggtctctgtcatcgc

SEQ ID NO: 300392 - DNA, 75 bp, synthetic construct
  source 1..75: mol_type = other DNA
aaattgcatggacgccggggagcagtcgtattgatggccaccaggcggagaatatcacctgggcgatttcatcgc

SEQ ID NO: 300393 - DNA, 75 bp, synthetic construct
  source 1..75: mol_type = other DNA
tgactgaccgggaaatcgactggctggaagaaatattaatgaagtatggaatggatgattctgtactctgtttct

SEQ ID NO: 300394 - DNA, 75 bp, synthetic construct
  source 1..75: mol_type = other DNA
tatccctcaccagaaaaactggcttcgctgagtgagaagaagctggcagcccaactcagtaaactcgcgccccgt

SEQ ID NO: 300395 - DNA, 75 bp, synthetic construct
  source 1..75: mol_type = other DNA
acacaaccaggcgcttatcgccctggcaagacggcgctgcgacattctgttcgccatgatgcgtgacggtacttt

SEQ ID NO: 300396 - DNA, 75 bp, synthetic construct
  source 1..75: mol_type = other DNA
ttgaaaagttaatcgacgaacatcgtgatattgttgattttggtacaaaagataacgctgtagatgatggatgga

SEQ ID NO: 300397 - DNA, 75 bp, synthetic construct
  source 1..75: mol_type = other DNA
ggtgggcggtatgactggcgtgctgctggcagtaccgggcgcggacttcgttctgcataacagcctgttcctgat

SEQ ID NO: 300398 - DNA, 75 bp, synthetic construct
  source 1..75: mol_type = other DNA
agcggccaatatcattgtaaaagacgaaaaaatgggaccagagccaattatcaaaagtctctgggcggtaactgt

SEQ ID NO: 300399 - DNA, 75 bp, synthetic construct
  source 1..75: mol_type = other DNA
ttaaaaacatattctccaataggacaatcactggaaaaacgtgcggaaaaaatacatgaactagaagaaaaagag

SEQ ID NO: 300400 - DNA, 75 bp, synthetic construct
  source 1..75: mol_type = other DNA
gaaagatgaactgggggagctggcgattgatgtactcatccatcggataacccagccgacccttcagcaacaacg

SEQ ID NO: 300401 - DNA, 75 bp, synthetic construct
  source 1..75: mol_type = other DNA
tgtgatgatggactgggctccgttcgatggcgacagcgatcttattcaggataactcgttgctgggcggagactt

SEQ ID NO: 300402 - DNA, 75 bp, synthetic construct
  source 1..75: mol_type = other DNA
ccgcgactggatcatccagcagtacttgatcttctccagcgatatccctcacccgaaaaactcgctttactgggt

SEQ ID NO: 300403 - DNA, 75 bp, synthetic construct
  source 1..75: mol_type = other DNA
gatccgctctccagggcttactacacccgcaaaatgagtcagggaaaacgacacaatcaggcgcttatcgccctg

SEQ ID NO: 300404 - DNA, 75 bp, synthetic construct
  source 1..75: mol_type = other DNA
ataaagctctcaaacgggcgttgttcctgtcggccttcaccgcctcacctgtccgctctccagggcttactacac

SEQ ID NO: 300405 - DNA, 75 bp, synthetic construct
  source 1..75: mol_type = other DNA
aaaagcgatcctgcctttgcttactggctggctgaatggcctgaaagcggattcagccagccgctcacaccaacg

SEQ ID NO: 300406 - DNA, 75 bp, synthetic construct
  source 1..75: mol_type = other DNA
gcatcgagcttgaacccaacattgatgccgttggcggaccttacgtaaccggcctggcaatgaccgacaccccgg

SEQ ID NO: 300407 - DNA, 75 bp, synthetic construct
  source 1..75: mol_type = other DNA
gatgctgatgtcattaaaacctacgtccggttgggactgggggtaggggtgattgccagcatggcggtcgacccg

SEQ ID NO: 300408 - DNA, 75 bp, synthetic construct
  source 1..75: mol_type = other DNA
cattgccagcatggcggtggatccggtcgccgatcccgaccttgtgcgtgttgatgctcacgatatcttcagcca

SEQ ID NO: 300409 - DNA, 75 bp, synthetic construct
  source 1..75: mol_type = other DNA
ttgctaacgatggggatttcgaccgtggtgattggtctgctgccgggctatgccacgattggtattttcgccccg

SEQ ID NO: 300410 - DNA, 75 bp, synthetic construct
  source 1..75: mol_type = other DNA
gtcagggtctcggcttaggcggtgaatggggcggcgcggcgctgttggcaaccgagaacgcaccacctcgcaaac

SEQ ID NO: 300411 - DNA, 75 bp, synthetic construct
  source 1..75: mol_type = other DNA
atcatgcagttcagcaaccgcgccggtgaagttgccatgttcaccgaatgcatggaagcggaactggtggcatcc

SEQ ID NO: 300412 - DNA, 75 bp, synthetic construct
  source 1..75: mol_type = other DNA
tcctgagaaagaggtaaacaggatgactaaaaatactcgtttttcccccgaagtccgtcaacgggcagtccgtat

SEQ ID NO: 300413 - DNA, 75 bp, synthetic construct
  source 1..75: mol_type = other DNA
ttattttaattataggacaaactctgggtattattgggggggtaagtaatttttcttttaatcgtgctatcgcaa

SEQ ID NO: 300414 - DNA, 75 bp, synthetic construct
  source 1..75: mol_type = other DNA
ccgtgaaatcgaatctattattgaagccggtcgtgtgagtgttgatggcaaaattgctaaactcggcgatcgcgt

SEQ ID NO: 300415 - DNA, 75 bp, synthetic construct
  source 1..75: mol_type = other DNA
tcacaattgaagaactggcgcagtatccgttggtgacatatacctttggttttaccggacgctccgaactggata

SEQ ID NO: 300416 - DNA, 75 bp, synthetic construct
  source 1..75: mol_type = other DNA
tctgaaccaatcgggcaacgctataaagcgacagaagcattatttaagtatgtcgcggttgatcctgaaggaaaa

SEQ ID NO: 300417 - DNA, 75 bp, synthetic construct
  source 1..75: mol_type = other DNA
gagcgtgaaaatcgtgaactgcgccgcagtaacgatatccttcgccaggcttccgcttattttgcgaaggcggag

SEQ ID NO: 300418 - DNA, 75 bp, synthetic construct
  source 1..75: mol_type = other DNA
gatattctggtggtggacaacctgaaagacggcaccaagtttgtgaacctggtcgatctggatatcgcggactat

SEQ ID NO: 300419 - DNA, 75 bp, synthetic construct
  source 1..75: mol_type = other DNA
tggtggcagcggctgttggtgtgcacgcagtcgccagcgccgttgaccagcgcagacgtcataaccagcaaccta

SEQ ID NO: 300420 - DNA, 75 bp, synthetic construct
  source 1..75: mol_type = other DNA
gtggtatggatccacggtctggaatgcacctgctgtaccgaatcttttatccgctccgctcacccactggcgaag

SEQ ID NO: 300421 - DNA, 75 bp, synthetic construct
  source 1..75: mol_type = other DNA
tggtggctgccgctgttggcgtgcatgcagtcgccagcgccgttgaccagcgcagacgtcataaccagcaacttg

SEQ ID NO: 300422 - DNA, 75 bp, synthetic construct
  source 1..75: mol_type = other DNA
ctaagcgcgccgctgctgattacgggtgataccggcaccggaaaagatctctttgcgtatgcctgtcatcaggca

SEQ ID NO: 300423 - DNA, 75 bp, synthetic construct
  source 1..75: mol_type = other DNA
gggcagatgatcaaaaaattgtcggtcaggccgatcccgtggcatgggtcagtttgcaggacattcaggggaaag

SEQ ID NO: 300424 - DNA, 75 bp, synthetic construct
  source 1..75: mol_type = other DNA
gccagcgcaattattgcctggggaacctgcgcatcttggggctgcgtacaagccgctcgccccaatccgacgcag

SEQ ID NO: 300425 - DNA, 75 bp, synthetic construct
  source 1..75: mol_type = other DNA
ataccttacttcccaaactgatgagcggtgaagtacgggttcagtatgcagaagaagcaatcgcatcagtagcat

SEQ ID NO: 300426 - DNA, 75 bp, synthetic construct
  source 1..75: mol_type = other DNA
attctatttgttgaaaacattagggctggaagaactgaacgaagatagcgctgttcctggactaaacagggatac

SEQ ID NO: 300427 - DNA, 75 bp, synthetic construct
  source 1..75: mol_type = other DNA
tttgatatgaagaagacgctcgacagctttatggaccgtgtcagtcagaagcagctgacagaagcgcagtcaaaa

SEQ ID NO: 300428 - DNA, 75 bp, synthetic construct
  source 1..75: mol_type = other DNA
agtctggctgccacgtcgctgggattaggcgcgggaatggcaccaaagattgcctgggcgctggagaataaaccg

SEQ ID NO: 300429 - DNA, 75 bp, synthetic construct
  source 1..75: mol_type = other DNA
atgaataacgaggaaacattttaccagtccatgcggcgtcagggggtcacccggcgaagttttcttaaatattgc

SEQ ID NO: 300430 - DNA, 75 bp, synthetic construct
  source 1..75: mol_type = other DNA
gtattgcgatataggtggttcagaccgacgaataaatgaaaatgccgggctggaaaaaatgcttattggtatgcg

SEQ ID NO: 300431 - DNA, 75 bp, synthetic construct
  source 1..75: mol_type = other DNA
tatagttggatcgaagtaccactgaggttgacagcaagagggcatgattttattgctgacttacgtcaaaaggat

SEQ ID NO: 300432 - DNA, 75 bp, synthetic construct
  source 1..75: mol_type = other DNA
ggcgcgtgctcttccaccaccgagtgggacggcaaatatatgatggataacaactatcaatactccaaggagctg

SEQ ID NO: 300433 - DNA, 75 bp, synthetic construct
  source 1..75: mol_type = other DNA
ggccctgaatgataaaggcatcaccgatatcctggtggtggacaacctgaaagacggcaccaagtttgtgaacct

SEQ ID NO: 300434 - DNA, 75 bp, synthetic construct
  source 1..75: mol_type = other DNA
gcgacttcgtctatgtgggcgacgtggctgatgtgaatctgtggttcctggaaaatggcgtttccggcatcttca

SEQ ID NO: 300435 - DNA, 75 bp, synthetic construct
  source 1..75: mol_type = other DNA
gggatggcaagtatatgatggataacaactatcaatactccaaagagctgttgcactactgtctggagcgcgaaa

SEQ ID NO: 300436 - DNA, 75 bp, synthetic construct
  source 1..75: mol_type = other DNA
ctggcttaccacaagaaaggtcagatcgaatacattccattcccggataaactgaaaggccgttatcagaagttc

SEQ ID NO: 300437 - DNA, 75 bp, synthetic construct
  source 1..75: mol_type = other DNA
gggacggcaagtatatgatggataacaactatcaatactctaaagaactgctgcactactgcctggagcgcgaaa

SEQ ID NO: 300438 - DNA, 75 bp, synthetic construct
  source 1..75: mol_type = other DNA
tgaggaaaatagcgcaaaaatggtgttatcccgtgcgatagataatgccataggtacatggagaaaagacaatcc

SEQ ID NO: 300439 - DNA, 75 bp, synthetic construct
  source 1..75: mol_type = other DNA
ggcgttaagtcgcatggatgattgcgcgccgattgcggcttacatctcccaggagaaagcgcgtaccgccgcgct

SEQ ID NO: 300440 - DNA, 75 bp, synthetic construct
  source 1..75: mol_type = other DNA
tcgatgctatttataatcagtctaccgccggagacatggccaaaaagcatctgaatgaggttaagagtattcttg

SEQ ID NO: 300441 - DNA, 75 bp, synthetic construct
  source 1..75: mol_type = other DNA
aataattgagccagttattgaattgtataccgacgttgtatgggcgccgttcaacacactgcacaacaaaatcaa

SEQ ID NO: 300442 - DNA, 75 bp, synthetic construct
  source 1..75: mol_type = other DNA
atttttgtttctcattctgtttatcgtgttgatgacaccgatatccccgctaatttttgtctgggcaatcgggaa

SEQ ID NO: 300443 - DNA, 75 bp, synthetic construct
  source 1..75: mol_type = other DNA
gtattgatgataccgatatccccgctaatttttgtctgggcaatcgggaaaataattgagccagttattgaattg

SEQ ID NO: 300444 - DNA, 75 bp, synthetic construct
  source 1..75: mol_type = other DNA
cgcttaatcagattgttgaccgcagaacggcatcgttactcagtgtggggatgctgacaaatcttaaccatgcag

SEQ ID NO: 300445 - DNA, 75 bp, synthetic construct
  source 1..75: mol_type = other DNA
aggagctttgcggggtggatttgctggtcctggatgaaatcggcatgcagcgggatacgcgcaacgagcaggtca

SEQ ID NO: 300446 - DNA, 75 bp, synthetic construct
  source 1..75: mol_type = other DNA
ggagacgctggaaacactgctccaggagaacgggaacgtggtcagagcagccgagcggcttggcattcaccgcaa

SEQ ID NO: 300447 - DNA, 75 bp, synthetic construct
  source 1..75: mol_type = other DNA
taccgggtgcagaacgacggacagcgccacgctctgagccaggcgaaatccatcgctgacgaactgatgaccggg

SEQ ID NO: 300448 - DNA, 75 bp, synthetic construct
  source 1..75: mol_type = other DNA
taccgggtgcagaacgacggtcagcgccatgctctgagtcaggcaaaatccatcgcggcagagctgcataccggc

SEQ ID NO: 300449 - DNA, 75 bp, synthetic construct
  source 1..75: mol_type = other DNA
aacggcgggcgctgggtgaattttaactgggagagctggcgcccgaatgttggtcaggctggcgcagtgaggtag

SEQ ID NO: 300450 - DNA, 75 bp, synthetic construct
  source 1..75: mol_type = other DNA
tgaaccgttcgggcatccagccgcttcacaggaagtgctcattcgggaactaccgggtgcagaacgacggtcagc

SEQ ID NO: 300451 - DNA, 75 bp, synthetic construct
  source 1..75: mol_type = other DNA
tatttccctctattgcgcttttaacgaactcgacgaagcgcgttttgtggttaaccgtatcaagacctggcagga

SEQ ID NO: 300452 - DNA, 75 bp, synthetic construct
  source 1..75: mol_type = other DNA
cttaacaagccgcatatccttcagcactatcgcgaacggtttaccaatatcctggtggatgaattccaggatacc

SEQ ID NO: 300453 - DNA, 75 bp, synthetic construct
  source 1..75: mol_type = other DNA
gtggaggagtggcgggaatggcaacttgctgaaggacgaaaacgcagcgaggagattaaccgcctgaatcatcag

SEQ ID NO: 300454 - DNA, 75 bp, synthetic construct
  source 1..75: mol_type = other DNA
ccatttttctttttgcactgctaacctcaacggcctctgccgctggcaaggacgttaatgttgagttcaggaagg

SEQ ID NO: 300455 - DNA, 75 bp, synthetic construct
  source 1..75: mol_type = other DNA
taccaggtgcagaacgacggtcagcgatacgcgttgagccaggcgaaatctatcgctgatgaactgatgaccgga

SEQ ID NO: 300456 - DNA, 75 bp, synthetic construct
  source 1..75: mol_type = other DNA
atgaaaaatattgcggcaggaggcattcttgaacgtatccgcagactggccccgccacatgtaaccgccccattc

SEQ ID NO: 300457 - DNA, 75 bp, synthetic construct
  source 1..75: mol_type = other DNA
ttcgtgcgccctgcgtctggctgccgggaaaccatgatttccagcctgcgatgtacagcgcgttacaggatgcgg

SEQ ID NO: 300458 - DNA, 75 bp, synthetic construct
  source 1..75: mol_type = other DNA
ggcagcagccattggcaaccatcttctggcgaaaggtcgcagcgtgattgtggtgacggtggcggatgtgatgct

SEQ ID NO: 300459 - DNA, 75 bp, synthetic construct
  source 1..75: mol_type = other DNA
catctactgccgagtgatatcgctgacgtcatccttgagggtgaagttcaggtcgtcgagcaactcggcaacgaa

SEQ ID NO: 300460 - DNA, 75 bp, synthetic construct
  source 1..75: mol_type = other DNA
gcaccgcaaatgctcgtttgcgaattacaaggtgcagaacgacggccagcgatacgcgttgagtcaggcgaaatc

SEQ ID NO: 300461 - DNA, 75 bp, synthetic construct
  source 1..75: mol_type = other DNA
taccaggtgcagaacgacggccagcgatacgcgttgagtcaggcgaaatccatcgctgatgaactgacgaccggg

SEQ ID NO: 300462 - DNA, 75 bp, synthetic construct
  source 1..75: mol_type = other DNA
ttcgtgcgccttgcgtctggttgcctggcaaccatgatttccagcctgcgatgtatagcgcgttacaagatgcgg

SEQ ID NO: 300463 - DNA, 75 bp, synthetic construct
  source 1..75: mol_type = other DNA
gttccaccgtaccggacggtggaggagtggcgggaatggcaacttgctgaaggacgaaaacgcagcgaggagatt

SEQ ID NO: 300464 - DNA, 75 bp, synthetic construct
  source 1..75: mol_type = other DNA
taccaggtgcagaacgaagggcagcgatacgcgttaagccaggcgaaatccatcgctgatgaaatgatgaccggg

SEQ ID NO: 300465 - DNA, 75 bp, synthetic construct
  source 1..75: mol_type = other DNA
ccatgaaaacattgctcggcgagcggattatggatcgcatgaccatgaacggcgggcgatgggtgaattttaact

SEQ ID NO: 300466 - DNA, 75 bp, synthetic construct
  source 1..75: mol_type = other DNA
gccatgctctgagtctggcaaaatccatcgcggcagaactgcataccggctgcacgaatttcgtgttcagcggta

SEQ ID NO: 300467 - DNA, 75 bp, synthetic construct
  source 1..75: mol_type = other DNA
cattgccgatgaattgatgaccggatgtacaaacttcgtgttcagcggtaaacctggtaccggtaaaaatcacct

SEQ ID NO: 300468 - DNA, 75 bp, synthetic construct
  source 1..75: mol_type = other DNA
ccaggcgaaatccattgccgatgaattgatgaccggatgtacaaacttcgtgttcagcggtaaacctggtaccgg

SEQ ID NO: 300469 - DNA, 75 bp, synthetic construct
  source 1..75: mol_type = other DNA
gaagatttaatgccgctgcaggcattcctctcccatgcggcgctggaagcgggagaggggcaggcggatacctgg

SEQ ID NO: 300470 - DNA, 75 bp, synthetic construct
  source 1..75: mol_type = other DNA
aaaaaacgaggtcacattgttgcttgacgggctgaatggagatcaacgaagggttgcgctcttgtgtctttgtac

SEQ ID NO: 300471 - DNA, 75 bp, synthetic construct
  source 1..75: mol_type = other DNA
agatactgttctgatgacgctctgccagcaactcattccgcttattgggacgttctcccccaatacgccggagcg

SEQ ID NO: 300472 - DNA, 75 bp, synthetic construct
  source 1..75: mol_type = other DNA
tggtggtctctgagcattttgagggtactggcaaaatcgtcagcgtcaatatcgattcaaatttcgcaacagttg

SEQ ID NO: 300473 - DNA, 75 bp, synthetic construct
  source 1..75: mol_type = other DNA
gcaatgaagaagtcaacgttagtctttctgatcgtcggaaagcagagattacggcccccaggtttgaactttttg

SEQ ID NO: 300474 - DNA, 75 bp, synthetic construct
  source 1..75: mol_type = other DNA
atgagcatctccaccacgaaacgccgcaatgaagaagtcaacgtaggtatttctgatcgtcgaaaagcagagatt

SEQ ID NO: 300475 - DNA, 75 bp, synthetic construct
  source 1..75: mol_type = other DNA
agatacatgaacagattatcggggatgtttacagccctgaaaaagatcggtttgtgggatgcagagcatccggtt

SEQ ID NO: 300476 - DNA, 75 bp, synthetic construct
  source 1..75: mol_type = other DNA
atggcgaacgaggcaataaggtggaaaaggacagcgtgacgctgaattttaaagcgtttgtgcaggctacatcag

SEQ ID NO: 300477 - DNA, 75 bp, synthetic construct
  source 1..75: mol_type = other DNA
ggctcggtatcctcctggccctgatgtctccggtaacggtaaacgcagccggggggctggattttaaaggcaatc

SEQ ID NO: 300478 - DNA, 75 bp, synthetic construct
  source 1..75: mol_type = other DNA
accgggggcgactgggcattggcatcattgatactgatggcagcagtttgctgaagctcaatcaggttcataatc

SEQ ID NO: 300479 - DNA, 75 bp, synthetic construct
  source 1..75: mol_type = other DNA
cagcggtgctctgggcgatctatcctgtcatctgcttgatttattttgttttataggggaaagcccggtagtggt

SEQ ID NO: 300480 - DNA, 75 bp, synthetic construct
  source 1..75: mol_type = other DNA
cccggatattatataaagaaattgtaccaggtgaccttaggaaaattcatgcagaatctaacgacgctaacacgg

SEQ ID NO: 300481 - DNA, 75 bp, synthetic construct
  source 1..75: mol_type = other DNA
tcgttgctgtaactattctgttctctgtcttcgctactgcgaaacaagtaaaactgccaaatgcgtattttcatg

SEQ ID NO: 300482 - DNA, 75 bp, synthetic construct
  source 1..75: mol_type = other DNA
ttcttgaacgcatccgtaagctggccccgcagcatgtaaccgcaccgtaccggacagtggacgagtggagagagt

SEQ ID NO: 300483 - DNA, 75 bp, synthetic construct
  source 1..75: mol_type = other DNA
cagtcaatctacggctggcgcggggcgcaggtggagaatattcagcgtttcctcaatgatttccccggtgccgaa

SEQ ID NO: 300484 - DNA, 75 bp, synthetic construct
  source 1..75: mol_type = other DNA
tggagtcggtgtaacgttgccggatgcggtgctgcgcaccttatttggcctaaaaaatcattcagattcaataaa

SEQ ID NO: 300485 - DNA, 75 bp, synthetic construct
  source 1..75: mol_type = other DNA
ggataccaacaacattcagtacgcgtggatccgcctgctggcgggcgacaccggcaaagtgatgatcgtcggtga

SEQ ID NO: 300486 - DNA, 75 bp, synthetic construct
  source 1..75: mol_type = other DNA
tgggtacgccgatggttgagaacgacagcggttacaaactcggccagcgcgtacgacacgccaagtttggtgaag

SEQ ID NO: 300487 - DNA, 75 bp, synthetic construct
  source 1..75: mol_type = other DNA
cggtgagcatagccgtttgcaggtggcattccagggccagggtattaaatggctggtggcggcttacgcccggct

SEQ ID NO: 300488 - DNA, 75 bp, synthetic construct
  source 1..75: mol_type = other DNA
gtacgtcagacatcgcgcgatcgccagttaacactctggcaggcatgtcgtgaactgttgcaggaaaaagccctc

SEQ ID NO: 300489 - DNA, 75 bp, synthetic construct
  source 1..75: mol_type = other DNA
cgatgaatacgctgcttggtgagcgcgtgatggaccgcatgaccatgaacggtggtcgctgggtgaattttaact

SEQ ID NO: 300490 - DNA, 75 bp, synthetic construct
  source 1..75: mol_type = other DNA
atggtttcactacgtatggaggaggctgtgtttatcagtcccgcaggtattcaatgggtgcctgcaataatgttt

SEQ ID NO: 300491 - DNA, 75 bp, synthetic construct
  source 1..75: mol_type = other DNA
ttgtaagaaagatatttagcaaaaaaattgactttacgatcttggcatttttctatatttcctctattttttttc

SEQ ID NO: 300492 - DNA, 75 bp, synthetic construct
  source 1..75: mol_type = other DNA
tagaggaactggtgacggcaacgcgccagttcagttacaacgaagaagacgaagatttaatgccgctgcaggcgt

SEQ ID NO: 300493 - DNA, 75 bp, synthetic construct
  source 1..75: mol_type = other DNA
caggatgcggtgcagttgatgacgctacactcggcgaaaggcctggagttcccgcaggtgtttatcgttggtatg

SEQ ID NO: 300494 - DNA, 75 bp, synthetic construct
  source 1..75: mol_type = other DNA
gcagacctggcagaaggtgtatcaggcgtatcaggaagcgtgcgatcgcgcgggcctggtggacttcgccgagct

SEQ ID NO: 300495 - DNA, 75 bp, synthetic construct
  source 1..75: mol_type = other DNA
caatcaagttattggagtttgttttaattttctctttttttcttattgcattatttttcttatattccccatctt

SEQ ID NO: 300496 - DNA, 75 bp, synthetic construct
  source 1..75: mol_type = other DNA
atgtcggctgaaatcagccgtagaagtctggtgaaaacctccgctcttggcagtctcgcgctagcaagcagtgct

SEQ ID NO: 300497 - DNA, 75 bp, synthetic construct
  source 1..75: mol_type = other DNA
atgaaggctgaaatcagccgtagaagtctgatgaaaacctccgcacttggcagtctcgcgctggcaagcagtgct

SEQ ID NO: 300498 - DNA, 75 bp, synthetic construct
  source 1..75: mol_type = other DNA
gcactgaacgccagccgcctgatcgtgactaaagatttagcgcagtgcgtggagatctccaaccagtacggcccg

SEQ ID NO: 300499 - DNA, 75 bp, synthetic construct
  source 1..75: mol_type = other DNA
tgatagctttgaactagaacctttctattatcttaaatatttagaatatagagagacagaaataaacagaggact

SEQ ID NO: 300500 - DNA, 75 bp, synthetic construct
  source 1..75: mol_type = other DNA
gtttcaataacagattattctttactgagttatatgtctttcttggtttttttattatatggtgtttttttacaa

SEQ ID NO: 300501 - DNA, 75 bp, synthetic construct
  source 1..75: mol_type = other DNA
tctgatctttggctgctggcggcgatgcatctattggcaatctcgcgcggtcatatctttaatgatggtaataag

SEQ ID NO: 300502 - DNA, 75 bp, synthetic construct
  source 1..75: mol_type = other DNA
cgatggctgcatcagcgttgatttaagcgccatcaaaccaatgattgcgctgccgttccacccgagcaacgtgta

SEQ ID NO: 300503 - DNA, 75 bp, synthetic construct
  source 1..75: mol_type = other DNA
tgattacatttatatccctggcattaaagcggcgctggataatcctggaacgacgtttaaaggttatgtgatcca

SEQ ID NO: 300504 - DNA, 75 bp, synthetic construct
  source 1..75: mol_type = other DNA
aggaaataatttatttccacgataaattgcttagcgttacaccaggtgtaacaggaatgtccgatccagggcgag

SEQ ID NO: 300505 - DNA, 75 bp, synthetic construct
  source 1..75: mol_type = other DNA
atggagattacgcctgtttatcttcaggatgaaaatgatcaacacgtcctgaccggtgcggtggtgatgttgcga

SEQ ID NO: 300506 - DNA, 75 bp, synthetic construct
  source 1..75: mol_type = other DNA
atgcaaattatcgctttgaatgctgcaacaggagaatataactggaagatggggtttgaggcccaaccgtacgag

SEQ ID NO: 300507 - DNA, 75 bp, synthetic construct
  source 1..75: mol_type = other DNA
ctgcgggaatacagcgcgaagtttgataaaaccacggttactacacttaaagtttctgctgaggaaattaccgct

SEQ ID NO: 300508 - DNA, 75 bp, synthetic construct
  source 1..75: mol_type = other DNA
atgggtgtggctcctgatgccattctcaaccttaaagatccgcaggtaatgtcctctctgatgaatggaattatc

SEQ ID NO: 300509 - DNA, 75 bp, synthetic construct
  source 1..75: mol_type = other DNA
gcttatcgcattgttcagtgggctgttggttgcatggcggctgctaaataccgctttcatgtcatcacccttggg

SEQ ID NO: 300510 - DNA, 75 bp, synthetic construct
  source 1..75: mol_type = other DNA
caaaatgcactggaaatcctcggtacattcatcgcgggtgtctgggtatccaaggttctgggggctttcgggaaa

SEQ ID NO: 300511 - DNA, 75 bp, synthetic construct
  source 1..75: mol_type = other DNA
ggcgatgcgccggggtgtgggcggtttctccgggcagtacagcgcaatggcgaaagctatcggcttcaatgctga

SEQ ID NO: 300512 - DNA, 75 bp, synthetic construct
  source 1..75: mol_type = other DNA
aaaatgctgaacatgatcgccgacctgctcaacgccattaaagatggccgctgggctgatgccgccagcatcggc

SEQ ID NO: 300513 - DNA, 75 bp, synthetic construct
  source 1..75: mol_type = other DNA
cgccccggctagtgacaacaacgatccggaggcgtactccaactttgtcgccaacatgatgggcgtgggaactaa

SEQ ID NO: 300514 - DNA, 75 bp, synthetic construct
  source 1..75: mol_type = other DNA
tctgccctggcctcaaccattgaaacactggccgctgctgaacgactgactgcccacaaaaatgctgtcaccctg

SEQ ID NO: 300515 - DNA, 75 bp, synthetic construct
  source 1..75: mol_type = other DNA
cgtgctgccgacttacggttataccgccacctgttccagcctcggcctggcggatttccagaagcgcatgaccgt

SEQ ID NO: 300516 - DNA, 75 bp, synthetic construct
  source 1..75: mol_type = other DNA
tgcggcgtgcaggacgtgtttaacgtcggcggcgcacaagccattgccgcactggcctttggtactgaatccgtg

SEQ ID NO: 300517 - DNA, 75 bp, synthetic construct
  source 1..75: mol_type = other DNA
caattatcagggcgtggccctgtccccggtactgagtgccggccacagtgacaaagcgatgctgtggtcggatgc

SEQ ID NO: 300518 - DNA, 75 bp, synthetic construct
  source 1..75: mol_type = other DNA
ggagaaggtgaaagccgaactggcgcagaaacaggcggaatatcaggcggcggataaagccctgaatgaggcgca

SEQ ID NO: 300519 - DNA, 75 bp, synthetic construct
  source 1..75: mol_type = other DNA
cggctacgaatgaccgaccattttattctcgtaatgagctaatagaacagttggtcattcgcaatatgtcagtta

SEQ ID NO: 300520 - DNA, 75 bp, synthetic construct
  source 1..75: mol_type = other DNA
ttgcgcgcattaagcagattgctggtcaggagcatattgatccgctgcaaactgaaattggcagcatggtttatg

SEQ ID NO: 300521 - DNA, 75 bp, synthetic construct
  source 1..75: mol_type = other DNA
gcgcaattgattaacggatttaattttttacgctggctggagagtgacccgcaggattcgcataacgaacatgtg

SEQ ID NO: 300522 - DNA, 75 bp, synthetic construct
  source 1..75: mol_type = other DNA
agcagtcgcatcaataccgacgtggcgcggcgtattcccggcctgaactgggttcccggaaaccgactggtttcg

SEQ ID NO: 300523 - DNA, 75 bp, synthetic construct
  source 1..75: mol_type = other DNA
ggctaaaacgtcaggactttgccttcacccgaaaaatgcgccgtgaagcccgtcaggtcgagcagtcctggttac

SEQ ID NO: 300524 - DNA, 75 bp, synthetic construct
  source 1..75: mol_type = other DNA
gcgccgagcaaggtagctacgcgctggtggatctcttcacccgctaccaggtgacgaaaaacttctcgttacagg

SEQ ID NO: 300525 - DNA, 75 bp, synthetic construct
  source 1..75: mol_type = other DNA
tctggttgagctggtgcaaaaaggcgctttccgggaagatctctattatcgcctgaatgtgctgacgctgaattt

SEQ ID NO: 300526 - DNA, 75 bp, synthetic construct
  source 1..75: mol_type = other DNA
gcaggattcgcataacgaacatgtggtgattaacgggcaaaatttcttgatggagataacgccggtttatttgca

SEQ ID NO: 300527 - DNA, 75 bp, synthetic construct
  source 1..75: mol_type = other DNA
aacggtggtcgatgggtgacgtttaactgggatagctggcgtccaaatgtcagcaatatgagggttgtgaagtaa

SEQ ID NO: 300528 - DNA, 75 bp, synthetic construct
  source 1..75: mol_type = other DNA
cgtcagttgcgggtggaaaaaattcttaatcgctctggcatccagccattgcaccgcaaatgctcgttttcgaat

SEQ ID NO: 300529 - DNA, 75 bp, synthetic construct
  source 1..75: mol_type = other DNA
tgtgttgcacgacagttacgacaacggcaaatcaggtgaaaaatttttacaggagctttgcggggtggatttgct

SEQ ID NO: 300530 - DNA, 75 bp, synthetic construct
  source 1..75: mol_type = other DNA
tgcacgaattttgtgttcagcggtaaaaccggcaccgggaaaaatcaccttgcagcggcgatgggtaaccggctg

SEQ ID NO: 300531 - DNA, 75 bp, synthetic construct
  source 1..75: mol_type = other DNA
tcgggaactaccgggtgcagaacgacggtcagcgccatgctctgagccaggcgaaatccattgccgatgaattga

SEQ ID NO: 300532 - DNA, 75 bp, synthetic construct
  source 1..75: mol_type = other DNA
tgcagcggcgatgggcaaccggctgatggtgaaggggcgcagcgtgattatcgtcaccgtgtctgacgtcatgag

SEQ ID NO: 300533 - DNA, 75 bp, synthetic construct
  source 1..75: mol_type = other DNA
gaaaaaattcaacaaagcacgcgtccagttctacctgaatggtaacgatcgcatcgtggttgatggtcataaagc

SEQ ID NO: 300534 - DNA, 75 bp, synthetic construct
  source 1..75: mol_type = other DNA
aagatctcaccactgacggattcgatgctctcatcaaattcttcaccactggtgcattcggtgttatggcccgca

SEQ ID NO: 300535 - DNA, 75 bp, synthetic construct
  source 1..75: mol_type = other DNA
catgaccgctgacatcctggcatgtaatgccgttggcggcttcgatcaggaattttggaaagctatcgataacca

SEQ ID NO: 300536 - DNA, 75 bp, synthetic construct
  source 1..75: mol_type = other DNA
tattggtaaaacactgaaaatgtacagcgtatccggcgacatcaacgatgaagtcgtaatgtctatggatggtca

SEQ ID NO: 300537 - DNA, 75 bp, synthetic construct
  source 1..75: mol_type = other DNA
cgatccaggttatgttggcagaagtaaagcgactgctgagctggaaaatcagcgtctggcggggaatgtcagcga

SEQ ID NO: 300538 - DNA, 75 bp, synthetic construct
  source 1..75: mol_type = other DNA
aatgggaatgattagtgatgattttatttcacttctggccgattctggaagtattgataattacgccaaaagaag

SEQ ID NO: 300539 - DNA, 75 bp, synthetic construct
  source 1..75: mol_type = other DNA
tcgtcgcccgctttgccgacgagcagggcgtgccgcgtccgaaactggccgctgacctgaatactgtacttacgc

SEQ ID NO: 300540 - DNA, 75 bp, synthetic construct
  source 1..75: mol_type = other DNA
tgatgggtgtacagaccgtattaccaatcggtaaaacgctgaaaatgtacaacgtatccggcgacattaacgatg

SEQ ID NO: 300541 - DNA, 75 bp, synthetic construct
  source 1..75: mol_type = other DNA
aagttgtgatgtctatggatggtcaagcgccacacggctttgatcacaccgaatacggcagcgatggcgacccga

SEQ ID NO: 300542 - DNA, 75 bp, synthetic construct
  source 1..75: mol_type = other DNA
aattctggaaagaaatcgataaccagattatcgaactgaacaccgaagaaatcggtattgaaatcgtcaacgacc

SEQ ID NO: 300543 - DNA, 75 bp, synthetic construct
  source 1..75: mol_type = other DNA
tcccgatgttcgcagcgggttacggtgttaactggcgtcatgccgctggtctgaataccgtagggattgaccttg

SEQ ID NO: 300544 - DNA, 75 bp, synthetic construct
  source 1..75: mol_type = other DNA
gagtcacccttgccgatccgctgcatctgatcctcggcgcacgttataccaactggcgggttgatacgctgactt

SEQ ID NO: 300545 - DNA, 75 bp, synthetic construct
  source 1..75: mol_type = other DNA
agaccttcgcgctgacaggtaacgaatttattgcctaccagcgccagaaatcagtaattagcccgctgatcggta

SEQ ID NO: 300546 - DNA, 75 bp, synthetic construct
  source 1..75: mol_type = other DNA
cccggcattctcaaatcagtggtggtgctgcccggaacacggaactcaattagcactcgaacgacgaagtaaaga

SEQ ID NO: 300547 - DNA, 75 bp, synthetic construct
  source 1..75: mol_type = other DNA
ggcacagcaggccgtgaatgcttatatcagggaacgagaccgtaatttgccgtgcgtttcatgcgggacattcga

SEQ ID NO: 300548 - DNA, 75 bp, synthetic construct
  source 1..75: mol_type = other DNA
catcatgccgagcgtgagtttggtgaatccaaatacagctttatgcgcctgattaatttgatgtacgacctggtg

SEQ ID NO: 300549 - DNA, 75 bp, synthetic construct
  source 1..75: mol_type = other DNA
atgtttgaaatccaccctgttaagaaagtctcggtggttattcccgtttataacgagcaggaaagcttaccggaa

SEQ ID NO: 300550 - DNA, 75 bp, synthetic construct
  source 1..75: mol_type = other DNA
gtatattgctcaagtgaacaaaaactctcattttatctttcgggtgctaccactgacagtgccagacatgtgttt

SEQ ID NO: 300551 - DNA, 75 bp, synthetic construct
  source 1..75: mol_type = other DNA
gttcgttccagtcgtgccatttgcgaaatagacgaccgcgtatacccccggaaatattggctacatggcctgaat

SEQ ID NO: 300552 - DNA, 75 bp, synthetic construct
  source 1..75: mol_type = other DNA
gttcgttcaagcagggcaatctgtgagcttgatgatcgtgtttacccacgaaaatactggttgcatggcctgaac

SEQ ID NO: 300553 - DNA, 75 bp, synthetic construct
  source 1..75: mol_type = other DNA
ctctcattttatctttcgggtgccaccactgacagtgcccgacaagtgtttgctaacacagcaccagatgcaaca

SEQ ID NO: 300554 - DNA, 75 bp, synthetic construct
  source 1..75: mol_type = other DNA
ttatggcgggtttcagtcatgtgacgggcgatttgattattacccttgatgccgatttgcaaaatcccccagagg

SEQ ID NO: 300555 - DNA, 75 bp, synthetic construct
  source 1..75: mol_type = other DNA
gatttgccgattatgtgctgcaacgtgaactgggcggcaactactacagcgatcctgatgttccacctcgcgctc

SEQ ID NO: 300556 - DNA, 75 bp, synthetic construct
  source 1..75: mol_type = other DNA
ggcccgattttcttgaacgtcactggcagaaacgtccggtggtgttaaaacgcggctttaataattttattgacc

SEQ ID NO: 300557 - DNA, 75 bp, synthetic construct
  source 1..75: mol_type = other DNA
gcagaccacaactgatgaggctgcggagttttccgggatgattcctgtttatcattttctggtcagtgccgcgat

SEQ ID NO: 300558 - DNA, 75 bp, synthetic construct
  source 1..75: mol_type = other DNA
ccatcaaggcggagtatcaacagaaacttaaaaactgcgaaacagcagaagtgaggttgcatgaatatctacgaa

SEQ ID NO: 300559 - DNA, 75 bp, synthetic construct
  source 1..75: mol_type = other DNA
atatgtttctaagacgagttgattgtatagtggcatcatctcctaattatgtatataccagtctgacattgcaaa

SEQ ID NO: 300560 - DNA, 75 bp, synthetic construct
  source 1..75: mol_type = other DNA
aagagttactggaagcaccaaccgcgggtgagggcgcaacctgccgcagctgcgcgcattgtccgtggatggcca

SEQ ID NO: 300561 - DNA, 75 bp, synthetic construct
  source 1..75: mol_type = other DNA
aatccagccggtacagcctgtcgcccaacagcctgtgaaaatggaaaatgggcgtattgtttacaaccgccaata

SEQ ID NO: 300562 - DNA, 75 bp, synthetic construct
  source 1..75: mol_type = other DNA
aacatgtttgtaaagaagaatgcccatgtcatcttttacgctctcgttttaaagatgataagggtgactggaaag

SEQ ID NO: 300563 - DNA, 75 bp, synthetic construct
  source 1..75: mol_type = other DNA
gaccctgaaatccaacaactggcggaggaaaccggcggctgcatttccgattcgctggaaatggcgcgctttggt

SEQ ID NO: 300564 - DNA, 75 bp, synthetic construct
  source 1..75: mol_type = other DNA
ttgtggcgaccgaccggggtatcttctataaaatgcagcaggcggtacctgataaagtactgttggaagcgccaa

SEQ ID NO: 300565 - DNA, 75 bp, synthetic construct
  source 1..75: mol_type = other DNA
gtaaattacaggaattgatttgggataagttggttgcatatgtcaatgattttaacttaagcaatcaagaaaaat

SEQ ID NO: 300566 - DNA, 75 bp, synthetic construct
  source 1..75: mol_type = other DNA
cgaagggaaagtcgcatttggactttccgttgagcacgttgaacacgcgattccgatgctgattaaccatctgaa

SEQ ID NO: 300567 - DNA, 75 bp, synthetic construct
  source 1..75: mol_type = other DNA
atgaaaaagattggcgttgcaggcttacagcgtgagcagattaaaaaaaccattgaagcgacggctcctggcagt

SEQ ID NO: 300568 - DNA, 75 bp, synthetic construct
  source 1..75: mol_type = other DNA
aggctggcaaatgcccacacaattaatggggttccttttgacggaacgcaggatataaacatcacttctggtatg

SEQ ID NO: 300569 - DNA, 75 bp, synthetic construct
  source 1..75: mol_type = other DNA
gtgtgaccgatatgccaccactggccccctctcagggcactcaggttaaatggtttactgaaggtgacggacgta

SEQ ID NO: 300570 - DNA, 75 bp, synthetic construct
  source 1..75: mol_type = other DNA
cattgtcgattgccatcgcggtgattggctataacaaagttgcaccattgccaaaccaggcattaaagcgaaaga

SEQ ID NO: 300571 - DNA, 75 bp, synthetic construct
  source 1..75: mol_type = other DNA
tgaagggaaagtggcgtttggcctttccgttgagcacgtcgaacacgcgattccgatgctgattaaccatctgaa

SEQ ID NO: 300572 - DNA, 75 bp, synthetic construct
  source 1..75: mol_type = other DNA
gctgctgcccgccgtcatcttgggcttggaggattatcaggaaaagacagcctggctgctaatgatgtgggagca

SEQ ID NO: 300573 - DNA, 75 bp, synthetic construct
  source 1..75: mol_type = other DNA
accgccgtggcagcgaataaactcgccaccccagtaaatattaatggcgttcctttcgacggaacgcaggatatc

SEQ ID NO: 300574 - DNA, 75 bp, synthetic construct
  source 1..75: mol_type = other DNA
tgggagcgcaggcattaagcggcgtactggaatataattactccctgtcatcaggaaatgtgattaccggtttta

SEQ ID NO: 300575 - DNA, 75 bp, synthetic construct
  source 1..75: mol_type = other DNA
acctggagaatgcggaaaccgcccgtaataatctggatgtttacagcaggagcgaaggtgataaccgttacctgc

SEQ ID NO: 300576 - DNA, 75 bp, synthetic construct
  source 1..75: mol_type = other DNA
agttcagccgataatatcggaggcgtttattaccgtccggtgcagatatatatcggtaatgcctggcgcacagtt

SEQ ID NO: 300577 - DNA, 75 bp, synthetic construct
  source 1..75: mol_type = other DNA
ggacggcaccgctgcggcagcgaataaactcgccaccccaagaaatattaatggtgttcctttcgacgggacgca

SEQ ID NO: 300578 - DNA, 75 bp, synthetic construct
  source 1..75: mol_type = other DNA
tggtgatggtaatgcaacggtaaccgcatattatcgcccggttcagtttctggtaaatggttcgtggaaaacagc

SEQ ID NO: 300579 - DNA, 75 bp, synthetic construct
  source 1..75: mol_type = other DNA
tttaatgaagtgcctgtcagcattttagtaaatgatatttttttgaaggattttttcatgaagcaacctgatttt

SEQ ID NO: 300580 - DNA, 75 bp, synthetic construct
  source 1..75: mol_type = other DNA
ggaaatagaaattacacttgcctcagcttttaataatgggattcgtgaaggacatacagccattatattttcaca

SEQ ID NO: 300581 - DNA, 75 bp, synthetic construct
  source 1..75: mol_type = other DNA
cgtacccctctcagaacagtccatcgcaattctgaaacagattaaggatatcaccggtaataatgaactgatctt

SEQ ID NO: 300582 - DNA, 75 bp, synthetic construct
  source 1..75: mol_type = other DNA
atgatgcaaaagttaaccttacaccggtcatcgattcgattctggagacttttttaaaatccccatatattaatg

SEQ ID NO: 300583 - DNA, 75 bp, synthetic construct
  source 1..75: mol_type = other DNA
taactcgcaggtgagttgtaaaggttcagttgattctacgattacggatttattagaaaaagcattgaataaagg

SEQ ID NO: 300584 - DNA, 75 bp, synthetic construct
  source 1..75: mol_type = other DNA
attttagctgcgatcaatctaaaattaaaatagctgagaccttattttttaatctcgataaagaaccctatgaaa

SEQ ID NO: 300585 - DNA, 75 bp, synthetic construct
  source 1..75: mol_type = other DNA
atgttccatgttgataataattccggcgtggcgaatatgcctgcgctggcaccggcgcagagtaataccaccacc

SEQ ID NO: 300586 - DNA, 75 bp, synthetic construct
  source 1..75: mol_type = other DNA
cgggagaaattcagccgataatatcggaggcgtttattaccgtccggtgcagatatatatcggtaatgcctggcg

SEQ ID NO: 300587 - DNA, 75 bp, synthetic construct
  source 1..75: mol_type = other DNA
tgctgatgccggtgcggaggcccagcgtcttgcccgtggttatcttggcctgggtacgcttgccacaaaaaacag

SEQ ID NO: 300588 - DNA, 75 bp, synthetic construct
  source 1..75: mol_type = other DNA
acccgctgaagtgcgagctgcgcggaggtcagatgcggtttacggggctgaagaggggttaccgtctggcagagc

SEQ ID NO: 300589 - DNA, 75 bp, synthetic construct
  source 1..75: mol_type = other DNA
ttcagcagggaaacctctggcttaactggctggagaagcagccggaaggttcagtgcgtccggtggtgattgagt

SEQ ID NO: 300590 - DNA, 75 bp, synthetic construct
  source 1..75: mol_type = other DNA
atgtatcagcggttactgaaggttgacccgctgaaatgcgtgctgtgcggaagtcagatgcgatttacggggctg

SEQ ID NO: 300591 - DNA, 75 bp, synthetic construct
  source 1..75: mol_type = other DNA
tggcgtgcgcacagtggatctggggacgaattgtgagtctttacgagcaggctgccagcgatgatggcgagatct

SEQ ID NO: 300592 - DNA, 75 bp, synthetic construct
  source 1..75: mol_type = other DNA
caacgtgcctacgaaatcaacagtaaagcggtatctaccaccgatcagatgctgcaaaaactgacgcaactctaa

SEQ ID NO: 300593 - DNA, 75 bp, synthetic construct
  source 1..75: mol_type = other DNA
gtatgttgaaacatctaacgtcaacgtggcggaagaactggtcaacatgatccaggtacagcgcgcctacgaaat

SEQ ID NO: 300594 - DNA, 75 bp, synthetic construct
  source 1..75: mol_type = other DNA
gtggttactcacgacctgcaactggcgaaacgtatgagccgccaactggagatgcgtgatggtcgtctgacggcg

SEQ ID NO: 300595 - DNA, 75 bp, synthetic construct
  source 1..75: mol_type = other DNA
acaacctgtgcaaacgctatcaggaagggagtgtgcaaaccgatgtactgcacaatgtcagtttcagcgtcggcg

SEQ ID NO: 300596 - DNA, 75 bp, synthetic construct
  source 1..75: mol_type = other DNA
gtgaaaagctcaataaatcaaagcgcgacatgaccaatttctacacgatcaactacgggagcgagtttttagatg

SEQ ID NO: 300597 - DNA, 75 bp, synthetic construct
  source 1..75: mol_type = other DNA
atgaagctcctttttgctgaacgtccgctggttataaacacgcagctggcgatgaaaattggtctgaacgaagcc

SEQ ID NO: 300598 - DNA, 75 bp, synthetic construct
  source 1..75: mol_type = other DNA
ggttattcgtctggggcgttcgcctgtacagcgttgcgtgaatcacatttctgaaccggatactgaaataccgcc

SEQ ID NO: 300599 - DNA, 75 bp, synthetic construct
  source 1..75: mol_type = other DNA
attttcttgataagatggcctggatgcaggatgtgaccacggagaaactgggcccttcgttgtggcatatgcatc

SEQ ID NO: 300600 - DNA, 75 bp, synthetic construct
  source 1..75: mol_type = other DNA
tggagagcattggcgaaaacctctacaccgaaacgcaatcctccggtgcaccgaacgaaagcacgccgggcctga

SEQ ID NO: 300601 - DNA, 75 bp, synthetic construct
  source 1..75: mol_type = other DNA
atgatcagttcattatggatcgccaaaacgggccttgacgcccagcaaaccaatatggacgtcattgccaacaac

SEQ ID NO: 300602 - DNA, 75 bp, synthetic construct
  source 1..75: mol_type = other DNA
gcgaaaagctcaacaaatcaaagcgtgacatgactaatttttacacgattaattacgagagcgagcttttagatg

SEQ ID NO: 300603 - DNA, 75 bp, synthetic construct
  source 1..75: mol_type = other DNA
cgcatgggccaacgacgtgcgcacaatgcggatgctggatggcagaactcacagacaaatttgtgaaatgtttgg

SEQ ID NO: 300604 - DNA, 75 bp, synthetic construct
  source 1..75: mol_type = other DNA
catcttcaccctgaacaagggagagcatgccggtgagcaacgcgtcagcctgaaggcccgcctgatcaaggtgga

SEQ ID NO: 300605 - DNA, 75 bp, synthetic construct
  source 1..75: mol_type = other DNA
cgacagtcgtcggggagaatacgatctcactggtcagacggtgtatcaaagcggtggatgaggacaaaaaagtcc

SEQ ID NO: 300606 - DNA, 75 bp, synthetic construct
  source 1..75: mol_type = other DNA
atccaaatggaagtgccactggtctgatacaatttatggcgaatactgctcgagttttaggaacaacaattaatg

SEQ ID NO: 300607 - DNA, 75 bp, synthetic construct
  source 1..75: mol_type = other DNA
cattttcacgtaaagcaccgaaagaaagttatttggtgatcaagcaccatccgatggatcgtggtcacagactct

SEQ ID NO: 300608 - DNA, 75 bp, synthetic construct
  source 1..75: mol_type = other DNA
tattatcgggtaaaaaatatctgctattgcagggaccgatgggaccttttttcaatgacgtcgccgaatggttag

SEQ ID NO: 300609 - DNA, 75 bp, synthetic construct
  source 1..75: mol_type = other DNA
gaggttaatgaatgagctggaccagcgttattatcttgccgttttgcaggtgtataacgatagccagattcgtaa

SEQ ID NO: 300610 - DNA, 75 bp, synthetic construct
  source 1..75: mol_type = other DNA
tctggggaagaatcgtgagtctttacgaacaggctgccagcgatgatggcgaaatcatgcgaccgaaagaaccca

SEQ ID NO: 300611 - DNA, 75 bp, synthetic construct
  source 1..75: mol_type = other DNA
gaagatttggcgtgtgcgcagtggatctggggaagaatcgtgagtctttacgaacaggctgccagcgatgatggc

SEQ ID NO: 300612 - DNA, 75 bp, synthetic construct
  source 1..75: mol_type = other DNA
agcttcgcgaaaaatgggatgaactggttatccgcctggagcgttcgtctgtacagcgttgtgtgaatcatattt

SEQ ID NO: 300613 - DNA, 75 bp, synthetic construct
  source 1..75: mol_type = other DNA
cgcctgatcaaggtggactggattaaaataggccaggagcaggtctataaggctgaaaaagcggagtccctgcca

SEQ ID NO: 300614 - DNA, 75 bp, synthetic construct
  source 1..75: mol_type = other DNA
cgtggtcaagcggactgattgaactgggttacgtcctgccggaaggcgcattgccgatagttgccggaaagcccg

SEQ ID NO: 300615 - DNA, 75 bp, synthetic construct
  source 1..75: mol_type = other DNA
aaaagttattctgttttaagaaaaagaaagagattaattgaaaaatataaagtaacatctggtttttttacgaga

SEQ ID NO: 300616 - DNA, 75 bp, synthetic construct
  source 1..75: mol_type = other DNA
ctccatgtctgacaatttcagccagcctgccagcggtctgatgacgccttactcagcacttgttctgtttgccgt

SEQ ID NO: 300617 - DNA, 75 bp, synthetic construct
  source 1..75: mol_type = other DNA
gtatggcaggtcaatgttattggtgcaaaaacgccggtataccgtttcagaacaggcgcatctgcaacaggtgaa

SEQ ID NO: 300618 - DNA, 75 bp, synthetic construct
  source 1..75: mol_type = other DNA
atcggtgtaataaaagatgggcaaaaaaatggcgacgggtgcagcaaaacgatgtgctggaaaacggctggacga

SEQ ID NO: 300619 - DNA, 75 bp, synthetic construct
  source 1..75: mol_type = other DNA
agaagaaaaatatttcgataccgtcctggccggactgtgtgtgggttatgccaccgaaagacatgcgggcaccaa

SEQ ID NO: 300620 - DNA, 75 bp, synthetic construct
  source 1..75: mol_type = other DNA
aactggctgaagtcggtggtctcagtattccgtactttactcagttggcaagcaaccttggctacatcatcacaa

SEQ ID NO: 300621 - DNA, 75 bp, synthetic construct
  source 1..75: mol_type = other DNA
cgggtcatttataataaacagctttttgaaattgcctccacgccgttttcgctgaaagcgttaaagcgttttaag

SEQ ID NO: 300622 - DNA, 75 bp, synthetic construct
  source 1..75: mol_type = other DNA
ctttgaatttactgctccttgcagcgctcacgctgggggcatcacaccaggcttgggctcaagatggcacaagac

SEQ ID NO: 300623 - DNA, 75 bp, synthetic construct
  source 1..75: mol_type = other DNA
atgacacctcagcaagaaaacgcccttcgcagcattgcccatctggctaattatgaaatcaaaaaagccagacag

SEQ ID NO: 300624 - DNA, 75 bp, synthetic construct
  source 1..75: mol_type = other DNA
tacaaagcttactttgccgcaactacctcacaacgcctgacaattattcttgaatcagaaaaccatattttaggg

SEQ ID NO: 300625 - DNA, 75 bp, synthetic construct
  source 1..75: mol_type = other DNA
ccgttagtcgttatcgaagttaaaaatgccgctgacgaaaatgcaacggttgcaggtgcttataaccagattaaa

SEQ ID NO: 300626 - DNA, 75 bp, synthetic construct
  source 1..75: mol_type = other DNA
aactgcgaaagtaaccgctcactctgctggcgctaaaatcacgcaatattacgcctataagctgaaccgccgtga

SEQ ID NO: 300627 - DNA, 75 bp, synthetic construct
  source 1..75: mol_type = other DNA
cgacctgcttgaagcggcgaacggcaccaataccgccgattcgctggcaagcctcggccaggatattgagtcgct

SEQ ID NO: 300628 - DNA, 75 bp, synthetic construct
  source 1..75: mol_type = other DNA
cgacctgctggaagcggcgaatggcaccaataccgccgattcgctcgcaagcctcggccaggatattgagtcgct

SEQ ID NO: 300629 - DNA, 75 bp, synthetic construct
  source 1..75: mol_type = other DNA
ccatcgccagactacggtgtcgaacggcgtcgaagtagacaccaacgtggcggcgagcgatttctttggcagcaa

SEQ ID NO: 300630 - DNA, 75 bp, synthetic construct
  source 1..75: mol_type = other DNA
aatacaaccaaacttgtcagcaataaaaaatgggagttccctctattctattgggattattcaattggattattg

SEQ ID NO: 300631 - DNA, 75 bp, synthetic construct
  source 1..75: mol_type = other DNA
cgggcaaaaatacgcgctgagccaggccaaatccatagctgacgaactgatgaccgggtgcacgaattttgtgtt

SEQ ID NO: 300632 - DNA, 75 bp, synthetic construct
  source 1..75: mol_type = other DNA
aatgcaataacaaaatatgaagcaggttttaaagtaagggagaagttaaaattaggaatgaaagatggatataga

SEQ ID NO: 300633 - DNA, 75 bp, synthetic construct
  source 1..75: mol_type = other DNA
ggcaaaattatagctatcgcccctattataaacacgccatgtctggcttaaatggacgcttttacggtattggta

SEQ ID NO: 300634 - DNA, 75 bp, synthetic construct
  source 1..75: mol_type = other DNA
cgggtggtgtacgttcatgacctgcccatgccggagctgctgacccatgcgaaggcggtggtaacgattaatagt

SEQ ID NO: 300635 - DNA, 75 bp, synthetic construct
  source 1..75: mol_type = other DNA
ttgttccataaaagcggcctcccgtgccggatttgcactgacataccagctggcacaggtgcgttatgcctggtg

SEQ ID NO: 300636 - DNA, 75 bp, synthetic construct
  source 1..75: mol_type = other DNA
caccgaatcaatggtcgcggcgctgaactatcaggacgaagacgggcactacgtgtttggcggcactatcaacga

SEQ ID NO: 300637 - DNA, 75 bp, synthetic construct
  source 1..75: mol_type = other DNA
agtggacaccaacgtggcggcgagcgatttcttcggcagtaatttagacgtgcttaacacgcttaattccttgtc

SEQ ID NO: 300638 - DNA, 75 bp, synthetic construct
  source 1..75: mol_type = other DNA
actggcaatagtcagcgaaattgtccgaaattcgaacggcgcactccacgccagtaatcatcctgaaggcggcgc

SEQ ID NO: 300639 - DNA, 75 bp, synthetic construct
  source 1..75: mol_type = other DNA
cacataaaagtggtgataaaataagagatatttataatagaactacttatttagaacaacgcaaaattatgatgc

SEQ ID NO: 300640 - DNA, 75 bp, synthetic construct
  source 1..75: mol_type = other DNA
atgggaatacgaccggaagatattcatccggacgcgcaagaggaaaataacatttccgccaaaattagcgtggca

SEQ ID NO: 300641 - DNA, 75 bp, synthetic construct
  source 1..75: mol_type = other DNA
aaaaccaagaggagctaaacaactcttacaaaaagagcattgctgaattttcaaaaaacacaaagccatttagta

SEQ ID NO: 300642 - DNA, 75 bp, synthetic construct
  source 1..75: mol_type = other DNA
atggctgtgaaactgtctgatatatcgtctaatctgaacaggttccgtcgcggactgggatatgcaggaaaaatt

SEQ ID NO: 300643 - DNA, 75 bp, synthetic construct
  source 1..75: mol_type = other DNA
gtggttctgattgatttgtgcagaggtggtaatgttggattttgttttttggtgtttttggggctgggcatatct

SEQ ID NO: 300644 - DNA, 75 bp, synthetic construct
  source 1..75: mol_type = other DNA
acggaaaaaaatacgcagaaatcgacactgctggtctgccagtttatgtgcatgatgatggtaaagaaatcggct

SEQ ID NO: 300645 - DNA, 75 bp, synthetic construct
  source 1..75: mol_type = other DNA
aaggcagaaattacgaaaaattttcagcagcaattagatgaagaaaagcaacgctctcagatgctggagaagcag

SEQ ID NO: 300646 - DNA, 75 bp, synthetic construct
  source 1..75: mol_type = other DNA
atgactgaagaaccagtcagatgggcaaaaactatggctaatgaaaaaaagacatcccgcaaaaagtttcgcgtg

SEQ ID NO: 300647 - DNA, 75 bp, synthetic construct
  source 1..75: mol_type = other DNA
atggtttgccgggctgtttattacggctactattattgctggcgggctatggtacatgggaattcttgatgtacc

SEQ ID NO: 300648 - DNA, 75 bp, synthetic construct
  source 1..75: mol_type = other DNA
cgataaaattgcgatcccggcagatttattacaagcccgcttcggacaggcattcaaagtggaagaagggaagat

SEQ ID NO: 300649 - DNA, 75 bp, synthetic construct
  source 1..75: mol_type = other DNA
cgataaaattgcgatcccggcagatttattacaagcccgcttcgggcaggcattcaaagtggaagaagggaggat

SEQ ID NO: 300650 - DNA, 75 bp, synthetic construct
  source 1..75: mol_type = other DNA
aaacgaacgatgatttcccgaggaggaagcatgaaaggtactactgcatccgcagataccactcaaccagcagca

SEQ ID NO: 300651 - DNA, 75 bp, synthetic construct
  source 1..75: mol_type = other DNA
attgataatttatgtgctgtcacaaaagcacctgattctctaaaagatgttttatttttaattcttaggaaattg

SEQ ID NO: 300652 - DNA, 75 bp, synthetic construct
  source 1..75: mol_type = other DNA
tgttaagttatcaacgactttgtgccaccgcccagcctacggaaaaaaaagaagaagagtgggatccggcaatct

SEQ ID NO: 300653 - DNA, 75 bp, synthetic construct
  source 1..75: mol_type = other DNA
atgaattcacgacgtccggaattattagaactgacaccacaggcactgacggcgttaagcaatgccggttttgtt

SEQ ID NO: 300654 - DNA, 75 bp, synthetic construct
  source 1..75: mol_type = other DNA
cagttagtacggaataatatcacaatcgcatacgggagtattataaaaatcaacgaagatttttattttactatt

SEQ ID NO: 300655 - DNA, 75 bp, synthetic construct
  source 1..75: mol_type = other DNA
acgatactgtaatgaatcgcatctattgtgcgatcggtacagtccacattgatatacatatgttgcgtaatatta

SEQ ID NO: 300656 - DNA, 75 bp, synthetic construct
  source 1..75: mol_type = other DNA
ggtcgcctctatattacgtccgaaggtcatgcttgccatgcatattttcgtgaggtcagcggtcatggtattcgt

SEQ ID NO: 300657 - DNA, 75 bp, synthetic construct
  source 1..75: mol_type = other DNA
aattccctctgcccgcttaccgatgagcgatgtgcgtttttattcccgcagcagtattcgtttcgcccgttgtga

SEQ ID NO: 300658 - DNA, 75 bp, synthetic construct
  source 1..75: mol_type = other DNA
atcactattgatacgcaatccatacccgcagatatcagtggtatcgaagacgttatgtttcacctccggcagctt

SEQ ID NO: 300659 - DNA, 75 bp, synthetic construct
  source 1..75: mol_type = other DNA
tcgtcgaggccaaaactcagcaagcggaatttactcatttaatctggcagatgcgcagtgaacacgtcacatcat

SEQ ID NO: 300660 - DNA, 75 bp, synthetic construct
  source 1..75: mol_type = other DNA
gtgaatcgctacggcaattgcgcgccagtgttgatgccttccacgcccgtgccagccactaccatgccggagaat

SEQ ID NO: 300661 - DNA, 75 bp, synthetic construct
  source 1..75: mol_type = other DNA
atagcagccgccagacgctggatgcggaggtaatcagcggcgaaggtgaagataacgtgctgacattatccctac

SEQ ID NO: 300662 - DNA, 75 bp, synthetic construct
  source 1..75: mol_type = other DNA
aacgatggtaaaaaaatttactccagtattgagctggaaccacagtcaaccatcacgggaggcccttacctgcgc

SEQ ID NO: 300663 - DNA, 75 bp, synthetic construct
  source 1..75: mol_type = other DNA
tcagcgtcagcgtatctgtattgcccgtgcgctggcgttgaatcccaaagtcattattgccgatgaagccgtgtc

SEQ ID NO: 300664 - DNA, 75 bp, synthetic construct
  source 1..75: mol_type = other DNA
atgatcttcccagcaatattcatcagcgtggggaagaggttgcagccgtctctttgcaacttgtcggaccaggac

SEQ ID NO: 300665 - DNA, 75 bp, synthetic construct
  source 1..75: mol_type = other DNA
tttaccgaacttcagccgaagctaaggggggagggcaagtatatgaaggtaaaaacaggtgtaaaaccggaagat

SEQ ID NO: 300666 - DNA, 75 bp, synthetic construct
  source 1..75: mol_type = other DNA
tcaggcattgcgccgggatattcagtttatttttcaggacccttacgcttcgctggacccacgtcagaccatcgg

SEQ ID NO: 300667 - DNA, 75 bp, synthetic construct
  source 1..75: mol_type = other DNA
caccacaacatccttacacccgtgcgctgttagctgctgtcccgcagcttggtgcgatgaaagggggagattatc

SEQ ID NO: 300668 - DNA, 75 bp, synthetic construct
  source 1..75: mol_type = other DNA
cccatcgagcagaaaacggtggtggatggtgaacctgttttacgggtgcgtaatctggtcacccgtttccctttg

SEQ ID NO: 300669 - DNA, 75 bp, synthetic construct
  source 1..75: mol_type = other DNA
catatcttcttcccgcagggtgatcctacggcagcaacgctacagtcgcttgccaccttcgccatcgccttcgtc

SEQ ID NO: 300670 - DNA, 75 bp, synthetic construct
  source 1..75: mol_type = other DNA
actgggcgccccaattggcttcttctttgccaacggcactttcctgttgctctcgtggctactgacggacgagca

SEQ ID NO: 300671 - DNA, 75 bp, synthetic construct
  source 1..75: mol_type = other DNA
atcgctgcatgagtcgccggtgtttgaaaaagtggcgaaagagaaaaagcaggtaaagatcccgctgggtacgtt

SEQ ID NO: 300672 - DNA, 75 bp, synthetic construct
  source 1..75: mol_type = other DNA
gcagaacaacgccaggaagaaggcacccagtggtttaaccgcgtaatggggattattggccgtggccgcaaagcg

SEQ ID NO: 300673 - DNA, 75 bp, synthetic construct
  source 1..75: mol_type = other DNA
aaggaaaagctgcgcacgcaggacagcgatccgcagagccggttcacctcaacgggtgccggtaatgaccagctg

SEQ ID NO: 300674 - DNA, 75 bp, synthetic construct
  source 1..75: mol_type = other DNA
gaccgctcgcatgatgtccctgcttaacgatggtaaaaaaatttactccagtattgagctggaacctcagtcaac

SEQ ID NO: 300675 - DNA, 75 bp, synthetic construct
  source 1..75: mol_type = other DNA
ttgccacacagtgatgaacttgatgccggtgatgtgctggcggttgataatctcaatattgcctttatgcaggac

SEQ ID NO: 300676 - DNA, 75 bp, synthetic construct
  source 1..75: mol_type = other DNA
aaagcgacagaagcattatttaagtatgtcgcggttgatcctgaaggaaaacctcgcgccttacctgttgagtaa

SEQ ID NO: 300677 - DNA, 75 bp, synthetic construct
  source 1..75: mol_type = other DNA
tgtcgcggttatcctgaaggaaaacctcgcgccttacctgttgagtaatagtcaaaagcctccggtcggaggctt

SEQ ID NO: 300678 - DNA, 75 bp, synthetic construct
  source 1..75: mol_type = other DNA
tcattgcagacgcttcgaccctggcgggtcgtgctggaatgagtgagagcgagtggcgagaagcgatcaaattcg

SEQ ID NO: 300679 - DNA, 75 bp, synthetic construct
  source 1..75: mol_type = other DNA
agctatcgagtctgaaatcatcgaaatggcagaacaacgccaggaagaaggcacccagtggtttaaccgcgtaat

SEQ ID NO: 300680 - DNA, 75 bp, synthetic construct
  source 1..75: mol_type = other DNA
atcaccagaatgtaaagattacccgagcgtcatcagcggttatttaggtaaaaactggggcatcctgttaggtgc

SEQ ID NO: 300681 - DNA, 75 bp, synthetic construct
  source 1..75: mol_type = other DNA
cacggtcgcgtcgtgaccgttcgcgtggaaggcatgacctttctgcgacctgtagcagtcggtgatgtggtgtgc

SEQ ID NO: 300682 - DNA, 75 bp, synthetic construct
  source 1..75: mol_type = other DNA
cttgattacattgatgcggtggcggcaatagatacaagcatcgcgccggatgtcatctggcctgaactgccggag

SEQ ID NO: 300683 - DNA, 75 bp, synthetic construct
  source 1..75: mol_type = other DNA
cgcctgaaagtaaaagatatgcgcaacgcccgccggatcagcgaaaaaccagaagagtgggatgaaccgctaatg

SEQ ID NO: 300684 - DNA, 75 bp, synthetic construct
  source 1..75: mol_type = other DNA
tgttgaaattggtccacggcgcgcggtctttgaaaacccgcagcatccttatacgcgtaaattactggcggcagt

SEQ ID NO: 300685 - DNA, 75 bp, synthetic construct
  source 1..75: mol_type = other DNA
atcgcaagcaaggttggcgtgtctgaaacctctgtgcggaaggtgttgaacatggcgcgtatgagtgcgcactaa

SEQ ID NO: 300686 - DNA, 75 bp, synthetic construct
  source 1..75: mol_type = other DNA
cgatgatactgtaagagagatttatgaagaatgtgaagctaaggttaatcatttaaatgtaacccagaaaaaggc

SEQ ID NO: 300687 - DNA, 75 bp, synthetic construct
  source 1..75: mol_type = other DNA
ctgaccgacagcggcaccggggcggtgacgcagagcatgcaggctgcgatgatgcgcggcgacgaagcctacagc

SEQ ID NO: 300688 - DNA, 75 bp, synthetic construct
  source 1..75: mol_type = other DNA
aggtcgatgatctgaatgctgaaggcgccaccgaagacgccctgaatatcgacgacctgaatgccggcggcagcg

SEQ ID NO: 300689 - DNA, 75 bp, synthetic construct
  source 1..75: mol_type = other DNA
atccagcaacgattttatgaggctgaagcaatccgtagagcaaggaaatttgcataaggaaaacgccaccagcaa

SEQ ID NO: 300690 - DNA, 75 bp, synthetic construct
  source 1..75: mol_type = other DNA
ttactgtcagtaccctttttttaccgtcaataatccaggcaaaacctatttcaataaaagttgcctatgaaaata

SEQ ID NO: 300691 - DNA, 75 bp, synthetic construct
  source 1..75: mol_type = other DNA
acacatcctgtcggcgtgagtgtgtcagaacagacgctcccacagtgtgatcagcaggtggataatgcggtcccg

SEQ ID NO: 300692 - DNA, 75 bp, synthetic construct
  source 1..75: mol_type = other DNA
gtgtgtcagaacagacgatcccacagtgtgaccagcaggtggataatgcggtcccgggctttacgcagaagctgt

SEQ ID NO: 300693 - DNA, 75 bp, synthetic construct
  source 1..75: mol_type = other DNA
cgctgaacgtcagcgtctgaaagagccggagcgtgaaaatcgtgaactacgccgcagtaacgatatccttcgcca

SEQ ID NO: 300694 - DNA, 75 bp, synthetic construct
  source 1..75: mol_type = other DNA
gtctttaaaataagcctggcggagatggcgcgcgctattccaccttataccgaactattccaccttataccgaac

SEQ ID NO: 300695 - DNA, 75 bp, synthetic construct
  source 1..75: mol_type = other DNA
cgttatcaatgacgatgacagcgccgatctcctgtttacgcttcccctgcgggaacgcgttcgcatcacgcgcag

SEQ ID NO: 300696 - DNA, 75 bp, synthetic construct
  source 1..75: mol_type = other DNA
gcaaccgataaaagcagaagaaaaaccgggtcgtaacgatccttgcccgtgcggtagtggtaagaaatttaagca

SEQ ID NO: 300697 - DNA, 75 bp, synthetic construct
  source 1..75: mol_type = other DNA
atgagtaacatttttcacagcattcgaacaattctatttcatcgttatcccttgtcctgtaaggtgttcccctta

SEQ ID NO: 300698 - DNA, 75 bp, synthetic construct
  source 1..75: mol_type = other DNA
ttaatgcagggttttgacgctgaagtgctgttacgtaatgacgaaggcaccgagctgaagccaacagcgttattg

SEQ ID NO: 300699 - DNA, 75 bp, synthetic construct
  source 1..75: mol_type = other DNA
catcatcaaaatctcctgggactatttatcgtgtgcatcgcgcatggctagacgcaattgaatatgcttcgaagc

SEQ ID NO: 300700 - DNA, 75 bp, synthetic construct
  source 1..75: mol_type = other DNA
tcgtagcgtcgtgcaaaccgtacgttcctccttcaacaacattaatgcttctatcagtagcattaacgcctacaa

SEQ ID NO: 300701 - DNA, 75 bp, synthetic construct
  source 1..75: mol_type = other DNA
gcgacccgtctgctgattgacatctgtggcggtgaagctggtccggtaatcgatatcactaacgaagcaacgctg

SEQ ID NO: 300702 - DNA, 75 bp, synthetic construct
  source 1..75: mol_type = other DNA
tcgtctcggctgcgaagtgaccgaaggcaaagacgagtggcaggcagttgcgccgagctggcgtttcgacatgga

SEQ ID NO: 300703 - DNA, 75 bp, synthetic construct
  source 1..75: mol_type = other DNA
tctcgctttccggcgaaccgtcgtgacatcgcggtggtggtcgcagaaaacgttcccgcagcggatattttatcc

SEQ ID NO: 300704 - DNA, 75 bp, synthetic construct
  source 1..75: mol_type = other DNA
cagattagaagtgagcttggagggtatgccacttccaatctatctggtgcatacaatatgttttctgagttctgg

SEQ ID NO: 300705 - DNA, 75 bp, synthetic construct
  source 1..75: mol_type = other DNA
agctcagcagccggtacagatggaaaacggacgaatcgtctacaaccgtcagtatgggaacattccgaaaggcag

SEQ ID NO: 300706 - DNA, 75 bp, synthetic construct
  source 1..75: mol_type = other DNA
agatttccacgaggattaccaaacggtaatggcatacaaagtttctgaagtcatcgctgcaatccgcgccgctgg

SEQ ID NO: 300707 - DNA, 75 bp, synthetic construct
  source 1..75: mol_type = other DNA
aatcattgttgcgatagaaaacgaacaggaacgtctttttgatgaagattacctaatggattcgaaagaatgcat

SEQ ID NO: 300708 - DNA, 75 bp, synthetic construct
  source 1..75: mol_type = other DNA
ttcataccagtctttaacgcaggcaacgagatttcatttgaaatcgcggataatgcttgcaggaatatgaggggt

SEQ ID NO: 300709 - DNA, 75 bp, synthetic construct
  source 1..75: mol_type = other DNA
tccagatagtccggcgccagtcgttcaaccagcgtcagtacgcaccaataccagcaccggaaaaaatcctttccg

SEQ ID NO: 300710 - DNA, 75 bp, synthetic construct
  source 1..75: mol_type = other DNA
ctgctcaacgacaaaggttatcaggaagtgatcacctacagcttcgttgatccgaaagtgcagcagatgatccat

SEQ ID NO: 300711 - DNA, 75 bp, synthetic construct
  source 1..75: mol_type = other DNA
tgatatcaccaacgaagcaacgctgccgaagcgtgcaaccatcactttacgtcgtagcaaactggatcgcctgat

SEQ ID NO: 300712 - DNA, 75 bp, synthetic construct
  source 1..75: mol_type = other DNA
gtggggagactgggactcatataaaccacaccgtggcgcacgtggttataaggtccgactaagtggtcaggccat

SEQ ID NO: 300713 - DNA, 75 bp, synthetic construct
  source 1..75: mol_type = other DNA
aaaacgtagcgccatattgaataactgcgttttgctttatgaacatttggtgctattactggcggatttaccaga

SEQ ID NO: 300714 - DNA, 75 bp, synthetic construct
  source 1..75: mol_type = other DNA
taaattggtttttgataaagtgcctctcagtattttagtgaatgatattttttttgaaggattttttcatgaagc

SEQ ID NO: 300715 - DNA, 75 bp, synthetic construct
  source 1..75: mol_type = other DNA
gattatagaagtttcactttccactatcactactatggggactcgtcaaggacatacagccattatatttccaca

SEQ ID NO: 300716 - DNA, 75 bp, synthetic construct
  source 1..75: mol_type = other DNA
atggctaactggttaaatcagctgcaatccctgcttgggcaaagcagttcttctacctcctcgtctatggagcag

SEQ ID NO: 300717 - DNA, 75 bp, synthetic construct
  source 1..75: mol_type = other DNA
taatctacagaagttaaataatctacagaagttaaataatctacagaagttaaataatatacaggagttaaataa

SEQ ID NO: 300718 - DNA, 75 bp, synthetic construct
  source 1..75: mol_type = other DNA
atgattttgcccgaattgccggggggcagaatagcagaagcaatattctttctcctagagcatttttggagtttt

SEQ ID NO: 300719 - DNA, 75 bp, synthetic construct
  source 1..75: mol_type = other DNA
aagactatataataatattggtaatcaccgcattatttatagatatatttgtaacctttaaagcaatgttctttt

SEQ ID NO: 300720 - DNA, 75 bp, synthetic construct
  source 1..75: mol_type = other DNA
tatctaaggtggaaatagaaattacactttccactatcactactatggggactcgtcaaggacatacggctatta

SEQ ID NO: 300721 - DNA, 75 bp, synthetic construct
  source 1..75: mol_type = other DNA
tgatgatcatgtattggttatgaagaaactcacagaaattaatttcccaaattggcttgtttcttatgataacgc

SEQ ID NO: 300722 - DNA, 75 bp, synthetic construct
  source 1..75: mol_type = other DNA
tgaatggtcttttcatcgctatgttatttcgaatccttctgagtttactaagcttgaggttggctttgctgcgtt

SEQ ID NO: 300723 - DNA, 75 bp, synthetic construct
  source 1..75: mol_type = other DNA
cacccagagcacgccgctggatgagcgcacggaacgtttgatcctcgcgctggtatttgccgctaaaagtgatgg

SEQ ID NO: 300724 - DNA, 75 bp, synthetic construct
  source 1..75: mol_type = other DNA
ctgaaaatcccccaggacgttcgtgaaggcattgaacgcgatctcgaacagcaaaaacgcactttggcggaataa

SEQ ID NO: 300725 - DNA, 75 bp, synthetic construct
  source 1..75: mol_type = other DNA
atggctaactggttaaatcaactgcaatccctgcttgggcaaagcagttcttctacctcctcgtctgcggatcag

SEQ ID NO: 300726 - DNA, 75 bp, synthetic construct
  source 1..75: mol_type = other DNA
gggaacgagcggatttatctaaggtggaaatagaaattacactttccactatcactactatggggactcgtcaag

SEQ ID NO: 300727 - DNA, 75 bp, synthetic construct
  source 1..75: mol_type = other DNA
tcgtccaggccaaagcacagcaggcagaattttctcatttgctctggcagatgcgcagcgaacaaatcgcatcaa

SEQ ID NO: 300728 - DNA, 75 bp, synthetic construct
  source 1..75: mol_type = other DNA
ttcaatctcgataaagaaccctataaaaatagtcgtgaattacaggaattgatttgggagaagttggttgcatat

SEQ ID NO: 300729 - DNA, 75 bp, synthetic construct
  source 1..75: mol_type = other DNA
gtctaatgatgagattatgaaaaatcaaccaaatgatgttattaatgaaaaaattaataatgaattaaaacttag

SEQ ID NO: 300730 - DNA, 75 bp, synthetic construct
  source 1..75: mol_type = other DNA
gagtgtatttcgctcggttgggatagcagccgccagacgctggatgcgcaggtaatcagcggcgaaggtgaagat

SEQ ID NO: 300731 - DNA, 75 bp, synthetic construct
  source 1..75: mol_type = other DNA
tgctacctctcagcccacggaaaaagaagaggaatggaacccggcaatctggctggaagaactgactaccctgcc

SEQ ID NO: 300732 - DNA, 75 bp, synthetic construct
  source 1..75: mol_type = other DNA
ttgatgatgttaagttgctatttaatgaagtgcctgtcagcattttagtaaatgacatttttttgaaggtttttt

SEQ ID NO: 300733 - DNA, 75 bp, synthetic construct
  source 1..75: mol_type = other DNA
aattggtacttccctcagttacttaagagctatgaggatgaaaagatttattttgataagttagggtataatttt

SEQ ID NO: 300734 - DNA, 75 bp, synthetic construct
  source 1..75: mol_type = other DNA
attctcaacacattacatcagccgacaattttaaacaaaaaagtgaagttttaaatacctggcgtgttggaatga

SEQ ID NO: 300735 - DNA, 75 bp, synthetic construct
  source 1..75: mol_type = other DNA
gactccgatatccggattggcgacctgccgattatccgggattccgaaatccagaacttctgtctgcacggcacg

SEQ ID NO: 300736 - DNA, 75 bp, synthetic construct
  source 1..75: mol_type = other DNA
attggcccacgtgctaaacgcgccagaggccaggcttcctcgctgtatctattttgttactatctgggttcaagt

SEQ ID NO: 300737 - DNA, 75 bp, synthetic construct
  source 1..75: mol_type = other DNA
cgcaaaccagacagcactatttggatcgtctgtgaacatagactttgttctacccgccaaaaaaagacgatcatc

SEQ ID NO: 300738 - DNA, 75 bp, synthetic construct
  source 1..75: mol_type = other DNA
tggttatttcttctatgcagttgccgaacgcgtgacgattccttttggcttaaaccatctggtgacgtcagtttt

SEQ ID NO: 300739 - DNA, 75 bp, synthetic construct
  source 1..75: mol_type = other DNA
gcatcagccgaaactaaaaagcagcaattgattaaccaggccaacgaatacatcaacagtaaacaatggccaggt

SEQ ID NO: 300740 - DNA, 75 bp, synthetic construct
  source 1..75: mol_type = other DNA
tcactgtccatttccacggcgatgttggctatcggtttgctgtttactggcccgctatccgatgccattggtcgc

SEQ ID NO: 300741 - DNA, 75 bp, synthetic construct
  source 1..75: mol_type = other DNA
tcgcccttcctcactgcgtcccaaaacgctgtttatcaatttccgtctgcactggcgcgatcggggattgccgct

SEQ ID NO: 300742 - DNA, 75 bp, synthetic construct
  source 1..75: mol_type = other DNA
caaaataccctacaagtcattatcggcactaaagtcatcgccctgcgtagggatatggataactacatggggatg

SEQ ID NO: 300743 - DNA, 75 bp, synthetic construct
  source 1..75: mol_type = other DNA
actggatttcaacttccggtcctgttggttatttcttctatgcagttgccgaacgcgtgacgattccttttggct

SEQ ID NO: 300744 - DNA, 75 bp, synthetic construct
  source 1..75: mol_type = other DNA
acaagatgcggtggatgcttattgccggtatcgtgttgacaagatgtgcgctgatatatcaaagaatgtgctgga

SEQ ID NO: 300745 - DNA, 75 bp, synthetic construct
  source 1..75: mol_type = other DNA
aagcaggcgcaaatcaccttgcagcatcttcaggaattaggctgccagattgcgattgatgatttcggcaccggc

SEQ ID NO: 300746 - DNA, 75 bp, synthetic construct
  source 1..75: mol_type = other DNA
ctgatggcccagccgattaccggtatgcgtggtgatgtttaccatgaaattcttctgcgcatgaagggtgagaat

SEQ ID NO: 300747 - DNA, 75 bp, synthetic construct
  source 1..75: mol_type = other DNA
ccattctcaaatttaacctgatgactgtaggccgtgaagagtccagtcctgtcacgctgaacgctcacgaagaaa

SEQ ID NO: 300748 - DNA, 75 bp, synthetic construct
  source 1..75: mol_type = other DNA
ctggtttgctacaggaagataaaatgagtaaatatctttacgatgcaaaaactaatatgttttacccatttactc

SEQ ID NO: 300749 - DNA, 75 bp, synthetic construct
  source 1..75: mol_type = other DNA
gcaccgagcgcgaagttgacctctatgaacgccagtgcgaagtattcctcgatccacacgatccctcagtgatcg

SEQ ID NO: 300750 - DNA, 75 bp, synthetic construct
  source 1..75: mol_type = other DNA
agaacctgcataccgcgccggaaggcagcaaatcacagccgattgcccgtccgcgttcactgattaccggcgaac

SEQ ID NO: 300751 - DNA, 75 bp, synthetic construct
  source 1..75: mol_type = other DNA
tcgagcaggcgattaaagacggtattccgctgagcgttattgaagccgcacagcagtcgccggtttataaaatgg

SEQ ID NO: 300752 - DNA, 75 bp, synthetic construct
  source 1..75: mol_type = other DNA
atgataaaaccgacgtttttacgccgggcggcgattacagctttgctttcaggatgttgttttagtgcggcagcc

SEQ ID NO: 300753 - DNA, 75 bp, synthetic construct
  source 1..75: mol_type = other DNA
acggtaaaacctggctggttaccggtagcccaggcggtagccggatcatcactacagtgctgcaaatggtggtga

SEQ ID NO: 300754 - DNA, 75 bp, synthetic construct
  source 1..75: mol_type = other DNA
gaacgtttacgggctggtgggcggtgatgccaacgccgtcgggccgaataaacgtccgctgtcgtcgatgtcacc

SEQ ID NO: 300755 - DNA, 75 bp, synthetic construct
  source 1..75: mol_type = other DNA
tgaccgttggactgttcgttatcaccttttttaatcccggggcaaatctctttgtcgtggttcaaaccagtctgg

SEQ ID NO: 300756 - DNA, 75 bp, synthetic construct
  source 1..75: mol_type = other DNA
atgatgaagttacttcacttatttatggttgaaatcactatggatcctttgcacgccgtttatctgaccgtagga

SEQ ID NO: 300757 - DNA, 75 bp, synthetic construct
  source 1..75: mol_type = other DNA
tgtgcatcaccggatgcccgtacaaaaaaatctatttcaactggaagagcggtaagtctgagaagtgcatcttct

SEQ ID NO: 300758 - DNA, 75 bp, synthetic construct
  source 1..75: mol_type = other DNA
cgtgctcaatctgcaaagcaatatgccggacaccaaaccgggtctgtatgagccaacttcgccgccgattatcac

SEQ ID NO: 300759 - DNA, 75 bp, synthetic construct
  source 1..75: mol_type = other DNA
cacagcgggtaacgtactgtttatcgccgctacggcagataactacctgcgcgcttacaacatgagcaacggtga

SEQ ID NO: 300760 - DNA, 75 bp, synthetic construct
  source 1..75: mol_type = other DNA
ccgcaaaccgttttattttttatcagtattttctcagtaacattaaatagatcgaaacaccaacatgggcacgtt

SEQ ID NO: 300761 - DNA, 75 bp, synthetic construct
  source 1..75: mol_type = other DNA
tggttggcttgttgttgaccggatgcaatgcaaatcagatgactgcgaagaaagttggtggccttaaggtaaata

SEQ ID NO: 300762 - DNA, 75 bp, synthetic construct
  source 1..75: mol_type = other DNA
cgctgggtcgacttaatagaggtttcaaaatgggcaagaaagaacaaggattattatctctgccaagaggagtaa

SEQ ID NO: 300763 - DNA, 75 bp, synthetic construct
  source 1..75: mol_type = other DNA
atttctcgataaataagaagaacacgaaaaaagaaatagacctcaaaatgcgggcgcttttaggtagtgtggcta

SEQ ID NO: 300764 - DNA, 75 bp, synthetic construct
  source 1..75: mol_type = other DNA
acaacggggagatgattggtcttaaacctcaggaagagatgacccccctgacaaaacttgagtttgcgccagtcg

SEQ ID NO: 300765 - DNA, 75 bp, synthetic construct
  source 1..75: mol_type = other DNA
cttgccaagccaaggctcgattcgactggcacagggacgaattcagtgatcctcgacggttttattgagcagggc

SEQ ID NO: 300766 - DNA, 75 bp, synthetic construct
  source 1..75: mol_type = other DNA
gccttgctgtgttgctatcaggctgcggtgaaaaaggcgattttgagaaagcgatcaacgcgaaaatttcacaat

SEQ ID NO: 300767 - DNA, 75 bp, synthetic construct
  source 1..75: mol_type = other DNA
aacaggtgaatggctttagcagtgtcgatgttctggaaattacggataaaggccaagaggttgagttttgggatc

SEQ ID NO: 300768 - DNA, 75 bp, synthetic construct
  source 1..75: mol_type = other DNA
aattgtcgatatcagccgtggcggcatgcgtgttcgtttggttgataacggcgctatcgcctttattccggcacc

SEQ ID NO: 300769 - DNA, 75 bp, synthetic construct
  source 1..75: mol_type = other DNA
ttacaaagtaaccgacgttatcgacgtcaccatcgccgaagtacgcatggaaacccgcagtattattgcgcgccc

SEQ ID NO: 300770 - DNA, 75 bp, synthetic construct
  source 1..75: mol_type = other DNA
aatgaagtccgcccggtactggcatgccgcatgacgctctccgctgatggcaccattgaagataatatcgaattc

SEQ ID NO: 300771 - DNA, 75 bp, synthetic construct
  source 1..75: mol_type = other DNA
cggcagcccaggaaggtcatccaggcactggccgggcataaggatccgcgctcgatggaagtctatacccgggta

SEQ ID NO: 300772 - DNA, 75 bp, synthetic construct
  source 1..75: mol_type = other DNA
cgattggctggaaaacaccggtgactggcaaccagaaagtgatgcgattgcggaacaaatccgcctgttagcgca

SEQ ID NO: 300773 - DNA, 75 bp, synthetic construct
  source 1..75: mol_type = other DNA
gacggtgttgctaccgaaatgctcgatgaaggtctgcaacgtgaagatctgactgctctggactttgtcaccatt

SEQ ID NO: 300774 - DNA, 75 bp, synthetic construct
  source 1..75: mol_type = other DNA
agtcgcaatattagaaacaactgataaaggtcgtaatacaaaattttgggatagcaataatggtgcctgtgttgg

SEQ ID NO: 300775 - DNA, 75 bp, synthetic construct
  source 1..75: mol_type = other DNA
cgctcgcgctcgctatttgaaacgcttaaacgcgatatcgccagcgtttcgccagaaacagaagtggtgggcgtt

SEQ ID NO: 300776 - DNA, 75 bp, synthetic construct
  source 1..75: mol_type = other DNA
tgggcgcggaggtggaaaacatcgatctctttgatcgcatacaactggaaaacattattgctgtctgccgtcagg

SEQ ID NO: 300777 - DNA, 75 bp, synthetic construct
  source 1..75: mol_type = other DNA
cgctcacgctcgctgtttgaaacgcttaaacgcgatatcgccagcgtttcgccagaaacagaagtggtgggcgtt

SEQ ID NO: 300778 - DNA, 75 bp, synthetic construct
  source 1..75: mol_type = other DNA
ttctggtcctgcttgccggtatattgctttgtggctgtgaaagcaaaacaaccgtcagacctttacagcagacga

SEQ ID NO: 300779 - DNA, 75 bp, synthetic construct
  source 1..75: mol_type = other DNA
ttatgggaaaaactggagccgggagcccctgtctgtgtattcctgtttgccgggaaggtttcgccggtcttgcag

SEQ ID NO: 300780 - DNA, 75 bp, synthetic construct
  source 1..75: mol_type = other DNA
aacacgaacgggagctattaaataaaatatgcattctttcaatgctggcccgtttacgtccgatacaaaaaggat

SEQ ID NO: 300781 - DNA, 75 bp, synthetic construct
  source 1..75: mol_type = other DNA
tccttttcagccagggctgatatcagccctgaatgaagtgagccgaaactcagcattaattgcgcaggtcaggga

SEQ ID NO: 300782 - DNA, 75 bp, synthetic construct
  source 1..75: mol_type = other DNA
tggcactgtttatcatcgggaactggtttcatgccggcaatacggagcgggcaataaaaaatactgatgagcagc

SEQ ID NO: 300783 - DNA, 75 bp, synthetic construct
  source 1..75: mol_type = other DNA
caccggaagccgtcagccattcactggcactggcggcgtcactggacgcgcaggggtacagcgtcagtgacatca

SEQ ID NO: 300784 - DNA, 75 bp, synthetic construct
  source 1..75: mol_type = other DNA
cacgtgatagctctctgtcgccaggcaaagtcgctttccgctgccggacgcctgctttttgatgtttcgcgccag

SEQ ID NO: 300785 - DNA, 75 bp, synthetic construct
  source 1..75: mol_type = other DNA
tgcgccagctggttgccgaaggcaaatttcgcgaagacctgtacgcgcggatcaatctctggaccttcaccttgc

SEQ ID NO: 300786 - DNA, 75 bp, synthetic construct
  source 1..75: mol_type = other DNA
ttttgggactaattccagctattattgcgaaaagcaaaggtcgctcatttttaggatggtgggtatatggtgcga

SEQ ID NO: 300787 - DNA, 75 bp, synthetic construct
  source 1..75: mol_type = other DNA
gcgatgtggtgttgctgtccggtattcaccgtggcgaaccagaaatcgtcggtcgttatgacagtcttggaaact

SEQ ID NO: 300788 - DNA, 75 bp, synthetic construct
  source 1..75: mol_type = other DNA
ctgccattgctggcggaatacggtgtgactcatgccgaacccggtcatgcgctgacgggcactattccggcaaac

SEQ ID NO: 300789 - DNA, 75 bp, synthetic construct
  source 1..75: mol_type = other DNA
ccgacctgatgatgacggtaggtaaaaaagtggaagagctgatagcacgtctggcgcaaaaagcccgtgccgcgg

SEQ ID NO: 300790 - DNA, 75 bp, synthetic construct
  source 1..75: mol_type = other DNA
gcgatgtggtgctggtgtctggtattcagcgcggcgaaccgaaaatcgttggtcgttatgacagtctcggcaacc

SEQ ID NO: 300791 - DNA, 75 bp, synthetic construct
  source 1..75: mol_type = other DNA
ttttccttgcctgctttgggatgaaacccgcgggaaagttttacccacgccaaatctgcacacgctggtacaggc

SEQ ID NO: 300792 - DNA, 75 bp, synthetic construct
  source 1..75: mol_type = other DNA
gcgatgtggtgctggtgtctggtattcatcgtggcgaaccggaaatcgtcggtcgttatgacagcctcggcaacc

SEQ ID NO: 300793 - DNA, 75 bp, synthetic construct
  source 1..75: mol_type = other DNA
aaacaatgaaccttgaacatgcttacttcctggctatgttcaacgagctgaaacgaatcggggaatggtcagccc

SEQ ID NO: 300794 - DNA, 75 bp, synthetic construct
  source 1..75: mol_type = other DNA
aatgcgttatgcccatttcgccccaagccaccttgaagatgccgtgcgacttaaccccttaaaatgtcgcaaaaa

SEQ ID NO: 300795 - DNA, 75 bp, synthetic construct
  source 1..75: mol_type = other DNA
atggcagtacgaaaactcaccactgggaaatggctttgcgaatgttaccccgccggacgaagtgggcgtcgtgtg

SEQ ID NO: 300796 - DNA, 75 bp, synthetic construct
  source 1..75: mol_type = other DNA
attccgcgataatccgtcgccattaaccgtggtgctgggtaaagatatcgccggtgagccggtggttgccgatct

SEQ ID NO: 300797 - DNA, 75 bp, synthetic construct
  source 1..75: mol_type = other DNA
cgtaaacaattcgccaccaaaggcgaagcactggcttttgagcgtcatacgatggaagaaaccgaagcaaagccc

SEQ ID NO: 300798 - DNA, 75 bp, synthetic construct
  source 1..75: mol_type = other DNA
ctctcgccggtctgccaactttcaaaattgcagagggtgaactggcgttccttgctgctgatgaaatcaaacgcc

SEQ ID NO: 300799 - DNA, 75 bp, synthetic construct
  source 1..75: mol_type = other DNA
gatgacagcagtatcgactacaccctgccgctggcaggcgagcatccggtaagcagtgcagtggtgctctgtttt

SEQ ID NO: 300800 - DNA, 75 bp, synthetic construct
  source 1..75: mol_type = other DNA
atggtaacgtcctgttctggacaatgttttgttaagcaacgctccaccacttgcggagatttctcctccggtagc

SEQ ID NO: 300801 - DNA, 75 bp, synthetic construct
  source 1..75: mol_type = other DNA
gttttgttaagcaacgctccaccacttgcggagatttctcctccggtagcaacttcgtcactctgtatttttctc

SEQ ID NO: 300802 - DNA, 75 bp, synthetic construct
  source 1..75: mol_type = other DNA
taagcaaggttttcggtatgcccagcattccggagaaggtaacggccatcggctacgctgacggttcaaaccctt

SEQ ID NO: 300803 - DNA, 75 bp, synthetic construct
  source 1..75: mol_type = other DNA
ttattctgtccgcagtagtctggctggttgccgctggtacgccagcgagcgcagcagagcatcagtccacactaa

SEQ ID NO: 300804 - DNA, 75 bp, synthetic construct
  source 1..75: mol_type = other DNA
ggacggcgctggagaaccattttgcggtgatcccggcagacagaacatggcgaccacagccgttgctgaaaccgc

SEQ ID NO: 300805 - DNA, 75 bp, synthetic construct
  source 1..75: mol_type = other DNA
gccaggcagcgataatctgaacgggattaacgtgaaataccgttatgagtttacggacgcgctggggctgattac

SEQ ID NO: 300806 - DNA, 75 bp, synthetic construct
  source 1..75: mol_type = other DNA
aaacgcgtctgtattaccggaaactcctgtgccatttaaaagtggtaccggagcaattgataacgacactgtcta

SEQ ID NO: 300807 - DNA, 75 bp, synthetic construct
  source 1..75: mol_type = other DNA
cggtgaaactacaggaggtaaagctgttgcggattcagttttaatatcagtgaaggataataaagtcacggtaca

SEQ ID NO: 300808 - DNA, 75 bp, synthetic construct
  source 1..75: mol_type = other DNA
catcaggggcatctggtacaaatcccttgtcatcaggtttctgacgccgttgaacagggcaccgacgtcatcacc

SEQ ID NO: 300809 - DNA, 75 bp, synthetic construct
  source 1..75: mol_type = other DNA
tacaggtaataaaacctggcttattaatggcgaagtcaaacccgggctgcgaaccgatgccgtatttgaactgga

SEQ ID NO: 300810 - DNA, 75 bp, synthetic construct
  source 1..75: mol_type = other DNA
catagataaaatcaacgcccactattttgacaaaaaagcagaagattatttcttcaataagttcctgttgtcttt

SEQ ID NO: 300811 - DNA, 75 bp, synthetic construct
  source 1..75: mol_type = other DNA
cggagaaaccacgggcggtaacgctgttgcggattcggtgttgatctctgtaaaagataataaagtaacggtgca

SEQ ID NO: 300812 - DNA, 75 bp, synthetic construct
  source 1..75: mol_type = other DNA
catgcagaaaagcctttgagcgtgcagtcaagcgggcaagcattgacttgccagagggccaatgcacccacgttc

SEQ ID NO: 300813 - DNA, 75 bp, synthetic construct
  source 1..75: mol_type = other DNA
gcttaacccaaactttggcggcgaggtgatggtgattggcctgggttgcgagaaattacagccagaacgcctgct

SEQ ID NO: 300814 - DNA, 75 bp, synthetic construct
  source 1..75: mol_type = other DNA
aatggaagaagtgaacaaaaaaccatggctgggggaaaaggaagatcggcgacatctatcagaattaattgagct

SEQ ID NO: 300815 - DNA, 75 bp, synthetic construct
  source 1..75: mol_type = other DNA
gtgctaagggatattttgggacattcggatatcaagatgaccatggtttactcacatttctcaccagatcatctt

SEQ ID NO: 300816 - DNA, 75 bp, synthetic construct
  source 1..75: mol_type = other DNA
atacaaaatcacgtacaccaacacgaaaggcagaaaaaaccgcgccgtcccaatcagcaaagaactctatgagtc

SEQ ID NO: 300817 - DNA, 75 bp, synthetic construct
  source 1..75: mol_type = other DNA
tcttccgggcggtattcaatgagctaaatcgcctcggagaatggaagggtgagaacccgctgaaaaatatgcgcc

SEQ ID NO: 300818 - DNA, 75 bp, synthetic construct
  source 1..75: mol_type = other DNA
tattcttgacgtcgccagcgggaagaagaaaaccttctcggatcaatggggactgcataaccaactggcagtatt

SEQ ID NO: 300819 - DNA, 75 bp, synthetic construct
  source 1..75: mol_type = other DNA
tcatccggtacgcgcgaaacaggggatggtggcgtctgtagatgctactgccactcaggtgggggtggatatcct

SEQ ID NO: 300820 - DNA, 75 bp, synthetic construct
  source 1..75: mol_type = other DNA
cagatcgcccaggagatgcagaaaaacggtggcttgatcactaaagaagatttagcggcctataaagcggtcgaa

SEQ ID NO: 300821 - DNA, 75 bp, synthetic construct
  source 1..75: mol_type = other DNA
gggtagccattgctgctctgctctcaggaagttgttttagcgccgtcgccgcgcctcctgtttcttacggcgtgg

SEQ ID NO: 300822 - DNA, 75 bp, synthetic construct
  source 1..75: mol_type = other DNA
ctgacagcaggtgactttacgaaataccgcgaagcacggttaaaaggtgaagtacgaaatgaagatggcacgttt

SEQ ID NO: 300823 - DNA, 75 bp, synthetic construct
  source 1..75: mol_type = other DNA
gggccaccaaatatcgaaataccgaattacttatacaaagaccaaaggcaagaaaaacagaacagtacccatatc

SEQ ID NO: 300824 - DNA, 75 bp, synthetic construct
  source 1..75: mol_type = other DNA
attctgcttaataaccagatggatgatttctccgccaaacctggcgtaccgaacgtttacgggctggtgggtggt

SEQ ID NO: 300825 - DNA, 75 bp, synthetic construct
  source 1..75: mol_type = other DNA
accggtgtcggcacaggcatggcaggacgaaatgcgctatgcgggcgtctcctcctttggtattggcggcaccaa

SEQ ID NO: 300826 - DNA, 75 bp, synthetic construct
  source 1..75: mol_type = other DNA
ctgacagccggagactttacgaaataccgcgaagcacggttaaaaggtgaaatacgaaatgaagatggcacgctt

SEQ ID NO: 300827 - DNA, 75 bp, synthetic construct
  source 1..75: mol_type = other DNA
acaggaactgtatgacgaactcccgaagaacagagggaagttattcacgccatgtagaaaagcctttgaacgagc

SEQ ID NO: 300828 - DNA, 75 bp, synthetic construct
  source 1..75: mol_type = other DNA
gccaataacggtacgcaacatacggtattttccggaccggaagcccgtctcgcagtattttgcgccacgctctcg

SEQ ID NO: 300829 - DNA, 75 bp, synthetic construct
  source 1..75: mol_type = other DNA
ccgatataaaaatgacaatggtttacgcacacttttctccagaccatctagaagatgctgttacaaaaaatcctt

SEQ ID NO: 300830 - DNA, 75 bp, synthetic construct
  source 1..75: mol_type = other DNA
agtaaagcgagccggcatcgagttaccagagggccaatgcacccacgtgctgcgtcatacattcgccagtcattt

SEQ ID NO: 300831 - DNA, 75 bp, synthetic construct
  source 1..75: mol_type = other DNA
aattgctgaaggtgagctggcctttctttccatggacgaaatcaagcgcctgttggatgcctgcgcagattctca

SEQ ID NO: 300832 - DNA, 75 bp, synthetic construct
  source 1..75: mol_type = other DNA
agcattgaccatccgcttacctttagcttcagcgccggtacgcttgcgcgcagcgacgagctggcgcaatacggc

SEQ ID NO: 300833 - DNA, 75 bp, synthetic construct
  source 1..75: mol_type = other DNA
ccgtctgcatatgaacctcgaccttttgcagttgtgtaagttcacagagatattgcaattgcctccggataagta

SEQ ID NO: 300834 - DNA, 75 bp, synthetic construct
  source 1..75: mol_type = other DNA
gcgcttaaacagtgcgccacgcgactgcacgccatctacgtcgatcaactggtacaacgctgtaccggcgatgcc

SEQ ID NO: 300835 - DNA, 75 bp, synthetic construct
  source 1..75: mol_type = other DNA
ccacgcggaatacgcgacagtcgtaccacttcacggacgtctccgcacagttcctcaatgacgccagagcccgtt

SEQ ID NO: 300836 - DNA, 75 bp, synthetic construct
  source 1..75: mol_type = other DNA
ctggctcagagaaaaaggggcgcgacgcatcgccctgctggcaccgcgcgtggatgagtcatggctacgcgacgt

SEQ ID NO: 300837 - DNA, 75 bp, synthetic construct
  source 1..75: mol_type = other DNA
atcgccagccgatccatccgcaaatcaaccagttgattggtgattttacctccgtcacgctggttgattttaact

SEQ ID NO: 300838 - DNA, 75 bp, synthetic construct
  source 1..75: mol_type = other DNA
ggcgcattcctgccgtacctgctttatatgtaccgctatcaggactacccggcagaccgccgcgaactcatcatc

SEQ ID NO: 300839 - DNA, 75 bp, synthetic construct
  source 1..75: mol_type = other DNA
tttatggaaacctcattccactacacgctgtaccgcccaatcatcaccgctctacaggcgcaggggcagagctgc

SEQ ID NO: 300840 - DNA, 75 bp, synthetic construct
  source 1..75: mol_type = other DNA
atgccaacacaaaccatcatcaaaacactcgctacccaccgcgaaaaaccatttgtcagcgtcgtcacgccaacc

SEQ ID NO: 300841 - DNA, 75 bp, synthetic construct
  source 1..75: mol_type = other DNA
aaagcgggagaacgggcggcgatggtgattgtggaggcgctggcgggcaaggaaccgtcaggaatatgtcgataa

SEQ ID NO: 300842 - DNA, 75 bp, synthetic construct
  source 1..75: mol_type = other DNA
tcgacgcctggcataacggcacgtttgcccgcactctgccggaaaatattcaacccgattcccgtaaacctacgg

SEQ ID NO: 300843 - DNA, 75 bp, synthetic construct
  source 1..75: mol_type = other DNA
gaagatcccccgccttgccgccagtgaagatgaaaacggtcaacggggccgccgcctgtcgcacttgcaggcgct

SEQ ID NO: 300844 - DNA, 75 bp, synthetic construct
  source 1..75: mol_type = other DNA
gttccatgcggcagaaaatggcgatgttcacgcctttgccgatgaagttaaggaactggggcaagcactgccgcg

SEQ ID NO: 300845 - DNA, 75 bp, synthetic construct
  source 1..75: mol_type = other DNA
ccagcggtagaaaaaatcgctcagaaacacaccagcttccagatcaaaccggaacaatacaatatcgtcggtgaa

SEQ ID NO: 300846 - DNA, 75 bp, synthetic construct
  source 1..75: mol_type = other DNA
cagagatgaaacgcgatgagatagcagatctgatggcattcgtggccgtcgccgaagagcgtagcttcacccggg

SEQ ID NO: 300847 - DNA, 75 bp, synthetic construct
  source 1..75: mol_type = other DNA
tctcgcacagtcacaacacctttgataaagattttattctcggggccagcacgccagtaaacgcgacacttacgg

SEQ ID NO: 300848 - DNA, 75 bp, synthetic construct
  source 1..75: mol_type = other DNA
aagcgtattgctaaagcacttgatgatgctcaggcacctcgtaactggcttttctcgatgagcatagggaaagac

SEQ ID NO: 300849 - DNA, 75 bp, synthetic construct
  source 1..75: mol_type = other DNA
atgactcgctacccgcagcaggcgagtcatttttactcgtttatcatgccagattacccgtcatatcagcgtttc

SEQ ID NO: 300850 - DNA, 75 bp, synthetic construct
  source 1..75: mol_type = other DNA
aagtggtcggcaacccgcgcttcgacgcctggcataacggcacgttcgatcgcgcgttgccggaaaacatccaat

SEQ ID NO: 300851 - DNA, 75 bp, synthetic construct
  source 1..75: mol_type = other DNA
ccagattatcgttcctcctgcaaccgaggataattgtgttgttctctcaattcgtaaaccatcactaacgcgttt

SEQ ID NO: 300852 - DNA, 75 bp, synthetic construct
  source 1..75: mol_type = other DNA
ctgatttcgcggcgttcctatcgcatgctcaccctgagcgatggtcacttgcatggaggcgtgggccatgaataa

SEQ ID NO: 300853 - DNA, 75 bp, synthetic construct
  source 1..75: mol_type = other DNA
tgtatcggcggcgctggataaagtcgggctactggacaaagcgaagaactttcctattcagctttctggcggtga

SEQ ID NO: 300854 - DNA, 75 bp, synthetic construct
  source 1..75: mol_type = other DNA
acaaccgatgcagacagtgccctgcatgctgccgatattgcgatgtatcaggagaaaaaacacaaacagaaaaca

SEQ ID NO: 300855 - DNA, 75 bp, synthetic construct
  source 1..75: mol_type = other DNA
cgatcaaatcccgcgcgccgattctgcttaacggtccaaccggcgcgggcaagtcatttctggcgcgacgcatct

SEQ ID NO: 300856 - DNA, 75 bp, synthetic construct
  source 1..75: mol_type = other DNA
atcgactttctggcgagccgcattgcagaatatgaaaacaataacgaaaagtttgcagagttcgacaaagccgtt

SEQ ID NO: 300857 - DNA, 75 bp, synthetic construct
  source 1..75: mol_type = other DNA
gcaacagcacggctggcaaaactatctgctgctggaagatgacgcggttattctcaagcaggagaaacatattca

SEQ ID NO: 300858 - DNA, 75 bp, synthetic construct
  source 1..75: mol_type = other DNA
acgctggtgatcaacgaccgcgtgtttaaaccgtttctggatgaaatgctggagacgctaaaaagcatcgacgat

SEQ ID NO: 300859 - DNA, 75 bp, synthetic construct
  source 1..75: mol_type = other DNA
gcaaccgctgctacgcgccgacaaatggctggcctgttatccgagtatttgttatcagcgaccgggctttagtga

SEQ ID NO: 300860 - DNA, 75 bp, synthetic construct
  source 1..75: mol_type = other DNA
ggaccgtaccgtctacgataacgtggcgatcccgctcattattgccggtgccagcggtgacgacatccgtcgccg

SEQ ID NO: 300861 - DNA, 75 bp, synthetic construct
  source 1..75: mol_type = other DNA
gctgttgctgaaatggcgaaagcaggcaagttaccagccttttatatgacggacccattaaagccgggcggtcat

SEQ ID NO: 300862 - DNA, 75 bp, synthetic construct
  source 1..75: mol_type = other DNA
acccatcgccgacaccatcggcttttttatggaaacctcattccactacgcgctgtaccgcccaatcatcaccgc

SEQ ID NO: 300863 - DNA, 75 bp, synthetic construct
  source 1..75: mol_type = other DNA
aactcgagcacggcgatgtgcttccccatgacatggtcgaatcctccgctgctgcatggcgggatgagatgagca

SEQ ID NO: 300864 - DNA, 75 bp, synthetic construct
  source 1..75: mol_type = other DNA
ctgaattgttttataagctgcataacaaaataagcacccctaagatcgaggaaaacgtaggtgacttccgtctga

SEQ ID NO: 300865 - DNA, 75 bp, synthetic construct
  source 1..75: mol_type = other DNA
ttaataggcataggcattcttggcgaatatataggaagaatatatatagaagttaagaaaagaccaaaatatatt

SEQ ID NO: 300866 - DNA, 75 bp, synthetic construct
  source 1..75: mol_type = other DNA
tatttattgcatgtatatcatttacatacggttcatggatgataattgataaattaatttttggtaataatgtac

SEQ ID NO: 300867 - DNA, 75 bp, synthetic construct
  source 1..75: mol_type = other DNA
tcaattggtaagagtttagtccaattggcaagaatggatgaatcaattaaaaatatggcaagatgggatatattt

SEQ ID NO: 300868 - DNA, 75 bp, synthetic construct
  source 1..75: mol_type = other DNA
cctggacgtcacaggacagggcgagccatttcagcacatgggcacgccgcgggattatttccgaccgtctggcaa

SEQ ID NO: 300869 - DNA, 75 bp, synthetic construct
  source 1..75: mol_type = other DNA
agtaatcagcgccaccagagacccggagtattactttgttgtggttctggcggggcagtcaaacagcatggcata

SEQ ID NO: 300870 - DNA, 75 bp, synthetic construct
  source 1..75: mol_type = other DNA
tcttcaatgaagaagatacgataccaattttttataaaacggtacgtgaattcgaagagttgaagccatatgaag

SEQ ID NO: 300871 - DNA, 75 bp, synthetic construct
  source 1..75: mol_type = other DNA
gtggttatccttcactgttagtatctattttgtttctgggcggaatccagttaatagggataggtgttcttggtg

SEQ ID NO: 300872 - DNA, 75 bp, synthetic construct
  source 1..75: mol_type = other DNA
cattactagcttctcaaccttccctcttcgcatgtggacttatattggcctgatggtcgccggcctgtcgtttct

SEQ ID NO: 300873 - DNA, 75 bp, synthetic construct
  source 1..75: mol_type = other DNA
aatacattggccgcatttacatcgaaacaaagaacagaccaagatacattacgaaaagggataatgttgaacatg

SEQ ID NO: 300874 - DNA, 75 bp, synthetic construct
  source 1..75: mol_type = other DNA
ctaattggtattggtgtacttggagagtacataggacgtatttatattgaagttaagcagcgcccaagatatgtt

SEQ ID NO: 300875 - DNA, 75 bp, synthetic construct
  source 1..75: mol_type = other DNA
ttaatcggtataggttttttaggtgaatatattggtagaatatatatagagaccaagaaaagaccaaaatacatc

SEQ ID NO: 300876 - DNA, 75 bp, synthetic construct
  source 1..75: mol_type = other DNA
aactcgggcgcggcgatgtgctttcccatgacatggtcgaatcttccgctgctgcatggcgggatgaaatgagca

SEQ ID NO: 300877 - DNA, 75 bp, synthetic construct
  source 1..75: mol_type = other DNA
aaccgtattatttatcaagaaaatgttcctccaggcccatttgctattaccaatttattcaatacattacagggg

SEQ ID NO: 300878 - DNA, 75 bp, synthetic construct
  source 1..75: mol_type = other DNA
acaatgaatgaatatatcaatgacactaaccattacacgaattatcagaatgaaaaagagagttatattgtcacg

SEQ ID NO: 300879 - DNA, 75 bp, synthetic construct
  source 1..75: mol_type = other DNA
tttcttacacgctgtgcgcgatgaactggtttgcagccaggaaaacggcactgtacaaattaaaggtgaaacggc

SEQ ID NO: 300880 - DNA, 75 bp, synthetic construct
  source 1..75: mol_type = other DNA
cttccccatgacatggtcgaatcctctgctgcagcatggcgggatgaaatgagcaggaaggtcgccggtaaatga

SEQ ID NO: 300881 - DNA, 75 bp, synthetic construct
  source 1..75: mol_type = other DNA
acaaaccgtgattatcaatctctggctgccggcgttggttttaaccttaactcattaggttcattatcttttgat

SEQ ID NO: 300882 - DNA, 75 bp, synthetic construct
  source 1..75: mol_type = other DNA
tttgatatcgggccattaaaaaacgtctccacttctctaacatttagccgaataaactgggaagaagacaactag

SEQ ID NO: 300883 - DNA, 75 bp, synthetic construct
  source 1..75: mol_type = other DNA
aactcgagcgcggcgatgtgcttccccatgacatagtcgaatcctccgctactgcatggcgggatgaaatgagca

SEQ ID NO: 300884 - DNA, 75 bp, synthetic construct
  source 1..75: mol_type = other DNA
gaccaggttgaggcaggtcgtcagcaactcgaacgcggcgatgtacttccccatgacatagttgaatcctcagcg

SEQ ID NO: 300885 - DNA, 75 bp, synthetic construct
  source 1..75: mol_type = other DNA
cggcgatgtgcttccccatgacatggtcgaatcttctgctgctgcatggcgggatgaaatgagcaggaaagtcgc

SEQ ID NO: 300886 - DNA, 75 bp, synthetic construct
  source 1..75: mol_type = other DNA
aactcaagtgcggtgatgtgcttccccatgacatggtcgaatcctccgctgctgcatggcgggatgagatgagca

SEQ ID NO: 300887 - DNA, 75 bp, synthetic construct
  source 1..75: mol_type = other DNA
actcgagcacggcgatgtgcttccccatgacatggtcgaatcctctgctgcagcatggcgggatgaaatgagcag

SEQ ID NO: 300888 - DNA, 75 bp, synthetic construct
  source 1..75: mol_type = other DNA
atgtacttccccatgacatggtcgaatcttccgctgctgcatggcgggatgaaatgagcaggaaagtcgccggta

SEQ ID NO: 300889 - DNA, 75 bp, synthetic construct
  source 1..75: mol_type = other DNA
actgaccgtaaatcggtagtgctgaaaaccaaaaacggtcaatacttcgtttcaccagataacggtacgctcact

SEQ ID NO: 300890 - DNA, 75 bp, synthetic construct
  source 1..75: mol_type = other DNA
tgcatcactggaagcagagccagtggcatggatgcacgcaaataatcctattggaataccggcgataacaagaag

SEQ ID NO: 300891 - DNA, 75 bp, synthetic construct
  source 1..75: mol_type = other DNA
gtgaagaaaaatacagcggaattgttggtgcactgcgtggaaaatatattaattgtctggtaacgaatagcagca

SEQ ID NO: 300892 - DNA, 75 bp, synthetic construct
  source 1..75: mol_type = other DNA
cgcctggtgccggaacacgatccggtacacaaagtaacgattatcccgcgtggtcgcgcgctgggtgtgacattc

SEQ ID NO: 300893 - DNA, 75 bp, synthetic construct
  source 1..75: mol_type = other DNA
atccagaaattgaaatcatccttatttccgccaccagcggcgaagggatggaccagtggctgaactggctggaga

SEQ ID NO: 300894 - DNA, 75 bp, synthetic construct
  source 1..75: mol_type = other DNA
aatcttaaaatctttgatttaacacacgaaattccaccgtataacatctgggaaggcgcttaccgcctgtatcag

SEQ ID NO: 300895 - DNA, 75 bp, synthetic construct
  source 1..75: mol_type = other DNA
gattggaatactgacccgcgtagatgcgacgttctcttctggttgccagttgatgattaacgctattcgaaaatc

SEQ ID NO: 300896 - DNA, 75 bp, synthetic construct
  source 1..75: mol_type = other DNA
gacgctaagtcgggtactggaatggcctgttgtcgtatcaccggaaggcactgcaccacgccaacattcagatgc

SEQ ID NO: 300897 - DNA, 75 bp, synthetic construct
  source 1..75: mol_type = other DNA
ccggttgtcgtatcgccggaaggcactgcgccccgccaacattcagatgcgttagtacaaagccagggctgcaaa

SEQ ID NO: 300898 - DNA, 75 bp, synthetic construct
  source 1..75: mol_type = other DNA
aaagacgttgtggtggtgtcgggaaatgatgaggatgaagagactcaactggcgatgatggggttacacggcgcg

SEQ ID NO: 300899 - DNA, 75 bp, synthetic construct
  source 1..75: mol_type = other DNA
atatcggcattggtcggatgtcagatcctgaactgatgaccgggcttaattacgaactgctgtttcttgaatcgc

SEQ ID NO: 300900 - DNA, 75 bp, synthetic construct
  source 1..75: mol_type = other DNA
gaatcgtaaagagggattgaacaatgacattataagagtgggagcgctacctactgccgcgttggggatattacc

SEQ ID NO: 300901 - DNA, 75 bp, synthetic construct
  source 1..75: mol_type = other DNA
tctccgagaaattaggtccgttgctgtatgcggaagaagaaggagaagtattcctcggtcgtagcgtggcgaaag

SEQ ID NO: 300902 - DNA, 75 bp, synthetic construct
  source 1..75: mol_type = other DNA
atggctactttaaaacggggctgatgatgctggtaggtagcattaaccgcgtgatccgtccgcgtctgaaactgc

SEQ ID NO: 300903 - DNA, 75 bp, synthetic construct
  source 1..75: mol_type = other DNA
gctggtaatggcactgggcagcacctccaacgatttcaatacgccgggtgtaaaagagaactgcattttcctcga

SEQ ID NO: 300904 - DNA, 75 bp, synthetic construct
  source 1..75: mol_type = other DNA
gccagcaagaatcgttagtcatcaatcgactggaattgttgcacgacgcccgctcgcgctcgctgtttgaaacgc

SEQ ID NO: 300905 - DNA, 75 bp, synthetic construct
  source 1..75: mol_type = other DNA
ggtcacagggatccgcgttcgatggaggtttataccagagtgtttgcgctggatatggctgccacgctggcagtg

SEQ ID NO: 300906 - DNA, 75 bp, synthetic construct
  source 1..75: mol_type = other DNA
tgaaatactccgccaacctgggcgcgaatggcaaagtgaacattgcgattgtcggcggcggcgcgacgggtgtag

SEQ ID NO: 300907 - DNA, 75 bp, synthetic construct
  source 1..75: mol_type = other DNA
tataaaggactgaccaacgaagccctgaatgtgacgctggtggaagcgggcgaacgcattttaccagcgctgccg

SEQ ID NO: 300908 - DNA, 75 bp, synthetic construct
  source 1..75: mol_type = other DNA
ctttgccactagcggacgcatcactctggacgtggttgaagatgagataaaccgtctgcgctataactggcagga

SEQ ID NO: 300909 - DNA, 75 bp, synthetic construct
  source 1..75: mol_type = other DNA
atgctctatcaccgccagccccggaaagtcatccaggcactggctggtcacagggatccacgttcgatggaggtt

SEQ ID NO: 300910 - DNA, 75 bp, synthetic construct
  source 1..75: mol_type = other DNA
agtggggcttctctgagaaactcggtccgctactgtatgcggaagaagaaggtgaagttttcctcggtcgtagcg

SEQ ID NO: 300911 - DNA, 75 bp, synthetic construct
  source 1..75: mol_type = other DNA
aaagccagcgtcaacgacgcggatcggctacgcaaatacctggcgcgttttggtctgacgtgggaagccgtgcag

SEQ ID NO: 300912 - DNA, 75 bp, synthetic construct
  source 1..75: mol_type = other DNA
aaagtggcgattagatcccgcgcgccgatcctgctcaacggcccaaccggtgcgggaaagtcgtttctggcacga

SEQ ID NO: 300913 - DNA, 75 bp, synthetic construct
  source 1..75: mol_type = other DNA
tgtctatgtcagcaagaatcgttagtcatcaatcgactggaattgttgcacgacgctcgctgtttgaaacgctta

SEQ ID NO: 300914 - DNA, 75 bp, synthetic construct
  source 1..75: mol_type = other DNA
cggtgaaactgcaggcggcaaagcggtgatggattcagttttgctctcagtaagagataataaagttactgtgca

SEQ ID NO: 300915 - DNA, 75 bp, synthetic construct
  source 1..75: mol_type = other DNA
tctcaatatgggaaaaaccgaccgcagcgccaacccttcgccgggcaacgataatggcggactcgcaaacgtggt

SEQ ID NO: 300916 - DNA, 75 bp, synthetic construct
  source 1..75: mol_type = other DNA
tctcaatatgggaaaaaccgaccgcagcgccaacccttcgccgggcaacgaaaagggcgggctcgcaaacgtggt

SEQ ID NO: 300917 - DNA, 75 bp, synthetic construct
  source 1..75: mol_type = other DNA
tctcaatatgggaaaaaccgaccgcagcgccaacccttcgccgggcaacgaaaacggcggcctcgcaaacgtggt

SEQ ID NO: 300918 - DNA, 75 bp, synthetic construct
  source 1..75: mol_type = other DNA
gcaattgttgaagtgctgtcgcccggtcaacacccgactaaacgcgtattaatttacgccgcgacgccagccagc

SEQ ID NO: 300919 - DNA, 75 bp, synthetic construct
  source 1..75: mol_type = other DNA
tctcaatatgggaaaaaccgaccgcagcgccaacccttcgccgggcaacgagaagggcggactcgcaaacgtggt

SEQ ID NO: 300920 - DNA, 75 bp, synthetic construct
  source 1..75: mol_type = other DNA
tctcaatatgggaaaaaccgaccgcagcgccaacccttcgccgggcaacgacaacggcggactcgcaaacgtggt

SEQ ID NO: 300921 - DNA, 75 bp, synthetic construct
  source 1..75: mol_type = other DNA
agtttgaccggggataattttggtcaactggttgaagaaatcgtatttgaagataacgccatcgtggatattggc

SEQ ID NO: 300922 - DNA, 75 bp, synthetic construct
  source 1..75: mol_type = other DNA
aacgtatacgaaagtgtaattcgtgccgtccatgacagtcgtggcagactcattgatcagcatacggtcgatatg

SEQ ID NO: 300923 - DNA, 75 bp, synthetic construct
  source 1..75: mol_type = other DNA
tatttgattgaagaagatgacaccaatccacttatcgactttctggcgagccgcattgcagagtatgaaaacaac

SEQ ID NO: 300924 - DNA, 75 bp, synthetic construct
  source 1..75: mol_type = other DNA
tctcaatatgggaaaaaccgaccgcagcgccaacccttcgccgggcaacgaaaaaggcggactcgcaaacgtggt

SEQ ID NO: 300925 - DNA, 75 bp, synthetic construct
  source 1..75: mol_type = other DNA
caatccgcaaagctgagggattaacgcaaaaaaaattttgcgaacttagcggattagcacttagctcattgaaaa

SEQ ID NO: 300926 - DNA, 75 bp, synthetic construct
  source 1..75: mol_type = other DNA
agtactgaaagggtctttatctgaggatgtctttcaggacagaggcacgattgccggttcggtgcatgttgacgc

SEQ ID NO: 300927 - DNA, 75 bp, synthetic construct
  source 1..75: mol_type = other DNA
gcaattgttgaagtgctgtcgcccggtcaacacccgactaaacgcgcattaatttacgccgcgacgccagccagt

SEQ ID NO: 300928 - DNA, 75 bp, synthetic construct
  source 1..75: mol_type = other DNA
catgacatagattcagccctgtcatccctgagtgagctgcagaatcgcccatccgggacaatacgtattactaca

SEQ ID NO: 300929 - DNA, 75 bp, synthetic construct
  source 1..75: mol_type = other DNA
agaagaacgattgggattgcggctcctgacgcgaaccacgcgtagcgttgtgccaactgaagcgggcgaacatct

SEQ ID NO: 300930 - DNA, 75 bp, synthetic construct
  source 1..75: mol_type = other DNA
tacgcggtggacgtgaagttcgtgttcgcatggaaggtcagcttttactgaatacgggtgatgctgccaacttac

SEQ ID NO: 300931 - DNA, 75 bp, synthetic construct
  source 1..75: mol_type = other DNA
cggtgaaactgcaggtggtaaagcggtggaagattcagtgttgctctcagtgagagataataaagttactgtgca

SEQ ID NO: 300932 - DNA, 75 bp, synthetic construct
  source 1..75: mol_type = other DNA
cattggtttaggtagcgcaggtacggcatggtacaagctggatacacaggccaaagataaaaaatggacagcgtt

SEQ ID NO: 300933 - DNA, 75 bp, synthetic construct
  source 1..75: mol_type = other DNA
atgtcgtttctgaacgttttgatgcaggcgtccgtctgggggggggagatggataaagatatgatcgccattcga

SEQ ID NO: 300934 - DNA, 75 bp, synthetic construct
  source 1..75: mol_type = other DNA
ccatatcgcggttttttagaaaaaaatacagagaaagacaatgtagagttttttgaacgtgcagctcaaaaaaaa

SEQ ID NO: 300935 - DNA, 75 bp, synthetic construct
  source 1..75: mol_type = other DNA
caatgtagagttttttgaacgtgcagctcaaaaaaaattgggtaatgaaactatcttaaaaaaagactctctatt

SEQ ID NO: 300936 - DNA, 75 bp, synthetic construct
  source 1..75: mol_type = other DNA
gcaattgttgaagtgctgtcgcccggtcaactcccgactaaacgcgcattaatttacgccgcgacgccagccagg

SEQ ID NO: 300937 - DNA, 75 bp, synthetic construct
  source 1..75: mol_type = other DNA
atggcgtattctccgctgctaatatcgctggttctggcgtttgtcgtcgttgcagaggagcgtagcttcactcgt

SEQ ID NO: 300938 - DNA, 75 bp, synthetic construct
  source 1..75: mol_type = other DNA
atatgcggccttaaaagaaggtgcaaaagttctggcttcaacgacattagttttaaatagagatgatttaaaaac

SEQ ID NO: 300939 - DNA, 75 bp, synthetic construct
  source 1..75: mol_type = other DNA
caattagaaaggcggaagggcttactcaagcaaagttttgcgagctaacagggttggcaataagcactctaaaaa

SEQ ID NO: 300940 - DNA, 75 bp, synthetic construct
  source 1..75: mol_type = other DNA
gtgaccattgaccttgcttatgaaggttccggtagtggcgactggcgaacggatgcatttattgttggtatcgga

SEQ ID NO: 300941 - DNA, 75 bp, synthetic construct
  source 1..75: mol_type = other DNA
tacgcgtgaatgaatggttcagcgcgtattcgatggcgggtgtggcttacagccgtgtgtcgactttctccgggg

SEQ ID NO: 300942 - DNA, 75 bp, synthetic construct
  source 1..75: mol_type = other DNA
ctgaccggaagtgatgacggtcgccacagcaacacgtctctggcgtggggagctggcgtgcagtttaacccgacc

SEQ ID NO: 300943 - DNA, 75 bp, synthetic construct
  source 1..75: mol_type = other DNA
ccgaatgcgtggccattgatattgcttatgaagggtccggaagtggggactggcgcactgacggtttcatcgtgg

SEQ ID NO: 300944 - DNA, 75 bp, synthetic construct
  source 1..75: mol_type = other DNA
ccgaatccgtggccattgatattgcttatgaagggtccgggagtggagactggcgcactgacggtttcatcgtgg

SEQ ID NO: 300945 - DNA, 75 bp, synthetic construct
  source 1..75: mol_type = other DNA
ccgaatacgtggccattgatattgcttatgaagggtccgggagtggcgactggcgcactgacggtttcatcgtgg

SEQ ID NO: 300946 - DNA, 75 bp, synthetic construct
  source 1..75: mol_type = other DNA
tgtccgcagccatctgtctgtccgtatccggtgcgcctgcatgggcatctgaacatcagtacacgctgagcgcgg

SEQ ID NO: 300947 - DNA, 75 bp, synthetic construct
  source 1..75: mol_type = other DNA
cccgaccgaatccgtggccattgaccttgcttatgaaggctccggcagtggcgactggcgaacggatgcatttat

SEQ ID NO: 300948 - DNA, 75 bp, synthetic construct
  source 1..75: mol_type = other DNA
gggattatcttcgcgtaactgacaacaaggggaaaacgcacgatgtgctgaccggaagtgatgacggtcgccaca

SEQ ID NO: 300949 - DNA, 75 bp, synthetic construct
  source 1..75: mol_type = other DNA
gcgtaaccgctggttcagcgtgatggcggggccgtctgtgcgcgtgaatgaatggttcagcgcgtatgcgatgga

SEQ ID NO: 300950 - DNA, 75 bp, synthetic construct
  source 1..75: mol_type = other DNA
acgtaaccgctggttcagcgtaatggcggggccgtctgtgcgcgtgaatgaaaggatcagcgcgtatgcgatggc

SEQ ID NO: 300951 - DNA, 75 bp, synthetic construct
  source 1..75: mol_type = other DNA
taactgacaacaagaggaaaacgcacgacgtgctgaccggaagtgatgacgctcgctacagcaacacatctctgg

SEQ ID NO: 300952 - DNA, 75 bp, synthetic construct
  source 1..75: mol_type = other DNA
atgacggtcgccacagcaacacgtctctggcgtggggggctggcgtgcagtttaacccgacagaatccgtggccg

SEQ ID NO: 300953 - DNA, 75 bp, synthetic construct
  source 1..75: mol_type = other DNA
aaagatacgctgagtatcactgatgtgatggccgcgcagggcatgacacagaatcgggctgagatgggtttttcc

SEQ ID NO: 300954 - DNA, 75 bp, synthetic construct
  source 1..75: mol_type = other DNA
gaaaaaaacagttaaacgtttttacgatacgctggttgtgcagtttgatattgaagaagcatgggcagaacaaca

SEQ ID NO: 300955 - DNA, 75 bp, synthetic construct
  source 1..75: mol_type = other DNA
tcgtatgcgtttgaagattatgcccgtagcgcggcgagcaaaaaacagtgcccctgctgtcacggaaaaaaattt

SEQ ID NO: 300956 - DNA, 75 bp, synthetic construct
  source 1..75: mol_type = other DNA
actgccagcgttgtggtggtcgtggctatgaaagactaccatcaacggaggcatttaatgccatacgcaaagtga

SEQ ID NO: 300957 - DNA, 75 bp, synthetic construct
  source 1..75: mol_type = other DNA
aaaccgggctgagatgggattttctgcgttcctggggaaaatgggcatcagtatgaatgacagggcgcgggcaac

SEQ ID NO: 300958 - DNA, 75 bp, synthetic construct
  source 1..75: mol_type = other DNA
tgccattcatcgtgaagagtcggaaaaacagggtgtgccggttttcagaaactgtcagcgttgtggtgggcgtgg

SEQ ID NO: 300959 - DNA, 75 bp, synthetic construct
  source 1..75: mol_type = other DNA
attaacgtgaaataccgttatgagtttacggacacctggggtgtacgtcttcagtatgcaggaagatcaacctta

SEQ ID NO: 300960 - DNA, 75 bp, synthetic construct
  source 1..75: mol_type = other DNA
cgcacgacgtgctgaccggaagtgatgacgctcgccacagtaacacctctctggcgtggggagctggcgtgcagt

SEQ ID NO: 300961 - DNA, 75 bp, synthetic construct
  source 1..75: mol_type = other DNA
aattgtacatattaacgttagccaagcttatttgcgctaacgtacttagcggtaaaggacttgttagcgacgata

SEQ ID NO: 300962 - DNA, 75 bp, synthetic construct
  source 1..75: mol_type = other DNA
accgaatccgtggccattgatattgcttatgaaggttccggcagtggtgactggcgcactgacggtttcatcgtg

SEQ ID NO: 300963 - DNA, 75 bp, synthetic construct
  source 1..75: mol_type = other DNA
tattgcttatgaaggctccggtagcggtgactggcgtaccaacagtttcatcgttggtgtcggttataaattctg

SEQ ID NO: 300964 - DNA, 75 bp, synthetic construct
  source 1..75: mol_type = other DNA
cgaatccgtgaccattgatattgcttatgaaggttccggtagtggcgactggcgaacggatgcatttattgttgg

SEQ ID NO: 300965 - DNA, 75 bp, synthetic construct
  source 1..75: mol_type = other DNA
cagctatgcaggagacaagaatcgccagctgacccattacagcgatacccgctggcatgaagattccgtgcgtaa

SEQ ID NO: 300966 - DNA, 75 bp, synthetic construct
  source 1..75: mol_type = other DNA
gctggcgtgcagtttaacccgaccgaatccgtggccattgatattgcttatgaaggctccggcagtggtgactgg

SEQ ID NO: 300967 - DNA, 75 bp, synthetic construct
  source 1..75: mol_type = other DNA
tgcgaaggttacgtttacaactctatcggtatcgttacttacctgaacccgttcatcggtcaccacaacggtgac

SEQ ID NO: 300968 - DNA, 75 bp, synthetic construct
  source 1..75: mol_type = other DNA
tctcaccgtttggtctgccatgtaaacagccagcatggggttatatctcggcgctggatctgaaaaccaatgaag

SEQ ID NO: 300969 - DNA, 75 bp, synthetic construct
  source 1..75: mol_type = other DNA
acgatccgggcgaaatcaccaatgaagtgacgccaattaaagtgggcgacaccctttacctgtgtaccgcgcacc

SEQ ID NO: 300970 - DNA, 75 bp, synthetic construct
  source 1..75: mol_type = other DNA
atggaacagccgaaagatgccaaaggcacaggtacggaatccggcattcagccgcaatatggcgtgccgtatggc

SEQ ID NO: 300971 - DNA, 75 bp, synthetic construct
  source 1..75: mol_type = other DNA
attaacgtgaaataccgttatgagtttacggacacgctggggatggtgacgtcattcagttatgcagaagacaag

SEQ ID NO: 300972 - DNA, 75 bp, synthetic construct
  source 1..75: mol_type = other DNA
cggtcgtttagagaattgtatgttccgtaggcttggcctgacgcaagaaaatgtaactaccacaaggccgtacta

SEQ ID NO: 300973 - DNA, 75 bp, synthetic construct
  source 1..75: mol_type = other DNA
gatattgcttatgaaggctccggcagtggcgactggcgaacggatgcatttattgttggtatcggataccgtttc

SEQ ID NO: 300974 - DNA, 75 bp, synthetic construct
  source 1..75: mol_type = other DNA
aaaggtgaatatcagtacctgaatccgaacgaccatgttaacaaatgtcagtccaccaacgacgcctacccgacc

SEQ ID NO: 300975 - DNA, 75 bp, synthetic construct
  source 1..75: mol_type = other DNA
ttacagcgatacccgctggcatgaagattccgtgcgtaaccgctggttcagcgtgatggcggggccgtctgtgcg

SEQ ID NO: 300976 - DNA, 75 bp, synthetic construct
  source 1..75: mol_type = other DNA
ttacggacacactggggatggtgacgtcattcagctatgcaggagacaggaatcgccagcttacccgttacagcg

SEQ ID NO: 300977 - DNA, 75 bp, synthetic construct
  source 1..75: mol_type = other DNA
atgagcgataaaaagaagcgcagtatggcggggtttccgtggatcgcggggatgggcttcttcatgcaggcactt

SEQ ID NO: 300978 - DNA, 75 bp, synthetic construct
  source 1..75: mol_type = other DNA
ggcgggtgtggcttacagccgtgtgtcgactttctccggggattatctccgcgtaactgacaacaaggggaaaac

SEQ ID NO: 300979 - DNA, 75 bp, synthetic construct
  source 1..75: mol_type = other DNA
atgcgtaaactttatgccgccattttgtccgcagccatttatctgaccgtatccggtgcgcctgcatgggcgtct

SEQ ID NO: 300980 - DNA, 75 bp, synthetic construct
  source 1..75: mol_type = other DNA
ggtatcttcatgcccgtacgaacgcacccggcagcgataatctgaacgggattaacgtgaaataccgttatgagt

SEQ ID NO: 300981 - DNA, 75 bp, synthetic construct
  source 1..75: mol_type = other DNA
tgtccgcagccatctgtctggctgtatccggtgcgcctgcatgggcgtctgaacatcggtccacgctgagcgcgg

SEQ ID NO: 300982 - DNA, 75 bp, synthetic construct
  source 1..75: mol_type = other DNA
tccgtgaccattgaccttgcttatgaaggttccggtagtggcgactggcgatcggatgcatttattgttggtatc

SEQ ID NO: 300983 - DNA, 75 bp, synthetic construct
  source 1..75: mol_type = other DNA
atccggtgcgcctgcatgggcgtctgaacatcagtccacgctgagcgcggggtatcttcatgcctcgacgaacgc

SEQ ID NO: 300984 - DNA, 75 bp, synthetic construct
  source 1..75: mol_type = other DNA
taagtgcggccgtccttcgcgtttatgaagggatggaaggcacaacgactgtcgaacaattccactatacgttta

SEQ ID NO: 300985 - DNA, 75 bp, synthetic construct
  source 1..75: mol_type = other DNA
gcctgttgctcggctggccttactgcgcgcttatcctcgtaatgaacttcttccagtattgaattttgtcgccat

SEQ ID NO: 300986 - DNA, 75 bp, synthetic construct
  source 1..75: mol_type = other DNA
gcggggccgtctgtacgcgtgaatgaatggttcagtgcttatgcgatggcgggtgtggcttacagccgtgtttcg

SEQ ID NO: 300987 - DNA, 75 bp, synthetic construct
  source 1..75: mol_type = other DNA
cccgaccgaatcagtggccgttgatgtcgcttatgaaggctccggcagcggtgactggcgcactgacggtttcat

SEQ ID NO: 300988 - DNA, 75 bp, synthetic construct
  source 1..75: mol_type = other DNA
atacccgctggcatgaagattccgttcgtaaccgcttgcgtattttcatgaaaggagatcactcaataacttcca

SEQ ID NO: 300989 - DNA, 75 bp, synthetic construct
  source 1..75: mol_type = other DNA
aaggaattaatctgcagatagctgatgccagggggaatattgcccgggcagggaaagtaatgcctgcaataccat

SEQ ID NO: 300990 - DNA, 75 bp, synthetic construct
  source 1..75: mol_type = other DNA
tccagaaaaccagattcaggtttatgtagagaacgaagacggctcgcacgttcctgtttctcaaccaatcatcat

SEQ ID NO: 300991 - DNA, 75 bp, synthetic construct
  source 1..75: mol_type = other DNA
atgatagccacacagatgtacggtaagccggtgagtgaactgagcgaggcagagaagcagacggtctcgacactg

SEQ ID NO: 300992 - DNA, 75 bp, synthetic construct
  source 1..75: mol_type = other DNA
ccttgcgcagatgagatagatctagcgtggactcaaggctctcgcgaatggctcgcgttggaaactttcattgac

SEQ ID NO: 300993 - DNA, 75 bp, synthetic construct
  source 1..75: mol_type = other DNA
aatctgcagatagctgatgccaggggaaatattgcccgggcagggaaagtaatgcctgcaataccattgacgggt

SEQ ID NO: 300994 - DNA, 75 bp, synthetic construct
  source 1..75: mol_type = other DNA
gtgatgcctaaagcagcatccaggttaagtttgagcaagcaagatgataaatttatgctagcctcaagtgttact

SEQ ID NO: 300995 - DNA, 75 bp, synthetic construct
  source 1..75: mol_type = other DNA
ggcggtaatctgagtgcagccctggcaggtggtgcagcgccgtatattgctgaaattatcaaacagaccaccccg

SEQ ID NO: 300996 - DNA, 75 bp, synthetic construct
  source 1..75: mol_type = other DNA
gacggtgcgggacgtgtggcagctcatgccgtggtgaatgccgcactggcggtggcacagggaaataatgctctt

SEQ ID NO: 300997 - DNA, 75 bp, synthetic construct
  source 1..75: mol_type = other DNA
gctacacggcaacgactatctgtattcgcctgggattgcttggcaaacacgatcgcccgacaaaactcggcctga

SEQ ID NO: 300998 - DNA, 75 bp, synthetic construct
  source 1..75: mol_type = other DNA
gactattgatattagagggaatcagcaattggctgaaattgcacataaatacggacgtcaggttgaaattaaatt

SEQ ID NO: 300999 - DNA, 75 bp, synthetic construct
  source 1..75: mol_type = other DNA
acgacgaaagtgtttgaaagccagaatctgacggataagcagatccataattacgcacaacagctggcaggagat

SEQ ID NO: 301000 - DNA, 75 bp, synthetic construct
  source 1..75: mol_type = other DNA
tgttgaaaacaatatgctgaacgtgatagccactgaaacagcagctaatacggcagcagcaatagctggtgctac

SEQ ID NO: 301001 - DNA, 75 bp, synthetic construct
  source 1..75: mol_type = other DNA
tgtgatgaatattaaaagcatcttggtattggtttgttgtacaactattctatcattgattatgatcatttttat

SEQ ID NO: 301002 - DNA, 75 bp, synthetic construct
  source 1..75: mol_type = other DNA
ctgtatataccataacaaatgatgttgttaatatatcaaggattcacagaagagaacttgatttccggaagtatg

SEQ ID NO: 301003 - DNA, 75 bp, synthetic construct
  source 1..75: mol_type = other DNA
actagcgatgataaatgcaaaagtaatcttttccttagcttcacaaaagatcaatgttttatgcttgaagattca

SEQ ID NO: 301004 - DNA, 75 bp, synthetic construct
  source 1..75: mol_type = other DNA
acatcatgggatgatttctatagccagtgggctgatttctgttggggcagtgataaagatgtgcatacccacaga

SEQ ID NO: 301005 - DNA, 75 bp, synthetic construct
  source 1..75: mol_type = other DNA
gtctttatcatacctggcccggcaaaagttatgaagagaaatttcagataaagctggttaactgccatgccacca

SEQ ID NO: 301006 - DNA, 75 bp, synthetic construct
  source 1..75: mol_type = other DNA
ccgtgattttctggcacgacctggcagcaccgatccttgcgggaattattaccgcagcgattgtcggctggtggc

SEQ ID NO: 301007 - DNA, 75 bp, synthetic construct
  source 1..75: mol_type = other DNA
ccgaagagcgccgactggcagaagccattgccgctgaagctcgtgccatggggctgacgaaaaaggacaaaatgc

SEQ ID NO: 301008 - DNA, 75 bp, synthetic construct
  source 1..75: mol_type = other DNA
atgtatgacggtattgagtatcgcggttatggtcagaatatcgttgaagaattaggtgagttcgctggtgttccg

SEQ ID NO: 301009 - DNA, 69 bp, synthetic construct
  source 1..69: mol_type = other DNA
atgacgcagacactgaatccggtcatcactgtcaccgtgtccggtcctgtgggcagcggtaaaagttac

SEQ ID NO: 301010 - DNA, 75 bp, synthetic construct
  source 1..75: mol_type = other DNA
ctcaatctattaaaggcgaaaaaacacacaatccacctatttcaacaaacaagcaattttgaggatgagcttgcc

SEQ ID NO: 301011 - DNA, 75 bp, synthetic construct
  source 1..75: mol_type = other DNA
gttactgaagaggtttttgaatcggcccactctattgttttcgatgaagcagaaaaccggatgcacaccattaaa

SEQ ID NO: 301012 - DNA, 75 bp, synthetic construct
  source 1..75: mol_type = other DNA
gttggtgctgcaaaaatggggatggatatccgtctggtggcaccgaaatctttctggccagatgaagcgctggta

SEQ ID NO: 301013 - DNA, 75 bp, synthetic construct
  source 1..75: mol_type = other DNA
ccctgaagtcaaatttatgcactgcctgcccgccttccataatgagcacaccacagtaggacgcgagatcgagat

SEQ ID NO: 301014 - DNA, 75 bp, synthetic construct
  source 1..75: mol_type = other DNA
ttatcaacgatgccctacaccacagcgaaactccagctaccgatgcttttctggctgaaattcgtgcggaagcac

SEQ ID NO: 301015 - DNA, 75 bp, synthetic construct
  source 1..75: mol_type = other DNA
aacaccagccaggtgttccgccgggtcaatgcgcctaccaagggcgatctggaggcggtactgcagcagctcagc

SEQ ID NO: 301016 - DNA, 75 bp, synthetic construct
  source 1..75: mol_type = other DNA
cgctgctcccactacaaccgaaaaatacgacttcccaccattgcatcgtgattttcgcgcttatctggcaatgtt

SEQ ID NO: 301017 - DNA, 75 bp, synthetic construct
  source 1..75: mol_type = other DNA
ttggcatcaacgtctatgtcatcatctttcactcgcttcagaagatgagtggcaacgctgtgtggataaagtgct

SEQ ID NO: 301018 - DNA, 75 bp, synthetic construct
  source 1..75: mol_type = other DNA
tactatcgcgatcgtcttactgccgccgatcttgctgacccgcaattgctgcgtgaaggaagggaagctctggat

SEQ ID NO: 301019 - DNA, 75 bp, synthetic construct
  source 1..75: mol_type = other DNA
agcgtattgcagataacactagggcatatgatcccgacaacaattaccgctcttatccagaaaactggcagcagg

SEQ ID NO: 301020 - DNA, 75 bp, synthetic construct
  source 1..75: mol_type = other DNA
aaggaagccaaacaagtttctccatccacccaattgccgccaccacgagctccacccttgctgcctgggtgggag

SEQ ID NO: 301021 - DNA, 75 bp, synthetic construct
  source 1..75: mol_type = other DNA
tgaagcgacagttttttataaaacaacaaatgacaaaatagatctcacaaaaaatggagaagtaattcttcaggt

SEQ ID NO: 301022 - DNA, 75 bp, synthetic construct
  source 1..75: mol_type = other DNA
gcatttagtaacctggggctggcgtatcagaaaaatggcaacatcgcggaagcaatttgggcaaatcgtaaagcg

SEQ ID NO: 301023 - DNA, 75 bp, synthetic construct
  source 1..75: mol_type = other DNA
ttaaactcaatccaaacggcgagtttgaagatatcaactctgttaccagcgccaattttaacgacaccacattag

SEQ ID NO: 301024 - DNA, 75 bp, synthetic construct
  source 1..75: mol_type = other DNA
gcagtgcagcgagtaaaaagcagtgcccttgttgcggtgggaaaaaatttattgaaagcgtagtttttacaaaca

SEQ ID NO: 301025 - DNA, 75 bp, synthetic construct
  source 1..75: mol_type = other DNA
gtaaagattgtcgtgggcgtggcgtcgccattcatcgtgaagagtcggaaaaacagggcgtgccggttttcagaa

SEQ ID NO: 301026 - DNA, 75 bp, synthetic construct
  source 1..75: mol_type = other DNA
atgaagctggaagatttaccgaaatactattccccaaaatcgcctggcctgactgatgcatccgcctcgacgtca

SEQ ID NO: 301027 - DNA, 75 bp, synthetic construct
  source 1..75: mol_type = other DNA
aggtactggaaaaggttgcccgccaggcaccgcactggctttccagcgtcagctccgcttcgccaatgtgggtag

SEQ ID NO: 301028 - DNA, 75 bp, synthetic construct
  source 1..75: mol_type = other DNA
aatgcctgcgacgggttcttcagctccggcttcgcctgcgatgcaaaacagtggagatactcaactggcaagaaa

SEQ ID NO: 301029 - DNA, 75 bp, synthetic construct
  source 1..75: mol_type = other DNA
tctatgccgtgcaggactatagcaataaagggttgcccaacagtaattatctctctgccagtaaggcaaaagtgt

SEQ ID NO: 301030 - DNA, 75 bp, synthetic construct
  source 1..75: mol_type = other DNA
tggatgttgatgatacggatagctatggaccagaaactgtcactatcagcaaaaagcattttggcgaaagttaca

SEQ ID NO: 301031 - DNA, 75 bp, synthetic construct
  source 1..75: mol_type = other DNA
catcagagtatcgtcaatgcacttaagggagattctttattttctgatggtgaataccggcatgcaattatcgct

SEQ ID NO: 301032 - DNA, 75 bp, synthetic construct
  source 1..75: mol_type = other DNA
gtttgagtaacttacgtcgttttgctgacacactccacgccattgagcgtgagttctttaccaaagagctacctg

SEQ ID NO: 301033 - DNA, 75 bp, synthetic construct
  source 1..75: mol_type = other DNA
ctcctattataacattgccaaaatttatgaaactgctggacaggacgctgatgcattgcagcattatcaactcgc

SEQ ID NO: 301034 - DNA, 75 bp, synthetic construct
  source 1..75: mol_type = other DNA
gccagtatgggcaaagtgtacaaaaggcgtgtatccgtcttactgggaagaatggaaaaaaatccgggaggtggt

SEQ ID NO: 301035 - DNA, 75 bp, synthetic construct
  source 1..75: mol_type = other DNA
atgaaagctttcgaagtgaatttcgacgggctggtggggctaacgcaccattacgctggcctgtcgtttggtaat

SEQ ID NO: 301036 - DNA, 75 bp, synthetic construct
  source 1..75: mol_type = other DNA
gcccttgctgatgcgggattcccgcaggcggtgatgccaccgcacgagcgaccgtttattcctgttttgcgtcaa

SEQ ID NO: 301037 - DNA, 75 bp, synthetic construct
  source 1..75: mol_type = other DNA
gatatggcgcgtcgcgttgccgaagccgtcgaacgccagttggcagaactgccgcgagctgaaaccgcacgtcag

SEQ ID NO: 301038 - DNA, 75 bp, synthetic construct
  source 1..75: mol_type = other DNA
gctggcgtttggtacggaatctgtgccgaaagtggacaaaatcttcgggccgggtaacgcctttgtcaccgaagc

SEQ ID NO: 301039 - DNA, 75 bp, synthetic construct
  source 1..75: mol_type = other DNA
aaaattgctttgcgcatgctggaacagggcattgatcgtgacctggtgctcgcggccacccagctaagcgaagcc

SEQ ID NO: 301040 - DNA, 75 bp, synthetic construct
  source 1..75: mol_type = other DNA
cattggcagcaagcaggaacgtaaagagtgggtggagcaattcaaagcgggcgagattgacctgctattcgtcta

SEQ ID NO: 301041 - DNA, 75 bp, synthetic construct
  source 1..75: mol_type = other DNA
aagaaaccaacatcttccctgacctctttactgctgcgattggccgaataaaccccggacttgcgccagacgaca

SEQ ID NO: 301042 - DNA, 75 bp, synthetic construct
  source 1..75: mol_type = other DNA
atacccgtttaattcaggattatctcgggcatcgaaatattcgccatactgtgcgttataccgccagtaatgctg

SEQ ID NO: 301043 - DNA, 75 bp, synthetic construct
  source 1..75: mol_type = other DNA
aaactcaacatcctttatcgcgaagccagccgccgcctcgacttactcaacctaaaagcggatctggaacagggc

SEQ ID NO: 301044 - DNA, 75 bp, synthetic construct
  source 1..75: mol_type = other DNA
agtgctgaacaacagccagatactgaacaatgaaagctattttgagcgccagattgtgtcatgtgtgcttgacca

SEQ ID NO: 301045 - DNA, 75 bp, synthetic construct
  source 1..75: mol_type = other DNA
gtacccgtgaggcgctggctgctaacttcgaccagcaggacccgcagttcgtcagcctgaaagatgaactggagc

SEQ ID NO: 301046 - DNA, 75 bp, synthetic construct
  source 1..75: mol_type = other DNA
atcagggagatgtatccggaaattggtgacgcggtggcttcgctcatccgtaaaaataactatctccagtcccgt

SEQ ID NO: 301047 - DNA, 75 bp, synthetic construct
  source 1..75: mol_type = other DNA
gacgttcagaaattcattgaagcccatccggggtgtacttccggagacattgcggatgcttttgcaggttactca

SEQ ID NO: 301048 - DNA, 75 bp, synthetic construct
  source 1..75: mol_type = other DNA
cattcagaggcagaggcgattatgcgcggtatgacgaatgctgaaatagacgcacttctggagaagctcgggtaa

SEQ ID NO: 301049 - DNA, 75 bp, synthetic construct
  source 1..75: mol_type = other DNA
aatctatagtgaatctcgcttttttataataggtcatgatgattgggataagttagagtattttattaactcatc

SEQ ID NO: 301050 - DNA, 75 bp, synthetic construct
  source 1..75: mol_type = other DNA
gcgcttctcattcagaggcagaggcgattatgcgtggtatgacgaatgctgaaatagacgcgcttctggagaagc

SEQ ID NO: 301051 - DNA, 75 bp, synthetic construct
  source 1..75: mol_type = other DNA
aacgcctggtggaactgctgacgtctcagatccaccaggccggtatgaaaccagcaccgttaccggaaaacgaaa

SEQ ID NO: 301052 - DNA, 75 bp, synthetic construct
  source 1..75: mol_type = other DNA
gctggccgccaacttcgaccagcaggacccgcagttcgtcagcctgaaagacgaactggagcgtctgtttaagaa

SEQ ID NO: 301053 - DNA, 75 bp, synthetic construct
  source 1..75: mol_type = other DNA
ggcggatatggccgatcagaatggccgcttgtttgcccgtaaggggcagcgtatcaatccgctggagaccgtttc

SEQ ID NO: 301054 - DNA, 75 bp, synthetic construct
  source 1..75: mol_type = other DNA
gctgacatgcaggcgcagtttaaagagcgagtggtgcagaacaccctgcgaccgaagtcagtggaggggctacag

SEQ ID NO: 301055 - DNA, 75 bp, synthetic construct
  source 1..75: mol_type = other DNA
atgaacaacaccgcagagaataccagcctttccacttttccggctgtaacgcagcgggcactggaaaccctgaac

SEQ ID NO: 301056 - DNA, 75 bp, synthetic construct
  source 1..75: mol_type = other DNA
tactgatatctggcgcagcacaggcaaaaaatctcgggacatggggggagatgtatcccattgccgagcaggaca

SEQ ID NO: 301057 - DNA, 75 bp, synthetic construct
  source 1..75: mol_type = other DNA
cggttcgggctgacatggataccggcagttgtacgccaggacggaaacacgctggtcgtgacctcggcggccatg

SEQ ID NO: 301058 - DNA, 75 bp, synthetic construct
  source 1..75: mol_type = other DNA
catggtttaagcagcaaccggctgagctgaaccgtaaggtgatactggtcgggggaaatatccgtgatgccacaa

SEQ ID NO: 301059 - DNA, 75 bp, synthetic construct
  source 1..75: mol_type = other DNA
actggaaaagcggcaagtcggaaaaatgcatcttctgttatccgcgaattgagtccggtcagccaacggtctgct

SEQ ID NO: 301060 - DNA, 75 bp, synthetic construct
  source 1..75: mol_type = other DNA
gtacggtcaatttgaaaacaccttcatgatgtacctgccacgcctgtgcgaacactgtctcaacccaagctgtgt

SEQ ID NO: 301061 - DNA, 75 bp, synthetic construct
  source 1..75: mol_type = other DNA
acttcgaagccatgcaaaaggagatgtacggtcagtttgaaaacactttcatgatgtacctgccgcgcctttgcg

SEQ ID NO: 301062 - DNA, 75 bp, synthetic construct
  source 1..75: mol_type = other DNA
tcgccaatatgttgagtgccggcgataccggtccggtactgcgggcgctgaaacggatgatggcgatgcgccact

SEQ ID NO: 301063 - DNA, 75 bp, synthetic construct
  source 1..75: mol_type = other DNA
atggtctggtacgtgccgccgctgtcgccgattcagtcttacgccgacgcgggcggactgcccaaaagcgaaggc

SEQ ID NO: 301064 - DNA, 75 bp, synthetic construct
  source 1..75: mol_type = other DNA
tgctgatcgaccaggacaaatgccgaggctggcggttgtgcattagcggttgcccatacaaaaaaatctacttca

SEQ ID NO: 301065 - DNA, 75 bp, synthetic construct
  source 1..75: mol_type = other DNA
tcttctttgaagccttcgactccactcgcgttccggcaatgggcgttattgatatgctggtgctgttgtttatgt

SEQ ID NO: 301066 - DNA, 75 bp, synthetic construct
  source 1..75: mol_type = other DNA
atcttcttgagtacaatgagttggtatcaaatttcccttcgccagaaagagtagttagcgattacattaggcgtt

SEQ ID NO: 301067 - DNA, 75 bp, synthetic construct
  source 1..75: mol_type = other DNA
aaaccgcacccccggcagcctgccggggacgaagacgcagatgacgatcgttcgaaaacctataagggcagcggg

SEQ ID NO: 301068 - DNA, 75 bp, synthetic construct
  source 1..75: mol_type = other DNA
gcaggaaaatgaaggtttaaaagaggctgtagcctcacgagatgaacatatcagctcccttcgccaggcaatgct

SEQ ID NO: 301069 - DNA, 75 bp, synthetic construct
  source 1..75: mol_type = other DNA
aatggttcagtgcttatgcgatggcaggtgtggcttacagccgtgtttcaacgttctccggggattatctccgcg

SEQ ID NO: 301070 - DNA, 75 bp, synthetic construct
  source 1..75: mol_type = other DNA
atgctggcattaatggtgacattagcagcatttcctgccattgctgaagacgttacaggaaactatcaaagctat

SEQ ID NO: 301071 - DNA, 75 bp, synthetic construct
  source 1..75: mol_type = other DNA
aaagatgttttcgatgccgtagcattttctgtcaagaaacgtagttttagtgatggtgatatcgttataaaatca

SEQ ID NO: 301072 - DNA, 75 bp, synthetic construct
  source 1..75: mol_type = other DNA
tacagcatcaggtggcacttttgcaggcagaaaacgccgggctgaaagatgcagtgaatgcccgggatgaacata

SEQ ID NO: 301073 - DNA, 75 bp, synthetic construct
  source 1..75: mol_type = other DNA
gctgctggagcataaacagggcactgctgatccgcagcatgtccctgcaaagtcttggtggcagttctggaaatc

SEQ ID NO: 301074 - DNA, 75 bp, synthetic construct
  source 1..75: mol_type = other DNA
agtcattgatactacagagcttattcgtgtttttggttctcttgcttttgacagtgggcgtgaccatgctgttgt

SEQ ID NO: 301075 - DNA, 75 bp, synthetic construct
  source 1..75: mol_type = other DNA
atccggtgcgcctgcatgggcgtctgagcagcaggccacgctgagcgcagggtatcttcatgcccgtacgaacgc

SEQ ID NO: 301076 - DNA, 75 bp, synthetic construct
  source 1..75: mol_type = other DNA
taaacttatcgactgccaggtccttaacgatcacacagcttcgcttggtgcctgcgaaattccccgccgggatta

SEQ ID NO: 301077 - DNA, 75 bp, synthetic construct
  source 1..75: mol_type = other DNA
cagcacggcttgttaaggttagtcgccctactatttacaagatgattaacagtggtaagttaagttacacctctg

SEQ ID NO: 301078 - DNA, 75 bp, synthetic construct
  source 1..75: mol_type = other DNA
gcgcagcagtatgccgacgataaagaaaaagtggcgctgttaaaagcgctttggcagtacgcggaagagatcgtc

SEQ ID NO: 301079 - DNA, 75 bp, synthetic construct
  source 1..75: mol_type = other DNA
caacacggcttccgtcggaaccggtgataattttgaacggttacttggtgcttcccataccgaaattgaagcagc

SEQ ID NO: 301080 - DNA, 75 bp, synthetic construct
  source 1..75: mol_type = other DNA
aaggccagtaccaggattaccagcgcacacagtatgaagtgtatgactaccccggacgtttcaagggtgcccacg

SEQ ID NO: 301081 - DNA, 75 bp, synthetic construct
  source 1..75: mol_type = other DNA
ccgtgttatcaacggctttatgattcagggcggcggttttgaaccgggcatgaagcaaaaagccaccaaagaacc

SEQ ID NO: 301082 - DNA, 75 bp, synthetic construct
  source 1..75: mol_type = other DNA
aatggtcgatatctttaaagtggtgaaagagcgcggtgccaaatccgtttgtatcactaactatattaaatctcc

SEQ ID NO: 301083 - DNA, 75 bp, synthetic construct
  source 1..75: mol_type = other DNA
tacaatcaacgcaattttttaatgccgaagtacttgagtccattctcaaactacttgctaattgcgatactattt

SEQ ID NO: 301084 - DNA, 75 bp, synthetic construct
  source 1..75: mol_type = other DNA
tgattcaaagcaattaccctacactgcatcaggcggaaaaaaaggtcgctgactatattcttagccacgcacatg

SEQ ID NO: 301085 - DNA, 75 bp, synthetic construct
  source 1..75: mol_type = other DNA
agtttcctatgcaggagtaaattctgttctacatgcaatagaaaatgatggtaattttaatgagtcttactttct

SEQ ID NO: 301086 - DNA, 75 bp, synthetic construct
  source 1..75: mol_type = other DNA
agagtgcagatgtgtttaacgaagaaaatgaagaaaaaatgctcccgtcggaatacctgcattttttacaaaagt

SEQ ID NO: 301087 - DNA, 75 bp, synthetic construct
  source 1..75: mol_type = other DNA
gcgcagcaatacgccgacgataaagaaaaagtggcgctgttaaaggcgctttggcagtacgcggaagagattgtc

SEQ ID NO: 301088 - DNA, 75 bp, synthetic construct
  source 1..75: mol_type = other DNA
ttttaatgttgcttttgtctggatgtaatgataaagcaaaagactttataggagggtggactcaggaatcaaatg

SEQ ID NO: 301089 - DNA, 75 bp, synthetic construct
  source 1..75: mol_type = other DNA
gtttttgccgctgagcctgcgcttttgtcgcgatctcgacctgctggcgctgggcgatgcacgagcagccacgct

SEQ ID NO: 301090 - DNA, 75 bp, synthetic construct
  source 1..75: mol_type = other DNA
gtagtcccggaggtatctgttccgcttggactggggattattacttccagtatggggatcagttttgatcaactg

SEQ ID NO: 301091 - DNA, 75 bp, synthetic construct
  source 1..75: mol_type = other DNA
cagtatttaacgttgagcagttctgggatggtcgtgcggcaacattgcaggatcaggctggtggaccgccgttga

SEQ ID NO: 301092 - DNA, 75 bp, synthetic construct
  source 1..75: mol_type = other DNA
taacggcaccgtacttccatcgcggtgatgtgccgacgctggacggggcggtgaaactgatgctgcgctatcagg

SEQ ID NO: 301093 - DNA, 75 bp, synthetic construct
  source 1..75: mol_type = other DNA
tgatattgcttatgaaggttccggcagtggtgactggcgcactgacggtttcatcgtgggtgtcggttataaatt

SEQ ID NO: 301094 - DNA, 75 bp, synthetic construct
  source 1..75: mol_type = other DNA
tgggacgaaattattgctaagctggaaaaagatccgcagcttaaagcgcagttcctcgaagtctatccgcaaggt

SEQ ID NO: 301095 - DNA, 75 bp, synthetic construct
  source 1..75: mol_type = other DNA
ggcgtcggtggtgcggtcgggccgattaatgcgccgacggtgtttaactcggtgtttaacgttgagcaattctgg

SEQ ID NO: 301096 - DNA, 75 bp, synthetic construct
  source 1..75: mol_type = other DNA
cgtcgatggcagaaaaacctcgattggcgttggtggcgcagttggccctattaatgcaccgacagtgtttaactc

SEQ ID NO: 301097 - DNA, 75 bp, synthetic construct
  source 1..75: mol_type = other DNA
cgtcacgtactggcgaaacacacaccgtggcgtggcaggctccggcggtggcgattacccgcacggcaacgcagg

SEQ ID NO: 301098 - DNA, 75 bp, synthetic construct
  source 1..75: mol_type = other DNA
tgttgctgcctaacactcgtcgcggaaaattactggcggcgaaactgggttatcgccttaaagcggcggtgtcta

SEQ ID NO: 301099 - DNA, 75 bp, synthetic construct
  source 1..75: mol_type = other DNA
cccggcagacagaacatggcgaccacagccgttgctgaaaccgctggtggacggcccgcagagcgctgtcgtgac

SEQ ID NO: 301100 - DNA, 75 bp, synthetic construct
  source 1..75: mol_type = other DNA
ggcgaagaacgcattgccacgccgtatgcggtactgaccatcagcagcggcacgttcgatgcggctcagccagac

SEQ ID NO: 301101 - DNA, 75 bp, synthetic construct
  source 1..75: mol_type = other DNA
acaaagcccgtctggtggtcagcgtcggtcgcggtattggcagcaaagagaacattgcgctggcagaacagcttt

SEQ ID NO: 301102 - DNA, 75 bp, synthetic construct
  source 1..75: mol_type = other DNA
tggcggaaaacgaaaaatggatggagcacgaacgctatgtcggtatctccaacctgatgctgaaacctgaactgt

SEQ ID NO: 301103 - DNA, 75 bp, synthetic construct
  source 1..75: mol_type = other DNA
ataaatgattcacaaggtactaatatacttattgtaagaaacgatgttttaaataaattacttgaacaatatcaa

SEQ ID NO: 301104 - DNA, 75 bp, synthetic construct
  source 1..75: mol_type = other DNA
gctggcgtgcagtttaacccgaccgaatccgtggccattgatattgcttatgaaggccccggcagtggcgactgg

SEQ ID NO: 301105 - DNA, 75 bp, synthetic construct
  source 1..75: mol_type = other DNA
cgatgtgctgaccggaagtgatggcggtcgccacagcaacacgtctctggcgtgggggggctggcgtgcagttta

SEQ ID NO: 301106 - DNA, 75 bp, synthetic construct
  source 1..75: mol_type = other DNA
gtaactgacaacaaggggaaaacgcacgatgtgctgaccggaagtgatgacgatcgccacagcaacacgtctctg

SEQ ID NO: 301107 - DNA, 75 bp, synthetic construct
  source 1..75: mol_type = other DNA
tgcagtttaacccgaccgaatccgtggccattgatattgcttatgaaggctcaggcagtggtgactggcgcactg

SEQ ID NO: 301108 - DNA, 75 bp, synthetic construct
  source 1..75: mol_type = other DNA
taaccgctggttcagcgtaatggcggggccgtctgtgcgcgtgaatgaatggttcagcgcgtatgcgatggcggg

SEQ ID NO: 301109 - DNA, 75 bp, synthetic construct
  source 1..75: mol_type = other DNA
atccggtgcgcctgcatgggcgtctgaacatcagtccacactgagcgcggggtatcttcatgcccgtacgaacgc

SEQ ID NO: 301110 - DNA, 75 bp, synthetic construct
  source 1..75: mol_type = other DNA
acacactggggctggtgacgtcattcagctatgcaggagacaagaatcgccagcttacccgttacagcgatatcc

SEQ ID NO: 301111 - DNA, 75 bp, synthetic construct
  source 1..75: mol_type = other DNA
attgcttatgaaggttccggcagtggcgactggcgcactgacggtttcatcgtgggtgtcggttataaattctga

SEQ ID NO: 301112 - DNA, 75 bp, synthetic construct
  source 1..75: mol_type = other DNA
cccgaccgaatccgtggccattgaccttgcttatgaaggttccggcagtggcggctggcgcactgacgggttcat

SEQ ID NO: 301113 - DNA, 75 bp, synthetic construct
  source 1..75: mol_type = other DNA
ttacggacacgctggggctggtgacgtcattcagctatgcaggagacaagaatcgccagattacccgttacagcg

SEQ ID NO: 301114 - DNA, 75 bp, synthetic construct
  source 1..75: mol_type = other DNA
tgtccgcagccatttgtctggccgtatccggtgcgcctgcatgggctctgacacagccacctgagcgcgggtatc

SEQ ID NO: 301115 - DNA, 75 bp, synthetic construct
  source 1..75: mol_type = other DNA
tctctggcgtggggagctggcgtgcagtttaacccgaccgaatccgtggccattgatgtcgcttatgaaggctcc

SEQ ID NO: 301116 - DNA, 75 bp, synthetic construct
  source 1..75: mol_type = other DNA
atcatctcaatcaaatgcgccccgaacgactgccgaacaatttctgggtgccacggcgattgttttcaccacaag

SEQ ID NO: 301117 - DNA, 75 bp, synthetic construct
  source 1..75: mol_type = other DNA
cttgtgctgataataacaactggtatatcggtaaaggtggtgctgataatggattagcgttctatagctatgcta

SEQ ID NO: 301118 - DNA, 75 bp, synthetic construct
  source 1..75: mol_type = other DNA
attcagctatgattttgcggacggtggattgtatttaggtggtactgcaaccgctcgttgtttgcatctcggaat

SEQ ID NO: 301119 - DNA, 75 bp, synthetic construct
  source 1..75: mol_type = other DNA
ctggcggtaaaggccagaaaattgtaatgaatagcgaagttgcattatctgaaaatgctcgtttggctgttaaag

SEQ ID NO: 301120 - DNA, 75 bp, synthetic construct
  source 1..75: mol_type = other DNA
ctttccacagatcacggtgattctttcggtgggtggaatagccgtagaccatttagttatgattttgctggtggt

SEQ ID NO: 301121 - DNA, 75 bp, synthetic construct
  source 1..75: mol_type = other DNA
attcttttggtagttggaataatcgcagaccattcagctataattttgatgatggtggactatatttaggtggta

SEQ ID NO: 301122 - DNA, 75 bp, synthetic construct
  source 1..75: mol_type = other DNA
tcttcaaaagttggcaatcttgataatccagacgatgttctgacaatttctaactcggcagtgaacgcgctgtta

SEQ ID NO: 301123 - DNA, 75 bp, synthetic construct
  source 1..75: mol_type = other DNA
cgaggaccaaacgaagcaagccattttaattttatggattatcgcactggtcaagatgttcgtaatggctggttt

SEQ ID NO: 301124 - DNA, 75 bp, synthetic construct
  source 1..75: mol_type = other DNA
tggaacgtaggacaaactggacaatgtaatattattgaacttgttataaggactagcaacggttcgcctaaagga

SEQ ID NO: 301125 - DNA, 75 bp, synthetic construct
  source 1..75: mol_type = other DNA
tttatttggtggaacgataacggccaaaactcgataaacttgatcgaaaacggtgaattgcatattactggcggt

SEQ ID NO: 301126 - DNA, 75 bp, synthetic construct
  source 1..75: mol_type = other DNA
aaagccgtattgatgcagccgacggatcgagtgatggcaagtacatcaaaaaacacgtaaacacttatactgatg

SEQ ID NO: 301127 - DNA, 75 bp, synthetic construct
  source 1..75: mol_type = other DNA
ttcattttgcataaacaaacagaaaaaagaagaaaacagaaatttttcagattaaaaaatatatcatgggatggc

SEQ ID NO: 301128 - DNA, 75 bp, synthetic construct
  source 1..75: mol_type = other DNA
tgattttactgctggtgctgctgtatattgtaacgacgtttatattcgttctgaccgtcgtctgaaaattaatgt

SEQ ID NO: 301129 - DNA, 75 bp, synthetic construct
  source 1..75: mol_type = other DNA
tgattaaggcagaaactgaccgcactatcgcagcaaataaagtctatgcggaaaatcagttaactgacacctaca

SEQ ID NO: 301130 - DNA, 75 bp, synthetic construct
  source 1..75: mol_type = other DNA
gcggggccgtctgtgcgcgtgaatgaatggttcagcgtgtatgcgatggcgggtgtggcttacagccgtgtgtcg

SEQ ID NO: 301131 - DNA, 75 bp, synthetic construct
  source 1..75: mol_type = other DNA
aaacacgtcagttcgccaggatgttgggacttgaaccgaagaacacggcagtgcggagtccggagagtaacggaa

SEQ ID NO: 301132 - DNA, 75 bp, synthetic construct
  source 1..75: mol_type = other DNA
atgtcaaacaacattcgtatcgaagaagatctgttgggtaccagggaagttccagctgatgcctactatggtgtt

SEQ ID NO: 301133 - DNA, 75 bp, synthetic construct
  source 1..75: mol_type = other DNA
gaatttatccatcacggtggcaaattaatcgactgtcaggtgcttaatgatcacacagcttcgcttggcgcctgc

SEQ ID NO: 301134 - DNA, 75 bp, synthetic construct
  source 1..75: mol_type = other DNA
ggaaaacgcacgatgtgctgaccggaagtgatgacggtcgccacagcaacacgtctctggcgtggggggctggcg

SEQ ID NO: 301135 - DNA, 75 bp, synthetic construct
  source 1..75: mol_type = other DNA
gcgtaaccgctggttcagcgtgatggcggggccatctgtgcgcgtgaatgaatggttcagcgcgtatgcgatcgc

SEQ ID NO: 301136 - DNA, 75 bp, synthetic construct
  source 1..75: mol_type = other DNA
cgctggggatattgcattaagtccaaaaggcgtcgaaatggttcatgttaataacgctcgattatatgttcatgg

SEQ ID NO: 301137 - DNA, 75 bp, synthetic construct
  source 1..75: mol_type = other DNA
gattcgtctgtatatttgttgggtacgtgtgctgacaacaacaactggtatattggtaaaggcggtggtgataat

SEQ ID NO: 301138 - DNA, 75 bp, synthetic construct
  source 1..75: mol_type = other DNA
aatacaggacgcaataacgttttgagtatgcgagattccaaaggtttcttggctgaatttgaacgcgtggggggt

SEQ ID NO: 301139 - DNA, 75 bp, synthetic construct
  source 1..75: mol_type = other DNA
actttctccggggattatcttcgcgtaactgacaacaagaggaaaacgcacgacgtgctgaccggaagtgatgac

SEQ ID NO: 301140 - DNA, 75 bp, synthetic construct
  source 1..75: mol_type = other DNA
gtgaccattgatattgcttatgaaggctccggcagtggcgactggcgcactgacggtttcatcgtgggtgtcggt

SEQ ID NO: 301141 - DNA, 75 bp, synthetic construct
  source 1..75: mol_type = other DNA
catctcacaacgaaagtgatgttcaagacaaaggattaaataaatccagtccgacgttcattgattcatttaagt

SEQ ID NO: 301142 - DNA, 75 bp, synthetic construct
  source 1..75: mol_type = other DNA
gtcggcggattaatcttagtattgagtatgacgaaagattatggcttgaaagcgactgcgaaataatcgtaatag

SEQ ID NO: 301143 - DNA, 75 bp, synthetic construct
  source 1..75: mol_type = other DNA
cgtcaactatctgcaacagaacgacagcctgtacgacctggcggtcaacgacagcaatgcctcctacacgcaggc

SEQ ID NO: 301144 - DNA, 75 bp, synthetic construct
  source 1..75: mol_type = other DNA
ccgtcaggacgtgggaggcgctggccgtttgaacatatttgcgcattgctgcgtgagctgttaagcattctcctg

SEQ ID NO: 301145 - DNA, 75 bp, synthetic construct
  source 1..75: mol_type = other DNA
taagaataggcataagtgaatcagccaaacttatctttcaaaaagttctttcaaaaaattggatgaaagaatata

SEQ ID NO: 301146 - DNA, 75 bp, synthetic construct
  source 1..75: mol_type = other DNA
tggtgggctattcgatgctccaggtcttggcccggtattgcaggaatatgtcaaaaacctggtgtctggtgggga

SEQ ID NO: 301147 - DNA, 75 bp, synthetic construct
  source 1..75: mol_type = other DNA
ggtgaagtcgggatctatttagatggtagcccagacgattgtatatcacttcagccacttaaaaacatggggcag

SEQ ID NO: 301148 - DNA, 75 bp, synthetic construct
  source 1..75: mol_type = other DNA
gtgcgcgtggcgttgggacgggcgattacccagcagtggtttcctggcaaagatgaagtccatgttattggcctc

SEQ ID NO: 301149 - DNA, 75 bp, synthetic construct
  source 1..75: mol_type = other DNA
tatggacgtatacaatgccaaagtttaattagttttgagaaaataattaatttaaatagtgccgcacctatggta

SEQ ID NO: 301150 - DNA, 75 bp, synthetic construct
  source 1..75: mol_type = other DNA
gttttgtattgacgcatcttgaagggctgagaaaaaaatgtgttataaacaaagagagagtatatgcagaagttg

SEQ ID NO: 301151 - DNA, 75 bp, synthetic construct
  source 1..75: mol_type = other DNA
atggtgtaccaggcttagccacgataaaggggatgtcaggtggaggtgtatatcacatagttggtagaaatacat

SEQ ID NO: 301152 - DNA, 75 bp, synthetic construct
  source 1..75: mol_type = other DNA
ggggcgaatccggttcgtttgaaaaaatttccagtgcgctgcatatcgccactattgatacgcttcccaagaatt

SEQ ID NO: 301153 - DNA, 75 bp, synthetic construct
  source 1..75: mol_type = other DNA
tcctgcgccgcagcttgccgcagttagtggtcctgtcgaatctggaactgtctgataaccgacatatccgcatga

SEQ ID NO: 301154 - DNA, 75 bp, synthetic construct
  source 1..75: mol_type = other DNA
ttatgataacaagcaagattttactgagctttcattatttgaatatacaaaacaatcacttgcgttgtgcggagc

SEQ ID NO: 301155 - DNA, 75 bp, synthetic construct
  source 1..75: mol_type = other DNA
ccgcccgcaggcaaaatggctgaaatgcgaactgggcgaaccgttgtttcgcatcagcaaaatcgcctttgatca

SEQ ID NO: 301156 - DNA, 75 bp, synthetic construct
  source 1..75: mol_type = other DNA
caggcaccacacgtcatgcatggattcggattgctcattttcatactatctgttgtttttttaagcgatcagata

SEQ ID NO: 301157 - DNA, 75 bp, synthetic construct
  source 1..75: mol_type = other DNA
ataacgttaaaagaagttattgatgggtgccgagacagaatattaagtccatatctaatccatagtcggcaccag

SEQ ID NO: 301158 - DNA, 75 bp, synthetic construct
  source 1..75: mol_type = other DNA
agtgggcttattgttgagggctggacaacgtctatattagttgtaacttcactatttataattcagttcgtcatg

SEQ ID NO: 301159 - DNA, 75 bp, synthetic construct
  source 1..75: mol_type = other DNA
ttcggtggagacaaggacgataaaaagaaaatcgaatccatcctccaggaaacctgggaaagcgctgacgactgg

SEQ ID NO: 301160 - DNA, 75 bp, synthetic construct
  source 1..75: mol_type = other DNA
ttttggcgtctcacaaggcaaggcgacgaaagagaaagtgatcgagcaggaacgggtcagcgccgcgccgttttg

SEQ ID NO: 301161 - DNA, 75 bp, synthetic construct
  source 1..75: mol_type = other DNA
aacattaatggcgtcaggttcgatggttcggctgacattacgttgactcctaaagatctggacgtttacagcaaa

SEQ ID NO: 301162 - DNA, 75 bp, synthetic construct
  source 1..75: mol_type = other DNA
gccacaggatgattcccagtatccagggatggatacaaagacagcaagtgattacctgccacagacaaattggcc

SEQ ID NO: 301163 - DNA, 75 bp, synthetic construct
  source 1..75: mol_type = other DNA
gtccggcctgtattacaaccgccaccgctattatgacccgctgcaggggaggtatatcactcaggatccgattgg

SEQ ID NO: 301164 - DNA, 75 bp, synthetic construct
  source 1..75: mol_type = other DNA
agcacgggatctggctggggtaattccaccagcaggaaaaactccgccaacatttcatgaacaacgctctctatc

SEQ ID NO: 301165 - DNA, 75 bp, synthetic construct
  source 1..75: mol_type = other DNA
attttacgttgaagccagagcattccctatcaagatatttgctgaggagggcttgaacgtaattgttccaactac

SEQ ID NO: 301166 - DNA, 75 bp, synthetic construct
  source 1..75: mol_type = other DNA
agaactataaatggggtgtcgtttgacggttctaaaaacattgagctaactccaaggtctataggcacgatcaac

SEQ ID NO: 301167 - DNA, 75 bp, synthetic construct
  source 1..75: mol_type = other DNA
taattttatctacagcttttatatctttagtatacatttttcttcaagaagatataaataatattagtcgtttac

SEQ ID NO: 301168 - DNA, 75 bp, synthetic construct
  source 1..75: mol_type = other DNA
agcaggagagctattgaacattcgtttgcgagatatagatcttgaaaacagaacgatcaaaatagttcgtcgtca

SEQ ID NO: 301169 - DNA, 75 bp, synthetic construct
  source 1..75: mol_type = other DNA
agtatcttcttcacaacaagaaagtggatgttaaaaaaatcaatgacttcataagaacgataaatagcaaaaaac

SEQ ID NO: 301170 - DNA, 75 bp, synthetic construct
  source 1..75: mol_type = other DNA
tattttttaattccgcactaacgactacttgcttggttttttcagtgtatgcgatactattcattaatagacaga

SEQ ID NO: 301171 - DNA, 75 bp, synthetic construct
  source 1..75: mol_type = other DNA
tggaaaaaaggggttctctatcttttcgcggaatcctacgattatcggactcgtcgtggcgatattatcgcttat

SEQ ID NO: 301172 - DNA, 75 bp, synthetic construct
  source 1..75: mol_type = other DNA
tacagaaacaaaaaagctcactgctggcgacgctggattacctcgaacagttacgcaggaaagaacccaatacag

SEQ ID NO: 301173 - DNA, 75 bp, synthetic construct
  source 1..75: mol_type = other DNA
ttcctaaaaatggtggcgttaaacaattttctgtgtggttagataaacaatcgaagcatgagttcgaatattatc

SEQ ID NO: 301174 - DNA, 75 bp, synthetic construct
  source 1..75: mol_type = other DNA
ccatcgatatcagcatgggtagacagaaagatgagagagccggcgcaagccggttttttatttgaattcaccgac

SEQ ID NO: 301175 - DNA, 75 bp, synthetic construct
  source 1..75: mol_type = other DNA
tccttacaacaacccttcttctggactggtgaattctcatggggttggctgaacaatgtatccctgtatggtggt

SEQ ID NO: 301176 - DNA, 75 bp, synthetic construct
  source 1..75: mol_type = other DNA
gcgccgggcggttgcccgttcagaacggttttctgccaccgtgcgcggctggttccgcgacgatggccggttatg

SEQ ID NO: 301177 - DNA, 75 bp, synthetic construct
  source 1..75: mol_type = other DNA
tatgtaaggataatagtggcagatatttctcaacagcacctaaccgaggagaaagaaaaggatcatatccattca

SEQ ID NO: 301178 - DNA, 75 bp, synthetic construct
  source 1..75: mol_type = other DNA
gatcgtttgccatttatatatcatcgctcataatttctataagcctatcttacttgatatataacgtaatagaaa

SEQ ID NO: 301179 - DNA, 75 bp, synthetic construct
  source 1..75: mol_type = other DNA
agtatcgctcccgtaatgcattaatccgtcgccacattgagaaaatggatgccagtttgcacgtcggaacgaagg

SEQ ID NO: 301180 - DNA, 75 bp, synthetic construct
  source 1..75: mol_type = other DNA
atgaaaaaatggaccataattttcgcgagcctaatgctgctcgttctgagtgttgtcggcgcatctaagagttat

SEQ ID NO: 301181 - DNA, 75 bp, synthetic construct
  source 1..75: mol_type = other DNA
gttgaataacaaaactaacttgtctgaagatgactggcagagcctgatgatacccttcatcacattactttttcc

SEQ ID NO: 301182 - DNA, 75 bp, synthetic construct
  source 1..75: mol_type = other DNA
aaggtgccggtacggttggccgagcgtcaatctttctggatgatgaagaaacctatataactgattcattattct

SEQ ID NO: 301183 - DNA, 75 bp, synthetic construct
  source 1..75: mol_type = other DNA
tggatcgggaatccgcgtatgagatgctgcaaaaaggcgtgcaggcgaataccgggcagcaaaataatcctcctg

SEQ ID NO: 301184 - DNA, 75 bp, synthetic construct
  source 1..75: mol_type = other DNA
atctgtttgctgggaaaccacagcaggaggttgtgttggctgcgctggaagatacctgggagactctttccaaac

SEQ ID NO: 301185 - DNA, 75 bp, synthetic construct
  source 1..75: mol_type = other DNA
gcgagaaaaaagatcgatacatagatataggcttggttgattctaatggtaatttagatattatcgaagttaaaa

SEQ ID NO: 301186 - DNA, 75 bp, synthetic construct
  source 1..75: mol_type = other DNA
cctccgtcaccaaatcaagattttgatagttatttttatgagtttcagtttggaacttttagtggtgattatatt

SEQ ID NO: 301187 - DNA, 75 bp, synthetic construct
  source 1..75: mol_type = other DNA
tttgctgtctactgggtaattgcggttatttctgttgtcgcattatttttaaccgcaaaggttaaagacgtttga

SEQ ID NO: 301188 - DNA, 75 bp, synthetic construct
  source 1..75: mol_type = other DNA
gagcagtgtatgcatcactgacagaagaagagcgccaactggaaaagttagctcttaccattccgggttttgaaa

SEQ ID NO: 301189 - DNA, 75 bp, synthetic construct
  source 1..75: mol_type = other DNA
gctcctataaggtagatatcaggccaaacgggcggtatggacgcagaattcagcggctttttaaaaagaaagcag

SEQ ID NO: 301190 - DNA, 75 bp, synthetic construct
  source 1..75: mol_type = other DNA
tacggtgccgataacggtatccggctggaggcggtgtggctgacacacgacccggcctacccggatgaacagccg

SEQ ID NO: 301191 - DNA, 75 bp, synthetic construct
  source 1..75: mol_type = other DNA
atgatctggataatgacgatggctcgccgtatgaacggtgtttacgcggcatttatgctggtcgcttttatgatg

SEQ ID NO: 301192 - DNA, 75 bp, synthetic construct
  source 1..75: mol_type = other DNA
tgcctgcatcatgtgtgactgagtattggtgtaaaatcccccgccagcagattatacctgctggtttttttattc

SEQ ID NO: 301193 - DNA, 75 bp, synthetic construct
  source 1..75: mol_type = other DNA
ttttaccgggatatcgataccatccgtgccctgaagaaacagcatgccgtctgcggatacagccagaccagggat

SEQ ID NO: 301194 - DNA, 75 bp, synthetic construct
  source 1..75: mol_type = other DNA
gtcaacctgagtctgacggcaacctcagaccccagctatccccaggcgattaagacgtcacgtcctggcgtgggc

SEQ ID NO: 301195 - DNA, 75 bp, synthetic construct
  source 1..75: mol_type = other DNA
gggaccagctgaccgggtattgcagcgcacagggggagctgtgggaataccgccacgacgccagcggcagacgaa

SEQ ID NO: 301196 - DNA, 75 bp, synthetic construct
  source 1..75: mol_type = other DNA
gtgcgactggaagcgccggggcgtgattatcgacgttatcagatggaagagtacggcggtgtggacgttcgtctg

SEQ ID NO: 301197 - DNA, 75 bp, synthetic construct
  source 1..75: mol_type = other DNA
gctgtatctgagaaaagtacagatgccattaacggtagtcagttatatgcgatagcgaagacactgaaagatgac

SEQ ID NO: 301198 - DNA, 75 bp, synthetic construct
  source 1..75: mol_type = other DNA
tgacacttaaggatggtgatgtggttatgctgggaggagtcagtgaacataaggtgactgatgcaaaaacgggac

SEQ ID NO: 301199 - DNA, 75 bp, synthetic construct
  source 1..75: mol_type = other DNA
cggtcaggcagtgccgccagcgataccgcgcggctgttggtctggtcgaggctctgccgaaggaagagaagaccc

SEQ ID NO: 301200 - DNA, 75 bp, synthetic construct
  source 1..75: mol_type = other DNA
gtgtttaatactgagcagaacgtattttattttcacgctgatggttcggttatgactttccgcgaatggaaaatc

SEQ ID NO: 301201 - DNA, 75 bp, synthetic construct
  source 1..75: mol_type = other DNA
tacaacatgcctttctttcggctcaacgctgcgtatttacggctacgctgctacgcgaaaatgagcgcagtttaa

SEQ ID NO: 301202 - DNA, 75 bp, synthetic construct
  source 1..75: mol_type = other DNA
atctcaagtaatccaaatatacttgcaacaatgttattaccaattatatttgaatattgctatatgctctataat

SEQ ID NO: 301203 - DNA, 75 bp, synthetic construct
  source 1..75: mol_type = other DNA
tatacattctactaatagtgattactattcaggtttttatcatacagatgtattaattcccggagaactggctta

SEQ ID NO: 301204 - DNA, 75 bp, synthetic construct
  source 1..75: mol_type = other DNA
cgaagacgatgcacctgagtaacgaagaacgccacgcaaacgctgagtggtttgccactacgccgggcgcaattc

SEQ ID NO: 301205 - DNA, 75 bp, synthetic construct
  source 1..75: mol_type = other DNA
aacgacattcgtcagatgattcaggataaccgtctgcggctgatgcaactggcggggcccggagcgcgctttacc

SEQ ID NO: 301206 - DNA, 75 bp, synthetic construct
  source 1..75: mol_type = other DNA
catgctgattggcgggcgctatttactgcgtccggtattccgttttattgcagcttctggtgtgcgggaagtgtt

SEQ ID NO: 301207 - DNA, 75 bp, synthetic construct
  source 1..75: mol_type = other DNA
agggggcgaatactggcgttgggttggtcagggtgtgccggacattctctcttttggtgacgaattatcgccgca

SEQ ID NO: 301208 - DNA, 75 bp, synthetic construct
  source 1..75: mol_type = other DNA
gtgctcggggtaacgcaacaaccggaatactggcagcatatgctcgacagttacgcggagcaggcggacaacatg

SEQ ID NO: 301209 - DNA, 75 bp, synthetic construct
  source 1..75: mol_type = other DNA
ggtgaaaatcgaacctccgcccaacagcagcaactcaccagttggcaagaacaaggccatgatattttcccactc

SEQ ID NO: 301210 - DNA, 75 bp, synthetic construct
  source 1..75: mol_type = other DNA
cgctattttaagtggatttaccagtgtcaatgcttttgctaagcataacgtgcttaatattgaaaccaattccgt

SEQ ID NO: 301211 - DNA, 75 bp, synthetic construct
  source 1..75: mol_type = other DNA
ctaacgattgggtttgtgaaagtgttctgatcgcggtgaccgggctcaagcccggtaccatcctccgggccagaa

SEQ ID NO: 301212 - DNA, 75 bp, synthetic construct
  source 1..75: mol_type = other DNA
gtctccgccagtgacggcgcggcgtatcgcgtcaccaccaccaaagagatcctcattgaacgcggtctggcgcat

SEQ ID NO: 301213 - DNA, 75 bp, synthetic construct
  source 1..75: mol_type = other DNA
atgctcggcggtggcgagaacgcgctgatgttgcccgctcagtctcgcctggcgttcgcttgccgatcatcaaag

SEQ ID NO: 301214 - DNA, 75 bp, synthetic construct
  source 1..75: mol_type = other DNA
attattgtcaggaataaatgcactaaatatatatatcaataatagttctttaagctataaagttggtttttcgtt

SEQ ID NO: 301215 - DNA, 75 bp, synthetic construct
  source 1..75: mol_type = other DNA
atgactcgcggtgtgaccgatgacagcggtaccttgcagttacaacatatatcgccagaacgttcatacattctg

SEQ ID NO: 301216 - DNA, 75 bp, synthetic construct
  source 1..75: mol_type = other DNA
ggttatcgggcaacaacggtggtatttgtctccaataccgtggcgttgagtaaagtgtcgggtaacgaacttctg

SEQ ID NO: 301217 - DNA, 75 bp, synthetic construct
  source 1..75: mol_type = other DNA
catgggcatggtacgccgactggcaggccagccaggcgctcggcgtaacgcaacaaccggaatactggcagcata

SEQ ID NO: 301218 - DNA, 75 bp, synthetic construct
  source 1..75: mol_type = other DNA
gagttccagccttacattgaagcgaattggatcaacaacagcaaagtctacgccgtgaagatgaatggtcaaacc

SEQ ID NO: 301219 - DNA, 75 bp, synthetic construct
  source 1..75: mol_type = other DNA
agtagtgaacaacagcggcgagcgttggcagaggagctggctgtgcaggtgggtattcgtccggagtatctcgac

SEQ ID NO: 301220 - DNA, 75 bp, synthetic construct
  source 1..75: mol_type = other DNA
cccgtttattggcattcttgctggcaggctgtatattttcagcatcagcctatacactggtagtcggcaatactg

SEQ ID NO: 301221 - DNA, 75 bp, synthetic construct
  source 1..75: mol_type = other DNA
ataagtaaacaagagcagcatattcaggaagttaatacagtacttgaagaaaaagagcatctcatccaacgcctg

SEQ ID NO: 301222 - DNA, 75 bp, synthetic construct
  source 1..75: mol_type = other DNA
attaagaggagtcctttttagaggcgggagcctgcgacatgttgtatttaaagaatgtataataaacgcttgtga

SEQ ID NO: 301223 - DNA, 75 bp, synthetic construct
  source 1..75: mol_type = other DNA
tgatggttttccacaggagggccataaaacgtgcgtcactgatcctgcggcgtacggctttcatcagcagtcgat

SEQ ID NO: 301224 - DNA, 75 bp, synthetic construct
  source 1..75: mol_type = other DNA
tctccggcaattcgactgacacgacaaatacacgagcctttctgcaacaggccgttgaccattacccacgactcg

SEQ ID NO: 301225 - DNA, 75 bp, synthetic construct
  source 1..75: mol_type = other DNA
tgtgatagcaacgcagcgcttatgaacttctattcaatattgaagagcaatactaaatcgttgctagatgtcgct

SEQ ID NO: 301226 - DNA, 75 bp, synthetic construct
  source 1..75: mol_type = other DNA
cacgattaaagatattcgattttatattcctagtgaaagtgataagttaaatcgctggaaaggggtattgtctcc

SEQ ID NO: 301227 - DNA, 75 bp, synthetic construct
  source 1..75: mol_type = other DNA
aacaaaaacgtgaagagatgaacctttctcaatccaagctggccgctttggttggcatgagtcagcaatctcttc

SEQ ID NO: 301228 - DNA, 75 bp, synthetic construct
  source 1..75: mol_type = other DNA
tggctgctctgttgggagccgttaccccgttctgtagttgctcgacaatacccatgttacgtggattgttgtcag

SEQ ID NO: 301229 - DNA, 75 bp, synthetic construct
  source 1..75: mol_type = other DNA
gccagaaaagggagaggctatctcctggctgctctgttgggagccgttaccccgttctgtagttgctcgacaata

SEQ ID NO: 301230 - DNA, 75 bp, synthetic construct
  source 1..75: mol_type = other DNA
ttatcgttgatttgaaaactatgttcaataataagagcgcaagcttgtccaatagactcatggcggctgaccggg

SEQ ID NO: 301231 - DNA, 75 bp, synthetic construct
  source 1..75: mol_type = other DNA
atgctttcagctacaataatcatgatgttgcgaatcggaactttataaataaaaatttcaataaaacacacagtt

SEQ ID NO: 301232 - DNA, 75 bp, synthetic construct
  source 1..75: mol_type = other DNA
tgcattcacctatgccctgcaatttgaatccgatgctggcgaggggctgaccgttatcgttgtgccgacgaacac

SEQ ID NO: 301233 - DNA, 75 bp, synthetic construct
  source 1..75: mol_type = other DNA
ggcatgagcaagctggaggcgatgcgccacgctgactttgacaccctcggggatagcccggagtttcaccagcta

SEQ ID NO: 301234 - DNA, 75 bp, synthetic construct
  source 1..75: mol_type = other DNA
acgatgccgcattgaaaccgcgtgagcacgccatcccggaagcgaccacggggcaaaacgcctttcttaaagcct

SEQ ID NO: 301235 - DNA, 75 bp, synthetic construct
  source 1..75: mol_type = other DNA
aaaggtgggatcagtcagggtgaactgacaggtggcggaaacctgaatgttacagggggaacgctggctatcgag

SEQ ID NO: 301236 - DNA, 75 bp, synthetic construct
  source 1..75: mol_type = other DNA
cgttgatgactgggagtttcgctctgctttccccgcgatgaagcacaccttgcaaaatgccttccccgctgcgca

SEQ ID NO: 301237 - DNA, 75 bp, synthetic construct
  source 1..75: mol_type = other DNA
ggtgccgggtagtcaggtgcttgccgcgctgatggccgctggtgcggacagatttatcattgacgaggtgcacac

SEQ ID NO: 301238 - DNA, 75 bp, synthetic construct
  source 1..75: mol_type = other DNA
ctgcgtgaatttcctcaagcagaacgccgccgactcgcctgatacaacctttaacaatgtattcccggaggatga

SEQ ID NO: 301239 - DNA, 75 bp, synthetic construct
  source 1..75: mol_type = other DNA
cgttgcacccgtggcggattaggacacatttcccaggctgtagataattacaccttcaaaacacgcctggactga

SEQ ID NO: 301240 - DNA, 75 bp, synthetic construct
  source 1..75: mol_type = other DNA
attcattagcctctcacgatattacctttgttggtattgtacagaccgctaaagcgtccggggtgatgctgccaa

SEQ ID NO: 301241 - DNA, 75 bp, synthetic construct
  source 1..75: mol_type = other DNA
aattaataactgatatggatggtactggacagtattcgaaaagcaatttaattattgagacatatccattaatta

SEQ ID NO: 301242 - DNA, 75 bp, synthetic construct
  source 1..75: mol_type = other DNA
gatgttctatttcacagtacaagaagaacctgcgatatcagaaaatgtggatggagtaccgcatcccggtgcaaa

SEQ ID NO: 301243 - DNA, 75 bp, synthetic construct
  source 1..75: mol_type = other DNA
gggaacggatgttgtagggacatggtgtaaaaataatcgccgtggcttcgtattgtccgggattattggggcgat

SEQ ID NO: 301244 - DNA, 75 bp, synthetic construct
  source 1..75: mol_type = other DNA
accgcaatacacaaagccaggtttactccgttgataacctcaaccacttcgccgatgtgctcaatgatattgatg

SEQ ID NO: 301245 - DNA, 75 bp, synthetic construct
  source 1..75: mol_type = other DNA
ccgtcgccctgcgtattccgtgcggcgatcgccataatcaccgcgtggaatatcgcgtggcgggtgccgatgcca

SEQ ID NO: 301246 - DNA, 75 bp, synthetic construct
  source 1..75: mol_type = other DNA
ggcttccgtggggaaattgatacgctctataaaatggaaaaaagagttcagtacgacattgaatacatcaagaaa

SEQ ID NO: 301247 - DNA, 75 bp, synthetic construct
  source 1..75: mol_type = other DNA
cttccgctgccgatcctgagtttattggtcaaatgcttctgaccatggtcgatgaagatggcgctccctttgacg

SEQ ID NO: 301248 - DNA, 75 bp, synthetic construct
  source 1..75: mol_type = other DNA
tagaagaagcaggtctgggtcaggaaatgggcgagccggatcgtacctgtgttcctgttctcggttccttaaccc

SEQ ID NO: 301249 - DNA, 75 bp, synthetic construct
  source 1..75: mol_type = other DNA
gcttccagccgggcatgtatgtgccgacgcaggcatcgtggggtcataacaaccgtaccgttgccctgcgtattc

SEQ ID NO: 301250 - DNA, 75 bp, synthetic construct
  source 1..75: mol_type = other DNA
ttattgaacataaattctttgcctccatgattaagaaatatggggatgatgtaatcagcgaaatttcaaaatatg

SEQ ID NO: 301251 - DNA, 75 bp, synthetic construct
  source 1..75: mol_type = other DNA
aaggtctttttcttagcgaagaagaggctaaaaggtatattgttactattccacgcagatataaaatttatccta

SEQ ID NO: 301252 - DNA, 75 bp, synthetic construct
  source 1..75: mol_type = other DNA
cactgcgaccatcgcggcctgccgctggcgcttatcagcacggaagggacaacagcgtggtacgcagaatacgat

SEQ ID NO: 301253 - DNA, 75 bp, synthetic construct
  source 1..75: mol_type = other DNA
ttattctgaatattactctgcaaccaaaaatgataaagagattatcgatcgacgattacagatgcgtacaaatga

SEQ ID NO: 301254 - DNA, 75 bp, synthetic construct
  source 1..75: mol_type = other DNA
taagatccgtgatgatttttttatcgttaagctgtgttctgatagttttcttgctctcaaatgtattacttggta

SEQ ID NO: 301255 - DNA, 75 bp, synthetic construct
  source 1..75: mol_type = other DNA
gtgtatttttttcaaaaaaatgattgttttttttacattaaagatgctttgcaaaatattgctgaaaataaaaag

SEQ ID NO: 301256 - DNA, 75 bp, synthetic construct
  source 1..75: mol_type = other DNA
gctcgggtctcaggggctgcggcacacacccggtgacattattgaaatctgtgataatgactatgccgggaccct

SEQ ID NO: 301257 - DNA, 75 bp, synthetic construct
  source 1..75: mol_type = other DNA
tgtggcactaaccggtagcgacggaagtaaaattctcaatattacgcgtccggatacccacggcacgaaaacggc

SEQ ID NO: 301258 - DNA, 75 bp, synthetic construct
  source 1..75: mol_type = other DNA
aagcgataacggcggttttactgctctccctttcttttcaggtagcggcagtgttaaaaggtggccagtggcaac

SEQ ID NO: 301259 - DNA, 75 bp, synthetic construct
  source 1..75: mol_type = other DNA
agcggcggcggtacggagctgaaaaatcagtacatggggatggtgagcggcgatatcatcggggataacgcgaac

SEQ ID NO: 301260 - DNA, 75 bp, synthetic construct
  source 1..75: mol_type = other DNA
gaacgtctcctcggctcatttctggggacatatggcggatacggtgggggtgaatggaaaaacattacatcgacc

SEQ ID NO: 301261 - DNA, 75 bp, synthetic construct
  source 1..75: mol_type = other DNA
aacgattgaaacggcacagggctggccgcttgataagtcaacagcaccaaagccgtacttctggtcacgaagcgt

SEQ ID NO: 301262 - DNA, 75 bp, synthetic construct
  source 1..75: mol_type = other DNA
cagtctggcatccacggagttggggtatctgacctgccagacaacggcaaatccgaaggtgagcacgattgagtt

SEQ ID NO: 301263 - DNA, 75 bp, synthetic construct
  source 1..75: mol_type = other DNA
atgaatgattcgtctgctttatataaaaagtatgatcttgttggtaaccagcacaatgaagttctggaaatggct

SEQ ID NO: 301264 - DNA, 75 bp, synthetic construct
  source 1..75: mol_type = other DNA
tggaccgtgaggttaccctgccggagacaggtacatcggcggtgaacctgattaacggcagcggtaagccggtga

SEQ ID NO: 301265 - DNA, 75 bp, synthetic construct
  source 1..75: mol_type = other DNA
acttcagggaaccaccggttctgacggtacggcgacgtttatgattaaacaggataatacgcctggatataaaac

SEQ ID NO: 301266 - DNA, 75 bp, synthetic construct
  source 1..75: mol_type = other DNA
cgtcggcagtacgataaccttaacggtgaccaccaaaaactgcgagggtaacccaacaggaaatcttccctttgt

SEQ ID NO: 301267 - DNA, 75 bp, synthetic construct
  source 1..75: mol_type = other DNA
aaatggtgatggcatgtttaatgcttactctggctacgccagcagtagcggcattgaaagggagccagtggcaac

SEQ ID NO: 301268 - DNA, 75 bp, synthetic construct
  source 1..75: mol_type = other DNA
tcgaagcttgcacaagactcagccaaaaagaccaaagaggcaaaagccacgctggatgctggcgatcgcactctt

SEQ ID NO: 301269 - DNA, 75 bp, synthetic construct
  source 1..75: mol_type = other DNA
atgtacctcggtatgaacgccgaaaccggcagagcgttaagcgacgagctgcacattaagcaatccgtaaaagat

SEQ ID NO: 301270 - DNA, 75 bp, synthetic construct
  source 1..75: mol_type = other DNA
agcgtccgcttgctttacagaagctgcttgatgaggggcatttcatggaagatttcctcattgagaaaactaagc

SEQ ID NO: 301271 - DNA, 75 bp, synthetic construct
  source 1..75: mol_type = other DNA
tctgattatgctgccgactctcggcatcggtgatatgaacaatctctataaatggctgttgaatcttaactcggt

SEQ ID NO: 301272 - DNA, 75 bp, synthetic construct
  source 1..75: mol_type = other DNA
agcatctaacagggaaagcactctctgaattaccaattgaaattccaccaatagatgaacaaaaacatatttcaa

SEQ ID NO: 301273 - DNA, 75 bp, synthetic construct
  source 1..75: mol_type = other DNA
tcgcctccatgcgtctgtttgcccggttacatgaaagccagcatccgggccaaggtggagcacccatttcgcatc

SEQ ID NO: 301274 - DNA, 75 bp, synthetic construct
  source 1..75: mol_type = other DNA
cttaacagccctccgcgacaccctgctcccgaaactcatctccggtgagctatccctggaagatcttccggatct

SEQ ID NO: 301275 - DNA, 75 bp, synthetic construct
  source 1..75: mol_type = other DNA
ccggacgtttccccgtgtcgctggaaggcagcgaaacggtgtccgacgccagcggtcatgtggcgttaaatctcc

SEQ ID NO: 301276 - DNA, 75 bp, synthetic construct
  source 1..75: mol_type = other DNA
gggttggatgaagctatcgcccggcgcggaactaaaactgaagatttctctgaggaagacacccgcgatatcaat

SEQ ID NO: 301277 - DNA, 75 bp, synthetic construct
  source 1..75: mol_type = other DNA
cagttttcgcgtggcaaactacatcaagccacatttcgagattggtttagctctcgccaaaaaagagttcaaaac

SEQ ID NO: 301278 - DNA, 75 bp, synthetic construct
  source 1..75: mol_type = other DNA
atgaacaatctctataaatggctgttgaatcttaactcggtagtgatgccgctgcgttatttatgggtatttgtt

SEQ ID NO: 301279 - DNA, 75 bp, synthetic construct
  source 1..75: mol_type = other DNA
gaagttcgctctgcaggccagtgatgatattgagtctcactatagtattgacagcacggtcagagaactaatgaa

SEQ ID NO: 301280 - DNA, 75 bp, synthetic construct
  source 1..75: mol_type = other DNA
tgaatattatttatacagcgtcatctctaggtatcagtggacaagaactacaggctttggctcagatgaggaccc

SEQ ID NO: 301281 - DNA, 75 bp, synthetic construct
  source 1..75: mol_type = other DNA
aacatatgtaacttaacagccctccgcgacaccctgctccccaaactcatctccggcgagctatccctggaagat

SEQ ID NO: 301282 - DNA, 75 bp, synthetic construct
  source 1..75: mol_type = other DNA
ttctggaaattactcagaatgccctaatatcattaccagaattgccagcatcgctggaataccttgacgcctgtg

SEQ ID NO: 301283 - DNA, 75 bp, synthetic construct
  source 1..75: mol_type = other DNA
gcttttgaacatgaagagcatgccaacaccttttccgcgttccttgaccgcctttccgataccatctctgcacgc

SEQ ID NO: 301284 - DNA, 75 bp, synthetic construct
  source 1..75: mol_type = other DNA
gataagtcatatcccggaaagcattcttaatctgaggaatgaatgttcaatacatattagtgataacccattatc

SEQ ID NO: 301285 - DNA, 75 bp, synthetic construct
  source 1..75: mol_type = other DNA
caccatcgctggctgggcagacaaaatcccgggtggcggtgcgctggctaatttcctcggcatggacgttgaggc

SEQ ID NO: 301286 - DNA, 75 bp, synthetic construct
  source 1..75: mol_type = other DNA
tttggcgatataggtattaccgtgcgcgcatggggaaaccagatcattgatattttcgaactggttaaatcctcg

SEQ ID NO: 301287 - DNA, 75 bp, synthetic construct
  source 1..75: mol_type = other DNA
cagtcaggaatgctaagggtggtgtctacgaatcagcgggccttcaccagtatgtgaacggtgtctatgattccc

SEQ ID NO: 301288 - DNA, 75 bp, synthetic construct
  source 1..75: mol_type = other DNA
gcgcacttatcgctggctggttgatgatcaccgcgtgtagtagcgcgcacaatacgacacctcgctatgttcctc

SEQ ID NO: 301289 - DNA, 75 bp, synthetic construct
  source 1..75: mol_type = other DNA
gcacggaccaatcgcagtgtattgctgacggcagcaggaaaacagtttcttgtagatagtcggcaaatcttgtct

SEQ ID NO: 301290 - DNA, 75 bp, synthetic construct
  source 1..75: mol_type = other DNA
ttatcgtgtccttgctcagccataaccgcccattatccgaagtgcttaacccacgttggaaggatattactgaac

SEQ ID NO: 301291 - DNA, 75 bp, synthetic construct
  source 1..75: mol_type = other DNA
cttaatccccccattgcctgcgtcccttatacagcttaatgtcagctataacaaacttattgaactgcctgcttt

SEQ ID NO: 301292 - DNA, 75 bp, synthetic construct
  source 1..75: mol_type = other DNA
tggaggcattgtttcagggagtacctcctcattactttaatttttgtaccaataatgaccaggaaggcggaactc

SEQ ID NO: 301293 - DNA, 75 bp, synthetic construct
  source 1..75: mol_type = other DNA
gggtattatgggagcttatggatatcaggatagcaaaactcataataagtatactagttatagttcacgaggaac

SEQ ID NO: 301294 - DNA, 75 bp, synthetic construct
  source 1..75: mol_type = other DNA
ctctcattttggcggaaaaaaatacctactctggtttcaccaacatcaatgcaggcattctaaaaatggggacag

SEQ ID NO: 301295 - DNA, 75 bp, synthetic construct
  source 1..75: mol_type = other DNA
tcatggagagttcaatctgaaagaaaacgctgaacttactgttagtactattctggcagataatctcagccatca

SEQ ID NO: 301296 - DNA, 75 bp, synthetic construct
  source 1..75: mol_type = other DNA
atcgactattgctggaaagtctgggccatatccctccgtcagaagcagaaaaagcttattatgcttccatcggaa

SEQ ID NO: 301297 - DNA, 75 bp, synthetic construct
  source 1..75: mol_type = other DNA
ggcgcagctggtggcctactcatggccggggaatgattttgagctcaacagcgtcattgagaatatcgccatcag

SEQ ID NO: 301298 - DNA, 75 bp, synthetic construct
  source 1..75: mol_type = other DNA
aagaacgaacaggtctatatatggatgcttggttgcagtacggttggtttaataatacagtcaaaggagatgggt

SEQ ID NO: 301299 - DNA, 75 bp, synthetic construct
  source 1..75: mol_type = other DNA
ttgagcgcgcgctgaacacgctgcaaaaaaatcttaccgttagcggtattcgaaccactaatctggcgacagtct

SEQ ID NO: 301300 - DNA, 75 bp, synthetic construct
  source 1..75: mol_type = other DNA
aggacatcgagctgattagtcgggtggttgatggtgtggttttcgttgtgcaagcgggggctgcgtccgtggaga

SEQ ID NO: 301301 - DNA, 75 bp, synthetic construct
  source 1..75: mol_type = other DNA
ggcacgatgaagccctctgcgaaattcacaggattcaaaacacaaacctatgtgagcactgcggctattcctgtt

SEQ ID NO: 301302 - DNA, 75 bp, synthetic construct
  source 1..75: mol_type = other DNA
tggagcaatttacatattgatgtcaattatcagggattggggctggagatgaaactcttgcgcatagcaggcctg

SEQ ID NO: 301303 - DNA, 75 bp, synthetic construct
  source 1..75: mol_type = other DNA
gtgattgagcttgtacttaaaaaaccgatcatcgcccacaaagaaacactgcatgtgctggaaatacgtgagcct

SEQ ID NO: 301304 - DNA, 75 bp, synthetic construct
  source 1..75: mol_type = other DNA
accacaggtaccccagttttagtgtattacctctcaggtactatcaattctttgggctcatgttctgtcaatgtc

SEQ ID NO: 301305 - DNA, 75 bp, synthetic construct
  source 1..75: mol_type = other DNA
aatgaccaacaggctatgctgagtctcattacatccaataaatgtcgcgtgttagatgaatcaatgacggtagaa

SEQ ID NO: 301306 - DNA, 75 bp, synthetic construct
  source 1..75: mol_type = other DNA
ttcgcaaaaagtatcaggtaaaacagataactatacactgtgcggaagcggcggaatgtgtgagctgacatttga

SEQ ID NO: 301307 - DNA, 75 bp, synthetic construct
  source 1..75: mol_type = other DNA
agattagagagctggaaaggtatcgcaatcttggtgttaaagatggcaccattcctgacaatgcgggggaagttt

SEQ ID NO: 301308 - DNA, 75 bp, synthetic construct
  source 1..75: mol_type = other DNA
cactagctacactttttacatgttttatacgtcatactacaacccgtcgccgcgaagctgttaatcttgaaggaa

SEQ ID NO: 301309 - DNA, 75 bp, synthetic construct
  source 1..75: mol_type = other DNA
ctggagcatctggccgggtcgtttgaactggggctgatgctgcccggtgagcgcatcccctcagccctgcgaacc

SEQ ID NO: 301310 - DNA, 75 bp, synthetic construct
  source 1..75: mol_type = other DNA
tttctcgtgaaattgacggcgaaataatacatttacgtgccaaagatggttacataaacgccacatcaatgtgta

SEQ ID NO: 301311 - DNA, 75 bp, synthetic construct
  source 1..75: mol_type = other DNA
ttcctcatacgcacttttctatgcttaatgaactgacgtttaacttggttgcgccacttgaacaggccggatata

SEQ ID NO: 301312 - DNA, 75 bp, synthetic construct
  source 1..75: mol_type = other DNA
gtcaacgtttaggtggccagggggctagcggtaatagcggtagcttttccctgaaaatattgcagccgttcgttg

SEQ ID NO: 301313 - DNA, 75 bp, synthetic construct
  source 1..75: mol_type = other DNA
agcgatcccaattatccccaggcgattaagacttcacgtcccggtgtcggtgttgtagtcactgacagccagaac

SEQ ID NO: 301314 - DNA, 75 bp, synthetic construct
  source 1..75: mol_type = other DNA
aggcggtttatggctgaaagaggattaatgctttctcctgaaaagacgaaaatcacacatatcgaggaaggattt

SEQ ID NO: 301315 - DNA, 75 bp, synthetic construct
  source 1..75: mol_type = other DNA
ggaccaacacccagattaaggccgcatggacagaaatacagcacgccaccgatatgacgcttgatatgctgaaac

SEQ ID NO: 301316 - DNA, 75 bp, synthetic construct
  source 1..75: mol_type = other DNA
atcctcgcttatggcacttgaagcgtgggctcatcgccgcgtagatgcaggtgaagcatttgaagatgtactaac

SEQ ID NO: 301317 - DNA, 75 bp, synthetic construct
  source 1..75: mol_type = other DNA
ggcactggaacgggcccttcgtatcctccatgctgatgacggatcgcgtgttggggccttttggggcagtcttat

SEQ ID NO: 301318 - DNA, 75 bp, synthetic construct
  source 1..75: mol_type = other DNA
cttgaagtaacacctgcaattaactcaatgccacctaagaaaatgaatacactattaaacaccattgaaactatt

SEQ ID NO: 301319 - DNA, 75 bp, synthetic construct
  source 1..75: mol_type = other DNA
acccaacaaaccgcctacgcccgatccaagtaaattgccggacatagcgaaacaattaagactgccatatcctat

SEQ ID NO: 301320 - DNA, 75 bp, synthetic construct
  source 1..75: mol_type = other DNA
tattcctgatgatgcagacagttatcgagcgaatgaatgtctatccagtcagcacgacaggtgtaccaccagaaa

SEQ ID NO: 301321 - DNA, 75 bp, synthetic construct
  source 1..75: mol_type = other DNA
gcgatgtatttgcggctaattttcgtgttgtagggcataagcctcttggggccagaacggctgaactcgcaatcc

SEQ ID NO: 301322 - DNA, 75 bp, synthetic construct
  source 1..75: mol_type = other DNA
gactgaaggtggtccgactaatccggaatacagattcgctgggcataccgatatttttattacctggatttataa

SEQ ID NO: 301323 - DNA, 75 bp, synthetic construct
  source 1..75: mol_type = other DNA
agtatcacgattagaaccttcgcaagaaaaatattacgcattattcacaccaaaggtgtgtcattgcctgatgat

SEQ ID NO: 301324 - DNA, 75 bp, synthetic construct
  source 1..75: mol_type = other DNA
tgttcccgccggtgctggtgcagatgctcgaccggctggaaagtgaaatcctggctgaccgggtgagtgaggaaa

SEQ ID NO: 301325 - DNA, 75 bp, synthetic construct
  source 1..75: mol_type = other DNA
cagatggacccggtgtacacgccggcgcgaaaaattcacctgtaccactgcgaccatcgcggcctgccgctggcc

SEQ ID NO: 301326 - DNA, 75 bp, synthetic construct
  source 1..75: mol_type = other DNA
aacctacggttcggatgacagccgcctgccgatgtccggtatggcgacctatacgccgggtatggagatatccgg

SEQ ID NO: 301327 - DNA, 75 bp, synthetic construct
  source 1..75: mol_type = other DNA
cgtggttgaggcgtttgataacgctaaaaatcatcgcggtgaacagccacgggtcattatttgcgacacgctgat

SEQ ID NO: 301328 - DNA, 75 bp, synthetic construct
  source 1..75: mol_type = other DNA
attttcaaacgccctatctcgcagccagccgacctgacagaaatggaaggtgttaaggctctcgggttcctcagg

SEQ ID NO: 301329 - DNA, 75 bp, synthetic construct
  source 1..75: mol_type = other DNA
atgagcttaacccttgttgatttcgtcaaacaacaggagccgcttttcattaaggcggccactgacgagcggatg

SEQ ID NO: 301330 - DNA, 75 bp, synthetic construct
  source 1..75: mol_type = other DNA
gatgcaaaaccagatggacccggtatacacgccggcgcgaaaaattcacctgtaccactgcgaccatcgcggcct

SEQ ID NO: 301331 - DNA, 75 bp, synthetic construct
  source 1..75: mol_type = other DNA
tgtatgctgataaaaaacaaatttcaaattttgttaattttatttttctaatccagaccatttcattattattat

SEQ ID NO: 301332 - DNA, 75 bp, synthetic construct
  source 1..75: mol_type = other DNA
tttccggctataacaacttctatgaattcgggctggataaagccgatcccgccgctaatgctggtagcctgaaaa

SEQ ID NO: 301333 - DNA, 75 bp, synthetic construct
  source 1..75: mol_type = other DNA
ggatgcggatgccgaaaaagcgctccaggcgctgcaagaacatattcttccggaaaaaggcgcttattggggaca

SEQ ID NO: 301334 - DNA, 75 bp, synthetic construct
  source 1..75: mol_type = other DNA
gagatacggtcaactcaggctcgttttacaggggcgattattgccatgctttcagctatcagtggggaagggcag

SEQ ID NO: 301335 - DNA, 75 bp, synthetic construct
  source 1..75: mol_type = other DNA
tgaaattaccaatattgtcgggggggcgaccacaccagttggctggctggctgtgaagtttggggagtttttcag

SEQ ID NO: 301336 - DNA, 75 bp, synthetic construct
  source 1..75: mol_type = other DNA
gcagaagcaaaattgaaggccaaattccctgaccgtgacttttacatcggcatggataccgcgttattgattggc

SEQ ID NO: 301337 - DNA, 75 bp, synthetic construct
  source 1..75: mol_type = other DNA
cgatctggtacttaatgcagataacaatgactttactggtgagatgcagattgaaaacggtgaagttaccttggg

SEQ ID NO: 301338 - DNA, 75 bp, synthetic construct
  source 1..75: mol_type = other DNA
ttgcaccgtggaccatgccaaccggtctgggagccttctttaacaccaacggtagcgtcgccgcattgctggtcg

SEQ ID NO: 301339 - DNA, 75 bp, synthetic construct
  source 1..75: mol_type = other DNA
gtggcaaaactggcgctgccgtccggcatcttccagattaacgaaccgattctgtttggtctgccaattatcatg

SEQ ID NO: 301340 - DNA, 75 bp, synthetic construct
  source 1..75: mol_type = other DNA
ttgaaaccatttttttttgttatttcatacatagttcttgcgctactggtttctttatttcatggggagacatcg

SEQ ID NO: 301341 - DNA, 75 bp, synthetic construct
  source 1..75: mol_type = other DNA
cggaattacaggaagacgaaccagaagcgcaacacactgaagcggtggcagcacaggaaaatagctgtgatggat

SEQ ID NO: 301342 - DNA, 75 bp, synthetic construct
  source 1..75: mol_type = other DNA
gcgcagacaatgccgccggaaagctgacctttaacattgacgggctggcaagggcgattgctcccctgcgcgatg

SEQ ID NO: 301343 - DNA, 75 bp, synthetic construct
  source 1..75: mol_type = other DNA
ttgtattgctggatgatcctagcccgtttcgcgatatggtgctggcgacgcttaataaagcagatattccatggc

SEQ ID NO: 301344 - DNA, 75 bp, synthetic construct
  source 1..75: mol_type = other DNA
acgctgccgctacaagcaggctttgtctatttaccgggactggcttttcaaaggcagtctcgaacggcgaagcac

SEQ ID NO: 301345 - DNA, 75 bp, synthetic construct
  source 1..75: mol_type = other DNA
gtacgctggcggatgcatcggtcagtggcgcgacaggaagcctgtcgttaatgacgccacgggataatgttacgc

SEQ ID NO: 301346 - DNA, 75 bp, synthetic construct
  source 1..75: mol_type = other DNA
tatacatcgaattgtattttggatatatcttttggtgaagataagattacatgtttcaataataggcttgtgttt

SEQ ID NO: 301347 - DNA, 75 bp, synthetic construct
  source 1..75: mol_type = other DNA
tagagccaatcattgagacgacgcgagaaacaattaaaatatttcttgatgctggtgaactggtaaaggttagcg

SEQ ID NO: 301348 - DNA, 75 bp, synthetic construct
  source 1..75: mol_type = other DNA
ctatagactccccatcagacatggttgttactagcgaggattatttcagatttataaatggtaattcttactttt

SEQ ID NO: 301349 - DNA, 75 bp, synthetic construct
  source 1..75: mol_type = other DNA
aatcatagcctcaatcgaacttgatccatcaattgaatatattcaagactttttcaaagaaaacacatttaaagt

SEQ ID NO: 301350 - DNA, 75 bp, synthetic construct
  source 1..75: mol_type = other DNA
attattacccgatcccgataagcaattagcggaatggcgtaatttattgaagattactcttgatttctttatccg

SEQ ID NO: 301351 - DNA, 75 bp, synthetic construct
  source 1..75: mol_type = other DNA
ggaaccacgctgggaaatcagttagaggtgataccggcggaccggacgtggcgtccacggctgcaaagcaaaccg

SEQ ID NO: 301352 - DNA, 75 bp, synthetic construct
  source 1..75: mol_type = other DNA
gtatggcgagacggggaaacaaaggctgagtatctggccgcccaccagcgttgtgttcgccgtctgcgtcgcatc

SEQ ID NO: 301353 - DNA, 75 bp, synthetic construct
  source 1..75: mol_type = other DNA
caaaaaatgttggtggtgctgagttgtctttgatgcaaatcttaaattcatgcaattactcatttgtcgtatatc

SEQ ID NO: 301354 - DNA, 75 bp, synthetic construct
  source 1..75: mol_type = other DNA
tgcgttattactacttgaaaattcataccagatatctcagatatcaaatatgattggaatttccagtgcatctta

SEQ ID NO: 301355 - DNA, 75 bp, synthetic construct
  source 1..75: mol_type = other DNA
gtagccaatggcaaaatttatatcggtaaaattgacactgacccggtaaaccctgaaaaccagattccggtttat

SEQ ID NO: 301356 - DNA, 75 bp, synthetic construct
  source 1..75: mol_type = other DNA
gcttggcaaacaggaagtacaaagcggcagcgtgatgagccacctgatggcgggcgtctctgcggcgctgccgtt

SEQ ID NO: 301357 - DNA, 75 bp, synthetic construct
  source 1..75: mol_type = other DNA
tacagattcttctggtttagaaaaagcatttaataatcttgatttagatgcagttattgtggggagtgaccaagt

SEQ ID NO: 301358 - DNA, 75 bp, synthetic construct
  source 1..75: mol_type = other DNA
gatatatttatgtcagcaataatgcgaaaaacagactttgtgcccgaatgcaataatcaaccgacagaacttaat

SEQ ID NO: 301359 - DNA, 75 bp, synthetic construct
  source 1..75: mol_type = other DNA
tgagccatatggccgcgaagcagaaaccacaggcgctggctctggcatggagtgacgaagacggtatggtgattg

SEQ ID NO: 301360 - DNA, 75 bp, synthetic construct
  source 1..75: mol_type = other DNA
gatgactttatggcgctagtagaagaccgtagaaacgctttgggcgatgatgctatggtattcagtgggttaaag

SEQ ID NO: 301361 - DNA, 75 bp, synthetic construct
  source 1..75: mol_type = other DNA
ctgaggcggggaccgtttatattcatatcaatgaagacgacagtagcttacccggtaagagcatcaagaatgctc

SEQ ID NO: 301362 - DNA, 75 bp, synthetic construct
  source 1..75: mol_type = other DNA
caaaaacaatacgctctcaccgcgcaccggcctgcggcagctcagtgaatttatccagacgcaatattttgatta

SEQ ID NO: 301363 - DNA, 75 bp, synthetic construct
  source 1..75: mol_type = other DNA
catgcacaggatcatttaatgacatcaatgctggcacgagaattagcagaagaaataattcatctttatcaaaga

SEQ ID NO: 301364 - DNA, 75 bp, synthetic construct
  source 1..75: mol_type = other DNA
cagttacgcaatttgtgaaaagagtcacggcagagaagaaatccgtattcatattgtttgcgatgtccctgatga

SEQ ID NO: 301365 - DNA, 75 bp, synthetic construct
  source 1..75: mol_type = other DNA
caacaaagctaacagattatagttggaccgcgaagtcaatcaacaaaggcgatattataaacattgaggtgggaa

SEQ ID NO: 301366 - DNA, 75 bp, synthetic construct
  source 1..75: mol_type = other DNA
gctacaccgtgaagcacagtctgatttttgccagcgttatcggcgttatcaccctgctgcaggcgtatgtgttta

SEQ ID NO: 301367 - DNA, 75 bp, synthetic construct
  source 1..75: mol_type = other DNA
agggtggcaaaacgggtatggcgacgtgaacgggacctgacgggctggatgtcgctgtcacggaaaccgcaagtg

SEQ ID NO: 301368 - DNA, 75 bp, synthetic construct
  source 1..75: mol_type = other DNA
ctccggaaaagacgaaaatcacacatatcgaggaaggatttgattttcttggacagaacattcgcaaatatggcg

SEQ ID NO: 301369 - DNA, 75 bp, synthetic construct
  source 1..75: mol_type = other DNA
tgggatgacagtttggttattttcttgtaatacaggtaaaggacaaaattcatttgctagccaattagctaaaga

SEQ ID NO: 301370 - DNA, 75 bp, synthetic construct
  source 1..75: mol_type = other DNA
agtcggaaacggaagtcgcccgcatggtggactgttttatctcgttgcaaattgccggtggcggcgatgatctgc

SEQ ID NO: 301371 - DNA, 75 bp, synthetic construct
  source 1..75: mol_type = other DNA
atcctctctacctgatgcgctatcagcagtttgtttcgccaatggtgtatggagagcgacagatcacatgggatg

SEQ ID NO: 301372 - DNA, 72 bp, synthetic construct
  source 1..72: mol_type = other DNA
cccgtgtgcgcgacccgggccgccggggatacacaaaacacatgctgcgtctgcggcgggccggagagataa

SEQ ID NO: 301373 - DNA, 75 bp, synthetic construct
  source 1..75: mol_type = other DNA
ggtaagcagaattgggcgctttgcgacgaaaatttcgatgattttgattttcttgtggctcctgaaaaaactcta

SEQ ID NO: 301374 - DNA, 75 bp, synthetic construct
  source 1..75: mol_type = other DNA
ctgggcgaagcgcacaccatgaactccgatgaatttgaacgtattcaggggatgcgccgcgcggtttatgacagc

SEQ ID NO: 301375 - DNA, 75 bp, synthetic construct
  source 1..75: mol_type = other DNA
ttaccgccagacgcttttagcggtcaaaaacaatacgctctcaccgcgcaccggcctgcggcagctcagtgaatt

SEQ ID NO: 301376 - DNA, 75 bp, synthetic construct
  source 1..75: mol_type = other DNA
tgtatatctgggccgagggaaatattatgtattaatggcaaattgggaagaaatgaaataattaaaaatgaattt

SEQ ID NO: 301377 - DNA, 75 bp, synthetic construct
  source 1..75: mol_type = other DNA
gtggaacgcggtagctggtgtgaactggtcgttctgaccatcaacgaaaaagcccacatctgtgggctttcatgt

SEQ ID NO: 301378 - DNA, 75 bp, synthetic construct
  source 1..75: mol_type = other DNA
ccgggccagcgggctgacattgctgactgcggcgatctcactgtggaatacggtatatatagaaagagccataga

SEQ ID NO: 301379 - DNA, 75 bp, synthetic construct
  source 1..75: mol_type = other DNA
caattaccaccaggatatacttgtgcagaaccctatttattcccagacattaataaacccgatgggccagcaaca

SEQ ID NO: 301380 - DNA, 75 bp, synthetic construct
  source 1..75: mol_type = other DNA
cccgtaaacagcacaccgcttccttattttcccctgacaccccccgccctctttcagcctcagcgttccccgaca

SEQ ID NO: 301381 - DNA, 75 bp, synthetic construct
  source 1..75: mol_type = other DNA
gtacgcattggtgcccccaccggcgtggcctgttcggtgtgccccggcggagtgacgtccggccatccggtcaat

SEQ ID NO: 301382 - DNA, 75 bp, synthetic construct
  source 1..75: mol_type = other DNA
ccccggaaacagcgcataacaccgtactgccagatctgacacggaaagagcatcgcatcattggcattgacagcc

SEQ ID NO: 301383 - DNA, 75 bp, synthetic construct
  source 1..75: mol_type = other DNA
gggctgagtggcgggtggaatttataccaatatcctctcaatccggttcataaagtggatcctttggggttatca

SEQ ID NO: 301384 - DNA, 75 bp, synthetic construct
  source 1..75: mol_type = other DNA
gtgcgcggcggcgtggcgaaactgaatgaaagtcaccgtcttgccccactctggcaggctctgccggaagaactc

SEQ ID NO: 301385 - DNA, 75 bp, synthetic construct
  source 1..75: mol_type = other DNA
tgaataacgtaaacttaaatgaaaatcctatccgcgctggtttaggtgaaaacccacggactgcatatgtagtac

SEQ ID NO: 301386 - DNA, 75 bp, synthetic construct
  source 1..75: mol_type = other DNA
cgtgaagtccggcaagtgtgaggagcacaggcgggcggcatggcgtgcagaggatgccagacgaggacaccgccg

SEQ ID NO: 301387 - DNA, 75 bp, synthetic construct
  source 1..75: mol_type = other DNA
taataaaaataacgattcctcaattgaatttcaaattggtaatcaaggaactggggaggcgactattcgcgaggg

SEQ ID NO: 301388 - DNA, 75 bp, synthetic construct
  source 1..75: mol_type = other DNA
ggcctgctcggaattaactcgcagggcaggtaaaacatcgacggttaatttgcgtaaatcctctggactgacaac

SEQ ID NO: 301389 - DNA, 75 bp, synthetic construct
  source 1..75: mol_type = other DNA
cgactggacgccacgcggtgagctggcggcggtgtatgaccgcagcggtacgcagatgcgccactttacttacga

SEQ ID NO: 301390 - DNA, 75 bp, synthetic construct
  source 1..75: mol_type = other DNA
cagtgcgggctgacggtggagcggctggcggcacagatagagccggtttatttacctgagcgaaaaattcatctt

SEQ ID NO: 301391 - DNA, 75 bp, synthetic construct
  source 1..75: mol_type = other DNA
cctgccggggcagcagtacgatgatgaatcggggctgtgctataaccgtaaccggtactacgatccgttgcaggg

SEQ ID NO: 301392 - DNA, 75 bp, synthetic construct
  source 1..75: mol_type = other DNA
tattgagcccaatgagtgtgtaaaattacctacggcacaaggcctggaggttacatcactggcagttgaattagg

SEQ ID NO: 301393 - DNA, 75 bp, synthetic construct
  source 1..75: mol_type = other DNA
caccacgcgtatccagacggtataccagccgggaagcttcacgccgctcatccgggtcgagacagagaacggcga

SEQ ID NO: 301394 - DNA, 75 bp, synthetic construct
  source 1..75: mol_type = other DNA
ctataacaaccagaaccagttaacctcagcatccgggcctgacggactggaaatgcgcaggaaatatgatgagta

SEQ ID NO: 301395 - DNA, 75 bp, synthetic construct
  source 1..75: mol_type = other DNA
tataaaaaaaacaagaagatttatgtttaatattttatctaatgatgaaaccagatcaaaaatgtatcagcaact

SEQ ID NO: 301396 - DNA, 75 bp, synthetic construct
  source 1..75: mol_type = other DNA
gtgctggtctgggtggggcatttgggaagtatgcccccacagccgtggggaaaatcttagggaatgatcctgttc

SEQ ID NO: 301397 - DNA, 75 bp, synthetic construct
  source 1..75: mol_type = other DNA
ggccctagcaccgcaaccagtcttgctgctcttattgctttatgttcgatattgctggcaaaaccggtgcaggag

SEQ ID NO: 301398 - DNA, 75 bp, synthetic construct
  source 1..75: mol_type = other DNA
tgcatgaatgttaccgcgaacacggacctcttttgctggtaaatcgccgtggacagccaggtaatccgcaactga

SEQ ID NO: 301399 - DNA, 75 bp, synthetic construct
  source 1..75: mol_type = other DNA
atacatatatccctggaactgaccgttttaacatttatacgaatacaagcggcacgtatactatttactacatgg

SEQ ID NO: 301400 - DNA, 75 bp, synthetic construct
  source 1..75: mol_type = other DNA
gggctgatgtgcagccgcctcaccgtcacaccggcgtggtggccaaaccgctgtcctccggcagtgcgaaacccg

SEQ ID NO: 301401 - DNA, 75 bp, synthetic construct
  source 1..75: mol_type = other DNA
tgaagatattgatcttaatggctacaaagcacacttatgcgatggtcgcctgtatctgattgcgccaaactttac

SEQ ID NO: 301402 - DNA, 75 bp, synthetic construct
  source 1..75: mol_type = other DNA
tttcagaagtagaaactgctaatagtaagcaggttgctgttttaaaagctaactttccgcagtgttttgataaaa

SEQ ID NO: 301403 - DNA, 75 bp, synthetic construct
  source 1..75: mol_type = other DNA
taaaagtttatgctaaggattacaaacagaaattaagctccgttatccatcttgatgggcgtgttgcaacgaacg

SEQ ID NO: 301404 - DNA, 75 bp, synthetic construct
  source 1..75: mol_type = other DNA
ggtgatattattggtgctataggtggtgaatttatcagcaatgcagttaaagatgagataaatggaacgaaaaaa

SEQ ID NO: 301405 - DNA, 75 bp, synthetic construct
  source 1..75: mol_type = other DNA
ctctgatacgagataaatcacttaacgcatctgatatctataatgctactgataatgccttatataaagcgaaat

SEQ ID NO: 301406 - DNA, 75 bp, synthetic construct
  source 1..75: mol_type = other DNA
agtatatattcgtatgtttttgcgttttttttgattacatttttagagtggttttgtaatagtacaataattatc

SEQ ID NO: 301407 - DNA, 75 bp, synthetic construct
  source 1..75: mol_type = other DNA
gggctaatatgtaagaagcaaggtgaatatttccctatgaatccgataagttcaaatgataatgatagtgtagac

SEQ ID NO: 301408 - DNA, 75 bp, synthetic construct
  source 1..75: mol_type = other DNA
acacgccggcgcgaaaaatccacctgtaccactgcgaccaccgcggcctgccgctggcgcttgtcagcacggaag

SEQ ID NO: 301409 - DNA, 75 bp, synthetic construct
  source 1..75: mol_type = other DNA
gaccgctcgttggaagcaaagcgtatggccgccgggcagtctattggaggggcgatcctcgtggtgacgcagttc

SEQ ID NO: 301410 - DNA, 75 bp, synthetic construct
  source 1..75: mol_type = other DNA
gattttaagggatgcttcttttctggacagaacttcagtaactatgatattcaatatgtgaactggggaacgtca

SEQ ID NO: 301411 - DNA, 75 bp, synthetic construct
  source 1..75: mol_type = other DNA
ttcaaatataaaaatggcgatgatgtccgggagatagccaaaattaacattactctccaaaaagaagaggatggt

SEQ ID NO: 301412 - DNA, 75 bp, synthetic construct
  source 1..75: mol_type = other DNA
cgtaaactcattgagcgctctgtcgaggaggattcatttaacggggtagttatacgtcatagaagaggaatccag

SEQ ID NO: 301413 - DNA, 75 bp, synthetic construct
  source 1..75: mol_type = other DNA
gcgattttttaactatacctcaagttcaacacagcgaagataaccgtgtgtggcgatatgttatggaggccgggt

SEQ ID NO: 301414 - DNA, 75 bp, synthetic construct
  source 1..75: mol_type = other DNA
caaatttccaggctggcctgatccaatcggccttttactttggttatttcattatcccaatccctgctgggatat

SEQ ID NO: 301415 - DNA, 75 bp, synthetic construct
  source 1..75: mol_type = other DNA
tatttgaggttttaacatataatcgcagaatcgctcctactgaacatgagattcatatatatgtagaatatttcc

SEQ ID NO: 301416 - DNA, 75 bp, synthetic construct
  source 1..75: mol_type = other DNA
agcattattgatgcagatattgctgcaggcgttctgatcaacgatggcattcacgtagttaacgacattccgaag

SEQ ID NO: 301417 - DNA, 75 bp, synthetic construct
  source 1..75: mol_type = other DNA
cacgctaacgcacgcgcggatcacgttgcaatgccgggtgctgccttcgccagcttctctgttgactatgaccgg

SEQ ID NO: 301418 - DNA, 75 bp, synthetic construct
  source 1..75: mol_type = other DNA
ccttctcacaaaatgaactcggtgtgcattcaatcgaggaacttaccgcgactcaaaacggaactgcagaaatgc

SEQ ID NO: 301419 - DNA, 75 bp, synthetic construct
  source 1..75: mol_type = other DNA
tactagcgaagcattgaaagcgttacttcaaaaggtggattcagacaaagactttgctccaaacaaagtcgtgtt

SEQ ID NO: 301420 - DNA, 75 bp, synthetic construct
  source 1..75: mol_type = other DNA
ataatgctatggtgttcaatggcctcaagctaatgaagaacggctacggtgagcaggttagcaagtggtttaacc

SEQ ID NO: 301421 - DNA, 75 bp, synthetic construct
  source 1..75: mol_type = other DNA
ctgactgtagaccagcatcgctatattaatgacgttatcggtgtgcttaaggcctgtcaggatagactcaatggc

SEQ ID NO: 301422 - DNA, 75 bp, synthetic construct
  source 1..75: mol_type = other DNA
accgtccgtctccctatctgtattggcagatcctgaagtccccgaacctaaagctcttaccctcgcgtctctcat

SEQ ID NO: 301423 - DNA, 75 bp, synthetic construct
  source 1..75: mol_type = other DNA
ttatccttgcatgcgtaggaacagttatctcactaattacatttgcaaaatgtagaaatcgcattgcatattggg

SEQ ID NO: 301424 - DNA, 75 bp, synthetic construct
  source 1..75: mol_type = other DNA
tgatgaccctaaaggcacagggcatggttctttgcctcatataaatattaaacgttctgatgggacaatggtgag

SEQ ID NO: 301425 - DNA, 75 bp, synthetic construct
  source 1..75: mol_type = other DNA
gtggcgctggcctggcacaaaaccaacaaaaaatggtcggctgattatgccgcccgtattctcgccagtatggaa

SEQ ID NO: 301426 - DNA, 75 bp, synthetic construct
  source 1..75: mol_type = other DNA
gcatgaagcgtatcgaagcgggagacagtcagtcactgatagattatgtcgatcgttttgatggtattgatcggc

SEQ ID NO: 301427 - DNA, 75 bp, synthetic construct
  source 1..75: mol_type = other DNA
gcagcactcaaggcaatccatgcggataaccctacagcctcctacgaggatatgaggaaacacttacgggatatc

SEQ ID NO: 301428 - DNA, 75 bp, synthetic construct
  source 1..75: mol_type = other DNA
cccgtagaggcgctgatggtgatgacgctatggtgttcgatggtcttcgcctcatgaagaacggttacggtgagc

SEQ ID NO: 301429 - DNA, 75 bp, synthetic construct
  source 1..75: mol_type = other DNA
ccgttacgctaaagaggtcgaggtggatagattggttaatgtgatggcaggtgtttataaggagactggattaaa

SEQ ID NO: 301430 - DNA, 75 bp, synthetic construct
  source 1..75: mol_type = other DNA
cgccgctaaagcgtactcgcagaagacctcaggtaagccataccattattacgtcaccgctctggctgcaatcac

SEQ ID NO: 301431 - DNA, 75 bp, synthetic construct
  source 1..75: mol_type = other DNA
accgctgtctgacctgctgaaccgggagtctaagactgactgtctggatgtagtaaccatcaacaataaatatct

SEQ ID NO: 301432 - DNA, 75 bp, synthetic construct
  source 1..75: mol_type = other DNA
caggttaacccgtatgttggctttgaaatgggttacgactggttaggtcgtatgccgtacaaaggcagcgttgaa

SEQ ID NO: 301433 - DNA, 75 bp, synthetic construct
  source 1..75: mol_type = other DNA
aggcttacagggaactaagaagaataagagataatattcatagtgaaatatacttcaaacaaactgatgaattgt

SEQ ID NO: 301434 - DNA, 75 bp, synthetic construct
  source 1..75: mol_type = other DNA
tcagctgtggtatggcattatattttttgtgtggggggattacagtggcagaagaacttgatgaaagcatgcaag

SEQ ID NO: 301435 - DNA, 75 bp, synthetic construct
  source 1..75: mol_type = other DNA
aaaagggagtactattcgcatacagttgatattgagaaaaatattcatgccatatgggttgcgggttccccacct

SEQ ID NO: 301436 - DNA, 75 bp, synthetic construct
  source 1..75: mol_type = other DNA
acgtcaggtggatgcgcacctgaagcgcctgcgtgaactggaagccggtaaggccgccacggcgcagccagtgaa

SEQ ID NO: 301437 - DNA, 75 bp, synthetic construct
  source 1..75: mol_type = other DNA
cctgcagcggggacgggcacagcgattatccgggaggccacccgtgcctgttatggcctgtttccgcgccgtcta

SEQ ID NO: 301438 - DNA, 75 bp, synthetic construct
  source 1..75: mol_type = other DNA
tgaaatagatcaaatgctccatatgattatgctagagatgaatgatgatatagccaaaaggtcattgttttcatt

SEQ ID NO: 301439 - DNA, 75 bp, synthetic construct
  source 1..75: mol_type = other DNA
catgtttattgatgagggcaagcctgagtttgttattgcttcagaactgaaccggaagaacatccccgccgagaa

SEQ ID NO: 301440 - DNA, 75 bp, synthetic construct
  source 1..75: mol_type = other DNA
ttatcggatgcagacgcaacattgatgagggaaatggcagaggccctggagcgttaaatactcaacacgattcac

SEQ ID NO: 301441 - DNA, 75 bp, synthetic construct
  source 1..75: mol_type = other DNA
actggtgaagctggttaatggcactgaaaaaccgacagcagcgaatctggccaaactccggtccggcagtctgac

SEQ ID NO: 301442 - DNA, 75 bp, synthetic construct
  source 1..75: mol_type = other DNA
ataaaaacagtcgtaatggtctaaaacttctacagaagcaagctgatttactaaaaataatcatggaggatacct

SEQ ID NO: 301443 - DNA, 75 bp, synthetic construct
  source 1..75: mol_type = other DNA
ccattggccaggcattacagaaacatgatacacccgtcggcccgttattttttgtaacacatcacggaagaacaa

SEQ ID NO: 301444 - DNA, 75 bp, synthetic construct
  source 1..75: mol_type = other DNA
aaaaagacttatatagatgggaggagacagaaaaaaaagaatttcttgatatttttgggagaaatgagattgagg

SEQ ID NO: 301445 - DNA, 75 bp, synthetic construct
  source 1..75: mol_type = other DNA
aatgcttttcctatcaccaatggttggaatattttaccaataactggtaaaagagctaatgtcgtacaagaaata

SEQ ID NO: 301446 - DNA, 75 bp, synthetic construct
  source 1..75: mol_type = other DNA
agaaaaaccagcgttacgcaaatggtcaacgctggttttatccggtacgttgcaattattttttagcagaacccg

SEQ ID NO: 301447 - DNA, 75 bp, synthetic construct
  source 1..75: mol_type = other DNA
ttccacagtgggtcattgatgcaggtatgttgaaagccggttcaccaattgaaaaatattttaggtattttgaaa

SEQ ID NO: 301448 - DNA, 75 bp, synthetic construct
  source 1..75: mol_type = other DNA
ccgggcatggcgatgtccccatggccgttgaagcagtaaaaaagggagcgtgggatttcctgcaaaagccgatca

SEQ ID NO: 301449 - DNA, 75 bp, synthetic construct
  source 1..75: mol_type = other DNA
tataacgatgatgttgcagtcttgacacctctatttaaattcacagataaactgttcacagatgaaaacaagctt

SEQ ID NO: 301450 - DNA, 75 bp, synthetic construct
  source 1..75: mol_type = other DNA
ctgaaaatcaagaaaacttaggattgtccggttggccagctgaaagaggcttacatgagacattattagttattc

SEQ ID NO: 301451 - DNA, 75 bp, synthetic construct
  source 1..75: mol_type = other DNA
taatcgtgcggccatcttgcgccaagctggtacgccgctacagcggtattgcctgctcaatcactgtgagccttg

SEQ ID NO: 301452 - DNA, 75 bp, synthetic construct
  source 1..75: mol_type = other DNA
tcgtgaagccatccttcgcgaggtatctacaccgctggagcgatattgcctgctgaatgattgtgagccatggga

SEQ ID NO: 301453 - DNA, 75 bp, synthetic construct
  source 1..75: mol_type = other DNA
gtgagcgacttatcagaccttgatatgagcgacgcgttaatcggctgggaacagcctgtaaaactcaaaacccgc

SEQ ID NO: 301454 - DNA, 75 bp, synthetic construct
  source 1..75: mol_type = other DNA
aatatcgaaagcaatgacttaccacatcataatccattaaatcatgttgatatcgttgatataatccaagaaaca

SEQ ID NO: 301455 - DNA, 75 bp, synthetic construct
  source 1..75: mol_type = other DNA
atatttctattacacccgattacagacaagcctggaaagtggagcataaattgtcagatattctactgttgacta

SEQ ID NO: 301456 - DNA, 75 bp, synthetic construct
  source 1..75: mol_type = other DNA
atggaacttaaaaaattgatggaacatatttctattattcccgattacagacaagcctggaaagtggtgcataaa

SEQ ID NO: 301457 - DNA, 75 bp, synthetic construct
  source 1..75: mol_type = other DNA
aaacgattgggcaaaagttcagggacgattttctgatatcccgttaatttcatcaagtgatgaaactgtcgagtt

SEQ ID NO: 301458 - DNA, 75 bp, synthetic construct
  source 1..75: mol_type = other DNA
accagctcgctgtttatcgcgaaacgggaaagcacggaccttaccctgcttactgaagttaattacgaggaaact

SEQ ID NO: 301459 - DNA, 75 bp, synthetic construct
  source 1..75: mol_type = other DNA
tgtatacctgtatttctgtatagttgacaatgagtttctcagaatcggtttctgtattgcatggacagcatacta

SEQ ID NO: 301460 - DNA, 75 bp, synthetic construct
  source 1..75: mol_type = other DNA
tctggtgatattattgataatattaaagttttcccgacactggttgaatcgttacacgatgtcgatttcactgtc

SEQ ID NO: 301461 - DNA, 75 bp, synthetic construct
  source 1..75: mol_type = other DNA
cggcaatcatgtcgcgggcgtggcagaggggcgctacgggcctcagtgtaagttaaacgacaaaaaaggtaagcc

SEQ ID NO: 301462 - DNA, 75 bp, synthetic construct
  source 1..75: mol_type = other DNA
aacaaaccgcctacgcccgattcaagtaaattgccggacatagcgaaacaattaagactgccatatcctattgac

SEQ ID NO: 301463 - DNA, 75 bp, synthetic construct
  source 1..75: mol_type = other DNA
actggcgtcactgcatgagtggatggaggagaaaaatgccacgctgtcgaaaaaatccagactgggcgaagcgtt

SEQ ID NO: 301464 - DNA, 75 bp, synthetic construct
  source 1..75: mol_type = other DNA
ctacaagactcatcacgttttcatgtaaaaaaagttatcattggtgatgataaaaacagcatgctttccggaatt

SEQ ID NO: 301465 - DNA, 75 bp, synthetic construct
  source 1..75: mol_type = other DNA
ccctacagcattattccaggcgtacccattcaaacagctaaaataattgagaatgggtatgaacttatggcttta

SEQ ID NO: 301466 - DNA, 75 bp, synthetic construct
  source 1..75: mol_type = other DNA
ctgatgtggttcgagtagtagcagcagaagtcagaaagagaagaccatcaatcagcgcacagcttggagaatctt

SEQ ID NO: 301467 - DNA, 75 bp, synthetic construct
  source 1..75: mol_type = other DNA
gttacacgatgtcgatttcactgtcgccaccactgcgcgcagtcgggcgaaatatcattactacgcaacgccagt

SEQ ID NO: 301468 - DNA, 75 bp, synthetic construct
  source 1..75: mol_type = other DNA
gaccagggaacaatttattgctgcgtcattgccagatagcatgattgttattggcgagcatagcgtccgaacaaa

SEQ ID NO: 301469 - DNA, 75 bp, synthetic construct
  source 1..75: mol_type = other DNA
gcgtcaatatgcacattaccataatgtaagtgcaatcgcggctattcagtatgtgatgaataaccctgtaaaata

SEQ ID NO: 301470 - DNA, 75 bp, synthetic construct
  source 1..75: mol_type = other DNA
ttatcggatattctattgttgactatttgtgccgttatttctggtgcagaaggttgggaagatatagaggatttt

SEQ ID NO: 301471 - DNA, 75 bp, synthetic construct
  source 1..75: mol_type = other DNA
ccgcccgccgcacccttgtccgggaatacgtgctttcccttgccgcccgtctgccggttgttgaggtatcacatg

SEQ ID NO: 301472 - DNA, 75 bp, synthetic construct
  source 1..75: mol_type = other DNA
gtatccgttagagccggtattctcacccccgtctgggctatcgccatcgagcgtgagaactccggcgatagcgta

SEQ ID NO: 301473 - DNA, 75 bp, synthetic construct
  source 1..75: mol_type = other DNA
actcgctggcgattcgctgttggcactggggaaatgcgttactgtttgttttgttactgttaagcggtttattgg

SEQ ID NO: 301474 - DNA, 75 bp, synthetic construct
  source 1..75: mol_type = other DNA
gaataagtgaagttgagttgttagaagatgaggttaacgacgaagttgagactcttcagtgggataagcaatgga

SEQ ID NO: 301475 - DNA, 75 bp, synthetic construct
  source 1..75: mol_type = other DNA
ataacagattattcaagcatttttattgattttatgattacggagaaaccagttgcatttattccatatgatctt

SEQ ID NO: 301476 - DNA, 75 bp, synthetic construct
  source 1..75: mol_type = other DNA
aattcatgcggcttttgaagcgtttctaactgatattcaagataaagttgcacaagattttgtcaccaaaagaaa

SEQ ID NO: 301477 - DNA, 75 bp, synthetic construct
  source 1..75: mol_type = other DNA
cgtgcgacccgccgcttatggcgaaaattggccgcgctgccaaaccgttggcaggccgcacaactggctgggtta

SEQ ID NO: 301478 - DNA, 75 bp, synthetic construct
  source 1..75: mol_type = other DNA
ccgcactactgcgcgatctgcacttccgggcggccccagacggtgaacataccctcgcggccatccattacctgg

SEQ ID NO: 301479 - DNA, 75 bp, synthetic construct
  source 1..75: mol_type = other DNA
atgaccaatgcagctttctatcaacttggcccactgcgcgagtatttagaagatcctaccgtttttgaaattcgc

SEQ ID NO: 301480 - DNA, 75 bp, synthetic construct
  source 1..75: mol_type = other DNA
atgaacgtagaaagggcgaaagccgcggtgctggaacaccaacggctttcaggtgcaaaaacgacagtagttgca

SEQ ID NO: 301481 - DNA, 75 bp, synthetic construct
  source 1..75: mol_type = other DNA
tggattccacggcatcgttgtccccggcacattacgagattccatttttgtgctggaaggccttctggagcagca

SEQ ID NO: 301482 - DNA, 75 bp, synthetic construct
  source 1..75: mol_type = other DNA
tgatgaagatactggtgatgatttgctgcgaaagaccatattcagcagtgtacctgtcgccagactggcagagtc

SEQ ID NO: 301483 - DNA, 75 bp, synthetic construct
  source 1..75: mol_type = other DNA
agaccccgatgtttacccgtcagataaaacagatcgccacggatgaagaactcagggagctgcaaaagacgctga

SEQ ID NO: 301484 - DNA, 75 bp, synthetic construct
  source 1..75: mol_type = other DNA
taataatctttatggcagtgagtttcggataagagatattaatgagaattttgttgggatggattttacctgtga

SEQ ID NO: 301485 - DNA, 75 bp, synthetic construct
  source 1..75: mol_type = other DNA
aatggaaaattaacagggattcgttctgaatacgttaatcaaggtatagctttgtcagcgttgaaggaggcgtga

SEQ ID NO: 301486 - DNA, 75 bp, synthetic construct
  source 1..75: mol_type = other DNA
atatccatgctatactgagttaaacaaaataagagccatgcaactaaacaatgcttacatttctgactttcaaaa

SEQ ID NO: 301487 - DNA, 75 bp, synthetic construct
  source 1..75: mol_type = other DNA
tgggtttacggtctgggacagaacaccgattcaggcggttatctcagtccggccaatgcgctgggataccttgct

SEQ ID NO: 301488 - DNA, 75 bp, synthetic construct
  source 1..75: mol_type = other DNA
gttaaaaatacggtaaaaactgaaacaatggcgatacaattagctgaaatatatgttaggtatcgctatggcgaa

SEQ ID NO: 301489 - DNA, 75 bp, synthetic construct
  source 1..75: mol_type = other DNA
gtacaatagcgagagttccacaaggcaaaagtttgttgataggtggttatacgcatgaaacgaactctaacgaaa

SEQ ID NO: 301490 - DNA, 75 bp, synthetic construct
  source 1..75: mol_type = other DNA
cgaaaaatgccaaggatagtctgacagatacggaaaaagctcaactaaagaagttgacgaaactgctcaaaggcg

SEQ ID NO: 301491 - DNA, 75 bp, synthetic construct
  source 1..75: mol_type = other DNA
agcggtgtgatgtcgggaaatgtcaccactgcaggtgatgtgaacgttatgccaggggggacactgcgtgtcgct

SEQ ID NO: 301492 - DNA, 75 bp, synthetic construct
  source 1..75: mol_type = other DNA
acattacgtaccgatgcggatggcgcgctgggcaacacccgggaactgaacatcagcaacgcggccatcgtcgat

SEQ ID NO: 301493 - DNA, 75 bp, synthetic construct
  source 1..75: mol_type = other DNA
agcggcggacaagggataagcacgcgtcagcagttccgccaacactgcgacagcgttgtcctcgcggcttttacc

SEQ ID NO: 301494 - DNA, 75 bp, synthetic construct
  source 1..75: mol_type = other DNA
gaatcatgggtgtgtgattccgggtactggttgcctgaaagtgaagtactcaaaaacggaatcaactcattgctt

SEQ ID NO: 301495 - DNA, 75 bp, synthetic construct
  source 1..75: mol_type = other DNA
accttggatgtgtggttccggctattggtttaagaacccacaagtacttcatgaaaatattgagttattatctgt

SEQ ID NO: 301496 - DNA, 75 bp, synthetic construct
  source 1..75: mol_type = other DNA
gtgtttgcgggaaaaaaattggcccagatccgcgaaattttaatcagcgagtcaacttgggaagaaatgacctgc

SEQ ID NO: 301497 - DNA, 75 bp, synthetic construct
  source 1..75: mol_type = other DNA
gtggtaagctcccagcgcttacatgatatgttgaatcctacaaaagataccaattggaattccacgtatatctac

SEQ ID NO: 301498 - DNA, 75 bp, synthetic construct
  source 1..75: mol_type = other DNA
tattatcagcttatcatcatttacaattagaaaatgcaaatgaagcagccacaagactaaaagtgatagatcggg

SEQ ID NO: 301499 - DNA, 75 bp, synthetic construct
  source 1..75: mol_type = other DNA
cccggtgaaaaaaagctggcggaagaatttgcggtatcgcggatgaccatccgtaaagccattgacctgctggtg

SEQ ID NO: 301500 - DNA, 75 bp, synthetic construct
  source 1..75: mol_type = other DNA
acgctgaatgccacgaataacatcactatgcaggggacccgtgttcagattaaacactccaacatcaccgcgggc

SEQ ID NO: 301501 - DNA, 75 bp, synthetic construct
  source 1..75: mol_type = other DNA
gtgacgccggggattcactgacactgaaacaggcaacagcctacagcgatatcagtacccgccgggcactgtcag

SEQ ID NO: 301502 - DNA, 75 bp, synthetic construct
  source 1..75: mol_type = other DNA
gtacgccagattactagcgcgggaaaaccctgacctgaaaaactttctcggtgataaagatgtagacccggatac

SEQ ID NO: 301503 - DNA, 75 bp, synthetic construct
  source 1..75: mol_type = other DNA
gtgcataagttcagccacggcaccaccggttccccggacaccattcgcgggatgtcggtcgaaatgctgttcgac

SEQ ID NO: 301504 - DNA, 75 bp, synthetic construct
  source 1..75: mol_type = other DNA
gactccctgcgcctgtactgcgccccggcggtgaatctgtttgtccatgacgccattcccttcgtacctgacagc

SEQ ID NO: 301505 - DNA, 75 bp, synthetic construct
  source 1..75: mol_type = other DNA
cgtgcgcacccttgcatcagacctggatatccgcatcccgtatgcgaccgacccggcgggaaaccggctgccgga

SEQ ID NO: 301506 - DNA, 75 bp, synthetic construct
  source 1..75: mol_type = other DNA
taatttattacaacgtaacacgcaatggtcgaatttatctggcgttgatttatcctaaaaatgaacaggatgatt

SEQ ID NO: 301507 - DNA, 75 bp, synthetic construct
  source 1..75: mol_type = other DNA
aaactgttccgccgccgtaatcgttcactcctgctgaccgaggaagggcaaagctatttcctcgatatcaaagag

SEQ ID NO: 301508 - DNA, 75 bp, synthetic construct
  source 1..75: mol_type = other DNA
atctgcgcctggctgttgcctttgtgatgttgcttgccgggtggaaactgacggggctggtttatgtatctaccg

SEQ ID NO: 301509 - DNA, 75 bp, synthetic construct
  source 1..75: mol_type = other DNA
gcttactggcttttcgtatggattttggctggaaacaaggaagtgaacgctcgcagcgtaatctcatggatgaga

SEQ ID NO: 301510 - DNA, 75 bp, synthetic construct
  source 1..75: mol_type = other DNA
gccatatccaaatacggcctatgcctcaacaatgaaagacgggacgactacggtatttgtttgtaactcgatggt

SEQ ID NO: 301511 - DNA, 75 bp, synthetic construct
  source 1..75: mol_type = other DNA
ttgaaggagaagaaggtgattttctttcagataatgggataagatttcacgttgataacaaagccgatttaataa

SEQ ID NO: 301512 - DNA, 75 bp, synthetic construct
  source 1..75: mol_type = other DNA
tcaatcttaatggggattatgtctggcgtaataatcttaagctgggtacagggaagtaccgaccattacgcagtg

SEQ ID NO: 301513 - DNA, 75 bp, synthetic construct
  source 1..75: mol_type = other DNA
atgtctactttggcttaaataataacaccaccattgtatggacggccgatgaaatgagtaaaggattaaacttaa

SEQ ID NO: 301514 - DNA, 75 bp, synthetic construct
  source 1..75: mol_type = other DNA
agtcatgtccgggtgaagttttccgatactaatgagaaagtaaaacgttggcagggaagcctgattcctgttgta

SEQ ID NO: 301515 - DNA, 75 bp, synthetic construct
  source 1..75: mol_type = other DNA
cacattagaatatttaccatatatcccattaaatgaaatatttgttcacggcaaaaatccagattttttttggag

SEQ ID NO: 301516 - DNA, 75 bp, synthetic construct
  source 1..75: mol_type = other DNA
cttgttgactcagcgttttgcttttctgactcagggcggagcggcaccagaaacgccaaatccgcgcctgccacc

SEQ ID NO: 301517 - DNA, 75 bp, synthetic construct
  source 1..75: mol_type = other DNA
tgaatgaaccgtcacgccgacgtttactgaaaggcattggtgcgctggcgctggcgggaagttgtccggtcgctc

SEQ ID NO: 301518 - DNA, 75 bp, synthetic construct
  source 1..75: mol_type = other DNA
cgtgacggcggtgaaattaatgatcatgcaccagccttcagtgctatgacagcagatatttccgggttaatgaaa

SEQ ID NO: 301519 - DNA, 75 bp, synthetic construct
  source 1..75: mol_type = other DNA
caaccgcatgacctggattaaaccctcttttatgtggatgatggagcgtagcaactggggactgaaaaaagatca

SEQ ID NO: 301520 - DNA, 75 bp, synthetic construct
  source 1..75: mol_type = other DNA
cctgtggttccctaatattttcatcaagcacattttcagcaggtattcccgtcgttgatgcaatcgctaactcac

SEQ ID NO: 301521 - DNA, 75 bp, synthetic construct
  source 1..75: mol_type = other DNA
cgttaggtgccttattcgactttttgcagcagaatctggcacaaacacatactgtgtcttccctcgccgaacggg

SEQ ID NO: 301522 - DNA, 75 bp, synthetic construct
  source 1..75: mol_type = other DNA
aatggctttaccgccgattaccagtcgatgctgcaaaagacagggttcaacgctgataaagcggctgttcagtcc

SEQ ID NO: 301523 - DNA, 75 bp, synthetic construct
  source 1..75: mol_type = other DNA
aaagaaggcggtaacagtcttatcgactgggaaaaatggcaaccggcaatagataaagcgaaggatgcgatcacc

SEQ ID NO: 301524 - DNA, 75 bp, synthetic construct
  source 1..75: mol_type = other DNA
atgaagtggaaacgaacaccgcaggggtatgtgattaccactgcgacgatcacccgcgcagggccgattgaatat

SEQ ID NO: 301525 - DNA, 75 bp, synthetic construct
  source 1..75: mol_type = other DNA
gcacaggatgttgcgaaatggatgggagtatcaccgaatgcaatattgaatcttacagatccccagactatggga

SEQ ID NO: 301526 - DNA, 75 bp, synthetic construct
  source 1..75: mol_type = other DNA
actaaaagatggtgttggcggctggcaaaatgcactggaaatcctcggtacattcatcgcgggtgtctgggtatc

SEQ ID NO: 301527 - DNA, 75 bp, synthetic construct
  source 1..75: mol_type = other DNA
gtggctttcacggctaagatcgcctctggtctggataatctttactgggcgtcactgcgcaccggcgcgacagtc

SEQ ID NO: 301528 - DNA, 75 bp, synthetic construct
  source 1..75: mol_type = other DNA
ctctatcccaaacggactttctggcactgtggcgtggatggcaacgaagggcagtcaggcgaatattgggcaaaa

SEQ ID NO: 301529 - DNA, 75 bp, synthetic construct
  source 1..75: mol_type = other DNA
gtcacgttagtagctggaatttcgccagtaaaatcatcaccgaagataaccggtgtaattttgctatggattact

SEQ ID NO: 301530 - DNA, 75 bp, synthetic construct
  source 1..75: mol_type = other DNA
aatgggaatgatggccagagaatatgcagaagaactgaagcaaacagagcaatatgaatacaacaggcttcggca

SEQ ID NO: 301531 - DNA, 75 bp, synthetic construct
  source 1..75: mol_type = other DNA
tattattttgcgagtgcatggcaggggaatgagtgggatcgctgcggtctgaccatgccaccacgcgtgcgaaca

SEQ ID NO: 301532 - DNA, 75 bp, synthetic construct
  source 1..75: mol_type = other DNA
gctacattttccgggcctcagtgggcagttgtcggagtggcatcttgcaacgggagaggtttcagtgctggaaga

SEQ ID NO: 301533 - DNA, 75 bp, synthetic construct
  source 1..75: mol_type = other DNA
aaaaacgatcacccctttgttgactatccctcccggaaaactgccgtctggacgcgaattacccaggatgaaaca

SEQ ID NO: 301534 - DNA, 75 bp, synthetic construct
  source 1..75: mol_type = other DNA
ttcagcgctcagtattcagaaatggtgaaagctatcggcttcaatgctgacgaggcggccagaagctccaacaaa

SEQ ID NO: 301535 - DNA, 75 bp, synthetic construct
  source 1..75: mol_type = other DNA
atggggcgtctcctgggaggccgttggtgcatacaatgccggattcagaaagaccgaacgccagaaccagagacg

SEQ ID NO: 301536 - DNA, 75 bp, synthetic construct
  source 1..75: mol_type = other DNA
gcaggtggtcatgggaccatgtgggatttccgtgataatcaggatgcccagcgtattatccgcgaagtgtatgaa

SEQ ID NO: 301537 - DNA, 75 bp, synthetic construct
  source 1..75: mol_type = other DNA
gagccgtggtcatagcctcgcactggccatggaaaaatggcaacgggcaggcctgtgggtggtcacccgttccga

SEQ ID NO: 301538 - DNA, 75 bp, synthetic construct
  source 1..75: mol_type = other DNA
gctctctatcagaacggctgtaccgtgcacagggtatcgatacaaaaacattactaggacataaagtccaggcaa

SEQ ID NO: 301539 - DNA, 75 bp, synthetic construct
  source 1..75: mol_type = other DNA
attggatatgctgatattgattcgatatatggttatctttctgtaaaaactacatttagacctgatcgacggttg

SEQ ID NO: 301540 - DNA, 75 bp, synthetic construct
  source 1..75: mol_type = other DNA
cggatttatgccgggataaaaagcagtaaaggtatccggatttcggtcacgaagaaatcgcttccggaaattaac

SEQ ID NO: 301541 - DNA, 75 bp, synthetic construct
  source 1..75: mol_type = other DNA
ggtaacaaaagtattgggagcattcgcaaaaatatccggtcttccgatacctccatggcttaaattatggggagc

SEQ ID NO: 301542 - DNA, 75 bp, synthetic construct
  source 1..75: mol_type = other DNA
aatggcgtggcggctcatacagggcgctggctctgtcattgactggtggaagcgtcttgacgatggcagtaaaaa

SEQ ID NO: 301543 - DNA, 75 bp, synthetic construct
  source 1..75: mol_type = other DNA
cgcggtggtggaaggcgcagcgctgagcattgtcggatttaccacccagatcgcgaatggtctggataaaattta

SEQ ID NO: 301544 - DNA, 75 bp, synthetic construct
  source 1..75: mol_type = other DNA
cgctttgccttgtggttaaaagaaaagtccaccacaccagctgatctgttggtttccgacccgaaagctttgctg

SEQ ID NO: 301545 - DNA, 75 bp, synthetic construct
  source 1..75: mol_type = other DNA
gatgatgagcctgacattcccggggcggaacagcatgttcgtagtaatgaaattgccccgcatgaaagagatgaa

SEQ ID NO: 301546 - DNA, 75 bp, synthetic construct
  source 1..75: mol_type = other DNA
aacaaattcatgacgtccatgcgcgggcttacgtcgctgttcggcattatgcgggacaagatcggctcaaacctc

SEQ ID NO: 301547 - DNA, 75 bp, synthetic construct
  source 1..75: mol_type = other DNA
ataagggtagattggaaaaagaatctatattgtcgaatcatcaatatgatttacgtggagaaaatctattcttta

SEQ ID NO: 301548 - DNA, 75 bp, synthetic construct
  source 1..75: mol_type = other DNA
aaggattattactttccaatcaagtatggtaaagatagagcagctcttatgattggtaatgcgttacctccagaa

SEQ ID NO: 301549 - DNA, 75 bp, synthetic construct
  source 1..75: mol_type = other DNA
cgttaaagggcgtttatctctccaccgcttacacctacgccaaacatcgccctgaccacgctgacgatgaaacca

SEQ ID NO: 301550 - DNA, 75 bp, synthetic construct
  source 1..75: mol_type = other DNA
gaaatcggcgctcactatccgggatttgaaaccgatattcacggtgcataccgtcaggctgatggccgctatacc

SEQ ID NO: 301551 - DNA, 75 bp, synthetic construct
  source 1..75: mol_type = other DNA
aattgaagatgctagtaaatttggtgtgccacaaagacgtaagcgcatggtactacttgcttcgcgatacggaga

SEQ ID NO: 301552 - DNA, 75 bp, synthetic construct
  source 1..75: mol_type = other DNA
aacatctttgaaagagggattattagtttaaataataaatattatatttattatgctcatcctatttcgaaacga

SEQ ID NO: 301553 - DNA, 75 bp, synthetic construct
  source 1..75: mol_type = other DNA
gtgcaaaaaggctacgctgcatttcaggatgccgcatgtgactacattattgctttcggtggcggtagcccaatt

SEQ ID NO: 301554 - DNA, 75 bp, synthetic construct
  source 1..75: mol_type = other DNA
ggaatggcttttaacagcgcgggactggggctggttcacgcactggcgcatcagcccggagctacccacaacctg

SEQ ID NO: 301555 - DNA, 75 bp, synthetic construct
  source 1..75: mol_type = other DNA
ccgctatgggaatattattaccgttgccgcctactgcaggattatatcagcggtatgaccgacctctatgcgtgg

SEQ ID NO: 301556 - DNA, 75 bp, synthetic construct
  source 1..75: mol_type = other DNA
attatattaatactcatcaatccaaagagttacaaaccgagtttggtaaactaatctcaactttaaatccaagta

SEQ ID NO: 301557 - DNA, 75 bp, synthetic construct
  source 1..75: mol_type = other DNA
ttatttatttcaagaaatatatcacctaaaaacaacgcggggcagggaatggctgccccatttaattcttacgca

SEQ ID NO: 301558 - DNA, 75 bp, synthetic construct
  source 1..75: mol_type = other DNA
gcgaagctgaatcggcatgatccctatgcctacctgaaggatgtgctgactcgcctgccgacacagaagaacaac

SEQ ID NO: 301559 - DNA, 75 bp, synthetic construct
  source 1..75: mol_type = other DNA
ttctctttattcctgcgctgtttattctgttttcacttggcggcgcggtatttggtatgggagaagaggccgtcg

SEQ ID NO: 301560 - DNA, 75 bp, synthetic construct
  source 1..75: mol_type = other DNA
gaaaaggaagttttcagcgtagttaagcgagtacagcaatcccagcaagttcaggattatgtaaaacgtgaacta

SEQ ID NO: 301561 - DNA, 75 bp, synthetic construct
  source 1..75: mol_type = other DNA
ggaccatggcatgctgtactgaagcgtacggaagctgaccgctgggcgcaggcagaagagcagaagtatgagatg

SEQ ID NO: 301562 - DNA, 75 bp, synthetic construct
  source 1..75: mol_type = other DNA
tttttcaaagcataaaccgatacccaatactggtttcagtaatgaaatggcggggcgggcgagatcctgttccag

SEQ ID NO: 301563 - DNA, 75 bp, synthetic construct
  source 1..75: mol_type = other DNA
ttgtggtgatattagtgctaaagatgcaaaaagcacacagaaagcctggaattgtcgtcactccagacagtcaaa

SEQ ID NO: 301564 - DNA, 75 bp, synthetic construct
  source 1..75: mol_type = other DNA
tcagagggatatatttatttgtcaggtcctccatcctatggtatagaatcactttatacaaaaggttgtttttac

SEQ ID NO: 301565 - DNA, 75 bp, synthetic construct
  source 1..75: mol_type = other DNA
aagggacaacagcgtggtacgcagaatacgatgaatggggtaacctgctgaatgaagagaacccgcatcagctgc

SEQ ID NO: 301566 - DNA, 75 bp, synthetic construct
  source 1..75: mol_type = other DNA
cttaacaactgtgattttctaaaaatagctccgaaaacagatgatctgtggattagtaaattgcttattttatcg

SEQ ID NO: 301567 - DNA, 75 bp, synthetic construct
  source 1..75: mol_type = other DNA
tggtctggtgcccaaacagactggctcaggagggaaaattcgcctgctggggataagcaaacgtggtgatacata

SEQ ID NO: 301568 - DNA, 75 bp, synthetic construct
  source 1..75: mol_type = other DNA
gtttctccctcgacgtgcgcgaaccgctcaaccgcttttcagtcgcgatgcagcaaatcgtcgctatttgccggg

SEQ ID NO: 301569 - DNA, 75 bp, synthetic construct
  source 1..75: mol_type = other DNA
tcaacttaacagtctatttcttgatagatatagtgattcgaccaatacatacacatctagtggaattctccatac

SEQ ID NO: 301570 - DNA, 75 bp, synthetic construct
  source 1..75: mol_type = other DNA
aaggcggggccgggctgaagcgggtggtgaaaaaagactggcggacggcagcgtcacgcacagcgggtatgacgc

SEQ ID NO: 301571 - DNA, 75 bp, synthetic construct
  source 1..75: mol_type = other DNA
cgaatacaaagcctcgcgaggccaaaccaccgctgcagagccaaaaaaagagctggatcaggctgccggtatcct

SEQ ID NO: 301572 - DNA, 75 bp, synthetic construct
  source 1..75: mol_type = other DNA
atgaaattaagtgattttactaacctttccggtcagtttgtgaagccaagcggcgaggggttccttctgtccagc

SEQ ID NO: 301573 - DNA, 75 bp, synthetic construct
  source 1..75: mol_type = other DNA
aattcaagactggttcaatgaattgcacgaagaaaataatctaaggaaggtgcgaataagcaggtcatttcttcc

SEQ ID NO: 301574 - DNA, 75 bp, synthetic construct
  source 1..75: mol_type = other DNA
ggtaaagtgatgatcgccgggatgggcggtgtgcttggttccgtcactattattattggtctgggcgctgctggg

SEQ ID NO: 301575 - DNA, 75 bp, synthetic construct
  source 1..75: mol_type = other DNA
catgacagatggtttcatgatgtttttgatgaaaatggaaatgcttatgactcatcagaaatagagttattaaaa

SEQ ID NO: 301576 - DNA, 75 bp, synthetic construct
  source 1..75: mol_type = other DNA
ctggtcgaaaaggcggtggatggcgggatatttacttattacattggctacgttacgccggtgatgctgccaact

SEQ ID NO: 301577 - DNA, 75 bp, synthetic construct
  source 1..75: mol_type = other DNA
atctggcgaatacgcgcgcggatggggccagccatattttcctggcgctgtcgactaacgacaataatactctgg

SEQ ID NO: 301578 - DNA, 75 bp, synthetic construct
  source 1..75: mol_type = other DNA
ctcttttggcgctgacccaacgggtggtatgacccgtttactttattcgccggaatggctggaaactcagcactg

SEQ ID NO: 301579 - DNA, 75 bp, synthetic construct
  source 1..75: mol_type = other DNA
ttcatgacgggggtatttccaccggcacgataatcgagagtggcaatcaggatgtttatacaggtggtatcagca

SEQ ID NO: 301580 - DNA, 75 bp, synthetic construct
  source 1..75: mol_type = other DNA
gtgctggaaaacgctggctcattaacagtcgtcactggttcccgggcagttgatacgattattaatgccaacggc

SEQ ID NO: 301581 - DNA, 75 bp, synthetic construct
  source 1..75: mol_type = other DNA
atgataaccgggtgaaagtgaataatgacggtaatttcgtcaatgatttgtcgggcagacgtggaatataccagg

SEQ ID NO: 301582 - DNA, 75 bp, synthetic construct
  source 1..75: mol_type = other DNA
ccttgaaagcgtacaggcagaaaccaaaagaaaaaatgcggaaaccgacggcctgcttacggacaatgagctccg

SEQ ID NO: 301583 - DNA, 75 bp, synthetic construct
  source 1..75: mol_type = other DNA
cagctgaatttgataaagaccttctcagacgattgcagcaagctgagcagaatctgataactgcctctgcggctt

SEQ ID NO: 301584 - DNA, 75 bp, synthetic construct
  source 1..75: mol_type = other DNA
gcggctgtgcgcaaagaatttgtcgatgataaccgggtgaaagtgaatagtgacggtaatttcgtcaatgatttg

SEQ ID NO: 301585 - DNA, 75 bp, synthetic construct
  source 1..75: mol_type = other DNA
cctttaatctgaccttgtcatacaacccgataaccacaacctgcaaaccggacgatttattaattactttagagg

SEQ ID NO: 301586 - DNA, 75 bp, synthetic construct
  source 1..75: mol_type = other DNA
ttgaagcagcgctcattgccggaattttgctggtggtgattttcggatatcgcaatattcatggaagactggcag

SEQ ID NO: 301587 - DNA, 75 bp, synthetic construct
  source 1..75: mol_type = other DNA
cgtcgggcttatctatctggagcggcagcgtcgtaaagcgcaggcaaaaaatgaaggttacggcacagagttact

SEQ ID NO: 301588 - DNA, 75 bp, synthetic construct
  source 1..75: mol_type = other DNA
tggatccctgtttggtacggtgcgagccaccaactggagttgccgggacttgccgccccgattaccacagatgtc

SEQ ID NO: 301589 - DNA, 75 bp, synthetic construct
  source 1..75: mol_type = other DNA
accccgcaatactggaagcgcgagtatcagttacaggatggcgatatcgacgaaaccccggcacctgcatcgttg

SEQ ID NO: 301590 - DNA, 75 bp, synthetic construct
  source 1..75: mol_type = other DNA
taaatgtttatttgaaaatagctgctatacctaatcgaacagagttaggctataaaagtgagaaaaagtttatcg

SEQ ID NO: 301591 - DNA, 75 bp, synthetic construct
  source 1..75: mol_type = other DNA
acgcgtccggtgcagcgcccggtggaaattacccagagggatcaggtgctggatatgttggaggcgcatagcgac

SEQ ID NO: 301592 - DNA, 75 bp, synthetic construct
  source 1..75: mol_type = other DNA
gcttgctgattcccgcaaccttaaccgccctgctggtggggattaccgaaccgccgggatttaccttcctgtttc

SEQ ID NO: 301593 - DNA, 75 bp, synthetic construct
  source 1..75: mol_type = other DNA
gaaaatcgggtaaaagtggcgggcttgctgattcccgcaaccttaaccgccatgctggtgggaattaccgaaccg

SEQ ID NO: 301594 - DNA, 75 bp, synthetic construct
  source 1..75: mol_type = other DNA
tggtaacgatagctatttttttagtgagctcagcgggattaatattggcccgtggcgtttacgcaacaatggttc

SEQ ID NO: 301595 - DNA, 75 bp, synthetic construct
  source 1..75: mol_type = other DNA
atttatcgctcttttgattattggtccggcaggacgagcgttaggtgacggtatctctttcgttctcagcacgct

SEQ ID NO: 301596 - DNA, 75 bp, synthetic construct
  source 1..75: mol_type = other DNA
caggtacggcagaaaagaaagaagaatgtgttaaagagtttattgtttccgataagtttaaaaaaatgatggacg

SEQ ID NO: 301597 - DNA, 75 bp, synthetic construct
  source 1..75: mol_type = other DNA
gtgattatcgccttcctggtgatgatcccctgcgcctggctgacattgctcggctggccaaaagtacaaatgggg

SEQ ID NO: 301598 - DNA, 75 bp, synthetic construct
  source 1..75: mol_type = other DNA
gtgtggctgacacacgacccggcctacccggatgaacagccgactgcgccgctggcgcgctacacgtacacggcc

SEQ ID NO: 301599 - DNA, 75 bp, synthetic construct
  source 1..75: mol_type = other DNA
cagcagatgctgttcgttatgaattggccacaggtgaaaaagttgttggtagaggacatgtattgaaagcacagg

SEQ ID NO: 301600 - DNA, 75 bp, synthetic construct
  source 1..75: mol_type = other DNA
atgtaaaccctactgctccagcagggagtaattctgccaatggccccatatataggattggtagaagccaaagtg

SEQ ID NO: 301601 - DNA, 75 bp, synthetic construct
  source 1..75: mol_type = other DNA
ctgccgccggtggagtggctgacgtatggcagcggttatcttgcggggatgaagctgggcggaacgccactggtc

SEQ ID NO: 301602 - DNA, 75 bp, synthetic construct
  source 1..75: mol_type = other DNA
gcggtccactacggctatgacgataaaggccgcctgacgggcgaacggcagacggtggagaacccggagacgggg

SEQ ID NO: 301603 - DNA, 75 bp, synthetic construct
  source 1..75: mol_type = other DNA
cgcagtggcctgccctgtgcggtggaagacggaaccggggtgaggcggagaataacgcgaaaccggtacggtcag

SEQ ID NO: 301604 - DNA, 75 bp, synthetic construct
  source 1..75: mol_type = other DNA
gaagcagaccgcctcacgcaccgcaccgtgaatggcgaaaccgcagagcggtggcagtatgacgaacgcggctgg

SEQ ID NO: 301605 - DNA, 75 bp, synthetic construct
  source 1..75: mol_type = other DNA
actggcactatgacgaagcagaccgcctcacgcaccgcaccgtgaagggtgaaaccgcagagcggtggcagtatg

SEQ ID NO: 301606 - DNA, 75 bp, synthetic construct
  source 1..75: mol_type = other DNA
gacggcgaccggctgaccacgatacagaacgacaggagccgcatccagacgatttatcagccggggagcttcacg

SEQ ID NO: 301607 - DNA, 75 bp, synthetic construct
  source 1..75: mol_type = other DNA
cgtaacgataccggcggtatcagcgctaagcagggcattgaagtcgccgttggcggcagcctgaccaataatatt

SEQ ID NO: 301608 - DNA, 75 bp, synthetic construct
  source 1..75: mol_type = other DNA
aatctggtcagcaccgagaaaggtgtgggggttcgcaacctcggcgttatcgcaggtggtgctaatggtgtcagc

SEQ ID NO: 301609 - DNA, 75 bp, synthetic construct
  source 1..75: mol_type = other DNA
tggcggttgataccaataacgccacgctgattaactctggtaaagggagttctgtcgggattgaagcgggtatcg

SEQ ID NO: 301610 - DNA, 75 bp, synthetic construct
  source 1..75: mol_type = other DNA
cgggcggcggagggtgacgtggcgggcgcggtgacgggggtgacggacggcgcgggccgctgttttcacctggtg

SEQ ID NO: 301611 - DNA, 75 bp, synthetic construct
  source 1..75: mol_type = other DNA
agataactgatatgaatcgagtttctcagcaatctcgtgtggggataggagctcagtttacgctatatgtaaaat

SEQ ID NO: 301612 - DNA, 75 bp, synthetic construct
  source 1..75: mol_type = other DNA
gtcattcgttgtgcggcagaaaaagagttttttcgtcagttacggggaagccaggccggatcctctctggctcat

SEQ ID NO: 301613 - DNA, 75 bp, synthetic construct
  source 1..75: mol_type = other DNA
ctgaactggtggggctgctggacaggctggagggggaaatccgggcaaactgcgtgagcagtgaaagccgccagt

SEQ ID NO: 301614 - DNA, 75 bp, synthetic construct
  source 1..75: mol_type = other DNA
ttgtggattttcagttatgtggccgccgtgtcgtgtgcgggctgtgccgtgcctccatcttagccgggctggcgg

SEQ ID NO: 301615 - DNA, 75 bp, synthetic construct
  source 1..75: mol_type = other DNA
ccagtcgcagcgcccaggcggcaaaagagatcaaagccctcattgaagactccgtctcgcgcgttgataccggtt

SEQ ID NO: 301616 - DNA, 75 bp, synthetic construct
  source 1..75: mol_type = other DNA
gcaactggcggcgatttctgccaaagcaattaaagaagcgcgttatcacctgcgttttagtcgtggctggctgga

SEQ ID NO: 301617 - DNA, 75 bp, synthetic construct
  source 1..75: mol_type = other DNA
agacggcccgcagcttcggcggggaggcatatgaacttgccaccgcctggaataccagcggccagctccggagca

SEQ ID NO: 301618 - DNA, 75 bp, synthetic construct
  source 1..75: mol_type = other DNA
ccctcacggcatggccggataaccgcatcgcggaagatgcgcactatgtctaccgccacgatgaatacggcaggc

SEQ ID NO: 301619 - DNA, 75 bp, synthetic construct
  source 1..75: mol_type = other DNA
gacccggaactgcacccggacagcaccctcacggcatggccggataaccgcatcgcggaagatgcgcactatgtc

SEQ ID NO: 301620 - DNA, 75 bp, synthetic construct
  source 1..75: mol_type = other DNA
gcagcttgaccgtgactatacgtggaacgataacggacaactggtgcgcatcagcggcccgcaggagtgccggga

SEQ ID NO: 301621 - DNA, 75 bp, synthetic construct
  source 1..75: mol_type = other DNA
accacgcaggcgcagcgggcggaagccttccgtaaacagcgcgcctcttccttatcttccccggccagtccccgt

SEQ ID NO: 301622 - DNA, 75 bp, synthetic construct
  source 1..75: mol_type = other DNA
gaaacctgctgggcgaggaaagcgcgcagcaccttcagcagtcactccgtctgccgggacagcagtatgatgagg

SEQ ID NO: 301623 - DNA, 75 bp, synthetic construct
  source 1..75: mol_type = other DNA
tatctggcgacaaacagtccgcaggggccgtggtggctgctcggctggtgtgagcgggtgccggaagcggatgag

SEQ ID NO: 301624 - DNA, 75 bp, synthetic construct
  source 1..75: mol_type = other DNA
gcgacctggtgcgcatcagcggcccgcgacagacgcgggaatacggctacagtgccacgggcaggctggagagcg

SEQ ID NO: 301625 - DNA, 75 bp, synthetic construct
  source 1..75: mol_type = other DNA
catagtccatctgaaatgttagtcaatgccgataaagcgttatatcaagccaaaagaaccgggaaaaacaaggta

SEQ ID NO: 301626 - DNA, 75 bp, synthetic construct
  source 1..75: mol_type = other DNA
ttgtatttggtcatgatttagatggttattttattgttagcgtaaaaaacaagaaagtttattacttgtatgata

SEQ ID NO: 301627 - DNA, 75 bp, synthetic construct
  source 1..75: mol_type = other DNA
tagaaccaaatggtgatcagccaatgaataagtctggtttaccaagtcagtgtagagtacatgcaaatggagaaa

SEQ ID NO: 301628 - DNA, 75 bp, synthetic construct
  source 1..75: mol_type = other DNA
gggaggaaggcatcagcacttacagcagttataacccgcgtgggcaactggtcagtcagaaggatgcgcaggggc

SEQ ID NO: 301629 - DNA, 75 bp, synthetic construct
  source 1..75: mol_type = other DNA
ttaccggccacgacaacagatgcgacgggcagcacccggcagatgacctggagccgctacgggcagttgctggcg

SEQ ID NO: 301630 - DNA, 75 bp, synthetic construct
  source 1..75: mol_type = other DNA
cattctgatgaccctgacttctgggatgtttggacaagaaagtatgctgatgggaaattggtcgagagaactgtc

SEQ ID NO: 301631 - DNA, 75 bp, synthetic construct
  source 1..75: mol_type = other DNA
atgaactcattccccattgaacaaggtgagcaactcagggttggcactgtcgattttgtttcacccaacgagatt

SEQ ID NO: 301632 - DNA, 75 bp, synthetic construct
  source 1..75: mol_type = other DNA
cgcgctgtcagatgtcggcatggcccgaaccaggcgcgaaagaggcaggtgtccgcaggaatagcgtgggtactg

SEQ ID NO: 301633 - DNA, 75 bp, synthetic construct
  source 1..75: mol_type = other DNA
cggagtgggcatcattcacgcaagcaagtcctaaagcacaacttccattactaaaacgctccttgagagcaatga

SEQ ID NO: 301634 - DNA, 75 bp, synthetic construct
  source 1..75: mol_type = other DNA
gtgtttcaattattgatctttctttagtaccaacagaaattactcatcttgtgacagctgttatttcaaggattg

SEQ ID NO: 301635 - DNA, 75 bp, synthetic construct
  source 1..75: mol_type = other DNA
gctaaaaatcttttggcaaaaattaacacttggcgtcagagtcttgaagaatataaagaaaggttagttactaca

SEQ ID NO: 301636 - DNA, 75 bp, synthetic construct
  source 1..75: mol_type = other DNA
gctggtcacccactggcactatgacgaagcagaccgcctcactcaccgcaccgtgaagggtgaaccggcagagca

SEQ ID NO: 301637 - DNA, 75 bp, synthetic construct
  source 1..75: mol_type = other DNA
taccactacgacagccagcaccgcctggtgttctacacgcggatacagcatggcgagccactggtcgagagccgc

SEQ ID NO: 301638 - DNA, 75 bp, synthetic construct
  source 1..75: mol_type = other DNA
caaccggagcgagacacagtacgatgcgtggggaaaagcggtcagcaccacgcagggcgggctgacgcgcagtat

SEQ ID NO: 301639 - DNA, 75 bp, synthetic construct
  source 1..75: mol_type = other DNA
tcaccctctggcattacgatgcgtcagaccgtatcacccggcgcacggtgaacggcgacccggcggaacagtggc

SEQ ID NO: 301640 - DNA, 75 bp, synthetic construct
  source 1..75: mol_type = other DNA
cctgacggcgatatcacccgctaccgttatgataatccacacagtgacctcccctgcgcaacggaagatgccacc

SEQ ID NO: 301641 - DNA, 75 bp, synthetic construct
  source 1..75: mol_type = other DNA
atatgatgagctggacagactggtatcggagacatcgcgcagcggggagacagtacgctaccgctacgatgacgt

SEQ ID NO: 301642 - DNA, 75 bp, synthetic construct
  source 1..75: mol_type = other DNA
cgggagacggtgcgcagctttggtaacggaacgggcagtaatgccgcatacgaactgaccagcacatacactccc

SEQ ID NO: 301643 - DNA, 75 bp, synthetic construct
  source 1..75: mol_type = other DNA
gttcttttccgcgcctacagcagctaccggaccaggacgcccgcgccggtgggggtgtttggtcccggctggaaa

SEQ ID NO: 301644 - DNA, 75 bp, synthetic construct
  source 1..75: mol_type = other DNA
ggaacgacaacggacagctaattcgcatcagcggcccgcaggagagccgggagtaccgttacagcgacacgggaa

SEQ ID NO: 301645 - DNA, 75 bp, synthetic construct
  source 1..75: mol_type = other DNA
gtaccgcgcatacgacagccgtggacagttaattgcggtgaaagacatgcagggccatgaaacgcggtatgaata

SEQ ID NO: 301646 - DNA, 75 bp, synthetic construct
  source 1..75: mol_type = other DNA
gaacggcagacggtggagaacccggagacaggggagatgctgtgggagcatgagacggggcatgcgtacagcgaa

SEQ ID NO: 301647 - DNA, 75 bp, synthetic construct
  source 1..75: mol_type = other DNA
tgaagaaggagcatgcggacggcagcatcacccgcagcgagtatgatgaggcggggaggctgaaggcgcagacgg

SEQ ID NO: 301648 - DNA, 75 bp, synthetic construct
  source 1..75: mol_type = other DNA
cggcaggctggcggagaagacggaccgtatcccggaaggggtgatacggatgcacgacgagcggacgcaccacta

SEQ ID NO: 301649 - DNA, 75 bp, synthetic construct
  source 1..75: mol_type = other DNA
atcgcctggaatgaagatcaaaaaggaatttataccgcaacgtataccgccttactccctggcaccggtttaaaa

SEQ ID NO: 301650 - DNA, 75 bp, synthetic construct
  source 1..75: mol_type = other DNA
gttactcgcttagctggtgatgagatagtacatgataccgtcgaagatcttcttgttgctctaaaacgtgcgggg

SEQ ID NO: 301651 - DNA, 75 bp, synthetic construct
  source 1..75: mol_type = other DNA
gcaggatgcacgcagctttatttcccttacaatgccacgactggtacattttatatgcgccagcacatcattcag

SEQ ID NO: 301652 - DNA, 75 bp, synthetic construct
  source 1..75: mol_type = other DNA
ccggttgcgggctctgcaagtgtcggcgatcagattatggcgctgccggaggcgaaagggcgcgaacaacttgca

SEQ ID NO: 301653 - DNA, 75 bp, synthetic construct
  source 1..75: mol_type = other DNA
aaaaactggcgcagatgctggcaggtcagcagggaatgtcagttgagcaggcaaaaacattactggcggcagcac

SEQ ID NO: 301654 - DNA, 75 bp, synthetic construct
  source 1..75: mol_type = other DNA
tgaggcgaaaggggctgaggcgctggctgaaaaactggcggcgtttcccggaatgactgtggagtctgcccgaga

SEQ ID NO: 301655 - DNA, 75 bp, synthetic construct
  source 1..75: mol_type = other DNA
cgggtacacctatacccttaaggaaaacggcctgccttacgctggcgttatcgctcaggaggttatggaggcgct

SEQ ID NO: 301656 - DNA, 75 bp, synthetic construct
  source 1..75: mol_type = other DNA
agcaacagcaaaacagcggcagccaccagcgaaacgaatgcggcaaaagcagcagccgatgcgctaaactatcgc

SEQ ID NO: 301657 - DNA, 75 bp, synthetic construct
  source 1..75: mol_type = other DNA
aagttcattaatccaaactggaagaattgggagtgggttgatgttggtatgggcatatcgaagccaatgccatta

SEQ ID NO: 301658 - DNA, 75 bp, synthetic construct
  source 1..75: mol_type = other DNA
cagagattgcccggatatttcaggaaacccatcaggttatcttggctttctgcgcatcatggaaggggctgccgg

SEQ ID NO: 301659 - DNA, 75 bp, synthetic construct
  source 1..75: mol_type = other DNA
ctggcgtattgaaagagatcattgggatacgtcaaaagctaaagattgcatctcatatagttacagtaaacaaga

SEQ ID NO: 301660 - DNA, 75 bp, synthetic construct
  source 1..75: mol_type = other DNA
caagccttgataatgccaggactaatctaggattgggtagaagtaacagtccacagcttgatagtatgtttctcg

SEQ ID NO: 301661 - DNA, 75 bp, synthetic construct
  source 1..75: mol_type = other DNA
cgctcgccgttctctgtctcgacccggatgagcggcgtgaagcttcccggctcgtataccgtctggatacgtgtg

SEQ ID NO: 301662 - DNA, 75 bp, synthetic construct
  source 1..75: mol_type = other DNA
ggagatacaaaaaacaatttatttatttcgccggacaacaatttttaattctttatgccccgacacgttctggta

SEQ ID NO: 301663 - DNA, 75 bp, synthetic construct
  source 1..75: mol_type = other DNA
tttaaggcaccgcaaggcgtatcagtcgagacacacttacgcctgctggtcgctgtctgccggggccaatccgag

SEQ ID NO: 301664 - DNA, 75 bp, synthetic construct
  source 1..75: mol_type = other DNA
gtgcaccttatccagcccgctatcagtgtcctgaaaaatcaggctgaaatgacaagactgggtaagcagtacaac

SEQ ID NO: 301665 - DNA, 75 bp, synthetic construct
  source 1..75: mol_type = other DNA
attaaaaaaactatatccagttgaagcaaatgagtttagagcacggttaagacaaataggtccaactaagaatga

SEQ ID NO: 301666 - DNA, 75 bp, synthetic construct
  source 1..75: mol_type = other DNA
ttgatgctcttaaaagccaggcggaaatgaccatgcttggaaagcaacattctgttgaggtaaagcagagggaat

SEQ ID NO: 301667 - DNA, 75 bp, synthetic construct
  source 1..75: mol_type = other DNA
cgggatattcgtaaaaagcccatgtcaatttatcttggtctgacaccggatgctttaatcactcatgagaaaatt

SEQ ID NO: 301668 - DNA, 75 bp, synthetic construct
  source 1..75: mol_type = other DNA
tataggggaaagccgactggcctcatctgtaacaaaagaagatttactcttcatcaggaaagatttattgaccgg

SEQ ID NO: 301669 - DNA, 75 bp, synthetic construct
  source 1..75: mol_type = other DNA
agtttggtgttgataacagctacctggcagataatccgtttaaagggatatcgccattaaaggaatcaagaacca

SEQ ID NO: 301670 - DNA, 75 bp, synthetic construct
  source 1..75: mol_type = other DNA
gctgtatccgcgtgtagaacaccaggcggtgctggctgtcgtagtggtagtggtgggtccgctcgtcgtccgtcc

SEQ ID NO: 301671 - DNA, 75 bp, synthetic construct
  source 1..75: mol_type = other DNA
agccggacggcacggtggagatcagtgtcaccagccagacggcgggcaccagtgcggtcaccgccagcatcaaca

SEQ ID NO: 301672 - DNA, 75 bp, synthetic construct
  source 1..75: mol_type = other DNA
ggggtaaataaaaaagaaattacggtgaaagaacttgaagaaaagtggctggatctgaaacgcatggaaatctct

SEQ ID NO: 301673 - DNA, 75 bp, synthetic construct
  source 1..75: mol_type = other DNA
ggctgtgtacacaggaatgcgtcacggtgaactggtctccctggcctgggaagatatcgatctgaaagcaggaac

SEQ ID NO: 301674 - DNA, 75 bp, synthetic construct
  source 1..75: mol_type = other DNA
gattaatacagaatatcgtaatggttttatttcagaaagtacatatttacgctatcttaatgtccttgttaatat

SEQ ID NO: 301675 - DNA, 75 bp, synthetic construct
  source 1..75: mol_type = other DNA
ccaaaatggatatcccttatttattgaggttcataataaaggtagctggagtgaggagaatactggtgacaatga

SEQ ID NO: 301676 - DNA, 75 bp, synthetic construct
  source 1..75: mol_type = other DNA
ggttatcaataccccagagacgaaactgtcaggctcatcccatgtcggtattgatgagtgggcgtggcatcgggg

SEQ ID NO: 301677 - DNA, 75 bp, synthetic construct
  source 1..75: mol_type = other DNA
aagaaaataagccatcttatgaatgtatgattattgctgaaaactgtctggcgctagcaagcagggcaaccgaag

SEQ ID NO: 301678 - DNA, 75 bp, synthetic construct
  source 1..75: mol_type = other DNA
ttatgcttccatcggaaacgatgatctggcagcctgagttcacagataaaacactctccaggaaacccggggcgg

SEQ ID NO: 301679 - DNA, 75 bp, synthetic construct
  source 1..75: mol_type = other DNA
tccacgccggaactgtttggatcgggaaacagcacttcgcatgtggacagaaaatgttacctggttctccaacga

SEQ ID NO: 301680 - DNA, 75 bp, synthetic construct
  source 1..75: mol_type = other DNA
cagctaatttgtgtcagaaaccaggagaaacaacccgtctgactgagaaatttgacgatattatttttaaagtcg

SEQ ID NO: 301681 - DNA, 75 bp, synthetic construct
  source 1..75: mol_type = other DNA
ctccattcgttaaatattttaggataaagtatattttttattccttactaatatcgtttacttttgtttttatag

SEQ ID NO: 301682 - DNA, 75 bp, synthetic construct
  source 1..75: mol_type = other DNA
gtaaattgctgccgtggtataacccttgcaaaatctggctgactggctgcgtctggcattcggcagcgccattgt

SEQ ID NO: 301683 - DNA, 75 bp, synthetic construct
  source 1..75: mol_type = other DNA
cagttgctaagcaatggaaatgatatgtttgtaaaggatccatcggcaactaataaaaccagtttatcatttatg

SEQ ID NO: 301684 - DNA, 75 bp, synthetic construct
  source 1..75: mol_type = other DNA
gggcgcgacaatcgcggccccggctgcaatgacggccaccaaggatacagcctcatcggcatcagatgttgctgg

SEQ ID NO: 301685 - DNA, 75 bp, synthetic construct
  source 1..75: mol_type = other DNA
gagcgccttgcaaaatacattgaaatggcaaagcatattgaccatgagatttctgataatggttacaggccttct

SEQ ID NO: 301686 - DNA, 75 bp, synthetic construct
  source 1..75: mol_type = other DNA
cacttctcttttttttgaatttatcagttgttgatgcaaatgaaattagtgttatgaacataaaatatggttatg

SEQ ID NO: 301687 - DNA, 75 bp, synthetic construct
  source 1..75: mol_type = other DNA
ccggataaacgcagtgcccgtgcgcagcgcgatgactggctgaagagagagatacagcgcgtatacgatgaaaat

SEQ ID NO: 301688 - DNA, 75 bp, synthetic construct
  source 1..75: mol_type = other DNA
ggacggttcgacggcgaacacgctgcgggcgagggtgaccgatgcgttcggcaatgcgcttgccggacagacggt

SEQ ID NO: 301689 - DNA, 75 bp, synthetic construct
  source 1..75: mol_type = other DNA
acattaaaaagttagttaagctgatgaaaaaaaatataaatagcttaagtaacgagcaaaaaggagctatggcct

SEQ ID NO: 301690 - DNA, 75 bp, synthetic construct
  source 1..75: mol_type = other DNA
ttgccaccactggcgatgccagcggtaccgcgacctttaacctgaaagcacgttacaaatcattcctggacaaag

SEQ ID NO: 301691 - DNA, 75 bp, synthetic construct
  source 1..75: mol_type = other DNA
cggatggttatactgaatcgtctggatgatattccgactttgaaacaaaaacgtccagttgaatacagagaatta

SEQ ID NO: 301692 - DNA, 75 bp, synthetic construct
  source 1..75: mol_type = other DNA
aacattgagacattcgtacaggcagagttactccgctatgccgctcagggtcttgaacaatccgtattcgataag

SEQ ID NO: 301693 - DNA, 75 bp, synthetic construct
  source 1..75: mol_type = other DNA
gtggacagatcggcacggaagcgccagcgacgcggtggcggcagagccgcagacgcggcgtgagcgcaaccatgc

SEQ ID NO: 301694 - DNA, 75 bp, synthetic construct
  source 1..75: mol_type = other DNA
ggccggtatcgccggtgtgtgacgttttacggtttcagtgaacgtcctcaggtggcggcttatgcgtttgatgtt

SEQ ID NO: 301695 - DNA, 75 bp, synthetic construct
  source 1..75: mol_type = other DNA
gttatccagcagctgccatcactttgattggtagcgacgctcatccacaatgtcaaagcctgttttttaaatttg

SEQ ID NO: 301696 - DNA, 75 bp, synthetic construct
  source 1..75: mol_type = other DNA
aaagaagcaaaactgctggcatcaacagggagtacaggtgactcgtatgacaacgcgatggcggagagcatcaat

SEQ ID NO: 301697 - DNA, 75 bp, synthetic construct
  source 1..75: mol_type = other DNA
tgcgggtaacccgaacctgctgtccgttgaccaggcaggcggcgtcggtattgaaattctgactaacgacgaaaa

SEQ ID NO: 301698 - DNA, 75 bp, synthetic construct
  source 1..75: mol_type = other DNA
atttaaacgccggcgatagcgtaattggagatatatataaaaatatcaaagagccatgtttgattaaagttggcc

SEQ ID NO: 301699 - DNA, 75 bp, synthetic construct
  source 1..75: mol_type = other DNA
gtggactcggtgatccactcagcggtgatggcggcctgtttatggcagttacccggtattcgtacccatctggtg

SEQ ID NO: 301700 - DNA, 75 bp, synthetic construct
  source 1..75: mol_type = other DNA
attcaccactgttaattaccggttcgataaatgcaagtggactggtatttatcgactcatattacgataatccgt

SEQ ID NO: 301701 - DNA, 75 bp, synthetic construct
  source 1..75: mol_type = other DNA
ttatttttagcattgccagataacttacagtttaattttgttaaaaggatggaaaaaaatcccctgcctactttt

SEQ ID NO: 301702 - DNA, 75 bp, synthetic construct
  source 1..75: mol_type = other DNA
gcagaaaccgatgcggagtggtggattgtggcgatgaataatccccattttcctgctgacgttctgaaagtcagg

SEQ ID NO: 301703 - DNA, 75 bp, synthetic construct
  source 1..75: mol_type = other DNA
cgaaaagtggtgataactcccactggtattgaccgacaatactatgaatgttgtgcacttagtgagctgaaaggg

SEQ ID NO: 301704 - DNA, 75 bp, synthetic construct
  source 1..75: mol_type = other DNA
aacagcgcaacggtcactccgacggtcaccacgcagtcggacggtacggtggagttcagtgtcaccagtcagacg

SEQ ID NO: 301705 - DNA, 75 bp, synthetic construct
  source 1..75: mol_type = other DNA
acgccagaagagagtgacaaaattgcagcatatttataccaaaaattcgagagtgacgatgatttaaccgacacg

SEQ ID NO: 301706 - DNA, 75 bp, synthetic construct
  source 1..75: mol_type = other DNA
acggcctcagtggtcaccgccattccgtgggttgctgcgctgtttggcacctggcttattcctcgttactccgat

SEQ ID NO: 301707 - DNA, 75 bp, synthetic construct
  source 1..75: mol_type = other DNA
cggatttatgggacatcccggctggttctggatgtttgtgattgaaggattgctggcggtgggcgcaggcgtatt

SEQ ID NO: 301708 - DNA, 75 bp, synthetic construct
  source 1..75: mol_type = other DNA
ctggcagcggtggcggtcatcggttcgctgattattttcactctgcgtgtaagtcgcgctgttgcgcagaccaac

SEQ ID NO: 301709 - DNA, 75 bp, synthetic construct
  source 1..75: mol_type = other DNA
tgaccgatcagcaattgggttaccagcctgttgttctggggttgctcgaccgtgaaccgctctctgtcgaaataa

SEQ ID NO: 301710 - DNA, 75 bp, synthetic construct
  source 1..75: mol_type = other DNA
aacaaggaggagccatgatcgttactatcccacgagatcttgccaccgatcctggctggtcaccgggcacagaga

SEQ ID NO: 301711 - DNA, 75 bp, synthetic construct
  source 1..75: mol_type = other DNA
ttggtacgacgacactgctgtggggatttctttcggcggcaatggcatgggccgatactgaagtgaaatttctga

SEQ ID NO: 301712 - DNA, 75 bp, synthetic construct
  source 1..75: mol_type = other DNA
acaccataacggagaccgtgagaaaaacggcgatgcaaatcacctggagagggatgtatcagaggttactgaagg

SEQ ID NO: 301713 - DNA, 75 bp, synthetic construct
  source 1..75: mol_type = other DNA
gcagtgctttagttgccaacacgggcgcagggactgatattgaaggatacaacaagctctctcacttcactatta

SEQ ID NO: 301714 - DNA, 75 bp, synthetic construct
  source 1..75: mol_type = other DNA
ttattcaacaaagccgataacaccagcacctcggatgttattgaagtttattctggtggcgtgcttgatgttagt

SEQ ID NO: 301715 - DNA, 75 bp, synthetic construct
  source 1..75: mol_type = other DNA
cacctcggatgttattgaaatttattccggtggcgtgcttgatgttagaggtggtatggcaacaaatgttactca

SEQ ID NO: 301716 - DNA, 75 bp, synthetic construct
  source 1..75: mol_type = other DNA
gcgacccgaatagataacggcggggtaatggatgttgccggaaacgcgaccaataccataatcaatggtggtaca

SEQ ID NO: 301717 - DNA, 75 bp, synthetic construct
  source 1..75: mol_type = other DNA
ttattcgccagtttaatctgttcatcaacaagaacagccatttgaaaaagatcagagtttcagacgtgatgaaaa

SEQ ID NO: 301718 - DNA, 75 bp, synthetic construct
  source 1..75: mol_type = other DNA
tagccggtaaaatgagcagcggtggagccgccaacggcagttatcgcagcaacgggctgggcggtcacattgaaa

SEQ ID NO: 301719 - DNA, 75 bp, synthetic construct
  source 1..75: mol_type = other DNA
atgatcttcagcgcattaaaagaaatatatgatggagatcctagttttatcttcgataagatatcacacaaactc

SEQ ID NO: 301720 - DNA, 75 bp, synthetic construct
  source 1..75: mol_type = other DNA
cctttggagtgtccgggacaccgtcttttatagtgaaaggaaaatatctggtccgtaataacgggatagcttcag

SEQ ID NO: 301721 - DNA, 75 bp, synthetic construct
  source 1..75: mol_type = other DNA
aaagagtaaagcggatatccggcaggtttttattgattcagggattccggcagagcagtttgatgcagccatgaa

SEQ ID NO: 301722 - DNA, 75 bp, synthetic construct
  source 1..75: mol_type = other DNA
ggaagtattattgaatctggtggccgtcaatatgtatcagccaatggtactcatcaggggcaggccaataataca

SEQ ID NO: 301723 - DNA, 75 bp, synthetic construct
  source 1..75: mol_type = other DNA
atgaacaggaccagtccccattattgtcgtcgctcagtactttccttactaatatctgccttgatatatgctccg

SEQ ID NO: 301724 - DNA, 75 bp, synthetic construct
  source 1..75: mol_type = other DNA
cctggccgcagggaaaaccctttccgtcacgtcgcaaaatgccatcaccaacggcggtgtgatgcagggtgatgc

SEQ ID NO: 301725 - DNA, 75 bp, synthetic construct
  source 1..75: mol_type = other DNA
aaaatattgatgtcgcgacttgtatgactattactgatgatagcaaacctttgaaaaattatgcatcaagggact

SEQ ID NO: 301726 - DNA, 75 bp, synthetic construct
  source 1..75: mol_type = other DNA
gatcccagtgctgctcagtgacgacggcagcattttcaatgaagggctgggagataagctggcgaaagaacgcaa

SEQ ID NO: 301727 - DNA, 75 bp, synthetic construct
  source 1..75: mol_type = other DNA
ggcgcaggaactggctgacctgctggaagcggtgcagggcattctcgacgaatacctgctggatggtggcgagca

SEQ ID NO: 301728 - DNA, 75 bp, synthetic construct
  source 1..75: mol_type = other DNA
atcaggtggcagcggcaaggctgacaacgttcagtgactggaaggtcatcagcgatacagcccgcggcgacctga

SEQ ID NO: 301729 - DNA, 75 bp, synthetic construct
  source 1..75: mol_type = other DNA
taaacgccttcaccaacctttcggtgcagtcgcaggtgtacgccagccagacgacgctacagcaacttttaagca

SEQ ID NO: 301730 - DNA, 75 bp, synthetic construct
  source 1..75: mol_type = other DNA
gtggtttttattttcagacaggagaggctttctgatgaaacggttaattatcagaattgtcatattctttttttg

SEQ ID NO: 301731 - DNA, 75 bp, synthetic construct
  source 1..75: mol_type = other DNA
ttcgtgcactgggcgaagaattcgccacggtgctggcggatttacagcgcacatttgaggggaagatggccgcgc

SEQ ID NO: 301732 - DNA, 75 bp, synthetic construct
  source 1..75: mol_type = other DNA
ccaaatacagaacctgtaaacacccttttgagcaacaatttcatcaggatcaataagaatattacattatctgat

SEQ ID NO: 301733 - DNA, 75 bp, synthetic construct
  source 1..75: mol_type = other DNA
gattgtgagccaagcaaagtcagttatcttcgtaatcttggattcagatatactcgtttgattgatgacataaca

SEQ ID NO: 301734 - DNA, 75 bp, synthetic construct
  source 1..75: mol_type = other DNA
agaaagcttatttgccttattgggtataagtgatatcgataaatttgaaaagctgatttccgatggtgtagaaaa

SEQ ID NO: 301735 - DNA, 75 bp, synthetic construct
  source 1..75: mol_type = other DNA
tgatggggcgcgaaagcggcagcctcgattttgccagtttcgcacgctttcactttctccggggctggcgtcggc

SEQ ID NO: 301736 - DNA, 75 bp, synthetic construct
  source 1..75: mol_type = other DNA
cgataacccagcgcactatgcggatgccattcgttataatgctcgaacgcctctgcaaggttctttgctgccgtt

SEQ ID NO: 301737 - DNA, 75 bp, synthetic construct
  source 1..75: mol_type = other DNA
tgcctcatcgattaataaagaaaaattactggaggttcgtaaagagttactgactggataccagatccctggatt

SEQ ID NO: 301738 - DNA, 75 bp, synthetic construct
  source 1..75: mol_type = other DNA
cagtctggctattaagctttccggcatcacatcgctggtgggcggcgtgattggcatcatcagcggaattacgca

SEQ ID NO: 301739 - DNA, 75 bp, synthetic construct
  source 1..75: mol_type = other DNA
atgactggttggagcgatgccaattattcaaaaaactacactattaacagaggtgaagtaagtatgcttcgttca

SEQ ID NO: 301740 - DNA, 75 bp, synthetic construct
  source 1..75: mol_type = other DNA
tgggcgggtatcacgctggaaaaatttatctgcttcctggacaggtacatacgctggtataacgagaaacgtatc

SEQ ID NO: 301741 - DNA, 75 bp, synthetic construct
  source 1..75: mol_type = other DNA
gcgcaggtgaaagtgcttaaacgcgataaagcgccggctcgtgaaaaagccctgaaatgtactgaccccaaaaag

SEQ ID NO: 301742 - DNA, 75 bp, synthetic construct
  source 1..75: mol_type = other DNA
aagcttttgcacgaaaataacaatatatcatattatcagttaaatagttttggcgtgactaaaagcagaaatttt

SEQ ID NO: 301743 - DNA, 75 bp, synthetic construct
  source 1..75: mol_type = other DNA
cagaggaagttgtaaaccagaggaatataaaagttaaaaacatgaccttagatgaaataaacaatacttactgta

SEQ ID NO: 301744 - DNA, 75 bp, synthetic construct
  source 1..75: mol_type = other DNA
tggcctggcaattctttcgcctggtgcatttgaagttcactctgacggaatagatgtggataacgaattgtttca

SEQ ID NO: 301745 - DNA, 75 bp, synthetic construct
  source 1..75: mol_type = other DNA
acgggataagcaaaccaacggacttatttacctggcacggtaaagataaaaaatacaacactctcgccattgtaa

SEQ ID NO: 301746 - DNA, 75 bp, synthetic construct
  source 1..75: mol_type = other DNA
cttgagcttataaaaaatgccatacgaggaaacagcaatcctgagagaattaatatcaataattccgcagttact

SEQ ID NO: 301747 - DNA, 75 bp, synthetic construct
  source 1..75: mol_type = other DNA
gttaatagattagtacaagagctcaaaaacctttttaatggtaagcaaggaataagcacctgtgttaaacatcta

SEQ ID NO: 301748 - DNA, 75 bp, synthetic construct
  source 1..75: mol_type = other DNA
tccacgtataactacatttcagcgtttatttactcgcgctgatttatatgcgcgtgtccataacgggaaaatagt

SEQ ID NO: 301749 - DNA, 75 bp, synthetic construct
  source 1..75: mol_type = other DNA
aagagttcaaaaacctttttaatggtaaggaaggaataagcacctgtattaaacatctacttgagcttataaaaa

SEQ ID NO: 301750 - DNA, 75 bp, synthetic construct
  source 1..75: mol_type = other DNA
accaacaaaatcacctgcgaacgatgaaaacaaaaaagtcggtcaaaccatcatcagtgaaaatgtagtagagaa

SEQ ID NO: 301751 - DNA, 75 bp, synthetic construct
  source 1..75: mol_type = other DNA
cgctttcgtctcagggtgggggcatacaggattatttttgatattgaagatggtgatcctgttgtattggaaata

SEQ ID NO: 301752 - DNA, 75 bp, synthetic construct
  source 1..75: mol_type = other DNA
tattattgactggactttgaccataaccaccaaggatagaacactgcacgaagagtccggtacagcaacgcaggt

SEQ ID NO: 301753 - DNA, 75 bp, synthetic construct
  source 1..75: mol_type = other DNA
atcgaccaccggggctgggggggctcagacgcacctaaatcaggataccgaattggtgaccttgctcgggatgcc

SEQ ID NO: 301754 - DNA, 75 bp, synthetic construct
  source 1..75: mol_type = other DNA
cggagaaagtccttcgccagagaatgctggatatagccaaagggaaactaaaaccagaacctgacgaaccgcgag

SEQ ID NO: 301755 - DNA, 75 bp, synthetic construct
  source 1..75: mol_type = other DNA
ctttcgaaagttacttcaacaatgagcttgatagaaaaacatctatctatttcccccttggccaggtgcaagaag

SEQ ID NO: 301756 - DNA, 75 bp, synthetic construct
  source 1..75: mol_type = other DNA
gataccagatttggtatatggaattatgcttggcatgcgtttgttaataatccaataatcggccaaggttatgga

SEQ ID NO: 301757 - DNA, 75 bp, synthetic construct
  source 1..75: mol_type = other DNA
ttagaacgcccattactaacggcgattcgtggattagatttcagtgaagtatataaacatgaagataataacgta

SEQ ID NO: 301758 - DNA, 75 bp, synthetic construct
  source 1..75: mol_type = other DNA
gttacacagatggttgcagaaggtaaatcggcctttcgggaaaagaactggaatgaaaaaaccaaactaggacag

SEQ ID NO: 301759 - DNA, 75 bp, synthetic construct
  source 1..75: mol_type = other DNA
cgcggcgaacagcaacgatgacgcatcactgcctccgccggagcaggataaacgctgggaaccgccttctccagg

SEQ ID NO: 301760 - DNA, 75 bp, synthetic construct
  source 1..75: mol_type = other DNA
gcaaataaatagatctaacggcgagtctcgcaggaagtctatcatgatgcagaagtcacacgccaaccgctacgg

SEQ ID NO: 301761 - DNA, 75 bp, synthetic construct
  source 1..75: mol_type = other DNA
tcgtgaacgtcttaataaagctagtaggcatgaaaagtttgcgatactggatgaattagagatcatgaaccgcga

SEQ ID NO: 301762 - DNA, 75 bp, synthetic construct
  source 1..75: mol_type = other DNA
tgatcagtgattcggtactaatcgtcgagaacatcgaccgattgacacgccttgatccttatatggcaattgaaa

SEQ ID NO: 301763 - DNA, 75 bp, synthetic construct
  source 1..75: mol_type = other DNA
caatgatgaaatttatcgccgtcagcgagagatgaaggatgaactgaataatctggaggatttgaagtcggttag

SEQ ID NO: 301764 - DNA, 75 bp, synthetic construct
  source 1..75: mol_type = other DNA
tcagaactgaagtgaagcgcagtcgactgttaattgacgagtatctgttaatcaggaaaatagcagacgtccaga

SEQ ID NO: 301765 - DNA, 75 bp, synthetic construct
  source 1..75: mol_type = other DNA
atttcactcaggtgctccttggacatcgttcatccagcatgacggataaataccgtgacggacgagggagggaat

SEQ ID NO: 301766 - DNA, 75 bp, synthetic construct
  source 1..75: mol_type = other DNA
gatcgctctctggaaaaccgccgtatgcaggcagggcaggtaatcagtggtgcaattctgattgtgacgactgag

SEQ ID NO: 301767 - DNA, 75 bp, synthetic construct
  source 1..75: mol_type = other DNA
ctgaaatgccaatgagtcaggagcctttcttcatcattgccttcggttatgtgaaaaaagcagctgcgatggcta

SEQ ID NO: 301768 - DNA, 75 bp, synthetic construct
  source 1..75: mol_type = other DNA
tcaaccaatatgaactgcaacgaagtgatttgcaatcttgctgcagaaaaacttggtggcgttaaaggggattac

SEQ ID NO: 301769 - DNA, 75 bp, synthetic construct
  source 1..75: mol_type = other DNA
attcggaggatgaccattcctgtagacaatataattaacatctatcctgatctacataaaaaaatgacaatgatc

SEQ ID NO: 301770 - DNA, 75 bp, synthetic construct
  source 1..75: mol_type = other DNA
gtgtccagattcattgtgatccttctggttgctgtgctggccgggttgctgtggctgcgacatgaaaatgagaac

SEQ ID NO: 301771 - DNA, 75 bp, synthetic construct
  source 1..75: mol_type = other DNA
agcaggtgaaactgtctatgcagaaactggatgaactgcttactgcaatggttcaggcacaggtcgatcgcaatg

SEQ ID NO: 301772 - DNA, 75 bp, synthetic construct
  source 1..75: mol_type = other DNA
gttcgaatggaacggtcatacctggaatggtggtcctgactcgatggcgcggctttatccggcagtaatagcatc

SEQ ID NO: 301773 - DNA, 75 bp, synthetic construct
  source 1..75: mol_type = other DNA
acatcaatgactggcttggcgaagaggtgatccgctttaacccttacgcactgttagacacccagcccacatcct

SEQ ID NO: 301774 - DNA, 75 bp, synthetic construct
  source 1..75: mol_type = other DNA
atgtctttactggggggtgattccgccatttatgttagattgaaaaaaactatcaatttaattaatatttatcac

SEQ ID NO: 301775 - DNA, 75 bp, synthetic construct
  source 1..75: mol_type = other DNA
caatggtaactcagaccttataacaaatgaaatgagagaggcttgcgttataaaccttgttgttgataacctcaa

SEQ ID NO: 301776 - DNA, 75 bp, synthetic construct
  source 1..75: mol_type = other DNA
agaaggaaacgatggacagtttaatcaggtctttgctgaaatggtggcatggcacaatgtgacgggattctctga

SEQ ID NO: 301777 - DNA, 75 bp, synthetic construct
  source 1..75: mol_type = other DNA
tatctattcctctttatactaaaatgacggatcaagatcagttgttcgttatcaaatcgattagacaattattta

SEQ ID NO: 301778 - DNA, 75 bp, synthetic construct
  source 1..75: mol_type = other DNA
tgctggcgtcactggaggggtggctgcgggagaaacagaaaaccctctcaaggcactcagaactggcgaaggcgt

SEQ ID NO: 301779 - DNA, 75 bp, synthetic construct
  source 1..75: mol_type = other DNA
aaaggctgttattgaaaatttgatatcaaaaaatattaaagtatatacacttacgatggataataatgagggtaa

SEQ ID NO: 301780 - DNA, 75 bp, synthetic construct
  source 1..75: mol_type = other DNA
atgattgaaggcatattaagcaaaaatcacaacgccagattaagtggatacatattcgttgatttttcagtaagt

SEQ ID NO: 301781 - DNA, 75 bp, synthetic construct
  source 1..75: mol_type = other DNA
gtcttacgtgcaatagctgttcaatgcattgccaaataatgcccgaagagtcaccacgcttgcagtattgcgcaa

SEQ ID NO: 301782 - DNA, 75 bp, synthetic construct
  source 1..75: mol_type = other DNA
cggcgtggcgcggggagtatgatgaatggggcaaccagcttaatgaagagaacccgtattacctgcaccagccat

SEQ ID NO: 301783 - DNA, 75 bp, synthetic construct
  source 1..75: mol_type = other DNA
atggggcaattacatggtgtggaaaccatcgagctgacggcaggcacggtggcagtcaccacaatagagacagcc

SEQ ID NO: 301784 - DNA, 75 bp, synthetic construct
  source 1..75: mol_type = other DNA
gcaatctgaggaccctggctgactgcctgaataccgatgaatggccagctattaaaacgttatcactgccccgct

SEQ ID NO: 301785 - DNA, 75 bp, synthetic construct
  source 1..75: mol_type = other DNA
cctcaataccgatgaatggccagctattaagacgttatcactgccccgctgggctaaggaatatgcaaatgacta

SEQ ID NO: 301786 - DNA, 75 bp, synthetic construct
  source 1..75: mol_type = other DNA
actgtgcagccggcgcatccctccaggaagtggtacagcgtcgtcagtcctacggcgccagaactgaattattgc

SEQ ID NO: 301787 - DNA, 75 bp, synthetic construct
  source 1..75: mol_type = other DNA
aaaacactctctatcgaaatgaataaattaaagcaggcacgatattccattggcattgccatgagtgaagaaaaa

SEQ ID NO: 301788 - DNA, 75 bp, synthetic construct
  source 1..75: mol_type = other DNA
agattaacgaccagcgtaacgcgctgtcggtgatcgtccgggtggaagaaaaaacgaatccggaagagcagcgtg

SEQ ID NO: 301789 - DNA, 75 bp, synthetic construct
  source 1..75: mol_type = other DNA
gttatgatgaagcacataatcactaccagccgaatcttaatctggttttatttgtgaaaaatcatgggttgcata

SEQ ID NO: 301790 - DNA, 75 bp, synthetic construct
  source 1..75: mol_type = other DNA
ttgtccgtattgtggaaaccggcagtatgggcagcgcggcgcttgatctcgacatcggtgtctcagcgctcagtc

SEQ ID NO: 301791 - DNA, 75 bp, synthetic construct
  source 1..75: mol_type = other DNA
acgagtcctggcgatacgacgggagcgataaatacccgtggtctcagcctgtgctgtatcacatttgcctcgaga

SEQ ID NO: 301792 - DNA, 75 bp, synthetic construct
  source 1..75: mol_type = other DNA
catgatatccggttacggaaatcctatctatgacgaaatgctgagcggatggcgctgcgagcgatttaacgccaa

SEQ ID NO: 301793 - DNA, 75 bp, synthetic construct
  source 1..75: mol_type = other DNA
atgagtacaaaggcaagtaaggcatccgtgaacagtagctatacattgtcattatctgccaatcggtacagtatc

SEQ ID NO: 301794 - DNA, 75 bp, synthetic construct
  source 1..75: mol_type = other DNA
ccagtttgcatctgtatctcaagagatgagtacaaaggcaagtaaggcatccgtgaacagtagctatacattgtc

SEQ ID NO: 301795 - DNA, 75 bp, synthetic construct
  source 1..75: mol_type = other DNA
acctcgcgtggcgtaacgccaactaactcggggctggccttttactcacaggcacagctggcgttgcgtcatgct

SEQ ID NO: 301796 - DNA, 75 bp, synthetic construct
  source 1..75: mol_type = other DNA
gccagcatcctgcaatccactgcatctgccgaaccggtcaataaactggtcgtggacagcatgattgcagatatt

SEQ ID NO: 301797 - DNA, 75 bp, synthetic construct
  source 1..75: mol_type = other DNA
ccttctgtatgacaattttttcggtaatcagcccacaggaagtgctatcagtcggcacgtctgtgataactaata

SEQ ID NO: 301798 - DNA, 75 bp, synthetic construct
  source 1..75: mol_type = other DNA
gaatgcggacgttatccggttgaaattttcatgatgggcgaagaagcaaaactggcaggccagcaggaatatcac

SEQ ID NO: 301799 - DNA, 75 bp, synthetic construct
  source 1..75: mol_type = other DNA
ctcgcttatacaaccgtatagaccaaatggagccaatagaacgaggcgagttgattcaatggcttaatttaaaat

SEQ ID NO: 301800 - DNA, 75 bp, synthetic construct
  source 1..75: mol_type = other DNA
ttataagcacgtttattcgtccggtttcggacagtttggcggtgaacccatcgctgcgtgctgggcgcttatgag

SEQ ID NO: 301801 - DNA, 75 bp, synthetic construct
  source 1..75: mol_type = other DNA
agggggacatgacccgcaagggactggatattgtgcagggttcagcaggtgtgctgataggtgcgccgacgggag

SEQ ID NO: 301802 - DNA, 75 bp, synthetic construct
  source 1..75: mol_type = other DNA
ggcggtatatcaccccggacccgattgggttgagaggtggatggaatatgtatcagtatccgttgaatcccatac

SEQ ID NO: 301803 - DNA, 75 bp, synthetic construct
  source 1..75: mol_type = other DNA
ccgcatcacctgcaccagccgtaccggctgccggggcagcagtatgataaggagtcggggctgtactataaccgt

SEQ ID NO: 301804 - DNA, 75 bp, synthetic construct
  source 1..75: mol_type = other DNA
gttcgcctgagtccgcatgtgtacctggcgacaaacagccttcaggggccgtggtggatactcagctggccggag

SEQ ID NO: 301805 - DNA, 75 bp, synthetic construct
  source 1..75: mol_type = other DNA
aagagctgatgatcctaatagctcaataaccggtgaaactacgataccagtagaaacttacacacctgatgattc

SEQ ID NO: 301806 - DNA, 75 bp, synthetic construct
  source 1..75: mol_type = other DNA
gggtatggcggcgggagcgtgacctgacggggtggatgtcgctgtcgcgtaaaccggaggagacctggtacgggt

SEQ ID NO: 301807 - DNA, 75 bp, synthetic construct
  source 1..75: mol_type = other DNA
atgatcttacccaccaatatcctcaaaagcgatcccgccgtcagccagctggaggcggtgaaaaaaggccatatc

SEQ ID NO: 301808 - DNA, 75 bp, synthetic construct
  source 1..75: mol_type = other DNA
gtcttggtaagcttcaggatatttgtcgttcccgttcatcggtacctcatgaaattgggcatctacttttgttgg

SEQ ID NO: 301809 - DNA, 75 bp, synthetic construct
  source 1..75: mol_type = other DNA
atttggtatcaaatccaatggatctaacggtaaaagtacccgctgctacgattctcgttattagttttacttcat

SEQ ID NO: 301810 - DNA, 75 bp, synthetic construct
  source 1..75: mol_type = other DNA
gcaagggatcgtatgcagcatgaacggtataaagatgaattgcgacagaaaatgggaaaacccgacgttacagat

SEQ ID NO: 301811 - DNA, 75 bp, synthetic construct
  source 1..75: mol_type = other DNA
gcgacccgataaactcaataatcaactgacaccactgcgtggtaaaccgcaaattcagttcacgcaaaactggcc

SEQ ID NO: 301812 - DNA, 75 bp, synthetic construct
  source 1..75: mol_type = other DNA
ctacggcctcacaacttctcgacgaacaagaagccattaccgttttcgattttaaaaccaagctggagctgcaaa

SEQ ID NO: 301813 - DNA, 75 bp, synthetic construct
  source 1..75: mol_type = other DNA
ccgccgttttcacctggtgctgaccacacaggcacagcgggcggaagtattccgtaaacagcgcgccacgtcttt

SEQ ID NO: 301814 - DNA, 75 bp, synthetic construct
  source 1..75: mol_type = other DNA
accttaccgttcaggcaaatggtatggtatgaaaattgtgtctgggcaacgtctgattatggtgtgtggcaaata

SEQ ID NO: 301815 - DNA, 75 bp, synthetic construct
  source 1..75: mol_type = other DNA
ccatttgttatggcgaagctatgaaaatagctgggagcaaatattcagcgcaggtgttggtgcctcctggcaaaa

SEQ ID NO: 301816 - DNA, 75 bp, synthetic construct
  source 1..75: mol_type = other DNA
tccacaagatttacccgatgatgttgttatcggaaacttatcaaagtctttcataccaagtaaaggagcaattat

SEQ ID NO: 301817 - DNA, 75 bp, synthetic construct
  source 1..75: mol_type = other DNA
tatgataatatgcattctattttttattatttaagaaatagcagggcgctttccatgttaatgttcagattcaag

SEQ ID NO: 301818 - DNA, 75 bp, synthetic construct
  source 1..75: mol_type = other DNA
aagttagtgtatgtgttatttcttttaaccaacaaaactatatacgacagtgcttggatggtgtcttttctcaga

SEQ ID NO: 301819 - DNA, 75 bp, synthetic construct
  source 1..75: mol_type = other DNA
atgattttgggtctaatcaacttaatgatcaatatctatagtgatatcaccaaccgtcaaaacgaaccgacaact

SEQ ID NO: 301820 - DNA, 75 bp, synthetic construct
  source 1..75: mol_type = other DNA
aaaatataacaatactcctcattggtgttagctataatgtgtatgcaggagactattttgatccatctttgctag

SEQ ID NO: 301821 - DNA, 75 bp, synthetic construct
  source 1..75: mol_type = other DNA
ctgatcctcgctattcagaatgtaacctccctgatgtaaatgaaagagggccaattgctgcgggtctttacattt

SEQ ID NO: 301822 - DNA, 75 bp, synthetic construct
  source 1..75: mol_type = other DNA
cagagcgatccgcgtcgtcagttggtagaaacattaacacgttgggatggcatcaatttgcttaatgatgatggt

SEQ ID NO: 301823 - DNA, 75 bp, synthetic construct
  source 1..75: mol_type = other DNA
atattaattctacacttggttatacgtggtctggaaatgtaaaaaacgtagattatagtctgtcaggcagtgctg

SEQ ID NO: 301824 - DNA, 75 bp, synthetic construct
  source 1..75: mol_type = other DNA
gaatatgcgtcttcatataatttattctattcatctaattttggatttaactttaatgaatggcgtttcaggact

SEQ ID NO: 301825 - DNA, 75 bp, synthetic construct
  source 1..75: mol_type = other DNA
tttttttgatcggattctagctcttaagtatcgaccagtaattaatagcgaaattatatcagcagaggactttcg

SEQ ID NO: 301826 - DNA, 75 bp, synthetic construct
  source 1..75: mol_type = other DNA
gaagcggccatagttcgttttacatcccagtaaccaacggggcaaacattaccactcaggggcaggcttatgacg

SEQ ID NO: 301827 - DNA, 75 bp, synthetic construct
  source 1..75: mol_type = other DNA
aatatttctttaaagctttttttctattttggtagtattgttataggtgtttttaattttattttgaatgatggt

SEQ ID NO: 301828 - DNA, 75 bp, synthetic construct
  source 1..75: mol_type = other DNA
atgaaggcgtattcaataaatcacccgtgtttccactggaaacagtgctcaaaacttaatcagtgtttccactgg

SEQ ID NO: 301829 - DNA, 75 bp, synthetic construct
  source 1..75: mol_type = other DNA
attcaggtctttaccttcgccctaacgaacgactttgataaccggtttattagtcgctgcatcaatcagctcacc

SEQ ID NO: 301830 - DNA, 75 bp, synthetic construct
  source 1..75: mol_type = other DNA
atgtggccaatcacggcacacatgatggctatcctcggtatccatcctgagacttatctagttcgaataacctct

SEQ ID NO: 301831 - DNA, 75 bp, synthetic construct
  source 1..75: mol_type = other DNA
agcaaaaaccaacggaggcatagttattcaggttggtggtaatttccaaggagaaaataacaatgaatcaaaaag

SEQ ID NO: 301832 - DNA, 75 bp, synthetic construct
  source 1..75: mol_type = other DNA
gctgagacagcggcaaaacgggcagaggatattgcatccgccgtggcgcttgaggatgcgagcacgacgaaaaag

SEQ ID NO: 301833 - DNA, 75 bp, synthetic construct
  source 1..75: mol_type = other DNA
cctactgctgaaactgttctgtaccgatctctgggcgcagggtgatgaagcgcatcgtgactggttgagtaaaaa

SEQ ID NO: 301834 - DNA, 75 bp, synthetic construct
  source 1..75: mol_type = other DNA
gcagcaaaacatgagaaacaaccggtaggtgttgtagcagccactcagcccatcaaattagtaaacaatatcgac

SEQ ID NO: 301835 - DNA, 75 bp, synthetic construct
  source 1..75: mol_type = other DNA
atgaagcataaaaattttattccgaaatggtatgattcaactcttgagtcaattccccatgatgttaacacgatt

SEQ ID NO: 301836 - DNA, 75 bp, synthetic construct
  source 1..75: mol_type = other DNA
gtgctcgccacaaaaaaaagaatcgaaatcgacgagccaacagagaaatttttactatattttaccagtgaagtc

SEQ ID NO: 301837 - DNA, 75 bp, synthetic construct
  source 1..75: mol_type = other DNA
atgcaatttaaagaactggaatccggacttcgtcagaagtttaccgacaaccgcatcgtcttctggcacgacccg

SEQ ID NO: 301838 - DNA, 75 bp, synthetic construct
  source 1..75: mol_type = other DNA
tgagctaaaagatctggtttcacgcctgcgtagccgatttaatgccagccgaatttttgttaccgccgatcacgg

SEQ ID NO: 301839 - DNA, 75 bp, synthetic construct
  source 1..75: mol_type = other DNA
cagccgggatgtgcagtacgatgcccgcccgttgctcggtttcacccgcgacgatgagcagatgattgaagacgt

SEQ ID NO: 301840 - DNA, 75 bp, synthetic construct
  source 1..75: mol_type = other DNA
ggctcaaagaccggccaaaccgcaacagccgggatgtgcagtacgatgcccgcccgttgctcggtttcacccgcg

SEQ ID NO: 301841 - DNA, 75 bp, synthetic construct
  source 1..75: mol_type = other DNA
gacaaaaaggaaaaagcataatttcttattggtggctcattgcaccggaaaaaacgcaggagaacccttaagcat

SEQ ID NO: 301842 - DNA, 75 bp, synthetic construct
  source 1..75: mol_type = other DNA
ccatcagtcaagagacgctattttttatgcaaatagagacaatattacgctatttaaagctgatccagctgttgc

SEQ ID NO: 301843 - DNA, 75 bp, synthetic construct
  source 1..75: mol_type = other DNA
taacgctgctggatatccggtatataacggacagattgccaaattcgttaccgtgcaaggccattctatggctgt

SEQ ID NO: 301844 - DNA, 75 bp, synthetic construct
  source 1..75: mol_type = other DNA
gcttaccgtatgtggggcatagcagagctacgctgggttgtgacgctcgccgccgggcttgaggatgagtctcag

SEQ ID NO: 301845 - DNA, 75 bp, synthetic construct
  source 1..75: mol_type = other DNA
ttatcgtggtttggttcatttattttctgtgtgattattcttcaaggttccatgtccagatatatgacgccgtcg

SEQ ID NO: 301846 - DNA, 75 bp, synthetic construct
  source 1..75: mol_type = other DNA
ttatcagcctcagcttatggcaatccatatgatgaactggggatttatattgagaaaaaagacatattctcaata

SEQ ID NO: 301847 - DNA, 75 bp, synthetic construct
  source 1..75: mol_type = other DNA
ctttcagcctcagcttacggaaacccatatgatgagcttggcatctttatagaaagaaaagatatattttcttta

SEQ ID NO: 301848 - DNA, 75 bp, synthetic construct
  source 1..75: mol_type = other DNA
tacaggtcaggaacagactaatatttaccttgctcttaaatttaggtttaagggctggagagttgctcaatctta

SEQ ID NO: 301849 - DNA, 75 bp, synthetic construct
  source 1..75: mol_type = other DNA
ggaagagagcaccacgctcgatagggaagcctttaaaaaactgctctctgagcgccagagcaaatactggtgtca

SEQ ID NO: 301850 - DNA, 75 bp, synthetic construct
  source 1..75: mol_type = other DNA
gtgcgcatatctcggtgcaaccctcgcagcatgaaatcccttatccttatgtcatcgatggctctgaattgacac

SEQ ID NO: 301851 - DNA, 75 bp, synthetic construct
  source 1..75: mol_type = other DNA
tcaatccggcccctgactgggtggaccgggagacgctgtaccgggaaggggcgtactggccggcggcggaggaag

SEQ ID NO: 301852 - DNA, 75 bp, synthetic construct
  source 1..75: mol_type = other DNA
tccgatgccgccggtggcgatgctcaatcagatgtgtgaccggctggtcagcagtctgggcagtgccggcgtgca

SEQ ID NO: 301853 - DNA, 75 bp, synthetic construct
  source 1..75: mol_type = other DNA
ggtgtatgccgttgagccggcgccgacggaagggcgctctgccggccgtctgctcgaaatccgggatgcggtgga

SEQ ID NO: 301854 - DNA, 75 bp, synthetic construct
  source 1..75: mol_type = other DNA
atccgctcaacaagctcgaccgcacccagaacgcgcatctgctgttgttcggcccgaccggggcgggcaagtcgg

SEQ ID NO: 301855 - DNA, 75 bp, synthetic construct
  source 1..75: mol_type = other DNA
gcgcctgctggaaatgtcggatgcgatggacatgttctgccaggggatcgacggcgaaatgttcgatcggcccgg

SEQ ID NO: 301856 - DNA, 75 bp, synthetic construct
  source 1..75: mol_type = other DNA
tacctgcgcggccgcgacctcgccgacctcgatatgcgcggccttcagctcggcaatgtcctgctcaatgccggt

SEQ ID NO: 301857 - DNA, 75 bp, synthetic construct
  source 1..75: mol_type = other DNA
cggaggtgagctgaaagaggatgcccgcctcacccgctctgaccgggcattaattcgcgaagcgattctgcacgc

SEQ ID NO: 301858 - DNA, 75 bp, synthetic construct
  source 1..75: mol_type = other DNA
cgtgcatcgtccccggttgtttattgccgaggcgggtaactcgtttggtctgctggccgattactttgaaagtct

SEQ ID NO: 301859 - DNA, 75 bp, synthetic construct
  source 1..75: mol_type = other DNA
cgaccagcatctggcgaggcccatcgtcaatatcactgatgaggcgcatatcattactgtgaatccgctgctggc

SEQ ID NO: 301860 - DNA, 75 bp, synthetic construct
  source 1..75: mol_type = other DNA
agtggagaaattgcgtacacccccggaggcagggacgctgaccggtgagaaggcccggggcgaaaagacggtgaa

SEQ ID NO: 301861 - DNA, 75 bp, synthetic construct
  source 1..75: mol_type = other DNA
tgctggccaaacgtattgaggcgctgttccgtgctgttccccccagtctgtatcttgctctgggcatgacggaga

SEQ ID NO: 301862 - DNA, 75 bp, synthetic construct
  source 1..75: mol_type = other DNA
taaactggtcgaagaagggctggcagcacatgctgttgatgaaagcgacctccccgatattgatgctgacagcga

SEQ ID NO: 301863 - DNA, 75 bp, synthetic construct
  source 1..75: mol_type = other DNA
agaacctgaagatagaacgttaacattgaatcagcaaatagaagttttaggtctcaaatttgctgtaaaagaaaa

SEQ ID NO: 301864 - DNA, 75 bp, synthetic construct
  source 1..75: mol_type = other DNA
aagctattatctatcaacaacagaatgagcaatcatatccaggtcaggaatttcttcttttacaactttgtatgc

SEQ ID NO: 301865 - DNA, 75 bp, synthetic construct
  source 1..75: mol_type = other DNA
tttctggcatagtttatgacatgcttaaacatcatgtttcgattactgcaacttcaataaaagaaaagttaaaaa

SEQ ID NO: 301866 - DNA, 75 bp, synthetic construct
  source 1..75: mol_type = other DNA
cctttttggcgctggtgccgaacaaaatgaacccgtgctctcctccggtacatgggaaattttaatggttcgcag

SEQ ID NO: 301867 - DNA, 75 bp, synthetic construct
  source 1..75: mol_type = other DNA
ctgacagcaacgatatcaccggacggtaaatgcagcaccatcgaatatgataaacgcgggcgtccggtgagtgtg

SEQ ID NO: 301868 - DNA, 75 bp, synthetic construct
  source 1..75: mol_type = other DNA
ccccggccagtccccgttctgtttcctcttctcaggttttccccgacacgctgcccaccggtacagagtacggtg

SEQ ID NO: 301869 - DNA, 75 bp, synthetic construct
  source 1..75: mol_type = other DNA
taacaacaattgacgaagagtattgtattcctgattatattatacataaaatggcggggttattcccacatgaac

SEQ ID NO: 301870 - DNA, 75 bp, synthetic construct
  source 1..75: mol_type = other DNA
attatgcacgtaccggagggcaggtgactgcagggaatgtgcaatcgattattggcgtgacttttgtttatcaat

SEQ ID NO: 301871 - DNA, 75 bp, synthetic construct
  source 1..75: mol_type = other DNA
tgaaaggtgctgctattttagctgtggtatttattcattcttcaggttatcttgctgtttctaatataggaacat

SEQ ID NO: 301872 - DNA, 75 bp, synthetic construct
  source 1..75: mol_type = other DNA
aaatgaagtttggcagtattcattgccaggcattattgaaaataacattatttctacaaaacaacatttcttagc

SEQ ID NO: 301873 - DNA, 75 bp, synthetic construct
  source 1..75: mol_type = other DNA
gtcacccagcagatgataacgctctataagacttttgttgactacgtatatgaacatccaaagcaagacgcaaag

SEQ ID NO: 301874 - DNA, 75 bp, synthetic construct
  source 1..75: mol_type = other DNA
acaataaagatcaaatgtgcatgggtatggctcaatttaccgcaaacgtaaccgaaggccgtaacagtgggatga

SEQ ID NO: 301875 - DNA, 75 bp, synthetic construct
  source 1..75: mol_type = other DNA
cgggtggacaagaagcccggtgaattgctgtcgccggataatccttatgtccgtccggtccggtcgcgcgaagcc

SEQ ID NO: 301876 - DNA, 75 bp, synthetic construct
  source 1..75: mol_type = other DNA
atagcgaatggattccgctttcgatcgcggccggaggtactggtgcggcaactattgatggtgccagaacgaatc

SEQ ID NO: 301877 - DNA, 75 bp, synthetic construct
  source 1..75: mol_type = other DNA
tcgtgacattggcggcggtggcggcgtaacaatcaacagcccgatcaccattaacactacgaatggcttcagtga

SEQ ID NO: 301878 - DNA, 75 bp, synthetic construct
  source 1..75: mol_type = other DNA
agcagcagttgatcggcacatttggcgatttcttcggtgaactgtctggagtcatagcagacggtgcaggtgagc

SEQ ID NO: 301879 - DNA, 75 bp, synthetic construct
  source 1..75: mol_type = other DNA
ccgcacgcctggcaaccatagaacaaggttgggaagcaggtgtacgaatgcagatgaaagcccagggctacaccg

SEQ ID NO: 301880 - DNA, 75 bp, synthetic construct
  source 1..75: mol_type = other DNA
ggctgatttctatctttccgttcgctcctccatgccgaatcacgaactgcaagtgaaattcccgcagctttgtaa

SEQ ID NO: 301881 - DNA, 75 bp, synthetic construct
  source 1..75: mol_type = other DNA
taacgctgaagtagcgaaacagatgcgaaacatggctgaaatacaggctatcgcggcgcttcgtgacctgaaaga

SEQ ID NO: 301882 - DNA, 75 bp, synthetic construct
  source 1..75: mol_type = other DNA
acaatcaacagcccgatcaccattaatactacgaatggcttcagtgatgaagactcaaggcgtcttgaagaaacg

SEQ ID NO: 301883 - DNA, 75 bp, synthetic construct
  source 1..75: mol_type = other DNA
agggcggtaaagctgacgcagcagcagcagcacaggcacttgatgacctgggaatcacgaccaacgactataaag

SEQ ID NO: 301884 - DNA, 75 bp, synthetic construct
  source 1..75: mol_type = other DNA
acataggcgaggaatacaacctgacaaaccagcaagcctacgagttcatccgggcgctgaataaggccgcgacaa

SEQ ID NO: 301885 - DNA, 75 bp, synthetic construct
  source 1..75: mol_type = other DNA
gcaacgctggctaaatccgtgatgtacataggcgaggaatacaacctgacaaaccagcaagcctacgagttcatc

SEQ ID NO: 301886 - DNA, 75 bp, synthetic construct
  source 1..75: mol_type = other DNA
caaaccaaaggcgcaatgctggaagaccaactaaaccgactgaaaggcgctatcagtgacgcagccacagaagcc

SEQ ID NO: 301887 - DNA, 75 bp, synthetic construct
  source 1..75: mol_type = other DNA
actggctatcaaattcgtcgatgcacaaaccaaaggcgcaatgctggaagaccaactaaaccgactgaaaggcgc

SEQ ID NO: 301888 - DNA, 75 bp, synthetic construct
  source 1..75: mol_type = other DNA
gactgaaaggcgctatcagtgacgcagccacagaagccagaaacgcaaactttaccagtatgctcgacaccgtcg

SEQ ID NO: 301889 - DNA, 75 bp, synthetic construct
  source 1..75: mol_type = other DNA
tttaatgccttcggcattgcctggccattacctgaatcactttcatacgcccaactcgatgccttactttatgcc

SEQ ID NO: 301890 - DNA, 75 bp, synthetic construct
  source 1..75: mol_type = other DNA
cccgcatcacctgcaccagccgtaccggctgccggggcagcagtatgataaggagtcggggctgtactacaaccg

SEQ ID NO: 301891 - DNA, 75 bp, synthetic construct
  source 1..75: mol_type = other DNA
ttctgagatgattgaagataataaaaaagacttggctgtaaatgaacatgggttgacatgtccatttacacaaga

SEQ ID NO: 301892 - DNA, 75 bp, synthetic construct
  source 1..75: mol_type = other DNA
agcagtggcagtatgatgagcacgggtggttaaccaccctcagccataccagtgaaggccaccgcgtgtcggtcc

SEQ ID NO: 301893 - DNA, 75 bp, synthetic construct
  source 1..75: mol_type = other DNA
catctttaccactgcgaccaccggggcctgccgctggcgctcatcagcgaagacggcaatacggcgtggagcggg

SEQ ID NO: 301894 - DNA, 75 bp, synthetic construct
  source 1..75: mol_type = other DNA
tgaagatgaggggcttatcactctctggcactacgatgcgtcggaccgcatcacgcaccggacggtgaacggcga

SEQ ID NO: 301895 - DNA, 75 bp, synthetic construct
  source 1..75: mol_type = other DNA
ggcagccggagtgaatttacctacgatgtgctggaccgcctgacggagcagcgcggctttgatggcaggacacag

SEQ ID NO: 301896 - DNA, 75 bp, synthetic construct
  source 1..75: mol_type = other DNA
gataatgtcagtgagatctatggcgcggcactcagggggatccctttgatcccggtgagcagggttccggctgcg

SEQ ID NO: 301897 - DNA, 75 bp, synthetic construct
  source 1..75: mol_type = other DNA
tctggcaggcagtatgctgactttttccctggagcatgatcctgacgccataccgggttatgaccacaaggatcc

SEQ ID NO: 301898 - DNA, 75 bp, synthetic construct
  source 1..75: mol_type = other DNA
atcctcaaatcagcgaaagcacatggcgaaaagaacgacgaacctcctacagtcgtgaatttaaaatcaggctgg

SEQ ID NO: 301899 - DNA, 75 bp, synthetic construct
  source 1..75: mol_type = other DNA
ccggacggcaaccggagcgagacacagtacgatgcgtggggaaaggcggtcagcaccacgcagggcgggctgacg

SEQ ID NO: 301900 - DNA, 75 bp, synthetic construct
  source 1..75: mol_type = other DNA
gtgcgcgctttcacgtatgacgcgcagcacccgggccggatggtggcgcaccgttacgcgggaaggccggagatg

SEQ ID NO: 301901 - DNA, 75 bp, synthetic construct
  source 1..75: mol_type = other DNA
gtgcattgcccgcgccgcccgccgtagccgcctgattgctcagggcctctacatcgacgaaatggagtcagtgct

SEQ ID NO: 301902 - DNA, 75 bp, synthetic construct
  source 1..75: mol_type = other DNA
taagaaaaatattagtgaattatacaaacaccaacgattctatggtgttaatcctttcctggatcttgatcctga

SEQ ID NO: 301903 - DNA, 75 bp, synthetic construct
  source 1..75: mol_type = other DNA
tacggctgggacggcgaccggctgaccacgatacagaacgacaggagccgcatccagacgatttatcagccgggg

SEQ ID NO: 301904 - DNA, 75 bp, synthetic construct
  source 1..75: mol_type = other DNA
ataacgtaccctatctggcagccctgacttttgttctgcttactggtatcgctgaacttatcgccctgctctgcg

SEQ ID NO: 301905 - DNA, 75 bp, synthetic construct
  source 1..75: mol_type = other DNA
caacggcggcatatgtaaatatgcgtcagtctgagaatcagccggttaaacgtcagccccgtttcagacgggggc

SEQ ID NO: 301906 - DNA, 75 bp, synthetic construct
  source 1..75: mol_type = other DNA
tatagtgattctactggcgcatacactactggcggaatgctccatacgaggctgttagcaaatgacaacactgtg

SEQ ID NO: 301907 - DNA, 75 bp, synthetic construct
  source 1..75: mol_type = other DNA
ttttgttccctgaatgatgtaagtcaagatgaatttttacggagtcagccggggaatttatttggtttttacgac

SEQ ID NO: 301908 - DNA, 75 bp, synthetic construct
  source 1..75: mol_type = other DNA
ccatttccggcgggacggaaccgtccgcttttcctgataccctgccgggttacaccgaatatggccgggacaacg

SEQ ID NO: 301909 - DNA, 75 bp, synthetic construct
  source 1..75: mol_type = other DNA
accgcatctgacgcgcaaatcgaaaatttggccgagcttaaagaagcaatagcgacgcgaattggtgaaaataga

SEQ ID NO: 301910 - DNA, 75 bp, synthetic construct
  source 1..75: mol_type = other DNA
catctgtttcccggtgaggacggttacagccgcagcgagtcactgtggctggtgcgcggcggcgtggcgaaactg

SEQ ID NO: 301911 - DNA, 75 bp, synthetic construct
  source 1..75: mol_type = other DNA
cctacagccagtgcttttatgggtatgtcgcaatttaaacttacccatcagaacaatgatgatcatggcaaccct

SEQ ID NO: 301912 - DNA, 75 bp, synthetic construct
  source 1..75: mol_type = other DNA
acgggacatgctacactatggactggtaacagagccattggcggtaatgaccatgctgattccagtgcttttgca

SEQ ID NO: 301913 - DNA, 75 bp, synthetic construct
  source 1..75: mol_type = other DNA
tactcatcgtttcaatagcttttgtcatcgactgcattttcaccggtgtcattcgtaaagtcttttccccggtga

SEQ ID NO: 301914 - DNA, 75 bp, synthetic construct
  source 1..75: mol_type = other DNA
tttcgataacgcaattttgcgcacctcatacgaacgtctggagatcccctgcccgtggcgctaccacaacgatcg

SEQ ID NO: 301915 - DNA, 75 bp, synthetic construct
  source 1..75: mol_type = other DNA
taagatttcggttgttgccgtggctgccacggaacaaaacgcgcagacagcggcatcgctgaaaggcacaaccct

SEQ ID NO: 301916 - DNA, 75 bp, synthetic construct
  source 1..75: mol_type = other DNA
tacgtttattctcggggagcagaactgcacggcaaacctgctgaacatggaaaatatctccaccattattcgtca

SEQ ID NO: 301917 - DNA, 75 bp, synthetic construct
  source 1..75: mol_type = other DNA
ttccggtactaccggatcgtggctgctgggaacggcgctggattttacggcgaaacaggaagggcgggccggcaa

SEQ ID NO: 301918 - DNA, 75 bp, synthetic construct
  source 1..75: mol_type = other DNA
tctcggggatgaaaactgcgatgcgaacctgctcaacatgcagaacgtatccaccattatccgtcgtgcgggctt

SEQ ID NO: 301919 - DNA, 75 bp, synthetic construct
  source 1..75: mol_type = other DNA
gttcagcctgacgttatccggcggagaagatgaggcgttcccggtcaatacaccggtggtggtggcaggggccat

SEQ ID NO: 301920 - DNA, 75 bp, synthetic construct
  source 1..75: mol_type = other DNA
cggacgcctctggtggcgtgtgtgcttccggcactgccggctcgtggctgctgggaacggcactggatttcacgg

SEQ ID NO: 301921 - DNA, 75 bp, synthetic construct
  source 1..75: mol_type = other DNA
cggcacacgctaaacgcattgaggaaattatcgctgaaaataaaccgcccttttctgttttccgcgacaaattca

SEQ ID NO: 301922 - DNA, 75 bp, synthetic construct
  source 1..75: mol_type = other DNA
cactggcgtactggcccgttcaatggatctggacatctataaccttcatccggcacacgctaaacgcattgagga

SEQ ID NO: 301923 - DNA, 75 bp, synthetic construct
  source 1..75: mol_type = other DNA
aaaccgttattccattcgaaggcgtgcgccacaatgcactggatgacgcccgtcaccaggcaaaatacgtttcag

SEQ ID NO: 301924 - DNA, 75 bp, synthetic construct
  source 1..75: mol_type = other DNA
ggtcgacaggaatatcgccggacgctacgccagataaacgaagccctagagacaaacaactggccagcaccgatt

SEQ ID NO: 301925 - DNA, 75 bp, synthetic construct
  source 1..75: mol_type = other DNA
tcctctgttgaaaaccagtggagcacgggagcagcttctggatcaaattgaaactgtagacccagaactggcaaa

SEQ ID NO: 301926 - DNA, 75 bp, synthetic construct
  source 1..75: mol_type = other DNA
acacaatgccagtctgccagcactgatgacaccagagcagatgaaagagtggatcgaaagctacaacagcactct

SEQ ID NO: 301927 - DNA, 75 bp, synthetic construct
  source 1..75: mol_type = other DNA
acgatgcgtcggaccgcatcacgcaccgtacggtgaacggcgacccggcggagcagtggcagtatgatgagcacg

SEQ ID NO: 301928 - DNA, 75 bp, synthetic construct
  source 1..75: mol_type = other DNA
accggaccaggacgcccgcgccggtgggggtgtttggtcccggctggaaagcgcccttcgatatccgcttacagg

SEQ ID NO: 301929 - DNA, 75 bp, synthetic construct
  source 1..75: mol_type = other DNA
atgcgtcggaccgcatcacgcaccggacggtgaacggcgacccggcggagcagtggcagtatgatgagcacgggt

SEQ ID NO: 301930 - DNA, 75 bp, synthetic construct
  source 1..75: mol_type = other DNA
ggtccactacggctatgacgataaaggccgcctgacgggcgaacggcagacggtggagaacccggagacggggga

SEQ ID NO: 301931 - DNA, 75 bp, synthetic construct
  source 1..75: mol_type = other DNA
tgaaagaaactatagattttttatcaagctctgaagaaactataaatatagagtatattgaaggaaccaatgtta

SEQ ID NO: 301932 - DNA, 75 bp, synthetic construct
  source 1..75: mol_type = other DNA
gaatctgtataaatatccattaaaccctgttcggtttatagattctttgggtttaaaattccatgttaacggtga

SEQ ID NO: 301933 - DNA, 75 bp, synthetic construct
  source 1..75: mol_type = other DNA
cccggcgagtgagctgccgacagggatagaggatgcgacgggcagtacaaaacagatggcatggagccgttacgg

SEQ ID NO: 301934 - DNA, 75 bp, synthetic construct
  source 1..75: mol_type = other DNA
gagatggcattgacggtttgggttcacaaaacatgaaaatgtatagtgggctattagggggcgatattttaaaac

SEQ ID NO: 301935 - DNA, 75 bp, synthetic construct
  source 1..75: mol_type = other DNA
gctgctgatacaggagcggaggaattattaggtgcaactttgggtaaattgccctttgtgcctgaaaatgcattt

SEQ ID NO: 301936 - DNA, 75 bp, synthetic construct
  source 1..75: mol_type = other DNA
cgtctgccgggacagcagtatgatgaggagtcggggctgtattacaaccgtcaccggtactatgacccgctacag

SEQ ID NO: 301937 - DNA, 75 bp, synthetic construct
  source 1..75: mol_type = other DNA
tcagccgaatgttgggaaggatttgacggatgaagagaagaaactgcctggccggcggcagtacgggaagcccgg

SEQ ID NO: 301938 - DNA, 75 bp, synthetic construct
  source 1..75: mol_type = other DNA
cgaacggctgaggaggaggtgcaagctcaaatagaatatttagcatataagaagcgttgtgagcaaaaacctgat

SEQ ID NO: 301939 - DNA, 75 bp, synthetic construct
  source 1..75: mol_type = other DNA
atgcagtggattgcaggatgctggcaataccagtatgacctgaccggaaaactcacgcagagtgaagatgagggg

SEQ ID NO: 301940 - DNA, 75 bp, synthetic construct
  source 1..75: mol_type = other DNA
taagaaatatgagaataaagaagaggcaagggttattacaataattgaatcgcgtgcggcgaaaactttaggtga

SEQ ID NO: 301941 - DNA, 75 bp, synthetic construct
  source 1..75: mol_type = other DNA
ccgggaagaaggcatcagcacttacagcagttataacccgcgtgggcaactggtcagtcagaaggatgcgcaggg

SEQ ID NO: 301942 - DNA, 75 bp, synthetic construct
  source 1..75: mol_type = other DNA
gcgacctcaccgctatcattgccccggacggtagccgcagtgagacacagtatgatgcgtggggtaaagccatca

SEQ ID NO: 301943 - DNA, 75 bp, synthetic construct
  source 1..75: mol_type = other DNA
aacttaataagtttatgcacgattacgacaaaacatcatcagaaatgagaaaataccttaaaagcatcaacgagt

SEQ ID NO: 301944 - DNA, 75 bp, synthetic construct
  source 1..75: mol_type = other DNA
ggtgtttatgctgctgctgatacaggagcggaggaattattaggtgcaactttgggtaaattgccctttgtgcct

SEQ ID NO: 301945 - DNA, 75 bp, synthetic construct
  source 1..75: mol_type = other DNA
ataaaggccgcctgaccggcgaacgccagacggtggagaacccggagacgggggaactgctgtggcagcatgaga

SEQ ID NO: 301946 - DNA, 75 bp, synthetic construct
  source 1..75: mol_type = other DNA
acccactcaatcctattgaacatatagatccgttggggttagctaatgtaacgccgcaaatgatatttggaacta

SEQ ID NO: 301947 - DNA, 75 bp, synthetic construct
  source 1..75: mol_type = other DNA
aaaaatttccgctgaaagaattaaataatcccaagcatgacagttacgcaattagtgaaaagagtcacggcagag

SEQ ID NO: 301948 - DNA, 75 bp, synthetic construct
  source 1..75: mol_type = other DNA
tgatgacgaaagaacaagagtcaaacactgatgaagtgaaaccagagcaaggaagtttgtttgaattagaatttc

SEQ ID NO: 301949 - DNA, 75 bp, synthetic construct
  source 1..75: mol_type = other DNA
gcgtatccgctgaacccggtgcagcggggggatcctcttgggttgtctggtgagacactggttcttggttctgcc

SEQ ID NO: 301950 - DNA, 75 bp, synthetic construct
  source 1..75: mol_type = other DNA
ctgttcagaaattacaagaccatcttaataaagacggtattcagaaaaaaatatgcaaaatgagaggtataaaag

SEQ ID NO: 301951 - DNA, 75 bp, synthetic construct
  source 1..75: mol_type = other DNA
tgggatttggcggaggtcgaggcatggattgatgcgtgcaaacattccagcccggcccctcgtcccggaatgggg

SEQ ID NO: 301952 - DNA, 75 bp, synthetic construct
  source 1..75: mol_type = other DNA
cgggggatgaggttatgaaggaatgtcttcgtccaaaccgaagagtggtgattactgctgaggaagaaggagaca

SEQ ID NO: 301953 - DNA, 75 bp, synthetic construct
  source 1..75: mol_type = other DNA
aaagaaaaaaggatttaccttactggaagtgactattgttttaggtattggaacgcttatcgcttttatgaagtt

SEQ ID NO: 301954 - DNA, 75 bp, synthetic construct
  source 1..75: mol_type = other DNA
gtgatccgtactttcgacatggtaaccagcgcaccggaaaaattatccggacaggctgctgacaagatgcaggct

SEQ ID NO: 301955 - DNA, 75 bp, synthetic construct
  source 1..75: mol_type = other DNA
agatgataaaaaacacttttttattaatcagttatgggcaattgaggatgaaaaaaattctatttatgtcacccc

SEQ ID NO: 301956 - DNA, 75 bp, synthetic construct
  source 1..75: mol_type = other DNA
tttcaggtatttgatgacgtatcaaacggtgataacagcatcagaatttatgagttgatggttgatgaagaaacc

SEQ ID NO: 301957 - DNA, 75 bp, synthetic construct
  source 1..75: mol_type = other DNA
atgaagagggcgcaggcccttttctttcttattgctaaaacagggatgataaagaaaaaaggatttaccttactg

SEQ ID NO: 301958 - DNA, 75 bp, synthetic construct
  source 1..75: mol_type = other DNA
ccgaatcaatttgaagcatgggtacatggtccggttgtgcgtgaactgtacaaccgtttttcagactacaaatgg

SEQ ID NO: 301959 - DNA, 75 bp, synthetic construct
  source 1..75: mol_type = other DNA
actcggctatcctgccattagtgaatttatggtcgtttataccagttataatatctactagtatagctccatatt

SEQ ID NO: 301960 - DNA, 75 bp, synthetic construct
  source 1..75: mol_type = other DNA
tttgtttaaaactttcataagagaatcgtggccgtttatagtaagtaatatttcaatagtgatgtatatgcggat

SEQ ID NO: 301961 - DNA, 75 bp, synthetic construct
  source 1..75: mol_type = other DNA
taactggctgtatgacgaccgtccggaggctatgtatccgcgctggcgtgtaaaagcgtatgcacgtgaccaata

SEQ ID NO: 301962 - DNA, 75 bp, synthetic construct
  source 1..75: mol_type = other DNA
cgtttcgttgagggtaaacactttttcaaaatcagcggtgatgagctgaaatctttccgactatcttttagcgag

SEQ ID NO: 301963 - DNA, 75 bp, synthetic construct
  source 1..75: mol_type = other DNA
ggcgttccgatggacgctatttgccagaacgtcatagataaaaaggtcacggcagaattttatcgctctatggca

SEQ ID NO: 301964 - DNA, 75 bp, synthetic construct
  source 1..75: mol_type = other DNA
tcggcgctggtttttcaggtgtggtcattgcccgccagcttgctgaacaaggtcacaaggttaaaatcatcgatc

SEQ ID NO: 301965 - DNA, 75 bp, synthetic construct
  source 1..75: mol_type = other DNA
agtctttaccgctaattgcgagctatggcttctgcttaccgcataagggcctgatggaactagtagaatccgtcc

SEQ ID NO: 301966 - DNA, 75 bp, synthetic construct
  source 1..75: mol_type = other DNA
ggattacgtttcacgctggaagtggacggcctgccaccggacgcgtttgcggtggtctcctttcatctgaaccag

SEQ ID NO: 301967 - DNA, 75 bp, synthetic construct
  source 1..75: mol_type = other DNA
agtttctcttttatttatctctgggatgcagtctggtaattcgtcgaaccgttcttcgtagtgttgagtcattgt

SEQ ID NO: 301968 - DNA, 75 bp, synthetic construct
  source 1..75: mol_type = other DNA
ataagcctggttgacgggcagggtaatccggtgagcgtggaggtccagtccgtcaccgacggcgtgaaggtgaaa

SEQ ID NO: 301969 - DNA, 75 bp, synthetic construct
  source 1..75: mol_type = other DNA
gtggtgaagggggtgagctttatgcttcgcctgaccgtggcagcggacgacggcagtgagcggttggtcagcacg

SEQ ID NO: 301970 - DNA, 75 bp, synthetic construct
  source 1..75: mol_type = other DNA
acaaatttactgcacttaccgctgagcttaccgctgagcttaccgctgagcttaccgcacggaaaaaacagtata

SEQ ID NO: 301971 - DNA, 75 bp, synthetic construct
  source 1..75: mol_type = other DNA
acttaccgctgagcttaccgctgagcttaccgctgagcttaacatgcgtaaaaaacagtacaactactatcgcga

SEQ ID NO: 301972 - DNA, 75 bp, synthetic construct
  source 1..75: mol_type = other DNA
tcaggttttttcactgccgattaatctgcatactattaatcagttctttgctaaaacctgttctcctgatgaagc

SEQ ID NO: 301973 - DNA, 75 bp, synthetic construct
  source 1..75: mol_type = other DNA
gtttaaaaacgagataggcctgtcgctggtcatgatctgcctgctgttgggtttttgccgcgagtcgcaaatcta

SEQ ID NO: 301974 - DNA, 75 bp, synthetic construct
  source 1..75: mol_type = other DNA
atctgagatacttgataaagcagcaacatttgattatatcaacgccggaacaagtagatcgggatacacaacgat

SEQ ID NO: 301975 - DNA, 75 bp, synthetic construct
  source 1..75: mol_type = other DNA
atttatctggaaaaattgctggatggggttgaggttgagtggaaatctcttggtgaggttgctgaaatttatggt

SEQ ID NO: 301976 - DNA, 75 bp, synthetic construct
  source 1..75: mol_type = other DNA
agtatttttagaggttatgctttgcttgcttggattgtttgtataccaatgtgttttgcatctggttatatagtt

SEQ ID NO: 301977 - DNA, 75 bp, synthetic construct
  source 1..75: mol_type = other DNA
cttaatgtcaattcttgtggcgtattgagtaacaatattgctgaagctttgaaatattattataacaatcccgca

SEQ ID NO: 301978 - DNA, 75 bp, synthetic construct
  source 1..75: mol_type = other DNA
tgacgaactacgccatgaactggcgatcgatttctttattcacgacggtggggtcgccagcggctgggcgataaa

SEQ ID NO: 301979 - DNA, 75 bp, synthetic construct
  source 1..75: mol_type = other DNA
aattggtctatgtggaatgatatagccatattatttaagacagttggtgtagtgctgaaaaaagatggtgcatat

SEQ ID NO: 301980 - DNA, 75 bp, synthetic construct
  source 1..75: mol_type = other DNA
atcattaaaacaatcgagcagaaacaaggtaaaccgggcctggaatatttagatcgctttggaaagaccataccc

SEQ ID NO: 301981 - DNA, 75 bp, synthetic construct
  source 1..75: mol_type = other DNA
tagcctggaagaggccattccggatatcattaaaacaatcgagcagaaacaaggtaaaccgggcctggaatattt

SEQ ID NO: 301982 - DNA, 75 bp, synthetic construct
  source 1..75: mol_type = other DNA
gtgctggcccgtggccagcgctttaatggtgacgcggaagtgatgacttatagcgcctcagtgagccacgcgatt

SEQ ID NO: 301983 - DNA, 75 bp, synthetic construct
  source 1..75: mol_type = other DNA
gttaaaaaagatggaggaccagcgatatatggccataaaagagttggtaaaagaggagtccctttcaattgtttg

SEQ ID NO: 301984 - DNA, 75 bp, synthetic construct
  source 1..75: mol_type = other DNA
aactggtcaatgtggaatgacattgcgattctttttaaaacaattagtgtcgttttgaaaaaagacggtgcatat

SEQ ID NO: 301985 - DNA, 75 bp, synthetic construct
  source 1..75: mol_type = other DNA
gtgtgttggatgtattcggattgtggcatagagaaacatggataataggtagtggggccaatgcacaagaggcct

SEQ ID NO: 301986 - DNA, 75 bp, synthetic construct
  source 1..75: mol_type = other DNA
gtagagactcccggcggtgtgtgcgcaggggagaaaatagacggaataccagtagttaataataatatagaatgg

SEQ ID NO: 301987 - DNA, 75 bp, synthetic construct
  source 1..75: mol_type = other DNA
tatttttgccgttattgaaattgcggtcatggcttttgctacatggtcgttttatcgtacattatggtttttgac

SEQ ID NO: 301988 - DNA, 75 bp, synthetic construct
  source 1..75: mol_type = other DNA
gctgcactattgccttagttgtgtctgattttattagttttgtgctttcattatatttagctgttggtcttttag

SEQ ID NO: 301989 - DNA, 75 bp, synthetic construct
  source 1..75: mol_type = other DNA
gttggcattatggccctaaagaaatcgttaaaaaattccagatacatcatcgtgttgcaattgaatatggcggca

SEQ ID NO: 301990 - DNA, 75 bp, synthetic construct
  source 1..75: mol_type = other DNA
tgaatacggcagactgacggagaagacggaccgcatcccggcgggtgtgatacggacggacgacgagcgcaccca

SEQ ID NO: 301991 - DNA, 75 bp, synthetic construct
  source 1..75: mol_type = other DNA
agccgctacctctacgacccgctgggacggcgaatggcgaaacgggtatggcggcgggagcgtgacctgacgggg

SEQ ID NO: 301992 - DNA, 75 bp, synthetic construct
  source 1..75: mol_type = other DNA
ggccaccgtgtcgctgtccactacggctacgacgataagggccgcctgacgggcgaacggcagacggtggagaac

SEQ ID NO: 301993 - DNA, 75 bp, synthetic construct
  source 1..75: mol_type = other DNA
aagccgggcgtggcttgcgcagtgcgggctgacggtggagcaactggccagacaggtggagccggaatacacacc

SEQ ID NO: 301994 - DNA, 75 bp, synthetic construct
  source 1..75: mol_type = other DNA
aaccggcagagcagtggcagtatgatggccacggctggctgacagacatcagccacctgagcgaaggccaccgtg

SEQ ID NO: 301995 - DNA, 75 bp, synthetic construct
  source 1..75: mol_type = other DNA
tatcagaaatattatctttctcttccattgaaaaaatagctaaaaatagtgggtggctattgattgaaagatgca

SEQ ID NO: 301996 - DNA, 75 bp, synthetic construct
  source 1..75: mol_type = other DNA
ccggggtgcgtagtgttatcagctatcttcttagtccattaaaggaaactattaatgaaagtttacgtgaacgtt

SEQ ID NO: 301997 - DNA, 75 bp, synthetic construct
  source 1..75: mol_type = other DNA
cagacaaaacacagaaacctttcctgaagagagttcttgagtttcgcaagaaagtgatgaccgctgataatcctc

SEQ ID NO: 301998 - DNA, 75 bp, synthetic construct
  source 1..75: mol_type = other DNA
aagcggtgctccgtataggcgaagtctgtgaggtttctggacgcgctgtgacaattttggtcgataaaaacaaaa

SEQ ID NO: 301999 - DNA, 75 bp, synthetic construct
  source 1..75: mol_type = other DNA
cctcacggcgtggccggataaccgcatcgcggaagatgcgcactatgtctaccgctacgatgaatacggcaggct

SEQ ID NO: 302000 - DNA, 75 bp, synthetic construct
  source 1..75: mol_type = other DNA
tcggatgctgagttggctaatctctataatagggcgcatttttttatttatatgtcaatatatgaaggctttggt

SEQ ID NO: 302001 - DNA, 75 bp, synthetic construct
  source 1..75: mol_type = other DNA
ggtgttcagcgatatgcagaggaacttgtaaaaaatattaataacaaaggatatgacattattatattagctcct

SEQ ID NO: 302002 - DNA, 75 bp, synthetic construct
  source 1..75: mol_type = other DNA
ctgtcgcatgtattgcccattataagcaaacagcggatcaacaaaaattaacacaaactattattctgaatggaa

SEQ ID NO: 302003 - DNA, 75 bp, synthetic construct
  source 1..75: mol_type = other DNA
ggtatggtgacatttgccgcagtgccggcactgcaggcccgtctgattggtgtcgctgagcaacatgctcctcat

SEQ ID NO: 302004 - DNA, 75 bp, synthetic construct
  source 1..75: mol_type = other DNA
gcatggctatgaccgatttatttcaggcatctatgaatatataaaaagagaaccatcaaaaaatatacatcttca

SEQ ID NO: 302005 - DNA, 75 bp, synthetic construct
  source 1..75: mol_type = other DNA
atataacaattaatactataaattctagtggggagcgtatatacgtttcttttaattattcagattatattcgtg

SEQ ID NO: 302006 - DNA, 75 bp, synthetic construct
  source 1..75: mol_type = other DNA
aaaatcagcggaacatggtaataattacgcacaatatcagatgtcaaaatatttattaaaaataggtgatattag

SEQ ID NO: 302007 - DNA, 75 bp, synthetic construct
  source 1..75: mol_type = other DNA
agagcggcgtatttaacgtagcactgaacaatggttcagaatggaataccgttaatagttcagtaattgatacat

SEQ ID NO: 302008 - DNA, 75 bp, synthetic construct
  source 1..75: mol_type = other DNA
tcaccacaccggacgggcgggagacgaaattttactataacgacgggaaccagctgacggcggtggtgtccccgg

SEQ ID NO: 302009 - DNA, 75 bp, synthetic construct
  source 1..75: mol_type = other DNA
tttgtagcatccgtgatgcctcagcacctgtatgggctgactttccgtatttttttacccatggcacttggcctg

SEQ ID NO: 302010 - DNA, 75 bp, synthetic construct
  source 1..75: mol_type = other DNA
atgggcacgctaacctcgccaattgcccgtggtaaagatgcaccgtctaacgcagtgctccttaatgaaaccatt

SEQ ID NO: 302011 - DNA, 75 bp, synthetic construct
  source 1..75: mol_type = other DNA
gcttttaccatttctaatggaattggttttgaaaggatggattatatatcatccaaattgaaaagcacttataga

SEQ ID NO: 302012 - DNA, 75 bp, synthetic construct
  source 1..75: mol_type = other DNA
tcgcgaggcggcggcagttcccgttacgcgcggcgggcgacagagtattggcgttttgctggtgctggatgatga

SEQ ID NO: 302013 - DNA, 75 bp, synthetic construct
  source 1..75: mol_type = other DNA
acgctgtgcgtatggatatttaagcgcatcagaaataatttaaaaattctgataaaacgaataaaaaattctcga

SEQ ID NO: 302014 - DNA, 75 bp, synthetic construct
  source 1..75: mol_type = other DNA
agcagatgtctttgtggttgatgaatggcggcgactggtttattgcgctggcagataatcaacagaaacaagcga

SEQ ID NO: 302015 - DNA, 75 bp, synthetic construct
  source 1..75: mol_type = other DNA
caacctgcgtgaggaagccggactgctcggcgtgaatatcgtgaccgatatcggggaagcacagccccgcaatga

SEQ ID NO: 302016 - DNA, 75 bp, synthetic construct
  source 1..75: mol_type = other DNA
gaaattctcggtttaattggtgtagatagccagcgtcgcgcacaattagttcagcttgttaatagttcagcagag

SEQ ID NO: 302017 - DNA, 75 bp, synthetic construct
  source 1..75: mol_type = other DNA
agggataattcaattgtttttattggcgctcgaggaggatataaaaactttgatgtagcagtcagagcacttaaa

SEQ ID NO: 302018 - DNA, 75 bp, synthetic construct
  source 1..75: mol_type = other DNA
cttcccgtccgtcaaacctgcgcggccttcagggggatgtggtgattgatgaagccgcgttccacgagtcactgg

SEQ ID NO: 302019 - DNA, 75 bp, synthetic construct
  source 1..75: mol_type = other DNA
ggaccagaacgcaacggctgtgaacgcccgccgccatggtgattttgccgtggcgctctgtatggcaaaccgggc

SEQ ID NO: 302020 - DNA, 75 bp, synthetic construct
  source 1..75: mol_type = other DNA
atatcgacacataacggcgtcgataacctgtttaaccagtacattcaggatgcgcgcgaggggcgcaaggattac

SEQ ID NO: 302021 - DNA, 75 bp, synthetic construct
  source 1..75: mol_type = other DNA
acgccgcccctggatgatgatctgatagtgaatttatgcaccagtgaacatctgctggtttgtagtggcacacta

SEQ ID NO: 302022 - DNA, 75 bp, synthetic construct
  source 1..75: mol_type = other DNA
tttggtggtggagataaggcccatatggaagaagagaataaagcatataaaacagcagctgattgcagtggctta

SEQ ID NO: 302023 - DNA, 75 bp, synthetic construct
  source 1..75: mol_type = other DNA
tatttacagaatgtcacgaacggtgcaatagtggctcttccgcaacctgggtggagattttcatgccagtggact

SEQ ID NO: 302024 - DNA, 75 bp, synthetic construct
  source 1..75: mol_type = other DNA
atgtatcgtatattacgcttgtctgttcttattataagcctgtcagggggaaatgttgttgctcatgctgataac

SEQ ID NO: 302025 - DNA, 75 bp, synthetic construct
  source 1..75: mol_type = other DNA
ggattgttaccaagaggtcaggatgatgcatatgaacgtggcacgcctataaatattaatctattcgatcatgtt

SEQ ID NO: 302026 - DNA, 75 bp, synthetic construct
  source 1..75: mol_type = other DNA
aaaattgacgacatattgggtgacgatgtcccaaatttgtcccaccctgaggtttttgaggatgcaaagaaagca

SEQ ID NO: 302027 - DNA, 75 bp, synthetic construct
  source 1..75: mol_type = other DNA
cgcagtgctccttaatgaaaccatcgccgactacactggcgtgccgatggagatccctcgcgctatcgcggtatt

SEQ ID NO: 302028 - DNA, 75 bp, synthetic construct
  source 1..75: mol_type = other DNA
ggtggggcgctggtaaccgctgataggggccaggtcagacatcatgtcgggaccgtctgtaacgtggatgccggt

SEQ ID NO: 302029 - DNA, 75 bp, synthetic construct
  source 1..75: mol_type = other DNA
atgaaatcctgggaaaagagggtggctacgtcagtcaccctgacgatacaggtggtgcaacgaagtggggcataa

SEQ ID NO: 302030 - DNA, 75 bp, synthetic construct
  source 1..75: mol_type = other DNA
agccgcgggcaggctctggaaatccttgaggcagactattggtatggacctcgttttgaccaggtggcaaacctg

SEQ ID NO: 302031 - DNA, 75 bp, synthetic construct
  source 1..75: mol_type = other DNA
cattaaaatagatgattctgattttccatttgaaatttcatcagaaaaagatcttaatgaagagttgaattcact

SEQ ID NO: 302032 - DNA, 75 bp, synthetic construct
  source 1..75: mol_type = other DNA
aaatattcgcggttaaaaaatgactatgataatgatattgaaaaactcaaagcgattaaaacagcaaattctcgc

SEQ ID NO: 302033 - DNA, 75 bp, synthetic construct
  source 1..75: mol_type = other DNA
actgtattcacaatcgtaagagatatctatgatcataaaaaagcaatagaagtttatcgttgtaagtttgatgat

SEQ ID NO: 302034 - DNA, 75 bp, synthetic construct
  source 1..75: mol_type = other DNA
ctgatcaactggcatattttacgtaactccctgccgccgctgatcgtgcaggcatcgctggatatcggtagcgcg

SEQ ID NO: 302035 - DNA, 75 bp, synthetic construct
  source 1..75: mol_type = other DNA
ccgcgattttgatatcgggccattaaaaaacgtctccacttctctaaggaaggtgcgaataagcaggtcatttct

SEQ ID NO: 302036 - DNA, 75 bp, synthetic construct
  source 1..75: mol_type = other DNA
agcaaaggatattttagcttatatattgatggctataacaagtgcaattagcttacccttgactttaatcgtaat

SEQ ID NO: 302037 - DNA, 75 bp, synthetic construct
  source 1..75: mol_type = other DNA
ggtactgacaatggcactggctgccgctctcgggccgagtttgtttaacgccatgctggcgattgctattgtgcg

SEQ ID NO: 302038 - DNA, 75 bp, synthetic construct
  source 1..75: mol_type = other DNA
aacctttggtgcgtcgcgttggcatctgatcaactggcatattttacgtaactccctgccgccgctgattgtgca

SEQ ID NO: 302039 - DNA, 75 bp, synthetic construct
  source 1..75: mol_type = other DNA
accgtggctggcgacgcatgatcccaacgccattgatttaaccgcccgccttttgccgccttctgcggcgcactg

SEQ ID NO: 302040 - DNA, 75 bp, synthetic construct
  source 1..75: mol_type = other DNA
gggataagtttgtcttacaccgcctgataagaaacggtatgcagagacaacgaggctttctgatgtggtggcgtc

SEQ ID NO: 302041 - DNA, 75 bp, synthetic construct
  source 1..75: mol_type = other DNA
tagtgtcggtgctgattttctttaccgccaaatattatgacaagaaagatggtcacgtgatgaccagccaggtgg

SEQ ID NO: 302042 - DNA, 75 bp, synthetic construct
  source 1..75: mol_type = other DNA
ccgcgggcggctttgccagttatatggatcatatcaaagcctccaatgcaatggtgaacgtctgcattcgtcccc

SEQ ID NO: 302043 - DNA, 75 bp, synthetic construct
  source 1..75: mol_type = other DNA
acccgaacaaaattacagatgctgatatatccgcactggcgagcctactggcgcgtctttcgggaagtgtcgcta

SEQ ID NO: 302044 - DNA, 75 bp, synthetic construct
  source 1..75: mol_type = other DNA
gcattcagcccggtagtggacagaatcacgggcgtgattgagcgtaagacggggaaagcagccagaggcattagc

SEQ ID NO: 302045 - DNA, 75 bp, synthetic construct
  source 1..75: mol_type = other DNA
tcaacaaaaaagtaggggtgctggttcgctatgagagtgtttactggcaggcattcagcccggtagtggacagaa

SEQ ID NO: 302046 - DNA, 75 bp, synthetic construct
  source 1..75: mol_type = other DNA
gcattcagtccggtagtagatagaatcacgggcatggttgagcgtaaggcggggaaagcagccagaggcattggc

SEQ ID NO: 302047 - DNA, 75 bp, synthetic construct
  source 1..75: mol_type = other DNA
gcttatcaatataattgccgaacatatccatagtgatatatatctaaccaagtatcagcaacaatatccagatgc

SEQ ID NO: 302048 - DNA, 75 bp, synthetic construct
  source 1..75: mol_type = other DNA
ctacacccttcgtacgcagcgataccatggatggcgttgattttatcttcaatgccccgtactgcaacattacag

SEQ ID NO: 302049 - DNA, 75 bp, synthetic construct
  source 1..75: mol_type = other DNA
gactacgactctctatctgctcaattaaacatcaaaagacttaaaaatggattctgtacgattcaaccattatta

SEQ ID NO: 302050 - DNA, 75 bp, synthetic construct
  source 1..75: mol_type = other DNA
gtggatgcgttcctatagcgacaaaacataaggggccggtaacaatattaggaaatactgtatttaagacacatt

SEQ ID NO: 302051 - DNA, 75 bp, synthetic construct
  source 1..75: mol_type = other DNA
atgtctttaaacgattctaaaatccgcaagttaaaatcttcttcccgtccggtaaaactctccgactctcatggc

SEQ ID NO: 302052 - DNA, 75 bp, synthetic construct
  source 1..75: mol_type = other DNA
tctgttcggcaaagtggtcgggcttccggtttataaacttttaggcggcgcagtgaaccgccccgggtttcctgg

SEQ ID NO: 302053 - DNA, 75 bp, synthetic construct
  source 1..75: mol_type = other DNA
agatggaactgtatatgtaatttacagttcgcacattaaaccgactgctgctgatgttggggcgttgtcattatc

SEQ ID NO: 302054 - DNA, 75 bp, synthetic construct
  source 1..75: mol_type = other DNA
gtcatcaggtacgtacaccccgacgccaggaacaaaacggattagggtcacaataacgggcggcggtggcggagg

SEQ ID NO: 302055 - DNA, 75 bp, synthetic construct
  source 1..75: mol_type = other DNA
cgcatcactggtggagatggaggcgacggtcagtccggaaatatcagcgtcagcggtgaaggcggaacatcgcac

SEQ ID NO: 302056 - DNA, 75 bp, synthetic construct
  source 1..75: mol_type = other DNA
cccatgaatccgataagttcaaatgataatgatagtgtagacttgcgaaatataaaatgccctgaaggttcagag

SEQ ID NO: 302057 - DNA, 75 bp, synthetic construct
  source 1..75: mol_type = other DNA
tccagctcagtagcgccaccaacagcgattcagaaacgcttgcggcaacaccaaaggcggtaaaggtcgcgtatg

SEQ ID NO: 302058 - DNA, 75 bp, synthetic construct
  source 1..75: mol_type = other DNA
tgtatgagaaagcagggcacgtaattaccgggcttggtattgtcggtgaagtcgatggtgatgaccccgcagtat

SEQ ID NO: 302059 - DNA, 75 bp, synthetic construct
  source 1..75: mol_type = other DNA
aaaactggcctttgagccacaggttgagccacattttctggcagactcttacggctacagaccgaataaatcggc

SEQ ID NO: 302060 - DNA, 75 bp, synthetic construct
  source 1..75: mol_type = other DNA
tatctgaggagaagtaaaaacgatgtgcctgatggcgatagcgaagacgactatgaggagaaattgcttattgcc

SEQ ID NO: 302061 - DNA, 75 bp, synthetic construct
  source 1..75: mol_type = other DNA
ggtagcccagcgacgcaaccggctcatcgtcccaggcgagcctcacgtcggcaacgtgctgtatcaaggggcact

SEQ ID NO: 302062 - DNA, 75 bp, synthetic construct
  source 1..75: mol_type = other DNA
aacaggcctgacagatggaactgtatatgtaatttacagttcacatattaaacctactgctgctgaccttggctt

SEQ ID NO: 302063 - DNA, 75 bp, synthetic construct
  source 1..75: mol_type = other DNA
acggcctcaagggcggtgatagctcgttcggatcggtaatagcccctggtggtgaaggcggcggaaaagtaggag

SEQ ID NO: 302064 - DNA, 75 bp, synthetic construct
  source 1..75: mol_type = other DNA
ggtgccggatataatgttaactcccctatgcaggctggtatatctgaacttgttcttcgtgcggggaatggaaat

SEQ ID NO: 302065 - DNA, 75 bp, synthetic construct
  source 1..75: mol_type = other DNA
taagaaattatttttttatatgtgtttaactatagctctttttactgttaccagagttattaggaatcctgacca

SEQ ID NO: 302066 - DNA, 75 bp, synthetic construct
  source 1..75: mol_type = other DNA
actaaatcagccgatagcaggtattccgctgatttttttatcacgcggcatggggggcaaaaatgttatggctga

SEQ ID NO: 302067 - DNA, 75 bp, synthetic construct
  source 1..75: mol_type = other DNA
aaatcacagaacaagctacaaaaacaataactgaatttatggagcaggctaaatcagccgatagcaggttttccg

SEQ ID NO: 302068 - DNA, 75 bp, synthetic construct
  source 1..75: mol_type = other DNA
attttgagtaaaattttttctggcgcgagaaatgtaattgaaaaaaagaaaagaaatctggataatttggcatga

SEQ ID NO: 302069 - DNA, 75 bp, synthetic construct
  source 1..75: mol_type = other DNA
tgaagaactggtcctgtcggcagatatcaaagaaaggctggagaaagttgttactgaacagcgacagtcggataa

SEQ ID NO: 302070 - DNA, 75 bp, synthetic construct
  source 1..75: mol_type = other DNA
tgaagcaacctgattttgcgaagtggtacttctatcaattaattaagaagtatgagggcgaacagctgtatctta

SEQ ID NO: 302071 - DNA, 75 bp, synthetic construct
  source 1..75: mol_type = other DNA
ctcaacgctcgctactgttaatggccgccatccagaaggagaatttagcgttgatcagggctacgcctgcggttt

SEQ ID NO: 302072 - DNA, 75 bp, synthetic construct
  source 1..75: mol_type = other DNA
gccaactcgttcgctggattgcttcatggcatcttttccatttggacaagaatacctcaccaaaggataatttgc

SEQ ID NO: 302073 - DNA, 75 bp, synthetic construct
  source 1..75: mol_type = other DNA
aaaggtcgcgtatgaccttgctaacgggaaatacactgcacaggatgccaccacagcgcgaaaagggcttgttca

SEQ ID NO: 302074 - DNA, 75 bp, synthetic construct
  source 1..75: mol_type = other DNA
acatacacgagggagtattggtaacacaggtgggagcgaaacccgtccacgaaatattgcatttaactatatcgt

SEQ ID NO: 302075 - DNA, 75 bp, synthetic construct
  source 1..75: mol_type = other DNA
aaagggtatcagattacctgggaccaggaagaaatgtggcaggaagcccatgcccgcgcctttaccgtcgctaaa

SEQ ID NO: 302076 - DNA, 75 bp, synthetic construct
  source 1..75: mol_type = other DNA
taccagaggctcataaagcaacagggctgcaagacacatttgaacttttttctcgcgacttcttagcttttctgg

SEQ ID NO: 302077 - DNA, 75 bp, synthetic construct
  source 1..75: mol_type = other DNA
tttctgacggaagccaactcgttcgctggattgcttcatggcatcttttccatttggacaagaatacctcaccaa

SEQ ID NO: 302078 - DNA, 75 bp, synthetic construct
  source 1..75: mol_type = other DNA
ctatatggatataaagcagacgaaaagcaattaagcaggtgtttagctgataaaatcataggtgtcaataccaat

SEQ ID NO: 302079 - DNA, 75 bp, synthetic construct
  source 1..75: mol_type = other DNA
tattacccattagtggtgatgatgattgaagcgcgtgatctggttaacgatcagggaaaaccgctactttatgtc

SEQ ID NO: 302080 - DNA, 75 bp, synthetic construct
  source 1..75: mol_type = other DNA
agcgcaacatcgcgcagtgattatccccgatgatgcaaaactgcacagaaatttactccgctggtatagcgcagg

SEQ ID NO: 302081 - DNA, 75 bp, synthetic construct
  source 1..75: mol_type = other DNA
tctctggttgagatggttttgcacaaagggcgtaagccgcgaatctcactcacgcgtgatacacagcatccctta

SEQ ID NO: 302082 - DNA, 75 bp, synthetic construct
  source 1..75: mol_type = other DNA
atctatttccttatctaggttattatcaattaatgtcatcagttgataagtttattatttatgatgatgtttcat

SEQ ID NO: 302083 - DNA, 75 bp, synthetic construct
  source 1..75: mol_type = other DNA
aagccggatagcttctacgatgcgggttataacgaaggtattcaggactgtcgtaaacatctgacggcatcaggc

SEQ ID NO: 302084 - DNA, 75 bp, synthetic construct
  source 1..75: mol_type = other DNA
gaatggcgctcgtgatggtgctgctgttactggcagtgatggcatcagtgagtgtcggcctctctcagcgcatat

SEQ ID NO: 302085 - DNA, 75 bp, synthetic construct
  source 1..75: mol_type = other DNA
gcggggagcagacttaccggtatgtgccgaatcctttaagatggatagatcccttaggattaaataaaggagctt

SEQ ID NO: 302086 - DNA, 75 bp, synthetic construct
  source 1..75: mol_type = other DNA
gagctgataagccagcagttcagccgggtacggcagccgcacccgtccgtggccccgcagtgggtgacgcggacg

SEQ ID NO: 302087 - DNA, 75 bp, synthetic construct
  source 1..75: mol_type = other DNA
tccgcttatctttttggtggtatggctgctgatgttgctggcgtggtatcttgttggtctgccgataggtccggg

SEQ ID NO: 302088 - DNA, 75 bp, synthetic construct
  source 1..75: mol_type = other DNA
tttttaacttccagaccattctgcatctgcccgttgccgtgcaaaatgacaccatcgatttttaccaaatgttcg

SEQ ID NO: 302089 - DNA, 75 bp, synthetic construct
  source 1..75: mol_type = other DNA
atccgggctgtgctataaccggttccggtattacgagccggaaaccggaatgtacctggtgagtgatccgctggg

SEQ ID NO: 302090 - DNA, 75 bp, synthetic construct
  source 1..75: mol_type = other DNA
cagacgcagctaaggctaatggggaacaaggtgttcttgatgagttagatgctatcagggatgacctgcttttta

SEQ ID NO: 302091 - DNA, 75 bp, synthetic construct
  source 1..75: mol_type = other DNA
ctatttgttcagaggtatttcatagccaatttaattcagcctatctttcagcattagaaggcgatattgtattca

SEQ ID NO: 302092 - DNA, 75 bp, synthetic construct
  source 1..75: mol_type = other DNA
cgtgatggagagataattggaacgtgggctgccaatcaactttctccaggcgatattactgagttaatgaccgga

SEQ ID NO: 302093 - DNA, 75 bp, synthetic construct
  source 1..75: mol_type = other DNA
cgtatttttcatatgaagcgcggaaagattattcatgagctgttgccttcgaattataccgagcagcagttggcg

SEQ ID NO: 302094 - DNA, 75 bp, synthetic construct
  source 1..75: mol_type = other DNA
agaaaataattcaggagctggaattcaatctcgatcctgatgcgttagtacaacatttgccgattgcacaacgcc

SEQ ID NO: 302095 - DNA, 75 bp, synthetic construct
  source 1..75: mol_type = other DNA
agctgaatattgctaatgcttctattatcgccatagatagcataactacaaataagtacttagttgtttatactg

SEQ ID NO: 302096 - DNA, 75 bp, synthetic construct
  source 1..75: mol_type = other DNA
cggaatatcgaaaaaaataaaccaatgaccttatatttacatactggtgatgaggagtgcgcgatccctgttgaa

SEQ ID NO: 302097 - DNA, 75 bp, synthetic construct
  source 1..75: mol_type = other DNA
tattcttatctcatctcgttatattttttggcgaatttcaacaaccttagtatggaataaatatcccgatatttt

SEQ ID NO: 302098 - DNA, 75 bp, synthetic construct
  source 1..75: mol_type = other DNA
cattggccctatgccgctggataaatgcgagctacggcactggctggcctgttttgatcgggtggcaaagaaagc

SEQ ID NO: 302099 - DNA, 75 bp, synthetic construct
  source 1..75: mol_type = other DNA
accctaaaataaaagagttaataaaagggcgtataccggctcagcgctggggaagggcacaggatcttatggggg

SEQ ID NO: 302100 - DNA, 75 bp, synthetic construct
  source 1..75: mol_type = other DNA
caggaattctgcgatgttgttggcgacagcaccgaggttatctgcgaggagattgggagagatggtgttctggtt

SEQ ID NO: 302101 - DNA, 75 bp, synthetic construct
  source 1..75: mol_type = other DNA
gctatctcagcagcatgatgcactttttatcaggtgtgccacgactgattttcttgtgtgcaccattatgcccca

SEQ ID NO: 302102 - DNA, 75 bp, synthetic construct
  source 1..75: mol_type = other DNA
cattcgccgggcggcagccaaaattaaacaagaaaatcctgactaccaaggcgaccttggcttcaaagtactcaa

SEQ ID NO: 302103 - DNA, 75 bp, synthetic construct
  source 1..75: mol_type = other DNA
tacccacgcctgaaacttgctcgtaatctactaaaggatgatggggttatttttatcagtattgacgacaatgag

SEQ ID NO: 302104 - DNA, 75 bp, synthetic construct
  source 1..75: mol_type = other DNA
gccagtgcgttgcacgtctcccagcctgcgctttcccagcagattcgccagttagaggagagtttaggcgtgccg

SEQ ID NO: 302105 - DNA, 75 bp, synthetic construct
  source 1..75: mol_type = other DNA
ttcttgccgtggctgaacatggcagcttcacccgtgcagccagtgcgttgcacgtctcccagcctgcgctttccc

SEQ ID NO: 302106 - DNA, 75 bp, synthetic construct
  source 1..75: mol_type = other DNA
atctgctttgtcgcgacgagttggacgttgggattgccttcgcgcctgtgcattcgccggagctggaggcaattc

SEQ ID NO: 302107 - DNA, 75 bp, synthetic construct
  source 1..75: mol_type = other DNA
tacgcgcatccgggcttttatcgatttccttagcgagcatgtaaaaacagctcccggaggagctgtcagagaggc

SEQ ID NO: 302108 - DNA, 75 bp, synthetic construct
  source 1..75: mol_type = other DNA
tggttgggggaaagaaaaaacggagcccccgcaacaaggccggggggctttcacacaaaggaaaatatccttttt

SEQ ID NO: 302109 - DNA, 75 bp, synthetic construct
  source 1..75: mol_type = other DNA
cacgtctcccagcctgcactttcccagcagattcgccagttagaggaaagtttaggcgtgccgctgtttgaccgt

SEQ ID NO: 302110 - DNA, 75 bp, synthetic construct
  source 1..75: mol_type = other DNA
tggcgataactacaagcgaacagcaaaatacattggcagtactgatggtggttatgatgtatttaaaagtaacaa

SEQ ID NO: 302111 - DNA, 75 bp, synthetic construct
  source 1..75: mol_type = other DNA
aggaactacgcatcaaagcagcagaaaaggcagctcaggatgcaactattaaagagcgaaaagcgaaagaggacg

SEQ ID NO: 302112 - DNA, 75 bp, synthetic construct
  source 1..75: mol_type = other DNA
aagttctgcccgatcttcaagcgatggagccagagcacaaaaacttggttttaaagatagtaaagagttttctat

SEQ ID NO: 302113 - DNA, 75 bp, synthetic construct
  source 1..75: mol_type = other DNA
tgttgggattgccttcgcgccggtgcattcgccggaactggaggcaatacctttactgacagaaagtttagcgtt

SEQ ID NO: 302114 - DNA, 75 bp, synthetic construct
  source 1..75: mol_type = other DNA
gttataatttatatttgaaatgttttaatatgcttttagagcatccttttggaatagggtatggcaattataaat

SEQ ID NO: 302115 - DNA, 75 bp, synthetic construct
  source 1..75: mol_type = other DNA
gctccagtttgttacagcgtattgaggatgttaatgctgaacgagccagggcctttagtcgtttgacagttatat

SEQ ID NO: 302116 - DNA, 75 bp, synthetic construct
  source 1..75: mol_type = other DNA
cgctgagcctggcagtattacagtcccttttactgctacgccgccagtatcgcgtattgatgccaaacgtgggca

SEQ ID NO: 302117 - DNA, 75 bp, synthetic construct
  source 1..75: mol_type = other DNA
tgtttaatgttctaaagggtgaaatgagtttagttggtcctaggccaataattactgcagaacttgaaagatata

SEQ ID NO: 302118 - DNA, 75 bp, synthetic construct
  source 1..75: mol_type = other DNA
aggaaagttaaagcggatggtgggccagcaatatatgggcatgaaaggattgggaaaggaggtcgtaaatttaaa

SEQ ID NO: 302119 - DNA, 75 bp, synthetic construct
  source 1..75: mol_type = other DNA
aactggtctatgtggaacgatattgcaatactatttaaaacaataaatgttgtcctgaaaaaagatggtgcctat

SEQ ID NO: 302120 - DNA, 75 bp, synthetic construct
  source 1..75: mol_type = other DNA
ggttggaaagtattacactggttattagcactttgctgtgtggcctggtactctatgaggctccgtcattatttt

SEQ ID NO: 302121 - DNA, 75 bp, synthetic construct
  source 1..75: mol_type = other DNA
ccaagctgacttacgcaacgcttggttaagaaattttatgatcaaaggataccgttatgtttcagtcatccctac

SEQ ID NO: 302122 - DNA, 75 bp, synthetic construct
  source 1..75: mol_type = other DNA
gtctactagatatagttggcctctggaggcgtgaaacatggattctgggaagtggaaaaaatgcagttgaggcct

SEQ ID NO: 302123 - DNA, 75 bp, synthetic construct
  source 1..75: mol_type = other DNA
tatttttgcaataatcgaaattgctgttatggcttttaccacttggtcattctcacgttacttatgggtgataac

SEQ ID NO: 302124 - DNA, 75 bp, synthetic construct
  source 1..75: mol_type = other DNA
atctttcaagttgaactggataaacaaattgaccttgtgactgaactagcaaaagatcccgcatcaaaaaaagaa

SEQ ID NO: 302125 - DNA, 75 bp, synthetic construct
  source 1..75: mol_type = other DNA
ttgtgtttaaagcaaatgaattagcagtaagccgttatgatctaactgaacatgaaaccaagctaattctgtttt

SEQ ID NO: 302126 - DNA, 75 bp, synthetic construct
  source 1..75: mol_type = other DNA
aattggtctatgtggaatgatatagcgatcttatttaagacagttggtgttgttttgaaaaaagacggtgcgtat

SEQ ID NO: 302127 - DNA, 75 bp, synthetic construct
  source 1..75: mol_type = other DNA
gacagtttttattgcaatcaatattgcaatcttgagttcaaaccttttgaaattatcacgctacgattaactcaa

SEQ ID NO: 302128 - DNA, 75 bp, synthetic construct
  source 1..75: mol_type = other DNA
ggatggcaattgctgcacattcttctggctttgtgctgtgttggatggtattcaatgagattacgtcattatttt

SEQ ID NO: 302129 - DNA, 75 bp, synthetic construct
  source 1..75: mol_type = other DNA
ccagggatggatacaaagacagcaagtgattacctgccacagacaaattggccaacaactcaattaccaccagga

SEQ ID NO: 302130 - DNA, 75 bp, synthetic construct
  source 1..75: mol_type = other DNA
cgacaattatcaatatttaaagttaaatgattatcttttgggggctatgagtctggatgatagtataatgaatac

SEQ ID NO: 302131 - DNA, 75 bp, synthetic construct
  source 1..75: mol_type = other DNA
agctgacgctagcacggtaccaatgactgtgaccttggcaggtaaaacactgagcaccactactaccagttatga

SEQ ID NO: 302132 - DNA, 75 bp, synthetic construct
  source 1..75: mol_type = other DNA
cttggctggctttcagatcgtcacccaccagaaaaaaccaattccagcgtaacgcaagaagtaaaatcttcagtt

SEQ ID NO: 302133 - DNA, 75 bp, synthetic construct
  source 1..75: mol_type = other DNA
tgcctggttgtttactatctcgctgctgttgtcgctggtatcgattgtggtgatcatgaagctgttttatcaata

SEQ ID NO: 302134 - DNA, 75 bp, synthetic construct
  source 1..75: mol_type = other DNA
agcagtctccggaccgcacgctcgaagtggtgatccttgccggaagcctggcatgggagacctcacacgtgtggc

SEQ ID NO: 302135 - DNA, 75 bp, synthetic construct
  source 1..75: mol_type = other DNA
cgccgtccggtaacggtgttgagcctcggttgtgtggtgattattgtcgccgctaacatcgtcggcatcggcatg

SEQ ID NO: 302136 - DNA, 75 bp, synthetic construct
  source 1..75: mol_type = other DNA
attactggagggaacgcttccgggaaaacctctctgggcagaatattgtgtgggattcaggtttttatcagaacc

SEQ ID NO: 302137 - DNA, 75 bp, synthetic construct
  source 1..75: mol_type = other DNA
caccaccgatgcgggtgccgggtttgagcagacgctgaccggaatgacagtggggatcgacagccgtaatgatat

SEQ ID NO: 302138 - DNA, 75 bp, synthetic construct
  source 1..75: mol_type = other DNA
aacgtagcaggtaaaatgagcagcggtggagccgccaatggcagttaccacagcaacgggctgggcggtcacatt

SEQ ID NO: 302139 - DNA, 75 bp, synthetic construct
  source 1..75: mol_type = other DNA
tatggagaaagagattgagtattatctggagattgccaacaaagagttgacaaaagtggataatacgttaaatga

SEQ ID NO: 302140 - DNA, 75 bp, synthetic construct
  source 1..75: mol_type = other DNA
aacattcagacgttcgctaaccagatttatattgataccggatcgccgaaaagtgggcggctgtcattttataaa

SEQ ID NO: 302141 - DNA, 75 bp, synthetic construct
  source 1..75: mol_type = other DNA
ttggttcgaatctgccgctggatacattgctaaacaacctgaccatcgctgaaaaaaaaacgcttaaatccaatt

SEQ ID NO: 302142 - DNA, 75 bp, synthetic construct
  source 1..75: mol_type = other DNA
tttttttcttgttcgtcgtttttgttttttctggaaggttctggctgttttcatcatttgtgtattgcactgtgt

SEQ ID NO: 302143 - DNA, 75 bp, synthetic construct
  source 1..75: mol_type = other DNA
aggatgaaactgaaagcgagctatcagagaagccagcccatacgctccgaaaatatggcgcagcctccaggctat

SEQ ID NO: 302144 - DNA, 75 bp, synthetic construct
  source 1..75: mol_type = other DNA
atggctgcttttcgcatcttacgtcttaaccctgccttgaataccttatcattcgtcaaaatattaatagcaatg

SEQ ID NO: 302145 - DNA, 75 bp, synthetic construct
  source 1..75: mol_type = other DNA
attgtggcgctgtggccttggccgaaatggcagcgtatgtgcgcccgtctgccgtggctgctcgccattccccat

SEQ ID NO: 302146 - DNA, 75 bp, synthetic construct
  source 1..75: mol_type = other DNA
cggagcatggtatctggggcctgctgcgtcagcaggtaaagttcttggtggtgggcttcttggactggcggccaa

SEQ ID NO: 302147 - DNA, 75 bp, synthetic construct
  source 1..75: mol_type = other DNA
agagaagtcagctcacacactcggaaaatatggcgcagcctccaggctctcaaaccgccagcaaattcctgtctg

SEQ ID NO: 302148 - DNA, 75 bp, synthetic construct
  source 1..75: mol_type = other DNA
agagaagccagcccatacgctccgaaaatatggcgcagcctccaggctatctaaccgccaacaaattcctgtctg

SEQ ID NO: 302149 - DNA, 75 bp, synthetic construct
  source 1..75: mol_type = other DNA
atgttggataaaattcgcaatctggactgttcagcaaaattcactgagcacaattttgtgtcgagcgaatacacc

SEQ ID NO: 302150 - DNA, 75 bp, synthetic construct
  source 1..75: mol_type = other DNA
gttggtgtaggaaccggtaaaacagttaaagcttacatgaacaatgcgggtaatatttatgcttcaggtaatctt

SEQ ID NO: 302151 - DNA, 75 bp, synthetic construct
  source 1..75: mol_type = other DNA
ctggttagttacgttaaaaaaaataacaggtaacaaagaaaatgtgattgggtttgatatgcgtcagtgtacggc

SEQ ID NO: 302152 - DNA, 75 bp, synthetic construct
  source 1..75: mol_type = other DNA
agtcagtattgcgcagtatatgccgacgctgtggctgggcgcggggcgttttccgacgctcaccactgaggcggt

SEQ ID NO: 302153 - DNA, 75 bp, synthetic construct
  source 1..75: mol_type = other DNA
gcgcaattaaaaatatgactgtggaacaattacttttgaggtgtactggcaatagcggacactaccatttgttct

SEQ ID NO: 302154 - DNA, 75 bp, synthetic construct
  source 1..75: mol_type = other DNA
gactttccggttttatctggaaaaacagggatggactcttgttaaccggggcgcaattaaaaatatgactgtgga

SEQ ID NO: 302155 - DNA, 75 bp, synthetic construct
  source 1..75: mol_type = other DNA
gcatcaaaggacgcaaacgtctacagcgccgaatgccaatgccgatctggaaaaattagcggccagggcgaagca

SEQ ID NO: 302156 - DNA, 75 bp, synthetic construct
  source 1..75: mol_type = other DNA
ttacgcgcaatattgatgtttcagtgggttcgattaccggaatgtgcgcagtgctgttggggataactggctctt

SEQ ID NO: 302157 - DNA, 75 bp, synthetic construct
  source 1..75: mol_type = other DNA
tccgcttggaaaacggaatctatggtcactcccgtttttgcaacaccgattttgacgacaagttggcttgcttga

SEQ ID NO: 302158 - DNA, 75 bp, synthetic construct
  source 1..75: mol_type = other DNA
ccacctgagactataacaaaatatgcaaaagcatataaagcagcttatcctgatttttcttttaatttgtggata

SEQ ID NO: 302159 - DNA, 75 bp, synthetic construct
  source 1..75: mol_type = other DNA
acgccgttcgtcggcgtgccggtgggtattttcgtggggatttatgtctttaccaaagtggttcgtctgatttca

SEQ ID NO: 302160 - DNA, 75 bp, synthetic construct
  source 1..75: mol_type = other DNA
ttagtcaaaatggctcaggcctgcaaggaagggaatgtcgccaacagcgaagagagttgggcaacggatgtgctg

SEQ ID NO: 302161 - DNA, 75 bp, synthetic construct
  source 1..75: mol_type = other DNA
actcagatctattctggtggtacgcaaattgttgattacaccagctcctcggatgttattgaagtttattccggt

SEQ ID NO: 302162 - DNA, 75 bp, synthetic construct
  source 1..75: mol_type = other DNA
ttaaaaatggcggtgagcaaagagtatatgaaagccatgcgctggacacgacgattgaaggtggaactcagtctc

SEQ ID NO: 302163 - DNA, 75 bp, synthetic construct
  source 1..75: mol_type = other DNA
tatccacattatgtcgatgaataacgagtggtttatccagcaggttcttgagattggcgtgcagcgagtttcctt

SEQ ID NO: 302164 - DNA, 75 bp, synthetic construct
  source 1..75: mol_type = other DNA
cggcgaatcgcccgtctggaaacgggcatggcctgggcagaagagccgccgtcacgcactcgtcacttaatcagc

SEQ ID NO: 302165 - DNA, 75 bp, synthetic construct
  source 1..75: mol_type = other DNA
gactggaaatttcgtgactggctggcacagctcgacgaagagattcgttacaccatgcgcaccacggttaacgca

SEQ ID NO: 302166 - DNA, 75 bp, synthetic construct
  source 1..75: mol_type = other DNA
tggcgcttgctggaacgggatatcgtcctggatcaagcggtgatcacttcccataacctgagtgtactgttctga

SEQ ID NO: 302167 - DNA, 75 bp, synthetic construct
  source 1..75: mol_type = other DNA
aggcttgtgctgacatgaaacgggataaaaacattgccagtgtgtttgctaccgggctgaatgagtggaaacagg

SEQ ID NO: 302168 - DNA, 75 bp, synthetic construct
  source 1..75: mol_type = other DNA
aacacgacagaatgatattctgtcatatcagagttatgtcgtcttacccgataacactggtggtgatgctgccaa

SEQ ID NO: 302169 - DNA, 75 bp, synthetic construct
  source 1..75: mol_type = other DNA
cttcatgactaatcgagaacgtttttttttcaatttagtctacaatgaatttcatcatgagttttttatattctc

SEQ ID NO: 302170 - DNA, 75 bp, synthetic construct
  source 1..75: mol_type = other DNA
aattagctaagtttccaacaaaattgaaacttaagctgcaaaaaattttaagaattcgccccattacacacgctt

SEQ ID NO: 302171 - DNA, 75 bp, synthetic construct
  source 1..75: mol_type = other DNA
tcaccagagttcattggtgaaataaaaaaaggtacgagagttgcgttgaaatatgattcttatccctatcaacga

SEQ ID NO: 302172 - DNA, 75 bp, synthetic construct
  source 1..75: mol_type = other DNA
taatacatcgtctggcaccagtggttacagttctcttaattatcgtggagcttacggtaatacgaatatcggtta

SEQ ID NO: 302173 - DNA, 75 bp, synthetic construct
  source 1..75: mol_type = other DNA
gtgataaccgcgcgtgccggaacgccgctggtggcgattgaagcggcgctggagagcgccgggcaaatgcttccc

SEQ ID NO: 302174 - DNA, 75 bp, synthetic construct
  source 1..75: mol_type = other DNA
gctggcggagcaccatcgtgcgcatcctgacatcaaggttgagctgctggatacgcagtgggatcgctgcctgaa

SEQ ID NO: 302175 - DNA, 75 bp, synthetic construct
  source 1..75: mol_type = other DNA
aacttgttcgcaccttccttagctccctgatcgcggcgctggaagaagaagtgggatatcgactgttcgatcgcg

SEQ ID NO: 302176 - DNA, 75 bp, synthetic construct
  source 1..75: mol_type = other DNA
cagtttgggggcaaggtggaatgcagcagtaaaacgtgctggtattcgccgccgtaatccgtaccatacgcggca

SEQ ID NO: 302177 - DNA, 75 bp, synthetic construct
  source 1..75: mol_type = other DNA
aattgaatcttccgatgatttcatttccttcataattgaccaagatgattcttggatgccagagcgtttaaaaat

SEQ ID NO: 302178 - DNA, 75 bp, synthetic construct
  source 1..75: mol_type = other DNA
cgacagcgacaggtcgatgtcctgtctggccttggtgccatgtctgacaaattcggtaaatccagtgacaaattg

SEQ ID NO: 302179 - DNA, 75 bp, synthetic construct
  source 1..75: mol_type = other DNA
gcggcaagccggttaaaacggaggaagtaatcaagagcacccttctctatcgcaacggctcacagctggcgcgca

SEQ ID NO: 302180 - DNA, 75 bp, synthetic construct
  source 1..75: mol_type = other DNA
aatagtgaaggtgcattctccatccacaataaagtggcagacaatgtgttgctggaaaacggaggccatttagaa

SEQ ID NO: 302181 - DNA, 75 bp, synthetic construct
  source 1..75: mol_type = other DNA
aacgtccgggggctgcgcttcagttagtgagtaaggtcaatgatatttacgcgcccgaactggaaatcgaagtaa

SEQ ID NO: 302182 - DNA, 75 bp, synthetic construct
  source 1..75: mol_type = other DNA
tacactggatgcgtatacatcatatggcactgatggggactcggtaaggcttaagaaggaattaatttatagttt

SEQ ID NO: 302183 - DNA, 75 bp, synthetic construct
  source 1..75: mol_type = other DNA
ggggatgataagtttatcaccaccgactatttgcaacagtgccacagaaaattacctgaactgcgtcaactcgga

SEQ ID NO: 302184 - DNA, 75 bp, synthetic construct
  source 1..75: mol_type = other DNA
gctgtgctgctggtatcgtattttggttcagcacgttccgatctcggtgcgtcgtttctgatgcccgccatcacc

SEQ ID NO: 302185 - DNA, 75 bp, synthetic construct
  source 1..75: mol_type = other DNA
aacgtccgggtgcagcgctccagcttgccggaaaagtgaatgagctttatgcgccagaactggaaattgaagtaa

SEQ ID NO: 302186 - DNA, 75 bp, synthetic construct
  source 1..75: mol_type = other DNA
tggagaagctcattcaccgcccgggagcagcccttcagatggcagcaaaactcaatgaagattttgccgtcaatc

SEQ ID NO: 302187 - DNA, 75 bp, synthetic construct
  source 1..75: mol_type = other DNA
tatacaagagtcaatgataattgcgatattcattatattggttttagtcgtctctataagcgaatttttcaaaaa

SEQ ID NO: 302188 - DNA, 75 bp, synthetic construct
  source 1..75: mol_type = other DNA
taagttacataatgctatccctgatttttactgcagatatctccgatttcggtgagaacgttatgaatctgtcga

SEQ ID NO: 302189 - DNA, 75 bp, synthetic construct
  source 1..75: mol_type = other DNA
cagctacgcgatgatgcactggtactcaacgacaacggcgggcggagcattcactttgagccgctgctgccgggg

SEQ ID NO: 302190 - DNA, 75 bp, synthetic construct
  source 1..75: mol_type = other DNA
tattactttttttctttctgcatattgctcttgttttcatgacattttttattagttatagggggagcaaaggta

SEQ ID NO: 302191 - DNA, 75 bp, synthetic construct
  source 1..75: mol_type = other DNA
cgttaacgcagtttatgaagaaaaaatttacgaagaacaactggccaattttctggacggagaagaatatgtcct

SEQ ID NO: 302192 - DNA, 75 bp, synthetic construct
  source 1..75: mol_type = other DNA
cgtgggatggctgaaacgtcgtctgttttattacaccacgcccggattttcttcactgctggccttgcataaggg

SEQ ID NO: 302193 - DNA, 75 bp, synthetic construct
  source 1..75: mol_type = other DNA
ttgcattttatgagtttatgtatatcaattattttactgatttttttctatgtttgcttttcacttttcttcatt

SEQ ID NO: 302194 - DNA, 75 bp, synthetic construct
  source 1..75: mol_type = other DNA
taattgttgctgccggggaaacaattgaagatataggaaaaggaacagcctggttgggtaaatcaaatgttgttt

SEQ ID NO: 302195 - DNA, 75 bp, synthetic construct
  source 1..75: mol_type = other DNA
cagtacaactactatcgcgaccagttgttgagttttaaagagggtgaggttgagtggaagactttgggggaaatt

SEQ ID NO: 302196 - DNA, 75 bp, synthetic construct
  source 1..75: mol_type = other DNA
ttactgcacttaccgctgagcttaccgctgagcttaccgctgagcttaacatgcgtaaaaaacagtacaactact

SEQ ID NO: 302197 - DNA, 75 bp, synthetic construct
  source 1..75: mol_type = other DNA
atgagtgaacaaatcaaacaggatatcgatctgattgagatttttttatctgaagaaaaagattcgtgttatcct

SEQ ID NO: 302198 - DNA, 75 bp, synthetic construct
  source 1..75: mol_type = other DNA
cggaacacagattaaacagcttggagaagcggttaaccgctatatcagtattcgctatgacaagatatccacact

SEQ ID NO: 302199 - DNA, 75 bp, synthetic construct
  source 1..75: mol_type = other DNA
ccatcaccgaaggtctcccgcgtgaaatcgagttgcgccagaaacaatacgagtactatcgtgacttactgttca

SEQ ID NO: 302200 - DNA, 75 bp, synthetic construct
  source 1..75: mol_type = other DNA
tcacaggggcgtaatacccctgcttttaccaccctcaccactgtcaggatcactgggcgcgttcaggagtatgac

SEQ ID NO: 302201 - DNA, 75 bp, synthetic construct
  source 1..75: mol_type = other DNA
ctacgccttcaccttttatatcttccagcagcttaaccgctggccggataacggcgaggaagactattcccgtaa

SEQ ID NO: 302202 - DNA, 75 bp, synthetic construct
  source 1..75: mol_type = other DNA
tttacagcactccataccctattgttaatctttttctattgtatttatctgtggcagcactccctcttttaaata

SEQ ID NO: 302203 - DNA, 75 bp, synthetic construct
  source 1..75: mol_type = other DNA
tccccaaatatcttgtcctgcttgacgatctggatcaggataagatcgaccagcttgagagcggtctttctctat

SEQ ID NO: 302204 - DNA, 75 bp, synthetic construct
  source 1..75: mol_type = other DNA
gggaagtgggtgtctctctgatgcgtaatggaaaaatactggctacgggagaaaatgtctccctggggacagtaa

SEQ ID NO: 302205 - DNA, 75 bp, synthetic construct
  source 1..75: mol_type = other DNA
ttcttttcgagatcgacatagagcattaccaggggccggaagatttttatcctgtccagtcggttccccttgagg

SEQ ID NO: 302206 - DNA, 75 bp, synthetic construct
  source 1..75: mol_type = other DNA
caggttctctttttgagcgtatggaagcctcttcggccagaaaccggcagggaggcagtattcattcgctcaggc

SEQ ID NO: 302207 - DNA, 75 bp, synthetic construct
  source 1..75: mol_type = other DNA
caggtagggccaacctttgaccaggtgtttacatctgccgatgacaacaaactggttgttccacagtttcttacc

SEQ ID NO: 302208 - DNA, 75 bp, synthetic construct
  source 1..75: mol_type = other DNA
gcttctacagatctcttgaaattgggttagggaaaatgcttgggaatttgggcgcattatcgttaatctatggac

SEQ ID NO: 302209 - DNA, 75 bp, synthetic construct
  source 1..75: mol_type = other DNA
ctatggtgtgtagaaatgaaaaaatgttcaaaaatatgttcctaggtgtgagagatggattaaaaaataagtttg

SEQ ID NO: 302210 - DNA, 75 bp, synthetic construct
  source 1..75: mol_type = other DNA
ctaccagttgctcacccgcctcgggcatgaatttgccccggaaaacagtactctggcagtacagaaagacaaaga

SEQ ID NO: 302211 - DNA, 75 bp, synthetic construct
  source 1..75: mol_type = other DNA
attattgcgcaactggaaactgcgcagaaaatccgtgacatcttcttcagggctttgttgaataaatcgaacttt

SEQ ID NO: 302212 - DNA, 75 bp, synthetic construct
  source 1..75: mol_type = other DNA
ccgaaatgtatcttcctgtacatgcgaatatgtgatcaatacaaccaaaggcgggaaagtcatagctaaaacgct

SEQ ID NO: 302213 - DNA, 75 bp, synthetic construct
  source 1..75: mol_type = other DNA
cgccatcaaaaatcataaaatttctggattacgcttatgaaaaatccatcgatggtattggtatcccggggatag

SEQ ID NO: 302214 - DNA, 75 bp, synthetic construct
  source 1..75: mol_type = other DNA
ttattaccgtggtttccgcaaacgctggcatctatagaaaaacgaaaagttgcagtcaacgtcatcttgcaggaa

SEQ ID NO: 302215 - DNA, 75 bp, synthetic construct
  source 1..75: mol_type = other DNA
ttttctatctcagattatattttatcaggctcaaatagtgatctttatgtcaaagttatagaggaaaatggctca

SEQ ID NO: 302216 - DNA, 75 bp, synthetic construct
  source 1..75: mol_type = other DNA
ctttctcgtggcattcaatctgtaagttataacaccagttcagtgaaaggggggaggagtactcatcagttaggg

SEQ ID NO: 302217 - DNA, 75 bp, synthetic construct
  source 1..75: mol_type = other DNA
actatgaccgaaaccattgagaataattttgatgatatttttcgtcaacagtcagagaatatgagcaattattat

SEQ ID NO: 302218 - DNA, 75 bp, synthetic construct
  source 1..75: mol_type = other DNA
gcgtgcgctgtggtgggtacagcattacctgcatcacgtccggccgcagttgctggttaacccgcactgtaaggc

SEQ ID NO: 302219 - DNA, 75 bp, synthetic construct
  source 1..75: mol_type = other DNA
tgatgccccagctgcggcaatatgtctcgaagcacggttatgttccaccgcagcaagatacacatactgaagcga

SEQ ID NO: 302220 - DNA, 75 bp, synthetic construct
  source 1..75: mol_type = other DNA
agcgacgttgattttgtcatggcgcacatccgcgtcggcaaatacccgatgcgcgaactggatgaaaaaatccca

SEQ ID NO: 302221 - DNA, 75 bp, synthetic construct
  source 1..75: mol_type = other DNA
gggaaatatattctattcatctactgaaacaaacttaaatgatgatgccagaaatctgtttgatagtgtaactgt

SEQ ID NO: 302222 - DNA, 75 bp, synthetic construct
  source 1..75: mol_type = other DNA
atttatggctagacttgataaacaaaaaaatccattggagtttataagagctgttgatattattaagaaaaaatt

SEQ ID NO: 302223 - DNA, 75 bp, synthetic construct
  source 1..75: mol_type = other DNA
ctgaagaatccgcaggactatggccgtctcggggcgcgcattcccaagggcgtgttgctggtcggcccaccgggc

SEQ ID NO: 302224 - DNA, 75 bp, synthetic construct
  source 1..75: mol_type = other DNA
gccctatgcccgcgtgttggagagcacctggctgcgcgatgtgctgtcgtggatcctgccagcggtagccttctt

SEQ ID NO: 302225 - DNA, 75 bp, synthetic construct
  source 1..75: mol_type = other DNA
tctcggcccgtggaacaaaccttgcaggaatcaatggaatagcggagcagctggggatggtcacccgggctcttt

SEQ ID NO: 302226 - DNA, 75 bp, synthetic construct
  source 1..75: mol_type = other DNA
gtgtccatctatatagatgggcgcgattgttgccagacaggacaattttcacaagacgtcgcagatggggcgctt

SEQ ID NO: 302227 - DNA, 75 bp, synthetic construct
  source 1..75: mol_type = other DNA
tgagttactataaaaaatcgctcatatcccaggaaggaagcataaaaaaaggtgcgccaggagacgcaccagttg

SEQ ID NO: 302228 - DNA, 75 bp, synthetic construct
  source 1..75: mol_type = other DNA
caatgaaccctgcatattcgccaatagtcgtcggtagtgaggacactctcgacgtgttcggggtggttacgtaca

SEQ ID NO: 302229 - DNA, 75 bp, synthetic construct
  source 1..75: mol_type = other DNA
cacggcgctggaacggctggtgaaaggtacggcgttgcatggcgcaagagccgaacatctgcgggataaaacaat

SEQ ID NO: 302230 - DNA, 75 bp, synthetic construct
  source 1..75: mol_type = other DNA
acggctattaccggcaaatatcggaagaaactcttgtcaggggggccgggccagctcctattttatggaaagcct

SEQ ID NO: 302231 - DNA, 75 bp, synthetic construct
  source 1..75: mol_type = other DNA
tggaatgataaaaatgagtgtgaccgaaatgtactaacccaattgcttggtatcagctatgacgaatggctaagg

SEQ ID NO: 302232 - DNA, 75 bp, synthetic construct
  source 1..75: mol_type = other DNA
atactgctaaattcaacaagattgcagcagatggttcaaggaagtacggaaattcgtcaagtaattattttgtat

SEQ ID NO: 302233 - DNA, 75 bp, synthetic construct
  source 1..75: mol_type = other DNA
taggtgccgctattgttgatattccattgcaaccggtcagtaaaaatatctttgatgtggattcttatcctcttg

SEQ ID NO: 302234 - DNA, 75 bp, synthetic construct
  source 1..75: mol_type = other DNA
gtgaactttaacgatgtgctcacgaccaaaatcgacggcacaaactatacccaaacggtgggttacagcctgaat

SEQ ID NO: 302235 - DNA, 75 bp, synthetic construct
  source 1..75: mol_type = other DNA
ccagtttacccgcagcggatacagtgctttcgtctttccgggtcgattcatggataagccattgtcagccagtgc

SEQ ID NO: 302236 - DNA, 75 bp, synthetic construct
  source 1..75: mol_type = other DNA
ttgagcaagacaccactcacagcaaaggccatagacgccgcacaaccgcaggacaagccctacaaactcaccgat

SEQ ID NO: 302237 - DNA, 75 bp, synthetic construct
  source 1..75: mol_type = other DNA
gtgtggctggaagctacaggatatagcgctcgtgagaatacttttcgatacgggctgcagaatacacgaggcctg

SEQ ID NO: 302238 - DNA, 75 bp, synthetic construct
  source 1..75: mol_type = other DNA
agatgattttgaagacggaacaattattatagcgaaatacggattcgaaactggcgatttagctggggggcgttt

SEQ ID NO: 302239 - DNA, 75 bp, synthetic construct
  source 1..75: mol_type = other DNA
acagtagagggaaaagaatttctgctgtcgtgccgattgaactgttcgaaaaactgacccgtgatagtgatatcg

SEQ ID NO: 302240 - DNA, 75 bp, synthetic construct
  source 1..75: mol_type = other DNA
atgacaactcaagtttctgttgaaactctttccccgatcacccacaaccagatcccagttattacaactgaactt

SEQ ID NO: 302241 - DNA, 75 bp, synthetic construct
  source 1..75: mol_type = other DNA
gacgtttgataaggctgcatatccgaaactggctattgcctatccttctggtgttattcctgatatgcgcggctg

SEQ ID NO: 302242 - DNA, 75 bp, synthetic construct
  source 1..75: mol_type = other DNA
ttgattacgggacgaagacagtcagtacgtttaactacggaacaaaaaccactaataccactggtaaccatacac

SEQ ID NO: 302243 - DNA, 75 bp, synthetic construct
  source 1..75: mol_type = other DNA
cacattcacacactgttgctattggctcacacgggcattccattaccgtaaatgctactggtaataccgaaaaca

SEQ ID NO: 302244 - DNA, 75 bp, synthetic construct
  source 1..75: mol_type = other DNA
cgtttaatgcgctgggaatgggtagatctggagtcagcaacaatcaccctacccgctgaagtcatgaaagcccgc

SEQ ID NO: 302245 - DNA, 75 bp, synthetic construct
  source 1..75: mol_type = other DNA
tagcattgtcagggttcagccggggtacgcatcggtgcccccaccggcgtggcctgttcggtgtgccccggcggg

SEQ ID NO: 302246 - DNA, 75 bp, synthetic construct
  source 1..75: mol_type = other DNA
attaaataatggtaaggctctgagtaacagacaagccaaaaatgatccgatgccaccctttaatattacacagaa

SEQ ID NO: 302247 - DNA, 75 bp, synthetic construct
  source 1..75: mol_type = other DNA
ggcggttgcttccagtaatcgacaacatcgtccggcgctggaattaaatcgcatccctgagttgcttgagaaaat

SEQ ID NO: 302248 - DNA, 75 bp, synthetic construct
  source 1..75: mol_type = other DNA
gtagggccatcatccctttcaaagcgcaattaacaatgggggatacggcgaccgcgggggacatttttgacagcg

SEQ ID NO: 302249 - DNA, 75 bp, synthetic construct
  source 1..75: mol_type = other DNA
ctttttcttccttttctatctctgtggtggcggttgctgttgccagcacgttttctgcacatgccggaaagttta

SEQ ID NO: 302250 - DNA, 75 bp, synthetic construct
  source 1..75: mol_type = other DNA
agggcgacatgacccgcaagggactggatattgtgcagggttcagcaggggtgctgataggcgcgccggacgggg

SEQ ID NO: 302251 - DNA, 75 bp, synthetic construct
  source 1..75: mol_type = other DNA
cgccactggtcatggctggcggaccaccttttcaacggcgcttaatgagtctggcagatactcaccagactggat

SEQ ID NO: 302252 - DNA, 75 bp, synthetic construct
  source 1..75: mol_type = other DNA
gcgttcaatcgtcgatataacggcccgtgatgttctggcattgcttcagaagaaagaacgcaccgcaccggagca

SEQ ID NO: 302253 - DNA, 75 bp, synthetic construct
  source 1..75: mol_type = other DNA
agaaagagcgcaccgcgccggaacaagccaggaagctacgccagcgtatcggggagatcttcaaatttgccgtta

SEQ ID NO: 302254 - DNA, 75 bp, synthetic construct
  source 1..75: mol_type = other DNA
gctgggagcgttcagattcagacggcaatacttttgctcatcctcacagctttgaggacggcagaattgcgcctg

SEQ ID NO: 302255 - DNA, 75 bp, synthetic construct
  source 1..75: mol_type = other DNA
ggcggaccaccttttcaacggcgcttaatgagtctggcagatactcaccagactggatcgaaatccaactggccc

SEQ ID NO: 302256 - DNA, 75 bp, synthetic construct
  source 1..75: mol_type = other DNA
caatacgtttgcttatcctcacggctttaaggacggcagaactgcgcaaaatgcgctgggaatgggtagatcttc

SEQ ID NO: 302257 - DNA, 75 bp, synthetic construct
  source 1..75: mol_type = other DNA
tgctttttttgatctgctcatgggggattttcaaaacggatcaaaagagcgaatccctttccaaaagtgttttta

SEQ ID NO: 302258 - DNA, 75 bp, synthetic construct
  source 1..75: mol_type = other DNA
cttatcctgaggactgggacgacgagttcaaggcccggctggaggagatgaagctgtactgggacgcatatcatg

SEQ ID NO: 302259 - DNA, 75 bp, synthetic construct
  source 1..75: mol_type = other DNA
ccaccagcattttggtgcgttctgggcgatgaccaccggggaatccggtctcgtgccccgagtcaaacctgacgg

SEQ ID NO: 302260 - DNA, 75 bp, synthetic construct
  source 1..75: mol_type = other DNA
tacgacagccagcaccgcctggtgttccacacgcggatacagcacggcgaaccacaggtggagagccggtacctc

SEQ ID NO: 302261 - DNA, 75 bp, synthetic construct
  source 1..75: mol_type = other DNA
ccgcagagcgccgtcgtgacgggaccggcaggcgaggaaatcttctgtgatgaacatggccgcgtgcgggtgaaa

SEQ ID NO: 302262 - DNA, 75 bp, synthetic construct
  source 1..75: mol_type = other DNA
caattcttgctggtattgcgctgttaaaagtaaagaaagatgcaccagcagagggcgaaaaattgagcgcgggga

SEQ ID NO: 302263 - DNA, 75 bp, synthetic construct
  source 1..75: mol_type = other DNA
atgaaagtgaataataaagattatttccctaagaatgtgagacttaatgttatgaggaagaaaggaggaatctta

SEQ ID NO: 302264 - DNA, 75 bp, synthetic construct
  source 1..75: mol_type = other DNA
atgtgtcaaaataatgcaaattctgtttcagaagacgtacgtttaaatatcatggttaaaaaaggcggagtatta

SEQ ID NO: 302265 - DNA, 75 bp, synthetic construct
  source 1..75: mol_type = other DNA
atgtgtcaaaataatgcaaattctgtttcagaatacgtacgtttaaatatcatggtgaaaaaaggcgaagtatta

SEQ ID NO: 302266 - DNA, 75 bp, synthetic construct
  source 1..75: mol_type = other DNA
tgactgagcaagatgaacgacaagggcaacgacatcagcctcatgatgagcaagaaaatgaaggtaaattcgaaa

SEQ ID NO: 302267 - DNA, 75 bp, synthetic construct
  source 1..75: mol_type = other DNA
taaatatgaggtcaacaacggatatctgagcataagtatatccaggctgaactatacgcatcagatagtaagaca

SEQ ID NO: 302268 - DNA, 75 bp, synthetic construct
  source 1..75: mol_type = other DNA
gtgtatctcgtaaggaggtttgtgctaaatatgaggtcaacaacggatatctgagcataagtatatccaggctga

SEQ ID NO: 302269 - DNA, 75 bp, synthetic construct
  source 1..75: mol_type = other DNA
tattacaaaccgctctagctaatcccgccgccgaattccgtgatggacagtgggaggccattgatgcactggtga

SEQ ID NO: 302270 - DNA, 75 bp, synthetic construct
  source 1..75: mol_type = other DNA
ctcgaccacaaaattaccgggcgatcgcgaaacgctatttttctacaatatgcgtgaaattcctcccgccccgga

SEQ ID NO: 302271 - DNA, 75 bp, synthetic construct
  source 1..75: mol_type = other DNA
gcgtgggcaggcaccggttttggccacctggcgataccgcgtgtgggtcaggaggtgattgtagacttcctcaac

SEQ ID NO: 302272 - DNA, 75 bp, synthetic construct
  source 1..75: mol_type = other DNA
ctctatgacccgctgggccgccggacgggaaaacgggtgtggcggcgggagcgtgacctgacggggtggatgtcg

SEQ ID NO: 302273 - DNA, 75 bp, synthetic construct
  source 1..75: mol_type = other DNA
cgcagaatatgatgaatggggcaacctgctgaatgaagagaacccgcatcagctgcagcagcttatccggctgcc

SEQ ID NO: 302274 - DNA, 75 bp, synthetic construct
  source 1..75: mol_type = other DNA
aagtgaaaaaagaattttgggatgaatttaaaagaaaaaatcatctgcatggagttttgttaaaaagaaacaaca

SEQ ID NO: 302275 - DNA, 75 bp, synthetic construct
  source 1..75: mol_type = other DNA
attatcggcggagatacagtctttactgataaaaatgacggaacaggtaatgatgtcatcagtgttgaagggaaa

SEQ ID NO: 302276 - DNA, 75 bp, synthetic construct
  source 1..75: mol_type = other DNA
gagctagcaaagaaagtagccatggtgctgacaaaagaaaagcctcaagactgctgcaacagttttgaggcctga

SEQ ID NO: 302277 - DNA, 75 bp, synthetic construct
  source 1..75: mol_type = other DNA
ggattaatgaatcgcaaatttcgcgatggaaagacagcttcatccccaaaatgggaatgcttctggctgttcttg

SEQ ID NO: 302278 - DNA, 75 bp, synthetic construct
  source 1..75: mol_type = other DNA
tcaccgtgctcactggtaatgacaatgtcaatctgcaacgtgccggaatcgatttggcaatctactttgatgacg

SEQ ID NO: 302279 - DNA, 75 bp, synthetic construct
  source 1..75: mol_type = other DNA
atatcatgaaggtatgcctgtagtcttgttttcctgcgaaacaggaaaaggcaaaaattcatttgcacagaaact

SEQ ID NO: 302280 - DNA, 75 bp, synthetic construct
  source 1..75: mol_type = other DNA
ttgattttggtgatatcggcgcatcgttatttagtgcggcagggccggggaatcgaccagctggtgtcatgccgc

SEQ ID NO: 302281 - DNA, 75 bp, synthetic construct
  source 1..75: mol_type = other DNA
ccaactttattgttcaggaaactatcgataattataaatatatgcaattaaatgattatctattaggtgcgatga

SEQ ID NO: 302282 - DNA, 75 bp, synthetic construct
  source 1..75: mol_type = other DNA
gcttgtgtaaaaacggcagtgcgaacgtgttaacggcggatatccccagctcgcagctggcaaatgcctgtgccg

SEQ ID NO: 302283 - DNA, 75 bp, synthetic construct
  source 1..75: mol_type = other DNA
gttctgacgtttattcgttatgcattcatttatctggcgatgaataaacgtgcgacgcttttgaagaacaacccg

SEQ ID NO: 302284 - DNA, 75 bp, synthetic construct
  source 1..75: mol_type = other DNA
gcccgtcagacgctgattatctctacatccatctggctgacggaacacaaatcaccgcgattgccagtaccgttc

SEQ ID NO: 302285 - DNA, 75 bp, synthetic construct
  source 1..75: mol_type = other DNA
caacgcggggccggttccggccggacaaccgaggtctctgggacaggtaggcagctctcctgtgagtctggggct

SEQ ID NO: 302286 - DNA, 75 bp, synthetic construct
  source 1..75: mol_type = other DNA
agcaatatgccccaaaatatataattgtatataccaggcttaatgaactagacaatcgtaaggcttcagcaaaat

SEQ ID NO: 302287 - DNA, 75 bp, synthetic construct
  source 1..75: mol_type = other DNA
atgcctggggacttataatgcgggttttgcaatggataaccaaaaaaagagacagcaatatgccccaaaatatat

SEQ ID NO: 302288 - DNA, 75 bp, synthetic construct
  source 1..75: mol_type = other DNA
cgtacggtcacggcgcagcatctgtccctgaaaagcaacctggtgtttttcaggacgcattttcaccatatttcg

SEQ ID NO: 302289 - DNA, 75 bp, synthetic construct
  source 1..75: mol_type = other DNA
attatctccacgcataacggcgtcgataatctgtttaatcagtacattcaggaagcccgcgaggggcgcaaggat

SEQ ID NO: 302290 - DNA, 75 bp, synthetic construct
  source 1..75: mol_type = other DNA
cgcgaggtgtttcgcgtggagctgcgcaacctgccgtatgcccagcaggagcaggtgatgatgtacatcctgacc

SEQ ID NO: 302291 - DNA, 75 bp, synthetic construct
  source 1..75: mol_type = other DNA
tcccgcttcagcttcggggaagactttgcccgcaccggtgacctctcctgctttgtgctgctggaaatcaccgaa

SEQ ID NO: 302292 - DNA, 75 bp, synthetic construct
  source 1..75: mol_type = other DNA
agggcgatgttccttctagggtgatgactataatagatggtcaacaaagattgactacattgctattagtgaata

SEQ ID NO: 302293 - DNA, 75 bp, synthetic construct
  source 1..75: mol_type = other DNA
caatgtgttttatgtggggtcaaagcaggagatggcgctggaatatatttctgcctgcgcactgttctcccgtgc

SEQ ID NO: 302294 - DNA, 75 bp, synthetic construct
  source 1..75: mol_type = other DNA
caggcgctgccggagcggttgcgggctatggagggtggttatcgtgatgacgatgaggcatatcatgaatttgat

SEQ ID NO: 302295 - DNA, 75 bp, synthetic construct
  source 1..75: mol_type = other DNA
cacgttgtggagtaacgtggcaatgcctggggacttataatgcgggttttgcaatggataaccaaaaaaagagac

SEQ ID NO: 302296 - DNA, 75 bp, synthetic construct
  source 1..75: mol_type = other DNA
gtgcgagcagaacgcgagcaactgaaggcggaattggcgaagctggaaacggagatggctggatatttgaaggag

SEQ ID NO: 302297 - DNA, 75 bp, synthetic construct
  source 1..75: mol_type = other DNA
ctggtggttattaccaccatctcttccatactttcattgctgaaagttacggagaatatggtgcatccgggagga

SEQ ID NO: 302298 - DNA, 75 bp, synthetic construct
  source 1..75: mol_type = other DNA
agcagcagctttccaactttgtgaccactgaaaccggcgtcaataactcgccaacccttatcaagcgtgatgtaa

SEQ ID NO: 302299 - DNA, 75 bp, synthetic construct
  source 1..75: mol_type = other DNA
cgaaccggctccattgatgccattttcaatctgctgaaaaccgacagtcgttttactgttgtcagtgcgccacga

SEQ ID NO: 302300 - DNA, 75 bp, synthetic construct
  source 1..75: mol_type = other DNA
gttatgtttttgaggttcagacctcgcagtctgacggctccggcattcttttagcggctaaaattctgtctgata

SEQ ID NO: 302301 - DNA, 75 bp, synthetic construct
  source 1..75: mol_type = other DNA
tagttgatcgtcgtttattaagtaataatggtgttcgtgtaattcgtcatattagagataaacaaatagatcgga

SEQ ID NO: 302302 - DNA, 75 bp, synthetic construct
  source 1..75: mol_type = other DNA
tcctgagcgaactaacaactcttgacgctgaaatgagcgttgtggctggacaacgtcctaaaatggatgcttatc

SEQ ID NO: 302303 - DNA, 75 bp, synthetic construct
  source 1..75: mol_type = other DNA
ttctgtttttaacagcattaatgatgataagtgcgtttcccgcgtttgccgggggatatatccaattcggtagtg

SEQ ID NO: 302304 - DNA, 75 bp, synthetic construct
  source 1..75: mol_type = other DNA
aatcacttatatcatatttgaaaggtgatgaattttcagctttattagagttgattaatgaaggatcttctcaag

SEQ ID NO: 302305 - DNA, 75 bp, synthetic construct
  source 1..75: mol_type = other DNA
ggcatttgaagatgcccgcgaccgcatcattgctgcggaaatgccgaaacagctggggtatgcactgaaacaaca

SEQ ID NO: 302306 - DNA, 75 bp, synthetic construct
  source 1..75: mol_type = other DNA
tgcatgacggaagcgccgacctcgctgttaccgcatccatgcctgatgaccgtctgtacggctatgcacatctcc

SEQ ID NO: 302307 - DNA, 75 bp, synthetic construct
  source 1..75: mol_type = other DNA
cccgtacgctaaaaaatgaaaattgcgtcaaagatgttctgttagccgcgcaagcagcggatgtggcgattgtcg

SEQ ID NO: 302308 - DNA, 75 bp, synthetic construct
  source 1..75: mol_type = other DNA
atatgacgggtatcgggcagcttaacgcggcgtgcagtgtgaatattattccggctccgttgcgggcatcctccg

SEQ ID NO: 302309 - DNA, 75 bp, synthetic construct
  source 1..75: mol_type = other DNA
cgcagctacttgggcatgtgcgcggcgaaactgaaacggaagtgcgatatagcaaagacctcaaaccaattcata

SEQ ID NO: 302310 - DNA, 75 bp, synthetic construct
  source 1..75: mol_type = other DNA
tgtaacagtagaaccgctgaaaccagcagatacaccagagttattagttaaagtaagagatttggttgattgggc

SEQ ID NO: 302311 - DNA, 75 bp, synthetic construct
  source 1..75: mol_type = other DNA
ctaccattaacaccaacaaagatagcgagattgatgcacacaaacaggagtctggtatcgctcctaactttgtac

SEQ ID NO: 302312 - DNA, 75 bp, synthetic construct
  source 1..75: mol_type = other DNA
cgagatgaggtaggtggtcgcgcggttaacttgcttcctagtgaaaccgttcaggacatctacgggattgttgct

SEQ ID NO: 302313 - DNA, 75 bp, synthetic construct
  source 1..75: mol_type = other DNA
gtggttttgataatagagtccttaccccgtggaaggatgaagaagaaaaacaacatcatttttctaatgttattt

SEQ ID NO: 302314 - DNA, 75 bp, synthetic construct
  source 1..75: mol_type = other DNA
atcgcaaaaaaatatggcaaggtagttagtcctcagtcaaatggcggtgttgttaggaataaaaacagagctctt

SEQ ID NO: 302315 - DNA, 75 bp, synthetic construct
  source 1..75: mol_type = other DNA
tttcaccctcgataccgtttccggagaaaccgaatggcgtagctcgtcgatgtctacccgcacggcgcaaaattc

SEQ ID NO: 302316 - DNA, 75 bp, synthetic construct
  source 1..75: mol_type = other DNA
ttgctgggggtgatcccggtaattgttctggcggtgcttaccgacgcgctgttcgatttgcttatcgcactgctg

SEQ ID NO: 302317 - DNA, 75 bp, synthetic construct
  source 1..75: mol_type = other DNA
gcaaactgtaggtatggcggtgattgcggcgttaatcggcgcaggcggttttggtgcgctggttttccaggggct

SEQ ID NO: 302318 - DNA, 75 bp, synthetic construct
  source 1..75: mol_type = other DNA
caacaatatcctattccgttattattatttgttaccatcaatgaacaaagagaaatattggatggaatgcaaaga

SEQ ID NO: 302319 - DNA, 75 bp, synthetic construct
  source 1..75: mol_type = other DNA
taaaagatactattagagaaatactaatcactccagcaatcgcttttactggtcgtgcaggtcattttgattttt

SEQ ID NO: 302320 - DNA, 75 bp, synthetic construct
  source 1..75: mol_type = other DNA
ctatacaacacagcaaggtaatggatttagtgcacagtgacaaaacgctatcacatgatgaaattgaattcatat

SEQ ID NO: 302321 - DNA, 75 bp, synthetic construct
  source 1..75: mol_type = other DNA
cgtggcaggccaggtgccggacaaactgaaaaacaccgatatcatgacccttgacctgggcgcattgcaggccgg

SEQ ID NO: 302322 - DNA, 75 bp, synthetic construct
  source 1..75: mol_type = other DNA
gtgagcggaatgtactccgtgcccatttatcaggataaattcaccgtagtgttaccgcccaaccatgctctggca

SEQ ID NO: 302323 - DNA, 75 bp, synthetic construct
  source 1..75: mol_type = other DNA
gatagcatcggtggtttcaacgatgctgctccatcaatatttggtgataacctaaccatattaattggactatta

SEQ ID NO: 302324 - DNA, 75 bp, synthetic construct
  source 1..75: mol_type = other DNA
cgtcaaagagtttgtccgcaccgtctggggcgaagagcacctgcaggaaaacctcgaatttatcgccgaaagtct

SEQ ID NO: 302325 - DNA, 75 bp, synthetic construct
  source 1..75: mol_type = other DNA
atacaatcagtgataaggttgcattacatgttctaaaaaatctatgcagtactttcaaaaaatatacatggctcg

SEQ ID NO: 302326 - DNA, 75 bp, synthetic construct
  source 1..75: mol_type = other DNA
gttcgatagcagaaccgggtaaaaccaaagcggcaaaagcagaggttgaacgtaacggctataaagtctgggaac

SEQ ID NO: 302327 - DNA, 75 bp, synthetic construct
  source 1..75: mol_type = other DNA
tctgtcccgctggagccgacgttttatcggcaaatttcattgctggtcaaagaggcgccggtagaaggcagccca

SEQ ID NO: 302328 - DNA, 75 bp, synthetic construct
  source 1..75: mol_type = other DNA
aaaattgataaattatcatgttggattatttttgatggcgcaaaaaaacattactttcaagataaatcaattact

SEQ ID NO: 302329 - DNA, 75 bp, synthetic construct
  source 1..75: mol_type = other DNA
tccctggtggtaaaggggtgaaactggtcgtggcaattgtcggtctgctgacttcaattatggcgtttattgttt

SEQ ID NO: 302330 - DNA, 75 bp, synthetic construct
  source 1..75: mol_type = other DNA
gcgcggcggcgtggcgaactggatgaaggtcaccggctggccgcactctggcaggcgctgccggaagaactccgc

SEQ ID NO: 302331 - DNA, 75 bp, synthetic construct
  source 1..75: mol_type = other DNA
cagatgaacttttggcctatatagaccaggtttcaggtggtaatcggtcagagtatctgcggcgctgccttgaag

SEQ ID NO: 302332 - DNA, 75 bp, synthetic construct
  source 1..75: mol_type = other DNA
gctggggctgccggtgatgctgaaggaatacggactgaattacgagaagcgccataccaaacaggggatacagac

SEQ ID NO: 302333 - DNA, 75 bp, synthetic construct
  source 1..75: mol_type = other DNA
ttgatggcgggatgagcagaaataccaagatagcttctggctatggtggacagtggagtgagaactctaacagct

SEQ ID NO: 302334 - DNA, 75 bp, synthetic construct
  source 1..75: mol_type = other DNA
atgattatcgctgacgggtggacagtcaatgacgtattaccgggtgatttcctctctcccacaactttcactatc

SEQ ID NO: 302335 - DNA, 75 bp, synthetic construct
  source 1..75: mol_type = other DNA
ttcaatttcctccgccaatggtggctcaagcagagcagcggtcgaagtatggacgacaacgacccctgagggaag

SEQ ID NO: 302336 - DNA, 75 bp, synthetic construct
  source 1..75: mol_type = other DNA
aaagaaaagaaacgggaaattatatgcggcgttagcagatatttacctatttatgagaaaagttataaaaagatg

SEQ ID NO: 302337 - DNA, 75 bp, synthetic construct
  source 1..75: mol_type = other DNA
aagaagaaggtcaaagtatactatttcagccctataaacgttttggtgcatgggagtttggtattgaatttttct

SEQ ID NO: 302338 - DNA, 75 bp, synthetic construct
  source 1..75: mol_type = other DNA
ggttgccctgaacaaaacccgcccttacaccgccagcgagacgttgctgctggaagtgtcccgcgccatctaccc

SEQ ID NO: 302339 - DNA, 75 bp, synthetic construct
  source 1..75: mol_type = other DNA
aataacgttatcgatattgcaaagagaattaaaccctctaaacgtggtgaattagaaattacagcaggtaatgaa

SEQ ID NO: 302340 - DNA, 75 bp, synthetic construct
  source 1..75: mol_type = other DNA
aagtaatggatcctgagagatttggagtggtggagtttgatagaaattttaaagctttaagtattgaagaaaaac

SEQ ID NO: 302341 - DNA, 75 bp, synthetic construct
  source 1..75: mol_type = other DNA
ctaacactgccggctttgcaaataaacttaactccaccaccgaaggtggttcaagcagagcagcggtcgaagtat

SEQ ID NO: 302342 - DNA, 75 bp, synthetic construct
  source 1..75: mol_type = other DNA
caaccattcaaaatccgcttcagtgattgtgccggtcttccagggaagagtgctcaactcgttttagcgcccagg

SEQ ID NO: 302343 - DNA, 75 bp, synthetic construct
  source 1..75: mol_type = other DNA
tacagcagaccatggcaacacttgcgcccaatcgctttttctttatgtcgccgtaccgcagttttacgacgtcag

SEQ ID NO: 302344 - DNA, 75 bp, synthetic construct
  source 1..75: mol_type = other DNA
caaataagctatgcttcactaagctaaagaaagatttcatttctcctggtaaattggatgaggaacaattctggt

SEQ ID NO: 302345 - DNA, 75 bp, synthetic construct
  source 1..75: mol_type = other DNA
aagttggagtcattacccatatttcatcatgccagcgagtccggttctggcacggaagaaaccggacgttatgat

SEQ ID NO: 302346 - DNA, 75 bp, synthetic construct
  source 1..75: mol_type = other DNA
tcaatgtgttgtttttcgttatcccagcggcaaacctttccactggcaatttgcaaaggagctggaaattgctgt

SEQ ID NO: 302347 - DNA, 75 bp, synthetic construct
  source 1..75: mol_type = other DNA
gctcacaactgacgactctcttgtcgatatcgtccaacagggctttgacgctggcgttcgacttagtggcatcgt

SEQ ID NO: 302348 - DNA, 75 bp, synthetic construct
  source 1..75: mol_type = other DNA
atggtacatgaccgcatagcggaagaactggagtcgaaaggcttttaccggagagcggcggcgcgatgggccgaa

SEQ ID NO: 302349 - DNA, 75 bp, synthetic construct
  source 1..75: mol_type = other DNA
tacatctaccacatctgggattacaacacgcccattatcgacgtgcttgaagcgttacataccgctgttactgct

SEQ ID NO: 302350 - DNA, 75 bp, synthetic construct
  source 1..75: mol_type = other DNA
atgagccgacgcgcggcgttctcggcccgtaatgatatctaccagctgttgcgcagcatcgccgcacaaaatgtg

SEQ ID NO: 302351 - DNA, 75 bp, synthetic construct
  source 1..75: mol_type = other DNA
gactcttatctgaagtacatcggggattaccgcgcacctatttggcacaggaagacgatttgccctcattgcgcg

SEQ ID NO: 302352 - DNA, 75 bp, synthetic construct
  source 1..75: mol_type = other DNA
gggaactcgacagaacggcctcagtagtctcgtcaggctccggtttatccccgctggcgcggggagctctacgtg

SEQ ID NO: 302353 - DNA, 75 bp, synthetic construct
  source 1..75: mol_type = other DNA
agggatcatcttgttcatggtataccgagaaaaaatgtatgtgatgaatataatgttaacaatggctatcttagt

SEQ ID NO: 302354 - DNA, 75 bp, synthetic construct
  source 1..75: mol_type = other DNA
cggagaacgctggcagcgatcagcataatgatagcaataatgaaactggcgaagatgaactcaactggaaaagac

SEQ ID NO: 302355 - DNA, 75 bp, synthetic construct
  source 1..75: mol_type = other DNA
gcagacaaattactggctgcctctcgcggagaatttgttgaagggattagcgacccgaatgattcgaaatggatt

SEQ ID NO: 302356 - DNA, 75 bp, synthetic construct
  source 1..75: mol_type = other DNA
tcgcatcttctccctctgttcaggacaaaccagccagcactgacaataccaacgtcaacggcgaagacatgacag

SEQ ID NO: 302357 - DNA, 75 bp, synthetic construct
  source 1..75: mol_type = other DNA
actaccactacgacagccagcaccggctggtgttctacacgcggatacagcaaggggagccacgggtcgagagcc

SEQ ID NO: 302358 - DNA, 75 bp, synthetic construct
  source 1..75: mol_type = other DNA
actaccactacgacagccagcaccgcctggtgttccacacgcggatacagcaaggggagccactggtcgagagcc

SEQ ID NO: 302359 - DNA, 75 bp, synthetic construct
  source 1..75: mol_type = other DNA
actaccactacgacagccagcaccgcctggtgttctacacgcggatacagcaaggggagccaccggtcgagagcc

SEQ ID NO: 302360 - DNA, 75 bp, synthetic construct
  source 1..75: mol_type = other DNA
gactgctcgggctaccagacccgttatgaatacgaccgcttcggccagatgacggcggtccaccgcgaggaaggc

SEQ ID NO: 302361 - DNA, 75 bp, synthetic construct
  source 1..75: mol_type = other DNA
atcctctgaaaagaaaatgtcccacaggtacagatagagttgctgcttatcatactcacggtgcagatagtcatg

SEQ ID NO: 302362 - DNA, 75 bp, synthetic construct
  source 1..75: mol_type = other DNA
actaccactacgacagccagcaccggctggtgttcgacacgcggatacagcaaggggagccactggtcgagagcc

SEQ ID NO: 302363 - DNA, 75 bp, synthetic construct
  source 1..75: mol_type = other DNA
caggggaggtatattacacaagaccccattgggctggcggggggatggaacctgtataattacccactgaatccg

SEQ ID NO: 302364 - DNA, 75 bp, synthetic construct
  source 1..75: mol_type = other DNA
gggcggtatattactcaggacccgatggggttgaaagggggatggaatttatatcagtatcctttaaatccacta

SEQ ID NO: 302365 - DNA, 75 bp, synthetic construct
  source 1..75: mol_type = other DNA
ctgagaccaagtctttacctacatcgggagtcagcaattcagtaggtgtaacggttggcggcggagttggggggc

SEQ ID NO: 302366 - DNA, 75 bp, synthetic construct
  source 1..75: mol_type = other DNA
actaccactacgacagccagcaccgactggtgttctacacgcggatacagcaaggggagccacaggtcgagagcc

SEQ ID NO: 302367 - DNA, 75 bp, synthetic construct
  source 1..75: mol_type = other DNA
actaccactacgacagccagcaccgactggtgttcaacacgcggatacagcaaggggagccactggtcgagagcc

SEQ ID NO: 302368 - DNA, 75 bp, synthetic construct
  source 1..75: mol_type = other DNA
aaccgtggccggttaacctcggtgaaagacgcacagggccgtgaaacgcggtatgaatacaacgccgcaggcgac

SEQ ID NO: 302369 - DNA, 75 bp, synthetic construct
  source 1..75: mol_type = other DNA
tggctggcgcggggcggggtggcggagcagcacagttcgcagccgttaagcgcgctctggcaggtgctgccggaa

SEQ ID NO: 302370 - DNA, 75 bp, synthetic construct
  source 1..75: mol_type = other DNA
acaggggctggcaaaccgcgtcacgccggacagcctgccgccggtggagtggctgacctacggcagcggttatct

SEQ ID NO: 302371 - DNA, 75 bp, synthetic construct
  source 1..75: mol_type = other DNA
agacggtggagaacccggagacaggggagatgctgtgggagcatgagacggggcatgcgtacagcgaacaggggc

SEQ ID NO: 302372 - DNA, 75 bp, synthetic construct
  source 1..75: mol_type = other DNA
cctgaaccggcgtgaggtactgcatacagaaggcggggccgggctgaagcgggtggtgaaaaaggaactcgcgga

SEQ ID NO: 302373 - DNA, 75 bp, synthetic construct
  source 1..75: mol_type = other DNA
atggcagtttttgctgggctactacaaaccagctttgcgccaaaagatcatcgtcgttgggatgatatctgggaa

SEQ ID NO: 302374 - DNA, 75 bp, synthetic construct
  source 1..75: mol_type = other DNA
aaatattttacaacatcggcggagaagcaaaatgctaaagccgccagggagaaaaagcaggaggctgctgaatga

SEQ ID NO: 302375 - DNA, 75 bp, synthetic construct
  source 1..75: mol_type = other DNA
tacggacggacgacgagcgcacccatcactaccattacgacagcctgcaccgcctggtccattacatccgtatcc

SEQ ID NO: 302376 - DNA, 75 bp, synthetic construct
  source 1..75: mol_type = other DNA
tggcactacgatgcgtcggaccgtatcacgcaccggacggtgaacggcgacccggcagagcagtggcagtatgat

SEQ ID NO: 302377 - DNA, 75 bp, synthetic construct
  source 1..75: mol_type = other DNA
ggaacagcaacgctcaatggaacaacagtttacttttataatgatccccggaatggtaattgtcctgctcacgaa

SEQ ID NO: 302378 - DNA, 75 bp, synthetic construct
  source 1..75: mol_type = other DNA
gctacgacgatgcggggcgggtggtggagcagctgaacccggcaggcctgagttaccgctaccagtatgagcagg

SEQ ID NO: 302379 - DNA, 75 bp, synthetic construct
  source 1..75: mol_type = other DNA
aaacacgcatacaacgaacaggggctggcaaaccgcgtcacgccggacagcctgccgccggtggagtggctgacc

SEQ ID NO: 302380 - DNA, 75 bp, synthetic construct
  source 1..75: mol_type = other DNA
agggagatatgacccagtacggtggtctcattgtccagggttcggcaggtgtaagaattggcgcgcccaccggcg

SEQ ID NO: 302381 - DNA, 75 bp, synthetic construct
  source 1..75: mol_type = other DNA
cggcccgctgccgttcattctctcccgcacctacagcagctaccggacgaagacgcctgcgccggtgggcgtttt

SEQ ID NO: 302382 - DNA, 75 bp, synthetic construct
  source 1..75: mol_type = other DNA
aatgtgcgcatcttttgccatctccttctggagatttacaatcatcagagtaccgaaaatgttatcgtgaatgta

SEQ ID NO: 302383 - DNA, 75 bp, synthetic construct
  source 1..75: mol_type = other DNA
ttgaactctgctgtggtaaggcaaggctggtgctgacgaaggacggaagcatatttctcaatggtacgcacattc

SEQ ID NO: 302384 - DNA, 75 bp, synthetic construct
  source 1..75: mol_type = other DNA
cgtgctggatccgtgtggcacaggcgtgggcaggcaccggttttggccacctggcgataccgcgtgtgggtcagg

SEQ ID NO: 302385 - DNA, 75 bp, synthetic construct
  source 1..75: mol_type = other DNA
tggcaagcagtagcgtcctctggtttacccatggacatggtaatacgggaaaaaccatatcaacttatggtcgct

SEQ ID NO: 302386 - DNA, 75 bp, synthetic construct
  source 1..75: mol_type = other DNA
agccgcagcgagtcaatgtggctggtgcgcggtggtaaggcagcgcagccggacggccacacgctggcgcggctg

SEQ ID NO: 302387 - DNA, 75 bp, synthetic construct
  source 1..75: mol_type = other DNA
cggaagccttccgtaaacagcgcgccacgtctttatcttccccggccagtccccgttctgtttcctcttctcagg

SEQ ID NO: 302388 - DNA, 75 bp, synthetic construct
  source 1..75: mol_type = other DNA
caggcgcttcctgccgacgccgcccgcctggtcggagcgaagctggatctcgacgaagacgctattctactgttg

SEQ ID NO: 302389 - DNA, 75 bp, synthetic construct
  source 1..75: mol_type = other DNA
agaatatgttgctttacttgatgacgatgatatatggcttgacaatcatatagaggattatatttcccttttaga

SEQ ID NO: 302390 - DNA, 75 bp, synthetic construct
  source 1..75: mol_type = other DNA
tgtacaatcacttcggtggtcattgaataacttcaaagacaaacgttgtttaggggattttatattgacacagtc

SEQ ID NO: 302391 - DNA, 75 bp, synthetic construct
  source 1..75: mol_type = other DNA
actgatggccagccactgagcaacatactgctgctggctgaccgtatcgcgatgataaatccggagagcggcaac

SEQ ID NO: 302392 - DNA, 75 bp, synthetic construct
  source 1..75: mol_type = other DNA
aagcatcctcggcacgatgttgcaggaaaacggggtgaccgagtggagcccgctgttcagcgagccacatccttc

SEQ ID NO: 302393 - DNA, 75 bp, synthetic construct
  source 1..75: mol_type = other DNA
ggaaggtgaatccctggatgatgttacagttgtcggggtagtgacattcgttatcaatcggacagggaaggatga

SEQ ID NO: 302394 - DNA, 75 bp, synthetic construct
  source 1..75: mol_type = other DNA
aggctgaggttatgaggcgggtgacgcactttatcaacagcactgatgctgcgatatctcttgaggcggcattgg

SEQ ID NO: 302395 - DNA, 75 bp, synthetic construct
  source 1..75: mol_type = other DNA
gtgatgtatctcggacaaattgttgaaattggtccacggcgcgcggtcttcgaaaacccgcagcatccttatacg

SEQ ID NO: 302396 - DNA, 75 bp, synthetic construct
  source 1..75: mol_type = other DNA
gagtagatgatacaaaagagtatttattcattagccaaactggtgtcccacttttcactaaacttcccgaggcca

SEQ ID NO: 302397 - DNA, 75 bp, synthetic construct
  source 1..75: mol_type = other DNA
gtttcgtggagattttagatgtacatgaaatagaatctctagttcctttatcgacaattgaagatgtattaagaa

SEQ ID NO: 302398 - DNA, 75 bp, synthetic construct
  source 1..75: mol_type = other DNA
gaaaatcctttggattctgatttttttaaggttatagcggctcattatgccgaaggtattaacttatctcgctgc

SEQ ID NO: 302399 - DNA, 75 bp, synthetic construct
  source 1..75: mol_type = other DNA
taccggttgtcaccgaactgggcatggacccgattcactttggtattgtcatggtactgaacatgtgtatcggta

SEQ ID NO: 302400 - DNA, 75 bp, synthetic construct
  source 1..75: mol_type = other DNA
acagtgcctcctggaatacatgagccttaaaaagggtgaggctattgagcatgtattgaacggtgacaagtggtt

SEQ ID NO: 302401 - DNA, 75 bp, synthetic construct
  source 1..75: mol_type = other DNA
gtaaagccccgacgaaagagcagatcgcctggatgcgcaggcttagagaggaaggttactacgtcgttcttgcgt

SEQ ID NO: 302402 - DNA, 75 bp, synthetic construct
  source 1..75: mol_type = other DNA
tctcatataggcgctcaccctattttggtcacattgggtagcatgaccattattagtggtatcggtatttacctg

SEQ ID NO: 302403 - DNA, 75 bp, synthetic construct
  source 1..75: mol_type = other DNA
ttatttagtctggcaatgccggggcgttttttcaccgacaatacttttctgagcattgcatttcaattgccagag

SEQ ID NO: 302404 - DNA, 75 bp, synthetic construct
  source 1..75: mol_type = other DNA
tcgataccacggctaagtacaaatctggtgttactaccgtaaaagactcggtacgactggatccttgggtgttta

SEQ ID NO: 302405 - DNA, 75 bp, synthetic construct
  source 1..75: mol_type = other DNA
ctgcttgtgtaagttatgatggttttggagagaatttgctcagcaatacattgaaatatatacaaaagggaagtt

SEQ ID NO: 302406 - DNA, 75 bp, synthetic construct
  source 1..75: mol_type = other DNA
atgttgattaatatcgaaaatgcgacacctgagaaggtgctaaataactcatttgccatagcggttgaaaatata

SEQ ID NO: 302407 - DNA, 75 bp, synthetic construct
  source 1..75: mol_type = other DNA
ttttgattttaaaacagcccttgaactcgatcgaaaacatggtgcatattggcgtccgatattaaagaagcttga

SEQ ID NO: 302408 - DNA, 75 bp, synthetic construct
  source 1..75: mol_type = other DNA
gtatgatgaggagtccggcctgtattacaaccgccaccgctattatgacccgctgcaggggcggtatatcactca

SEQ ID NO: 302409 - DNA, 75 bp, synthetic construct
  source 1..75: mol_type = other DNA
ggagtatatcgtgaatgacctcttttccgggcgtaaggagtcgattgacgtccttaccagacggctgcatggcaa

SEQ ID NO: 302410 - DNA, 75 bp, synthetic construct
  source 1..75: mol_type = other DNA
gctccgcggcatcgtaagtggtggtttgacatcgtcgacagaccgctctctgaagatgaactaatccgcactaag

SEQ ID NO: 302411 - DNA, 75 bp, synthetic construct
  source 1..75: mol_type = other DNA
ttcaaactcgacgttaagaaagtggcggacccggaaggtggcgaacgtgcggtcattaccttagatggtaaatat

SEQ ID NO: 302412 - DNA, 75 bp, synthetic construct
  source 1..75: mol_type = other DNA
gtggcggacccggaaggtggcgaacgtgcggtcatcaccttagatggtaaatatctgccgaccaaaccgttctga

SEQ ID NO: 302413 - DNA, 75 bp, synthetic construct
  source 1..75: mol_type = other DNA
tattttgctcagcaaagctaaaaaagatctctcatttgccgagattgccgacggcaccggtctggcagaagcctt

SEQ ID NO: 302414 - DNA, 75 bp, synthetic construct
  source 1..75: mol_type = other DNA
tggagaacccggagacgggggaactgctgtggcagcatgagacgaaacacgcctacaacgaacaggggctggcaa

SEQ ID NO: 302415 - DNA, 75 bp, synthetic construct
  source 1..75: mol_type = other DNA
tgccggacccggagctgcacccggacagtaccctcacggcgtggccggataaccgcatcgcagaggatgcgcact

SEQ ID NO: 302416 - DNA, 75 bp, synthetic construct
  source 1..75: mol_type = other DNA
agggattacaacttcaccgcaaccggcaggaacattaccagcgagtgatgtacctcataggccatcgcaatattg

SEQ ID NO: 302417 - DNA, 75 bp, synthetic construct
  source 1..75: mol_type = other DNA
aagcaatattatgaaacccacagctgtatatgctgattatattaataacactactgatttcagaccaaaacctga

SEQ ID NO: 302418 - DNA, 75 bp, synthetic construct
  source 1..75: mol_type = other DNA
cgataagtagtttcaatggtattgctgccggattttatcacggaaactgggcgatgctgctaacagctctttcca

SEQ ID NO: 302419 - DNA, 75 bp, synthetic construct
  source 1..75: mol_type = other DNA
gtcaattatcaaagaaaatctctcattacacttaactcatacggtgaaatggactgaatctctcgatacatattc

SEQ ID NO: 302420 - DNA, 75 bp, synthetic construct
  source 1..75: mol_type = other DNA
gctatctcacatgaaagctggtctggaaacctgcccggcggcacgccggaaacggcggtacagcaaagcgaatta

SEQ ID NO: 302421 - DNA, 75 bp, synthetic construct
  source 1..75: mol_type = other DNA
gagaacaccgtattgacccttcacgcttcagagctgttgatattatatctggtgaaaataccactttaagaaaac

SEQ ID NO: 302422 - DNA, 75 bp, synthetic construct
  source 1..75: mol_type = other DNA
tggtgaaccgttgccggtcagcccggaaggtgaagcgcagcaaaatatcattgtctggatggatcatcgtgctac

SEQ ID NO: 302423 - DNA, 75 bp, synthetic construct
  source 1..75: mol_type = other DNA
ggagatgaaggaagaactgagcagtctgggggatttgcattcaatcaggaaactggtcgttagctcagaaaaacc

SEQ ID NO: 302424 - DNA, 75 bp, synthetic construct
  source 1..75: mol_type = other DNA
cttctttatatactgggttttcgataattaatcaatttatagggttgttagtccagttaattttgatgagaggct

SEQ ID NO: 302425 - DNA, 75 bp, synthetic construct
  source 1..75: mol_type = other DNA
attgtcgggatctgcacagccattttcgttgccagcgtattgtggttaagttcgttagccgccagtcgtatcatc

SEQ ID NO: 302426 - DNA, 75 bp, synthetic construct
  source 1..75: mol_type = other DNA
cctgcggtattccggtcattaccacgcaatgctgcgaaccggttttattaggctcggccattcttggtgctgtcg

SEQ ID NO: 302427 - DNA, 75 bp, synthetic construct
  source 1..75: mol_type = other DNA
aacgcgctgggccatgcgcatccggaactgcgtgaggcgctgaacgaacaggcgagtaagttctggcataccggc

SEQ ID NO: 302428 - DNA, 75 bp, synthetic construct
  source 1..75: mol_type = other DNA
ctgctaaacaactttttgaaaaagagtttattaaaagaaagcttttagagtatggaggaaacatttctcataccg

SEQ ID NO: 302429 - DNA, 75 bp, synthetic construct
  source 1..75: mol_type = other DNA
aaagacccatattctgctcattatacttttggtacaccagagaaagcatggtttaaggatggcattttagctgaa

SEQ ID NO: 302430 - DNA, 75 bp, synthetic construct
  source 1..75: mol_type = other DNA
taaaaactcctatggtggatatacaggtgctgaagcacatactattttttactcccatgggaaaatagactccgc

SEQ ID NO: 302431 - DNA, 75 bp, synthetic construct
  source 1..75: mol_type = other DNA
ccttattacataacactagatgataccagaatagacggcaaacctgttcagagcagtgctgatgattttttgctt

SEQ ID NO: 302432 - DNA, 75 bp, synthetic construct
  source 1..75: mol_type = other DNA
gatgccaacgacgtggactaccgcgttgacggcgatagcgacgtcaatatcaactacatcgaccttcgctatgcg

SEQ ID NO: 302433 - DNA, 75 bp, synthetic construct
  source 1..75: mol_type = other DNA
acgtgatttacagggcgacgaggtggaagcggacaaaacgttacacattgcgcaaaacggaacagtggtcgccga

SEQ ID NO: 302434 - DNA, 75 bp, synthetic construct
  source 1..75: mol_type = other DNA
agtctctactggcataaaatgcgcattaatataaatcaacaacttacaaaagaagttgagatttgtgaactcact

SEQ ID NO: 302435 - DNA, 75 bp, synthetic construct
  source 1..75: mol_type = other DNA
ccgaagcggatgcgcggctggactaccacctgttttatgagtacgacgctgcggaccggatcatccgctggtccg

SEQ ID NO: 302436 - DNA, 75 bp, synthetic construct
  source 1..75: mol_type = other DNA
tgaatttcaaattggtaatcaagggacgggcgaagcaactattcgcgatggggggctaattacggctgaaaatac

SEQ ID NO: 302437 - DNA, 75 bp, synthetic construct
  source 1..75: mol_type = other DNA
tccgttatcaataatggcctgctcaccatctccactgagcgtagctgggcgatgacgcacagtatcagcggtagc

SEQ ID NO: 302438 - DNA, 75 bp, synthetic construct
  source 1..75: mol_type = other DNA
gcggaagtcagcctcgataatacgcaggggttaggcagaggaaatattgccaatgacggtctgttaacgctaaaa

SEQ ID NO: 302439 - DNA, 75 bp, synthetic construct
  source 1..75: mol_type = other DNA
atgcgccgtcaggtggcaaaggctatcgcaccggtatacgcggcggtgggccgatgacgactctgattgaattgc

SEQ ID NO: 302440 - DNA, 75 bp, synthetic construct
  source 1..75: mol_type = other DNA
agatctccagggtgcggcatggcagtttttgctggggctactacaaaccagcttcgcgccaaaagatcatcgtcg

SEQ ID NO: 302441 - DNA, 75 bp, synthetic construct
  source 1..75: mol_type = other DNA
taaagtctccccaaccggcaaacagaacagctttgccagccgtgcctacgcctcctgggcgctggcagaaaaagg

SEQ ID NO: 302442 - DNA, 75 bp, synthetic construct
  source 1..75: mol_type = other DNA
tggcaagtgaaccaaacggcctctgcttataatactgcagtgcgtgaacataatgctgcccttcgcgatgatcct

SEQ ID NO: 302443 - DNA, 75 bp, synthetic construct
  source 1..75: mol_type = other DNA
accattgaacatattcagaagatgcgggaaatggtaagcgtaaaccgactgctgtatgtagccattaagccagta

SEQ ID NO: 302444 - DNA, 75 bp, synthetic construct
  source 1..75: mol_type = other DNA
cgactggttaggccttatcgaaacgggtaaatcagaaaacaatacggaacttcccgcgctggtggtgaaactctt

SEQ ID NO: 302445 - DNA, 75 bp, synthetic construct
  source 1..75: mol_type = other DNA
acctggcgattgtatgatagcggaaataatgcaaggcctttaaatgtgggtcaatccggaacggggacgctgaat

SEQ ID NO: 302446 - DNA, 75 bp, synthetic construct
  source 1..75: mol_type = other DNA
aaaaccactatcggcggcaacctggagaatggcggcacggttcaaatgaatagcgaagggggaaaccggggaatg

SEQ ID NO: 302447 - DNA, 75 bp, synthetic construct
  source 1..75: mol_type = other DNA
gtaagttggcagcatcacctaagcggttcagtgtctggtgcgagtctggaagttgataatggtcagattaccaat

SEQ ID NO: 302448 - DNA, 75 bp, synthetic construct
  source 1..75: mol_type = other DNA
accggaactgtcgaagctggggcttacgtctacacgctggctaaagggaggggaatgacgagaaaaactggtatc

SEQ ID NO: 302449 - DNA, 75 bp, synthetic construct
  source 1..75: mol_type = other DNA
acgatgctgacaacggcgtcatgctgaccggtgaaatcagtcaggatatgctgggtggctataacaaaaccgtgc

SEQ ID NO: 302450 - DNA, 75 bp, synthetic construct
  source 1..75: mol_type = other DNA
cggatgctgtcgctggtcgcccgcggacagtaccagtttaccgactacgtgcgcctgattggcgaagttggcggt

SEQ ID NO: 302451 - DNA, 75 bp, synthetic construct
  source 1..75: mol_type = other DNA
atggctatatgcgcgccggggttggagtctccagcgacggtagcgaagtggaatggcaaaaaaataagctgggcc

SEQ ID NO: 302452 - DNA, 75 bp, synthetic construct
  source 1..75: mol_type = other DNA
cgcggcgtatcagggtacgacggatatcgtgggtggtgaaattgctttcggttccgactctgccattaatatggc

SEQ ID NO: 302453 - DNA, 75 bp, synthetic construct
  source 1..75: mol_type = other DNA
gtgggctaattacggctgaaaatacgattatcggtggcaatgccaccggtatcggaaccctgaatgtgcaggatc

SEQ ID NO: 302454 - DNA, 75 bp, synthetic construct
  source 1..75: mol_type = other DNA
ggtgatgtgacaaaactgggtaccgggatcctgactcttaacaacgattccgcggcgtatcagggggcacctcag

SEQ ID NO: 302455 - DNA, 75 bp, synthetic construct
  source 1..75: mol_type = other DNA
gtgggctgattacggctgaaaatacgattatcggtggcaatgccaccggtgtcggaaccctgaatgtgcaggatc

SEQ ID NO: 302456 - DNA, 75 bp, synthetic construct
  source 1..75: mol_type = other DNA
gtatcaatgtcggtaattttggtagcggcatcgtaaatgtcagtaatggtgccacccttaattcaacgggctatg

SEQ ID NO: 302457 - DNA, 75 bp, synthetic construct
  source 1..75: mol_type = other DNA
ggatcctgactcttaacaacgattccgcggcgtatcagggtacgacggatatcgtggggggaaattgctttcggt

SEQ ID NO: 302458 - DNA, 75 bp, synthetic construct
  source 1..75: mol_type = other DNA
ttttgtatggtgcatgtatgattaataatgtgtatgccgaagagcaaaatagagttcagaaatttgaagctcttt

SEQ ID NO: 302459 - DNA, 75 bp, synthetic construct
  source 1..75: mol_type = other DNA
atcgaaaacaccactgtgatctattgatagaccagacatatttacgtcataagcatgaatatgctgagttaattt

SEQ ID NO: 302460 - DNA, 75 bp, synthetic construct
  source 1..75: mol_type = other DNA
tagtcaatattctcaaaagcccgatatcattattgttgatcattattcacttgacagtgaatgggagataattgt

SEQ ID NO: 302461 - DNA, 75 bp, synthetic construct
  source 1..75: mol_type = other DNA
gcaagtgcgcttgatgtgacggaagacgtgattgattcaattttgcatgcaatgcaggggcgagttctggatggt

SEQ ID NO: 302462 - DNA, 75 bp, synthetic construct
  source 1..75: mol_type = other DNA
atggcaaaaatggggcaaagcgctgcaaaaggggcaaaaaaggggcaaaaaaggggcaaaaaaagagtgggttat

SEQ ID NO: 302463 - DNA, 75 bp, synthetic construct
  source 1..75: mol_type = other DNA
tgatatccaaattaatagaataaaaggcaactattccgaaaagcaagagtcattaaaaaaattatgcgtaagggc

SEQ ID NO: 302464 - DNA, 75 bp, synthetic construct
  source 1..75: mol_type = other DNA
accctgcgcaacggaagatgccaccggcagccggaaaaccatgacgtggagccgttacggccagttgctgagctt

SEQ ID NO: 302465 - DNA, 75 bp, synthetic construct
  source 1..75: mol_type = other DNA
gaccagtgaaaacggcagccacaccaccttccgttacgatgtactcgaccggctgatacaggaaaccggctttga

SEQ ID NO: 302466 - DNA, 75 bp, synthetic construct
  source 1..75: mol_type = other DNA
cggctgggtattggcgctgtgttgggatatttgctggcagggattgcaattggcccgtggggggctggggtttat

SEQ ID NO: 302467 - DNA, 75 bp, synthetic construct
  source 1..75: mol_type = other DNA
tgatacaattactatcgattgtaactctgaagattttcaaattcatggtggcctatgggatgggcaaactttatt

SEQ ID NO: 302468 - DNA, 75 bp, synthetic construct
  source 1..75: mol_type = other DNA
attgcgaatcgcgacgagaattttatggtcgtcagttagaaaccgcagccagccattatcttccgcgcactggtc

SEQ ID NO: 302469 - DNA, 75 bp, synthetic construct
  source 1..75: mol_type = other DNA
ttatgtcaatcaaggtaacagcgcgtttgattgccctggtcatcagggcggcgaatttttccgtcgccatccggc

SEQ ID NO: 302470 - DNA, 75 bp, synthetic construct
  source 1..75: mol_type = other DNA
gacggcaagcgctctacatggcacacacagcgattcacacgggctaaacggaaggcgctaggagagaaggggaca

SEQ ID NO: 302471 - DNA, 75 bp, synthetic construct
  source 1..75: mol_type = other DNA
tttaataacggcagtagctcaaacaattatacgattcgtataacaacggcaacaacgacaagtgtctctggcgca

SEQ ID NO: 302472 - DNA, 75 bp, synthetic construct
  source 1..75: mol_type = other DNA
atgaaaacgggatcggagttcgtgtccaggcaacgctacgtggagagagcaaaccacgcgtacttgagttacttc

SEQ ID NO: 302473 - DNA, 75 bp, synthetic construct
  source 1..75: mol_type = other DNA
attcttacaaatacctgatggcttcagaaatcagcaataccgccaatcaggggatgctgcagggtaagcactatc

SEQ ID NO: 302474 - DNA, 75 bp, synthetic construct
  source 1..75: mol_type = other DNA
caactcaaataaggacgaacttattgatacaactcaggcaagacctgtgcagtattgtatcaatggcacttggta

SEQ ID NO: 302475 - DNA, 75 bp, synthetic construct
  source 1..75: mol_type = other DNA
taacgtcagtcggtcgcgatattctggctaaaacaagcacactagccgttatccaataccttggtttaagagaac

SEQ ID NO: 302476 - DNA, 75 bp, synthetic construct
  source 1..75: mol_type = other DNA
acagctcgaacaatcaacggggtgggatttgatggttctaaaaacattgagctaacggcggaagatttaaatctt

SEQ ID NO: 302477 - DNA, 75 bp, synthetic construct
  source 1..75: mol_type = other DNA
cgttgctgtgtgttgcgctgccgttgacggtacaggcggattgcctgtcaggtgacgaggtggcacaaaacagcg

SEQ ID NO: 302478 - DNA, 75 bp, synthetic construct
  source 1..75: mol_type = other DNA
caggcgtttgaaggtttaagcgtcgccgggtcggtgggggcctatcagtatcatggtcgaagtgccgacgggcgt

SEQ ID NO: 302479 - DNA, 75 bp, synthetic construct
  source 1..75: mol_type = other DNA
cctcgtgatagacggaagcgatactattacaggcttgcagaatctgaatttgcaggcctccggtattgcatcgtt

SEQ ID NO: 302480 - DNA, 75 bp, synthetic construct
  source 1..75: mol_type = other DNA
atctggggcaccggaacatccggcatacggtgatttatacggcgacaaatacgcagaggtttatgaatgtctggg

SEQ ID NO: 302481 - DNA, 75 bp, synthetic construct
  source 1..75: mol_type = other DNA
ccgctggcgggatgcggattcagactggttgttcctgtcgcagaagggaggtgcactgtcgcgccatcaggttag

SEQ ID NO: 302482 - DNA, 75 bp, synthetic construct
  source 1..75: mol_type = other DNA
gagtaagaatattattgcacaaatttcaccactcactccacatacactagtttgtagatctcctacagcagttat

SEQ ID NO: 302483 - DNA, 75 bp, synthetic construct
  source 1..75: mol_type = other DNA
ttatcttctgcttgctggtgttatctgttgcattattttctgtacgctaacgcactttggcgcggtcgctatgga

SEQ ID NO: 302484 - DNA, 75 bp, synthetic construct
  source 1..75: mol_type = other DNA
cgatcgcaacgaccttgcttacggcatgatcaccaaaggactgaagaaccttgccaaagagcttgattgcgttgt

SEQ ID NO: 302485 - DNA, 75 bp, synthetic construct
  source 1..75: mol_type = other DNA
cgtatgacaaccaaacaggagccgaaattcagttataagggagaaatgcgcaaaggtatggatgcccatatttgc

SEQ ID NO: 302486 - DNA, 75 bp, synthetic construct
  source 1..75: mol_type = other DNA
tattgctgacacaaacgctacaaacccgacaaccgaccttgacgcaccgtgcagacgatctgtttctctggcaac

SEQ ID NO: 302487 - DNA, 75 bp, synthetic construct
  source 1..75: mol_type = other DNA
actttaaagcatttgattcaagggacaaaaataacaatttatccaatgcaggttttattcggcagataattcaag

SEQ ID NO: 302488 - DNA, 75 bp, synthetic construct
  source 1..75: mol_type = other DNA
tgataaaaattatttttaggccgaaagatcaattgtcccgactgacgtttggggtgcttaaaattggaatggcgg

SEQ ID NO: 302489 - DNA, 75 bp, synthetic construct
  source 1..75: mol_type = other DNA
agtcattaaaactaaacaggttgaatttcaacttcaggttggtgttccactctattttcggcttcgggcaaatcc

SEQ ID NO: 302490 - DNA, 75 bp, synthetic construct
  source 1..75: mol_type = other DNA
atcaatcaataatatttttctttattttttaaatttaaaaattaattgtgctgatgatttttttgatattaataa

SEQ ID NO: 302491 - DNA, 75 bp, synthetic construct
  source 1..75: mol_type = other DNA
aggggagggctggtcctccccaacgggaggggggcaacaaggaatagtaagatccgggcaggaagagcaggttat

SEQ ID NO: 302492 - DNA, 75 bp, synthetic construct
  source 1..75: mol_type = other DNA
tgatattatgtccgatgggaatcagtatagtgcccctggcgaatatatattttcagtaagtggtgaatgtataac

SEQ ID NO: 302493 - DNA, 75 bp, synthetic construct
  source 1..75: mol_type = other DNA
cgcgacaagccgctggtcaaaatcaactgcgctgccatccccgccagtcttctggaaagtgagttattcggtcat

SEQ ID NO: 302494 - DNA, 75 bp, synthetic construct
  source 1..75: mol_type = other DNA
cccgcgacgcgacaagccgctggtcaaaatcaactgcgctgccatccccgccagtcttctggaaagtgagttatt

SEQ ID NO: 302495 - DNA, 75 bp, synthetic construct
  source 1..75: mol_type = other DNA
agccaggcaatggaagacctgctccagcaggtagatattgtggcgaagagcgacagtacggtgttgatttgtggt

SEQ ID NO: 302496 - DNA, 75 bp, synthetic construct
  source 1..75: mol_type = other DNA
agtttgttgggcatacactacatgttcaactaaatacagggtttcgatttgataatcttcctgaggaggaagaac

SEQ ID NO: 302497 - DNA, 75 bp, synthetic construct
  source 1..75: mol_type = other DNA
atgacaaggatctgattattttacctaagaaactggtaaagccaatgcaagtacttatggatggcgatttggcga

SEQ ID NO: 302498 - DNA, 75 bp, synthetic construct
  source 1..75: mol_type = other DNA
ggaacaacaaaaaatcgccgccgtcctttccgctgcagacgccgaaatctccacactggagaaaaaactcgcctg

SEQ ID NO: 302499 - DNA, 75 bp, synthetic construct
  source 1..75: mol_type = other DNA
aaaactgggtgcgatagccgatatgaacagtggaggtactccgaaatcaacggttgaagagtattatggcgggaa

SEQ ID NO: 302500 - DNA, 75 bp, synthetic construct
  source 1..75: mol_type = other DNA
tcctaaagtctatatggctgtgggtttagttctttgcgccctcgttaacgtggcgcttggttttagttttgcttt

SEQ ID NO: 302501 - DNA, 75 bp, synthetic construct
  source 1..75: mol_type = other DNA
tgagtagcctggcagacaaagctaatcctaaagtctatatggctgtgggtttagttctttgcgccctcgttaacg

SEQ ID NO: 302502 - DNA, 75 bp, synthetic construct
  source 1..75: mol_type = other DNA
aaagacgttgcccggatgatgaaaaaacgtggggaagcatccgatatccgcatcgatgacctgccgctgaagctg

SEQ ID NO: 302503 - DNA, 75 bp, synthetic construct
  source 1..75: mol_type = other DNA
tacgtgttcttcaggataaactcgcctgcctgaaagacgagaaaaaagccctgatgcaacagctactgactggca

SEQ ID NO: 302504 - DNA, 75 bp, synthetic construct
  source 1..75: mol_type = other DNA
agccctgcgtatacagttttaaccccaataaaaaaaattgtagatgagttttataagcaatattacaaatcttac

SEQ ID NO: 302505 - DNA, 75 bp, synthetic construct
  source 1..75: mol_type = other DNA
gcaagcttgctgatatttcacgtgttacttcagggggaacgcctaatagggccatatctgaatattggcaaaatg

SEQ ID NO: 302506 - DNA, 75 bp, synthetic construct
  source 1..75: mol_type = other DNA
ctactttctgttgagtaactttgactttaaaaaatttagtgacaaaacaggtgtgcccggtgttaaccgtaatga

SEQ ID NO: 302507 - DNA, 75 bp, synthetic construct
  source 1..75: mol_type = other DNA
aacatggtatttatcatgcacctttgcctgccataatttttgatgatttcacgactgatagtaagttcgtcgatt

SEQ ID NO: 302508 - DNA, 75 bp, synthetic construct
  source 1..75: mol_type = other DNA
gaaatggcttagggcagtagaactgtttaagactatttcgcaaaagaataattctgaggatgtggagcttctggc

SEQ ID NO: 302509 - DNA, 75 bp, synthetic construct
  source 1..75: mol_type = other DNA
ggctgggctggaatagtttttagccgtcgggttatacctgctttacctgacatatggcacgcacgaatctatgta

SEQ ID NO: 302510 - DNA, 75 bp, synthetic construct
  source 1..75: mol_type = other DNA
gtgaaaaaaggtaacgaaggcaccattaaaacagccgatgatctgaaaggcaaaaaagtgggggtcggtctgggc

SEQ ID NO: 302511 - DNA, 75 bp, synthetic construct
  source 1..75: mol_type = other DNA
gattcattcaattgggtatatggcctgagatgaaactggccacagcgaatgaactggccaaaaaagtatggtgcc

SEQ ID NO: 302512 - DNA, 75 bp, synthetic construct
  source 1..75: mol_type = other DNA
gctcggttttgaaggccagcaggtgagttgggaaaccgcgcaccgctggcagtctgaactcaatgcgaaactggt

SEQ ID NO: 302513 - DNA, 75 bp, synthetic construct
  source 1..75: mol_type = other DNA
gctgaccgtggagccggggatttatttgccagggcaagggggcgtgcgcatcgaagatgttgtgctggttacccc

SEQ ID NO: 302514 - DNA, 75 bp, synthetic construct
  source 1..75: mol_type = other DNA
ccggttatcggcgctcttggtacatttgttactggtagtgacacaaactccaacattctgtttggtaaattgcag

SEQ ID NO: 302515 - DNA, 75 bp, synthetic construct
  source 1..75: mol_type = other DNA
ctttatacgtatcaagctaaatctcttttttatgataaagttatctggaaacaagaccctctgttcaattctgta

SEQ ID NO: 302516 - DNA, 75 bp, synthetic construct
  source 1..75: mol_type = other DNA
ataaatattatactctgtgtgtgctttacattattaattttcatgcgaatgccgcatattccaacagtaaatatg

SEQ ID NO: 302517 - DNA, 75 bp, synthetic construct
  source 1..75: mol_type = other DNA
tccgctcagaactactcgattcacgctttggcacaaaggctatttccactatcgcggagtctaaacgttttccgc

SEQ ID NO: 302518 - DNA, 75 bp, synthetic construct
  source 1..75: mol_type = other DNA
aaattatcgggaaatttgatatcaggaagaacgacaaagggaaagaatatcgtgtccctggctggaagctggccg

SEQ ID NO: 302519 - DNA, 75 bp, synthetic construct
  source 1..75: mol_type = other DNA
ttgctgctggggaggacgttgttcctgcttctgagctcgcagaagcactgaaacaggttcgggaaatcccgcgca

SEQ ID NO: 302520 - DNA, 75 bp, synthetic construct
  source 1..75: mol_type = other DNA
ccatggagtacggcctgtcgcgaaaatggatagcgcacacgcctttgttgccaaaggacgggaaacggcagaagg

SEQ ID NO: 302521 - DNA, 75 bp, synthetic construct
  source 1..75: mol_type = other DNA
atcattgccgatgagcagttgcaaacgctcggttttgaaggccagcaggtgagttgggaaaccgcgcaccgctgg

SEQ ID NO: 302522 - DNA, 75 bp, synthetic construct
  source 1..75: mol_type = other DNA
ttcatgatgtacaagacatgactaaattaaagcatccaaaagcaaacgactctgaatatggatgtgttggtcagg

SEQ ID NO: 302523 - DNA, 75 bp, synthetic construct
  source 1..75: mol_type = other DNA
atgactaagacatttggatcaacaatagctgacgtgataggtaaaaatcatgaggcggcaggggatagacaaggt

SEQ ID NO: 302524 - DNA, 75 bp, synthetic construct
  source 1..75: mol_type = other DNA
tgaagatgtgaataacaggaagcacaacaaatgggtcaatctgatagaagaccacggtgctcgtgagatggaaag

SEQ ID NO: 302525 - DNA, 75 bp, synthetic construct
  source 1..75: mol_type = other DNA
aattccgggacgctcaacaacgtcacgattaatgagaactgtcagattaaggggaaactgtcagccaaccagatt

SEQ ID NO: 302526 - DNA, 75 bp, synthetic construct
  source 1..75: mol_type = other DNA
tgttcctcaagatggtcgaaggtttcagaaaagagctatctcaatacgacgcacaatgtgttttcggaagtgctg

SEQ ID NO: 302527 - DNA, 75 bp, synthetic construct
  source 1..75: mol_type = other DNA
taaacctgttgctgacgatatatcattcgacggtactgggagcctgtttctggctaacttcttccttcaaacaat

SEQ ID NO: 302528 - DNA, 75 bp, synthetic construct
  source 1..75: mol_type = other DNA
accggtcatgctatcggcattgaagtccatgaagatccgcgtttttcaccgcgggacaccacgacgctacagcca

SEQ ID NO: 302529 - DNA, 75 bp, synthetic construct
  source 1..75: mol_type = other DNA
ggaggtggagaaaatccgcctcgcctgtgggattgccgatcgcggtgcagagcatattcgccgctttattcaggc

SEQ ID NO: 302530 - DNA, 75 bp, synthetic construct
  source 1..75: mol_type = other DNA
ttgtcctgcaggcacagctcgcagcaatctctgcaattcgccccggcgtgcgctgccagcaggttgacgatgccg

SEQ ID NO: 302531 - DNA, 75 bp, synthetic construct
  source 1..75: mol_type = other DNA
aagagattaagaaaattgtcgaagaagttgcagaaaaacttgaaattagcgatttactttaccgaaaaccgaaag

SEQ ID NO: 302532 - DNA, 75 bp, synthetic construct
  source 1..75: mol_type = other DNA
ggctacgacttgatgctattgccgctaaggccaaccaactattgattgatgcgaatgcggctataatgggcggtg

SEQ ID NO: 302533 - DNA, 75 bp, synthetic construct
  source 1..75: mol_type = other DNA
agttcgaactcaatgcgaaactggtgagcgccacgccggatgtgctgcggcaaatcaaaacgccagaagaggtgg

SEQ ID NO: 302534 - DNA, 75 bp, synthetic construct
  source 1..75: mol_type = other DNA
catgttcaattctacaatgcagcaatgaatagagccaatattaaaaataccttccttgattattcaaatttttat

SEQ ID NO: 302535 - DNA, 75 bp, synthetic construct
  source 1..75: mol_type = other DNA
acagctggggagggagccatgaagcagaccaaccagacaatcagcgtcaaggatggcaacaacgttctgagagtg

SEQ ID NO: 302536 - DNA, 75 bp, synthetic construct
  source 1..75: mol_type = other DNA
gctctatgaactaactcaccgtattaatcttcccaaagccagtactggatggcaaattcgagtggtgcgtgacac

SEQ ID NO: 302537 - DNA, 75 bp, synthetic construct
  source 1..75: mol_type = other DNA
cgcggtggacagcaatgaaaaaattgctggcatggctgacgaaattaaaaaccatgccgacgaactcgagcagca

SEQ ID NO: 302538 - DNA, 75 bp, synthetic construct
  source 1..75: mol_type = other DNA
acaacatgttaaacgttgctgccatgagtgatgaagaaaagaaactatttatcgctactatgaactttattatga

SEQ ID NO: 302539 - DNA, 75 bp, synthetic construct
  source 1..75: mol_type = other DNA
ggcgcaggtggtaagccgtcgctcgcagaccgccacgaacgccgggaacagtgccagtatagacagagtggatac

SEQ ID NO: 302540 - DNA, 75 bp, synthetic construct
  source 1..75: mol_type = other DNA
cgtccagcctttgggccacgtctgcgttgacccatcttaccggccgcaccggtgaagtgcccaaacctgtcggac

SEQ ID NO: 302541 - DNA, 75 bp, synthetic construct
  source 1..75: mol_type = other DNA
agtaacgcgtcagacgacattatcaatggcccgctgacgataaaaatcagcggtgttgttgccgatatttttgtc

SEQ ID NO: 302542 - DNA, 75 bp, synthetic construct
  source 1..75: mol_type = other DNA
ccaggggaagatgtaccagccacaaaactttttgccgcaggcgtcaaaaacttttgcgtctgcccccggacaact

SEQ ID NO: 302543 - DNA, 75 bp, synthetic construct
  source 1..75: mol_type = other DNA
gtgacagacattaccaggaatgcgacttacccggtactgatagacagcattgcggtggaagtgaacagcacagac

SEQ ID NO: 302544 - DNA, 75 bp, synthetic construct
  source 1..75: mol_type = other DNA
ggcacatctacaaccacgccagcgttgttgaaggaaaatttacctttgcggacccgagtgaaaccacccgaaaca

SEQ ID NO: 302545 - DNA, 75 bp, synthetic construct
  source 1..75: mol_type = other DNA
ttacatccagtcgaacaattatgttgccggctctgttggctggaaactggataagtccgggacgtttgagaacta

SEQ ID NO: 302546 - DNA, 75 bp, synthetic construct
  source 1..75: mol_type = other DNA
ttccccatttgatgctgttgctgctccttttccgcatcggaatgccggaaaacgtgatgaatcaggtacgtatac

SEQ ID NO: 302547 - DNA, 75 bp, synthetic construct
  source 1..75: mol_type = other DNA
cttattcaattagtcggccacaggacgtaattgatattgttaataagaactctgcaatcaacaccagtatcggcg

SEQ ID NO: 302548 - DNA, 75 bp, synthetic construct
  source 1..75: mol_type = other DNA
taatcaggaataccttgatacaacctcatctccttatcccgcaggttccctaatgctggcggttatgctcaatat

SEQ ID NO: 302549 - DNA, 75 bp, synthetic construct
  source 1..75: mol_type = other DNA
gccggttggctgatggtggcaaccgccgcagagatggtcagatacgggccgggaagtcactggttgttacaggtc

SEQ ID NO: 302550 - DNA, 75 bp, synthetic construct
  source 1..75: mol_type = other DNA
tcgggtgtaagttcaaatgaatctaataaaaaattagtcaagaaagaaattgcttatattctagctaaaaataat

SEQ ID NO: 302551 - DNA, 75 bp, synthetic construct
  source 1..75: mol_type = other DNA
attctccgtggtgaggaaaatatctccattaatagtgatatcctggtaacactacagaaattctttgaagaagat

SEQ ID NO: 302552 - DNA, 75 bp, synthetic construct
  source 1..75: mol_type = other DNA
tctcttttcaaaatggatgatcatgaaaaagtgataggcttgattcagaaaatgaaaagaatttatgatagttta

SEQ ID NO: 302553 - DNA, 75 bp, synthetic construct
  source 1..75: mol_type = other DNA
gatggtgagttatgcgccaacgtgcagggaaatttgatggatgagatgctgattacgatcattcaggggcacgct

SEQ ID NO: 302554 - DNA, 75 bp, synthetic construct
  source 1..75: mol_type = other DNA
gaccgcattattgtcatggaaaaagggaaaattgttgaacagggtaaacataaggagctgctttctgaaccagaa

SEQ ID NO: 302555 - DNA, 75 bp, synthetic construct
  source 1..75: mol_type = other DNA
aaaaatgatattaatgaacatataacaggcattaaagaccctgcatttcatgaggttctaattgaaattatggct

SEQ ID NO: 302556 - DNA, 75 bp, synthetic construct
  source 1..75: mol_type = other DNA
attaccgctttaggtttggtggcaaccgcaggactagcctggggagctaaggaaggtgcgaacaagttcctgata

SEQ ID NO: 302557 - DNA, 75 bp, synthetic construct
  source 1..75: mol_type = other DNA
agcgtcagtcggcggggaaactgctgggataacagccccatggaacgcttcttccgcagtctgaaaacagaatgg

SEQ ID NO: 302558 - DNA, 75 bp, synthetic construct
  source 1..75: mol_type = other DNA
atatattgcatgaaccacgtaggcctgataagcgtagcgcatcaggccgcttttgcgtttgtcatcagtctcagg

SEQ ID NO: 302559 - DNA, 75 bp, synthetic construct
  source 1..75: mol_type = other DNA
atgtgcgctttgttcatgccggatgcggcgtaaccgccttatccggcctacaaaatcttgcggattcaatatatt

SEQ ID NO: 302560 - DNA, 75 bp, synthetic construct
  source 1..75: mol_type = other DNA
cgcgattccctagcgtatctgccagcgtcagatactctggagataatgacttttgggtatttcgaggaagagtag

SEQ ID NO: 302561 - DNA, 75 bp, synthetic construct
  source 1..75: mol_type = other DNA
gtgtttatcagtatggtcgtgctgaacatttcacccacattatatctgacaaaccttccccaaaagataaatatg

SEQ ID NO: 302562 - DNA, 75 bp, synthetic construct
  source 1..75: mol_type = other DNA
gtgaatatgctcttaatattcttggtcaaaatgtttcaagagtcacaacagggaaaaaaccttatgatatattat

SEQ ID NO: 302563 - DNA, 75 bp, synthetic construct
  source 1..75: mol_type = other DNA
atgatgagaacaaaagttttcaataatcttcttgaatggattgaggaaaacttatcagcggaaatgaaagttgac

SEQ ID NO: 302564 - DNA, 75 bp, synthetic construct
  source 1..75: mol_type = other DNA
attgcgcatccagaatacccaggggctagcttctgtgctggagaccaagacatagaaaactatgctcaggtgtat

SEQ ID NO: 302565 - DNA, 75 bp, synthetic construct
  source 1..75: mol_type = other DNA
ggcgacaatacagacgaagataaacagcctaaccagggtaaagaactggctggcgcaacggacaatgagaaagcc

SEQ ID NO: 302566 - DNA, 75 bp, synthetic construct
  source 1..75: mol_type = other DNA
gtgtcgtggcgaaaccaccgaggaaaagcccacgaactagcgtggtgttactccccgtccggttccggtacaagg

SEQ ID NO: 302567 - DNA, 75 bp, synthetic construct
  source 1..75: mol_type = other DNA
atgtatcagttttccgaaaatgtacccaaatacattaacgcttatcgtttcattgtctggaatggattacacggc

SEQ ID NO: 302568 - DNA, 75 bp, synthetic construct
  source 1..75: mol_type = other DNA
tccggatttttgtgcacagaaaaccccccagctaggctgggggccggaaagctttcagctttgagccagttatta

SEQ ID NO: 302569 - DNA, 75 bp, synthetic construct
  source 1..75: mol_type = other DNA
cgcgccagcagagcttccaccgttgcatcctttggcacttcccacgaaaggcggtgaagcaatggtgagtcgtgc

SEQ ID NO: 302570 - DNA, 75 bp, synthetic construct
  source 1..75: mol_type = other DNA
taccaagagaacttcgataagcaagttgctcagataaatgacggcaagctggctatagagaaaatgcttaacgaa

SEQ ID NO: 302571 - DNA, 75 bp, synthetic construct
  source 1..75: mol_type = other DNA
tgtatacaaactacaggcaaagtcaggttatcaccggtggtaggctgctccgatggaaaaattgtgaactgattg

SEQ ID NO: 302572 - DNA, 75 bp, synthetic construct
  source 1..75: mol_type = other DNA
atggcaaataaaactgaaaagccaacacaaaagaaactccaggatgcttctaaaaaaggtcaaattctaaaaagt

SEQ ID NO: 302573 - DNA, 75 bp, synthetic construct
  source 1..75: mol_type = other DNA
cgtgctgattaacctggcgaccgccccctctggacgttttgggcgcgtttcctatgcgacagcagaaaacccact

SEQ ID NO: 302574 - DNA, 75 bp, synthetic construct
  source 1..75: mol_type = other DNA
catgctggactcaatcgaggactgcgtaacggcctgtaaagcacgcggctggctgccgattgttctgtgtattga

SEQ ID NO: 302575 - DNA, 75 bp, synthetic construct
  source 1..75: mol_type = other DNA
cacacttacgctgatgacagcgttgctcaagtacttcgtgagagagcctattttgaaggttttgatgtagacata

SEQ ID NO: 302576 - DNA, 75 bp, synthetic construct
  source 1..75: mol_type = other DNA
gacctaaagcatttggtttgattggaatgcttgcaatatttatcgccattggtcaagtgtttatcgatagtggtt

SEQ ID NO: 302577 - DNA, 75 bp, synthetic construct
  source 1..75: mol_type = other DNA
ttcaattaatattaatgcttgttttggcaagattacttggacccaaggcatttggtttaattggaatgcttgcaa

SEQ ID NO: 302578 - DNA, 75 bp, synthetic construct
  source 1..75: mol_type = other DNA
cggatgaggcagtaccagagacaaatcaccagcgacatcatcgcaagaacgggtcaaaacgaaccgccgattatc

SEQ ID NO: 302579 - DNA, 75 bp, synthetic construct
  source 1..75: mol_type = other DNA
gaaacacgctggaaaatgctgacagacgcaggtaaaacgcttggatttcgtggtggcaaggctcagcgttcatgg

SEQ ID NO: 302580 - DNA, 75 bp, synthetic construct
  source 1..75: mol_type = other DNA
acccgctatcagttgctgaacgagacaggaaagacgctgggattccggggaggacgtgcagagcgcgccgccgag

SEQ ID NO: 302581 - DNA, 75 bp, synthetic construct
  source 1..75: mol_type = other DNA
ctgcaacccgcctgattgccgcattttccgccctgtctgctgttccagcaatggcggccagcgctgaccaggcat

SEQ ID NO: 302582 - DNA, 75 bp, synthetic construct
  source 1..75: mol_type = other DNA
gtcaattatcttgtcgaaagaattgatagcatcgatcttgacgtgttaagtgatgataacattcaggagatagga

SEQ ID NO: 302583 - DNA, 75 bp, synthetic construct
  source 1..75: mol_type = other DNA
aaaacaatgacgatgatcatgttttgagcgctattcagttaccgtttgaagctgctctaaaatcttcaagtgtta

SEQ ID NO: 302584 - DNA, 75 bp, synthetic construct
  source 1..75: mol_type = other DNA
tcctctggtgacaagctatatggcgaggattttacatggctgtgcttcgtacgttaccgggcagaatcaaaactc

SEQ ID NO: 302585 - DNA, 75 bp, synthetic construct
  source 1..75: mol_type = other DNA
atgtggaaatggtatcagaatgaggacatcggtgagtattattggcaaacagaactgggtacatgtaaaaataat

SEQ ID NO: 302586 - DNA, 75 bp, synthetic construct
  source 1..75: mol_type = other DNA
tatttttccaaagatgttataaaaaaccttcactatgacagaaaaacagtaagtgaagaaagaaagtcagccctt

SEQ ID NO: 302587 - DNA, 75 bp, synthetic construct
  source 1..75: mol_type = other DNA
tagcgtaagtgtggatatgacaaagggaacgcaatgcatgattcacttgatggtgaatgaagaagttttcatgtc

SEQ ID NO: 302588 - DNA, 75 bp, synthetic construct
  source 1..75: mol_type = other DNA
agcgactaaaattaataatgtaaatgctcattcttcaaaatttgtccattgccatttttacagtgttgatatgat

SEQ ID NO: 302589 - DNA, 75 bp, synthetic construct
  source 1..75: mol_type = other DNA
cagtgctgacaggcaggaaaccatcggcggtaatgttaacagcacagtaagcgggaatatcacagagaacatcag

SEQ ID NO: 302590 - DNA, 75 bp, synthetic construct
  source 1..75: mol_type = other DNA
agttcactgatggcagggcagatcgtccatggttctgatggtgattacggtattgtggccaccggtgatatcagg

SEQ ID NO: 302591 - DNA, 75 bp, synthetic construct
  source 1..75: mol_type = other DNA
gcgttagggtgccaccccctaaagggggagcgtaaaggcgagtattccgttgaagttaatgggaactggcgggta

SEQ ID NO: 302592 - DNA, 75 bp, synthetic construct
  source 1..75: mol_type = other DNA
ctcgaaggcccatactcctgggagatcatgtctgaaattcatggctttgacgtgattggcctgccttactacgaa

SEQ ID NO: 302593 - DNA, 75 bp, synthetic construct
  source 1..75: mol_type = other DNA
tgaaaaataatgcggtaatgggggtatataacaaccgtaccctaccttcttcttatcacgatgctatgaccgaat

SEQ ID NO: 302594 - DNA, 75 bp, synthetic construct
  source 1..75: mol_type = other DNA
gtttaatctgtttcctgaaatgcactcttcgcattacaacgatatttgtagcgtaagtgtggatatgacaaaggg

SEQ ID NO: 302595 - DNA, 75 bp, synthetic construct
  source 1..75: mol_type = other DNA
attggaatacgtaatatatcgaatggaaaacttgaaagacaaaaatttcttttcccactggactatgagaataaa

SEQ ID NO: 302596 - DNA, 75 bp, synthetic construct
  source 1..75: mol_type = other DNA
tcatttttatgattatagcaggcgatatgcaattagtgagaatatcgaaaaagacgctgtaacaaacaatatcgc

SEQ ID NO: 302597 - DNA, 75 bp, synthetic construct
  source 1..75: mol_type = other DNA
tgactaaactcaaaggggcgacatccaccatcgagcataacctcaccgaaaacgtgggaggccgcagaacatgcc

SEQ ID NO: 302598 - DNA, 75 bp, synthetic construct
  source 1..75: mol_type = other DNA
gcgattgtctgcgccttcgggcttgcctggatgagcgaaacctttgtgaatgggcatatcgaactgatcaaagcg

SEQ ID NO: 302599 - DNA, 75 bp, synthetic construct
  source 1..75: mol_type = other DNA
attattgttagccaaagtaatgatgtttttcactggagttttgataagaaaaatggtcttggaaaaatccaacaa

SEQ ID NO: 302600 - DNA, 75 bp, synthetic construct
  source 1..75: mol_type = other DNA
tggtgttgacattgaacgttcttcatttggtgattataacatcaatcatcttgtcaatgctaatataagatactc

SEQ ID NO: 302601 - DNA, 75 bp, synthetic construct
  source 1..75: mol_type = other DNA
atgttcacccttcacccattattcaccacctatcactatgaaataaaaggagaaaaaagaaaggtgaacagtgtg

SEQ ID NO: 302602 - DNA, 75 bp, synthetic construct
  source 1..75: mol_type = other DNA
cagcctggcaagcattgcaagaagatgaagtgatgagaaaaatagccatagaacgccttgtcgaagggtttcatg

SEQ ID NO: 302603 - DNA, 75 bp, synthetic construct
  source 1..75: mol_type = other DNA
ctgcggcttgtggatattgagccggactgtctaaatgagggtgtgaaccgtgaaaaactggagtatgtatattac

SEQ ID NO: 302604 - DNA, 75 bp, synthetic construct
  source 1..75: mol_type = other DNA
ctatcaaattgtcctgcaggcacagctcgcagcaatctccgcgattcgccccggcgtgcgctgccagcaggttga

SEQ ID NO: 302605 - DNA, 75 bp, synthetic construct
  source 1..75: mol_type = other DNA
gctgaaccttggcgacaaggatctcagccgtgatgactacagctataacgaagacggacgtcgttactttatggc

SEQ ID NO: 302606 - DNA, 75 bp, synthetic construct
  source 1..75: mol_type = other DNA
gtgaaagatcgtatcagcatcagccgtacgtctgacgtcaatgctgcaccgggctaccaaaactttgttggtttt

SEQ ID NO: 302607 - DNA, 75 bp, synthetic construct
  source 1..75: mol_type = other DNA
attaccaagacacctgacatcacgctaaaggatgatgttggtacatataatataaaaggaaagaaagatgcaaga

SEQ ID NO: 302608 - DNA, 75 bp, synthetic construct
  source 1..75: mol_type = other DNA
aggtcggtttgatgggattgtgggtatttttgctctcatcggtgattggttacccggcaatgtatctgtttcagc

SEQ ID NO: 302609 - DNA, 75 bp, synthetic construct
  source 1..75: mol_type = other DNA
ttgtgctggttaccccgcaaggcgcagaagtgctctacgccatgccgaaaacagtgttgctcacgggagaggcat

SEQ ID NO: 302610 - DNA, 75 bp, synthetic construct
  source 1..75: mol_type = other DNA
aattaactatttctcacgtaatgctgatggctttattattggcaagtttatgtctgccactatacttggtagtta

SEQ ID NO: 302611 - DNA, 75 bp, synthetic construct
  source 1..75: mol_type = other DNA
actgagctggcaccacgcctcgacgatgagcaggcggccatcgtgcattgctggctggataaagtcctggcgatt

SEQ ID NO: 302612 - DNA, 75 bp, synthetic construct
  source 1..75: mol_type = other DNA
atgaacataaataccatctatcgccacccggcagatctggaagccgaatcgatgctatctcgtaaagaagcatac

SEQ ID NO: 302613 - DNA, 75 bp, synthetic construct
  source 1..75: mol_type = other DNA
atgattacggcgcgttacgcatgacgacgctcaactgcagcggacaatgccatttacaagccgtggaggcgaaga

SEQ ID NO: 302614 - DNA, 75 bp, synthetic construct
  source 1..75: mol_type = other DNA
gcagttttaagcgttccatttgtaaattgggtttttggcccacaatggcatattactgcaaatatactaacttgg

SEQ ID NO: 302615 - DNA, 75 bp, synthetic construct
  source 1..75: mol_type = other DNA
ggaatgccttctcgcaattttttaagatttgtgtacaactagttaacgttatttatctcgcaaaaatcattcctc

SEQ ID NO: 302616 - DNA, 75 bp, synthetic construct
  source 1..75: mol_type = other DNA
tgaaaaatataacactgggcaactcttcgggttagatggtataaaagcagataatccaataaaaacaaagcaagg

SEQ ID NO: 302617 - DNA, 75 bp, synthetic construct
  source 1..75: mol_type = other DNA
atcaacagaaaaagacccggcagtaaacgccattgctcacgccattttgggcggcgcagtggcggcaatgcaggg

SEQ ID NO: 302618 - DNA, 75 bp, synthetic construct
  source 1..75: mol_type = other DNA
cttcatagggcacaatgctggaattaatgataacgatgcagcgaaagccattgctcatgccattctcggcggtgt

SEQ ID NO: 302619 - DNA, 75 bp, synthetic construct
  source 1..75: mol_type = other DNA
tatacaaaaaagggacgagtatgcgccgtgtgcgactgatcgtttctgaagctcgtcagcaggcccgccaggtaa

SEQ ID NO: 302620 - DNA, 75 bp, synthetic construct
  source 1..75: mol_type = other DNA
gtatattacacaagaccccattgggctggcggggggatggaacctgtataattacccactgaatccgataataag

SEQ ID NO: 302621 - DNA, 75 bp, synthetic construct
  source 1..75: mol_type = other DNA
gccgctggcgctcatcagcacggaaggggcaacagcgtggtgcgcagaatatgatgaatggggcaacctgctgaa

SEQ ID NO: 302622 - DNA, 75 bp, synthetic construct
  source 1..75: mol_type = other DNA
acaactatatcttacaaacgaataaagatggccactattgttggcgaccattcgaattaattcatcctgcaattt

SEQ ID NO: 302623 - DNA, 75 bp, synthetic construct
  source 1..75: mol_type = other DNA
accggtgatctcgaggcccgtctgcagaagaacgggagtgttcgtttccgtgaccgtcggacgggagagtttgtc

SEQ ID NO: 302624 - DNA, 75 bp, synthetic construct
  source 1..75: mol_type = other DNA
cgatcattgttaatgaccctacagaggcgcacgtccatcatatccgttgcagaaacacttgggcctcatctttgt

SEQ ID NO: 302625 - DNA, 75 bp, synthetic construct
  source 1..75: mol_type = other DNA
acctatggacaaacaggaaacaaggtttcagccggaaccgtccagtcagtcattggtgtcacttttatctatgaa

SEQ ID NO: 302626 - DNA, 75 bp, synthetic construct
  source 1..75: mol_type = other DNA
tcattatctaaaatgatgaatagctccagtgatctcatggggttgagaaggcagccccagaacttctggcggcta

SEQ ID NO: 302627 - DNA, 75 bp, synthetic construct
  source 1..75: mol_type = other DNA
gtatgtgccgaatcctttaagatggatagatcccttaggattaaataaaggagcttcattatctaaaatgatgaa

SEQ ID NO: 302628 - DNA, 75 bp, synthetic construct
  source 1..75: mol_type = other DNA
gttccggtgggacagccgggaccagctgaccgggtattgcagcgcacagggtgagctgtgggaataccgccacga

SEQ ID NO: 302629 - DNA, 75 bp, synthetic construct
  source 1..75: mol_type = other DNA
tgcggggcgggtggtggagcaacttaacccggcaggcctgagttaccgctaccagtatgagcaggatcgcatcac

SEQ ID NO: 302630 - DNA, 75 bp, synthetic construct
  source 1..75: mol_type = other DNA
ttatgccgggttaacttccattaccgcgggctacgattttaccgattattctggcgatcatggcaaccgtaattt

SEQ ID NO: 302631 - DNA, 75 bp, synthetic construct
  source 1..75: mol_type = other DNA
acaagaatctatcaataaatctcttcagtttaaatacctgttcagtactgatatcgcaaatttttatccatcaat

SEQ ID NO: 302632 - DNA, 75 bp, synthetic construct
  source 1..75: mol_type = other DNA
ctcccttttcttcataacattcattgcaaaagtgatgttattgtaatttccgctgctgatgactctgcgacaatt

SEQ ID NO: 302633 - DNA, 75 bp, synthetic construct
  source 1..75: mol_type = other DNA
gcggaacagcatggcgcaacattttataaccagaatggccagcagcaggatgcgattgccattctgaaagccaac

SEQ ID NO: 302634 - DNA, 75 bp, synthetic construct
  source 1..75: mol_type = other DNA
cagctatcgttttaacgataactgcatgtgccggaaaagctgaaaaagacccgcaatatgtagccgcagagaaat

SEQ ID NO: 302635 - DNA, 75 bp, synthetic construct
  source 1..75: mol_type = other DNA
aaatttatcgctggcgggaccaatctgctggacctgatgaagctggaaattgaaacgccaacccaccttatcgat

SEQ ID NO: 302636 - DNA, 75 bp, synthetic construct
  source 1..75: mol_type = other DNA
tggaagagcgtgaacaagcccaggcaaaagcggctgaagaacatcatctgcatcagcaaacatggcgcgctgagc

SEQ ID NO: 302637 - DNA, 75 bp, synthetic construct
  source 1..75: mol_type = other DNA
ttgcgcaagaaaagcagtcactgctggagcaacaaacagaagcgcaggagcagcagagcgctctgcaacagcaac

SEQ ID NO: 302638 - DNA, 75 bp, synthetic construct
  source 1..75: mol_type = other DNA
tttgctttctggttagtcgacaccctgcaaccccgtaaaattgttgagctgggtacccattacggcagctcctat

SEQ ID NO: 302639 - DNA, 75 bp, synthetic construct
  source 1..75: mol_type = other DNA
gctttgggatgaattaaaacggcaatatccgcactttgagttctctcatgggcatggacttggggttgttggtgt

SEQ ID NO: 302640 - DNA, 75 bp, synthetic construct
  source 1..75: mol_type = other DNA
cctgaagcagaccgtttcatggaaactgaccgcccctgtgcgcgcactgggacgcacttttaaagacattccagc

SEQ ID NO: 302641 - DNA, 75 bp, synthetic construct
  source 1..75: mol_type = other DNA
ctggaagccaacatcagtgagcgtttccgtgaactggcaatcatgactcgtcataccgaacagttaactcgtgaa

SEQ ID NO: 302642 - DNA, 75 bp, synthetic construct
  source 1..75: mol_type = other DNA
atggcggggatttccgtcagcaagctgaagacattcaacgctggcgtgaaaggctccacgctgggcgcaagtggg

SEQ ID NO: 302643 - DNA, 75 bp, synthetic construct
  source 1..75: mol_type = other DNA
tcgaatcgaaccttagtcgaaggttctcacccttccccgatgagtgcaaactttcacaatctcaccgaagttacc

SEQ ID NO: 302644 - DNA, 75 bp, synthetic construct
  source 1..75: mol_type = other DNA
ttactcactgctagatttggcatctacatccagagcaatcggaatatcaaccattggattaaaactatctattga

SEQ ID NO: 302645 - DNA, 75 bp, synthetic construct
  source 1..75: mol_type = other DNA
tgactgatggcgcaggcatccccatgtccggatgccagattattctgaaatcccgtgtaaacacctcagaagtgg

SEQ ID NO: 302646 - DNA, 75 bp, synthetic construct
  source 1..75: mol_type = other DNA
tcgcaacgatgagatttatcgccgtcagcgtgaaatgaaagaggagctgagcggtctggatgatttggcttcaat

SEQ ID NO: 302647 - DNA, 75 bp, synthetic construct
  source 1..75: mol_type = other DNA
cgataatcagcaggtgaaactgtcgatgccggaactggaagaactggcggcagcaatggtgcaggcgcaggtcga

SEQ ID NO: 302648 - DNA, 75 bp, synthetic construct
  source 1..75: mol_type = other DNA
gggaactcattatggaagttcttatttctcattttgccaggcagtcaccaaactggatttagaaacatgctgctt

SEQ ID NO: 302649 - DNA, 75 bp, synthetic construct
  source 1..75: mol_type = other DNA
ccagcgcgatgacttttctgaggatagccatgccaacgatccgaagttggctggtgatgactatgtggcagcgcc

SEQ ID NO: 302650 - DNA, 75 bp, synthetic construct
  source 1..75: mol_type = other DNA
acatccagcccgttcggtatcggcatgaccttcgattacacggagtgctgggaaattggtgttcgtgacgactgc

SEQ ID NO: 302651 - DNA, 75 bp, synthetic construct
  source 1..75: mol_type = other DNA
aatacttccagacgatgtatgaacttgaacgccagtttaattcaactcttccggttggcggccttcctttcgttg

SEQ ID NO: 302652 - DNA, 75 bp, synthetic construct
  source 1..75: mol_type = other DNA
ttctgctgcaggcaaaccgtgacgtgaatctggtatcagcagaaaacacgtcaaagctggaaggaaagaacacat

SEQ ID NO: 302653 - DNA, 75 bp, synthetic construct
  source 1..75: mol_type = other DNA
cagagaaaaactgggaaactgctcgaaacaaggcattggatcttgtaggtaatttaggagcggactctaagccag

SEQ ID NO: 302654 - DNA, 75 bp, synthetic construct
  source 1..75: mol_type = other DNA
atgagtggttcggcgagtgtgaacctcagccgggataaaatgcacagtaactacgacagtgtgcaggagcagacg

SEQ ID NO: 302655 - DNA, 75 bp, synthetic construct
  source 1..75: mol_type = other DNA
caaattgaattcagttcaggtgttgatttgtcttggattaaaataacatcagaagactcagtggttttctctgac

SEQ ID NO: 302656 - DNA, 75 bp, synthetic construct
  source 1..75: mol_type = other DNA
tagtgagtatgccttcgcaactcttcactatggctcgttcttttaaagccgtagccaatggcaaaatttatatcg

SEQ ID NO: 302657 - DNA, 75 bp, synthetic construct
  source 1..75: mol_type = other DNA
caattgataaacagaatagtgagcttgaactggcccgtgatgaactcgcggtattgcttcagcggcaccatgcag

SEQ ID NO: 302658 - DNA, 75 bp, synthetic construct
  source 1..75: mol_type = other DNA
tttaccggcgaagacacaatggcattaacaccgctcagtgcttttgtgcgcggtattctcgggaaaaacacagcc

SEQ ID NO: 302659 - DNA, 75 bp, synthetic construct
  source 1..75: mol_type = other DNA
taagctcgccatcaacaactaattttcctgcaacagttaatactgaaatagaattcctttcgcaagctagaaagt

SEQ ID NO: 302660 - DNA, 75 bp, synthetic construct
  source 1..75: mol_type = other DNA
atggaggggtacgaatatgattacgattacgacggtgagcatcgcgatgaaccgataatcgtgaattaccacaat

SEQ ID NO: 302661 - DNA, 75 bp, synthetic construct
  source 1..75: mol_type = other DNA
gcaatttttaccgccgtcgatgccccagtacctgtataaactgtcctgtgctggcaacaatattaactcaatacc

SEQ ID NO: 302662 - DNA, 75 bp, synthetic construct
  source 1..75: mol_type = other DNA
acctgagagtgattaactgttctgaaaacttcttgcaatttttaccgccgtcgatgccccagtacctgtataaac

SEQ ID NO: 302663 - DNA, 75 bp, synthetic construct
  source 1..75: mol_type = other DNA
gctcaaagccgtcgagggcctgaaaaaccagcagggcctggaggaccttttagactttttgcgcaaggaaggcca

SEQ ID NO: 302664 - DNA, 75 bp, synthetic construct
  source 1..75: mol_type = other DNA
gactcgcctgaaagtatttgactgttctagtaacgatttgatctctgcaccacggctgccgcccaagctaataat

SEQ ID NO: 302665 - DNA, 75 bp, synthetic construct
  source 1..75: mol_type = other DNA
aaaacgataccggtgccgcagccccgtagcctgaagttgtttgactgtaacagtaacccttgggacacagacaat

SEQ ID NO: 302666 - DNA, 75 bp, synthetic construct
  source 1..75: mol_type = other DNA
atactactgtggtcacaaccagtttaaaacgataccggtgccgcagccccgtagcctgaagttgtttgactgtaa

SEQ ID NO: 302667 - DNA, 75 bp, synthetic construct
  source 1..75: mol_type = other DNA
tataggaccgataacagtctctagtgatgaaatgaccaatgctctcgatccggtcgaattagcggcaattatcaa

SEQ ID NO: 302668 - DNA, 75 bp, synthetic construct
  source 1..75: mol_type = other DNA
gttctcgatccggtcgaattagcggcaatcattaataaaaagcatcataccataattaatggtaaaaaatttaaa

SEQ ID NO: 302669 - DNA, 75 bp, synthetic construct
  source 1..75: mol_type = other DNA
ataataattatcagtttattgtgacaattaatagcaaaaattacggttgctctcttgataataccgatgttaatt

SEQ ID NO: 302670 - DNA, 75 bp, synthetic construct
  source 1..75: mol_type = other DNA
ttagtggcattatggcattatatatgttaggaactactatttcatatgctaacagtcttgcagataatatgcaga

SEQ ID NO: 302671 - DNA, 75 bp, synthetic construct
  source 1..75: mol_type = other DNA
ttagcggtgttatggcattatatatgacagggagtgcactgtcatatgctgccagtcttgatgaaaatatgcaga

SEQ ID NO: 302672 - DNA, 75 bp, synthetic construct
  source 1..75: mol_type = other DNA
tcatcgatttgttaaaacgcataatgagtatcaatgaaaacgttcatgtattagctggaaatcatgaaacgaatt

SEQ ID NO: 302673 - DNA, 75 bp, synthetic construct
  source 1..75: mol_type = other DNA
agtaccggagctggtgtgctgacacagggaagcaccacatatgccatgcacgggcagcagggaaatgacctgaat

SEQ ID NO: 302674 - DNA, 75 bp, synthetic construct
  source 1..75: mol_type = other DNA
tgggtattcagggttctgaagaactttttaaaaatatgattggttatgctcgtctgatgggaagaagcgaagaag

SEQ ID NO: 302675 - DNA, 75 bp, synthetic construct
  source 1..75: mol_type = other DNA
cgcgcgatgttattgagttgcctattgacgacgagttagatgtttcaggctggaatggcgcaaggcgctgggatt

SEQ ID NO: 302676 - DNA, 75 bp, synthetic construct
  source 1..75: mol_type = other DNA
gcggccttgagatggcagaccgtgaacgggcattaaatgctcagttaaacagggttaaagaatctcctgacacgc

SEQ ID NO: 302677 - DNA, 75 bp, synthetic construct
  source 1..75: mol_type = other DNA
tcaggtcgtgaaagcagctaatgactccgttaacgccatgcgccgtgaaatgtatcgctatacgtggaaatcggc

SEQ ID NO: 302678 - DNA, 75 bp, synthetic construct
  source 1..75: mol_type = other DNA
gatcgtgatgggttatgcctgttcgccaaacgcctggaacggggccgcttcatctggccggtgacccgggaaggg

SEQ ID NO: 302679 - DNA, 75 bp, synthetic construct
  source 1..75: mol_type = other DNA
aagaatacgatgggtcttgaaggctcagaggaattatttaaaaacttaactggatatgcccgtctaatggggtgt

SEQ ID NO: 302680 - DNA, 75 bp, synthetic construct
  source 1..75: mol_type = other DNA
cggatgaggtctataacaaggccgcacacgtcgcgaccattgagatcatttctaacgttcattctgaagcgaccg

SEQ ID NO: 302681 - DNA, 75 bp, synthetic construct
  source 1..75: mol_type = other DNA
tgctggtaacagtacgccaggcataccgtgattccctggacgggaaaagtgtgtcttttacgggcgtaaatggtc

SEQ ID NO: 302682 - DNA, 75 bp, synthetic construct
  source 1..75: mol_type = other DNA
acagtgccgtggccaggggctttattgccgtatctgagtttgccaggaaatgcacctgccgggttaccgggaaaa

SEQ ID NO: 302683 - DNA, 75 bp, synthetic construct
  source 1..75: mol_type = other DNA
ccccccttcagcacttgcgtatcggtgccgaccagagcgggaaaatcaccgctatctcacatgaaagctggtctg

SEQ ID NO: 302684 - DNA, 75 bp, synthetic construct
  source 1..75: mol_type = other DNA
cggacgcgccggacgctgtgtttcagcaggcggcctatgtagtcacggtggaagtcctctccaacgtaccgtcag

SEQ ID NO: 302685 - DNA, 75 bp, synthetic construct
  source 1..75: mol_type = other DNA
actccccgtcctgaactgggggaatacatattcgcactccccgttgaacggcatatgctttattttttgcagact

SEQ ID NO: 302686 - DNA, 75 bp, synthetic construct
  source 1..75: mol_type = other DNA
acgctcagtctttcatttggcttcatccagtcacttagcatgctgatcacctttaccgttattctttggcaaagc

SEQ ID NO: 302687 - DNA, 75 bp, synthetic construct
  source 1..75: mol_type = other DNA
tctttttctgaagacgcctcgcatttttgcggaataatatttcaatacatcaatttatttaacttaaatatatcc

SEQ ID NO: 302688 - DNA, 75 bp, synthetic construct
  source 1..75: mol_type = other DNA
ctctccagcaaccaatgccaccagggattaagcccccgcaacattgcgcctcaccggaatccttccggcttgacg

SEQ ID NO: 302689 - DNA, 75 bp, synthetic construct
  source 1..75: mol_type = other DNA
aaagcagacgattctaagaaatttgctatcgataatagaattaaaaaaacaaaaagagtgtaataatatgatttt

SEQ ID NO: 302690 - DNA, 75 bp, synthetic construct
  source 1..75: mol_type = other DNA
ctgtgggtggcggattttacttacgtcagcacatggcagggcttcgtctgtatggcgttcgatgtaaccactcgt

SEQ ID NO: 302691 - DNA, 75 bp, synthetic construct
  source 1..75: mol_type = other DNA
tgttctccggggtaaaaaggtccgcactaccgtcagccggaaagccgttgccgcaggcgacagcgtaaaccgcca

SEQ ID NO: 302692 - DNA, 75 bp, synthetic construct
  source 1..75: mol_type = other DNA
tggcgttcatcattgatgtgtttgccggatacattgtggggtggcgggtctcatcgtccatggagacgacattcg

SEQ ID NO: 302693 - DNA, 75 bp, synthetic construct
  source 1..75: mol_type = other DNA
gagatacgctttatgttcgtatacttgggcgcaatacaccctgcggcggtacgccgaccgcacagacccatttca

SEQ ID NO: 302694 - DNA, 75 bp, synthetic construct
  source 1..75: mol_type = other DNA
aagactcgggatactaccagtcagggccggggtcgaaagaggacagggtaaagtatgaaaagcagtcacaagaag

SEQ ID NO: 302695 - DNA, 75 bp, synthetic construct
  source 1..75: mol_type = other DNA
attcattgtcaatgcattgcataataagttcggaggaatctttttaagaaatttttctacagaaatcgaaacttc

SEQ ID NO: 302696 - DNA, 75 bp, synthetic construct
  source 1..75: mol_type = other DNA
ccatgttagtctatgccttggagtctttgtctcaaagaaatgataactataagtctgattgggatgactacgatc

SEQ ID NO: 302697 - DNA, 75 bp, synthetic construct
  source 1..75: mol_type = other DNA
agacggatttacagctaaaagtatagcgaagtggtttagtgaatacctaaatatgttaaatttaggcgaagtcac

SEQ ID NO: 302698 - DNA, 75 bp, synthetic construct
  source 1..75: mol_type = other DNA
gcaatcaaataccacggaacgcagcaattacgggcgcatattgcaaaaacagtaatccgttcaggactgatttca

SEQ ID NO: 302699 - DNA, 75 bp, synthetic construct
  source 1..75: mol_type = other DNA
tcagtgacagcagcatcagcgatattctgtctccagtcgatattgagcagatcaccaacgataccaggacggcca

SEQ ID NO: 302700 - DNA, 75 bp, synthetic construct
  source 1..75: mol_type = other DNA
ggaatttaccaagccatgaacgaagaacagttcagccagttaatgggtgccattaataaaaccagtgaacgcctg

SEQ ID NO: 302701 - DNA, 75 bp, synthetic construct
  source 1..75: mol_type = other DNA
ggccgggcagaaactttttacctccattgaagtgcgggaaaactatctgggcacaggcaaattctttgtgtccgg

SEQ ID NO: 302702 - DNA, 75 bp, synthetic construct
  source 1..75: mol_type = other DNA
actcgtcctcagaaatggttgagccagttaccctgagcacttggcgtgctagtcattggcctcttttgtccctac

SEQ ID NO: 302703 - DNA, 75 bp, synthetic construct
  source 1..75: mol_type = other DNA
ggcaggccagcaggcactggaagcgttcgctgcggcctgggacagtcgctatcctcagataagccgaagctggca

SEQ ID NO: 302704 - DNA, 75 bp, synthetic construct
  source 1..75: mol_type = other DNA
tttgttattaataacaaacctagttctaaaatgttgattaataatattaaggataaaagctataaaatatttcat

SEQ ID NO: 302705 - DNA, 75 bp, synthetic construct
  source 1..75: mol_type = other DNA
aaatcctttaaattcagagcaatagaagaatttgtccctgctcatcttaacgtgcttgttaatgatcaaaacgag

SEQ ID NO: 302706 - DNA, 75 bp, synthetic construct
  source 1..75: mol_type = other DNA
ggtatgaggactacacgcgcgccgccgagttgctgcgtctcaatccgacactacgtaatcctaacaatatcaaag

SEQ ID NO: 302707 - DNA, 75 bp, synthetic construct
  source 1..75: mol_type = other DNA
gaccgggcaaaaaacggttgctgttgccattccggcaggctcatcaacctcggatattaccgagctggtaacggc

SEQ ID NO: 302708 - DNA, 75 bp, synthetic construct
  source 1..75: mol_type = other DNA
cgagttgttgcgtctcaatccgacactacgtaatcctaacaacatcaaagccggtgacgttctgaatgcctactc

SEQ ID NO: 302709 - DNA, 75 bp, synthetic construct
  source 1..75: mol_type = other DNA
gtcgtgtcccgtggcatttaacccccttaatcgccagaccatggaggaaagctggttgcgtaccgtggcatttaa

SEQ ID NO: 302710 - DNA, 75 bp, synthetic construct
  source 1..75: mol_type = other DNA
aacggcggcagcagcaggcgttgctgacacggctggcagaactggctgcagattccagcgccgacgatgccgccg

SEQ ID NO: 302711 - DNA, 75 bp, synthetic construct
  source 1..75: mol_type = other DNA
ataacccacaggtcagacgactcaatgagatcacgaatagtaaacatctctcaaaagcagatctggccagaattt

SEQ ID NO: 302712 - DNA, 75 bp, synthetic construct
  source 1..75: mol_type = other DNA
tttttttaatgaaatggattctgtgattgataagttgaaaagtaatagctgcgattttttatatggagactattt

SEQ ID NO: 302713 - DNA, 75 bp, synthetic construct
  source 1..75: mol_type = other DNA
attataacaacaaaaaaggattgctacgtaccttatctaacgttgcagatttaaaacgtaaatattcttttgaat

SEQ ID NO: 302714 - DNA, 75 bp, synthetic construct
  source 1..75: mol_type = other DNA
aaaagttcaacagtcaaatgatagcaatacaaataaaaaagctcgtgctgcaagaggtcctcgttttactttaag

SEQ ID NO: 302715 - DNA, 75 bp, synthetic construct
  source 1..75: mol_type = other DNA
ctgcacctccagtgatgcacagaaaaaaaacattgatggagaatctgaaacaaaaatggaaaacggtcttcgcca

SEQ ID NO: 302716 - DNA, 75 bp, synthetic construct
  source 1..75: mol_type = other DNA
ccagcgatgcgcaaccagtcaccttcgtggcggataaggacagcgcggttgtcgttctgcaaacatcgaaagcgg

SEQ ID NO: 302717 - DNA, 75 bp, synthetic construct
  source 1..75: mol_type = other DNA
ctcgattagcaacggcggaaaaggcatgacggatagtaacggggttgcaatcgcctccctgaccggcacgttaac

SEQ ID NO: 302718 - DNA, 75 bp, synthetic construct
  source 1..75: mol_type = other DNA
atgatggtattgaacgcgatccgcagcagttttttaaacgtgccaacagcaaatcaccggagcggggaggtgcaa

SEQ ID NO: 302719 - DNA, 75 bp, synthetic construct
  source 1..75: mol_type = other DNA
tgaggtaatgcagcttaattcattgattaacggtgcgctggactcaatgatgaagcaattccaggtggaagagga

SEQ ID NO: 302720 - DNA, 75 bp, synthetic construct
  source 1..75: mol_type = other DNA
taatgctgcaaaagcattgacaaaatggtggaacgatacagcatcacaaagaatatttgactctctaatattgaa

SEQ ID NO: 302721 - DNA, 75 bp, synthetic construct
  source 1..75: mol_type = other DNA
gcggcccgcaggagagccgggagtaccgttacagcgacacgggaaggctgacgggcgtccacaccacggcggcga

SEQ ID NO: 302722 - DNA, 75 bp, synthetic construct
  source 1..75: mol_type = other DNA
tggtggagaggatgctgatatacagagaatatcactttcccgtgctgaggcgctgattgccctgaaatggtggga

SEQ ID NO: 302723 - DNA, 75 bp, synthetic construct
  source 1..75: mol_type = other DNA
gcgctacgttctcactgggctgatgtgcagaatgaacaccttgcgcggcacggccatcagtcgcgcgttgatcat

SEQ ID NO: 302724 - DNA, 75 bp, synthetic construct
  source 1..75: mol_type = other DNA
tttaatggcagaacacaacagattgcgtattggagacatgctggagaaactgattaatgagtactaccaggagca

SEQ ID NO: 302725 - DNA, 75 bp, synthetic construct
  source 1..75: mol_type = other DNA
gaaacaacgccgacccgattcatgtttctacaggtctgctgctgaacaaagagcaaaaggcaggtgagtcgaagc

SEQ ID NO: 302726 - DNA, 75 bp, synthetic construct
  source 1..75: mol_type = other DNA
ggcgatcaggtcgtcatggacgtttacatcaacaaggctgttgctgagacgaaacctgatggcaagcgcctgatt

SEQ ID NO: 302727 - DNA, 75 bp, synthetic construct
  source 1..75: mol_type = other DNA
tgatatgccattccaggatgatccaaccgatgaatgggcgatccgtgatggtgactggaagatgattatcgatcg

SEQ ID NO: 302728 - DNA, 75 bp, synthetic construct
  source 1..75: mol_type = other DNA
agctatttacaagtcaggctattaatgctgttgcagatggcgatttttccttactccatgagttaataggtaatg

SEQ ID NO: 302729 - DNA, 75 bp, synthetic construct
  source 1..75: mol_type = other DNA
tcatggtattgaggtagcggataaactgcgtaatcggtggcttggttcaaaagccgatggatataatccactgct

SEQ ID NO: 302730 - DNA, 75 bp, synthetic construct
  source 1..75: mol_type = other DNA
gaagacttttataagaatacagccagtttcatgggatctttctttgagccagtggataagaagacctcacaggta

SEQ ID NO: 302731 - DNA, 75 bp, synthetic construct
  source 1..75: mol_type = other DNA
acttctttctgatccaaatctaatggagtcaatgggtaaagccggtcaacagttcgtggctgataactttgattt

SEQ ID NO: 302732 - DNA, 75 bp, synthetic construct
  source 1..75: mol_type = other DNA
aacaaaattgtatttgactataatgatagtggagtctcttgttttaagaggaaagtttataagttttttaatgtc

SEQ ID NO: 302733 - DNA, 75 bp, synthetic construct
  source 1..75: mol_type = other DNA
gaagaaaatattcttccggatgaatcattcaactggttgaaaaagaatgagagagccacattctggttatgggca

SEQ ID NO: 302734 - DNA, 75 bp, synthetic construct
  source 1..75: mol_type = other DNA
cccggacaacgagttagtaataggggctagtgactacgaacacatcaagacatgggtgttcgaggctctggctgc

SEQ ID NO: 302735 - DNA, 75 bp, synthetic construct
  source 1..75: mol_type = other DNA
tctaataaatgcatatgcaaaactacatcgacaacattatggttatccacttaaaataataggggatggcccatt

SEQ ID NO: 302736 - DNA, 75 bp, synthetic construct
  source 1..75: mol_type = other DNA
acatattcattttggtgtcgacgctgtagttaactggtcaacctttaagcaattcaaaaagcctattgttattac

SEQ ID NO: 302737 - DNA, 75 bp, synthetic construct
  source 1..75: mol_type = other DNA
aatttttatcagtatccgttgaatccagttacgaatacagatcctctggggttagaagtttttcctagaccattc

SEQ ID NO: 302738 - DNA, 75 bp, synthetic construct
  source 1..75: mol_type = other DNA
ccgaactcgccagactgctcgacctcgatgaagaaatcatcatccagtgggaaagcggagagcacgaaccaacca

SEQ ID NO: 302739 - DNA, 75 bp, synthetic construct
  source 1..75: mol_type = other DNA
ccatctgcggcaattaatatggttcgaaaacacgcgaccagtcgtgaatttaaaggcgatgtctcggcggaataa

SEQ ID NO: 302740 - DNA, 75 bp, synthetic construct
  source 1..75: mol_type = other DNA
gattcaaatcaaagataatactttgaaaagtaatgaagaatatctaaccactgaagacgaaagccatgctgtgaa

SEQ ID NO: 302741 - DNA, 75 bp, synthetic construct
  source 1..75: mol_type = other DNA
gcaactggattttatcgacctgacagccttcggtacggcgcttgtcggttttttgcctcagacctcgccggaagc

SEQ ID NO: 302742 - DNA, 75 bp, synthetic construct
  source 1..75: mol_type = other DNA
actgtctcgaagaactgaaaaaccttggcagcctcattacactaatagcaaaagcaacaccagatgctacgctct

SEQ ID NO: 302743 - DNA, 75 bp, synthetic construct
  source 1..75: mol_type = other DNA
ccaaaaagtgaggagcagcaacaccatgacgcatctcaacaagtttgccccttatctcgcgaagctcttctgcgg

SEQ ID NO: 302744 - DNA, 75 bp, synthetic construct
  source 1..75: mol_type = other DNA
tttctgaaattgttacaagcaaaatagacctcaatcaagctgtagctcaaggtcaagagatgactgatactctta

SEQ ID NO: 302745 - DNA, 75 bp, synthetic construct
  source 1..75: mol_type = other DNA
atgaatacaaacaggagtcgataagttttatttatcatatgttacccaccccatttttaatggttcttcgcataa

SEQ ID NO: 302746 - DNA, 75 bp, synthetic construct
  source 1..75: mol_type = other DNA
ccgcgacagcttccgccagaaggatgcggaccttcagtctcagtatcagaccggggatatcagtgaggattttta

SEQ ID NO: 302747 - DNA, 75 bp, synthetic construct
  source 1..75: mol_type = other DNA
cggaaactggacaaccgctcagtttattgactggctagagtctcagggagcctttaatcatccttactggatgtg

SEQ ID NO: 302748 - DNA, 75 bp, synthetic construct
  source 1..75: mol_type = other DNA
tttgaagcattgggtgatgaggtgaattttacggtatctaattcgatggacgagttttcaagcaggtatgcgtga

SEQ ID NO: 302749 - DNA, 75 bp, synthetic construct
  source 1..75: mol_type = other DNA
atgtccagttgagttagacaatgacagacttaaatttctgaccagagacgtaacaaaaaaacaaatttatacttt

SEQ ID NO: 302750 - DNA, 75 bp, synthetic construct
  source 1..75: mol_type = other DNA
gaacgataccagccagacttcgccgataagacgacaaacggaagtgagaaccgatactggatcctgcgtaacatg

SEQ ID NO: 302751 - DNA, 75 bp, synthetic construct
  source 1..75: mol_type = other DNA
gttgatattgaagtgatacgtaagataaataataacacatatgccatttattactatttgccagttgttctttgc

SEQ ID NO: 302752 - DNA, 75 bp, synthetic construct
  source 1..75: mol_type = other DNA
ggaaaactgcatctggcacaggggatgtgggagctgattgataacagccagcttgatgatgagatggcggagatg

SEQ ID NO: 302753 - DNA, 75 bp, synthetic construct
  source 1..75: mol_type = other DNA
gcaatgcaaccagcgatatttctgtttgatcaggaggtttctatttatctaaacatattatctgctcaattaaga

SEQ ID NO: 302754 - DNA, 75 bp, synthetic construct
  source 1..75: mol_type = other DNA
atgctatggactatcattagattaattatcgtggtatcgcttgtatttattactggaaaattcggtctatcaaga

SEQ ID NO: 302755 - DNA, 75 bp, synthetic construct
  source 1..75: mol_type = other DNA
ggcgctgcgttaacgcttacgtttctgccatcagtaatctttataaaaatgccacagatatttaagatattggat

SEQ ID NO: 302756 - DNA, 75 bp, synthetic construct
  source 1..75: mol_type = other DNA
cgaattcagtcaggcgtgctgagaggttgataccagcgctggaaaaacttgagtcgaaagggaaggtgcaactat

SEQ ID NO: 302757 - DNA, 75 bp, synthetic construct
  source 1..75: mol_type = other DNA
atgagcaacaaaaatgaaattaatcatgagcttaacctgaattttgatattctgccacgtcatatcaggcgatgg

SEQ ID NO: 302758 - DNA, 75 bp, synthetic construct
  source 1..75: mol_type = other DNA
acaatgggaaccatgatgactttttattttttaaaaataacagacttttatttaaaattgatgataaaaaagtca

SEQ ID NO: 302759 - DNA, 75 bp, synthetic construct
  source 1..75: mol_type = other DNA
agcaataagcctttatactactagttcaacaataatattaggtgcattatcaggaacaactgcagtgggatattt

SEQ ID NO: 302760 - DNA, 75 bp, synthetic construct
  source 1..75: mol_type = other DNA
gagctaaaggccctcgatgctggatcgtatgtttctggtatttatgcagatgagaaaatactcaattatgatgaa

SEQ ID NO: 302761 - DNA, 75 bp, synthetic construct
  source 1..75: mol_type = other DNA
cgaattcagtcaggtgtgctgagaggttgatgccagcgctggaaaaacttgagtcgagagggaaggtgcaattat

SEQ ID NO: 302762 - DNA, 75 bp, synthetic construct
  source 1..75: mol_type = other DNA
cgactctgcacgagtctgtgggcctggcggcagaagtgttcgaaggtagcattaccgacctgccgaacccgaaag

SEQ ID NO: 302763 - DNA, 75 bp, synthetic construct
  source 1..75: mol_type = other DNA
acatacgcggatgggcgcacgttgactaacggcacgaccacctggcaggtgcgggtggtcgatctggcaggcaac

SEQ ID NO: 302764 - DNA, 75 bp, synthetic construct
  source 1..75: mol_type = other DNA
cgtcgggcagaccgcgacgcaaaacgtggtggtcgataccaccagtcccgaagcggcgaaaagcatcaccattac

SEQ ID NO: 302765 - DNA, 75 bp, synthetic construct
  source 1..75: mol_type = other DNA
caagccgacaccggccttagcgccagcgactttatcaccagcgtcagcccggtagtggtcaatggctcgctcacc

SEQ ID NO: 302766 - DNA, 75 bp, synthetic construct
  source 1..75: mol_type = other DNA
agcgtcggcgttccggcggcggatgtcagtaactggcctgcgggaacgctgaacattaccgttagcggcgcgaac

SEQ ID NO: 302767 - DNA, 75 bp, synthetic construct
  source 1..75: mol_type = other DNA
cacagatcatcagcggatccgccacgggtgtggcaaccggtagcaccgtgacggtgactatcggcacaaatactt

SEQ ID NO: 302768 - DNA, 75 bp, synthetic construct
  source 1..75: mol_type = other DNA
ctccgatctggcagcgggcagcaacgtcacgctgaccataaatgggcaaacgtatgttgcggcggtgctggcgga

SEQ ID NO: 302769 - DNA, 75 bp, synthetic construct
  source 1..75: mol_type = other DNA
gaatgcaggcgccgtgctgacggttaccatcaacagtgtggcgtattccgccacggtacaggcggacgggagctg

SEQ ID NO: 302770 - DNA, 75 bp, synthetic construct
  source 1..75: mol_type = other DNA
accattaacacggtagcgggcgatgacatcattaacgccacggaacatgctcaggcgcagattatcagcggctcg

SEQ ID NO: 302771 - DNA, 75 bp, synthetic construct
  source 1..75: mol_type = other DNA
ggctggagcctgaccgttcccgccagcgcggtgagcagcctggcagatggcgcggcggaaatcaccgcgaccgtc

SEQ ID NO: 302772 - DNA, 75 bp, synthetic construct
  source 1..75: mol_type = other DNA
gtcggcgttccggcgacggatgtcagcaactggcctgcgggaacgctgaacattagcgttagcggcgcgaacagt

SEQ ID NO: 302773 - DNA, 75 bp, synthetic construct
  source 1..75: mol_type = other DNA
agctggagcgtcagcgtgccgacggcagatctcagcaatctgaccgccagccagtacaccgtcagcgcctcagtc

SEQ ID NO: 302774 - DNA, 75 bp, synthetic construct
  source 1..75: mol_type = other DNA
acattattaacgccaccgagcacgggcaggcgctggtgatttccggttccagcaccggtggagaagcgggggatg

SEQ ID NO: 302775 - DNA, 75 bp, synthetic construct
  source 1..75: mol_type = other DNA
taccgtcgccatcagcatgaacagcattaccagcgatgatgtgattaacgcagccgaaaaaggcgcggcattaac

SEQ ID NO: 302776 - DNA, 75 bp, synthetic construct
  source 1..75: mol_type = other DNA
gccgaaaatgctgaaaaccttcccgcagctgaagggcgtgaaaattgattaccgctggacgggcaacttcctgct

SEQ ID NO: 302777 - DNA, 75 bp, synthetic construct
  source 1..75: mol_type = other DNA
caactcgaactgctggacgccagtgccattcgccgtgaagttgccagcgatcgctacaccggtgcgctgctggat

SEQ ID NO: 302778 - DNA, 75 bp, synthetic construct
  source 1..75: mol_type = other DNA
accgctggacgggcaacttcctgctgaccctgtcacgcatgccgcagtttggtcgcctcgataccaacatctact

SEQ ID NO: 302779 - DNA, 75 bp, synthetic construct
  source 1..75: mol_type = other DNA
ttacaccacggtggtggatggttccggcaactggagtctgggcgttccggcctcggtggtcagtgggctggcgga

SEQ ID NO: 302780 - DNA, 75 bp, synthetic construct
  source 1..75: mol_type = other DNA
ggtcgcctcgataccaacatctattacatgcagggctacagcggccacggcgtcacctgtactcatctcgccgga

SEQ ID NO: 302781 - DNA, 75 bp, synthetic construct
  source 1..75: mol_type = other DNA
gaactgggaacgctacggcaataaacagctggagctgctggatgccaacgccattcgccgtgaagtagccagcga

SEQ ID NO: 302782 - DNA, 75 bp, synthetic construct
  source 1..75: mol_type = other DNA
aacctacacctctgaaccgggcggcgcggtagtggtcgatccggcgcacaacacctggtatgtacagttgccgga

SEQ ID NO: 302783 - DNA, 75 bp, synthetic construct
  source 1..75: mol_type = other DNA
gcgacaccacgcttaccgtgcgcggcgtgttgggcgcggcgctcggcgctaatgagttcgcacaaatcagtaccg

SEQ ID NO: 302784 - DNA, 75 bp, synthetic construct
  source 1..75: mol_type = other DNA
gaatgtcgggcagaccgcgacgcaaaatgtggtggtcgacaccaccagcccggaagcggcgaaaagtatcaccat

SEQ ID NO: 302785 - DNA, 75 bp, synthetic construct
  source 1..75: mol_type = other DNA
acgccgccagtgcgaataaatacgcgccattcgacacgctgaatgagtcgatttcctgcgacgtttgcgtggtcg

SEQ ID NO: 302786 - DNA, 75 bp, synthetic construct
  source 1..75: mol_type = other DNA
agagatccaagcatttattctgcacagcgtccagcaggcgcagatctccggcgtggttatccctaacgcgcttag

SEQ ID NO: 302787 - DNA, 75 bp, synthetic construct
  source 1..75: mol_type = other DNA
caggatcgacctggttcagcacacctacaacctgaacaactattacacgctatcttcgctcatcaaccaagggaa

SEQ ID NO: 302788 - DNA, 75 bp, synthetic construct
  source 1..75: mol_type = other DNA
cctcgactcgcacggaatgtggacggtgctggcaaaccagcaggtaatgcaatcgactgacccactcacctggtc

SEQ ID NO: 302789 - DNA, 75 bp, synthetic construct
  source 1..75: mol_type = other DNA
atgctgaaagagttggttgaacgcacgccaggttatcatggatggcaacaggaattctggcttgcgcattgtggc

SEQ ID NO: 302790 - DNA, 75 bp, synthetic construct
  source 1..75: mol_type = other DNA
gattacggacgggaaacacggcgggagtaccggctggaccggaacggccaggtcacggcggtgacagcctcaggc

SEQ ID NO: 302791 - DNA, 75 bp, synthetic construct
  source 1..75: mol_type = other DNA
attcctgtaccaaatgtattaccgggtatattatccattgtgtttatgtatgtcggatatctggtggtgaaatac

SEQ ID NO: 302792 - DNA, 75 bp, synthetic construct
  source 1..75: mol_type = other DNA
taccattaagaaaatcagacagtctcagaaaagaaactctatgatcttggtactaacagggcaattagaagggat

SEQ ID NO: 302793 - DNA, 75 bp, synthetic construct
  source 1..75: mol_type = other DNA
aaatttcaattattcacgattatcgccagtcctggaaaaccagttacagcctggcggatatcctttttctgacga

SEQ ID NO: 302794 - DNA, 75 bp, synthetic construct
  source 1..75: mol_type = other DNA
gaaattctgatctagctaaatgcctgcaaaagggtggtgattgtcagggttatctcttccgctgtctccactgcg

SEQ ID NO: 302795 - DNA, 75 bp, synthetic construct
  source 1..75: mol_type = other DNA
taaatatcgccaagggggagtaagtactgataaaaaaaagcttaacattaaattggaaaatgatttcaataaact

SEQ ID NO: 302796 - DNA, 75 bp, synthetic construct
  source 1..75: mol_type = other DNA
gaacaaaggtgatatgctcacctcagaacaacacaggtgtcataatgaaaaaaagaaatttcagcgcagagttta

SEQ ID NO: 302797 - DNA, 75 bp, synthetic construct
  source 1..75: mol_type = other DNA
acgcatcatgagcggtactggctctgccagtggtggtttcagtgacaactacacgcacgttcaggtcggggtcga

SEQ ID NO: 302798 - DNA, 75 bp, synthetic construct
  source 1..75: mol_type = other DNA
atttacaatcgtgcggttacctattcccgtgccaaatgtattgccgggtatattatctattgtgtttatgtatgt

SEQ ID NO: 302799 - DNA, 75 bp, synthetic construct
  source 1..75: mol_type = other DNA
atgaaagatattttattttcttctggcgtcggttttggtattggtgctttatttacaatcgtgcggttacctatt

SEQ ID NO: 302800 - DNA, 75 bp, synthetic construct
  source 1..75: mol_type = other DNA
tgatatatgaagagaactatccagcgcaggctgcgtatgcagacatggcaaatgatgtcgaaggcatcattagat

SEQ ID NO: 302801 - DNA, 75 bp, synthetic construct
  source 1..75: mol_type = other DNA
gaagaccgcattattaaagatggttcttacaacatcgatcagggcgttggtgtgcgtgcaatcagtggtgaaaaa

SEQ ID NO: 302802 - DNA, 75 bp, synthetic construct
  source 1..75: mol_type = other DNA
ggcgctggcgctggcagggatgccgcccttcaacatttttcttagcgaatttatgaccgttaccgccggactggc

SEQ ID NO: 302803 - DNA, 75 bp, synthetic construct
  source 1..75: mol_type = other DNA
cagtctggcaaaaacgctgctgttctgcggttccggcaatgtactgctcaagtacggcacgcgcgatctcaacgt

SEQ ID NO: 302804 - DNA, 75 bp, synthetic construct
  source 1..75: mol_type = other DNA
cgcgatctcaacgtcgtctgcgggatgctcaaaatcatgccatttaccgccgtgctgtttggcggcggtgcgctg

SEQ ID NO: 302805 - DNA, 75 bp, synthetic construct
  source 1..75: mol_type = other DNA
gctgctggttgttaccagcaataacctgattgtgatgtgggcggcgatcgaagccaccaccttaagctcggcgtt

SEQ ID NO: 302806 - DNA, 75 bp, synthetic construct
  source 1..75: mol_type = other DNA
atgagttattctgtgatgttcgctttactcctgctcacgccgctgcttttttcgctgctctgttttgcctgccgg

SEQ ID NO: 302807 - DNA, 75 bp, synthetic construct
  source 1..75: mol_type = other DNA
atagcttagggatcacactgctgctgattctggcactctgggtggtccaaactgccgctgatgcgggagaaatat

SEQ ID NO: 302808 - DNA, 75 bp, synthetic construct
  source 1..75: mol_type = other DNA
aaggagtcacggacggtgaataaattatgggagcggcttcgtgatgagcatggagtagctacgtcaaaacttcgt

SEQ ID NO: 302809 - DNA, 75 bp, synthetic construct
  source 1..75: mol_type = other DNA
ttcgaagaatatcgacggccacgcgctggccggtgaactggacgacgaaagcggcaagccgctgaatgaaagcgc

SEQ ID NO: 302810 - DNA, 75 bp, synthetic construct
  source 1..75: mol_type = other DNA
accataacgccaaatggaatcattccaccgtcgcccaggcgcagcgctatttatgccgagtatggaaccgggcaa

SEQ ID NO: 302811 - DNA, 75 bp, synthetic construct
  source 1..75: mol_type = other DNA
aaagaactatgtgcaaaagatgatccattgtgtaaatggattaaagaagagttaccatcatcattcttcgaagat

SEQ ID NO: 302812 - DNA, 75 bp, synthetic construct
  source 1..75: mol_type = other DNA
gccaagcagcgaattagatgtcgcctggcgttctgccgtggaaaaaaccgaggccagatcggaggctgaaaaagc

SEQ ID NO: 302813 - DNA, 75 bp, synthetic construct
  source 1..75: mol_type = other DNA
accgggcaaccgccaaactgaaacgcgaagatttgcgcccttatggcttccgtgtcgccgagccgcatcacgatg

SEQ ID NO: 302814 - DNA, 75 bp, synthetic construct
  source 1..75: mol_type = other DNA
ggcgctggtgataaccggtagcagcagcgggctggcagcgggcgcggcgctgacggtggtgatcaataacgtcac

SEQ ID NO: 302815 - DNA, 75 bp, synthetic construct
  source 1..75: mol_type = other DNA
caaatcagcctcgacggcggtgtcacctggaccacgttaaccgttatcggcaccagctggagctatgccgatggt

SEQ ID NO: 302816 - DNA, 75 bp, synthetic construct
  source 1..75: mol_type = other DNA
aacggtagctggagcactaccgttccggcggcggatatggcgaccctgcgtgacggcgatgccagcgcccaggtg

SEQ ID NO: 302817 - DNA, 75 bp, synthetic construct
  source 1..75: mol_type = other DNA
gcgatgacattatcaatgccgctgaaatcgctgtggcgcagaccatcagcgggcaggtcacgggaactgcggctg

SEQ ID NO: 302818 - DNA, 75 bp, synthetic construct
  source 1..75: mol_type = other DNA
caataacggctacaccctgaccgccacggtcagcgatcaggcgggtaaccctggcagcgccagcaaaggtgtgac

SEQ ID NO: 302819 - DNA, 75 bp, synthetic construct
  source 1..75: mol_type = other DNA
ggcgtaccggcggcggatgttacggcgctcgctggcggtgtgcagaccattatcgccagcgtcagcgatcgggca

SEQ ID NO: 302820 - DNA, 75 bp, synthetic construct
  source 1..75: mol_type = other DNA
ggcacctggagcgtgaatgttccggcagcggatttaagcggattaaccgccagcagttacaccgtgaccgccacg

SEQ ID NO: 302821 - DNA, 75 bp, synthetic construct
  source 1..75: mol_type = other DNA
tgaccggcagcagcggcgataaccaactggaaggacgcggcggcaacgacacccttaacatcggaaacggcggtc

SEQ ID NO: 302822 - DNA, 75 bp, synthetic construct
  source 1..75: mol_type = other DNA
aacttaagctggagcgtcaccgttccggcagccgatctccaggcattgggcaatggtgatttgaccattacagcc

SEQ ID NO: 302823 - DNA, 75 bp, synthetic construct
  source 1..75: mol_type = other DNA
ccgccaacgttgacgcactggctgacggcaacgctacggtcaccgccagcgtgaacgatgttgccggtaacccga

SEQ ID NO: 302824 - DNA, 75 bp, synthetic construct
  source 1..75: mol_type = other DNA
gatcagcctgcgggtacggcgatcaccgttacgctgaacggacaaaactacagcgccaccaccgacgcctccggc

SEQ ID NO: 302825 - DNA, 75 bp, synthetic construct
  source 1..75: mol_type = other DNA
tgagcgttgtgctcaacggcaaaacctacacctccaccctggatgcctccggcaactggagcgttggcgttccgg

SEQ ID NO: 302826 - DNA, 75 bp, synthetic construct
  source 1..75: mol_type = other DNA
gcagcagcaatcacaccattactgtcgatctcagcgccccggcgatgggcattaatatcgattccctgcaagccg

SEQ ID NO: 302827 - DNA, 75 bp, synthetic construct
  source 1..75: mol_type = other DNA
gatgatccgatacagaacctgaaggactcatggctgattaaaaccgtcacgtttactgaaggtgataacggacgt

SEQ ID NO: 302828 - DNA, 75 bp, synthetic construct
  source 1..75: mol_type = other DNA
acggccagcaatgggacggatggaccgagatgtctgtaacttcctcactggaggctgttgccggggaatttgatc

SEQ ID NO: 302829 - DNA, 75 bp, synthetic construct
  source 1..75: mol_type = other DNA
tctcgagttcgtcgtggtgttattgcacaacaaattgaagaaatcgataatcaatatgttaagcatacattcgaa

SEQ ID NO: 302830 - DNA, 75 bp, synthetic construct
  source 1..75: mol_type = other DNA
aactacttcaaacatttgaggcatttccagaggaagatcaacagcaaatgcttaaagatatgaaggagaaaaaag

SEQ ID NO: 302831 - DNA, 75 bp, synthetic construct
  source 1..75: mol_type = other DNA
taattcagatagcagacgaagcgttatataccgcaaaaagacggggcagaaattgtgttgaactgtggaaacccg

SEQ ID NO: 302832 - DNA, 75 bp, synthetic construct
  source 1..75: mol_type = other DNA
ttatggggcgggataaaaccggcgatctcgttgacagctcagtggtgcataaatccggccagtggaaaggtgttc

SEQ ID NO: 302833 - DNA, 75 bp, synthetic construct
  source 1..75: mol_type = other DNA
aattcaaacgctcttacgatctcaacctgcggatcaaaaatatgctacccgatctctatgcagaagatcccgatt

SEQ ID NO: 302834 - DNA, 75 bp, synthetic construct
  source 1..75: mol_type = other DNA
caggtaacgggcgcagcggcgggcgacacggtgaccgtcacgctcggcggagcgacttacaccgccacggtgcag

SEQ ID NO: 302835 - DNA, 75 bp, synthetic construct
  source 1..75: mol_type = other DNA
gcagacggcctcaactggagttatgttgacggacgcacgctcaccaacggcaccaccacctggcaggtgcgggtg

SEQ ID NO: 302836 - DNA, 75 bp, synthetic construct
  source 1..75: mol_type = other DNA
ggtgcggttgaatgtggaatcgcgcggtgatgtaccgctgatggaagaaaagacaaaacttatccttgagttact

SEQ ID NO: 302837 - DNA, 75 bp, synthetic construct
  source 1..75: mol_type = other DNA
tcggcacgtttacggcagacaaattgcgcgtgaccgatatcactagcggtgcgacatatccggtgctgattgaaa

SEQ ID NO: 302838 - DNA, 75 bp, synthetic construct
  source 1..75: mol_type = other DNA
tctgccctgccgcaaggggttactctggaaggaaatgccggtcataacctgctggcatcgttctacgtacagagc

SEQ ID NO: 302839 - DNA, 75 bp, synthetic construct
  source 1..75: mol_type = other DNA
cgatctgtgatgttattatccatcatagtttatatatggtggatgtatatgtatttgggtcagcattaaagagtt

SEQ ID NO: 302840 - DNA, 75 bp, synthetic construct
  source 1..75: mol_type = other DNA
gctggatgcgcaggcgggaaacatcggtgattttgtcaaagtcacccagagcggcagcgacaccatcgtgcagat

SEQ ID NO: 302841 - DNA, 75 bp, synthetic construct
  source 1..75: mol_type = other DNA
aggtatttccggctcgaattttaacgacactctgaccggcagcagcggcgataaccaactggaagggcgcggcgg

SEQ ID NO: 302842 - DNA, 75 bp, synthetic construct
  source 1..75: mol_type = other DNA
acacctcgacatttaccaatatcgaaggtatttccggctcgaattttaacgacactctgaccggcagcagcggcg

SEQ ID NO: 302843 - DNA, 75 bp, synthetic construct
  source 1..75: mol_type = other DNA
gccgttgaccatcagcggcggcagtacggggctggcgacgggcgcgcaggtcaccgtcacgctcaacggtcacaa

SEQ ID NO: 302844 - DNA, 75 bp, synthetic construct
  source 1..75: mol_type = other DNA
gggatatcaccgttgacgccaatctgcctggtctacgggtcgatacggtggcgggtgatgatgtggtcaatatca

SEQ ID NO: 302845 - DNA, 75 bp, synthetic construct
  source 1..75: mol_type = other DNA
cggcagcaccagcgggattgaaagcgggcaaaccgtcaccgtcacctttggcggcaaaacctacaccgcaagcgt

SEQ ID NO: 302846 - DNA, 75 bp, synthetic construct
  source 1..75: mol_type = other DNA
ggtcagcgcctccgctcaggacagtgccggaaacagcgccacagcctcgcgcagcgtggcggtggatctcaccgc

SEQ ID NO: 302847 - DNA, 75 bp, synthetic construct
  source 1..75: mol_type = other DNA
aacggcaacagcgccaccactactcacgcttacagcgtcgatgccagcgcgccaacggtgaccattaacaccatt

SEQ ID NO: 302848 - DNA, 75 bp, synthetic construct
  source 1..75: mol_type = other DNA
cgctccggtgctcgccattaacaccattgccgtcgatgacatcatcaacgccacggagaaaggcgcggatctggc

SEQ ID NO: 302849 - DNA, 75 bp, synthetic construct
  source 1..75: mol_type = other DNA
cgccagccagtttagcctggcggtggactggaaccatgacggcctgatggatatcgcccgtatcgcccagaccgg

SEQ ID NO: 302850 - DNA, 75 bp, synthetic construct
  source 1..75: mol_type = other DNA
gcgcctggcctgcgggatcggtgacgattgcggcgagcggtagcacctctgccggaaatccggtaagcgttacgc

SEQ ID NO: 302851 - DNA, 75 bp, synthetic construct
  source 1..75: mol_type = other DNA
gagggcgacggctatctcgacttctggattggcgacgcgggcgggccggactccaacaccttcctgtggaacaac

SEQ ID NO: 302852 - DNA, 75 bp, synthetic construct
  source 1..75: mol_type = other DNA
agcaattccgccagtcataatgtgcaggtcaataccgcgctacctggcgtcacccttaatccggtggcgaccgac

SEQ ID NO: 302853 - DNA, 75 bp, synthetic construct
  source 1..75: mol_type = other DNA
accaacggtacgcagtggacttacaccgacagccgcacgctgaccgacggcagctacgtttaccaggtgcgggtg

SEQ ID NO: 302854 - DNA, 75 bp, synthetic construct
  source 1..75: mol_type = other DNA
gctaatgagttcgcacaaatcagtaccgacaacggcgcaacctgggtaaacgtgacgctggcagcagacggcctc

SEQ ID NO: 302855 - DNA, 75 bp, synthetic construct
  source 1..75: mol_type = other DNA
gcggggaatccgggcagcgccactcataacgtcaccctcaatggcgacgtgccgacggtgaccattaataccttc

SEQ ID NO: 302856 - DNA, 75 bp, synthetic construct
  source 1..75: mol_type = other DNA
ggaacgtggctggcaaacggcggcatggacgtggttgatttccgcctctcgacggtgggcgtgaccgcgaactta

SEQ ID NO: 302857 - DNA, 75 bp, synthetic construct
  source 1..75: mol_type = other DNA
tcttcctgccagccagccagggaagagctaactacggctccctgttattcaacaccaacggcgtgctgggcagtc

SEQ ID NO: 302858 - DNA, 75 bp, synthetic construct
  source 1..75: mol_type = other DNA
cgatacgattaaccccaccgccacgccgaccattgtgtcgtacactgatgacgtcgggcagcggcaggggacatt

SEQ ID NO: 302859 - DNA, 75 bp, synthetic construct
  source 1..75: mol_type = other DNA
cacgggcaggcgctggtcgtcagcggaaccagcacgggcgcggcggcgggcgatgtggtcacggttaacctgaac

SEQ ID NO: 302860 - DNA, 75 bp, synthetic construct
  source 1..75: mol_type = other DNA
gcgtcgatgccacggcacccacgctttccatcaataccattgccaccgacgatattcttaacgccgctgaggcgg

SEQ ID NO: 302861 - DNA, 75 bp, synthetic construct
  source 1..75: mol_type = other DNA
cgatggcacgtggagcgtcggtgttccggcggcagatgtgggcaactggcctgcggggacggtgaatattacggt

SEQ ID NO: 302862 - DNA, 75 bp, synthetic construct
  source 1..75: mol_type = other DNA
agcgtgaatgtgccggcggcagacgttgcggcgcttgccgatggcaccagctatacggttagcgcctccgcgcag

SEQ ID NO: 302863 - DNA, 75 bp, synthetic construct
  source 1..75: mol_type = other DNA
gactatcagcgccaccatcaccgatagtgcaggcaacagcagcacgcagacgcacaatgtgcaggtcaatacggc

SEQ ID NO: 302864 - DNA, 75 bp, synthetic construct
  source 1..75: mol_type = other DNA
tatcagcggcaccgccacgggtgcggtggcgggcgaccgcctggtggtgaccatcgccgggcagcagtatgtcac

SEQ ID NO: 302865 - DNA, 75 bp, synthetic construct
  source 1..75: mol_type = other DNA
gtggtggtggccaggccgtttgaagggcagggagatgatatgcttaccgcatatattgtcagccaagcctcattg

SEQ ID NO: 302866 - DNA, 75 bp, synthetic construct
  source 1..75: mol_type = other DNA
tgcacgagtcgggaaaaatagagtggcttggacgtggtgaggaggaaattaaaattcgcggtaatcgtatcggtg

SEQ ID NO: 302867 - DNA, 75 bp, synthetic construct
  source 1..75: mol_type = other DNA
agcgcattgaattcggcatggctaaatgaatccgccaccctgtttcgtcgcaagtattaccagaatggcgcgcac

SEQ ID NO: 302868 - DNA, 75 bp, synthetic construct
  source 1..75: mol_type = other DNA
gcgttgcagcagaagccgaaagtttcgatttcaataaatctagcattcatccagatatatacatgaacgagatcc

SEQ ID NO: 302869 - DNA, 75 bp, synthetic construct
  source 1..75: mol_type = other DNA
gggttatataacacgacctcttactgacgaagatggctttttggttgaagaaacaattgatgtattaaagcgaat

SEQ ID NO: 302870 - DNA, 75 bp, synthetic construct
  source 1..75: mol_type = other DNA
gcaaaaattgccggaggatcgtgaatccattttttggctaaatgtaaaatccattcctgggatgtcagaagagtc

SEQ ID NO: 302871 - DNA, 75 bp, synthetic construct
  source 1..75: mol_type = other DNA
gatattcatgcttatcgctatgttatgaaacccacactgccagtgcgtcgcgatagcccgaaaaaggctatcact

SEQ ID NO: 302872 - DNA, 75 bp, synthetic construct
  source 1..75: mol_type = other DNA
acaggagcagaaagatctgcgtatccgtcagattcaggaagcgttgcagtatgcgaatcaggcgcaggtcgcaaa

SEQ ID NO: 302873 - DNA, 75 bp, synthetic construct
  source 1..75: mol_type = other DNA
attcaggaagcgttgcagtatgcgaatcaggcgcaggtgacaaagccgcagattcagcagacacaggacgtgacc

SEQ ID NO: 302874 - DNA, 75 bp, synthetic construct
  source 1..75: mol_type = other DNA
acgccggtcattacaacccaggaaaccgatgacaaaataacatggtcactgacaggctataacacggtagcaaac

SEQ ID NO: 302875 - DNA, 75 bp, synthetic construct
  source 1..75: mol_type = other DNA
ccgtaatgggctttgataatctggttggcgtcgggcatctgtttttaccgccgctgaccacaattcagcttccac

SEQ ID NO: 302876 - DNA, 75 bp, synthetic construct
  source 1..75: mol_type = other DNA
ctgctgggcgaaaatgaagaagccggtgaagaagacaccgatttcggtatgggaagccttggggcgctcaaaatg

SEQ ID NO: 302877 - DNA, 75 bp, synthetic construct
  source 1..75: mol_type = other DNA
tctgacgggttataccggtattcagataaccgataataactataccgctggtttgttagggaaggtgcgaataag

SEQ ID NO: 302878 - DNA, 75 bp, synthetic construct
  source 1..75: mol_type = other DNA
gtcttctttatcttctccggccagtccccgttctgtttcctcttctcagtttttccccgacacgctgcccaccgg

SEQ ID NO: 302879 - DNA, 75 bp, synthetic construct
  source 1..75: mol_type = other DNA
atagacaagaacgagggaaaaggtactcatccaaatattgttactggcaaatccatagcttctgataataacaaa

SEQ ID NO: 302880 - DNA, 75 bp, synthetic construct
  source 1..75: mol_type = other DNA
ctgtacattcttttaattctgatactgttattggcagtgataatgttgctatagacaagaacgagggaaaaggta

SEQ ID NO: 302881 - DNA, 75 bp, synthetic construct
  source 1..75: mol_type = other DNA
agaaaagcttggtctcgaagcttcgctatacagcactcattccatgagaagaacaaaaccttacctgatatacaa

SEQ ID NO: 302882 - DNA, 75 bp, synthetic construct
  source 1..75: mol_type = other DNA
ggtagccctgtgcaatttgagataaccaaagggacaagagaagctgttgctgcattgataaagcttggcaatttg

SEQ ID NO: 302883 - DNA, 75 bp, synthetic construct
  source 1..75: mol_type = other DNA
atggaacatgagcttcattataatggtatcgacaccgctaaagagaaactggatgtcgatgtactgtgtactgat

SEQ ID NO: 302884 - DNA, 75 bp, synthetic construct
  source 1..75: mol_type = other DNA
actgaaaactctccatttaaacaagaatctattgaaaatagtaaatttactttcatagatttgtttgctggtatt

SEQ ID NO: 302885 - DNA, 75 bp, synthetic construct
  source 1..75: mol_type = other DNA
acggcggcagtgtctatcggcctggcgagttataccgggatgccggtttccactactcacgtactctcctcttct

SEQ ID NO: 302886 - DNA, 75 bp, synthetic construct
  source 1..75: mol_type = other DNA
ccagctactactacggtctgaataactatctaacgggttatactggtattcagatggatttgcccctatatttcc

SEQ ID NO: 302887 - DNA, 75 bp, synthetic construct
  source 1..75: mol_type = other DNA
acatcaaaaaaaggaatgaaaaaaaaaactatacttttgactttaataataggaggttatttatatatctctccc

SEQ ID NO: 302888 - DNA, 75 bp, synthetic construct
  source 1..75: mol_type = other DNA
gacgcctcaattattcactggaggttgctaatgcggctggaataaaaaaacctgtatacagcaatggtcagatta

SEQ ID NO: 302889 - DNA, 75 bp, synthetic construct
  source 1..75: mol_type = other DNA
ttgaaagaaacagagagttcatataataaaaagttcaattctgattacaaaagtaataatcagcagacctcattt

SEQ ID NO: 302890 - DNA, 75 bp, synthetic construct
  source 1..75: mol_type = other DNA
attcctttgcggctggtctgcggggatgacattaccgcaggcgatggcgcagggaacggcgtgcgcggcgaaaac

SEQ ID NO: 302891 - DNA, 75 bp, synthetic construct
  source 1..75: mol_type = other DNA
tggatagctgggggcgagttgatgttcttatcaataatgcgggcgttatgccgctttcaccgcttgcagcaggaa

SEQ ID NO: 302892 - DNA, 75 bp, synthetic construct
  source 1..75: mol_type = other DNA
acactctgacattacaataagtattgatgctgacttacaagacgatacatcagttatagaaaatatggttgacga

SEQ ID NO: 302893 - DNA, 75 bp, synthetic construct
  source 1..75: mol_type = other DNA
caggaatttaatttgcatgcgcatctttttctggtacccggaaacgagcttcgactttctgggctatacattccg

SEQ ID NO: 302894 - DNA, 75 bp, synthetic construct
  source 1..75: mol_type = other DNA
agtcataaaaatgggatgaacttagatatgcgttatttaagaaaagatgaatcaggtaatggaattcatctcaac

SEQ ID NO: 302895 - DNA, 75 bp, synthetic construct
  source 1..75: mol_type = other DNA
ggaaagaccaatattaaaacatattgaacacttgagaaaccatcatcatcatatacatgttcaaggatataatcc

SEQ ID NO: 302896 - DNA, 75 bp, synthetic construct
  source 1..75: mol_type = other DNA
tatcgtagcgttggttgatgtcctgcattcaaaagagatccaggactggatccgtactaaatataaaggtgcggt

SEQ ID NO: 302897 - DNA, 75 bp, synthetic construct
  source 1..75: mol_type = other DNA
tagattcacagaaagtcgagaattgtgtgttgtggttaacggtaatattggtgctaaggtagtttctccttataa

SEQ ID NO: 302898 - DNA, 75 bp, synthetic construct
  source 1..75: mol_type = other DNA
gaaagttatatgtatttggggtatacatctttgggagcacgcgcaatcattacaaatggtaaaggcactaaaata

SEQ ID NO: 302899 - DNA, 75 bp, synthetic construct
  source 1..75: mol_type = other DNA
ttcttcaccatatgaaaaacaagtgtactctcatgtccgtgtctgtccctgaattgtcacttgagcttaaagctg

SEQ ID NO: 302900 - DNA, 75 bp, synthetic construct
  source 1..75: mol_type = other DNA
gggattatcaaacgctgatacagacgtaactgttagtattgatgcagacctgcaagatgatataagttgcattga

SEQ ID NO: 302901 - DNA, 75 bp, synthetic construct
  source 1..75: mol_type = other DNA
gatgcagcgaacagtttcttcccaaatgtccaggaggatggaaccccgtataaattcgatctgccttttggattc

SEQ ID NO: 302902 - DNA, 75 bp, synthetic construct
  source 1..75: mol_type = other DNA
ccatccttgcggcacttcacagaggtgacctactacgctttggcattggccacagctatccagcaagaggggctt

SEQ ID NO: 302903 - DNA, 75 bp, synthetic construct
  source 1..75: mol_type = other DNA
cgacgttcgccgctttgctgacctgatggacaagctgggcgacacgatggcagaaacctacgccggaagaacggg

SEQ ID NO: 302904 - DNA, 75 bp, synthetic construct
  source 1..75: mol_type = other DNA
tcttacgatgcaggccggcacaagcctgagtctggagcagaatagcacattggcaggacgtattgtgggagatgg

SEQ ID NO: 302905 - DNA, 75 bp, synthetic construct
  source 1..75: mol_type = other DNA
aacgcagtgagcaaaccatcaggaggctactggctttttttacagcagggggccacggcaacggcttcagggaaa

SEQ ID NO: 302906 - DNA, 75 bp, synthetic construct
  source 1..75: mol_type = other DNA
cagtgaaggtgagcgggggagttccacgggtaaagtcacggaaagcgggggtaaagcaaaagagaaaatcggggt

SEQ ID NO: 302907 - DNA, 75 bp, synthetic construct
  source 1..75: mol_type = other DNA
atgacgtacaaatcagttaagcacgggctgccgcgctcgttcacccgcgtctgggtgatgaccgacaccgggcgg

SEQ ID NO: 302908 - DNA, 75 bp, synthetic construct
  source 1..75: mol_type = other DNA
agttgttcatacaggcagtggtgatgccagatttacactgaacggtggaaaggttgatgcaggtacatgggaata

SEQ ID NO: 302909 - DNA, 75 bp, synthetic construct
  source 1..75: mol_type = other DNA
gagactccactgttggcgaacttacaatggataatggcactgttcattttcattctccacagtcagaaaactggc

SEQ ID NO: 302910 - DNA, 75 bp, synthetic construct
  source 1..75: mol_type = other DNA
cctatgaaatatcgcagcgaaaatatattgttacgaattccgctgattatgataaatattgtgacatagtcaaaa

SEQ ID NO: 302911 - DNA, 75 bp, synthetic construct
  source 1..75: mol_type = other DNA
gcatttatgacgagatcggcgggtacggtgtaaaagcatcggcacttactgacgagatcaacgcgtgtggtaatg

SEQ ID NO: 302912 - DNA, 75 bp, synthetic construct
  source 1..75: mol_type = other DNA
atggcaatgagtgtaaggctaacggcttcgcagatgaggttatacccgcgattacagcaatggcccgaattgaat

SEQ ID NO: 302913 - DNA, 75 bp, synthetic construct
  source 1..75: mol_type = other DNA
aggtggcagaatcggatgccagcctgttgtctcgccttgcccggacgtataacgccgtcagtaaacctgccggag

SEQ ID NO: 302914 - DNA, 75 bp, synthetic construct
  source 1..75: mol_type = other DNA
gatttacgctgaatctgtcactgaccacggatatttctgcaaaggggaaagccagtggcaagaaaaaaggcgtca

SEQ ID NO: 302915 - DNA, 75 bp, synthetic construct
  source 1..75: mol_type = other DNA
tattgttacgaatcccgatgattatgataaatattcttacatggttaaaaggatagtaatagatggtcataatta

SEQ ID NO: 302916 - DNA, 75 bp, synthetic construct
  source 1..75: mol_type = other DNA
gcgccaactttgatcgcagaatacccactgttgttcgagaattagagtcgatttcggagtcagttgaagaattcc

SEQ ID NO: 302917 - DNA, 75 bp, synthetic construct
  source 1..75: mol_type = other DNA
ttccattagttgtcctttccgggcaggtagcgacctcgttgataggttacgatgcctttcaggagtgcgacatgg

SEQ ID NO: 302918 - DNA, 75 bp, synthetic construct
  source 1..75: mol_type = other DNA
ttctggaatatcgcaaaaaagaactggttcgcctgaccctgacagaccccgtgacagggaagtcaggagaagtga

SEQ ID NO: 302919 - DNA, 75 bp, synthetic construct
  source 1..75: mol_type = other DNA
cgatattatcattatttacactattaccgtttataatagcatccgggacatgttttattaaattctcgattgttt

SEQ ID NO: 302920 - DNA, 75 bp, synthetic construct
  source 1..75: mol_type = other DNA
gtgcattttattggcgacacagcggcggcaaaaattatcgagttgacgcctgtcccagacagcataatcgccggt

SEQ ID NO: 302921 - DNA, 75 bp, synthetic construct
  source 1..75: mol_type = other DNA
agcatcgctttgctttatttgatttttttaaaaacgggaaacgaaaaaaacggcatttatggcaattgagttcag

SEQ ID NO: 302922 - DNA, 75 bp, synthetic construct
  source 1..75: mol_type = other DNA
ttcgtgctcaattacaccctatgtcgtttttgaaaaatattatagtattgattctggtatgaacatttttggcag

SEQ ID NO: 302923 - DNA, 75 bp, synthetic construct
  source 1..75: mol_type = other DNA
ttatgaatgtgtctctaaatataatgcagcaactgattaatacggtatatacctttatcatacccccattaatta

SEQ ID NO: 302924 - DNA, 75 bp, synthetic construct
  source 1..75: mol_type = other DNA
aaataccccctgaaaagaaaggaaatgacaggcgctgaaaacgggctttttggcctctgccgtttcctttctctg

SEQ ID NO: 302925 - DNA, 75 bp, synthetic construct
  source 1..75: mol_type = other DNA
accgcaaaaaagaactggttcgcctgaccctgacagaccccgtgacagggaagtcaggagaagtgaaatcattgg

SEQ ID NO: 302926 - DNA, 75 bp, synthetic construct
  source 1..75: mol_type = other DNA
cagtatccattgaatccaactactaagatagatccgttgggtctctccggagaagattccatagagcagtcaggt

SEQ ID NO: 302927 - DNA, 75 bp, synthetic construct
  source 1..75: mol_type = other DNA
ggggaggctggagcgggaactgcgcgcgggtgcggtgagtgcggagagtgaggcatggcttcagcagtgcgggct

SEQ ID NO: 302928 - DNA, 75 bp, synthetic construct
  source 1..75: mol_type = other DNA
cggagttggttagcttttttgaaaagattcagaaggtgaatagttctgaagataatgaagagataatcgatgatg

SEQ ID NO: 302929 - DNA, 75 bp, synthetic construct
  source 1..75: mol_type = other DNA
tctggacggtgtcgtgaagctgaaccgttttgaaagtaacgtagccggtaaaatgagcagcggtggagccgccaa

SEQ ID NO: 302930 - DNA, 75 bp, synthetic construct
  source 1..75: mol_type = other DNA
ctgatgcgacccgaatagataatggcggcgttatggatgttgccggaaacgcgacaaataccataattaatggtg

SEQ ID NO: 302931 - DNA, 75 bp, synthetic construct
  source 1..75: mol_type = other DNA
tttgaaagtaacgtagccggtaaaatgagcagcggtggagccgccaacggcagttatcatagcaacgggctgggg

SEQ ID NO: 302932 - DNA, 75 bp, synthetic construct
  source 1..75: mol_type = other DNA
tgataaatgaatctttgaatgctattgttaattttgatgagtttgaggaggctaaattaaatattattgctgata

SEQ ID NO: 302933 - DNA, 75 bp, synthetic construct
  source 1..75: mol_type = other DNA
tatctggacggtatcgtgaagctgaaccgctttgaaagtaacgtagccggtaaaatgagcagcggtggagccgcc

SEQ ID NO: 302934 - DNA, 75 bp, synthetic construct
  source 1..75: mol_type = other DNA
gacgggagatcgtcaaaacaaaagccactgcgacaggcacgacgctcaccggcggcgaacaaatcgtcgagggtg

SEQ ID NO: 302935 - DNA, 75 bp, synthetic construct
  source 1..75: mol_type = other DNA
gactgtagacggcagccaaagagtagatgaacgaggtgcaacaaataatgctcatatcatcaatcacggcaatca

SEQ ID NO: 302936 - DNA, 75 bp, synthetic construct
  source 1..75: mol_type = other DNA
agcagcaatacaaattagaccttgagttggtcaagaagaaacctgcgaaccgtacagaggcaaaagcccatttgg

SEQ ID NO: 302937 - DNA, 75 bp, synthetic construct
  source 1..75: mol_type = other DNA
aattctgccgcaaaaagcgccaaagaatcactggatatagccaatgcaattcggtttggtgaaggggttgtggag

SEQ ID NO: 302938 - DNA, 75 bp, synthetic construct
  source 1..75: mol_type = other DNA
gaatatatcaggcaggtattaaagcctcattcagcagttcgttaagcgggcatctcggggtggggtatagccatg

SEQ ID NO: 302939 - DNA, 75 bp, synthetic construct
  source 1..75: mol_type = other DNA
tggcagcaacattaccgttggtatttgatgctgagctaaacagtattcgcgagcggttgaacataatgaaagcga

SEQ ID NO: 302940 - DNA, 75 bp, synthetic construct
  source 1..75: mol_type = other DNA
aaccgtggagtcagacaccacttccgccaaaacacaggtcaatgcgggcggtcgggagatcgtcaaaacaaaagc

SEQ ID NO: 302941 - DNA, 75 bp, synthetic construct
  source 1..75: mol_type = other DNA
atgctctgcggcttcgatgatgatcttgccgcacagacaacgcaggccagcaaccgtatccgcggccttctgacc

SEQ ID NO: 302942 - DNA, 75 bp, synthetic construct
  source 1..75: mol_type = other DNA
agaatggaatattagcgcagagtgatatattacgcatacaggagtcagcaagacaacaaaccagagattgtatga

SEQ ID NO: 302943 - DNA, 75 bp, synthetic construct
  source 1..75: mol_type = other DNA
gaaaattggcagcaaaatgcgttacaagcattaaggtctgataaagaggggttaactcctgaaaaattattagtc

SEQ ID NO: 302944 - DNA, 75 bp, synthetic construct
  source 1..75: mol_type = other DNA
tctgttgagaagaaggagccttttaaaaactgatagaggagttttgcaggggggcattttattttttaaaggcgt

SEQ ID NO: 302945 - DNA, 75 bp, synthetic construct
  source 1..75: mol_type = other DNA
ctgaacggtttacaccagctatccctgccgcagatttttagttatatccatgaggacgtcagctacgtcctggaa

SEQ ID NO: 302946 - DNA, 75 bp, synthetic construct
  source 1..75: mol_type = other DNA
gtgctgggcttagacactgctacagcaaaggacttgtttctcatcaagatttaaaaccagaaaatatatttattc

SEQ ID NO: 302947 - DNA, 75 bp, synthetic construct
  source 1..75: mol_type = other DNA
tatcggtaccttcgggccgccaaagacagatgcaggctaccggacaataaagctgctggaacctgcgttggaagc

SEQ ID NO: 302948 - DNA, 75 bp, synthetic construct
  source 1..75: mol_type = other DNA
tggcgctaataaatctggtaagtcacattctgttgaatgctgtgacagtgccttaccgagagagcgaaattgtgg

SEQ ID NO: 302949 - DNA, 75 bp, synthetic construct
  source 1..75: mol_type = other DNA
gttttatttttaacgctcccagcactgtgcttgatgagttcacccagattttatttatgtggatgattttacttg

SEQ ID NO: 302950 - DNA, 75 bp, synthetic construct
  source 1..75: mol_type = other DNA
tggaatttttatcagtatccgctgaatccggttcagtatatagattcaatgggactggcatcaaaatatggacac

SEQ ID NO: 302951 - DNA, 75 bp, synthetic construct
  source 1..75: mol_type = other DNA
tgcctgttacggggaagatagccatcggattggtcattttacgtttcgtatgcaggcggcaggacttatgcggca

SEQ ID NO: 302952 - DNA, 75 bp, synthetic construct
  source 1..75: mol_type = other DNA
tcacaccttgttttgaaaatggtaaggcagcatttgttgattttcttgcagaagagagtatagctgtgggatcca

SEQ ID NO: 302953 - DNA, 75 bp, synthetic construct
  source 1..75: mol_type = other DNA
tcggcctgggtgttgaatttgctctggccgatgttcacaccattgttgtcgcaaaaataacgtctgtaaatgaca

SEQ ID NO: 302954 - DNA, 75 bp, synthetic construct
  source 1..75: mol_type = other DNA
atcaccgtgagcaccatgctgctgaaagtgagcagcattgacggcaatactaaactggacgccctggatatcgat

SEQ ID NO: 302955 - DNA, 75 bp, synthetic construct
  source 1..75: mol_type = other DNA
ataccctctggcctcttattctgacgagcgcgtgtcgaggagtattcccccttttctccaggctgtttctttact

SEQ ID NO: 302956 - DNA, 75 bp, synthetic construct
  source 1..75: mol_type = other DNA
ccagtacatcaattactatttttcctgtcttacaaaatacagtacaggcaagcgagattattaaatataacaatc

SEQ ID NO: 302957 - DNA, 75 bp, synthetic construct
  source 1..75: mol_type = other DNA
ctaaaacgggtctatttacagacgggccaacgtatcatgagaagtacaggtattcaatactatgagattcagttt

SEQ ID NO: 302958 - DNA, 75 bp, synthetic construct
  source 1..75: mol_type = other DNA
aattctggttggctaaagctcgataacatggtgctgcgcgttaaatcagtcaccaccaccaaaattgtactggaa

SEQ ID NO: 302959 - DNA, 75 bp, synthetic construct
  source 1..75: mol_type = other DNA
cactcatggctgaatggatagctcagcagcaggatattaatgtcgtgttaagtcacgcccggacagaagcagagg

SEQ ID NO: 302960 - DNA, 75 bp, synthetic construct
  source 1..75: mol_type = other DNA
ctggacgggaaaacaacggaatcatagaactcgcattcatagtttccgaaacccgcgaggtaagcaggcttaccg

SEQ ID NO: 302961 - DNA, 75 bp, synthetic construct
  source 1..75: mol_type = other DNA
cgatgactttaaccgtactgcccgttcatcaacgccccccatgagcgaatcctcacggacagagaacggcaggta

SEQ ID NO: 302962 - DNA, 75 bp, synthetic construct
  source 1..75: mol_type = other DNA
tacacagaatcctcaatcagccctgttaaaactcctagggaatgacctgacgttatttaccaatcaaattgcaac

SEQ ID NO: 302963 - DNA, 75 bp, synthetic construct
  source 1..75: mol_type = other DNA
ttttggtcgactggtcaatgccgtcagcggattatctgacgccgcaaaggcttttctggaagcatccgcaccacc

SEQ ID NO: 302964 - DNA, 75 bp, synthetic construct
  source 1..75: mol_type = other DNA
atatcgagacacggattcagagagcagccgacgagtatgaacgtgctgtacaaaaatcgctacccactgataacg

SEQ ID NO: 302965 - DNA, 75 bp, synthetic construct
  source 1..75: mol_type = other DNA
ttaggaacaacagagattctctggagtggatatacaacagttagagttctcgcgacagtaggtgataactctatt

SEQ ID NO: 302966 - DNA, 75 bp, synthetic construct
  source 1..75: mol_type = other DNA
tttcagtcttgctggtttcttgctgatatacgccagaatttgtacaacctctgtagctgccatatttgcccttca

SEQ ID NO: 302967 - DNA, 75 bp, synthetic construct
  source 1..75: mol_type = other DNA
tattatccctccagtgcagagaaaatcggccagttttctctgcctgcagtccgcatgccgtatcgggccttgggt

SEQ ID NO: 302968 - DNA, 75 bp, synthetic construct
  source 1..75: mol_type = other DNA
atattattcttggctcgttgagctttgttcttactccatatatgttaaaactattgagaaaaattaggaatttac

SEQ ID NO: 302969 - DNA, 75 bp, synthetic construct
  source 1..75: mol_type = other DNA
atggagatgtattttaaaagaatgaaagatgagtggaccggacttgtcgaacaggcagatccactcattcgtgct

SEQ ID NO: 302970 - DNA, 75 bp, synthetic construct
  source 1..75: mol_type = other DNA
gtgagttttaatcgcccgataaatgacaggaaggaccagagcttacacgaccgtctgggtgagccgcaatataca

SEQ ID NO: 302971 - DNA, 75 bp, synthetic construct
  source 1..75: mol_type = other DNA
gacgactatgattctcgcggtgtgacggcctctgttgagggtgggtatacctttgaagcgggaacatgtagcggc

SEQ ID NO: 302972 - DNA, 75 bp, synthetic construct
  source 1..75: mol_type = other DNA
atgccgcatctggcattcagtgcaaatgccagatgcgacgctgacgcgtcttatctggccttgtattatccctcc

SEQ ID NO: 302973 - DNA, 75 bp, synthetic construct
  source 1..75: mol_type = other DNA
ttcacctttagtgatggacacagaccggctaaaattttctatctaagcgatcatgcagctatcaacaccggaaaa

SEQ ID NO: 302974 - DNA, 75 bp, synthetic construct
  source 1..75: mol_type = other DNA
cgctggatccggagatgatcaacgaagtactggacgtgatggtggaactggcgaacgaaggaatgaccatgatgg

SEQ ID NO: 302975 - DNA, 75 bp, synthetic construct
  source 1..75: mol_type = other DNA
ttaatgaaccgctggcttaatactgtccgagggtctgctgatggtcataatactgcactgttcagctggcaggag

SEQ ID NO: 302976 - DNA, 75 bp, synthetic construct
  source 1..75: mol_type = other DNA
gtactctctgcgcaaacggacgatgttgaaagactgatacaaatccaacataccgtggctgaagtccatgctcgt

SEQ ID NO: 302977 - DNA, 75 bp, synthetic construct
  source 1..75: mol_type = other DNA
tctgtccattggtgccgccatgtttaatggacatccggattatgaacgtttaattcaaatagccgacgaagctct

SEQ ID NO: 302978 - DNA, 75 bp, synthetic construct
  source 1..75: mol_type = other DNA
aaccatgcgtaacaccaggaatttgaataacagaagtttgcgggtgaaatttctattacagataagaaataccgt

SEQ ID NO: 302979 - DNA, 75 bp, synthetic construct
  source 1..75: mol_type = other DNA
gtgaccgataaacgcaagcgccgcaccgacgccggaaaaaccgcgctgacccgcgatgaggcggtgatgatttcc

SEQ ID NO: 302980 - DNA, 75 bp, synthetic construct
  source 1..75: mol_type = other DNA
catcttgtgctggcaggcgtctcactcgcgatcgtgtgtttcctgtacttttcggcccgccatgtaccggaaata

SEQ ID NO: 302981 - DNA, 75 bp, synthetic construct
  source 1..75: mol_type = other DNA
agctagacgtattgagcaaacatatgggatgcctggggggtatcttgatatggaacctgaagatacaacagaatc

SEQ ID NO: 302982 - DNA, 75 bp, synthetic construct
  source 1..75: mol_type = other DNA
tacgggctgatgtgctggggtaaaatcgttgatgtagagcgcttgctgactgtgacgccatcccagcagtttctg

SEQ ID NO: 302983 - DNA, 75 bp, synthetic construct
  source 1..75: mol_type = other DNA
ataactaacgtaactcttatcagttgtgttgatatgcttgtcctaggcgctatctttgctcatataaaggatagc

SEQ ID NO: 302984 - DNA, 75 bp, synthetic construct
  source 1..75: mol_type = other DNA
tgcgtctggatgaaggatttcttggctacgagacgagtccactcagagaaaaagtgaccatcattggggtgggcg

SEQ ID NO: 302985 - DNA, 75 bp, synthetic construct
  source 1..75: mol_type = other DNA
caagtatatcaagatattttatatttcaaatcactgatggaaacccatacattgtaaatgtaactcttatcagtt

SEQ ID NO: 302986 - DNA, 75 bp, synthetic construct
  source 1..75: mol_type = other DNA
attattccgttacgctcacggttaacagtgggtgatagttataccgatggcgatatttttgacagtgtgaacttt

SEQ ID NO: 302987 - DNA, 75 bp, synthetic construct
  source 1..75: mol_type = other DNA
atgaaggataataccgttccgctgaaattaatcgcgctgttagcgaatggcgaatttcactctggtgagcagttg

SEQ ID NO: 302988 - DNA, 75 bp, synthetic construct
  source 1..75: mol_type = other DNA
gtaaccagaagcagatacaactcaataggagcaaaaataaccattaataccgtaacgacccctagttctaacaag

SEQ ID NO: 302989 - DNA, 75 bp, synthetic construct
  source 1..75: mol_type = other DNA
cagttgatttaacaataggcactgttgacctattcggggatggcgttgagaagtcattcattattgcggggagtg

SEQ ID NO: 302990 - DNA, 75 bp, synthetic construct
  source 1..75: mol_type = other DNA
cctcgtgcgctggggccatgccaacacggggaggcttgatttaacccagcgtcagagttatgaggcccttttaag

SEQ ID NO: 302991 - DNA, 75 bp, synthetic construct
  source 1..75: mol_type = other DNA
tcaggctggcgcggaactcagggttattgcggacattggcggcagtgatgcctccgtgttttatgaggcaatcaa

SEQ ID NO: 302992 - DNA, 75 bp, synthetic construct
  source 1..75: mol_type = other DNA
agctggcacccggtgtcagtctggccccggcttccggcagcgagctggcccgtcgcctgcagattgcgcattatc

SEQ ID NO: 302993 - DNA, 75 bp, synthetic construct
  source 1..75: mol_type = other DNA
ggacacagcgttaccggtacagcgccacagggcagctcatccgcagcgaggatgaggggcaggtcacgcagtggt

SEQ ID NO: 302994 - DNA, 75 bp, synthetic construct
  source 1..75: mol_type = other DNA
gacggcgaatggcgaaacgggtatggcggcgggagcgtgacctgacggggtggatgtcgctgtcgcgtaaaccgg

SEQ ID NO: 302995 - DNA, 75 bp, synthetic construct
  source 1..75: mol_type = other DNA
ttcaggcgtgggaagtgttcgaaaaactcgaagactgttatttcagccaaaaacagccaccagcagcacaaaacc

SEQ ID NO: 302996 - DNA, 75 bp, synthetic construct
  source 1..75: mol_type = other DNA
cgcagggagagacgctggcgctgcccgtgaccacgccggaaatgacgccgggtgaggtgacgccgcgaccactgc

SEQ ID NO: 302997 - DNA, 75 bp, synthetic construct
  source 1..75: mol_type = other DNA
caggcgacctcaccgctatcgttgccccggacggcagccgcagtgagatacagtatgatgcgtggggaaaggccg

SEQ ID NO: 302998 - DNA, 75 bp, synthetic construct
  source 1..75: mol_type = other DNA
ctaccactacgacagccagcaccgtctggtgttctacacgcggatacagcacggtgagccgcgggtagagagccg

SEQ ID NO: 302999 - DNA, 75 bp, synthetic construct
  source 1..75: mol_type = other DNA
ctaccactacgacagccagcaccgtctggtgttctacacgcggatacagcacggtgagccgctggttgagagccg

SEQ ID NO: 303000 - DNA, 75 bp, synthetic construct
  source 1..75: mol_type = other DNA
ttttgatagtagcaatagaattgatcgtcgttctcaacgtggtgctggtgatccatatacaggtgaagtcgttgg

SEQ ID NO: 303001 - DNA, 75 bp, synthetic construct
  source 1..75: mol_type = other DNA
ggcttgtttggcgtcgaaggattctcttcagaccttgatatcgtcatcggtcgctcccgtgaggaactcttccag

SEQ ID NO: 303002 - DNA, 75 bp, synthetic construct
  source 1..75: mol_type = other DNA
gacggcaatacggcgtggcgcggggagtatgatgaatggggcaaccagcttaatgaggagaacccgcatcacctg

SEQ ID NO: 303003 - DNA, 75 bp, synthetic construct
  source 1..75: mol_type = other DNA
agcagtgaaagccgaaagtggcttgcgcagtgcgggctgacggtggagcaactggcaaaacagatagagccggaa

SEQ ID NO: 303004 - DNA, 75 bp, synthetic construct
  source 1..75: mol_type = other DNA
aaggcacattatcaatacaatatgccgacaatatatccctcaaacaaccaaacgaacacaaagaagtgatgcgta

SEQ ID NO: 303005 - DNA, 75 bp, synthetic construct
  source 1..75: mol_type = other DNA
gcttgccgttatactaagatttaacggttggaaaatatatcctcttatacatatgagcctgtataacacatctag

SEQ ID NO: 303006 - DNA, 75 bp, synthetic construct
  source 1..75: mol_type = other DNA
cgtggcgtgatacgttaaatcgtccggctgtgggtatcaaaaaaaacggggcatttgctgcggggaaaattgaag

SEQ ID NO: 303007 - DNA, 75 bp, synthetic construct
  source 1..75: mol_type = other DNA
tctagtgcgctggggccatgccaacactgggagacttgatttaacccagcgtcagagttatgaggcccttttgag

SEQ ID NO: 303008 - DNA, 75 bp, synthetic construct
  source 1..75: mol_type = other DNA
taaagttttttatcataatattggtagccgtggcagtgctgagtatttggtgcgaaccgacctaagtcatggata

SEQ ID NO: 303009 - DNA, 75 bp, synthetic construct
  source 1..75: mol_type = other DNA
gtttcgggagatgtcgaaccatacatttcaaagctaattgctgatgcgaccagcgtggaggacttgatccgaatc

SEQ ID NO: 303010 - DNA, 75 bp, synthetic construct
  source 1..75: mol_type = other DNA
ttaagtatgagagaccgccatctgaaataacaattgtaccagttggtttatatggtgaacttagagatgaatatc

SEQ ID NO: 303011 - DNA, 75 bp, synthetic construct
  source 1..75: mol_type = other DNA
cttggcgaaaagtggcatgcagaccatgtaaaaccggtcattcgttttgatggaaatatgcttcaccaggaacgt

SEQ ID NO: 303012 - DNA, 75 bp, synthetic construct
  source 1..75: mol_type = other DNA
gcttcggcagcatggcaggcagtaatgccgcatatgaactgaccagcacatacacccccgcaggccagttacaga

SEQ ID NO: 303013 - DNA, 75 bp, synthetic construct
  source 1..75: mol_type = other DNA
ggcggtcaacccattgatgtgctggcggcgtatcccggaaagtacattcagcgagttttcgatgatatcagttat

SEQ ID NO: 303014 - DNA, 75 bp, synthetic construct
  source 1..75: mol_type = other DNA
gaacgacgacgcctgaaatattcctggataacgtcaagcgcgctgacgaactggtgaacggtccggccggaacga

SEQ ID NO: 303015 - DNA, 75 bp, synthetic construct
  source 1..75: mol_type = other DNA
cgatacacgcagctggcccggcagaacatgatcacgcctcctgtcgtcaccgaacagcatcagagtgtcaccggc

SEQ ID NO: 303016 - DNA, 75 bp, synthetic construct
  source 1..75: mol_type = other DNA
acgttacgaaagagtatcctctttaccaccatattggctcaggaattaaggatctcgtatttcaccctaaaagag

SEQ ID NO: 303017 - DNA, 75 bp, synthetic construct
  source 1..75: mol_type = other DNA
tggagaaaataactaattctcgattttcatatatgactttagataagaattatagaagctcaaagagaataatag

SEQ ID NO: 303018 - DNA, 75 bp, synthetic construct
  source 1..75: mol_type = other DNA
caaattgattttgagcaaatgctatacttttcataccaattgataagtaaagatgccatatcgaaaatattaagt

SEQ ID NO: 303019 - DNA, 75 bp, synthetic construct
  source 1..75: mol_type = other DNA
gattagtgacggaggctatcaacatatcagaactggtggcgttgcttccggaacaatcataaatcagagtggccg

SEQ ID NO: 303020 - DNA, 75 bp, synthetic construct
  source 1..75: mol_type = other DNA
aatatttcaggcacagtatctacaggaggaactgtttcttccggcgaaacacaagtcgtgtattccggtggggaa

SEQ ID NO: 303021 - DNA, 75 bp, synthetic construct
  source 1..75: mol_type = other DNA
tggggaaaatgcaacagggctctttgctgaaacctggatgcaatataactggtttaatgcatcagtgaaaggtga

SEQ ID NO: 303022 - DNA, 75 bp, synthetic construct
  source 1..75: mol_type = other DNA
ccaggcaaaagaatgcctgcaatatgttgattatctgacaccgaatgaaacagaagcgtcgctgatgtccggtgt

SEQ ID NO: 303023 - DNA, 75 bp, synthetic construct
  source 1..75: mol_type = other DNA
caataatttttgaggccacgcctgaaagtaataaatacctgtacgctatgagcacattaatccgttcactttgta

SEQ ID NO: 303024 - DNA, 75 bp, synthetic construct
  source 1..75: mol_type = other DNA
ttagaatagttattacgctcaacaacaactcagcaaccgtcgtacctgaatgtcataatttaaaatataagttct

SEQ ID NO: 303025 - DNA, 75 bp, synthetic construct
  source 1..75: mol_type = other DNA
atctttacccgtctcattggccattattatggtttgctctgctggcggcgacattagtctgggcaggaattgcga

SEQ ID NO: 303026 - DNA, 75 bp, synthetic construct
  source 1..75: mol_type = other DNA
cgtggtggctaaattttttattacactggtcgtttttactggagttgatattggtaacggcggctattgctgtgt

SEQ ID NO: 303027 - DNA, 75 bp, synthetic construct
  source 1..75: mol_type = other DNA
gagttgacggatgccaaaatatttttgacacagctggaaaataactttgaagcaaccgcgctggcactaattatg

SEQ ID NO: 303028 - DNA, 75 bp, synthetic construct
  source 1..75: mol_type = other DNA
acaaccggaaccagcatcaaaaatggtggcacgatccgcgtggattccggtgccagcgccctgaatattgcttta

SEQ ID NO: 303029 - DNA, 75 bp, synthetic construct
  source 1..75: mol_type = other DNA
cgccatcgtcatgcttctccgggaatccggtgaactatgcgtctgcgatatctgcgcgaccacctcccaatcaca

SEQ ID NO: 303030 - DNA, 75 bp, synthetic construct
  source 1..75: mol_type = other DNA
caactggcaatcatcaccgaagtgctggcgggggcgtgggaacgactggagcaggggcgggcggatattgttatc

SEQ ID NO: 303031 - DNA, 75 bp, synthetic construct
  source 1..75: mol_type = other DNA
ggacgggtatgtcgtatcaggaacgcttatcgggaaaccaggctcccgctctggttgaaccgccccgggtttcct

SEQ ID NO: 303032 - DNA, 75 bp, synthetic construct
  source 1..75: mol_type = other DNA
atcagtaaccacaagcagtaataaaaacattaggattcatattcatcaattaccgaaggattttgtcataataga

SEQ ID NO: 303033 - DNA, 75 bp, synthetic construct
  source 1..75: mol_type = other DNA
cgatggcactggcgctgaaaattgcagcgcgcagcgttattccggctggaatagcgaattgggccagcaaatcct

SEQ ID NO: 303034 - DNA, 75 bp, synthetic construct
  source 1..75: mol_type = other DNA
ttaatgtcggcgagtcgaaaagtttagtaagtgtttcggcatatgatggtggtgagggtgctgcaaggttgtcca

SEQ ID NO: 303035 - DNA, 75 bp, synthetic construct
  source 1..75: mol_type = other DNA
ttaggggttatgggcgggtacgcaaatgcaaaaggaaaaactataaaccatacaaatgataaagttgcaagaaat

SEQ ID NO: 303036 - DNA, 75 bp, synthetic construct
  source 1..75: mol_type = other DNA
cgttcagaccgcgttttttcagttcagtcagcacattgaaccagaacttagcccctttattttcggccagtcaca

SEQ ID NO: 303037 - DNA, 75 bp, synthetic construct
  source 1..75: mol_type = other DNA
ttcggtgaataacaatggcagtgttgtcattaataacagcatagtaaacgggaatatcacgaatgatgctgactt

SEQ ID NO: 303038 - DNA, 75 bp, synthetic construct
  source 1..75: mol_type = other DNA
ctaacgacaattggcttgtcggccaaaaacgctattttgattgttgagttcgctaaagatctcatggagaaagag

SEQ ID NO: 303039 - DNA, 75 bp, synthetic construct
  source 1..75: mol_type = other DNA
atgttgtcgttgattcacaaggcattgaacgggactttgttaccgagcttgatacaagcaaagaagtcgtggttt

SEQ ID NO: 303040 - DNA, 75 bp, synthetic construct
  source 1..75: mol_type = other DNA
acattagcgagtccttgtcagctcgtccgcgtgtggcggacaaggcctacttcacgggcaagatgatgaacacga

SEQ ID NO: 303041 - DNA, 75 bp, synthetic construct
  source 1..75: mol_type = other DNA
atggcccttcgctgggatggtaaccagagacaggctaaaatgttgtcagcgtgtttccggtgcattttttgggat

SEQ ID NO: 303042 - DNA, 75 bp, synthetic construct
  source 1..75: mol_type = other DNA
agagcaaatgacctacctgccatatactcacaaaacaccccagtatttagcaaaacattgagtctgtatgtaaaa

SEQ ID NO: 303043 - DNA, 75 bp, synthetic construct
  source 1..75: mol_type = other DNA
atgggtcgctgctattattttttgtattcttttccgggttatgctgaagaaacttttgatacgcacttcatgatt

SEQ ID NO: 303044 - DNA, 75 bp, synthetic construct
  source 1..75: mol_type = other DNA
ttcaaaaaatacttcgtttgttggcgatattagttctggtgaaaaaataataattcacggaaaaattaatggtaa

SEQ ID NO: 303045 - DNA, 75 bp, synthetic construct
  source 1..75: mol_type = other DNA
acagctagggccgtattgacggggatgtgttattcagctggcagtgctatgcgccacggaagcagttcgctgacc

SEQ ID NO: 303046 - DNA, 75 bp, synthetic construct
  source 1..75: mol_type = other DNA
cggcaatgtatgtgctggagaaagaaggtatcaccaccgccttcggcgttccgggagctgcaataaatccgttct

SEQ ID NO: 303047 - DNA, 75 bp, synthetic construct
  source 1..75: mol_type = other DNA
tagattaaaaaatgataaatctccatggcaactactgaaaataaatattttgttcacttttttttatgctatctt

SEQ ID NO: 303048 - DNA, 75 bp, synthetic construct
  source 1..75: mol_type = other DNA
ttacagtttattggcgatatgcgtggcgatgactggctttgtcgtggcaacccggaaactcagaaggcgatttgg

SEQ ID NO: 303049 - DNA, 75 bp, synthetic construct
  source 1..75: mol_type = other DNA
agtagaactgacgctgcaaagtggcgaaacgcttcaggccgatgtggtgatttacggtattggtatcagcgccaa

SEQ ID NO: 303050 - DNA, 75 bp, synthetic construct
  source 1..75: mol_type = other DNA
tgggatcagctgtttatggcaaccggcgcggcagcccgaccgctgccgttgcttgatgcactgggagaacgctgc

SEQ ID NO: 303051 - DNA, 75 bp, synthetic construct
  source 1..75: mol_type = other DNA
gcagagagtcccggcattattgataaagaattcttcaataaaatcggtgagaatttcgaccctaagaagttcaac

SEQ ID NO: 303052 - DNA, 75 bp, synthetic construct
  source 1..75: mol_type = other DNA
cccgccttacgctatatccgctgaagatatttcccccgaatctctttcgggaaagcccagttctgagttgggtga

SEQ ID NO: 303053 - DNA, 75 bp, synthetic construct
  source 1..75: mol_type = other DNA
atgagtatgggcgttgatgttgggtatggagcaggcatcgcccctcaccccggccctctccccaatggggcgagg

SEQ ID NO: 303054 - DNA, 75 bp, synthetic construct
  source 1..75: mol_type = other DNA
tgtgttattcagctggcagtgctatgcgccacggaagcagttcgctgacccggttgaccggccagtctgctatga

SEQ ID NO: 303055 - DNA, 75 bp, synthetic construct
  source 1..75: mol_type = other DNA
ttagccgctaatggtgtgctgacggtggatggcaccgacccgtcagaaacgggaagctgggttgaatcaggtggc

SEQ ID NO: 303056 - DNA, 75 bp, synthetic construct
  source 1..75: mol_type = other DNA
gcaacagcgcaacggtcactccgacggtcaccacgcagtcggacggtacggtggagttcagtgtcaccagtcaga

SEQ ID NO: 303057 - DNA, 75 bp, synthetic construct
  source 1..75: mol_type = other DNA
gccgggcagacggtcagcgtgatggcaggcaacggtgcaacggttgccccgacggtgattacagagccggacggc

SEQ ID NO: 303058 - DNA, 75 bp, synthetic construct
  source 1..75: mol_type = other DNA
tcactgcaaccatcaacaacagcaccctgagtcagaacgtgacatttatcgccgatgtcagaacggcgcagatcg

SEQ ID NO: 303059 - DNA, 75 bp, synthetic construct
  source 1..75: mol_type = other DNA
atgggttgccgaggaaaatctggttgccagtctgaaattaaaaacatgggcaacggagattaagtcctcattata

SEQ ID NO: 303060 - DNA, 75 bp, synthetic construct
  source 1..75: mol_type = other DNA
agccacatcaactatcgccacggataaaaacgcatacaccgctggcgagactataaccgtcgccgtgacgctgaa

SEQ ID NO: 303061 - DNA, 75 bp, synthetic construct
  source 1..75: mol_type = other DNA
catgcgcattcggatactgccacgtcactgatcctgccgaacgttaaaactattccatataccctgggggcattg

SEQ ID NO: 303062 - DNA, 75 bp, synthetic construct
  source 1..75: mol_type = other DNA
gaaaaacataccactaaccaatcaacccctcggccaaaaatttatttcccatacggcgagaaaaaatttttagat

SEQ ID NO: 303063 - DNA, 75 bp, synthetic construct
  source 1..75: mol_type = other DNA
agctcagcaaaaattctctttaaaaacaaccatatcaatggaaaaaaattagaagactttactttcgaaaatggg

SEQ ID NO: 303064 - DNA, 75 bp, synthetic construct
  source 1..75: mol_type = other DNA
gaggcggacggtgcgacggcgaacacgctgcgggcgagggtgaccgatgcgttcggcaatgcacttgccgggcag

SEQ ID NO: 303065 - DNA, 75 bp, synthetic construct
  source 1..75: mol_type = other DNA
tgtctggacagcatgggttgccgaggaaaatctggttgccagtctgaaattgaaaacatgggcaacggagattaa

SEQ ID NO: 303066 - DNA, 75 bp, synthetic construct
  source 1..75: mol_type = other DNA
aacaatcagagagttattccatccacagtggtgctccggtgcaggcaaattctgctatcaggacagataaatcgg

SEQ ID NO: 303067 - DNA, 75 bp, synthetic construct
  source 1..75: mol_type = other DNA
aaagaacgttaagcaaggatgatgaactgaaatcgttgtatcaggacggaaatattccgctgtttgttgaaaagg

SEQ ID NO: 303068 - DNA, 75 bp, synthetic construct
  source 1..75: mol_type = other DNA
gtgctgtcactgtttcagttctctgcacattaacgggatgtgactacattgaagaaggcaagccagaaagtagtt

SEQ ID NO: 303069 - DNA, 75 bp, synthetic construct
  source 1..75: mol_type = other DNA
cgctgcacggatgatttctggtgtgctgaataatctgatgctgggcaggaatattgatgccacagtggcgcagtt

SEQ ID NO: 303070 - DNA, 75 bp, synthetic construct
  source 1..75: mol_type = other DNA
atgtaaggcattgcagctcgcaaacgaaaagctggctgaccttaagaacctatcccaaaaggaattgtcagataa

SEQ ID NO: 303071 - DNA, 75 bp, synthetic construct
  source 1..75: mol_type = other DNA
cagagaaagcttgctgtacttactgcattcgttaaagcgcaggaaataacggcattggacgatgccgttgatgtg

SEQ ID NO: 303072 - DNA, 75 bp, synthetic construct
  source 1..75: mol_type = other DNA
ttgctatcatcggtgctggtcgtgcttacatcatctcaaaagagaaaggcgaaacgcgggcgagtatttcgctac

SEQ ID NO: 303073 - DNA, 75 bp, synthetic construct
  source 1..75: mol_type = other DNA
ggaatgccgcgcgtaatatgtacgtcgttgcttccgaactctcgcgcggcgacagtcggatgaaaaccgaggtgc

SEQ ID NO: 303074 - DNA, 75 bp, synthetic construct
  source 1..75: mol_type = other DNA
ccgcttgccaaaacgtcactccgcttcttcaggtagcagaacaccgcgaagccggtcgcttcacttcaatcgaac

SEQ ID NO: 303075 - DNA, 75 bp, synthetic construct
  source 1..75: mol_type = other DNA
cgaaaaacaaggggtgaccccaacaggagaacaatggattgccgatgtgttttgtaccagaaataacgcgaaact

SEQ ID NO: 303076 - DNA, 75 bp, synthetic construct
  source 1..75: mol_type = other DNA
ctgattaccagtacgatcagtcatttaacaatggcaaaagccaggcgctgagagatcccctcataatttccccaa

SEQ ID NO: 303077 - DNA, 75 bp, synthetic construct
  source 1..75: mol_type = other DNA
tggcgagacctttggaccggtggcgccaaagcgcatctcggagtaggtgatggccgagaccacgatacggtgact

SEQ ID NO: 303078 - DNA, 75 bp, synthetic construct
  source 1..75: mol_type = other DNA
tggagaatctgctctattttatgcagaacacgcgtaaacggcttgatgaaccgccccggaaatcctggagactaa

SEQ ID NO: 303079 - DNA, 75 bp, synthetic construct
  source 1..75: mol_type = other DNA
tagaaccaggcgatgagtcgcatctctattatcatatccattgttttttaacaagcaatcattgccctttcgaac

SEQ ID NO: 303080 - DNA, 75 bp, synthetic construct
  source 1..75: mol_type = other DNA
cttaggtaattactcattttcattgtcattcaacctcagtgagcaaaaactaataattaatagcattgaaaaatc

SEQ ID NO: 303081 - DNA, 75 bp, synthetic construct
  source 1..75: mol_type = other DNA
cctctacaggggaactacaaaggctatagggatgctcacatagaaccggactggctactcatctacaagataact

SEQ ID NO: 303082 - DNA, 75 bp, synthetic construct
  source 1..75: mol_type = other DNA
ggatagttgccatattagttggttaatttggatatggccaatatttgttattggttgcatcttttcagcaataac

SEQ ID NO: 303083 - DNA, 75 bp, synthetic construct
  source 1..75: mol_type = other DNA
tcgctccggtgattcatggtattgcccgtggcaccgcacaagtgagtgtaaaacagaacggatacgatgtttatc

SEQ ID NO: 303084 - DNA, 75 bp, synthetic construct
  source 1..75: mol_type = other DNA
cctatcccggagggccggtaacagtccctcttactgtacgttgcgaccagacacagtcggtcagctataccctgt

SEQ ID NO: 303085 - DNA, 75 bp, synthetic construct
  source 1..75: mol_type = other DNA
tcctcaaagaacgccgcaccgcccttatctccgccgccgtcaccggcaaaatagatctccgcaactggaccgccc

SEQ ID NO: 303086 - DNA, 75 bp, synthetic construct
  source 1..75: mol_type = other DNA
gtgagtttgaacgtagctggacattgaaaccattcattaccaaacctgaaaatccgattataggaaatgatgtct

SEQ ID NO: 303087 - DNA, 75 bp, synthetic construct
  source 1..75: mol_type = other DNA
agggcacgcttagggagaagggaaaagcgacccgacgtcaacagaaaagtactagtgcggtcagaaaaagtaaat

SEQ ID NO: 303088 - DNA, 75 bp, synthetic construct
  source 1..75: mol_type = other DNA
catgcgtgcaataaaaatgtacaaccacatgataagaaaggtaagttattcatctgaagattcactatctgatgt

SEQ ID NO: 303089 - DNA, 75 bp, synthetic construct
  source 1..75: mol_type = other DNA
gttcgccattgccattcgccatttcgcccctccccccccttctggcaactggcgcacagtagcgcagacaatttt

SEQ ID NO: 303090 - DNA, 75 bp, synthetic construct
  source 1..75: mol_type = other DNA
gctttattttgctggcggtttgcggcaccagcctgttcacctcgtcggtaatgacggtaatggcaaaaagtcggg

SEQ ID NO: 303091 - DNA, 75 bp, synthetic construct
  source 1..75: mol_type = other DNA
gtcctttgagatcccctggaatccgaacacccgtaccgaggtgagcaccctctgcatcagccagttccgctacag

SEQ ID NO: 303092 - DNA, 75 bp, synthetic construct
  source 1..75: mol_type = other DNA
aaaacgaaaccgctgttgaaatccctggaaagctggttgcgtgaaaagatgaagaccctgtcgcgacactcagag

SEQ ID NO: 303093 - DNA, 75 bp, synthetic construct
  source 1..75: mol_type = other DNA
ccagtgtcaactgaactgccaccagcaaatgaaagtgttctgttatttgatgctaatggagaaggctggctgatt

SEQ ID NO: 303094 - DNA, 75 bp, synthetic construct
  source 1..75: mol_type = other DNA
tagccttacttaatacattagcggactggaatatcattattccgggaaatgcagaagaagccgaatacgcccttc

SEQ ID NO: 303095 - DNA, 75 bp, synthetic construct
  source 1..75: mol_type = other DNA
catcgggcattatctgaacataaaacactatcagtaagttggagtcattaccgggaaatagatattatctataaa

SEQ ID NO: 303096 - DNA, 75 bp, synthetic construct
  source 1..75: mol_type = other DNA
ctttgcaaaatggtttgaaaatgcgcgtgcggcagaagtgttgcatgacattgaatactccgatctgaacgaaga

SEQ ID NO: 303097 - DNA, 75 bp, synthetic construct
  source 1..75: mol_type = other DNA
gtgaaatttccgctacctggacgcataaaaccggaactctcgccaaaagtcgggcactccgaaggaattgacgcg

SEQ ID NO: 303098 - DNA, 75 bp, synthetic construct
  source 1..75: mol_type = other DNA
cgaagaagaatggtctgaattctttttttggttgctaaattctctggagtgtctggattatgtgattattaattt

SEQ ID NO: 303099 - DNA, 75 bp, synthetic construct
  source 1..75: mol_type = other DNA
catttttcatatatttatctagtatcaacaaagtgaattttattgatagtgtttataaatactttaccttttttc

SEQ ID NO: 303100 - DNA, 75 bp, synthetic construct
  source 1..75: mol_type = other DNA
tttttttattcattacaggtttgtgcattggtagttttttaaatgtggtcatctatcgcattcctttgtcgctca

SEQ ID NO: 303101 - DNA, 75 bp, synthetic construct
  source 1..75: mol_type = other DNA
acagccatattacaggagggttaatcgctgtttctgaattatccggcagagtatcatcaagagcaactagtaaga

SEQ ID NO: 303102 - DNA, 75 bp, synthetic construct
  source 1..75: mol_type = other DNA
gatgaatttatcattgttttgactgaagcttcggaaaacgaaacgttacgtaccgcagaacgtattcgcagtcgg

SEQ ID NO: 303103 - DNA, 75 bp, synthetic construct
  source 1..75: mol_type = other DNA
tgtgttctctgctattattggtggtgtgatgtttatcaatgtcaaacgaagatttgattgtggctacgatgggag

SEQ ID NO: 303104 - DNA, 75 bp, synthetic construct
  source 1..75: mol_type = other DNA
ctggttattattgaaaggtcaatgccgattttgtggtggcgtgatatcttcacgctacccaattatagaattaat

SEQ ID NO: 303105 - DNA, 75 bp, synthetic construct
  source 1..75: mol_type = other DNA
cctacttcgacgcctcattgttggaagaaaaatccgcgtcgatggcgctggccattgaacgcgcccttacgcatg

SEQ ID NO: 303106 - DNA, 75 bp, synthetic construct
  source 1..75: mol_type = other DNA
gtgatgctggggaggctggagcgggaactgcgcgcgggagcggtgagtgcggagagtgaggcatggcttgcgcag

SEQ ID NO: 303107 - DNA, 75 bp, synthetic construct
  source 1..75: mol_type = other DNA
caatgaagtggccttcagcgacacgttacatagactgaagggggataatcgcgggctggatacggaagggatcac

SEQ ID NO: 303108 - DNA, 75 bp, synthetic construct
  source 1..75: mol_type = other DNA
agctgcgtccgttgctgccggtacatccgggaaacgcaggtcaacccgcaatgccgtcaggcggggatgaacatt

SEQ ID NO: 303109 - DNA, 75 bp, synthetic construct
  source 1..75: mol_type = other DNA
ggtactatgatccgttgcaggggagatatatcacccaggacccgatagggctgagaggtgaatggaatctgtata

SEQ ID NO: 303110 - DNA, 75 bp, synthetic construct
  source 1..75: mol_type = other DNA
ccgcatcgcggaagatgcgcactatgtctaccgctacgatgaatacggcaggctggcggagaagacggaccgcat

SEQ ID NO: 303111 - DNA, 75 bp, synthetic construct
  source 1..75: mol_type = other DNA
agaacccgcatcacctgtaccagccgtaccgtttgccggggcagcagtatgatgaggagtcgggactgtattaca

SEQ ID NO: 303112 - DNA, 75 bp, synthetic construct
  source 1..75: mol_type = other DNA
ggatgattcaggaatatgtccctggtaagcaggtcacgctggcacatgtcattgctaatccagggaaggatctgt

SEQ ID NO: 303113 - DNA, 75 bp, synthetic construct
  source 1..75: mol_type = other DNA
ttgaatgtggataccctaaatacaaataatgtcataaaacaaactcgccaaagaacaagtgaaagaaaaaatctc

SEQ ID NO: 303114 - DNA, 75 bp, synthetic construct
  source 1..75: mol_type = other DNA
ttgaatatagaaacccaaaacacaaatgatgtcacaaaacaagttcgccaaagaagaagtgaaaggcaaaatttc

SEQ ID NO: 303115 - DNA, 75 bp, synthetic construct
  source 1..75: mol_type = other DNA
cgctgcgggcgagggtgaccgatgcgttcggtaatacgcttgccggacagacggtcagcgtgttggcaggcaacg

SEQ ID NO: 303116 - DNA, 75 bp, synthetic construct
  source 1..75: mol_type = other DNA
atgtcaggacggcgaagatagcggatctggtggttattaaggatggttcagaggcggacggttcgacggcgaaca

SEQ ID NO: 303117 - DNA, 75 bp, synthetic construct
  source 1..75: mol_type = other DNA
ggtcgctccgacggtcaccacgcatccggacggcacggtggagatctctgtcaccagtcagacggcgggagtcag

SEQ ID NO: 303118 - DNA, 75 bp, synthetic construct
  source 1..75: mol_type = other DNA
cttaaggcacagacggatgccgcaggccggacaacagagtacagcccggatgtggtgacgggcctcatcacgcgc

SEQ ID NO: 303119 - DNA, 75 bp, synthetic construct
  source 1..75: mol_type = other DNA
cggtggagcggctggcggcacagatagagccggtttatttacctgagcgaaaaattcatctttatcactgtgacc

SEQ ID NO: 303120 - DNA, 75 bp, synthetic construct
  source 1..75: mol_type = other DNA
cacgggcaggctggagagtgtgcgcaccctcgcaccggacctggacatccgcatcccgtatgccacggacccggc

SEQ ID NO: 303121 - DNA, 75 bp, synthetic construct
  source 1..75: mol_type = other DNA
aatagaataaaactacgtcatattgaatgctattttcaacaacgttatcacactggcgtcagttccaatatacta

SEQ ID NO: 303122 - DNA, 75 bp, synthetic construct
  source 1..75: mol_type = other DNA
gagaaaggccgcctgaccggtgagcgtcagacggtgcatcacccgcagacggaagcactgctctggcagcatgag

SEQ ID NO: 303123 - DNA, 75 bp, synthetic construct
  source 1..75: mol_type = other DNA
tatgtaagaagcaaggtgaatatttccccatgaatccgataagttcaaatgataatgatagtgtagacttgcgaa

SEQ ID NO: 303124 - DNA, 75 bp, synthetic construct
  source 1..75: mol_type = other DNA
gtgcgcattggtgcccccaccggcgtggcctgttcggtgtgccccggcggagtgacgtccggccatcggcgtttt

SEQ ID NO: 303125 - DNA, 75 bp, synthetic construct
  source 1..75: mol_type = other DNA
gtgtctaaattaaatgacgctggtgttagccgatcagcgaaagggctgggttatgaaaaagagattagagattac

SEQ ID NO: 303126 - DNA, 75 bp, synthetic construct
  source 1..75: mol_type = other DNA
ccgtccacgctaaagcgcacggtaaagttgccatcctgtactccggtcagttgtccggccccgaacaggcggaac

SEQ ID NO: 303127 - DNA, 75 bp, synthetic construct
  source 1..75: mol_type = other DNA
ccgctgctgggggcgaaggtgctgcccggcgagacggaccttgcgctgcccggcccgctgtcgttcattctctcc

SEQ ID NO: 303128 - DNA, 75 bp, synthetic construct
  source 1..75: mol_type = other DNA
aaagttatcccattctgagatgattgaagataataaaaaagacttggctgtaaatgaacatgggttgacatgtcc

SEQ ID NO: 303129 - DNA, 75 bp, synthetic construct
  source 1..75: mol_type = other DNA
ccggctgcaccgcgagacggcccgtagcttcggcggggcgggcagtacagcggggtacgaacaggccacggcgta

SEQ ID NO: 303130 - DNA, 75 bp, synthetic construct
  source 1..75: mol_type = other DNA
gtatattactcaggacccgatggggttgaaagggggatggaatttatatcagtatcctttaaatccactacaaca

SEQ ID NO: 303131 - DNA, 75 bp, synthetic construct
  source 1..75: mol_type = other DNA
ctaccactacgacagccagcaccgtctggtgttctacacgcggatacagcacggtgagccacaggtagagagccg

SEQ ID NO: 303132 - DNA, 75 bp, synthetic construct
  source 1..75: mol_type = other DNA
gagcaggcacctgaacctcccgcagcttgaccgggactacgactggaacgacaacggacagctaatccgcatcag

SEQ ID NO: 303133 - DNA, 75 bp, synthetic construct
  source 1..75: mol_type = other DNA
tccgtaaacagcgcgccacgtctttatcttcccctgccggtccccgttctgtttcctcttctcaggttttccccg

SEQ ID NO: 303134 - DNA, 75 bp, synthetic construct
  source 1..75: mol_type = other DNA
ctaccactacgacagccagcaccgtctggtgttctacacgcggatacagcacggtgagccgcaggtggagagccg

SEQ ID NO: 303135 - DNA, 75 bp, synthetic construct
  source 1..75: mol_type = other DNA
ctaccactacgacagccagcaccgtctggtgttctacacgcggatacagcacggtgagcccccggtagagagccg

SEQ ID NO: 303136 - DNA, 75 bp, synthetic construct
  source 1..75: mol_type = other DNA
ctaccactacgacagccagcaccgtctggtgttctacacgcggatacagcacggtgagccccaggtcgagagccg

SEQ ID NO: 303137 - DNA, 75 bp, synthetic construct
  source 1..75: mol_type = other DNA
ccgtagcactgggcagcaacctgaaagctcgcgagaatatggcctatgcctctttgctggcgggtatggccttca

SEQ ID NO: 303138 - DNA, 75 bp, synthetic construct
  source 1..75: mol_type = other DNA
cggtatgaatacaacgccgccggtgacctgaccaccgtcattgccccggacggcagcagaaacgggacacagtac

SEQ ID NO: 303139 - DNA, 75 bp, synthetic construct
  source 1..75: mol_type = other DNA
cgcagcgccgcagcctggcggatgcccttcagcagtccggcggcgaagacggtggcagtgtggtgttcccgccgg

SEQ ID NO: 303140 - DNA, 75 bp, synthetic construct
  source 1..75: mol_type = other DNA
gcttgactgtgactatacgtggaacgataacggacaactggtgcgcatcagcggcccgcaggagtgccgggagta

SEQ ID NO: 303141 - DNA, 75 bp, synthetic construct
  source 1..75: mol_type = other DNA
gttacagattcaaatttgaaaaatattatagacgatctttatcggccaaatgcaaaagtaggaagtggaagcaca

SEQ ID NO: 303142 - DNA, 75 bp, synthetic construct
  source 1..75: mol_type = other DNA
acgcaggcgcagcgggcggaagccttccgtaaacagcgcgccacgtctttatcttcccctgccggtccccgttct

SEQ ID NO: 303143 - DNA, 75 bp, synthetic construct
  source 1..75: mol_type = other DNA
tataaccggaaccggtactatgacccgctacaggggaggtatatcacccaggatccaatcgggctaagaggtgaa

SEQ ID NO: 303144 - DNA, 75 bp, synthetic construct
  source 1..75: mol_type = other DNA
atgtcaaatcaggcctcgccggatggctggactatatctcaggaaggacgtgttggagcaggtaatgctacagat

SEQ ID NO: 303145 - DNA, 75 bp, synthetic construct
  source 1..75: mol_type = other DNA
tgtggtctgcttatcgcggaacacatgcccagagcggaacattcggacatactcgcaatgactggctgatttcct

SEQ ID NO: 303146 - DNA, 75 bp, synthetic construct
  source 1..75: mol_type = other DNA
ctgaactttatctgccacccgaacctggtgaatcagttgcgcgttctggccggtctcatccagtacaaactttaa

SEQ ID NO: 303147 - DNA, 75 bp, synthetic construct
  source 1..75: mol_type = other DNA
cgcagcgaacacagaatgttttcttgagtccccagatgtttcttgctcagttcattcattccataaattgtggcg

SEQ ID NO: 303148 - DNA, 75 bp, synthetic construct
  source 1..75: mol_type = other DNA
tcggtctcgtcactcaggtgctgcttcccgagcaggtaagtaaagaagccatcaagctccctgataaaacaggag

SEQ ID NO: 303149 - DNA, 75 bp, synthetic construct
  source 1..75: mol_type = other DNA
ccccgccgttaaatttttcatttgaagaaaggaaaaaagtttttttatgggtattgacccgtcttctgaaagaag

SEQ ID NO: 303150 - DNA, 75 bp, synthetic construct
  source 1..75: mol_type = other DNA
acttagctcatgtattaaaatatggtatagcatttcaccatggttcactacctctatttataagaaaaagaatag

SEQ ID NO: 303151 - DNA, 75 bp, synthetic construct
  source 1..75: mol_type = other DNA
tgaagataatttatgataaatacaatcagatgacagattatgaactgatgatacttgagtcattagttgtatgtt

SEQ ID NO: 303152 - DNA, 75 bp, synthetic construct
  source 1..75: mol_type = other DNA
tccgccgcattgaagacgccgctgccgccctgatcgccgccggcaccctgaacccgaccaacgagcaggtccgtc

SEQ ID NO: 303153 - DNA, 75 bp, synthetic construct
  source 1..75: mol_type = other DNA
cgccagcaacgcttggccgtatccgttatgtcatcaaaaaccgtttcaccagtcgctacccacgccacaagctgg

SEQ ID NO: 303154 - DNA, 75 bp, synthetic construct
  source 1..75: mol_type = other DNA
cgtccttgctgtcactgacactgatgtctgttttattatcgcctttatctcttcaggcagcggatatccggcgta

SEQ ID NO: 303155 - DNA, 75 bp, synthetic construct
  source 1..75: mol_type = other DNA
tgaacaacactgttgacttcactatttctcaggctgaagcaggctttgtgtatgaagccacgcttcatgccgggg

SEQ ID NO: 303156 - DNA, 75 bp, synthetic construct
  source 1..75: mol_type = other DNA
acacccggttcacggtcggccatttgcaccggaagtgacctttgttatcgacggtggcacgcgctttgtggtggg

SEQ ID NO: 303157 - DNA, 75 bp, synthetic construct
  source 1..75: mol_type = other DNA
atgcggagcacgccgggcggatggtggcacaccattatgcggggaggccggagagccgctaccggtatgatgata

SEQ ID NO: 303158 - DNA, 75 bp, synthetic construct
  source 1..75: mol_type = other DNA
attggccacaggtgaaaaagttggtggtagaggacatgtattgaaagcacaggattatacaagggctttacagga

SEQ ID NO: 303159 - DNA, 75 bp, synthetic construct
  source 1..75: mol_type = other DNA
atccggtagacgcagaggcgcttaagagatcccaggcacagttacaggaactgggggcatactggccgtaccgaa

SEQ ID NO: 303160 - DNA, 75 bp, synthetic construct
  source 1..75: mol_type = other DNA
gacccggcgggcaaccggctgccggacccggagctgcacccggacagtacactcacagtgtggccggataaccgc

SEQ ID NO: 303161 - DNA, 75 bp, synthetic construct
  source 1..75: mol_type = other DNA
agagccgctacctctatgacccgctgggccgccggacgggaaaacgggtgtggcggcgggagcgtgacctgacgg

SEQ ID NO: 303162 - DNA, 75 bp, synthetic construct
  source 1..75: mol_type = other DNA
gtggagccggaatacacaccagtgcgaaacgttcatctttaccactgcgaccaccggggcctgccgctggcgctc

SEQ ID NO: 303163 - DNA, 75 bp, synthetic construct
  source 1..75: mol_type = other DNA
cccttgtgattaaacgcgtattccggctgaccgaccctgcgggcttgaactgcccccgaaagttggacagttatt

SEQ ID NO: 303164 - DNA, 75 bp, synthetic construct
  source 1..75: mol_type = other DNA
gttcttttatcgctgtcactaatcccccggtgtatgattttgctgattttcttaacgataatctggcaaaaatcg

SEQ ID NO: 303165 - DNA, 75 bp, synthetic construct
  source 1..75: mol_type = other DNA
tacgtgaacgctacgccctgcaactgatgacgcaaaaagccgatgaatcaccggctccggtggtgacaaaggcca

SEQ ID NO: 303166 - DNA, 75 bp, synthetic construct
  source 1..75: mol_type = other DNA
tggcgcatgaactttcgtccatttccaggaattgggtggtaggtttgcacaagtactgggtcgacaacaatctga

SEQ ID NO: 303167 - DNA, 75 bp, synthetic construct
  source 1..75: mol_type = other DNA
atggttacgttgaagtcgctgatgctgaaaccaacagttaacgatcagcatgcagctcctgagctggtggacttg

SEQ ID NO: 303168 - DNA, 75 bp, synthetic construct
  source 1..75: mol_type = other DNA
ataatatgcgaacatctgatttttcattcctgactgagaacgaagctttcttttatgtggatcataataactgcc

SEQ ID NO: 303169 - DNA, 75 bp, synthetic construct
  source 1..75: mol_type = other DNA
tgggggccacagcgacatatttgcggcgaacgcaccgcccgaggttcaactttactggcctcgattaccggtaac

SEQ ID NO: 303170 - DNA, 75 bp, synthetic construct
  source 1..75: mol_type = other DNA
agggcgaggggtatggattgcagcaaactgtgttgttactgcaggttcaactataaaagatggtacattaattcc

SEQ ID NO: 303171 - DNA, 75 bp, synthetic construct
  source 1..75: mol_type = other DNA
aattagagatgaagtatcctgatctattaaaagaaatattaagatatataaccgtgcagcgcatttcagaggtaa

SEQ ID NO: 303172 - DNA, 75 bp, synthetic construct
  source 1..75: mol_type = other DNA
gatcgcctacgtgccgctgatgtgggtgatcaacgagatcaatcgtggggagctggagatcctgctgccgcgtta

SEQ ID NO: 303173 - DNA, 75 bp, synthetic construct
  source 1..75: mol_type = other DNA
aaaatttcaggcatttccccgaagttaacattaattttaacagaggctttaacttcatcagtggacctaatggtt

SEQ ID NO: 303174 - DNA, 75 bp, synthetic construct
  source 1..75: mol_type = other DNA
tcggttttgatgaagattccatgcctgagggcgtaccggcgaacgagtcgctgtatgcctacctgttcggcgcga

SEQ ID NO: 303175 - DNA, 75 bp, synthetic construct
  source 1..75: mol_type = other DNA
aagccaaagactggaccggcagaatttacacgtacatgtggaagcaagcggtgagcagtatcgttttgttatgcc

SEQ ID NO: 303176 - DNA, 75 bp, synthetic construct
  source 1..75: mol_type = other DNA
agcagcgcaaagctctatcaaccatctcataataggaaatggccgtttcggtgataaaataaatatgctttgcaa

SEQ ID NO: 303177 - DNA, 75 bp, synthetic construct
  source 1..75: mol_type = other DNA
gtgatgacgtggaggtggtgaatgatgctaagcgaggaaacgtccgccgtacgcccacaaaaacaaacgcgattt

SEQ ID NO: 303178 - DNA, 75 bp, synthetic construct
  source 1..75: mol_type = other DNA
gtagagaacgaagacggctctcacattcctgtttcgcaaccaatcattattaactctgctggttaccctgtatat

SEQ ID NO: 303179 - DNA, 75 bp, synthetic construct
  source 1..75: mol_type = other DNA
tgaagccagcgccagtgaaaactgtacaaactgaaaagctacgtgagtttgaagacaaaaagcagtttgcccgga

SEQ ID NO: 303180 - DNA, 75 bp, synthetic construct
  source 1..75: mol_type = other DNA
agtgacctatgaatttgcccgtcttcctgcttcagttcaggctgagttagataaggccatcaggctggttatggg

SEQ ID NO: 303181 - DNA, 75 bp, synthetic construct
  source 1..75: mol_type = other DNA
ttaattttcagatctcgctgcaaaattgtgttcgtataagcagtattaaaacaaaactaaaatctaatgtagtag

SEQ ID NO: 303182 - DNA, 75 bp, synthetic construct
  source 1..75: mol_type = other DNA
tggggctgacgccaaaaaatggaggtgccattagaaatatatcaacagaacatggtagttatgctgcttcagtta

SEQ ID NO: 303183 - DNA, 75 bp, synthetic construct
  source 1..75: mol_type = other DNA
atggtagaaaataaccagaaaaacataaaaatactgagaagtgaattgcaattactggagtggagtcttagtaaa

SEQ ID NO: 303184 - DNA, 75 bp, synthetic construct
  source 1..75: mol_type = other DNA
aggaggtcggtattttttgaataaaaataaactatcattatcagatgagttacaattaatttctcttgagaaata

SEQ ID NO: 303185 - DNA, 75 bp, synthetic construct
  source 1..75: mol_type = other DNA
gtttattctatgaatgccccagggtttattcccggtattgatttctctgatcaccttaattattggcaacacgat

SEQ ID NO: 303186 - DNA, 75 bp, synthetic construct
  source 1..75: mol_type = other DNA
gggagtcagggatgccctgggtatcatgagcgaacagctttctctttccgtctctgacctgacgcgtatcctggt

SEQ ID NO: 303187 - DNA, 75 bp, synthetic construct
  source 1..75: mol_type = other DNA
attttttctggtggtagatattttatgacaaatgataaattaacattgtccgattcgttacaattattatcatta

SEQ ID NO: 303188 - DNA, 75 bp, synthetic construct
  source 1..75: mol_type = other DNA
ggaagagctgaagtcgttacgtgatattcacgcacgcattcaccgccctgaaatgctggagattatccgtacccg

SEQ ID NO: 303189 - DNA, 75 bp, synthetic construct
  source 1..75: mol_type = other DNA
atgtgcaatgacacccgtccggacgcagccgccgaagccatcaaaacactgattgatgcgctgattgatatttct

SEQ ID NO: 303190 - DNA, 75 bp, synthetic construct
  source 1..75: mol_type = other DNA
gttgctatgcggattatcgctgatatggcactgaatgaggccagcaaaattatcatggctgatatggaggtggtg

SEQ ID NO: 303191 - DNA, 75 bp, synthetic construct
  source 1..75: mol_type = other DNA
cattccgtacacgctggtaacgccgcaggcctggaagaagtcagccggtctcatcggaagtgacaaggacgcggc

SEQ ID NO: 303192 - DNA, 75 bp, synthetic construct
  source 1..75: mol_type = other DNA
cgtaagtacggaattacgcacgcatacctcgagcaggtgggcgcaatgccagggcagggaacggcgagcatgttc

SEQ ID NO: 303193 - DNA, 75 bp, synthetic construct
  source 1..75: mol_type = other DNA
atatcgcctatccgggtgattctattgatgttgtcagcaaattggctttttcggatgccagtggctttaaacact

SEQ ID NO: 303194 - DNA, 75 bp, synthetic construct
  source 1..75: mol_type = other DNA
agactatcacttatttaagtgatactggttgtctggagattcagggggccagtctacataacagtagcgtgaacg

SEQ ID NO: 303195 - DNA, 75 bp, synthetic construct
  source 1..75: mol_type = other DNA
gtgattttgtcacgacaggcaaagcaaattttcgttctttcgctacttccgtgatttcggatcttagtcgaatag

SEQ ID NO: 303196 - DNA, 75 bp, synthetic construct
  source 1..75: mol_type = other DNA
cagctcgatattcaggcaggagactgggttagtggtgcctcccagggattcaataactggctggatgacactaag

SEQ ID NO: 303197 - DNA, 75 bp, synthetic construct
  source 1..75: mol_type = other DNA
atgacggccagaatggagagattggtcctcaggcaataaaagcacttatggggatggttgatcagcgggtgcagg

SEQ ID NO: 303198 - DNA, 75 bp, synthetic construct
  source 1..75: mol_type = other DNA
ttgctcaggacgtactaaatttatcaataaacgattacaacaagcgacaacaggaaggaattgaactcagacaga

SEQ ID NO: 303199 - DNA, 75 bp, synthetic construct
  source 1..75: mol_type = other DNA
gggacttgttcgcaccttccctagtgaacttgcaaaactggaaaagctaaagaatcagtattcaaaggaagaata

SEQ ID NO: 303200 - DNA, 75 bp, synthetic construct
  source 1..75: mol_type = other DNA
aggcaataaaagcacttatggggatggttgatcagcgggtgcagggcaatctgttaaatatgcgacgtgatgggg

SEQ ID NO: 303201 - DNA, 75 bp, synthetic construct
  source 1..75: mol_type = other DNA
atggggcgaaaaatttctacattattaaagataataggagttacaggttctttatgcggtattatagcgacagca

SEQ ID NO: 303202 - DNA, 75 bp, synthetic construct
  source 1..75: mol_type = other DNA
tggtatctgagcagtagtaaaaatactccagaaccaaggcctgatcctgaacctactccggaagggcatgataac

SEQ ID NO: 303203 - DNA, 75 bp, synthetic construct
  source 1..75: mol_type = other DNA
actatcgaaagcgtgaccctgaaagatatcagtaaatatataaaagatgatattgggggtgatgctgccaactta

SEQ ID NO: 303204 - DNA, 75 bp, synthetic construct
  source 1..75: mol_type = other DNA
ttaacacgaacttccgatggttctcttggtgtcagagctattaatagtaaaagtggtaatggaggcggagatatt

SEQ ID NO: 303205 - DNA, 75 bp, synthetic construct
  source 1..75: mol_type = other DNA
agcagtctatgctgataccgaaggttttgtcagtgaaatggatacccgcgcgctggggatggcagtggttgcaat

SEQ ID NO: 303206 - DNA, 75 bp, synthetic construct
  source 1..75: mol_type = other DNA
cggttgcggtaaagaagtaactatcgcaggtgggaaaaaaatcccaccacaaaaccaccaccaacatacccccgc

SEQ ID NO: 303207 - DNA, 75 bp, synthetic construct
  source 1..75: mol_type = other DNA
agaaaaacgagcagctcgatattcaggcaggagactgggttagtggtgcctcccagggattcaataactggctgg

SEQ ID NO: 303208 - DNA, 75 bp, synthetic construct
  source 1..75: mol_type = other DNA
ggggaaatcgggtaaataccgccagggccttttcatccaggacggctgtcgtgtcgtctggtcagaatctattca

SEQ ID NO: 303209 - DNA, 75 bp, synthetic construct
  source 1..75: mol_type = other DNA
gacaggctgacgacggtacagaccgacaccacgcgtatccagacggtataccagccggggagcttcgcgccgctc

SEQ ID NO: 303210 - DNA, 75 bp, synthetic construct
  source 1..75: mol_type = other DNA
actgaaagtgagattgtctcgaagacccgtaaagcgattcaggaagcgaccgaagcactggcgctgtttgatacc

SEQ ID NO: 303211 - DNA, 75 bp, synthetic construct
  source 1..75: mol_type = other DNA
tgccagtggttctaacgctgcggatttatttactcaattaacaagcattgctgttttgttaactatgttcccata

SEQ ID NO: 303212 - DNA, 75 bp, synthetic construct
  source 1..75: mol_type = other DNA
caaaccctcctattatagctcgttttagagactatctggaagatggtgagtgcattgacagaattagcgaatcaa

SEQ ID NO: 303213 - DNA, 75 bp, synthetic construct
  source 1..75: mol_type = other DNA
aataatgcctaccgaagaaatattaatagatgacatttccacgagcgatagcaataaaacatcagagcagtcttc

SEQ ID NO: 303214 - DNA, 75 bp, synthetic construct
  source 1..75: mol_type = other DNA
ccaagtactagacgtaaaaacattcttatgaatctagtcgaggcaatattaggtgagtgtcagaaaacatctccc

SEQ ID NO: 303215 - DNA, 75 bp, synthetic construct
  source 1..75: mol_type = other DNA
caacggtacaaaaagtgatcatgatgtcgttgccgagcctattatcaatcctgccgtcgataatccagccgatta

SEQ ID NO: 303216 - DNA, 75 bp, synthetic construct
  source 1..75: mol_type = other DNA
ttctactgtagcagcaactctgggtggcgatctgttcaaaaaagacgaagtcgctaccgcagtgggtatggcagg

SEQ ID NO: 303217 - DNA, 75 bp, synthetic construct
  source 1..75: mol_type = other DNA
atcggcaagcggatggatttcgacactgaagtgatggtgcgcctctactggcagggaaacaccagctatttcgtg

SEQ ID NO: 303218 - DNA, 75 bp, synthetic construct
  source 1..75: mol_type = other DNA
aatagatagtaacggacggatctcaggtaatgctaaggccaaagtttcgggactggaaaatcagataaaggatga

SEQ ID NO: 303219 - DNA, 75 bp, synthetic construct
  source 1..75: mol_type = other DNA
aaggagcaacatcgttcaaaatcctttcgacaacgggggataacaggctacatggggttgctgaaatatataagt

SEQ ID NO: 303220 - DNA, 75 bp, synthetic construct
  source 1..75: mol_type = other DNA
ctggagggcagcatcgcctacatcgtcaaccacgcgttcgctaaaagcctgtttttccttgtagcaggtgcgctg

SEQ ID NO: 303221 - DNA, 75 bp, synthetic construct
  source 1..75: mol_type = other DNA
cacgatgaatacggcaggctgacggagaagacggaccgcatcccggcgggtgtgatacggacggacgacgaagcg

SEQ ID NO: 303222 - DNA, 75 bp, synthetic construct
  source 1..75: mol_type = other DNA
ttggatttttctcgcaattggtagttttattgataatcagcgaggagcaacgctaagtagcacattagatcctgc

SEQ ID NO: 303223 - DNA, 75 bp, synthetic construct
  source 1..75: mol_type = other DNA
tctacaggtacgggtaaagttattccatcttctaaagagcaaattattcagtcattagagggtggtattttgacc

SEQ ID NO: 303224 - DNA, 75 bp, synthetic construct
  source 1..75: mol_type = other DNA
cacctgccagctttaccggtgcccggcctcagcccggcgtttttaacgctaccgcgaccttaaccattgaatttg

SEQ ID NO: 303225 - DNA, 75 bp, synthetic construct
  source 1..75: mol_type = other DNA
tctgcaggtccggaccgcaaattataatctggaagtatcccttatcagcacattaacacgaaaatgtacaggagc

SEQ ID NO: 303226 - DNA, 75 bp, synthetic construct
  source 1..75: mol_type = other DNA
tttggttcagatccgaaaggtgtgaaacgagaagccagactgaaaaaatacatgacaatttcggtcatccctgca

SEQ ID NO: 303227 - DNA, 75 bp, synthetic construct
  source 1..75: mol_type = other DNA
ggctggcgggggcggcggtaggtggcggcgcgcttggcgctttactggcaagcggtggcgatgatgactcaaaaa

SEQ ID NO: 303228 - DNA, 75 bp, synthetic construct
  source 1..75: mol_type = other DNA
gtgtccgttaaactcaggctacctcaaggaggcttactggataggctattggggcgtgagcatcgaatggagaga

SEQ ID NO: 303229 - DNA, 75 bp, synthetic construct
  source 1..75: mol_type = other DNA
atgactgagccgttagttgctaaaggagctgcaagtgaggtagaggttttaaggttaaaacgtcaagcttctgat

SEQ ID NO: 303230 - DNA, 75 bp, synthetic construct
  source 1..75: mol_type = other DNA
ttacggtggcggagatccgcacgctgtcggtaatgaggttgcacgtcggcaacagtctgcaaatgctcaggtcat

SEQ ID NO: 303231 - DNA, 75 bp, synthetic construct
  source 1..75: mol_type = other DNA
aaaaatggcaaccggcaatagataaagcgaaggatgcgatcacctggcttcgtgaccaccttctggaactaaaag

SEQ ID NO: 303232 - DNA, 75 bp, synthetic construct
  source 1..75: mol_type = other DNA
taaaaatggctgatcattttgagtacgaggaagattttgaaacagatgattttgatatcaaaaaaaaacgagagt

SEQ ID NO: 303233 - DNA, 75 bp, synthetic construct
  source 1..75: mol_type = other DNA
attagtcccggcggatgcgccgctgtggcgaacaatcaatacgccacagggtaaaggcgttgttaacttaggggc

SEQ ID NO: 303234 - DNA, 75 bp, synthetic construct
  source 1..75: mol_type = other DNA
tggtgaaaaaataacaaacaatgaagaccaactaacggaaaaggtatttttttattacgatagtagttattccga

SEQ ID NO: 303235 - DNA, 75 bp, synthetic construct
  source 1..75: mol_type = other DNA
acaatgggtgcttttgttttgatatttaacataattaattatatttttcctatgaaagtaaaatttttaatgatg

SEQ ID NO: 303236 - DNA, 75 bp, synthetic construct
  source 1..75: mol_type = other DNA
caaattcgacgcagcaggcgtacatcctgatgatttcagggaactttcagacctgcgtaaatttccctgtaccac

SEQ ID NO: 303237 - DNA, 75 bp, synthetic construct
  source 1..75: mol_type = other DNA
cagaacttacaagaccattaagtaaagacactctaattgagcggattactagccaaggacaaaatagcagtggtg

SEQ ID NO: 303238 - DNA, 75 bp, synthetic construct
  source 1..75: mol_type = other DNA
ttaattattgggcggataaaggatgtagtttgtcagatgccagagaagttacacggcgaataaacccagcagcag

SEQ ID NO: 303239 - DNA, 75 bp, synthetic construct
  source 1..75: mol_type = other DNA
aaccataccgcgctatgggggtgcatccggtcacgcacacagcacggcgacaagtgcactatttcgttgttgcgc

SEQ ID NO: 303240 - DNA, 75 bp, synthetic construct
  source 1..75: mol_type = other DNA
ccttgataattcaatcatggtaaaatattttaaagatgagaaaccaacttatgctcgaatgacagcacatctccc

SEQ ID NO: 303241 - DNA, 75 bp, synthetic construct
  source 1..75: mol_type = other DNA
aattgctttcggttccgactctgccattaatatggcaagtcaacacattaatatccataacagcggtgtgatgtc

SEQ ID NO: 303242 - DNA, 75 bp, synthetic construct
  source 1..75: mol_type = other DNA
cgctcaactattggatattctttccaggaacgaatatccaattaataaagacgcaagagaattattacattcagc

SEQ ID NO: 303243 - DNA, 75 bp, synthetic construct
  source 1..75: mol_type = other DNA
atccaattaataaagacgcaagagaattattacattcagccccgaaagaagccgagcttgatggagatcaaatga

SEQ ID NO: 303244 - DNA, 75 bp, synthetic construct
  source 1..75: mol_type = other DNA
tggggtatgagatgaagcacttccggcgctggctgtacaagctggaaaatgatggcgtaatcgttattgacggtg

SEQ ID NO: 303245 - DNA, 75 bp, synthetic construct
  source 1..75: mol_type = other DNA
cacccagattaatggtgatgacgccacggcaaacaacaacggcaaaaccaccgttgacggcaaggattccaccgg

SEQ ID NO: 303246 - DNA, 75 bp, synthetic construct
  source 1..75: mol_type = other DNA
tgtcgatattgttgagggtcgttttgatgccgggatacgcctgggtgaaattgtagataaggatatggttgcagt

SEQ ID NO: 303247 - DNA, 75 bp, synthetic construct
  source 1..75: mol_type = other DNA
tgtcgatattgttgacggtcgttttgatgccgggatacgcctgggtgaaattgtggataaagatatggttgcagt

SEQ ID NO: 303248 - DNA, 75 bp, synthetic construct
  source 1..75: mol_type = other DNA
tgtcgatattgttgatggtcgttttgatgccgggatacgcctgggtgaaattgtcgataatgatatggttgcagt

SEQ ID NO: 303249 - DNA, 75 bp, synthetic construct
  source 1..75: mol_type = other DNA
tgtgtatgattctcaacctgatatttccaacagccgttctggcggttatggaacacgatcggagcaatatcaaaa

SEQ ID NO: 303250 - DNA, 75 bp, synthetic construct
  source 1..75: mol_type = other DNA
ttctgatgaatccatcagcagataacatcgcgaaattattcgcagccatgatattagttgtttttttttacttgg

SEQ ID NO: 303251 - DNA, 75 bp, synthetic construct
  source 1..75: mol_type = other DNA
aaagcattgcttgtagggataaatgttacaaaaaaggcagtttctgatgccctgctaaacaaagggataaaagtt

SEQ ID NO: 303252 - DNA, 75 bp, synthetic construct
  source 1..75: mol_type = other DNA
cataaggccaaacatcttgagcagcgaaggttgatgctacaatggtgggcagattttcttgatgctaaccgggat

SEQ ID NO: 303253 - DNA, 75 bp, synthetic construct
  source 1..75: mol_type = other DNA
tggctacaggtatatctgtagttttcatctactgtttgctggttgaaacgcgaacggataaagaaaaagatctac

SEQ ID NO: 303254 - DNA, 75 bp, synthetic construct
  source 1..75: mol_type = other DNA
aactgaaagacctttcaggagtggtttctgaagtaaaatcagattttgatagtatttttaatgttgagtttattt

SEQ ID NO: 303255 - DNA, 75 bp, synthetic construct
  source 1..75: mol_type = other DNA
tgtcgatattgttgaaggtcgttttgatgccgggatacgcctgggtgaaattgtggataacgatatggttgcagt

SEQ ID NO: 303256 - DNA, 75 bp, synthetic construct
  source 1..75: mol_type = other DNA
tgtcgagaaggataacgcctataacgggatgaccctgcgtgaatgggctcgcatgtcactgacggagcgcggtat

SEQ ID NO: 303257 - DNA, 75 bp, synthetic construct
  source 1..75: mol_type = other DNA
agacaacggtgagcgggagaaagcgcagcgccgcagcctggcggagaagctgcagcaggaagggagcgaggacgg

SEQ ID NO: 303258 - DNA, 75 bp, synthetic construct
  source 1..75: mol_type = other DNA
atgcatggcagacacgcaatcaaacccgaaacagttactgaagttcacgggatgatccctgccgcttcgtacaat

SEQ ID NO: 303259 - DNA, 75 bp, synthetic construct
  source 1..75: mol_type = other DNA
cctccggttcagcagtggagatacccgatgacgggcggtcagtgccgggaacaccggaaggcttttatgcgccgc

SEQ ID NO: 303260 - DNA, 75 bp, synthetic construct
  source 1..75: mol_type = other DNA
caaaggctgggtgcggacggtgtggcggatggacgaccagcagcagtgggaagagcgggcgcgggtaaacgcgga

SEQ ID NO: 303261 - DNA, 75 bp, synthetic construct
  source 1..75: mol_type = other DNA
atgaaaattctccatatcgacagcagcccaatgcttaagcattcaagttcgcggaaattaagccaggcgctggta

SEQ ID NO: 303262 - DNA, 75 bp, synthetic construct
  source 1..75: mol_type = other DNA
acgaaggcgagagcactatcaccaatggcggcaccggcactcagatcaacggtaacgacgccaccgcgaataaca

SEQ ID NO: 303263 - DNA, 75 bp, synthetic construct
  source 1..75: mol_type = other DNA
actatgaaagtttcaataaaaggatgggcaagtgggtttgggcattttaaaaaaaatagtcctgtaaatattaat

SEQ ID NO: 303264 - DNA, 75 bp, synthetic construct
  source 1..75: mol_type = other DNA
agcttccgttacctggaccacaaaacgggagaaacggcgacggaaacgctgacacagcgtgagctggtcgcgagg

SEQ ID NO: 303265 - DNA, 75 bp, synthetic construct
  source 1..75: mol_type = other DNA
cccgatgtcgaaaattaacgacgccatccagcatgtacgcgatggtaaagcgcgctaccgcgtggtcctgaaagc

SEQ ID NO: 303266 - DNA, 75 bp, synthetic construct
  source 1..75: mol_type = other DNA
gccagtactggcattgtgtggtgtagtacttcccatagttccacttgatgaaatatggaaagtactgatcatctt

SEQ ID NO: 303267 - DNA, 75 bp, synthetic construct
  source 1..75: mol_type = other DNA
gccagtactggccttatgtggtgtggtactccccattgttccacttgatgaaatatggaaagtactgataatctt

SEQ ID NO: 303268 - DNA, 75 bp, synthetic construct
  source 1..75: mol_type = other DNA
catcgtgcgatgtgctcattattggcgcgccgatgattaatcacagcgtttcatctggcctcaaaacctggatag

SEQ ID NO: 303269 - DNA, 75 bp, synthetic construct
  source 1..75: mol_type = other DNA
tgcggtaacaccctgcgactgggcgttaccggcacccccggcgcggggaaaagtacctttcttgaggcctttggc

SEQ ID NO: 303270 - DNA, 75 bp, synthetic construct
  source 1..75: mol_type = other DNA
aaacccggcgataaaatctgggaatctgacgatataaaaattccggtctactgtgacaacaacacaaacggtaat

SEQ ID NO: 303271 - DNA, 75 bp, synthetic construct
  source 1..75: mol_type = other DNA
gacaattccagcagaacggatgaaagctaagcgcgagcacattgttcctttgtcaccacaagcattagaaattct

SEQ ID NO: 303272 - DNA, 75 bp, synthetic construct
  source 1..75: mol_type = other DNA
ttaagctacaaccatacgatctggtttatgttaccgccgctccggttgtgcgttggaaccgtctgatcactcagt

SEQ ID NO: 303273 - DNA, 75 bp, synthetic construct
  source 1..75: mol_type = other DNA
cggagctacgcgacagacgcaacatgacgttctgcataatcgcgaaacacatcaacatcacgatgcaaatgcaca

SEQ ID NO: 303274 - DNA, 75 bp, synthetic construct
  source 1..75: mol_type = other DNA
agaaacgcgatatttatgctgagcattttatttgttgccaggaggaaatcccttactatgggctgaattctttat

SEQ ID NO: 303275 - DNA, 75 bp, synthetic construct
  source 1..75: mol_type = other DNA
gtcggtagatatatacagctacgaagagtcagcagagctgctgtctttttgcggttaacagatttgtcgctgtca

SEQ ID NO: 303276 - DNA, 75 bp, synthetic construct
  source 1..75: mol_type = other DNA
ggaataatactcagcagcctatgaatagccagacggccaacgcagctttaaaaagaattggatttggtggtaaat

SEQ ID NO: 303277 - DNA, 75 bp, synthetic construct
  source 1..75: mol_type = other DNA
ccaataagtgggtatcagagaaggttttgatggcgattaccggcctgacaaagaacgcgatcagattggccagag

SEQ ID NO: 303278 - DNA, 75 bp, synthetic construct
  source 1..75: mol_type = other DNA
ggacatcaatataatcttgatgaagttaaaacattagtttccactgaacagtggagtcgattttgctttatagaa

SEQ ID NO: 303279 - DNA, 75 bp, synthetic construct
  source 1..75: mol_type = other DNA
tttataacgttgcttacggtgagagaacatcattaaacgaattagtagaattgataaaaagtcatctaggaagaa

SEQ ID NO: 303280 - DNA, 75 bp, synthetic construct
  source 1..75: mol_type = other DNA
ggtgcaggcaggggtatctgaacggttgctggctttgcttaacggtggtgcggtgccggaagtgaaaagcgcggt

SEQ ID NO: 303281 - DNA, 75 bp, synthetic construct
  source 1..75: mol_type = other DNA
atgaacgaaaaaatattcctgctagatcttcttttatatatttaggccctttggagtatcttaaaaaaatagatg

SEQ ID NO: 303282 - DNA, 75 bp, synthetic construct
  source 1..75: mol_type = other DNA
cagccgaaggacaactcccctatcctttacaaccgccacgaagtcgacaaatgggttgagcgtcagcaacccgcg

SEQ ID NO: 303283 - DNA, 75 bp, synthetic construct
  source 1..75: mol_type = other DNA
cgtatgcgggatgttttggctttactgatagatgagtatttaggtgatgtgaaaaaccaaccaaccaagatagcg

SEQ ID NO: 303284 - DNA, 75 bp, synthetic construct
  source 1..75: mol_type = other DNA
ccgcgcaaaaacgcatcgtgaacgctggtgaaagcctgcagttcagcgcctctgagtttggcgcagtgaaaccgc

SEQ ID NO: 303285 - DNA, 75 bp, synthetic construct
  source 1..75: mol_type = other DNA
gagaaggtctatggtacacatggccgtgggttcattcatgtacatcacatcaagccgcttcatacgattggggaa

SEQ ID NO: 303286 - DNA, 75 bp, synthetic construct
  source 1..75: mol_type = other DNA
gactcaagtaacagtgaactactacgaacgcgatccaaaggccagacaagcctgcatccagcatcacggtactgc

SEQ ID NO: 303287 - DNA, 75 bp, synthetic construct
  source 1..75: mol_type = other DNA
tcgacagcgacggtgccagcgacacccattacatccccggtgaaggcaaaatgccgttgcgggagctgatgcgcg

SEQ ID NO: 303288 - DNA, 75 bp, synthetic construct
  source 1..75: mol_type = other DNA
atgaaaacaggtatgtttacctgcggccaccagcggctgcctattgaacacgcatttcgtgatgcaagcgagctg

SEQ ID NO: 303289 - DNA, 75 bp, synthetic construct
  source 1..75: mol_type = other DNA
tggtgaaagcctgcagttcagcgcctctgagtttggcgcagtgaaaccgctggatgacgagagtacaagctggac

SEQ ID NO: 303290 - DNA, 75 bp, synthetic construct
  source 1..75: mol_type = other DNA
cagtacaaaacagatggcatggagccgttacggtcaactgctggccttcacggactgctcggggtacacgacgcg

SEQ ID NO: 303291 - DNA, 75 bp, synthetic construct
  source 1..75: mol_type = other DNA
ggcgcaaattcgcaggtgcggcagatggcgggaattggcgttcatgcatggcagtatgcgcagtcgtgcatgttg

SEQ ID NO: 303292 - DNA, 75 bp, synthetic construct
  source 1..75: mol_type = other DNA
ctgttttgtggattggttatggcctggtgttcgccggacatcgccttttcaaagcatcctgtaaagatccctcaa

SEQ ID NO: 303293 - DNA, 75 bp, synthetic construct
  source 1..75: mol_type = other DNA
atacattgagattttctacaatcgtcagcgtcgtcactctcgtctggggaatatctctccggcagccttcaggat

SEQ ID NO: 303294 - DNA, 75 bp, synthetic construct
  source 1..75: mol_type = other DNA
gaggcattaacccggatgaagggggctgccatgcgactgaccgggatgctgtaccggaatccggatcttgcggag

SEQ ID NO: 303295 - DNA, 75 bp, synthetic construct
  source 1..75: mol_type = other DNA
aacatgttctgtggccctgacaaagcctcagaagcgccccacggcattttcagcagtttacagtacccggggtat

SEQ ID NO: 303296 - DNA, 75 bp, synthetic construct
  source 1..75: mol_type = other DNA
ctatcaacctcagtttgatattaaaactggtttaagacaggcaatgccctggtatataaacttatttaaaaaagc

SEQ ID NO: 303297 - DNA, 75 bp, synthetic construct
  source 1..75: mol_type = other DNA
aaagctaataaaaaaaataaaccgaaatgctgtacttagaagttgcttattaagtccatttgcctgtgctgtttt

SEQ ID NO: 303298 - DNA, 75 bp, synthetic construct
  source 1..75: mol_type = other DNA
taagtcaaaatcaggatatgaacgtatatcgtttgcatttgatagcagcatctggataggaggtgtaagtaaaaa

SEQ ID NO: 303299 - DNA, 75 bp, synthetic construct
  source 1..75: mol_type = other DNA
gcagactggccgtttcccgataatgacgaactggcatggcaattctccgtgctgtttgaagggcagggcgagatg

SEQ ID NO: 303300 - DNA, 75 bp, synthetic construct
  source 1..75: mol_type = other DNA
taacctgtgaacgcatccgcctgcaggataccccggaaggggcggaggtgttgctccgggtgtttcccctgccgg

SEQ ID NO: 303301 - DNA, 75 bp, synthetic construct
  source 1..75: mol_type = other DNA
gctgctatcttggccaaagattctgttggtcagattaacatgattaattccaccgctcgttcagatattgaaata

SEQ ID NO: 303302 - DNA, 75 bp, synthetic construct
  source 1..75: mol_type = other DNA
aagaaaaggataacgccattagttaaaatagacacatcggatttctatgtgttcaccccggcgctcacgttcctg

SEQ ID NO: 303303 - DNA, 75 bp, synthetic construct
  source 1..75: mol_type = other DNA
cgccgattgctgctgctgttggggatgccagcaaagttatcatgctggaagagtgtattgaggatctgctggggt

SEQ ID NO: 303304 - DNA, 75 bp, synthetic construct
  source 1..75: mol_type = other DNA
cgggaactggggccatccatacgccaggtttcccgcatcagtgatttgttattagagaacgagttaaaggaaaaa

SEQ ID NO: 303305 - DNA, 75 bp, synthetic construct
  source 1..75: mol_type = other DNA
cgaaaaagcgtgaccgtattcaccgcattccggaagatcgcaaaaagaaaaaaggcaaacgtaaaccgccattct

SEQ ID NO: 303306 - DNA, 75 bp, synthetic construct
  source 1..75: mol_type = other DNA
tgaaaaaaaaacacaatattccgtctctaataaatgagtgtcattgcctgttggctgaatgctatatatccctgg

SEQ ID NO: 303307 - DNA, 75 bp, synthetic construct
  source 1..75: mol_type = other DNA
tgagttcacgcctgaaagtattgtcaaagcaataacgatatttgaacacctgaaaaaaaacacaatattccgtct

SEQ ID NO: 303308 - DNA, 75 bp, synthetic construct
  source 1..75: mol_type = other DNA
gataatgttctcctaccttcattttcggttgaaatgtcgagtaacatcaaaacatgtgtatcgaatcaaggaacc

SEQ ID NO: 303309 - DNA, 75 bp, synthetic construct
  source 1..75: mol_type = other DNA
gaacttcttcgtttacttgatgatgctgcgaaaggcgatgcaatcatcattgaacagatagacaggctttctcgt

SEQ ID NO: 303310 - DNA, 75 bp, synthetic construct
  source 1..75: mol_type = other DNA
aagactctgttatcacggtacgcagactctataatggatatttcggtaatggcaaagtcaatatttccaataatg

SEQ ID NO: 303311 - DNA, 75 bp, synthetic construct
  source 1..75: mol_type = other DNA
acctcaatattagcgatggcggtaagtttgtatcgcaaaatattacttttttgggcgataaagcaagcggtatcg

SEQ ID NO: 303312 - DNA, 75 bp, synthetic construct
  source 1..75: mol_type = other DNA
aatattaaacagaagggtcacgttgacggaggatatttaaggataggttcttcgacaggaggcgtcgggacggtc

SEQ ID NO: 303313 - DNA, 75 bp, synthetic construct
  source 1..75: mol_type = other DNA
ggttacaggcgtttagatgctgctcaagattatgattttttgtgtagggctgtattgagtggatgtattgtaagg

SEQ ID NO: 303314 - DNA, 75 bp, synthetic construct
  source 1..75: mol_type = other DNA
ctttgattatcacaggctttagcgatacaagaaacgggatttatcgttgtcctcttcgtaatgaaaaccgttgta

SEQ ID NO: 303315 - DNA, 75 bp, synthetic construct
  source 1..75: mol_type = other DNA
atgcgtttatacgaatccctgtgtcagtaccgtaaacctgatggctcaggtgtcgtgtccctgaaaatcgactgg

SEQ ID NO: 303316 - DNA, 75 bp, synthetic construct
  source 1..75: mol_type = other DNA
tgctgtccggcgtgttgccgagcgatggttgaaagctttaacgcaggacacgacgggccgttgctggcacgcaga

SEQ ID NO: 303317 - DNA, 75 bp, synthetic construct
  source 1..75: mol_type = other DNA
atcatcaacgctgaactgtttgcactggcaggtctggatgcgcagcatctgcaactgctggttcatagcggctcg

SEQ ID NO: 303318 - DNA, 75 bp, synthetic construct
  source 1..75: mol_type = other DNA
cagcaacggaggaagctcactcggttatggagaaaccggcgtcgggaatgtcagcatcaccacggggggggatgt

SEQ ID NO: 303319 - DNA, 75 bp, synthetic construct
  source 1..75: mol_type = other DNA
atgcactatcgcaatgtggtttgtttgttgtcttattcgttgttcttatcgtctgcatggggatgtgagctcgca

SEQ ID NO: 303320 - DNA, 75 bp, synthetic construct
  source 1..75: mol_type = other DNA
ttgcgcagtgcgggctgacggtggagcggctggcggcacagatagagccggtttatttgcctgagcgaaaaatac

SEQ ID NO: 303321 - DNA, 75 bp, synthetic construct
  source 1..75: mol_type = other DNA
cgataaggtcgatgaaaagttattacaggaaatgatggttgtgctgatggaccaactggagcgccgatttggtgg

SEQ ID NO: 303322 - DNA, 75 bp, synthetic construct
  source 1..75: mol_type = other DNA
tcgacgttcatacccatgacgatatcaacgttattcgcatcccggaatatctgccaaaaatcagccaggggatca

SEQ ID NO: 303323 - DNA, 75 bp, synthetic construct
  source 1..75: mol_type = other DNA
gggcgggtgctggcaccagggtttatcgacgttcatacccatgacgatatcaacgttattcgcatcccggaatat

SEQ ID NO: 303324 - DNA, 75 bp, synthetic construct
  source 1..75: mol_type = other DNA
cgttagtattgcctacagcatcacttatgcattgtattttatagtggtgtgtattatttattgttggcatctgac

SEQ ID NO: 303325 - DNA, 75 bp, synthetic construct
  source 1..75: mol_type = other DNA
gcctttataaatggattcatttcatcacaagtttcacaaggagttaatagatattcagcagaaaatcaaggtgat

SEQ ID NO: 303326 - DNA, 75 bp, synthetic construct
  source 1..75: mol_type = other DNA
tgtattgttgtaccgctcgcgttgagcatggctttaaccatctacggcttgaaagattttataattagtatcttg

SEQ ID NO: 303327 - DNA, 75 bp, synthetic construct
  source 1..75: mol_type = other DNA
gcgattattttcatctttgacaggctgatcggtgaatcacgtacctcccgttcaaaagccaaaaaccaggcgtaa

SEQ ID NO: 303328 - DNA, 75 bp, synthetic construct
  source 1..75: mol_type = other DNA
ttggagtcattaccgggccaaatcgataaatcgctcgatgaagcctcactcagcctgcgcgccggttccctgcgt

SEQ ID NO: 303329 - DNA, 75 bp, synthetic construct
  source 1..75: mol_type = other DNA
attcaccccaaaaggtgttcagtggattgctggtctgcttgctgcatggagagctaccgcagcatgaagatgata

SEQ ID NO: 303330 - DNA, 75 bp, synthetic construct
  source 1..75: mol_type = other DNA
cgataaggtcgatgaaaaactggtccaggaaatgatggttgtgctgatggatcaactggaacgccgcttcggtgg

SEQ ID NO: 303331 - DNA, 75 bp, synthetic construct
  source 1..75: mol_type = other DNA
caggaaatgatggttgtgctgatggaccaactggagcgccgatttggtggtaaacagcaggaacagccggaagag

SEQ ID NO: 303332 - DNA, 75 bp, synthetic construct
  source 1..75: mol_type = other DNA
ccatgcagttaaaaattgcacagaatgaggcagaaatcaatcgtatggcccgtgaacgtaaattacgtgaggaag

SEQ ID NO: 303333 - DNA, 75 bp, synthetic construct
  source 1..75: mol_type = other DNA
agttttgtttagcgagtcgaaagaaagtagaaagagaatttgatgaaaaaatcgttatttttaaatatattgaac

SEQ ID NO: 303334 - DNA, 75 bp, synthetic construct
  source 1..75: mol_type = other DNA
gacgactaaaggcggtcagccgccactattcagtggtaccgggatgtctgttcatgatgttgttcgccaggaaat

SEQ ID NO: 303335 - DNA, 75 bp, synthetic construct
  source 1..75: mol_type = other DNA
accccgtactgctcactcaactaaccagcggtgaaatagttgtcggggctgagggggagaagctgactaatcact

SEQ ID NO: 303336 - DNA, 75 bp, synthetic construct
  source 1..75: mol_type = other DNA
gcattatttattgtgatacgttactgagccatccgcaaaagcacttacctaaacgaaaactaaccgcaggtcagt

SEQ ID NO: 303337 - DNA, 75 bp, synthetic construct
  source 1..75: mol_type = other DNA
ggccgcagggtggcaaaacgggtgtggcgacgtgaacgggacctgacgggctggattgtcgctgtcacggaaacc

SEQ ID NO: 303338 - DNA, 75 bp, synthetic construct
  source 1..75: mol_type = other DNA
tggtatctgtctgatgttgcttcagtcttatgtataagtgctagccagcttaaaagaaaactgcatagtgaaggt

SEQ ID NO: 303339 - DNA, 75 bp, synthetic construct
  source 1..75: mol_type = other DNA
gaaaatgctattgtcggggctaccttcagagtttgagcttgctgcagttgttcccgacaagtatctggataaata

SEQ ID NO: 303340 - DNA, 75 bp, synthetic construct
  source 1..75: mol_type = other DNA
tggatggttttctgaaaggtgaatgcatcccacgagatttaaaggttaacgaaacaaacgctgaatatcttgtcc

SEQ ID NO: 303341 - DNA, 75 bp, synthetic construct
  source 1..75: mol_type = other DNA
atggctaacctgcaacttgccgtcaaaggtgaatacttcgatgccatgattcgtggagagaaaacggaagagtat

SEQ ID NO: 303342 - DNA, 75 bp, synthetic construct
  source 1..75: mol_type = other DNA
atggccgccatgtttcatcagcaacgaaatccagtgattgattatgtctggaattcagtacggcgtaaattcggg

SEQ ID NO: 303343 - DNA, 75 bp, synthetic construct
  source 1..75: mol_type = other DNA
gagtcgcgagtctcacatttggatcacccaaagaatacatcaataaattatgcaaactcttatgcttagacaaaa

SEQ ID NO: 303344 - DNA, 75 bp, synthetic construct
  source 1..75: mol_type = other DNA
attatgccgttaagtttctacgcagtgaagcgtctagtgtacgtttgttcgccgaccagcttcgcaaaggaggca

SEQ ID NO: 303345 - DNA, 75 bp, synthetic construct
  source 1..75: mol_type = other DNA
cgttctgctggaatcacgattgataaccttgaggccaagtgcgcggcgctggtagcggagagtgcggggatgaag

SEQ ID NO: 303346 - DNA, 75 bp, synthetic construct
  source 1..75: mol_type = other DNA
gatggcgcgggtattaatccagagatttacaaatactctctggagcagcagcgtgatgttccggtcgtccttttt

SEQ ID NO: 303347 - DNA, 75 bp, synthetic construct
  source 1..75: mol_type = other DNA
cggcatacaggcagcagtgaagaggttgcgtcgtatctggaaaatcttcttgcagtaaaacgaatcttcccagcg

SEQ ID NO: 303348 - DNA, 75 bp, synthetic construct
  source 1..75: mol_type = other DNA
tgaatgggcagactgttggcgctgcaggtgtttatgttgttgccagggggctctttgttgggaatggctctcctg

SEQ ID NO: 303349 - DNA, 75 bp, synthetic construct
  source 1..75: mol_type = other DNA
acggatattaacatttcagcaaagcggcttggactgcgtgctggagattcgctgacagtagcgctgggtgtggta

SEQ ID NO: 303350 - DNA, 75 bp, synthetic construct
  source 1..75: mol_type = other DNA
aagaaacacggacactgataatgcccgtgtggcaatgccatgtaagttagcgatgaatatggcgcaaaaaaaagc

SEQ ID NO: 303351 - DNA, 75 bp, synthetic construct
  source 1..75: mol_type = other DNA
gcgattgcgttgccaccggttaaagaaaattatccgggcgaacagtttgtggaatggcacaggaaagaggtgttc

SEQ ID NO: 303352 - DNA, 75 bp, synthetic construct
  source 1..75: mol_type = other DNA
ccagagaagcgacgcgtcccgttgcagccacgacctatgcgcgattgctgctggaacgtcagggcgtattacccg

SEQ ID NO: 303353 - DNA, 75 bp, synthetic construct
  source 1..75: mol_type = other DNA
agcaggtaagaaaacatcgttacctttaatggaaggtctaacagatgtgcaggataggattgaagaaacattaga

SEQ ID NO: 303354 - DNA, 75 bp, synthetic construct
  source 1..75: mol_type = other DNA
cagcgaatagaatgatggatcgcgttatgttggagaagaagaagccagcagaggatctattacttgaaccagaag

SEQ ID NO: 303355 - DNA, 75 bp, synthetic construct
  source 1..75: mol_type = other DNA
atcgcgtcgatcaagctgggccgaaagtactatccagtacatcgtgaatagtgggattgagattcacgatatctc

SEQ ID NO: 303356 - DNA, 75 bp, synthetic construct
  source 1..75: mol_type = other DNA
tgtacgggatgtttgtgcgctaaacagggtggcttatcacaatctccagattgactacggagacaagccatctga

SEQ ID NO: 303357 - DNA, 75 bp, synthetic construct
  source 1..75: mol_type = other DNA
agcatacaaatttaacctgctggataaagacgatgcagcgattaccgatgccgcaactgatgaccagtttgcagt

SEQ ID NO: 303358 - DNA, 75 bp, synthetic construct
  source 1..75: mol_type = other DNA
aaatacgtcgagttatttatcattactcgataataccggtgaaatgctggttgctataaatgacatgaatattag

SEQ ID NO: 303359 - DNA, 75 bp, synthetic construct
  source 1..75: mol_type = other DNA
ggaaaagggcgagcctggtgatcgaggtccacagggcgctaccggccccagaggaccacaaggggaaaaagggga

SEQ ID NO: 303360 - DNA, 75 bp, synthetic construct
  source 1..75: mol_type = other DNA
tttgtcttattcaaaggccttacatttcaaaaactctgcttaccaggcgcatttcgcccaggggatcaccataat

SEQ ID NO: 303361 - DNA, 75 bp, synthetic construct
  source 1..75: mol_type = other DNA
tccagagctgatagatatcttagttgaatatcaatggctaatcgcagctagagcaaatattttttcacccgctga

SEQ ID NO: 303362 - DNA, 75 bp, synthetic construct
  source 1..75: mol_type = other DNA
acacagaggaacaggatcggcgcaggaaaacttatgcagaaaaaatacagaacatttatcgaaatataaaaaaca

SEQ ID NO: 303363 - DNA, 75 bp, synthetic construct
  source 1..75: mol_type = other DNA
ttacctatgactacgttgcttactctacaggaaacaccacaaaggcgagcgatggcaccctaaaagctgcgtccc

SEQ ID NO: 303364 - DNA, 75 bp, synthetic construct
  source 1..75: mol_type = other DNA
aaaccaaaggtgaaccgattgacgtcccggcgaacagctggatcgatgttcgtctggatatgccagtggatagca

SEQ ID NO: 303365 - DNA, 75 bp, synthetic construct
  source 1..75: mol_type = other DNA
atcgaagaaccggagcagaccccggagcaggaaccttcacagtctgatgccttacaggcgctggctgaagcgctg

SEQ ID NO: 303366 - DNA, 75 bp, synthetic construct
  source 1..75: mol_type = other DNA
tgccttatgcccgcaccgttgacattgttcctgtcagtgatgaaacggcattatcacaggctgaagaggggctga

SEQ ID NO: 303367 - DNA, 75 bp, synthetic construct
  source 1..75: mol_type = other DNA
tcgcggtaatgtcgtggccgccccaaaaaatagccccgcaaatgctcaggctgctcacgcatcaccgcttcggca

SEQ ID NO: 303368 - DNA, 75 bp, synthetic construct
  source 1..75: mol_type = other DNA
gtgataccgggccgatgggccccgcagggaaggatggcgcagattcacaggcgaacagagtgcgtatcagcgaga

SEQ ID NO: 303369 - DNA, 75 bp, synthetic construct
  source 1..75: mol_type = other DNA
taatgaaataagaatttctgatatatctatgtttcattccaaattaatacagaaattaattttacttcataagaa

SEQ ID NO: 303370 - DNA, 75 bp, synthetic construct
  source 1..75: mol_type = other DNA
ttttgtgaaaaggcaaacgacacctttcataagttatctctggcaagggataacaaaaaagatttatttgctaat

SEQ ID NO: 303371 - DNA, 75 bp, synthetic construct
  source 1..75: mol_type = other DNA
aatgagcaggatcgcctatgggcccgtcaggtcgcggtccgggaagggtatggtgattctgcactggttattgat

SEQ ID NO: 303372 - DNA, 75 bp, synthetic construct
  source 1..75: mol_type = other DNA
caccgtcagaattcggtatgcatcacttctatgtggagattcccgcagcgccccgtgacgctgttgtgatctatg

SEQ ID NO: 303373 - DNA, 75 bp, synthetic construct
  source 1..75: mol_type = other DNA
attagggggcctaacaggtaacgcactatcaaatcaagctatttctaaggccttgggaacgattcgtaaagagtt

SEQ ID NO: 303374 - DNA, 75 bp, synthetic construct
  source 1..75: mol_type = other DNA
acttagcacgcagaatggtagattcgcgactgactgacaacaaaaagcgaatactggttcttcataagcaagggc

SEQ ID NO: 303375 - DNA, 75 bp, synthetic construct
  source 1..75: mol_type = other DNA
gttcccgccgtggcagagaatgatcctggggggaataacgatagccagctatcttctgccgccagcgcagggaaa

SEQ ID NO: 303376 - DNA, 75 bp, synthetic construct
  source 1..75: mol_type = other DNA
attacgaactgtatgacaaaccggaagcggttcatgaagcaatggtaaaagtgctcccattctttgccgaacacc

SEQ ID NO: 303377 - DNA, 75 bp, synthetic construct
  source 1..75: mol_type = other DNA
gtaacgcacacgctggacggtcagtttgacgacgccaacaacgctgaaaaagcgctgagtaacctcaagaacgtc

SEQ ID NO: 303378 - DNA, 75 bp, synthetic construct
  source 1..75: mol_type = other DNA
tctcactgacgtaagtggttatgtagatctgtttgtatcctatatggccgcgatagataatatggtttgtggaaa

SEQ ID NO: 303379 - DNA, 75 bp, synthetic construct
  source 1..75: mol_type = other DNA
tttaacctgcagtacagccgtcagacatactggggacatacggaaaacggactattatacggtgagcgtcaaccg

SEQ ID NO: 303380 - DNA, 75 bp, synthetic construct
  source 1..75: mol_type = other DNA
atgcttaaagttgacgcaattactttttttggcagcaaaacaaagcttgccaatgccgcaggagtgaggctggca

SEQ ID NO: 303381 - DNA, 75 bp, synthetic construct
  source 1..75: mol_type = other DNA
gtgattagtccgctacacagccacctgacacgcctgattgccgcctggaccggcagcgacgccaatgacacccgc

SEQ ID NO: 303382 - DNA, 75 bp, synthetic construct
  source 1..75: mol_type = other DNA
tgatgcgtggctgatggaaaacgcactaccgtcagggtttgaggtggggtttgatgggatggagattggggtggc

SEQ ID NO: 303383 - DNA, 75 bp, synthetic construct
  source 1..75: mol_type = other DNA
catagtacgattcttatgacgatgcgatatgcacactttgccccagaccaccttgaggctgcggtaacgctcaat

SEQ ID NO: 303384 - DNA, 75 bp, synthetic construct
  source 1..75: mol_type = other DNA
gcatactgcgacgaacgtaccgacttcaccctgggccagaccctccccctctccttcacccgtttccacagttct

SEQ ID NO: 303385 - DNA, 75 bp, synthetic construct
  source 1..75: mol_type = other DNA
ggcaacggctcagacgtggtgaatggctttacggtagggacatgggaagacaccgccgacaccgatcgcattgat

SEQ ID NO: 303386 - DNA, 75 bp, synthetic construct
  source 1..75: mol_type = other DNA
cttattgatagtgttttatgttcagataatgcccgatgacttgagttatgcagctaccgctttgcgccgattttg

SEQ ID NO: 303387 - DNA, 75 bp, synthetic construct
  source 1..75: mol_type = other DNA
ctgtttgctcaagttattgtccatgagcaacgtgtcggtaatgactccaacttattgatagtgttttatgttcag

SEQ ID NO: 303388 - DNA, 75 bp, synthetic construct
  source 1..75: mol_type = other DNA
tacagctccggcaccggaacgtggcttgcgaacggtggcatggatgtggttgatttccgcctctcgacggtgggc

SEQ ID NO: 303389 - DNA, 75 bp, synthetic construct
  source 1..75: mol_type = other DNA
cgggcggcacttttgcgacaactaacgtggtcacgctgacgggcgtgcacaccgacctcgccaccttgctggcga

SEQ ID NO: 303390 - DNA, 75 bp, synthetic construct
  source 1..75: mol_type = other DNA
ggcgggccggactccaacaccttcctgtggaacaacgcaggtacgctggtaggtaactccaccacgtcgaacagc

SEQ ID NO: 303391 - DNA, 75 bp, synthetic construct
  source 1..75: mol_type = other DNA
aacgcgcatctgattccgattattaccggggcgacgatcgtgtgcttctcgtttcttggttttgatgcggtgacc

SEQ ID NO: 303392 - DNA, 75 bp, synthetic construct
  source 1..75: mol_type = other DNA
cagccgctttaaagacccggacgccgcactgcctgaaattgcgctgtacgtcggcggcaagctcttccagtcgat

SEQ ID NO: 303393 - DNA, 75 bp, synthetic construct
  source 1..75: mol_type = other DNA
agacaagtccggctgcgcttagccagctactgggaccaaaccctcatcgcaatatcggcgataagatggctcgca

SEQ ID NO: 303394 - DNA, 75 bp, synthetic construct
  source 1..75: mol_type = other DNA
tgaaggatggtacaggaaaaccggtaccggactgcaccatagagctgaaggccacgcgaacgagtgagacggtga

SEQ ID NO: 303395 - DNA, 75 bp, synthetic construct
  source 1..75: mol_type = other DNA
acattagcgtctggcctggcgtcacatgccagcgtatcgcgcctgttgtatgtgatggggcgtgacaatgtgttc

SEQ ID NO: 303396 - DNA, 75 bp, synthetic construct
  source 1..75: mol_type = other DNA
tgatcccgaaagccatcttcctgacggcggtatacggcggcgttatctttatcgctgcgtcgttctttatgcagc

SEQ ID NO: 303397 - DNA, 75 bp, synthetic construct
  source 1..75: mol_type = other DNA
aatttcgttggtaaaaccgcactgtggaaatcgggttattatgattatgaaattgaaataatagatcgattgttt

SEQ ID NO: 303398 - DNA, 75 bp, synthetic construct
  source 1..75: mol_type = other DNA
agaaagtaaatcatatgataatgcagttaattccccatcatgtaaaatggtgcgcaggaaaaaacaacgatgtaa

SEQ ID NO: 303399 - DNA, 75 bp, synthetic construct
  source 1..75: mol_type = other DNA
atcagcagagcagaaaaataggaatgattgttccctgtgttgttatttcagagaagcatacagatatgcttgaaa

SEQ ID NO: 303400 - DNA, 75 bp, synthetic construct
  source 1..75: mol_type = other DNA
aatcagatatgcaggatggcgtcagcacatcggcggtgcaaaattccgggacgaaatccactacaccgccaaacg

SEQ ID NO: 303401 - DNA, 75 bp, synthetic construct
  source 1..75: mol_type = other DNA
gcagcttcggaatacgcaggtccacagcgtgccgagctggcgggggctgacggtcacgatagccgttgtggtagg

SEQ ID NO: 303402 - DNA, 75 bp, synthetic construct
  source 1..75: mol_type = other DNA
attatttatacagtaagacccatatcccgccacggccctccaggtctgcagacatatatgtcttcaatctggttt

SEQ ID NO: 303403 - DNA, 75 bp, synthetic construct
  source 1..75: mol_type = other DNA
atcagttacgggattatgcattatggctgaacaaatgtgaaagaccatggaagttaatttatttatgcaatcagg

SEQ ID NO: 303404 - DNA, 75 bp, synthetic construct
  source 1..75: mol_type = other DNA
tgactgagaagaacaaggagttccaccagagcatagcccgcgcggccaaaaacagctacctgacttcttattacg

SEQ ID NO: 303405 - DNA, 75 bp, synthetic construct
  source 1..75: mol_type = other DNA
tgatcttatgcagcgcgccgttacccgcttagcggcgattcaacgcactgatgcggatttgacgcagatacgcgc

SEQ ID NO: 303406 - DNA, 75 bp, synthetic construct
  source 1..75: mol_type = other DNA
gctgagaacccgactcagttacgatcttaagcagcctgataaagacaatgcagcagaggacattatcagtcatga

SEQ ID NO: 303407 - DNA, 75 bp, synthetic construct
  source 1..75: mol_type = other DNA
cgattggcgcagcgttcttctctgttggtcgtttttacccgacaagacgtcgcggtaacggtgttggaaacagaa

SEQ ID NO: 303408 - DNA, 75 bp, synthetic construct
  source 1..75: mol_type = other DNA
ttctctgttggtcgtttttacccgacaagacgtcgcggtaacggtgctggaaacagaaacgggccgctactctga

SEQ ID NO: 303409 - DNA, 75 bp, synthetic construct
  source 1..75: mol_type = other DNA
cgggaacgccttcattgagaagaaattcatcgcaaaccgcctggtttctctggtgcctttgctgccgcagaacat

SEQ ID NO: 303410 - DNA, 75 bp, synthetic construct
  source 1..75: mol_type = other DNA
atggacatgattaagtgggataagtgcgaatacattgccccacgacatgagctgaaaacgtatcccatgtgggtc

SEQ ID NO: 303411 - DNA, 75 bp, synthetic construct
  source 1..75: mol_type = other DNA
ctataaaggtcgcggcgaaacgatgtttgataagtatctcagcgggctggggaaaaacgccaaacagacgctgaa

SEQ ID NO: 303412 - DNA, 75 bp, synthetic construct
  source 1..75: mol_type = other DNA
gaaggccgttttaattttgaatattttaatgaagtgcaggagtggcaaaaaaacaatcctggcaaggtctggcct

SEQ ID NO: 303413 - DNA, 75 bp, synthetic construct
  source 1..75: mol_type = other DNA
cttgccgggccatcaagagttggtgctgtggcagctacaacaaccggagttgccgcccgtgttgtaggcggaagc

SEQ ID NO: 303414 - DNA, 75 bp, synthetic construct
  source 1..75: mol_type = other DNA
tctatcaaaagtttaagactggacaataataaaataacccacattgatactaataatacatccgatattggaact

SEQ ID NO: 303415 - DNA, 75 bp, synthetic construct
  source 1..75: mol_type = other DNA
attcagggcattattaaccatgaaaatggggacgccgctcgtgcagtaagtggcgatgatgtgatgcgggcgctg

SEQ ID NO: 303416 - DNA, 75 bp, synthetic construct
  source 1..75: mol_type = other DNA
aaaaatacgattgatcagattattgatatttatgccccttcatctgatggaaataacacatcgtcctataaaagc

SEQ ID NO: 303417 - DNA, 75 bp, synthetic construct
  source 1..75: mol_type = other DNA
gcttgccggtgattataatgcactggcagccggtgccggctgggacctgggtgtgccggggaccctttccgctga

SEQ ID NO: 303418 - DNA, 75 bp, synthetic construct
  source 1..75: mol_type = other DNA
cttgactcaatcgaaaaaaattcagccaagatgtctagtgtggcaagtaacgcccttaatgtttttaatgtaatc

SEQ ID NO: 303419 - DNA, 75 bp, synthetic construct
  source 1..75: mol_type = other DNA
gtattctgtggatagtccgacagttaaaagtggtgagttgtggctgacattacagaatggaaacctggctccgat

SEQ ID NO: 303420 - DNA, 75 bp, synthetic construct
  source 1..75: mol_type = other DNA
gcgaaacgatgtttgataagtacctcagcgggctggggaaaaacgccaaacagacgctgaaaacttacaagcaga

SEQ ID NO: 303421 - DNA, 75 bp, synthetic construct
  source 1..75: mol_type = other DNA
attacgcgctaaagctgaatccctcgataaagacatctcccgccttgaggccgttgctgacgaagagcgcagtaa

SEQ ID NO: 303422 - DNA, 75 bp, synthetic construct
  source 1..75: mol_type = other DNA
tacattctgacaggtgaaacccgcgcattaagtacaggcgttcccgctgatggtggttataccgttatccccgaa

SEQ ID NO: 303423 - DNA, 75 bp, synthetic construct
  source 1..75: mol_type = other DNA
aaaacgctggcctgggatgccttcgcatttactgaagtgttactgactcagccggtgatggtagtagttggtgaa

SEQ ID NO: 303424 - DNA, 75 bp, synthetic construct
  source 1..75: mol_type = other DNA
gcctggatgcagcaaaagcccatggactgaccgaacgcgatgtttatgaagcaactgactactataaaacaccac

SEQ ID NO: 303425 - DNA, 75 bp, synthetic construct
  source 1..75: mol_type = other DNA
aaggctatctcgttctcgcttatgacgccagtttccagggagaatctggtggggagcctcgctggatagaagatc

SEQ ID NO: 303426 - DNA, 75 bp, synthetic construct
  source 1..75: mol_type = other DNA
aatttaacgatactataattgaatctcagaaagtcacaggcaataaggcaaagcatattcttgaggatatagaaa

SEQ ID NO: 303427 - DNA, 75 bp, synthetic construct
  source 1..75: mol_type = other DNA
gtattacgggtgttaatatcgggcgtctttttcgggaaggtttcagcaattacgatccgattggcgcattgaatg

SEQ ID NO: 303428 - DNA, 75 bp, synthetic construct
  source 1..75: mol_type = other DNA
ggcgatggtttcgcaggatcgtcagttagtttcattacccgatttctcacattatgaactgtatgacaaaccgga

SEQ ID NO: 303429 - DNA, 75 bp, synthetic construct
  source 1..75: mol_type = other DNA
gcttggcatgggcttccatcctgattttactggtcggcagaacgtatatatgtccgggctgatgatgggcttgag

SEQ ID NO: 303430 - DNA, 75 bp, synthetic construct
  source 1..75: mol_type = other DNA
agcgaaacggcaacctcgtcagccagcggcgaaagtcagatgtctctcgatgagattgaagatgtgtaccacacg

SEQ ID NO: 303431 - DNA, 75 bp, synthetic construct
  source 1..75: mol_type = other DNA
acgcatctattccagcgggatgcaaatgcgcctggcgttcgctgtcgccacggcctcccggccggatattctgat

SEQ ID NO: 303432 - DNA, 75 bp, synthetic construct
  source 1..75: mol_type = other DNA
tgctttacagcgtgatgccttgattgctgccggggtggctccccggaatttacatcaggattatttatcatttta

SEQ ID NO: 303433 - DNA, 75 bp, synthetic construct
  source 1..75: mol_type = other DNA
gcatggctctatttaaagatgctgatccaactgaaacaaaagaattttatcatacgcggccaggttacaggcctg

SEQ ID NO: 303434 - DNA, 75 bp, synthetic construct
  source 1..75: mol_type = other DNA
tcggcaactacattgatcagcctgtacgtatctactctagtggtatgcaaatgcgactcgctttttctgtagcta

SEQ ID NO: 303435 - DNA, 75 bp, synthetic construct
  source 1..75: mol_type = other DNA
cgcggtgcaatggagcgagccaacaaagcccgcagaagatgcggcgaggttttccgttacgctattgtcactggt

SEQ ID NO: 303436 - DNA, 75 bp, synthetic construct
  source 1..75: mol_type = other DNA
tctgctgtatgccgcccgaaaacgggggctggaacccggtatcttctgcgccatccacacgtatggccgtcgtct

SEQ ID NO: 303437 - DNA, 75 bp, synthetic construct
  source 1..75: mol_type = other DNA
atgtactcaccttggatatttcctgacaaagcaaagttcggtcgagtcgtgccgaagaacaaaatatacgaacac

SEQ ID NO: 303438 - DNA, 75 bp, synthetic construct
  source 1..75: mol_type = other DNA
ccagtgaggtcagtgaaatacaggttttcagtgtgaagcttaaaggtgactcgatagacgacagcgtactaaaag

SEQ ID NO: 303439 - DNA, 75 bp, synthetic construct
  source 1..75: mol_type = other DNA
gggattgcaggtggtggacatcctgacgggggctgtgaactctgggtatatgaagtatctgaatccacggttaga

SEQ ID NO: 303440 - DNA, 75 bp, synthetic construct
  source 1..75: mol_type = other DNA
gttcgtaaagacacactgcatatctttaatgagcgcgttcagaagctaaaagacaagtacggtattgtcggtgag

SEQ ID NO: 303441 - DNA, 75 bp, synthetic construct
  source 1..75: mol_type = other DNA
tcagtcagggcacggcccccgtgaaaatgccggattttgatattctctcggagggtaaaacgctgtcaggcgtgg

SEQ ID NO: 303442 - DNA, 75 bp, synthetic construct
  source 1..75: mol_type = other DNA
acccgtgaacgtgttcgccagattcaggttgaaggcctgcgccgtttgcgcgaaatcctgcaaacgcaggggctg

SEQ ID NO: 303443 - DNA, 75 bp, synthetic construct
  source 1..75: mol_type = other DNA
tcgctactggtagcggggcaaacgtattatcacaagctgattatgacgcactgtcggccagaacaactggctttt

SEQ ID NO: 303444 - DNA, 75 bp, synthetic construct
  source 1..75: mol_type = other DNA
tgctaaagatgcgcaacgattccctgagtttagttcgttaaaattatcaaaaggttgtgatatatatcaacttaa

SEQ ID NO: 303445 - DNA, 75 bp, synthetic construct
  source 1..75: mol_type = other DNA
gagccaataccaagtttgcctgatgctgagaatcgtaaaaacaaagtggtagcgatggatgacaatggtaatcct

SEQ ID NO: 303446 - DNA, 75 bp, synthetic construct
  source 1..75: mol_type = other DNA
atctatactgcaaaactggagaacggtacatcaattactttacgtgatgtatctacttcacagcaacagaccgga

SEQ ID NO: 303447 - DNA, 75 bp, synthetic construct
  source 1..75: mol_type = other DNA
accggataatgaagaaaaagcccgtcatcaggaggttcagcaacaacgatttgatgaactgagtaaaatatatga

SEQ ID NO: 303448 - DNA, 75 bp, synthetic construct
  source 1..75: mol_type = other DNA
tagatggtgcttctgtaggttactggcccggtatgaaaactgatttcaggggatataccagttatggatatttaa

SEQ ID NO: 303449 - DNA, 75 bp, synthetic construct
  source 1..75: mol_type = other DNA
attaaaagcaaggatgctggaccagactttgtcgccgagaaaaatggtgagactttttgttttgaagtagtcacg

SEQ ID NO: 303450 - DNA, 75 bp, synthetic construct
  source 1..75: mol_type = other DNA
tgggcattacgaaaagctgggataacggcgtgctgagttttgccgaggggctcgcggagaatatcgctgaaggcg

SEQ ID NO: 303451 - DNA, 72 bp, synthetic construct
  source 1..72: mol_type = other DNA
cgcgggtgtgagatgcgcggcatggtggctaattttggcggtttcctttccattaacaaactttcgcagtaa

SEQ ID NO: 303452 - DNA, 75 bp, synthetic construct
  source 1..75: mol_type = other DNA
ctgagtatcgtggggataagctcaaattagccagaatggctgttgggctctcctgcgaagagttagcggagaaaa

SEQ ID NO: 303453 - DNA, 75 bp, synthetic construct
  source 1..75: mol_type = other DNA
gggtaatcgttgcgcatgttacgggagtcgatgatcgtgttgatgcttttactgttcacaataacaggcctgtta

SEQ ID NO: 303454 - DNA, 75 bp, synthetic construct
  source 1..75: mol_type = other DNA
taagaattcttatgaaaactggcttgagtcaagatttaattcgtgagttgttctccatcaacagacctattacaa

SEQ ID NO: 303455 - DNA, 75 bp, synthetic construct
  source 1..75: mol_type = other DNA
gatgctgctaatggtaccggcaccctgacccagggaaatacaagctgggatatgcacggcaaaaaaggaaatgac

SEQ ID NO: 303456 - DNA, 75 bp, synthetic construct
  source 1..75: mol_type = other DNA
gtgatgcctttcccgggaatggattgccagtgcggggactgtggagcttaattccggtgttggtggcctttccat

SEQ ID NO: 303457 - DNA, 75 bp, synthetic construct
  source 1..75: mol_type = other DNA
caatcggccctcggcggcagccagagcggtaccaccagcggcgtggcggcaatggactacgactgggacggcgcg

SEQ ID NO: 303458 - DNA, 75 bp, synthetic construct
  source 1..75: mol_type = other DNA
gcgtgaaaagtgtcgctcaatggttgctcatggcatcaatcccgcgcagaaaaagcaggaagaaaagcttaaaca

SEQ ID NO: 303459 - DNA, 75 bp, synthetic construct
  source 1..75: mol_type = other DNA
tatcatctttagcatttgttcttacgggttgtaaagaagaaacaaaatctgtcgattggtggataaatcatccga

SEQ ID NO: 303460 - DNA, 75 bp, synthetic construct
  source 1..75: mol_type = other DNA
aacaggggagtaatcaaaaccaatccactggagtcgttacgaaaatcggatgtcggtatagcagcgaagatgaag

SEQ ID NO: 303461 - DNA, 75 bp, synthetic construct
  source 1..75: mol_type = other DNA
ttactcaaggcttaatgtaggtgataaatacgataacctgatcattaatggaactcttttgtcaaaattttcagt

SEQ ID NO: 303462 - DNA, 75 bp, synthetic construct
  source 1..75: mol_type = other DNA
aatttaagctggagattgcgtttagacagatatgatacaggattgcttgatcttgagcagcttgaagcttcaggc

SEQ ID NO: 303463 - DNA, 75 bp, synthetic construct
  source 1..75: mol_type = other DNA
ttttcaattttgcatgttcttcaacacttcttaatttaagtgagaatccgtttgatggtatgtcagacaggaaaa

SEQ ID NO: 303464 - DNA, 75 bp, synthetic construct
  source 1..75: mol_type = other DNA
agtaaatctgcaacagaaatcattgctgtttccgggccgcgctgctgggtaggatttgatccttcgcgtggcgtg

SEQ ID NO: 303465 - DNA, 75 bp, synthetic construct
  source 1..75: mol_type = other DNA
atcttgagcagaaactggccgggaactctcctgatcagactgcgcagaagtcatttgctcagcgcgtatctgaag

SEQ ID NO: 303466 - DNA, 75 bp, synthetic construct
  source 1..75: mol_type = other DNA
accaaatccggcgctcgcctcttcgatctggaacagaaactggcatccggcgctgagaatcctggtgagaagaaa

SEQ ID NO: 303467 - DNA, 75 bp, synthetic construct
  source 1..75: mol_type = other DNA
cgctgcaattcctggttggagtgttaaacctaatgctgtctgtgatgataacggaatccattatacaattaaaaa

SEQ ID NO: 303468 - DNA, 75 bp, synthetic construct
  source 1..75: mol_type = other DNA
taaagttaatgtttattatcctccaggacatcctgaaaaggctgaaataaataacccgtgggttaattttttcaa

SEQ ID NO: 303469 - DNA, 75 bp, synthetic construct
  source 1..75: mol_type = other DNA
aattcacgccagatcggtaatgatggttcatggcatcctgttgtcgcatttcgtcctacgccagactacacgctc

SEQ ID NO: 303470 - DNA, 75 bp, synthetic construct
  source 1..75: mol_type = other DNA
gatggcattcttgaggtcatgaagccgaaaataaattatgcacccgctatgttggtgggtaaggtagtggtttct

SEQ ID NO: 303471 - DNA, 75 bp, synthetic construct
  source 1..75: mol_type = other DNA
aaaatcagcttagatctggcagcaattcccgcaatggttgcttaacgaagattatcactactggagatgaacctc

SEQ ID NO: 303472 - DNA, 75 bp, synthetic construct
  source 1..75: mol_type = other DNA
gattttactgcccggaatagcaattggaggattaggctatatttcttatgttgtattaattgctattgaggattt

SEQ ID NO: 303473 - DNA, 75 bp, synthetic construct
  source 1..75: mol_type = other DNA
gttatttttatcgccgtcggtttattaatcagtatgccctcctctaaaaagacgcgcaggaaaaggaaatcccgc

SEQ ID NO: 303474 - DNA, 75 bp, synthetic construct
  source 1..75: mol_type = other DNA
atatatcaaaattaagcgattattattttttagttcccgattatcaacgtgagtatgtatggaaggttgatgatc

SEQ ID NO: 303475 - DNA, 75 bp, synthetic construct
  source 1..75: mol_type = other DNA
tgcaggcgtggagctgagaaaaatcgcgggtctttaccgcattgagaaactcatccgtgagcgctgtcaacgcca

SEQ ID NO: 303476 - DNA, 75 bp, synthetic construct
  source 1..75: mol_type = other DNA
attttttgtctgtgtttaatgccatatcatctaggaaaaataatcttgaagctaactataatgaccttcttgctt

SEQ ID NO: 303477 - DNA, 75 bp, synthetic construct
  source 1..75: mol_type = other DNA
ctgcggtttatcttactaacggtggaatgaactttattctggaaactctttggcaaagttataatttatggcctt

SEQ ID NO: 303478 - DNA, 75 bp, synthetic construct
  source 1..75: mol_type = other DNA
acgtttgttaatgcatgtcaggaatatgatgacaacagcttaaaattattcgcttcgctgttaatttcacgttca

SEQ ID NO: 303479 - DNA, 75 bp, synthetic construct
  source 1..75: mol_type = other DNA
tgccagccttaatgctatggatcttgttaaaaatttgattttcagtcagataaaagaagaacagttttcggcaat

SEQ ID NO: 303480 - DNA, 75 bp, synthetic construct
  source 1..75: mol_type = other DNA
gaaggttagttctgaagtgagtgggtataaaaactataatatagtgtgtgatgctcttcgatcgattatggattt

SEQ ID NO: 303481 - DNA, 75 bp, synthetic construct
  source 1..75: mol_type = other DNA
agagctatcttcacattagttagtgaaactgaattagttaaagtaatacataacctcaatcactcttttggttat

SEQ ID NO: 303482 - DNA, 75 bp, synthetic construct
  source 1..75: mol_type = other DNA
aaggattggtgttcagttcagctcctgaaagcttcttgaattacggtaagtatgaagatgcagtagttattagct

SEQ ID NO: 303483 - DNA, 75 bp, synthetic construct
  source 1..75: mol_type = other DNA
ctctgcactggagggataatacaaggcctgataagcgtagcgcatcaggctattttgcatttgtcatcagccgcc

SEQ ID NO: 303484 - DNA, 75 bp, synthetic construct
  source 1..75: mol_type = other DNA
tgaaaggaataagtcacaaattaacaaagagcagaacaagcaatacaaaccctcttatcaacaggtcacatctca

SEQ ID NO: 303485 - DNA, 75 bp, synthetic construct
  source 1..75: mol_type = other DNA
atgactcaaacattatttaataaaaacaacctcaatcctatttttatacgtaataaaaaagagtttattaaaaat

SEQ ID NO: 303486 - DNA, 75 bp, synthetic construct
  source 1..75: mol_type = other DNA
atgggtgaggcgatactctatcagttgcatagtctgctggctgctacagcgctctgtttttgccgattggcaccc

SEQ ID NO: 303487 - DNA, 75 bp, synthetic construct
  source 1..75: mol_type = other DNA
atgccgctgatgcggcatatcctggtaacgatatctgaattgttatacatgtgtatatacgtggtaatgacaaaa

SEQ ID NO: 303488 - DNA, 75 bp, synthetic construct
  source 1..75: mol_type = other DNA
aaaacactcggtaaaagtactgatatgattaatgctaaactggaagaagcaagatctaatgccgctcgtttacgt

SEQ ID NO: 303489 - DNA, 75 bp, synthetic construct
  source 1..75: mol_type = other DNA
ggattactgaatatcagggggatccgaataactggcttagtgctttcaaaatccctccccgtcgcctggtcaaaa

SEQ ID NO: 303490 - DNA, 75 bp, synthetic construct
  source 1..75: mol_type = other DNA
gccgcgagcagctgttaaaccacgtctggggaactaacgtgtatgtggaagaccgcacggtcgatgtccacattc

SEQ ID NO: 303491 - DNA, 75 bp, synthetic construct
  source 1..75: mol_type = other DNA
gtggagcgcggaatatgatgaatggggcaaccagcttaatgaggagaacccgcatcacctgcaccagccgtaccg

SEQ ID NO: 303492 - DNA, 75 bp, synthetic construct
  source 1..75: mol_type = other DNA
gtttattaccgtttccccttttgcgggcggcggcgatctgatcacccttatctatcttcttgccctgtttcgttt

SEQ ID NO: 303493 - DNA, 75 bp, synthetic construct
  source 1..75: mol_type = other DNA
ttaaagtcagttcctccttttataccgaagaaacgttggttgaagaagataaagcattgttgattggtaatggtc

SEQ ID NO: 303494 - DNA, 75 bp, synthetic construct
  source 1..75: mol_type = other DNA
gttgaagtctgcgcttgccctgaactgctactttggttcatccggtggctcggtagaaaaatcagaagcgattca

SEQ ID NO: 303495 - DNA, 75 bp, synthetic construct
  source 1..75: mol_type = other DNA
tgggattttccttgctataggtagttttatcgataaccaacgtggtgcaacgttaagtagtactttggatcctgc

SEQ ID NO: 303496 - DNA, 75 bp, synthetic construct
  source 1..75: mol_type = other DNA
acggctgaactttcgtccattccaggcaccccatcgaggctggccccttcgatacagtggtgctttttaagatta

SEQ ID NO: 303497 - DNA, 75 bp, synthetic construct
  source 1..75: mol_type = other DNA
accgccgaattgtcatccataccaggcccccccatcgaggctggtcccttcgatactgtggtgctttttaagatt

SEQ ID NO: 303498 - DNA, 75 bp, synthetic construct
  source 1..75: mol_type = other DNA
ttgcagcgttaacttttctatttcgcctgaaacacaggtgattgattttggtaaatttaacgtcctggatattcg

SEQ ID NO: 303499 - DNA, 75 bp, synthetic construct
  source 1..75: mol_type = other DNA
aaccatcggttgactactttgaagctaaattttccgctttggaaaccaagatagcagatgtaaaagtatggatgc

SEQ ID NO: 303500 - DNA, 75 bp, synthetic construct
  source 1..75: mol_type = other DNA
atggctgatattgcaattgtgtgggatcagggatgcggttcgctgcaactgaacggtgcagacctgctgacagat

SEQ ID NO: 303501 - DNA, 75 bp, synthetic construct
  source 1..75: mol_type = other DNA
gatggcttttgtggacaaagacagagagctcaactcactggatgccgctaccggaaccaccgcaggaggtgaatc

SEQ ID NO: 303502 - DNA, 75 bp, synthetic construct
  source 1..75: mol_type = other DNA
ggctggataagctgtagtgatgcagttcctgctgaatattgcgatgtgattcttctcgatgatctcgggaatgta

SEQ ID NO: 303503 - DNA, 75 bp, synthetic construct
  source 1..75: mol_type = other DNA
cgacattacagtgggcagacatacccaactggatggtgcggtgattgcctccactgccacaccggataaaaacca

SEQ ID NO: 303504 - DNA, 75 bp, synthetic construct
  source 1..75: mol_type = other DNA
cgcgcggctggcgctttcggtgcgcataaccctgcctgatggttcagtgagacccatgattttttatgctgatct

SEQ ID NO: 303505 - DNA, 75 bp, synthetic construct
  source 1..75: mol_type = other DNA
tgataagccgtgcccgtgcctacgcggatgaggcgctgggctggctcagtcaggatggcgtggcgtcatccgtgg

SEQ ID NO: 303506 - DNA, 75 bp, synthetic construct
  source 1..75: mol_type = other DNA
ggtgatgccagcggttgctcgctgcgggttggagtgtttggtgctgagccgtggacacaggccatgcgtaaagag

SEQ ID NO: 303507 - DNA, 75 bp, synthetic construct
  source 1..75: mol_type = other DNA
ggcacgcccaaagacaaaattcatgttgcctatggttacggcctgtttactggtgggctgggcgcgcactatggt

SEQ ID NO: 303508 - DNA, 75 bp, synthetic construct
  source 1..75: mol_type = other DNA
aactgtggcagtatcccgcgttcagaaggcaaggcgtgtcgggtgtttgatctgcgcaatattgttggtgcctga

SEQ ID NO: 303509 - DNA, 75 bp, synthetic construct
  source 1..75: mol_type = other DNA
cgggcgagcaaaacgcggcatatcaagcgatgtttgcagtacagaaagccttcacaattgcatctgccgcattaa

SEQ ID NO: 303510 - DNA, 75 bp, synthetic construct
  source 1..75: mol_type = other DNA
gcgaagctaaatcagcgatgaaagattatataactaatacgctggatgcacagaacgcgaccgctggtttcggaa

SEQ ID NO: 303511 - DNA, 75 bp, synthetic construct
  source 1..75: mol_type = other DNA
ctgcagcagaccatagaaaacacagcgatgcgactgatgcagcgtgaatcacaacgacccggaggaattttgcag

SEQ ID NO: 303512 - DNA, 75 bp, synthetic construct
  source 1..75: mol_type = other DNA
ggaccgaatgcaggagctattggaggtgctgccgcaggtgcatgggccggtggattatttggggaatatgcacct

SEQ ID NO: 303513 - DNA, 75 bp, synthetic construct
  source 1..75: mol_type = other DNA
tcttttggaaatcttaaatgtcgagtattagatttaaaaaattatgctgaagatatgtataactggaggcatata

SEQ ID NO: 303514 - DNA, 75 bp, synthetic construct
  source 1..75: mol_type = other DNA
atgccaatgagacacaaagctgtcattgagcagatcaagcggcagctaagggaagaaatcaaagagattaaccgc

SEQ ID NO: 303515 - DNA, 75 bp, synthetic construct
  source 1..75: mol_type = other DNA
tcgggatggaagtaattgccaatgcagcagcaaaaacgccacgcgatacagggacgctaatcggtggctattacg

SEQ ID NO: 303516 - DNA, 75 bp, synthetic construct
  source 1..75: mol_type = other DNA
acccctatgccaaaaccacctccatatctagattttcaaaagaaaaaggcataagtgaaaacgacgtatataaag

SEQ ID NO: 303517 - DNA, 75 bp, synthetic construct
  source 1..75: mol_type = other DNA
ttaacaaggttttaaaagcattcccgcagttctggaacggagaggaattacaacgttcaatggtgagtgacgcta

SEQ ID NO: 303518 - DNA, 75 bp, synthetic construct
  source 1..75: mol_type = other DNA
aactttataaactaagaaaaaattgccttgcatacattcatggacactcggctggtggaacaaacccttctttag

SEQ ID NO: 303519 - DNA, 75 bp, synthetic construct
  source 1..75: mol_type = other DNA
aaaaacaaaacggaaaagaatattcactttgtgccgttcatgaccgatgagaacggagcaaatgtcccgacgaac

SEQ ID NO: 303520 - DNA, 75 bp, synthetic construct
  source 1..75: mol_type = other DNA
gagatatacggtgtagtgatgtgatcgaactgcctcagggaatgttttcaggagcatcgtcgatcctcatgacta

SEQ ID NO: 303521 - DNA, 75 bp, synthetic construct
  source 1..75: mol_type = other DNA
ttaaccctaaaactggaaagccacctgtatgtcggaatggaaagcccattggaccttttgataccagtgaaacac

SEQ ID NO: 303522 - DNA, 75 bp, synthetic construct
  source 1..75: mol_type = other DNA
ataatggataatagtaataaagtgatcaatgaagtggtctttggcaatgtttatatttctgaactcggtgcaaaa

SEQ ID NO: 303523 - DNA, 75 bp, synthetic construct
  source 1..75: mol_type = other DNA
caaaggacagaatacttacgactttactatgtgggagaaaatggtagaggataagtctctcacatctcatacggt

SEQ ID NO: 303524 - DNA, 75 bp, synthetic construct
  source 1..75: mol_type = other DNA
gaactggtggcgggatgccagcgctgtgctgattgccaagaagagtttgaagaacgtagtaagcacctgaggtga

SEQ ID NO: 303525 - DNA, 75 bp, synthetic construct
  source 1..75: mol_type = other DNA
attttgttcaggcttcgcgctttatcaatggtggtgttgcggtaaatacaccaaaactgcgtgatttcgcgatca

SEQ ID NO: 303526 - DNA, 75 bp, synthetic construct
  source 1..75: mol_type = other DNA
aatattgctgatattattatcgtcgatggcggcagcactgacggttctcttgaaaaagatcgcttgttatcgctc

SEQ ID NO: 303527 - DNA, 75 bp, synthetic construct
  source 1..75: mol_type = other DNA
cacattcagatattcaccatctgcatatgctatatctatacatatgcagaacatctacctatactgagcatatgc

SEQ ID NO: 303528 - DNA, 75 bp, synthetic construct
  source 1..75: mol_type = other DNA
cggagatcgcctggacagactggaaaatcagttcagtcaactgtcagcgcaggagaaatcagaacctgacgcaga

SEQ ID NO: 303529 - DNA, 75 bp, synthetic construct
  source 1..75: mol_type = other DNA
atcttgaaaccgcattcagcgaactcagccgtgaagccaccaccattcctggaagagcgccggaaaccaacacgt

SEQ ID NO: 303530 - DNA, 75 bp, synthetic construct
  source 1..75: mol_type = other DNA
attctccgggaactgctgggccggaccacggcacccgagctggtggatatcgataagatgttaccgccggatcgt

SEQ ID NO: 303531 - DNA, 75 bp, synthetic construct
  source 1..75: mol_type = other DNA
gggtgggcggttaacacgctgtctcaaatagcgaatatcacaatggggcagtctccagccggggagtcttataat

SEQ ID NO: 303532 - DNA, 75 bp, synthetic construct
  source 1..75: mol_type = other DNA
tttggaacagacattaactagagctgatgttggtataaagtataaggtgatttcaaagacgggacagcatgcaaa

SEQ ID NO: 303533 - DNA, 75 bp, synthetic construct
  source 1..75: mol_type = other DNA
atagtgatgacagcctagttttatcggatgaaagttatcatcggcaatatatggatttatatcactggagtaata

SEQ ID NO: 303534 - DNA, 75 bp, synthetic construct
  source 1..75: mol_type = other DNA
tatcagcactgacgggcggagttatgttgttatcggcaccagccatggcagtggatgtccccataaaaataaccg

SEQ ID NO: 303535 - DNA, 75 bp, synthetic construct
  source 1..75: mol_type = other DNA
gaggcccgcacctcttcgctatcttcttctgacagttcccgccctctctcagcctcaccgttccccgacacactg

SEQ ID NO: 303536 - DNA, 75 bp, synthetic construct
  source 1..75: mol_type = other DNA
atgaatattgccaatgccgattgttgtattgggcgagggcttgcggcattaaatagcaaaagccgctcagatgga

SEQ ID NO: 303537 - DNA, 75 bp, synthetic construct
  source 1..75: mol_type = other DNA
cggtgctaaaagagattcaggacggcattcccagtcacgtcacggtcgatttggtttccgctccagaaacaactg

SEQ ID NO: 303538 - DNA, 75 bp, synthetic construct
  source 1..75: mol_type = other DNA
cgctttgtggttgtggtgggtgattacaacacccgcagcgaacagagcgccagacagggaggcaccgtccgggat

SEQ ID NO: 303539 - DNA, 75 bp, synthetic construct
  source 1..75: mol_type = other DNA
acgtccctgatgcaggcgttaaaccagttgcttcaggaatacgggagccccagtgaaaagaccgtactgtttcct

SEQ ID NO: 303540 - DNA, 75 bp, synthetic construct
  source 1..75: mol_type = other DNA
gagatagcacaggctgtgtatccgtgccatcgggagccaaggagttggaggtagatactgacgaagagccgactg

SEQ ID NO: 303541 - DNA, 75 bp, synthetic construct
  source 1..75: mol_type = other DNA
catatgttccggatttatggcggtgccactaccgacgatgacccggcatggctgagaacccgactcagttacgat

SEQ ID NO: 303542 - DNA, 75 bp, synthetic construct
  source 1..75: mol_type = other DNA
ctggaattgttaagtgtggatctgaaagtgtacatagaagccgcccggcgtcgcctggagcttctcctgtggacc

SEQ ID NO: 303543 - DNA, 75 bp, synthetic construct
  source 1..75: mol_type = other DNA
caacaaatatatcatacttgggcaccaacagcttcagcttaatcggtaaccagtacctgacacacggaagcatca

SEQ ID NO: 303544 - DNA, 75 bp, synthetic construct
  source 1..75: mol_type = other DNA
taaaaactcagccggttcaattaaataaagtcacatctaatactgaatctacgataaaacaacacgagttagtat

SEQ ID NO: 303545 - DNA, 75 bp, synthetic construct
  source 1..75: mol_type = other DNA
tagctgactatgctacgcaatgttgtcctgggagaaaactatcaccaatgacactttctcgagatattgagacat

SEQ ID NO: 303546 - DNA, 75 bp, synthetic construct
  source 1..75: mol_type = other DNA
ggtgtggtcgcttatgagcactggctgcgaaatacgggcaaaaatattcccgtcaatccagacctgatgaaagta

SEQ ID NO: 303547 - DNA, 75 bp, synthetic construct
  source 1..75: mol_type = other DNA
ttgaataggacagtatttcgtcagatcccgaacggatccaggttgctggccgttggaaattttttcagggccccg

SEQ ID NO: 303548 - DNA, 75 bp, synthetic construct
  source 1..75: mol_type = other DNA
tattttgcatttgtcatcagccgccgtcaccccgacagtatcggggtgacggataatcacttactcgatcccttt

SEQ ID NO: 303549 - DNA, 75 bp, synthetic construct
  source 1..75: mol_type = other DNA
atgtttccattaaatgatctgtcgttaaatactcagtcggttcaattaaataaagtcacatctaatactgagtct

SEQ ID NO: 303550 - DNA, 75 bp, synthetic construct
  source 1..75: mol_type = other DNA
gcagaacgtagcagaatgctcgcggtaatgggttcagcggggtcgctgggcgtatatctggcaaacgtcgataaa

SEQ ID NO: 303551 - DNA, 75 bp, synthetic construct
  source 1..75: mol_type = other DNA
gtgataagaatgcaattgaacgtcaaagtgacggtgtagaattttgtttcatccctgagttcaatgacggaagaa

SEQ ID NO: 303552 - DNA, 75 bp, synthetic construct
  source 1..75: mol_type = other DNA
ggtgaaattgttagcaaagaagagattatcgataaggtctggagcgcgagtgttgccagtgatgagtctctaaca

SEQ ID NO: 303553 - DNA, 75 bp, synthetic construct
  source 1..75: mol_type = other DNA
cggtaactataccggaaacaatggcctgatgacgttcaacgcgacgctgggcggcgataattcgcccaccgataa

SEQ ID NO: 303554 - DNA, 75 bp, synthetic construct
  source 1..75: mol_type = other DNA
ggcgatggaccatgataaaaaaattatgctggtcgcgcagaaagaagcttcaacggatgagccgggtgtaaacga

SEQ ID NO: 303555 - DNA, 75 bp, synthetic construct
  source 1..75: mol_type = other DNA
gagaattttattgcagataatgtcaagatactaccgtacggagctgtatttggcggtgcaggtgccaatttttat

SEQ ID NO: 303556 - DNA, 75 bp, synthetic construct
  source 1..75: mol_type = other DNA
ttgcagtttataatggtgaaaagtggttagtagagcaacttacatctataataaatcaaaaaaatgttgatattg

SEQ ID NO: 303557 - DNA, 75 bp, synthetic construct
  source 1..75: mol_type = other DNA
atggggttgattctacaatcattgcatcaaaaggcctccaggttgttacttccggcaaccaggcccacgcagtat

SEQ ID NO: 303558 - DNA, 75 bp, synthetic construct
  source 1..75: mol_type = other DNA
attgccccgtttgttattcccctgaccattctgattaacgtggcggtgatgcttccaattagtagaacatgtgtt

SEQ ID NO: 303559 - DNA, 75 bp, synthetic construct
  source 1..75: mol_type = other DNA
agccggaggcaaaaaagggaaagcagccgccagtattggtatgagtcgtaccactttctggcggaaaacacgaaa

SEQ ID NO: 303560 - DNA, 75 bp, synthetic construct
  source 1..75: mol_type = other DNA
aacgcgcaggatcgctggcatcttggcgtgatggcaggctacgccaatcagcacagtaatactcagagtaatcgt

SEQ ID NO: 303561 - DNA, 75 bp, synthetic construct
  source 1..75: mol_type = other DNA
tcagggatggattatttatttgctaaattaaaagcatctaaagatatttatcatgaatttgttagcggcaaaata

SEQ ID NO: 303562 - DNA, 75 bp, synthetic construct
  source 1..75: mol_type = other DNA
gcatgaacgcctgggacagatgcagtataccgatgttattaccggtgagcagaagaataccagcatgtggatgca

SEQ ID NO: 303563 - DNA, 75 bp, synthetic construct
  source 1..75: mol_type = other DNA
gataaaaccattgctggcgaataccctgactatcagcgcaaaatcagcgccacccgtgatggcctgaaagtcacc

SEQ ID NO: 303564 - DNA, 75 bp, synthetic construct
  source 1..75: mol_type = other DNA
acctgcggacgcgatcgccattctgggcgcgcatggcctctatcctgaccggcggccgcctggtgacacccgata

SEQ ID NO: 303565 - DNA, 75 bp, synthetic construct
  source 1..75: mol_type = other DNA
actgcatgggaaaatgttggacttcgcgaccttcaggtctcaggcaattgctcttttggaaggtaataaggatcc

SEQ ID NO: 303566 - DNA, 75 bp, synthetic construct
  source 1..75: mol_type = other DNA
ctaccggttatcactatcacacgtaaggacggcgacagtcaccgctttaccctggcagatcgcggagcttacacg

SEQ ID NO: 303567 - DNA, 75 bp, synthetic construct
  source 1..75: mol_type = other DNA
cctggatggagacagctgatgtgatagccagccattatgaaaatgataaagatgtggtgagagaactactgtcgc

SEQ ID NO: 303568 - DNA, 75 bp, synthetic construct
  source 1..75: mol_type = other DNA
gtatttcgacggtgacgatctggtcaataaaaatatccgtgaatatttcgatggcagcgacgagtttaatcgccg

SEQ ID NO: 303569 - DNA, 75 bp, synthetic construct
  source 1..75: mol_type = other DNA
gaaaaatatcggagatataacaatggtcagcactgaaggactctggactatatatacaacggccagagttgtcgt

SEQ ID NO: 303570 - DNA, 75 bp, synthetic construct
  source 1..75: mol_type = other DNA
gcgtggagcgcggaatatgatgaatggggcaaccagcttaatgaggagaacccgcatcacctgcaccagccgtac

SEQ ID NO: 303571 - DNA, 75 bp, synthetic construct
  source 1..75: mol_type = other DNA
cttctatatatgtatttgataataattcgactgacagtacagcacaagtggcagaggatgctggagcaacagttc

SEQ ID NO: 303572 - DNA, 75 bp, synthetic construct
  source 1..75: mol_type = other DNA
gagacaatacctcatgaagtcgtctccatcatgattgatgacgatgtctcattgttggcggcatggcgtatttac

SEQ ID NO: 303573 - DNA, 75 bp, synthetic construct
  source 1..75: mol_type = other DNA
atactgaattttccattggcggtactgagctgctgctgtttaagcagatgggcaaagctacggtggatggcatcc

SEQ ID NO: 303574 - DNA, 75 bp, synthetic construct
  source 1..75: mol_type = other DNA
tgcgagaatggattcagatgacatttgcctccctgaacgttttcaaaaacaaatacctctttttttagtgataaa

SEQ ID NO: 303575 - DNA, 75 bp, synthetic construct
  source 1..75: mol_type = other DNA
ctaccggcagcaaaacgccagcattcagcgtcacgattgagggtaaggatattacaacggtgctggataagcgcc

SEQ ID NO: 303576 - DNA, 75 bp, synthetic construct
  source 1..75: mol_type = other DNA
aacaacgccactggtaattttaaaatctttgttcaggataccggcgtcagcccacagtctgacgacgcgatgacg

SEQ ID NO: 303577 - DNA, 75 bp, synthetic construct
  source 1..75: mol_type = other DNA
taatggtggcacacagaatattaataattatggcatagccacaggcaccaatatcaacagcggaacgcaaaatat

SEQ ID NO: 303578 - DNA, 75 bp, synthetic construct
  source 1..75: mol_type = other DNA
caataccataatcaatggtggtacacagaatattaataatcatggtattgccactggcaccaatattaacagcgg

SEQ ID NO: 303579 - DNA, 75 bp, synthetic construct
  source 1..75: mol_type = other DNA
caaattattgataacaccagctcctcggatgttattgaagtttattccggcggcgtgcttgatgttagaggtggt

SEQ ID NO: 303580 - DNA, 75 bp, synthetic construct
  source 1..75: mol_type = other DNA
agccagaacgtgacgtttgtcgccgatgtcaggacggcgaagatagcggacctggtggttattaaggacggctca

SEQ ID NO: 303581 - DNA, 75 bp, synthetic construct
  source 1..75: mol_type = other DNA
tttagaagtatctcattccgcaaacaagacgattattaaagataaaggaacaatgtcagttttaaccaatgctaa

SEQ ID NO: 303582 - DNA, 75 bp, synthetic construct
  source 1..75: mol_type = other DNA
atggtgataaatggaaacttcagaaagaaggtaatgaaagaccaagtaagacggcgacgactaaaaatgagattg

SEQ ID NO: 303583 - DNA, 75 bp, synthetic construct
  source 1..75: mol_type = other DNA
acgataagcgcgccgctgttcaggccttgagtggttattcaattcctgtggtgactgtaaaagtgcgcgtttgct

SEQ ID NO: 303584 - DNA, 75 bp, synthetic construct
  source 1..75: mol_type = other DNA
tctcaacagtggcttaccaagttggctatactccggctcatttctctgttgcatttcgcaagcgctttggtatct

SEQ ID NO: 303585 - DNA, 75 bp, synthetic construct
  source 1..75: mol_type = other DNA
gaagtctggcaacgaacacaaccataaatggtggtcgacagtatgttgaacagagcacagtagaaacaaccacca

SEQ ID NO: 303586 - DNA, 75 bp, synthetic construct
  source 1..75: mol_type = other DNA
tcgtgccagaaataaaggtcatcaagttggacaatatctcgatgataattctgctgctgattttattgcttctgt

SEQ ID NO: 303587 - DNA, 75 bp, synthetic construct
  source 1..75: mol_type = other DNA
gaatttattgatggttccggttatctcattttgccaacgaccggtcgcttctttcagattccctacggctgcctg

SEQ ID NO: 303588 - DNA, 75 bp, synthetic construct
  source 1..75: mol_type = other DNA
cggttttgatcgcggaggacatggcagtgtgggcagttattctctgggcggctatgccagttgggaacatgaaag

SEQ ID NO: 303589 - DNA, 75 bp, synthetic construct
  source 1..75: mol_type = other DNA
ctgttatcttaaacaggtaatagaaaataatgatggctataaagtattctatttgaatggtgtcccaattaagcg

SEQ ID NO: 303590 - DNA, 75 bp, synthetic construct
  source 1..75: mol_type = other DNA
ggaaaacctgatgttccgccagcgtatcactgaccgctatctggtcaatctggctgaatccatcgccaccaccgt

SEQ ID NO: 303591 - DNA, 75 bp, synthetic construct
  source 1..75: mol_type = other DNA
ttctgggcggtagataaaccgcaacacgcttctctgttccgcgacattatcgaaggcgtgaacgccaaattccgc

SEQ ID NO: 303592 - DNA, 75 bp, synthetic construct
  source 1..75: mol_type = other DNA
aaaccttatgatagagggggataatctcgaagttttaaagcttcttcaaaaaagctattctggtaaggttaagct

SEQ ID NO: 303593 - DNA, 75 bp, synthetic construct
  source 1..75: mol_type = other DNA
ctcaggatccgattgggctgaaggggggatggaatttttatcagtatccgctgaatccggttcagtatatagatt

SEQ ID NO: 303594 - DNA, 75 bp, synthetic construct
  source 1..75: mol_type = other DNA
ctctctgaacacttagtaccaaaagttgaatttaattacgaaaccagaagttggatgagtaaaaaattcacgttg

SEQ ID NO: 303595 - DNA, 75 bp, synthetic construct
  source 1..75: mol_type = other DNA
ttttacagtgaaaaagtaaataatctgaatacaggtaatacacatccaataacttcatggaatgaggttattgat

SEQ ID NO: 303596 - DNA, 75 bp, synthetic construct
  source 1..75: mol_type = other DNA
atatatgactcatgatactgattttgctgcagcactgcatgatgcaaagaaaatctggttaaaaagttatgatgg

SEQ ID NO: 303597 - DNA, 75 bp, synthetic construct
  source 1..75: mol_type = other DNA
gtatctcttttcagacaaaattgaagaagactcgaaatatattgaattagttaaatcttcagaaaaaagaattga

SEQ ID NO: 303598 - DNA, 75 bp, synthetic construct
  source 1..75: mol_type = other DNA
ttgccgatggcggcacgttgtttctcgatgaaattggcgatctgccgttagaacttcagcctaaactgctgcgcg

SEQ ID NO: 303599 - DNA, 75 bp, synthetic construct
  source 1..75: mol_type = other DNA
tcgaaggaatggctatgtctgtcgttgaggcaatgcaagtgggattaattccttgcgttactaatgttggacaaa

SEQ ID NO: 303600 - DNA, 75 bp, synthetic construct
  source 1..75: mol_type = other DNA
gtaggacgcgtaaataaagttaaaaacatcaatgcagcaatcaattttgtaaaagtatttaatgaattaaattta

SEQ ID NO: 303601 - DNA, 75 bp, synthetic construct
  source 1..75: mol_type = other DNA
ttgagtacggaggaatttctactggcacgataatcgaaagtggcaatcaatatgttcataaaggtggtaccagca

SEQ ID NO: 303602 - DNA, 75 bp, synthetic construct
  source 1..75: mol_type = other DNA
gctgatatttttacaacaattaaggcatcttcaaagtattttagagcggattttcgcaccgataatatgaataac

SEQ ID NO: 303603 - DNA, 75 bp, synthetic construct
  source 1..75: mol_type = other DNA
ggtctatatttgtgattatattcttaatgatatgagtcataaatcaacctatactttctggtggcactatccatt

SEQ ID NO: 303604 - DNA, 75 bp, synthetic construct
  source 1..75: mol_type = other DNA
taataccagcatatgcattatataactcagtcagaagtagattaaatataccattgcattttgtattggtcactt

SEQ ID NO: 303605 - DNA, 75 bp, synthetic construct
  source 1..75: mol_type = other DNA
ggcgtggttagtgaaacgctttgggacgcgtaatgtcatcctggtcacgatgtcctgcgcattgatcgggatgat

SEQ ID NO: 303606 - DNA, 75 bp, synthetic construct
  source 1..75: mol_type = other DNA
gcgcatattgcgaacgaggatttgcgtgtcatgggcctggccgattccatcagccggctgacccatctgctggcc

SEQ ID NO: 303607 - DNA, 75 bp, synthetic construct
  source 1..75: mol_type = other DNA
gctttataccgcccagccagtgccggtaactccggatgcctggataagctgtagtgagcgaatgccagaaatggg

SEQ ID NO: 303608 - DNA, 75 bp, synthetic construct
  source 1..75: mol_type = other DNA
gtgggaccacagggaccgaaaggcgacaccggagcaacgggtccgcagggacagaagggggacaagggggataca

SEQ ID NO: 303609 - DNA, 75 bp, synthetic construct
  source 1..75: mol_type = other DNA
ccgggagaggcaggtcctcagggaccgaaaggggatacgggagccgcaggtccggcaggaccacggggaccatcc

SEQ ID NO: 303610 - DNA, 75 bp, synthetic construct
  source 1..75: mol_type = other DNA
ctgtgagaaacagtttctggagaacccccccctgcattttaaggaaaaactttgcttatccagatttattaataa

SEQ ID NO: 303611 - DNA, 72 bp, synthetic construct
  source 1..72: mol_type = other DNA
atgttaactggctgtccgggcatttttgcggtttttatctttattattcagtttgttgtgcggaaaaaatgt

SEQ ID NO: 303612 - DNA, 75 bp, synthetic construct
  source 1..75: mol_type = other DNA
cgagaaaatgggagagaaaggaaaatatgccgaactcacctgtaatcttgctgataataattgcgtaactcgctc

SEQ ID NO: 303613 - DNA, 75 bp, synthetic construct
  source 1..75: mol_type = other DNA
cctcggatatgatgaatggtctggtcaatatgatcccatgggcgatggttatcatcatgctgcgctggataacca

SEQ ID NO: 303614 - DNA, 75 bp, synthetic construct
  source 1..75: mol_type = other DNA
gctgccgggcgcatcactgtgctgaccaacgagaacggcagccagtccacgttccggtatgacccggtcgacagg

SEQ ID NO: 303615 - DNA, 75 bp, synthetic construct
  source 1..75: mol_type = other DNA
ttgatcttgggacctatgagtatgtcctgaaaagtgacggcaacagcaactggaacctgaccaatgatgtcaaac

SEQ ID NO: 303616 - DNA, 75 bp, synthetic construct
  source 1..75: mol_type = other DNA
ttgatcttgggacctatgagtatgtcctgaaaagtgacggcaacagcaactggaacctgaccaatggagcctgta

SEQ ID NO: 303617 - DNA, 75 bp, synthetic construct
  source 1..75: mol_type = other DNA
ctgggcggctatgccagttgggaacatgaaagtggtttctatctggacggtgtcgtgaagctgaaccgttttaaa

SEQ ID NO: 303618 - DNA, 75 bp, synthetic construct
  source 1..75: mol_type = other DNA
tgttgatggtacaacgataaataagtccggttatcaggacatcacgcaaggaagtattgcaacgaacacaatcat

SEQ ID NO: 303619 - DNA, 75 bp, synthetic construct
  source 1..75: mol_type = other DNA
ggtggagatctctgtcaccagtcagacggcgggagtcagtgcggtcaccgccagcatcaacaacagcagcctgag

SEQ ID NO: 303620 - DNA, 75 bp, synthetic construct
  source 1..75: mol_type = other DNA
gagcggttgaacataatgaaagcgagtccacacaacaataatgtctggggggcgacgtataacgtaaccggctca

SEQ ID NO: 303621 - DNA, 75 bp, synthetic construct
  source 1..75: mol_type = other DNA
acactcaccttgctgcccaagtggagtattgccgggatggaaatgtaccatgcatttcggtggaaaaaacggatg

SEQ ID NO: 303622 - DNA, 75 bp, synthetic construct
  source 1..75: mol_type = other DNA
agatacggtgcgttgtatctgtcgcggtgacagtaaagccaggaatgaaatagccagatgccgcacccagggcag

SEQ ID NO: 303623 - DNA, 75 bp, synthetic construct
  source 1..75: mol_type = other DNA
acaaagacagcaagtgattacctgccacagacaaattggtcaacaactcaattaccaccaggatatacttgtgca

SEQ ID NO: 303624 - DNA, 75 bp, synthetic construct
  source 1..75: mol_type = other DNA
gaaccaacagttatggtgatgctttctacatcaggaattcagaagctaaaaatgtagtgctggaaaacgctggct

SEQ ID NO: 303625 - DNA, 75 bp, synthetic construct
  source 1..75: mol_type = other DNA
cagggactgatatcgaaggatacaacaagctctctcacttcactattaccggaggggaggctaattatgttgtgc

SEQ ID NO: 303626 - DNA, 75 bp, synthetic construct
  source 1..75: mol_type = other DNA
aagcagaaaaaatggctacggactggaaaactctggctggttcgctggcaacactatttccagatcgtaacaaac

SEQ ID NO: 303627 - DNA, 75 bp, synthetic construct
  source 1..75: mol_type = other DNA
agaattttggcgagccattgacactagaacaactaaccttagttctccgtgaaaaaattcatcccagccgtcgct

SEQ ID NO: 303628 - DNA, 75 bp, synthetic construct
  source 1..75: mol_type = other DNA
atgaacaccaattatgaagccactgttgcaactactgataacattgttcacgaggtttacctggaaggaaagcat

SEQ ID NO: 303629 - DNA, 75 bp, synthetic construct
  source 1..75: mol_type = other DNA
gcggcagcgacaccattgtccccattgatgtttggatccccggctgcccgccaacaccggccgccaccattcacg

SEQ ID NO: 303630 - DNA, 75 bp, synthetic construct
  source 1..75: mol_type = other DNA
aaacagtacagactcagagataatttgcagtaacaagtttatttttcaaacatttgtatattcaaaagagagcat

SEQ ID NO: 303631 - DNA, 75 bp, synthetic construct
  source 1..75: mol_type = other DNA
agattcttttggaagtgcacttattcactttttagcaaggacgtttcgtagggttgtggcggtttggcaacctaa

SEQ ID NO: 303632 - DNA, 75 bp, synthetic construct
  source 1..75: mol_type = other DNA
acgcataatcaaatatgtgcatcaaaaaaatgtttaagaaatattacaagactatttgaacatctatcattcgat

SEQ ID NO: 303633 - DNA, 75 bp, synthetic construct
  source 1..75: mol_type = other DNA
atgaaccaatcacaatttcagcaggcggctggtatcagcgccgggctttctgcgcgctggtttccgcacattgat

SEQ ID NO: 303634 - DNA, 75 bp, synthetic construct
  source 1..75: mol_type = other DNA
ccaaagaccgtctggcgatacccggtgcattcggatacgggcatttattctcttcgtcggaagttgtgtatttca

SEQ ID NO: 303635 - DNA, 75 bp, synthetic construct
  source 1..75: mol_type = other DNA
ataaagtgtcagttttaatatctggtgaattattggatggttctgggcgcccgatgcctcattgtcatataataa

SEQ ID NO: 303636 - DNA, 75 bp, synthetic construct
  source 1..75: mol_type = other DNA
gcaggatgagcgttaccaccgcgtctgctggccgttcagaccgtggccggaaacgctgtcaccgcagcagggcga

SEQ ID NO: 303637 - DNA, 75 bp, synthetic construct
  source 1..75: mol_type = other DNA
cggctggtgtaagcgccgggttagctacgcgctggtttccgcacattgacgcggcaatgaaagagttcggcattg

SEQ ID NO: 303638 - DNA, 75 bp, synthetic construct
  source 1..75: mol_type = other DNA
gctgcaatgaaagagtttggaatcacagcagttaacgatcaggccatgttcattgcacaagttgggcatgaatct

SEQ ID NO: 303639 - DNA, 75 bp, synthetic construct
  source 1..75: mol_type = other DNA
ctactgaaattaaattcgattttacagcatacattacagagtattcacggttgatctaccccgtgctgaagaaat

SEQ ID NO: 303640 - DNA, 75 bp, synthetic construct
  source 1..75: mol_type = other DNA
attaacgccccggcagcatagacgcattcatgcctatcaatgcgacgacccaatgagagggatttatttgaatca

SEQ ID NO: 303641 - DNA, 75 bp, synthetic construct
  source 1..75: mol_type = other DNA
gttaactagacggcagcatatgagaatccatcaatttcaatgtgatgacccgatgcgcgccattcgcttgcataa

SEQ ID NO: 303642 - DNA, 75 bp, synthetic construct
  source 1..75: mol_type = other DNA
aggtaattatgcgtttattcgtcctggcacaataatcagcaatggcgtaaaaattggttttgccaccgagattaa

SEQ ID NO: 303643 - DNA, 75 bp, synthetic construct
  source 1..75: mol_type = other DNA
acgttcagcaggatgcttttgatgaggtatttaattcttactacgaggtctatcagtttattcgtgttgagatgc

SEQ ID NO: 303644 - DNA, 75 bp, synthetic construct
  source 1..75: mol_type = other DNA
ttttattccatcaatattcacaaagctgtatttatgctccaccacaacaggccaattgctgaaggtaaggaaatt

SEQ ID NO: 303645 - DNA, 75 bp, synthetic construct
  source 1..75: mol_type = other DNA
cgcttggcttgaactgcatgcgtgttgtttctggtgaaaaatcacgagcaattacagccagcaaattctattttt

SEQ ID NO: 303646 - DNA, 75 bp, synthetic construct
  source 1..75: mol_type = other DNA
atgtcaggacggcgaagatcgctgatctggtggtcacccgggataactcagtggcagacggtgcaatggcgaaca

SEQ ID NO: 303647 - DNA, 75 bp, synthetic construct
  source 1..75: mol_type = other DNA
gcgacaaggcgcagattggtgctttttttggtcaccaatcttatattgatattccaatggaattaatccgtgaag

SEQ ID NO: 303648 - DNA, 75 bp, synthetic construct
  source 1..75: mol_type = other DNA
agtaatcatcgtctggatgaacagcctgtgtctgttcgaactccagagggaattatcgctaccggatgcgataaa

SEQ ID NO: 303649 - DNA, 75 bp, synthetic construct
  source 1..75: mol_type = other DNA
tggcaattatgcattcattcgtccaggttcagtgattagcaatgatttaaaagttgggtttgcaaccgaaattaa

SEQ ID NO: 303650 - DNA, 75 bp, synthetic construct
  source 1..75: mol_type = other DNA
cccggattcggttatctgggagctttacgccgcaaccggtgtggatgctgtgccgattcgttttgcaggctctta

SEQ ID NO: 303651 - DNA, 75 bp, synthetic construct
  source 1..75: mol_type = other DNA
cgtatagccatctgtttagataaaattaatgttaatttggatgaacttgaaaagcctgagcaggtaacgcggtta

SEQ ID NO: 303652 - DNA, 75 bp, synthetic construct
  source 1..75: mol_type = other DNA
ttggtaaactgaaaatttctgatggcattgcccctgaagtcatggcgttactggcagaaaaaaatgtaccgcaga

SEQ ID NO: 303653 - DNA, 75 bp, synthetic construct
  source 1..75: mol_type = other DNA
atgacgaatcaaggcaactgctttaatcttctacatatggtagaaaacgcacataaacatcacgcattcgcaaca

SEQ ID NO: 303654 - DNA, 75 bp, synthetic construct
  source 1..75: mol_type = other DNA
tgtacagttatggttataatttagcctctgttgttttttgtatcatcgcatggcctctttctgcaaagctaaatt

SEQ ID NO: 303655 - DNA, 75 bp, synthetic construct
  source 1..75: mol_type = other DNA
attaattggctattagatcaaatttacaaaaataattttgagcaattggccattgattcattgtcagttccaacg

SEQ ID NO: 303656 - DNA, 75 bp, synthetic construct
  source 1..75: mol_type = other DNA
catctaaagaatttctaaggcgccgtcgccctgaaaaattttctgattcaacaatcagagagactggtactttag

SEQ ID NO: 303657 - DNA, 75 bp, synthetic construct
  source 1..75: mol_type = other DNA
tataaagattccgagggggagttatcagatagtaatacctggaagcgttttttggaatcatctgaacatggtgat

SEQ ID NO: 303658 - DNA, 75 bp, synthetic construct
  source 1..75: mol_type = other DNA
gacggcgaacacgctgcgggcgagggtgaccgatgcgttcggtaatgcgcttgccgggcagacggtcagcgtgtt

SEQ ID NO: 303659 - DNA, 75 bp, synthetic construct
  source 1..75: mol_type = other DNA
gatggcaggcaacagcgcaacggtcactccgacggtcaccacgcagtcggacggtacggtggagttcagtgtcac

SEQ ID NO: 303660 - DNA, 75 bp, synthetic construct
  source 1..75: mol_type = other DNA
tgccaatattgtttggcaaaaaaaatattccccacaaaatgatgccacttattttagtgatatgcatgatcatat

SEQ ID NO: 303661 - DNA, 75 bp, synthetic construct
  source 1..75: mol_type = other DNA
ttgaaaataacgttgctaaaacaaatctttgcgccattctggaacaacacggcctgactaatctgcacagcctgt

SEQ ID NO: 303662 - DNA, 75 bp, synthetic construct
  source 1..75: mol_type = other DNA
tgaactggcatggtaagcgtcaggctcgtcagcttgctcttaccccttcccgtggcaccttacgcccatgtaaag

SEQ ID NO: 303663 - DNA, 75 bp, synthetic construct
  source 1..75: mol_type = other DNA
tgtcgccagagcgcaactgaacgatgcgacgtttgctgcatcgccggaaggaaaacgctgcgaaccgatctgctg

SEQ ID NO: 303664 - DNA, 75 bp, synthetic construct
  source 1..75: mol_type = other DNA
aaaaataatccgaaagcagattctgcagcatatgaaaccagcgctgatatgattttgtctgagctgattagccac

SEQ ID NO: 303665 - DNA, 75 bp, synthetic construct
  source 1..75: mol_type = other DNA
ctataaatatagagtatattgaaggaaccaatgttagatttaattcgaataatatggcgatatattggaatagta

SEQ ID NO: 303666 - DNA, 75 bp, synthetic construct
  source 1..75: mol_type = other DNA
atggcatggagccgttacggtcaactgctggccttcacggactgctcggggtacacgacgcggtatgagtacgac

SEQ ID NO: 303667 - DNA, 75 bp, synthetic construct
  source 1..75: mol_type = other DNA
ccggtggtcatcacagggccggacggcacggtggagatctcagtcaccagccagaccgccggaaccagtgcgatc

SEQ ID NO: 303668 - DNA, 75 bp, synthetic construct
  source 1..75: mol_type = other DNA
tgaatgttatcaaatggcagctgaaaaaggttttccagaagcgcagggaaacttaggagtattatatagtaaagg

SEQ ID NO: 303669 - DNA, 75 bp, synthetic construct
  source 1..75: mol_type = other DNA
gtgacctcaacaagccgctgagtaatcagaacttaattacctggaaagatacgccggtctataacgcgccgagtg

SEQ ID NO: 303670 - DNA, 75 bp, synthetic construct
  source 1..75: mol_type = other DNA
tgtttatctccattcctttctactggggggatgatattgccaaaacacgtcaccaaattaacttatcgaattcga

SEQ ID NO: 303671 - DNA, 75 bp, synthetic construct
  source 1..75: mol_type = other DNA
tggataaactggcaaaacaaccggatcgtatatggtggagtacgctggcgaaaagcaatcttacatttttcaagt

SEQ ID NO: 303672 - DNA, 75 bp, synthetic construct
  source 1..75: mol_type = other DNA
gcagaaattgatcccgagtggtggattgtggcgatgaataatccccgttttccagttgatgtattgaaggcgagg

SEQ ID NO: 303673 - DNA, 75 bp, synthetic construct
  source 1..75: mol_type = other DNA
attaaggggagtattaatgcgcgcgggatatttatcaatgacataattgcacctgttgttgtgtcttcgacaaat

SEQ ID NO: 303674 - DNA, 75 bp, synthetic construct
  source 1..75: mol_type = other DNA
gcgcgaaaagttcatttttaccactgcgaccaccggggcctgccgctggcgctcatcagcgaagacggcaatacg

SEQ ID NO: 303675 - DNA, 75 bp, synthetic construct
  source 1..75: mol_type = other DNA
cctgcccgctgcgccactggtgcggtacacgtatacggaagccggtgaactgctggcggtatatgaccgcagcaa

SEQ ID NO: 303676 - DNA, 75 bp, synthetic construct
  source 1..75: mol_type = other DNA
gtcccgcaaactcaagcgaacaatacgtagtttccctggcaacaggtgatcaaagcgtatttgaaaagcttgggt

SEQ ID NO: 303677 - DNA, 75 bp, synthetic construct
  source 1..75: mol_type = other DNA
gcaggacaaactcgacagctggcgcagggaatacaatcatgaaaggacgcattcatcattaaatgacatgactcc

SEQ ID NO: 303678 - DNA, 75 bp, synthetic construct
  source 1..75: mol_type = other DNA
ctttatctctgtctgggaagattgcgataccgttgttgccgctggcatacgggaatttcgagagcgatgggcaaa

SEQ ID NO: 303679 - DNA, 75 bp, synthetic construct
  source 1..75: mol_type = other DNA
atacttccgctcattacaaatctcgattgccagtccatatcatatcctgttacaactcaaaatattaaaatattg

SEQ ID NO: 303680 - DNA, 75 bp, synthetic construct
  source 1..75: mol_type = other DNA
aaagatttaaaataaaaccaacgcatgaaattgtaagttctgtcttgaacccaagccgctttttaggtagtaaaa

SEQ ID NO: 303681 - DNA, 75 bp, synthetic construct
  source 1..75: mol_type = other DNA
ttatggcattttataatggccataccgaaacaatacgtgccttttgtaatattctaaaaaactatagttttacca

SEQ ID NO: 303682 - DNA, 75 bp, synthetic construct
  source 1..75: mol_type = other DNA
taaaagacttgccagactatcttgataagtatatgaaagatgatggttttcacattaaggaacttcttaatgatg

SEQ ID NO: 303683 - DNA, 75 bp, synthetic construct
  source 1..75: mol_type = other DNA
aacggcgatggcaccttttccagcgctattcaggtcaccgtcggcaccctgacgtggtacggctcgattgtggca

SEQ ID NO: 303684 - DNA, 75 bp, synthetic construct
  source 1..75: mol_type = other DNA
gaccgaagcggtgcgggaagttgctcgccgcatggagacgttcgccagcctgatgacgtcagcgccgtctctggg

SEQ ID NO: 303685 - DNA, 75 bp, synthetic construct
  source 1..75: mol_type = other DNA
aggcgatacagaacggcatgacaccgaccgaagcggtgcgggaagttgctcgccgcatggagacgttcgccagcc

SEQ ID NO: 303686 - DNA, 75 bp, synthetic construct
  source 1..75: mol_type = other DNA
taaccatgatgaaaacttcgcttatctttgaaaaatatacggaaatcatcataaagcaaagattaaaaaaagggt

SEQ ID NO: 303687 - DNA, 75 bp, synthetic construct
  source 1..75: mol_type = other DNA
gacaccacgcttaccgtgcgcggcgtattgggcgcggcgctcggcgctaatgagttcgcgcaaatcagtaccgac

SEQ ID NO: 303688 - DNA, 75 bp, synthetic construct
  source 1..75: mol_type = other DNA
gatgccactcacgcttacgatctcagcgctgaagcgggtaccgcgagcaacaacggcaagttcgtcggcaccggc

SEQ ID NO: 303689 - DNA, 75 bp, synthetic construct
  source 1..75: mol_type = other DNA
aataaggaagagaactgcaatttttgctgttttaaataatgatgaaaaaatgctggataaagttaaagactatta

SEQ ID NO: 303690 - DNA, 75 bp, synthetic construct
  source 1..75: mol_type = other DNA
atgagcgacgccggatcatcaacaagatgcaccggaccaaagataaagatctctgccggaggctcaacgccatct

SEQ ID NO: 303691 - DNA, 75 bp, synthetic construct
  source 1..75: mol_type = other DNA
cataatcttggcaacgatactctccgtaaatatcagcaggccaatgccgtctacgctgacgaagcggcgaaacta

SEQ ID NO: 303692 - DNA, 75 bp, synthetic construct
  source 1..75: mol_type = other DNA
gtgaaggagttcctctgcacaccacagacctgttacaacccacttcccgcgtcggaaaaatggcgcagactacag

SEQ ID NO: 303693 - DNA, 75 bp, synthetic construct
  source 1..75: mol_type = other DNA
ggcggagctgttgcaccgcctggcaaagggtgaaaaggggacgccagaattatccctgcgtgacgatccggcaca

SEQ ID NO: 303694 - DNA, 75 bp, synthetic construct
  source 1..75: mol_type = other DNA
tatcaagcactaatagcgtcaaccggacaggcgcaggttgataaagagcaggtaaaaaaaaagccgcccggcaga

SEQ ID NO: 303695 - DNA, 75 bp, synthetic construct
  source 1..75: mol_type = other DNA
cttcatggctggagttcttctccggcaagcgatttgtgccgatagtgacctccttcgccgcgctgtttgtcgggc

SEQ ID NO: 303696 - DNA, 75 bp, synthetic construct
  source 1..75: mol_type = other DNA
tgcattgcgtatttttagaggaatatcgttcttttatcggcataatttcttctttgatatgggcgttaatttcat

SEQ ID NO: 303697 - DNA, 75 bp, synthetic construct
  source 1..75: mol_type = other DNA
tgcgtgatgtggcagaggcaataaaaacagtgtccacacctcagaaactgctggcgtttcgcatgaaagtcacac

SEQ ID NO: 303698 - DNA, 75 bp, synthetic construct
  source 1..75: mol_type = other DNA
ttggtaatttaatttgttcaggacctcaaaacagacacctgcttacagaattagatggaagtggtaaatataaat

SEQ ID NO: 303699 - DNA, 75 bp, synthetic construct
  source 1..75: mol_type = other DNA
agcaccagaacaaaaagcgcaggctcaggagcaatacttcaatgaagtcgttgccccgcaagccggagaaaatgc

SEQ ID NO: 303700 - DNA, 75 bp, synthetic construct
  source 1..75: mol_type = other DNA
tacatcaaatgaaataaaggttgcttatcctaattatggggctttgacaaaatttgattatatgtatccatctca

SEQ ID NO: 303701 - DNA, 75 bp, synthetic construct
  source 1..75: mol_type = other DNA
cagtgcttcaggtgcattaacatgggctggagttggttactctgttggttctcttactgctgaaaatttttctga

SEQ ID NO: 303702 - DNA, 75 bp, synthetic construct
  source 1..75: mol_type = other DNA
acccggcgattcggcaatcaatttcctcaaaatcaatcgcgaagtcactatccagacggtattccgctatgccaa

SEQ ID NO: 303703 - DNA, 75 bp, synthetic construct
  source 1..75: mol_type = other DNA
aagcttatggcagtacatttagcagtacggattactggacaagtactgtacttataggggttcacgagaaattca

SEQ ID NO: 303704 - DNA, 75 bp, synthetic construct
  source 1..75: mol_type = other DNA
ggtaaccctgctttagggctgacatcagaagtcatcgagtcttatattgatagtttcgcggtaggcggcgcaact

SEQ ID NO: 303705 - DNA, 75 bp, synthetic construct
  source 1..75: mol_type = other DNA
ccagccagacggcgggcaccagtacagtcaccgccagcatcaacaacagcagccagagccagaacgtcacctttg

SEQ ID NO: 303706 - DNA, 75 bp, synthetic construct
  source 1..75: mol_type = other DNA
agatcgccgaactggtggtcattaaggacgactcagtggcagacggtgcaatggcgaatatgctgcgggcgagag

SEQ ID NO: 303707 - DNA, 75 bp, synthetic construct
  source 1..75: mol_type = other DNA
ggcgagtccttactgtctggtgataacgtaatagtggaaggagccgtacgttcaggaggatggtctgaaaacgcc

SEQ ID NO: 303708 - DNA, 75 bp, synthetic construct
  source 1..75: mol_type = other DNA
ggtggagatctctgtcaccagccagacggcgggcaccagtgccgtcactgcaaccatcaacagcagcagccagag

SEQ ID NO: 303709 - DNA, 75 bp, synthetic construct
  source 1..75: mol_type = other DNA
gcgatggaggctggcggggcatctcattactgggcccgggaaatcaggaaactcgaccatgatgtaatattgctt

SEQ ID NO: 303710 - DNA, 75 bp, synthetic construct
  source 1..75: mol_type = other DNA
cgtgatatcgcatcgcaacttaatacattagcttcattgggagcagtaacaaaacacgtcaataataattgcccg

SEQ ID NO: 303711 - DNA, 75 bp, synthetic construct
  source 1..75: mol_type = other DNA
ataggtggtatggctaatattgcaggcatcgttaatgaagcgaagaaaaaaagcaaagatgtgtttttctttgat

SEQ ID NO: 303712 - DNA, 75 bp, synthetic construct
  source 1..75: mol_type = other DNA
tgacatagcctctacaggtcacgaggaatcgcctgttcgtgggtctgtaatattgtctaaagtaaaccccggaag

SEQ ID NO: 303713 - DNA, 75 bp, synthetic construct
  source 1..75: mol_type = other DNA
acggcgggcaccagtacagtcacctccagcatcaacagcagcagcctgagccggaccgtgacgtttatcgccgat

SEQ ID NO: 303714 - DNA, 75 bp, synthetic construct
  source 1..75: mol_type = other DNA
cctcaaaaacaccatcatacactaaatcagtaagttggcagcatcaccaaaaatcgaataaattttggtggatag

SEQ ID NO: 303715 - DNA, 75 bp, synthetic construct
  source 1..75: mol_type = other DNA
gtcagaacgtgacgtttatcgccgatatcaggacggcgcagatcgctgatctggtggtcattaaggacggctcag

SEQ ID NO: 303716 - DNA, 75 bp, synthetic construct
  source 1..75: mol_type = other DNA
cagtatcgcctgtgggatgcggaatatgatgaatggggggaatgggaagattgcggagaatgcgcttacgaagga

SEQ ID NO: 303717 - DNA, 75 bp, synthetic construct
  source 1..75: mol_type = other DNA
ggacagaaactatctggcgtcagtccttgcggggagcgggctttcgtaatcttgccctggctgcaccgtgagacg

SEQ ID NO: 303718 - DNA, 75 bp, synthetic construct
  source 1..75: mol_type = other DNA
tctatagaaataacctgcgcagccttgggaagagctctatccctgcctatacccgagccagtactactgtttgac

SEQ ID NO: 303719 - DNA, 75 bp, synthetic construct
  source 1..75: mol_type = other DNA
cattaaggatggttcagaggcggacggttcgacggcgaacacgctgcgggtgagggtgaccgatgcgttcgggaa

SEQ ID NO: 303720 - DNA, 75 bp, synthetic construct
  source 1..75: mol_type = other DNA
ggtgatggcatatatgaacgtacatatatggcctaccaagaaggagaaaatttaacttcatttatggagattaaa

SEQ ID NO: 303721 - DNA, 75 bp, synthetic construct
  source 1..75: mol_type = other DNA
gccggaaccagtgtggtcaccgccagcgtcaacaacagcagccagagccggaacgtgacgtttgtcgccgatgtc

SEQ ID NO: 303722 - DNA, 75 bp, synthetic construct
  source 1..75: mol_type = other DNA
agactatcacttatttaagtgatattggttgtctggagattcagggggccagtctaatggctgtggcgattcggt

SEQ ID NO: 303723 - DNA, 75 bp, synthetic construct
  source 1..75: mol_type = other DNA
tgacatttatcgccgatgtcagcacggcgaagatcgctgatctggtggttattaaggatggttcagaggcggacg

SEQ ID NO: 303724 - DNA, 75 bp, synthetic construct
  source 1..75: mol_type = other DNA
acccaagaaccagatgttatcattcctttctgctagaatagaggtacttggtgacatactatatgagcagataaa

SEQ ID NO: 303725 - DNA, 75 bp, synthetic construct
  source 1..75: mol_type = other DNA
aatgttgtacaattaggaactgtcgagaaaggtaaacctggcactcctgttgattttaagctggtagcaaaagat

SEQ ID NO: 303726 - DNA, 75 bp, synthetic construct
  source 1..75: mol_type = other DNA
tttttgatgatgcagaaaaatattctgattcggaattgaaaattcagttaaaaactctgaaaaaacagatgatca

SEQ ID NO: 303727 - DNA, 75 bp, synthetic construct
  source 1..75: mol_type = other DNA
gtgagctgctgccgttctatctgccgtgggtgtcgggtgtcctcagcgccggaaaaggggcgcaggatgacattg

SEQ ID NO: 303728 - DNA, 75 bp, synthetic construct
  source 1..75: mol_type = other DNA
tgataccaaaattttgctaggccattcgaatcaaaaaatgaccgatatttacaacgacgcacgcggtaaggaatg

SEQ ID NO: 303729 - DNA, 75 bp, synthetic construct
  source 1..75: mol_type = other DNA
ccatcatttagcaaaaccaaaattttgctaaataatgaatggcttatgcaactcacagcgtgtgagagtctggtc

SEQ ID NO: 303730 - DNA, 75 bp, synthetic construct
  source 1..75: mol_type = other DNA
tcaggccatatattgaaagcggtaagcttgtatctctgcttgatgactttcttccacaatttccgggcttctatc

SEQ ID NO: 303731 - DNA, 75 bp, synthetic construct
  source 1..75: mol_type = other DNA
gaggctggctcttgccggcggaggaataacaattgccactcaggaaactttcaggccatatatggctttgttgaa

SEQ ID NO: 303732 - DNA, 75 bp, synthetic construct
  source 1..75: mol_type = other DNA
atttgaagaaaacgggagaactttcgaccttgcgattgaaccgcagattacgactaatgatctgcgtctgatgtt

SEQ ID NO: 303733 - DNA, 75 bp, synthetic construct
  source 1..75: mol_type = other DNA
tccctcgatctctccctggtcagccagcagtttctctcccttgaatttgcgcaggtgctggacaaaatggcctac

SEQ ID NO: 303734 - DNA, 75 bp, synthetic construct
  source 1..75: mol_type = other DNA
tttgagcttattgacttactggaccagcgttccgatggaatagttaacggagtggttgccatcagggacgattta

SEQ ID NO: 303735 - DNA, 75 bp, synthetic construct
  source 1..75: mol_type = other DNA
gatgaacacattctcagacttatccaacgctccctctccaacccacaacttcatacttttatttgttgttatagc

SEQ ID NO: 303736 - DNA, 75 bp, synthetic construct
  source 1..75: mol_type = other DNA
gacagcgactgacttttgatgagtggatgatgatttataacgcagcggaaaaggatggttactttttacagcgcg

SEQ ID NO: 303737 - DNA, 75 bp, synthetic construct
  source 1..75: mol_type = other DNA
gaaaataaacaggattatccagtgcttattgaaacaactattctcaatgaagattctgaatccagatcagaaagg

SEQ ID NO: 303738 - DNA, 75 bp, synthetic construct
  source 1..75: mol_type = other DNA
aggagggcgcgtctgacggtaataaggccataagcgaaacagagcgtgatgcggtgaaggcgatgttcaggggga

SEQ ID NO: 303739 - DNA, 75 bp, synthetic construct
  source 1..75: mol_type = other DNA
tgtttcgccagcaaccatcccctccccccgacggtggcttaccgtcatcccgtgtccctccgccctttggggccg

SEQ ID NO: 303740 - DNA, 75 bp, synthetic construct
  source 1..75: mol_type = other DNA
ggccggacagcgattcagtgtctgggagcctatccccggacgggcgaacgaagcactcgactgcctcgtttacag

SEQ ID NO: 303741 - DNA, 75 bp, synthetic construct
  source 1..75: mol_type = other DNA
agcagctggaatcgcagagttttgccgcaccgttggcgaaccaatccacgtgccattaatgctgactcataagct

SEQ ID NO: 303742 - DNA, 75 bp, synthetic construct
  source 1..75: mol_type = other DNA
gctcaagatatggtttcgtttttgtcatcccatgccgtgttctcagaaataacagactttgaacacaacgtggtt

SEQ ID NO: 303743 - DNA, 75 bp, synthetic construct
  source 1..75: mol_type = other DNA
atgtccacaaacatatctcagtcctcggagaaccagagtttaacccagcggaagattgagcgtcttcaactgagt

SEQ ID NO: 303744 - DNA, 75 bp, synthetic construct
  source 1..75: mol_type = other DNA
ggacaggaagaaaaaatcaattacgagctgccgggtgcggttattgaagaaccagcgccggtcaaacgtaagcga

SEQ ID NO: 303745 - DNA, 75 bp, synthetic construct
  source 1..75: mol_type = other DNA
tggcatcagaccaaaccgtttgaatgttgtggttcccgccattcaccattaatggaatacgaccagaaatggcat

SEQ ID NO: 303746 - DNA, 75 bp, synthetic construct
  source 1..75: mol_type = other DNA
cgtttattgtgattttacccgacattaataatgaagccagtctcagacaaaatggtaaagcgatgcgcatgcgtc

SEQ ID NO: 303747 - DNA, 75 bp, synthetic construct
  source 1..75: mol_type = other DNA
gatatttgcccgcgcctgtgacatcaatgccatgtcacggctggattatatgtatttatcaaacgggaataattc

SEQ ID NO: 303748 - DNA, 75 bp, synthetic construct
  source 1..75: mol_type = other DNA
tcagcacgtcaccgcaacaaccgccactcgaacagcttaccaccctgtccgttccgcccggttttcacccgacag

SEQ ID NO: 303749 - DNA, 75 bp, synthetic construct
  source 1..75: mol_type = other DNA
atgatatctatcacagcttatgtgcttgcgcgcataaacttgaggcgtgtaagcacacagagcttaatgctataa

SEQ ID NO: 303750 - DNA, 75 bp, synthetic construct
  source 1..75: mol_type = other DNA
ctggagtatccaggtaactgttctatttcacaaaagcatttagtcgacaccaacattactaatggacatccaata

SEQ ID NO: 303751 - DNA, 75 bp, synthetic construct
  source 1..75: mol_type = other DNA
ctggagtatccaggtaactgtactatttcacaaaagcatttagtcgactccaacattactaatgggcatccaata

SEQ ID NO: 303752 - DNA, 75 bp, synthetic construct
  source 1..75: mol_type = other DNA
atatatacaataagaacatcaacatactgattggctcaggggcttcagcagacttgttcccgacgctgtccctag

SEQ ID NO: 303753 - DNA, 75 bp, synthetic construct
  source 1..75: mol_type = other DNA
taaaattgttgataaacaaacgatcgaggctcttgttgatacggcattctataatctcagggaagatgtaaagac

SEQ ID NO: 303754 - DNA, 75 bp, synthetic construct
  source 1..75: mol_type = other DNA
aaaaacggctgcgctggtactggcgtaacccttccgatctttgcccgtggcacatggatgaaaagccaaatcagc

SEQ ID NO: 303755 - DNA, 75 bp, synthetic construct
  source 1..75: mol_type = other DNA
ttagctgttggtggttatcctccattcagaaaatctcaagattttgcattatggagcctattaattgtacataat

SEQ ID NO: 303756 - DNA, 75 bp, synthetic construct
  source 1..75: mol_type = other DNA
tccttttcaacagatgaagatcttgagtatggttatttaataaacactggcaatcattatgacgtttacctccct

SEQ ID NO: 303757 - DNA, 75 bp, synthetic construct
  source 1..75: mol_type = other DNA
gttttttaaaaaagaatttattgatagttgcttgaatgacaaaaaatgcatactgcatttacccgagtttatatt

SEQ ID NO: 303758 - DNA, 75 bp, synthetic construct
  source 1..75: mol_type = other DNA
gagtctatcacagattttaaaggttattattggtatggctttatggaatatattgaaaacattactgcgtgtgat

SEQ ID NO: 303759 - DNA, 75 bp, synthetic construct
  source 1..75: mol_type = other DNA
aaattctcacttatcagaaaaaaagagatctggattatcccctgcaggaacattacctgacacaactctgtatga

SEQ ID NO: 303760 - DNA, 75 bp, synthetic construct
  source 1..75: mol_type = other DNA
gtctcttaacccgcgatggtcgggtcacagttgatgagcagtgggtcttttttgaagccgaaacctactctgacg

SEQ ID NO: 303761 - DNA, 75 bp, synthetic construct
  source 1..75: mol_type = other DNA
tcagcgtattctcgatgccgcagaaagcaaagaagggctattaatgcgccgcgttctggcgcttatgacaacggt

SEQ ID NO: 303762 - DNA, 75 bp, synthetic construct
  source 1..75: mol_type = other DNA
taacgccgcagcagttacatgaagagagcaacctgatccaggccggcctggattccataagattgatgagatggt

SEQ ID NO: 303763 - DNA, 75 bp, synthetic construct
  source 1..75: mol_type = other DNA
atgtacgctgaaactcgcaatatgaccccatatggtggtggcgagtttgataatggtgaatcaagatcagccatc

SEQ ID NO: 303764 - DNA, 75 bp, synthetic construct
  source 1..75: mol_type = other DNA
taaacaaaactttcgatgggaaaaactttgttgttaaaaattttaatttggaagttaataatgaggattttgttg

SEQ ID NO: 303765 - DNA, 75 bp, synthetic construct
  source 1..75: mol_type = other DNA
aagaacttgcttgctttagataccgacacgtcggataggattaaagcggtgaagaattttcttgctgttctttca

SEQ ID NO: 303766 - DNA, 75 bp, synthetic construct
  source 1..75: mol_type = other DNA
ggataccagagcgcactatgaaacgttcagcatccgtaaaagccgcgatcataccagcatggacacgattatccc

SEQ ID NO: 303767 - DNA, 75 bp, synthetic construct
  source 1..75: mol_type = other DNA
gagcgtgcaggatgcttgcgttcaatgaccctgcccggaggcgatcgggcagttaaagagccgctgcgcgtcggc

SEQ ID NO: 303768 - DNA, 75 bp, synthetic construct
  source 1..75: mol_type = other DNA
atggctttatggaatatattgaaaacattactgcgtgtgatgatgtttttttctgagtattgtttagatgataat

SEQ ID NO: 303769 - DNA, 75 bp, synthetic construct
  source 1..75: mol_type = other DNA
tacctggcaaagaggctgatttcgtggtgatggaacccaccgccactccgctacagcagctgcgctatgacaact

SEQ ID NO: 303770 - DNA, 75 bp, synthetic construct
  source 1..75: mol_type = other DNA
atattaagtggatttatcatcgtatactcaacaagaaagaaggaagttaatgatactttctcattctcaattaga

SEQ ID NO: 303771 - DNA, 75 bp, synthetic construct
  source 1..75: mol_type = other DNA
tgaaattcaagatgaaataaaatcaaagattcaagacaaaatagatgaactttctaaaaatttattcaacactat

SEQ ID NO: 303772 - DNA, 75 bp, synthetic construct
  source 1..75: mol_type = other DNA
gtattgatttgtctggtatatcttttattcagagtgaaattaataaaacttatggattaaaatacgctccagtag

SEQ ID NO: 303773 - DNA, 75 bp, synthetic construct
  source 1..75: mol_type = other DNA
catcaatctccttggggaatgaatccttttcaacagatgacgaccttgagtatggttatttaataaacactggca

SEQ ID NO: 303774 - DNA, 75 bp, synthetic construct
  source 1..75: mol_type = other DNA
tcatgggcgctggtcagttataagatgcaaaaggaagtttacaacgaattcattaaaatggttgataaaaaaacg

SEQ ID NO: 303775 - DNA, 75 bp, synthetic construct
  source 1..75: mol_type = other DNA
atgggtagtaatatacatggaattagttgcactgcaaataattatttgaaacaagcctggaacgatataaaaaat

SEQ ID NO: 303776 - DNA, 75 bp, synthetic construct
  source 1..75: mol_type = other DNA
atggctttatggaatatattgaaaacattaatgcgtgtgatgatgtttttttctgagtattgttttgatgatgaa

SEQ ID NO: 303777 - DNA, 75 bp, synthetic construct
  source 1..75: mol_type = other DNA
atgagtagtaatatacatggaattagttgcactgcaaataattatttgaaagaagcatggagcaatataaaaaat

SEQ ID NO: 303778 - DNA, 75 bp, synthetic construct
  source 1..75: mol_type = other DNA
aaaagaaagtacaggttattccgcaacaaggtcaatcaaaagcgacaaaggactcagataaaagtacattttatg

SEQ ID NO: 303779 - DNA, 75 bp, synthetic construct
  source 1..75: mol_type = other DNA
tgttctgaaagacacctcgttttatcttggacgaaatgcgcagctcactactgatattagtgcagataactcatc

SEQ ID NO: 303780 - DNA, 75 bp, synthetic construct
  source 1..75: mol_type = other DNA
gtggaaatgaaccagacggggggaattttctggccatcatccaaacacattgacccggcccgcctgactccacag

SEQ ID NO: 303781 - DNA, 75 bp, synthetic construct
  source 1..75: mol_type = other DNA
gtcccgccggatgatggtggcgacacacctgtcccgccggatgatggcggcgacacacccgtcccgccggatgat

SEQ ID NO: 303782 - DNA, 75 bp, synthetic construct
  source 1..75: mol_type = other DNA
agcctgttagcagtcttcctgaagaagcttttgctgaagggttatcgcgatccggtttaagccccgttctgctac

SEQ ID NO: 303783 - DNA, 75 bp, synthetic construct
  source 1..75: mol_type = other DNA
ccattaattcaggcgtcaattgtgggaatggatatcccatatcagacctatcgtgatttcgctgaaaataaagga

SEQ ID NO: 303784 - DNA, 75 bp, synthetic construct
  source 1..75: mol_type = other DNA
ttgtaaatatgctcggcggtacctgggtaagccgtttaaccactattggtctggtgctggttcttattcctgtgg

SEQ ID NO: 303785 - DNA, 75 bp, synthetic construct
  source 1..75: mol_type = other DNA
ggcatgaaactgcgcagatggtgtatgaaatttacggtatgtggattgatgacatgaacgacgaacaggtagcca

SEQ ID NO: 303786 - DNA, 75 bp, synthetic construct
  source 1..75: mol_type = other DNA
caacttatgccgacaatgcggaagattgccgggaaatggtacgcacacatgttgaacaagcctgtcgtgccgcta

SEQ ID NO: 303787 - DNA, 75 bp, synthetic construct
  source 1..75: mol_type = other DNA
ataacaccttaattaaaggattaaatatttctctacaatctgatgatgaagatacccgagacatggctatgttaa

SEQ ID NO: 303788 - DNA, 75 bp, synthetic construct
  source 1..75: mol_type = other DNA
tgaaagcacacagctttttccatcactgtcatcactctgtcatctttccagtagaaactaatgtcactgaaatgg

SEQ ID NO: 303789 - DNA, 75 bp, synthetic construct
  source 1..75: mol_type = other DNA
atgctacagcaaaacgaccggtcgccgctgcggcagccctgacagtctcagcaggctgattctgagcagcattca

SEQ ID NO: 303790 - DNA, 75 bp, synthetic construct
  source 1..75: mol_type = other DNA
attatgtcattgcggggattgctctcagctgagaaaaaaataatgagagtgttaaattatttttatctgaaaaag

SEQ ID NO: 303791 - DNA, 75 bp, synthetic construct
  source 1..75: mol_type = other DNA
aacttgaacgcatgacgtctatcgttaacgacatgctgttcctatcccatgcccatgcgggtgaacatgcgtccc

SEQ ID NO: 303792 - DNA, 75 bp, synthetic construct
  source 1..75: mol_type = other DNA
ttgatgagtccgtggatcaccgctcgaacctcagccgacggttggtccacgcttgccaataaattcaccgtatta

SEQ ID NO: 303793 - DNA, 75 bp, synthetic construct
  source 1..75: mol_type = other DNA
atattctgcatattggctatggaataaaatcaaccgaagccatttttcaaggattacaagactgttgcggaaatt

SEQ ID NO: 303794 - DNA, 75 bp, synthetic construct
  source 1..75: mol_type = other DNA
tgcggttgttgattggatttgcccctatatttccagacacctgttatcacttaacccattactggcttgctgccg

SEQ ID NO: 303795 - DNA, 75 bp, synthetic construct
  source 1..75: mol_type = other DNA
gtggaaccctcttttgctgaaaaacagctctctctgaatgttcagggcgatgtcaccgcgcacatcgaccgacga

SEQ ID NO: 303796 - DNA, 75 bp, synthetic construct
  source 1..75: mol_type = other DNA
cggcaaatggtgaaagacctgagttacgttatgtggtcgccattgactccacgccgtacatgggcacgctcaatg

SEQ ID NO: 303797 - DNA, 75 bp, synthetic construct
  source 1..75: mol_type = other DNA
ttcaggttgttgagaaataaaaccctgaccatggctccggggcccgttattcgctccggggagatcggccagtga

SEQ ID NO: 303798 - DNA, 75 bp, synthetic construct
  source 1..75: mol_type = other DNA
tcagactaagggcaacgctcacggccatatagttttgcgtggggggaaaaaagcgaattaccatgcagcggatat

SEQ ID NO: 303799 - DNA, 75 bp, synthetic construct
  source 1..75: mol_type = other DNA
caggacaacgtcgcgaagacataacgaatatgcggttcagtgatatttatgatgatcgtctccacgtcaggcaaa

SEQ ID NO: 303800 - DNA, 75 bp, synthetic construct
  source 1..75: mol_type = other DNA
tcatctggaacaggttgtccagcattctccacatcttcaagccacagcagaagacgtaatatttcatctatattt

SEQ ID NO: 303801 - DNA, 75 bp, synthetic construct
  source 1..75: mol_type = other DNA
tcatctaattatgttgagcgcatttgtcataggcgcatattctgcatattggctatggaataataatcaaccgaa

SEQ ID NO: 303802 - DNA, 75 bp, synthetic construct
  source 1..75: mol_type = other DNA
aaacatataaaaagtcatctaattatgttgagcgcatttgttgagcgcatttgtcataggcgcatattctgcata

SEQ ID NO: 303803 - DNA, 75 bp, synthetic construct
  source 1..75: mol_type = other DNA
agccggacggcacggtggaaatcagtgtcaccagccagacggcgggcagcagtgcggtcaccgtcagtatcaaca

SEQ ID NO: 303804 - DNA, 75 bp, synthetic construct
  source 1..75: mol_type = other DNA
aaataaaagggcgcaagtctttttgtctacacattctcctgcactattaaatagggttgaaccagaaaatatacg

SEQ ID NO: 303805 - DNA, 75 bp, synthetic construct
  source 1..75: mol_type = other DNA
ggctgcatgagcaagttaaatcggtttatcagctcctgagcgagccacagctgcatattcctaactaccagcgcc

SEQ ID NO: 303806 - DNA, 75 bp, synthetic construct
  source 1..75: mol_type = other DNA
aagtttgcaacgcgtgatatcccaggacagagaactggtcagcgaaacgctggaaatgttgcaaacctgctatca

SEQ ID NO: 303807 - DNA, 75 bp, synthetic construct
  source 1..75: mol_type = other DNA
ccaaaaactgatgctcagtatattgataaaacaaaaaatgctatcgcttcagtattgaagaaagatgctgaagat

SEQ ID NO: 303808 - DNA, 75 bp, synthetic construct
  source 1..75: mol_type = other DNA
tttaagcatttaatttcaagtgaagcaggagagatcccattctgtatagcaaaattaaaagcaaaatggacaaag

SEQ ID NO: 303809 - DNA, 75 bp, synthetic construct
  source 1..75: mol_type = other DNA
agctcgataatgattcattaaaaaatgatgcaccgattgtattgaaagaactaatcaaaaaagtgagaggattac

SEQ ID NO: 303810 - DNA, 75 bp, synthetic construct
  source 1..75: mol_type = other DNA
tttggcgaaaaggtgacgctattaccgatatcccgtcagataaaaatgttgcaaatcgcggagtaaagcctaagc

SEQ ID NO: 303811 - DNA, 75 bp, synthetic construct
  source 1..75: mol_type = other DNA
cagggacccgcagggccgcgtggagaagcggggccccgtggagataagggcgagcaggggatgccggggcctcag

SEQ ID NO: 303812 - DNA, 75 bp, synthetic construct
  source 1..75: mol_type = other DNA
gcttctccacgcggccctgctggtccacagggacccgcagggccgcgtggagaagcggggccccgtggagataag

SEQ ID NO: 303813 - DNA, 75 bp, synthetic construct
  source 1..75: mol_type = other DNA
tggtgaaagaagcggtccagatatatgggggaatccgttctatcatcaatatctttgtgtcccagatggtaaagg

SEQ ID NO: 303814 - DNA, 75 bp, synthetic construct
  source 1..75: mol_type = other DNA
ctggtgaaagaagcggtccagatatatgggggaatccgttctatcatcaatatctttgtgtcccagatggtaaag

SEQ ID NO: 303815 - DNA, 75 bp, synthetic construct
  source 1..75: mol_type = other DNA
cggtgaactgttattgcgcgcatcagctattgatggagttgtcccatcagaaaaaatgcagctacttacgtttat

SEQ ID NO: 303816 - DNA, 75 bp, synthetic construct
  source 1..75: mol_type = other DNA
gtttcaatcggaaatcaattccaagaagaagtaggagtccagacaataacatcttcattaggcagaaattggaaa

SEQ ID NO: 303817 - DNA, 75 bp, synthetic construct
  source 1..75: mol_type = other DNA
aaaaattgagaaccggagacaaaattctgcgggcaagtgtcagggttgatcctaaaactcatgtattaataccag

SEQ ID NO: 303818 - DNA, 75 bp, synthetic construct
  source 1..75: mol_type = other DNA
ataaaaaattgacaatgagagacaaaactctgcgggcaagtgttaatgttaatcctcaagctcaagtattgatac

SEQ ID NO: 303819 - DNA, 75 bp, synthetic construct
  source 1..75: mol_type = other DNA
aacaggtgccgctaataagtgggtcctacaacatgctacagttcaaaaccaacgattcacattacaacccgacat

SEQ ID NO: 303820 - DNA, 75 bp, synthetic construct
  source 1..75: mol_type = other DNA
ccgggaaaagcgtggcaacgttatcaacgtcgtttgccgatgctacttgccgttccgcatgtcgcttttgctacg

SEQ ID NO: 303821 - DNA, 75 bp, synthetic construct
  source 1..75: mol_type = other DNA
ttctcagaatacggattcactcaaaccctttgcgtcttaggcgcagtcgtaaataacgcgaatgacacctttgat

SEQ ID NO: 303822 - DNA, 75 bp, synthetic construct
  source 1..75: mol_type = other DNA
gtgctgtatgcgctgcgctcgaatatcgaccttttctatacgccgggggagattctctatggcaagcgtgaaact

SEQ ID NO: 303823 - DNA, 75 bp, synthetic construct
  source 1..75: mol_type = other DNA
gtcggcgctgaaggtgtcgtctgcatgaccttcccgggtgccttcaacgaagaaaaaacgcacatcatggcaatg

SEQ ID NO: 303824 - DNA, 75 bp, synthetic construct
  source 1..75: mol_type = other DNA
agacagtgtcgatactttcacatatgtcaaggaagccgtcaaagcatatccggaaatatattttgcaaaagttgt

SEQ ID NO: 303825 - DNA, 75 bp, synthetic construct
  source 1..75: mol_type = other DNA
atcctccaaatttaacgataatattaatagaagaacccgaaaaccacctttcaccacaatacttaggaagaatag

SEQ ID NO: 303826 - DNA, 75 bp, synthetic construct
  source 1..75: mol_type = other DNA
tgtttcagtcaaccctaaaactcaagtattaataccaggcgaatatacaatgatactccatgctgcagttgattt

SEQ ID NO: 303827 - DNA, 75 bp, synthetic construct
  source 1..75: mol_type = other DNA
cgcgaccagacagagtggtcgcaggcctgaatgctatcgtccacgaaaatgcctctgcggaagaagcatacagcc

SEQ ID NO: 303828 - DNA, 75 bp, synthetic construct
  source 1..75: mol_type = other DNA
acttccctatggctaccccgtgactagcgacgactcgaacaacccggcaattatcgccgcctcggctcgcgccgc

SEQ ID NO: 303829 - DNA, 75 bp, synthetic construct
  source 1..75: mol_type = other DNA
gggggacgctgagtggctatgggaatggtgtctacaacaccaacctgccaggggtaggattacgtctgagtgcgg

SEQ ID NO: 303830 - DNA, 75 bp, synthetic construct
  source 1..75: mol_type = other DNA
gttagatataaaaatgatttttatagaataaataaaaaatcatttagtcatataatgaatcaagataagagcaaa

SEQ ID NO: 303831 - DNA, 75 bp, synthetic construct
  source 1..75: mol_type = other DNA
aaatgcaattggtaaaaatgaagattatataggggtggtttattggcgagggtttgatattgagtcaataacagg

SEQ ID NO: 303832 - DNA, 75 bp, synthetic construct
  source 1..75: mol_type = other DNA
agattggaaagagttggtcgagcacggttttgacgatattgacccgcaaggctatttcacaggcaagcatccgaa

SEQ ID NO: 303833 - DNA, 75 bp, synthetic construct
  source 1..75: mol_type = other DNA
gcacggcggaaatcagtgttaccagtcagacggcgggagttagcgcagtcaccgtcagcatcaacagcagcagtc

SEQ ID NO: 303834 - DNA, 75 bp, synthetic construct
  source 1..75: mol_type = other DNA
aagcgacttttcttcgggcacaacaaatcgatagaaatttccatagcggtttatgttttgtaatgtgtattgact

SEQ ID NO: 303835 - DNA, 75 bp, synthetic construct
  source 1..75: mol_type = other DNA
cgtggatggaatactgcgatccggtgtttggtgcgatggatgtggaagggcgtcgttcgtttaccgaattcattc

SEQ ID NO: 303836 - DNA, 75 bp, synthetic construct
  source 1..75: mol_type = other DNA
gtccggaagagcacgggcgtgcgggggaggtggatgtctacgtattgtcccgtgaaggaaatggcactgccagcg

SEQ ID NO: 303837 - DNA, 75 bp, synthetic construct
  source 1..75: mol_type = other DNA
attgaagaaaggcttcaaaattgccagacggaatatcaaaatgaaattaatcaactatctgcgttaggtgttaat

SEQ ID NO: 303838 - DNA, 75 bp, synthetic construct
  source 1..75: mol_type = other DNA
caaccggcgatggggttaccaagcggatattcagcaggctacagctacgaatattttggcggtaacgccacctag

SEQ ID NO: 303839 - DNA, 75 bp, synthetic construct
  source 1..75: mol_type = other DNA
cgcggaacagagttatatcgttaccaacggaacatcgacgtcgaacaaaattgtgggtatgtacgccgcgccatc

SEQ ID NO: 303840 - DNA, 75 bp, synthetic construct
  source 1..75: mol_type = other DNA
atgaaccggacgcgatccgcgctcaatgtgaattgctgaaagcaatgtttatgcttcggactaaatatccctggg

SEQ ID NO: 303841 - DNA, 75 bp, synthetic construct
  source 1..75: mol_type = other DNA
ctaattattctgaacatggctttgaaaatatttgtaagtcgatgttgttgcggaaaactagttttttaaagttta

SEQ ID NO: 303842 - DNA, 75 bp, synthetic construct
  source 1..75: mol_type = other DNA
gatcaagaaccatctgcccggtgacgtgcgtagtcacaagaatgtctggcaatggctcgtggataactggaacag

SEQ ID NO: 303843 - DNA, 75 bp, synthetic construct
  source 1..75: mol_type = other DNA
tctttcgttccttaaccgcttagctcatgcaagtaagtgggataccaaaacgccagcactcaaagcagaaaggct

SEQ ID NO: 303844 - DNA, 75 bp, synthetic construct
  source 1..75: mol_type = other DNA
cacaacacgacgttatatcgattaccgcgatccctgggaaaatcatgtccgcaatgacaggaaccgggttgtatt

SEQ ID NO: 303845 - DNA, 75 bp, synthetic construct
  source 1..75: mol_type = other DNA
tgctgggtgaaatcggcctggcaatcgaaatgggttgtgatgctgaagacatcgcactgaccatccacgcgcacc

SEQ ID NO: 303846 - DNA, 75 bp, synthetic construct
  source 1..75: mol_type = other DNA
cgcataatagccaaaagcatatacaatggtgtattgatggtctggaatcgtcccagtcgctattgaaaataaaag

SEQ ID NO: 303847 - DNA, 75 bp, synthetic construct
  source 1..75: mol_type = other DNA
gtagtggctggtggagtctatgcgctgcaaatgaagggtaaaagcggtgtcgcgctagtagtggcaaaagaaatt

SEQ ID NO: 303848 - DNA, 75 bp, synthetic construct
  source 1..75: mol_type = other DNA
aagtcataaaaccgaatatttcagcgttatgggctgaaaagcaggcgcagataaaatcgggagaaatgactatca

SEQ ID NO: 303849 - DNA, 75 bp, synthetic construct
  source 1..75: mol_type = other DNA
tatgaaaaagggaggatgtctgatgcagaaaatttttaccgactcctttgcatctacgatttcaaaaattatgaa

SEQ ID NO: 303850 - DNA, 75 bp, synthetic construct
  source 1..75: mol_type = other DNA
aatgtcattattaatgatttttgtccaatttgctttaaagaaattaacaatgagctagagcgtttttcgaaagtg

SEQ ID NO: 303851 - DNA, 75 bp, synthetic construct
  source 1..75: mol_type = other DNA
acgaacgcaggcaatcgctaatgccagcaaaagaatgctgccctatttcgaggaagttgcagcggcaagtctggc

SEQ ID NO: 303852 - DNA, 75 bp, synthetic construct
  source 1..75: mol_type = other DNA
aaaaataaaggactttcgattctttgatggtaaattaattgaaaattatttgatcaggattgggtactcaaaatt

SEQ ID NO: 303853 - DNA, 75 bp, synthetic construct
  source 1..75: mol_type = other DNA
gcgttatctcaaattgttatgagagaaatgacggaaaaagaaagagaaagagtgatggatttgaattcactacct

SEQ ID NO: 303854 - DNA, 75 bp, synthetic construct
  source 1..75: mol_type = other DNA
tctaaaagaaatagtttctactttagtcggtaacaaaattaacgttggccattctcaaaaaatatataagcattt

SEQ ID NO: 303855 - DNA, 75 bp, synthetic construct
  source 1..75: mol_type = other DNA
tcgctttcgcaaaagattgtgaaaagcgtaacgacgaaattggttacagaaacgctgtcgcacgtgcgtattatg

SEQ ID NO: 303856 - DNA, 75 bp, synthetic construct
  source 1..75: mol_type = other DNA
aaggcgagctttctcgtaccatcgaaactatcggcccggtaaaaggggcgcgcgtacatctggcaatgccgaaac

SEQ ID NO: 303857 - DNA, 75 bp, synthetic construct
  source 1..75: mol_type = other DNA
ttagcaactggggactgattaaagctagaaatgttgtctccgacacaacggtgtatgatttgactgaagatatgc

SEQ ID NO: 303858 - DNA, 75 bp, synthetic construct
  source 1..75: mol_type = other DNA
cattaccatttgataggttctcagagcttttagagcgcatcgagagctttaaaggtaggaaacttactaaattag

SEQ ID NO: 303859 - DNA, 75 bp, synthetic construct
  source 1..75: mol_type = other DNA
catttgtggcgatggcgaccgaaatgaacaaaggtgtactgaaaaatttaggactgctgacgccggcgctggaac

SEQ ID NO: 303860 - DNA, 75 bp, synthetic construct
  source 1..75: mol_type = other DNA
caccaaggcctcattgactatcttgttaacgatgcttggaagggtaacgaaccttttgaaaaaagagacttaatt

SEQ ID NO: 303861 - DNA, 75 bp, synthetic construct
  source 1..75: mol_type = other DNA
ccaaacagctactcccaccggtagatttaacggaactgttacttgagatagatgcccggacaggatttacacatg

SEQ ID NO: 303862 - DNA, 75 bp, synthetic construct
  source 1..75: mol_type = other DNA
gcaggccaatacgacacttgcagatggcacccgtcacagtgggcaatcggttaaatccgtctacagcaaatcctt

SEQ ID NO: 303863 - DNA, 75 bp, synthetic construct
  source 1..75: mol_type = other DNA
atttctaatcggttagaaactcggaaacttgaaaatatccgcgacacccttctccccaaactcctttcgggcgaa

SEQ ID NO: 303864 - DNA, 75 bp, synthetic construct
  source 1..75: mol_type = other DNA
gaaaaatgaactggttgagattatgaaagataaacgcgttgtcacactcataaaattgattgccgatgaaactcc

SEQ ID NO: 303865 - DNA, 75 bp, synthetic construct
  source 1..75: mol_type = other DNA
aacgctggtcagcgccaatgcccgcctggttgattttcagtccacactggagcttgctggtcgttggggaggtgg

SEQ ID NO: 303866 - DNA, 75 bp, synthetic construct
  source 1..75: mol_type = other DNA
gctgataaagcacaatataccagcactgacccgccatcggctcagttgggtgaaacagaattaccttcgtgcaga

SEQ ID NO: 303867 - DNA, 75 bp, synthetic construct
  source 1..75: mol_type = other DNA
tgagagaaagcttatgttgcagtggtgggctgattatcttgatgaaacaactaagagaagaattgcaccatttga

SEQ ID NO: 303868 - DNA, 75 bp, synthetic construct
  source 1..75: mol_type = other DNA
cgtcacgccggacagcctgccgccggtggagtggctgacctacggcagcggttacctggcgggcatgaagctggg

SEQ ID NO: 303869 - DNA, 75 bp, synthetic construct
  source 1..75: mol_type = other DNA
gacgggagcattacccgcagcgagtatgatgaggcggggaggctgaaggcacagacggatgcggcggggcggcgg

SEQ ID NO: 303870 - DNA, 75 bp, synthetic construct
  source 1..75: mol_type = other DNA
gacgataagggccgcctgacgggcgaacggcagacggtggagaacccggagacgggggaactgctgtggcagcat

SEQ ID NO: 303871 - DNA, 75 bp, synthetic construct
  source 1..75: mol_type = other DNA
gttaatggattagtacaagagctcaaaaacctttttaatggtaaggaaggaataagcacctgtattaaacatcta

SEQ ID NO: 303872 - DNA, 75 bp, synthetic construct
  source 1..75: mol_type = other DNA
aaacagatacccatcacccagtttctccttctctctatttgcaggataaatcctcagactttgccggcatgattg

SEQ ID NO: 303873 - DNA, 75 bp, synthetic construct
  source 1..75: mol_type = other DNA
ataaatttagggctatttaaaaactgccaagactggtctaatgattctttagaaacatgtaagatgaagtgctcc

SEQ ID NO: 303874 - DNA, 75 bp, synthetic construct
  source 1..75: mol_type = other DNA
ggcatatgcctctgtagtgtcggattttgaactgcggttgccggcggagggtacacctgcagcatggcaggcagg

SEQ ID NO: 303875 - DNA, 75 bp, synthetic construct
  source 1..75: mol_type = other DNA
aagcggaaaaatggccccgagaatattctatgcttgctcgcaggatacaatttctacgctttaatgattatccag

SEQ ID NO: 303876 - DNA, 75 bp, synthetic construct
  source 1..75: mol_type = other DNA
tttaatcagaaagaaaatatgatcttggcatcagatgaagccaagggaagcaatagaattgaagtcaaacttgag

SEQ ID NO: 303877 - DNA, 75 bp, synthetic construct
  source 1..75: mol_type = other DNA
gttatatattcttttttttgttgtttgttgacaatgggggcgcaggctaaaataatattggatatatcaagagat

SEQ ID NO: 303878 - DNA, 75 bp, synthetic construct
  source 1..75: mol_type = other DNA
gcgctacagccttgcgaaaaacccgcagcagttcctgaatacccctgtcatcaaagagtttctgaacacatcagg

SEQ ID NO: 303879 - DNA, 75 bp, synthetic construct
  source 1..75: mol_type = other DNA
ggcagtctctattgaacaaaagcaggtccgcttttctcctcggatagatgtttcttttaaaggtgtgataaaact

SEQ ID NO: 303880 - DNA, 75 bp, synthetic construct
  source 1..75: mol_type = other DNA
ttacccactgaatccgataataaggatggatcctttgggtttgtataatttatatcaattattatatgatgtttg

SEQ ID NO: 303881 - DNA, 75 bp, synthetic construct
  source 1..75: mol_type = other DNA
cctttattatgatgttgaagtgcttttcgactggattaatgatggtcagaagtttgaatccatacatcctaaagg

SEQ ID NO: 303882 - DNA, 75 bp, synthetic construct
  source 1..75: mol_type = other DNA
tcataatgccgcatcatcagctgcaaccagcgcggaaaatgcagcaaatgctgcactcgggcatgaaaacagcgc

SEQ ID NO: 303883 - DNA, 75 bp, synthetic construct
  source 1..75: mol_type = other DNA
catcaggcatcttctgtaagtgcgtttgttacggttagccaggggatcacctgttctgctcccgccaaaacgact

SEQ ID NO: 303884 - DNA, 75 bp, synthetic construct
  source 1..75: mol_type = other DNA
gtggtcttttattagttagcccacgcaacaaagtacagtatattcagcagttattggttattctaagcctactat

SEQ ID NO: 303885 - DNA, 75 bp, synthetic construct
  source 1..75: mol_type = other DNA
ttagatgagaaattttatcttactaaatctcgtaaaaaacacgttttacttaaagaaataaataatacaccatat

SEQ ID NO: 303886 - DNA, 75 bp, synthetic construct
  source 1..75: mol_type = other DNA
acgcttgagcgggaagcccgcgctaaaagggaggccgagcttctcaatgcgcaggacgacgaagagaaagccccg

SEQ ID NO: 303887 - DNA, 75 bp, synthetic construct
  source 1..75: mol_type = other DNA
atattgttgatggttggcatttagataaagatatattaggaggtaatgagtacagcccaagtaactgcatctttg

SEQ ID NO: 303888 - DNA, 75 bp, synthetic construct
  source 1..75: mol_type = other DNA
ccacggtcccacctgcgtcatcggtcagcttatctgtctgggaccacggtcccacctgcgtcatcggtcaggtaa

SEQ ID NO: 303889 - DNA, 75 bp, synthetic construct
  source 1..75: mol_type = other DNA
gatgtagcggctgcggcggcggataatgcacctggtaaagatcgtaatgtggattataccgaaaactcacgacag

SEQ ID NO: 303890 - DNA, 75 bp, synthetic construct
  source 1..75: mol_type = other DNA
caggtcaaaacaagacaacaggaaatgatactggctgcggaaaacaacgccacacagcctacagacagtacagca

SEQ ID NO: 303891 - DNA, 75 bp, synthetic construct
  source 1..75: mol_type = other DNA
tgacctgtacatcccggaaaatacctcgatcccctgctcactggatcgccgctttgtatctgaccgggcggggaa

SEQ ID NO: 303892 - DNA, 75 bp, synthetic construct
  source 1..75: mol_type = other DNA
ctgttctacccccgcaaaaacgactgaacaaatagttgctgatgccgatgccgcgttatatcgagcgaaagaaaa

SEQ ID NO: 303893 - DNA, 75 bp, synthetic construct
  source 1..75: mol_type = other DNA
tcattatgctgagtctgcaaccttcctgtgtaaagtcaaacagtcagggggacggtgacgtcccgggccagaata

SEQ ID NO: 303894 - DNA, 75 bp, synthetic construct
  source 1..75: mol_type = other DNA
gcctgaaaaaaaacagtgaattattccggacccgctgtgaacagcggttacaccagttatcccgggaaaatgctg

SEQ ID NO: 303895 - DNA, 75 bp, synthetic construct
  source 1..75: mol_type = other DNA
cagtacggattattggacaagtactcagctcatgggagtacacgagaaatttaatcctgaaactggtatatcaga

SEQ ID NO: 303896 - DNA, 75 bp, synthetic construct
  source 1..75: mol_type = other DNA
atgcactggatggtatccaggtaccgaagtgaacgatcaggacggcaacggcaaggcggatgcagaggaagcggc

SEQ ID NO: 303897 - DNA, 75 bp, synthetic construct
  source 1..75: mol_type = other DNA
ctgataaggacggtaacggcctgatcacgccggaagaggcgaaagccgtggaagatgcgaatgcggcgctggaag

SEQ ID NO: 303898 - DNA, 75 bp, synthetic construct
  source 1..75: mol_type = other DNA
tggctgagtattctaaaagataacaatattagtgcaattaattgcggctttatttgttctaaatatagactttca

SEQ ID NO: 303899 - DNA, 75 bp, synthetic construct
  source 1..75: mol_type = other DNA
ggacccgatagggctggaggggggatggagtctgtatgcgtatccgctgaatccggtgaatggtattgatccatt

SEQ ID NO: 303900 - DNA, 75 bp, synthetic construct
  source 1..75: mol_type = other DNA
aagaaaaagtgagtttcatgttgattcattaaagccaggtagtacgcgtagtgttattttagaaacgcaaccaaa

SEQ ID NO: 303901 - DNA, 75 bp, synthetic construct
  source 1..75: mol_type = other DNA
tggatgatgactttgatgataactcccctgatgatggtcccgttgagaatagtcctgttgtgaatagtccccttg

SEQ ID NO: 303902 - DNA, 75 bp, synthetic construct
  source 1..75: mol_type = other DNA
aaggatgaaagcagaattcgattttttattggtgatgttcgcgataaagatcgtttgtatcgagcgctggatggt

SEQ ID NO: 303903 - DNA, 75 bp, synthetic construct
  source 1..75: mol_type = other DNA
ataataaaaataaatttcagtattttaaatttaaactgattaaattcttattcagtaactttgtaacccgtaaaa

SEQ ID NO: 303904 - DNA, 75 bp, synthetic construct
  source 1..75: mol_type = other DNA
aatcagttaccagaggatatcaaaagctccctggtttcctgtgtcgatatattcaaggttttgattaaacaatat

SEQ ID NO: 303905 - DNA, 75 bp, synthetic construct
  source 1..75: mol_type = other DNA
agctaatctgtctgggaccacggtcccacctgcgtcatcggtcaggtaatctgtctgggaccacggtcccacctg

SEQ ID NO: 303906 - DNA, 75 bp, synthetic construct
  source 1..75: mol_type = other DNA
ttttgctgcaaaccctgcgcctgaaacgcctcacgaactacaaaatcatcgctgcatcaatatgcgtctgccaac

SEQ ID NO: 303907 - DNA, 75 bp, synthetic construct
  source 1..75: mol_type = other DNA
tgtgcatgacgacgtaacatttcttggaatttttgatcatcgtccgatacgttaccatttacgattagtggtgca

SEQ ID NO: 303908 - DNA, 75 bp, synthetic construct
  source 1..75: mol_type = other DNA
agccggattactggcatcaacaggaagtacaggcgactcgtatgacaacgcgatggcggagagcatcaatggtct

SEQ ID NO: 303909 - DNA, 75 bp, synthetic construct
  source 1..75: mol_type = other DNA
aagacatcatgttcagccgcacgaccggggataccgtggccgtggtgaacgtgaaggatacccccggagtgaagg

SEQ ID NO: 303910 - DNA, 75 bp, synthetic construct
  source 1..75: mol_type = other DNA
gaagtctgattttcctgatgttgctcataaagacatacacatacttaatatcggtactaccggggaagagtattc

SEQ ID NO: 303911 - DNA, 75 bp, synthetic construct
  source 1..75: mol_type = other DNA
tggcccggagagtaatggtcccggcagtcaatctttcaacaggaaaacctcagttcttcaagacaccacataacc

SEQ ID NO: 303912 - DNA, 75 bp, synthetic construct
  source 1..75: mol_type = other DNA
gacgttgttgtaccttcctatgaatatgtagaaacgattgagtcaagcgctgaagtggcgtctgactcaattgat

SEQ ID NO: 303913 - DNA, 75 bp, synthetic construct
  source 1..75: mol_type = other DNA
aggattctttattgatctagctgtgaaagatccaggttgtcctggccgttacttaatgggcatagagtgtgatgg

SEQ ID NO: 303914 - DNA, 75 bp, synthetic construct
  source 1..75: mol_type = other DNA
tatcagtttattcgtgttgagatgcgagttctgaatattaaaaggaaaaagatcttgagttatatatgttggcga

SEQ ID NO: 303915 - DNA, 75 bp, synthetic construct
  source 1..75: mol_type = other DNA
atttaaagattacgacaaaaaactgattgaattacaacgtcagcggattgcagcaaaaattgcttgccgaaatat

SEQ ID NO: 303916 - DNA, 75 bp, synthetic construct
  source 1..75: mol_type = other DNA
atacgaagcgcaacgctttcttgaccgagtcttggcattaattgatggcgaagaggctgaagcgaatgatgcagc

SEQ ID NO: 303917 - DNA, 75 bp, synthetic construct
  source 1..75: mol_type = other DNA
acatgtcattgaggttgagcttcctaatgttgatgctgatcgtcgtttgttgcggcccgcaatgcttgaggcttt

SEQ ID NO: 303918 - DNA, 75 bp, synthetic construct
  source 1..75: mol_type = other DNA
accagccggggagcttcgcgccgctcatccgcatcgaaacagacaacggtgaacgggagaaagcgcagtgccgca

SEQ ID NO: 303919 - DNA, 75 bp, synthetic construct
  source 1..75: mol_type = other DNA
agtcgctgaccattgccgacagccttaagtttggtaaagcggtgctgaataagctcggtaaaatcaacaagctgc

SEQ ID NO: 303920 - DNA, 75 bp, synthetic construct
  source 1..75: mol_type = other DNA
ttgccgacagcctgaagtttggtaaggccgtgctaaataagctggggaaaatcaacaaactgcataagaatcagg

SEQ ID NO: 303921 - DNA, 75 bp, synthetic construct
  source 1..75: mol_type = other DNA
aaaacatactatttgattttaaaaagagagaatttatctcaatccgaaatatataaccatttgattaactggata

SEQ ID NO: 303922 - DNA, 75 bp, synthetic construct
  source 1..75: mol_type = other DNA
agctttccgcaaaagaagcaaacagccttgtatggctatgggattatgccaaccgctcacaggcattattccgcg

SEQ ID NO: 303923 - DNA, 75 bp, synthetic construct
  source 1..75: mol_type = other DNA
tgcttcagaatacagtcaatgacagttgtatctttgggactaataggatttagacaattatttatcatgctattt

SEQ ID NO: 303924 - DNA, 75 bp, synthetic construct
  source 1..75: mol_type = other DNA
tttgctgtttcctttttattttttgctgtgttttcctataagcgaaattatgtttcaattagtttaagatacttt

SEQ ID NO: 303925 - DNA, 75 bp, synthetic construct
  source 1..75: mol_type = other DNA
catcaatattagacgtttatggtgaaaagattgagaatatcaaagattctccaatgaagttttttgaagagcttg

SEQ ID NO: 303926 - DNA, 75 bp, synthetic construct
  source 1..75: mol_type = other DNA
gaggatgaggggcttgtcaccctctggcactacgatgcgtcggaccgcatcacgcaccggacggtgaacggcgac

SEQ ID NO: 303927 - DNA, 75 bp, synthetic construct
  source 1..75: mol_type = other DNA
gtggtgaaaaaagaactggcggacggcagcgtcacgcgcagcgggtatgacgcggcaggaaggctcacggcgcag

SEQ ID NO: 303928 - DNA, 75 bp, synthetic construct
  source 1..75: mol_type = other DNA
atttaattttaagattgaagaagagatcaaagagataattgatatactatcaactcttgaaccaagtgagggttc

SEQ ID NO: 303929 - DNA, 75 bp, synthetic construct
  source 1..75: mol_type = other DNA
gcgaggtggcagccttccagtaacaaaaatgcgtaaatacgaagaagtaaccggacttcctcgcgaagttctata

SEQ ID NO: 303930 - DNA, 75 bp, synthetic construct
  source 1..75: mol_type = other DNA
aatggggcaacctgctgaatgaagagaacccgcaacagctgcagcagctcatccgcctgccgggtcagcagtatg

SEQ ID NO: 303931 - DNA, 75 bp, synthetic construct
  source 1..75: mol_type = other DNA
acggtaaagaaaaacgatggaactgcggataacgatccgatgtttgtccccttacgggcgcctgcggtagaaata

SEQ ID NO: 303932 - DNA, 75 bp, synthetic construct
  source 1..75: mol_type = other DNA
ggactcgattcgctgtcgcgctggccggtgggcagccttgtcggggtaagcgtggatgatgaaggcgtttgcgcg

SEQ ID NO: 303933 - DNA, 75 bp, synthetic construct
  source 1..75: mol_type = other DNA
cgcctcgctgtttgcgcgccagtcgggactcgattcgctgtcgcgctggccggtgggcagccttgtcggggtaag

SEQ ID NO: 303934 - DNA, 75 bp, synthetic construct
  source 1..75: mol_type = other DNA
acttttgcacaaagtgaacaacacaatacaggcacaaaaacgcttcattgccgatgccgcgcacgaattacgcac

SEQ ID NO: 303935 - DNA, 75 bp, synthetic construct
  source 1..75: mol_type = other DNA
tacgcaaaacgatgacacaggcatcacctttcatttgcccgcgcccgtgagggaaggttttcagaacgccaccat

SEQ ID NO: 303936 - DNA, 75 bp, synthetic construct
  source 1..75: mol_type = other DNA
gaaaggcggtggcagaaatcctgaaaggattcggagttgacaaggcatcagcagagatggtgggaaacatcttgg

SEQ ID NO: 303937 - DNA, 75 bp, synthetic construct
  source 1..75: mol_type = other DNA
agatgattaatagttttgaagacttgcctgtaaaaattgagtttgttcttggaaagaaaataatgaatctatatg

SEQ ID NO: 303938 - DNA, 75 bp, synthetic construct
  source 1..75: mol_type = other DNA
taatatcgataaagacaaggtaaaaatagaattcggtatcagcgtcaacacgatcaaccgagaaacggatgccga

SEQ ID NO: 303939 - DNA, 75 bp, synthetic construct
  source 1..75: mol_type = other DNA
gatgggccttttggatctaatcttaagaccgaacattataaaaaaagtggaattcctattatttcaagcggcttt

SEQ ID NO: 303940 - DNA, 75 bp, synthetic construct
  source 1..75: mol_type = other DNA
cacgttgcggcgtgattttcgtgaacgactgatgtatctggacctggagtatcagtccggatactgccgcttacg

SEQ ID NO: 303941 - DNA, 75 bp, synthetic construct
  source 1..75: mol_type = other DNA
acagcacgctgaagaaagttggaaaattacacgaccgactcactgaatcgacggtaaccatcaacgttctttacg

SEQ ID NO: 303942 - DNA, 75 bp, synthetic construct
  source 1..75: mol_type = other DNA
atctgttcctttatcgggctggtggggtaatagttacgccacctattctgtttcgcaaaacgataattccggtag

SEQ ID NO: 303943 - DNA, 75 bp, synthetic construct
  source 1..75: mol_type = other DNA
gggacgccctgaacgaatactgccgcaatggctgggtggagatcgacaataatctgtgtgaaaacgccctccggg

SEQ ID NO: 303944 - DNA, 75 bp, synthetic construct
  source 1..75: mol_type = other DNA
ggacaacagaatggtgcgcagaatacgatgaatggggtaacctgctgaatgaagagaacccgcatcagctgcagc

SEQ ID NO: 303945 - DNA, 75 bp, synthetic construct
  source 1..75: mol_type = other DNA
acggcgaactcatccgcatcagcagcccgcgccagacccggagttacagctacagcaccaccggcaggctgacca

SEQ ID NO: 303946 - DNA, 75 bp, synthetic construct
  source 1..75: mol_type = other DNA
tgaaggacggggccggtaagccggtaccgggatgcacgatagagctgaaagcgcgccgcacaacggagacggtga

SEQ ID NO: 303947 - DNA, 75 bp, synthetic construct
  source 1..75: mol_type = other DNA
gcaatcacagcagcagggaatgcagaggaaagctcgacccgtgccggtgagtctgaaaaagccgccggagctgat

SEQ ID NO: 303948 - DNA, 75 bp, synthetic construct
  source 1..75: mol_type = other DNA
tgggtggaaatcgacaacaacatcgctgaaaatgccctgcgggcggtcagtctgggtcgtaaaaacttcctgttc

SEQ ID NO: 303949 - DNA, 75 bp, synthetic construct
  source 1..75: mol_type = other DNA
cctcagcttactgaacggaaaaaaataatgtctttaaatgagcaatataatcaacttgcatctgtcgttgcggcg

SEQ ID NO: 303950 - DNA, 75 bp, synthetic construct
  source 1..75: mol_type = other DNA
atagggcgctgtatctgattttagttatgtctgcaggacctattgcagttgcgacatttgttggtttattggttg

SEQ ID NO: 303951 - DNA, 75 bp, synthetic construct
  source 1..75: mol_type = other DNA
cgtcacgcggctgggtgggaaagttactttagcccctgccagccagtttacctcaggcgtactggtcagcattgt

SEQ ID NO: 303952 - DNA, 75 bp, synthetic construct
  source 1..75: mol_type = other DNA
tgacggccgcacacagcgttatcaccacgacctgaccggcaaacttatccgcagcgaggatgaggggctggtcac

SEQ ID NO: 303953 - DNA, 75 bp, synthetic construct
  source 1..75: mol_type = other DNA
ggtgaggacggttacagccgcagcgagtcactgtggctggtgcgcggcggcgtcctgagactggatgaaggtcac

SEQ ID NO: 303954 - DNA, 75 bp, synthetic construct
  source 1..75: mol_type = other DNA
ccgtcaccggtactacgatccgttgcaggggcggtatattactcaggacccgatggggttgaaagggggatggaa

SEQ ID NO: 303955 - DNA, 75 bp, synthetic construct
  source 1..75: mol_type = other DNA
tttaatagatgatgtcgtatcgacacaaaacaactacgcgaagctcatgcgtgcattagaaatgcttctgacgag

SEQ ID NO: 303956 - DNA, 75 bp, synthetic construct
  source 1..75: mol_type = other DNA
caagagcgcagcctcaagataaaatcgatagctataattcagcactgcaagctttttccatcttttgttcatcta

SEQ ID NO: 303957 - DNA, 75 bp, synthetic construct
  source 1..75: mol_type = other DNA
tgtaagcgaaaacggtttaaatggagtcttatctgatcgtaataaaaaaaataaaaatgatcacgggtgtggcac

SEQ ID NO: 303958 - DNA, 75 bp, synthetic construct
  source 1..75: mol_type = other DNA
aatcgcaaaaaagtcggagatgagctactggtaaagcgtgagacaatgcttagcagacagaagcgtggccgagac

SEQ ID NO: 303959 - DNA, 75 bp, synthetic construct
  source 1..75: mol_type = other DNA
atgtccgggagatagccaaaattaacattactctccaaaaagaagagggtggtttatataatttacgtggattgg

SEQ ID NO: 303960 - DNA, 75 bp, synthetic construct
  source 1..75: mol_type = other DNA
gtcagagtcaaaggaacaccccatagatattcaagaaaaaaaagatgcgtttgtgaatgagttcaaggggatatt

SEQ ID NO: 303961 - DNA, 75 bp, synthetic construct
  source 1..75: mol_type = other DNA
aaaaatattcaacatatactttgataataattacgaggtagttactgatggtgagcctgacgtagtatgtttaag

SEQ ID NO: 303962 - DNA, 75 bp, synthetic construct
  source 1..75: mol_type = other DNA
aaaaaaaccataaacagcattcgcctgaatttcgcagtgaagatctgaagcttgcggaacgcatcggtattgctg

SEQ ID NO: 303963 - DNA, 75 bp, synthetic construct
  source 1..75: mol_type = other DNA
aactggagagaacgaatacaccgtaattgaacaaacaggtggcaaatcctttaatgtttttcaggttggtgcagg

SEQ ID NO: 303964 - DNA, 75 bp, synthetic construct
  source 1..75: mol_type = other DNA
actctacatctcatctcattctgaattcagatgattttaaatctcaggatatagagggggagatattaaaaatct

SEQ ID NO: 303965 - DNA, 75 bp, synthetic construct
  source 1..75: mol_type = other DNA
ataaccatccaaatctaggaatttgtggatctttattactacaccaaaacaacaagtcaataatccaagctgcgg

SEQ ID NO: 303966 - DNA, 75 bp, synthetic construct
  source 1..75: mol_type = other DNA
gatatccgtaacatggaaaactcatggttccggtaattatgtggatgacagatactctgtgaatgttttgagaag

SEQ ID NO: 303967 - DNA, 75 bp, synthetic construct
  source 1..75: mol_type = other DNA
atcttttctatatacaacaatgggagttgttttcttggggtttcttgccacgtcttatgatgtggggatatatac

SEQ ID NO: 303968 - DNA, 75 bp, synthetic construct
  source 1..75: mol_type = other DNA
tgaaacggtattcaaatacaaaaaaggaagttttgtccgggagatagccagaattaacattactctacaaaaagg

SEQ ID NO: 303969 - DNA, 75 bp, synthetic construct
  source 1..75: mol_type = other DNA
ggcgcaacaggaatcccgcgataatctgggactgaaaagcgccgctacaatggagccacagagtgatatttatga

SEQ ID NO: 303970 - DNA, 75 bp, synthetic construct
  source 1..75: mol_type = other DNA
cacagcagattaaggccgactgtcaggcgctggcgaaagacgtacagcagaacgccgacgcggttgcggagggta

SEQ ID NO: 303971 - DNA, 75 bp, synthetic construct
  source 1..75: mol_type = other DNA
tggtggtatgccggggtcatatcgggcactgtcaggtgatgggctcgggtctgccgggtcagccagtgtcatgat

SEQ ID NO: 303972 - DNA, 75 bp, synthetic construct
  source 1..75: mol_type = other DNA
caacagatatgtttgctcaagcgcgttcttcactgaagggagggtggaacggtaaattctggaactacgcatctc

SEQ ID NO: 303973 - DNA, 75 bp, synthetic construct
  source 1..75: mol_type = other DNA
tacacttgatcaggccgcttccggtgatgctccaatccagtggaaagcgtctctgccggttactgttacctacat

SEQ ID NO: 303974 - DNA, 75 bp, synthetic construct
  source 1..75: mol_type = other DNA
cgccgctacaatggagccacagagtgatatttatgaccggacagaaggccgactggcgataccggggacactggg

SEQ ID NO: 303975 - DNA, 75 bp, synthetic construct
  source 1..75: mol_type = other DNA
caacttacccttgagccgagattaatcgatcttctggttttctttgctcaacacagtggcgaagtacttagggaa

SEQ ID NO: 303976 - DNA, 75 bp, synthetic construct
  source 1..75: mol_type = other DNA
ttgacacataataatgtagggtttaatttcaaattattcccggaagtcaagctgtctgggaaaaatcttgaaacg

SEQ ID NO: 303977 - DNA, 75 bp, synthetic construct
  source 1..75: mol_type = other DNA
gatgatattttatttatggatgatgactttgatgatccttccactaaggatgatcccgtggagaatagtcccctt

SEQ ID NO: 303978 - DNA, 75 bp, synthetic construct
  source 1..75: mol_type = other DNA
gtccggatgccacattattctgaaatcccgggtaaacacctcagaggtggtgatgcgcacagttgccgacgtggt

SEQ ID NO: 303979 - DNA, 75 bp, synthetic construct
  source 1..75: mol_type = other DNA
tttctgcgccggcagctgaagcgccccgttcggttgctgcgctcacccccgatccaggcttcgtctggactgaac

SEQ ID NO: 303980 - DNA, 75 bp, synthetic construct
  source 1..75: mol_type = other DNA
gcgcgctggcgctgggcttactgatggcggccgtccctgacggccatgctgaccagacggtgccggagggttacg

SEQ ID NO: 303981 - DNA, 75 bp, synthetic construct
  source 1..75: mol_type = other DNA
gcgacgtgcccaccgtcaccatcaacacctttgcgggcgatgatgtagtgaacgcggcggaacacggcgcgtctt

SEQ ID NO: 303982 - DNA, 75 bp, synthetic construct
  source 1..75: mol_type = other DNA
ataccgccacggttgccgccaatggcacctgggcgctgaacgtgcctgcggcggatctggcagcactcgggcaag

SEQ ID NO: 303983 - DNA, 75 bp, synthetic construct
  source 1..75: mol_type = other DNA
gagcgtcggcgttccggcggcagatgtcagcgtctggcctgcgggaacggtcacaattacggcgagcggcaacac

SEQ ID NO: 303984 - DNA, 75 bp, synthetic construct
  source 1..75: mol_type = other DNA
cagcagacgtgggcaactggcctgcgggtacagtgaatatcattgtaagcggcactaacactgcagaaacgacta

SEQ ID NO: 303985 - DNA, 75 bp, synthetic construct
  source 1..75: mol_type = other DNA
ccagtgacgccaccgggggcaacggttcggacgtggtgaatggctttacggtaggcacctgggaaggcaccgccg

SEQ ID NO: 303986 - DNA, 75 bp, synthetic construct
  source 1..75: mol_type = other DNA
gcggtgaagtcgtttacctctaccgtaacggtctgctgttaggtgcggtaacgatggtcggcgcgctgaactgga

SEQ ID NO: 303987 - DNA, 75 bp, synthetic construct
  source 1..75: mol_type = other DNA
ggtcaaaccacgcacgccctgaccgtcgataccgttgcgcccacggtgaccatcgccacggtggcgggtgacgat

SEQ ID NO: 303988 - DNA, 75 bp, synthetic construct
  source 1..75: mol_type = other DNA
gatgatgtgatcaacgcgacggaaaaaggatcgaatctggcgctttccggcaccagcgatcagcctgcgggtacg

SEQ ID NO: 303989 - DNA, 75 bp, synthetic construct
  source 1..75: mol_type = other DNA
ggcaccacgataacggtgacgctgaacgggcaaaattacaccgccaccacagatgcttccggcaactggagcgcc

SEQ ID NO: 303990 - DNA, 75 bp, synthetic construct
  source 1..75: mol_type = other DNA
actgttccggcgtcacgggtgagcgccctcggtgaagccagttatacggtgaccgcttccgccactgacaccgat

SEQ ID NO: 303991 - DNA, 75 bp, synthetic construct
  source 1..75: mol_type = other DNA
aaacgtccaggccagcgtcagcaacgtcgcgggtaacaacgcccaggcaacgcatgtttatagcgtcgatgccac

SEQ ID NO: 303992 - DNA, 75 bp, synthetic construct
  source 1..75: mol_type = other DNA
agacagcaatggtgacaccatcgccagtacccaggtcggtagcgatggacgctggagcgtcgatttgcctacgca

SEQ ID NO: 303993 - DNA, 75 bp, synthetic construct
  source 1..75: mol_type = other DNA
agatttaaccctttccggcagcacctccggcgtggaagtggggcaaacggtcaccgttacctttggcgggaaaac

SEQ ID NO: 303994 - DNA, 75 bp, synthetic construct
  source 1..75: mol_type = other DNA
gtagcgggcgatgacatcattaacgccacggaacacggacaggcgcagattatcagcggctcggcaacgggcgcg

SEQ ID NO: 303995 - DNA, 75 bp, synthetic construct
  source 1..75: mol_type = other DNA
cggcaacgccacggtcaccgccagcgtgaacgatgtcgccggtaacccgaccagcgtttcacgcgtggcgctggt

SEQ ID NO: 303996 - DNA, 75 bp, synthetic construct
  source 1..75: mol_type = other DNA
ggtggatatcacggtaagcggcaccaacagcgccggaacaacctccaccattacccatccggttaccgtcgatct

SEQ ID NO: 303997 - DNA, 75 bp, synthetic construct
  source 1..75: mol_type = other DNA
ccgtctcgctcaacggcaaaaactacaccaccacgctggatgcctctggtaactggagcgtcggtatcccggcgg

SEQ ID NO: 303998 - DNA, 75 bp, synthetic construct
  source 1..75: mol_type = other DNA
tggctctctcacggttaacgcctcggtgaccaacggcgttggcaacaccggcagcggcacgcgtgagatcgcgat

SEQ ID NO: 303999 - DNA, 75 bp, synthetic construct
  source 1..75: mol_type = other DNA
cggcggtgcataactacagtgttgatagcagcgcgccgaccatcattatcaatactgttgccagcgacaatatcg

SEQ ID NO: 304000 - DNA, 75 bp, synthetic construct
  source 1..75: mol_type = other DNA
cgtgctggacgccaacggcaactggagcatcggcgtgcctgccagcgtgatttccgcactggcgcagggcgatgt

SEQ ID NO: 304001 - DNA, 75 bp, synthetic construct
  source 1..75: mol_type = other DNA
gcggttgccgggaatacggtgattgtcaccattggcggcaatcaatataacgccaccgtgcagtcagatttaagc

SEQ ID NO: 304002 - DNA, 75 bp, synthetic construct
  source 1..75: mol_type = other DNA
ccagccataatgtgctggtcaacagcgccttgcctgccgttaccattaacgcggtggcgactgacgatattatta

SEQ ID NO: 304003 - DNA, 75 bp, synthetic construct
  source 1..75: mol_type = other DNA
tcaataccacctggggcggtttacaggcgacagatgccacccacgcttacgacctcagcgccgaagcaggtacgg

SEQ ID NO: 304004 - DNA, 75 bp, synthetic construct
  source 1..75: mol_type = other DNA
tgcctccggtaactggagcgttggcgttccggcggcagatgttacggcgctgggtagcggtgcgcagaccatcac

SEQ ID NO: 304005 - DNA, 75 bp, synthetic construct
  source 1..75: mol_type = other DNA
agcgacgatatccttaacgccacagaggcgggaaatccgctcaccatcagcggcaccagcaccgccgaaaccggg

SEQ ID NO: 304006 - DNA, 75 bp, synthetic construct
  source 1..75: mol_type = other DNA
gccgggcgtcaccattaacgttgtcgcgagcgacgatattattaacgctgccgaagcgggcgcgggccagagcat

SEQ ID NO: 304007 - DNA, 75 bp, synthetic construct
  source 1..75: mol_type = other DNA
ggtgattcatctttccagcaagctctgctttacaacggaagggtcggaaacaaaatcaacattggatatcgtgaa

SEQ ID NO: 304008 - DNA, 75 bp, synthetic construct
  source 1..75: mol_type = other DNA
tggggctttttgcccggaccggtcaacttagcctgaaatccggggaaggggcagtggatgttcaggcgcaaaacg

SEQ ID NO: 304009 - DNA, 75 bp, synthetic construct
  source 1..75: mol_type = other DNA
ttgcctttaatctttgcccgaaacaggcgaaaggtaacatcaaaagctggaaagcgacgccaatgcaactggtca

SEQ ID NO: 304010 - DNA, 75 bp, synthetic construct
  source 1..75: mol_type = other DNA
gccacgcggtgagctggcggcggtgtatgaccgcagcggtacgcagatgcgccactttacttacgatgataaata

SEQ ID NO: 304011 - DNA, 75 bp, synthetic construct
  source 1..75: mol_type = other DNA
ttcacgacactttcatgtggatcacatttaccctaaaggtttgtttacgcgtaacaagcttgcaaaagttggtgt

SEQ ID NO: 304012 - DNA, 75 bp, synthetic construct
  source 1..75: mol_type = other DNA
agcgtgggctttaaggttgagaactttaacaaggaaaacatggcgattctcgaaaagaactggacgccaattcgt

SEQ ID NO: 304013 - DNA, 75 bp, synthetic construct
  source 1..75: mol_type = other DNA
tatctgtacacatcaatgtttcattcattactgctatcgcgcagcgcttgaaacggaacttcaaaaccttctccg

SEQ ID NO: 304014 - DNA, 75 bp, synthetic construct
  source 1..75: mol_type = other DNA
ttactggattatgggaatgctatttgtcatggtccaaacagaatcgagagctaacattatccaagttggaagcgc

SEQ ID NO: 304015 - DNA, 75 bp, synthetic construct
  source 1..75: mol_type = other DNA
tttataaagagaggagtatttagttctgggatttttttattttccctcatatttttatcagttcatgggttgtat

SEQ ID NO: 304016 - DNA, 75 bp, synthetic construct
  source 1..75: mol_type = other DNA
cattagccagcttgaatttaatgctattcatgacgttgtacagaagcgtacagggtacgacctgactgtagataa

SEQ ID NO: 304017 - DNA, 75 bp, synthetic construct
  source 1..75: mol_type = other DNA
atatgaagctgtgcgcgatgttgtcgccaacaaaaccggctttaatatttctccagacaaagcccttgatttttc

SEQ ID NO: 304018 - DNA, 75 bp, synthetic construct
  source 1..75: mol_type = other DNA
cagaagcgaaccgcccagagtgagggtaaagcagcccttgaagcagcccgcgctcaaacacagcgcctcaaaatg

SEQ ID NO: 304019 - DNA, 75 bp, synthetic construct
  source 1..75: mol_type = other DNA
gtgcaaatcgtcggcagtaccatcactgacgccggttcgataacgttaaccatcgacaatagtcaggccagcgtg

SEQ ID NO: 304020 - DNA, 75 bp, synthetic construct
  source 1..75: mol_type = other DNA
accgttaccgatgccgccggtaacagcgatagtgagacgcacacggtcaccgttaaccttaccgcaccgaccatt

SEQ ID NO: 304021 - DNA, 75 bp, synthetic construct
  source 1..75: mol_type = other DNA
ccacgcacgccctgaccgtcgataccgttgcgccaacggtcaccatcgccacggtggcgggtgacgatattatca

SEQ ID NO: 304022 - DNA, 75 bp, synthetic construct
  source 1..75: mol_type = other DNA
ccacggagaaaggcgcggatctggcgatttccggcagcagtaaccagcctgcgggtacgcagataaccgttacgc

SEQ ID NO: 304023 - DNA, 75 bp, synthetic construct
  source 1..75: mol_type = other DNA
ttacccatccggttaccgtcgatctggcggcggtcgccatcaccattaacaccctttccggcgatgatgtgatca

SEQ ID NO: 304024 - DNA, 75 bp, synthetic construct
  source 1..75: mol_type = other DNA
cgcaacaccaacacggtgagctacggcacttcgctgcacctgcgcatcaccgatcccaacggcattaacgtctat

SEQ ID NO: 304025 - DNA, 75 bp, synthetic construct
  source 1..75: mol_type = other DNA
tgaataatgacggcaggatcgacctggttcagcacacctataacctgaataactattacacactgtcttcgctca

SEQ ID NO: 304026 - DNA, 75 bp, synthetic construct
  source 1..75: mol_type = other DNA
gccgatgacgtgattaacgctgccgaaaaaggcgcggcgttaacgctctctggcagcacttctggtgtggaggcc

SEQ ID NO: 304027 - DNA, 75 bp, synthetic construct
  source 1..75: mol_type = other DNA
cgatgcttccggtaactggagcgtgaccgttccgtcgtcacgggtgagcgccctcggtgaagcgacttataccgt

SEQ ID NO: 304028 - DNA, 75 bp, synthetic construct
  source 1..75: mol_type = other DNA
ttaacgccgccgaaaaaggggcagatttaaccctttccggcagcacctccggcgtggaagcggggcaaacggtca

SEQ ID NO: 304029 - DNA, 75 bp, synthetic construct
  source 1..75: mol_type = other DNA
acggcgtggcaacgctggatgcgcaggccggaaacatcggtgattttgtcaaagtcacccagagcggcagcgaca

SEQ ID NO: 304030 - DNA, 75 bp, synthetic construct
  source 1..75: mol_type = other DNA
gcgatagtgagacgcacacggtcaccgtcaaccttaccgcgccgaccattggcatcaacaccatcgccaccgatg

SEQ ID NO: 304031 - DNA, 75 bp, synthetic construct
  source 1..75: mol_type = other DNA
accagaccacggtgcaggcagacggcagctggagtttaacgctgcccgccagcgacttaaccgcacttgccaata

SEQ ID NO: 304032 - DNA, 75 bp, synthetic construct
  source 1..75: mol_type = other DNA
accgccagcaatatcgatcagacggtaaacaccacctggggcggtttacatgccactgatgctacccatgcttac

SEQ ID NO: 304033 - DNA, 75 bp, synthetic construct
  source 1..75: mol_type = other DNA
gtcaccgcgcaggtgaaaagctcggcgggcaacggcaacaccgctaacgtcagcaacggcacggtgacggtcaac

SEQ ID NO: 304034 - DNA, 75 bp, synthetic construct
  source 1..75: mol_type = other DNA
ccattgacgccagtctgccaggtctgcgagtcgacaccgttgcaggcgatgatgtggtcaatatcatcgaacatg

SEQ ID NO: 304035 - DNA, 75 bp, synthetic construct
  source 1..75: mol_type = other DNA
tccggcgatgacattattaacaattccgagaaaactcaggatctgaccatcagcggcggctccagcggtctggcg

SEQ ID NO: 304036 - DNA, 75 bp, synthetic construct
  source 1..75: mol_type = other DNA
ggtgactgatgcggcgggtaatagcgataacgagacgcacacggttaccgttaaccttgctgcgccgaccattgg

SEQ ID NO: 304037 - DNA, 75 bp, synthetic construct
  source 1..75: mol_type = other DNA
actaatgtggtcacgctgacgggcgtgcataccgacctcgccactttgctggcgaatcatcagttgatggtggtg

SEQ ID NO: 304038 - DNA, 75 bp, synthetic construct
  source 1..75: mol_type = other DNA
cggggcggtgacggggtatctttcgctcaacgaaggttctggcgtcgatctgaataatgacggcaggatcgacct

SEQ ID NO: 304039 - DNA, 75 bp, synthetic construct
  source 1..75: mol_type = other DNA
gatggcggcaccacctggcagaatctttcggtaagcggtttgacctggagctatcttgacgggcgtacgctgacc

SEQ ID NO: 304040 - DNA, 75 bp, synthetic construct
  source 1..75: mol_type = other DNA
tcactattggcggcaatcaatacaccgccaccgtgcagtcagatttaagctggagcgtcagcgtacctgcgaacg

SEQ ID NO: 304041 - DNA, 75 bp, synthetic construct
  source 1..75: mol_type = other DNA
aaaaaggccagccgttgaccatcagcggcagcagctccgggctggcgaccggcgcacaggtgaccgtcacgctta

SEQ ID NO: 304042 - DNA, 75 bp, synthetic construct
  source 1..75: mol_type = other DNA
aaccccggcagcgccagccataatctggcggtagacaccaccgcgccggttcttaccataaataccgtggcgggc

SEQ ID NO: 304043 - DNA, 75 bp, synthetic construct
  source 1..75: mol_type = other DNA
agctacggcacttcgctgcacctgcgcatcaccgatcccaacggcattaacgtctattacggcaataccgtaaaa

SEQ ID NO: 304044 - DNA, 75 bp, synthetic construct
  source 1..75: mol_type = other DNA
tggcaacagcggttccgccagccataacgtgcaggttaataccgcgctgccgggcgtcaccattaacgttgtcgc

SEQ ID NO: 304045 - DNA, 75 bp, synthetic construct
  source 1..75: mol_type = other DNA
ggattgccgctggcattcgtcaatgtttgctatcgtcgcgtttggcttgcttgtctgctggagtaatgccgttgg

SEQ ID NO: 304046 - DNA, 75 bp, synthetic construct
  source 1..75: mol_type = other DNA
gtttgccaggagtgtcgggtgagcgttaatggtcgtcgggtacccggttgtcagaccctttgccagccagacatg

SEQ ID NO: 304047 - DNA, 75 bp, synthetic construct
  source 1..75: mol_type = other DNA
caggcatcactatccccccgcctgacagcaatattcggtgttcatcctcagctgactgcccggatagaacttccg

SEQ ID NO: 304048 - DNA, 75 bp, synthetic construct
  source 1..75: mol_type = other DNA
gatagtgatcatcaacctgattacaacgatattttgtcgcaacgtattcaaagtagccaaagggcgctgggactg

SEQ ID NO: 304049 - DNA, 75 bp, synthetic construct
  source 1..75: mol_type = other DNA
gctggcagctaagcctgctggcgagtgtggtaatcagtgccttttttctcaacacagcttacgcctggcaacaag

SEQ ID NO: 304050 - DNA, 75 bp, synthetic construct
  source 1..75: mol_type = other DNA
tcctattacacaaaaatttgtcgatttcctctgtcagcaattacgtctccagctgcgagccattaaccttgagtt

SEQ ID NO: 304051 - DNA, 75 bp, synthetic construct
  source 1..75: mol_type = other DNA
tcgacaaaaaagagttcaaaactggcgaagcggtcagcggtcagcggcaaactgcaactgctttacccggatggt

SEQ ID NO: 304052 - DNA, 75 bp, synthetic construct
  source 1..75: mol_type = other DNA
cgctaggtggtgttagccgtgaagggcatcaattcaaaaacagcgcagcacagaatcgctggaagaatcatgcga

SEQ ID NO: 304053 - DNA, 75 bp, synthetic construct
  source 1..75: mol_type = other DNA
aacagaacaatacgggaaatggttcatcgacaaatccccgtattcggataagcaggtagaaagctttcgatacaa

SEQ ID NO: 304054 - DNA, 75 bp, synthetic construct
  source 1..75: mol_type = other DNA
tcattgcgcgccagccgggcggccctgaggtgttagaacaagtacagcgcgcggtgccgcagccttcggcgggcg

SEQ ID NO: 304055 - DNA, 75 bp, synthetic construct
  source 1..75: mol_type = other DNA
ccactatggcaggctaaaccgttcgagccgcagcaaggggtaaaactggaaggcgcatccagcaatttcatctcg

SEQ ID NO: 304056 - DNA, 75 bp, synthetic construct
  source 1..75: mol_type = other DNA
ctgctctacccgcatggcgagccggtaaaaaatgcccgcgtgcagttaagtttgcgcgctcagcaattatcaatg

SEQ ID NO: 304057 - DNA, 75 bp, synthetic construct
  source 1..75: mol_type = other DNA
gcagtacggggttggcgaccggcgcacaggttaccgtcacactcaacggtcataactacagcgctaccaccgacg

SEQ ID NO: 304058 - DNA, 75 bp, synthetic construct
  source 1..75: mol_type = other DNA
ccgatctggcagcattaccagagggcagcgcctccgcgcaggccagcgtcagcaatattaacggcaatagcgcct

SEQ ID NO: 304059 - DNA, 75 bp, synthetic construct
  source 1..75: mol_type = other DNA
tcagccagggcaacggcacgtttgtctggggacagaacaccatcaacaccttcctcagcacggcgggtagcggcg

SEQ ID NO: 304060 - DNA, 75 bp, synthetic construct
  source 1..75: mol_type = other DNA
cgattacgatcgtaacggcacgggcgatttgtttatcactcgtgatgactacggtacggggtatatcaacggctt

SEQ ID NO: 304061 - DNA, 75 bp, synthetic construct
  source 1..75: mol_type = other DNA
caccagcggaattgaaagcgggcaaaccgtcaccgtcacctttggcggtaaaacctacactgcaagcgtcgccgc

SEQ ID NO: 304062 - DNA, 75 bp, synthetic construct
  source 1..75: mol_type = other DNA
gccctccgttaccatcaacaccatcgccacggacgatattcttaacgccgccgaagcgggatcggcgctgaccat

SEQ ID NO: 304063 - DNA, 75 bp, synthetic construct
  source 1..75: mol_type = other DNA
acggttaccgatgctgctggtaataccggcacggcgactcataacatcaccctggcaggcgtcgcgccgcaagtg

SEQ ID NO: 304064 - DNA, 75 bp, synthetic construct
  source 1..75: mol_type = other DNA
gcgcctggcctgcggggatggtcaccattacggtaaacggcatcagcagtgccggaaatccggtcagtgtcacgc

SEQ ID NO: 304065 - DNA, 75 bp, synthetic construct
  source 1..75: mol_type = other DNA
acgccgccgaaaaaggcagcgatttacagctctccggcaccacctccggcgtggaagcggggcagaccattaccg

SEQ ID NO: 304066 - DNA, 75 bp, synthetic construct
  source 1..75: mol_type = other DNA
aaagtatcaccattaccggtatcagcgatgacaccggagccagcagcagcgattttattaccagcgacaccacgc

SEQ ID NO: 304067 - DNA, 75 bp, synthetic construct
  source 1..75: mol_type = other DNA
caaatcagtaccgacaacggcgcaacctgggtgaatgtgacgctggcggctgacggcctgaactggacatacgcg

SEQ ID NO: 304068 - DNA, 75 bp, synthetic construct
  source 1..75: mol_type = other DNA
ctatgccgatggtcgcacactgaccgacggcacctggaactacacggtgcgggtggtggatctggcggggaacgt

SEQ ID NO: 304069 - DNA, 75 bp, synthetic construct
  source 1..75: mol_type = other DNA
ggcaataatgcgtcggcaacccatgcgtatagcgtcgatgccagcgcgccgacgctcaccataaacaccatcgcc

SEQ ID NO: 304070 - DNA, 75 bp, synthetic construct
  source 1..75: mol_type = other DNA
agacgccaacctgccgggtctgcgcgtcgataccgtggcgggcgatgatgtggttaacagcatcgaacacggtca

SEQ ID NO: 304071 - DNA, 75 bp, synthetic construct
  source 1..75: mol_type = other DNA
gcaacccggcgagcaccacgcataatctggcggtggatctcaccgttccggtactcaccatcaacaccattgcgg

SEQ ID NO: 304072 - DNA, 75 bp, synthetic construct
  source 1..75: mol_type = other DNA
cgtggaagtcaatccgggcgcggtgcttatcaccatcaataccgtctccggcgatgacattattaatgccacaga

SEQ ID NO: 304073 - DNA, 75 bp, synthetic construct
  source 1..75: mol_type = other DNA
gttacccacgcaaagtgcaggtgaacatacctggtcagtggtgcaaattgtcggcagtaccatcactgacgccgg

SEQ ID NO: 304074 - DNA, 75 bp, synthetic construct
  source 1..75: mol_type = other DNA
gcgaatggcaacactggcagcggctcgcgggatatcaccattgatgccaacctgccgggtctgcgcgtggatacc

SEQ ID NO: 304075 - DNA, 75 bp, synthetic construct
  source 1..75: mol_type = other DNA
aacgctctctggcagcacttctggtgtggaggccgggcaaacggtcaccgtcacctttggcggcaaaacttacag

SEQ ID NO: 304076 - DNA, 75 bp, synthetic construct
  source 1..75: mol_type = other DNA
ttaagctggagcgtcagcgtacctgcgaacgttttgcaggcgctgggcaacggtgagctgaccatcagcgcctcg

SEQ ID NO: 304077 - DNA, 75 bp, synthetic construct
  source 1..75: mol_type = other DNA
ggcaatcagcatcaacaccgttgccagcgacgacgtaattaacgccgccgaaaaaggcaccgacctgaccctttc

SEQ ID NO: 304078 - DNA, 75 bp, synthetic construct
  source 1..75: mol_type = other DNA
ccacggagaaaggcgcggatctggcgatttccggcatcagcgaccagcctgcgggtacgcaggtaaccgttacgc

SEQ ID NO: 304079 - DNA, 75 bp, synthetic construct
  source 1..75: mol_type = other DNA
attaatccggtagcgactgacgatattattaacgccgccgaatcaggcgtggcgcagaccatcagcggtcaggtg

SEQ ID NO: 304080 - DNA, 75 bp, synthetic construct
  source 1..75: mol_type = other DNA
atctcagcaatctgaccgccagccagtacacggtcagcgcctcggtaagcgataaagcgggtaacccggcgtccg

SEQ ID NO: 304081 - DNA, 75 bp, synthetic construct
  source 1..75: mol_type = other DNA
ggcgatttccggcaccagcgaccagcctgcgggcacgcagattaccgttacgctcaacgggcaaaattacaccac

SEQ ID NO: 304082 - DNA, 75 bp, synthetic construct
  source 1..75: mol_type = other DNA
tgccaccgcgccctccgtcaccatcaacaccatcgccgcagacgatattcttaacgccgccgaagcgggatcggc

SEQ ID NO: 304083 - DNA, 75 bp, synthetic construct
  source 1..75: mol_type = other DNA
ggcttattccgccacggtacaggcagacgggagctggagcgtcggcattccggcgacaaacgtcagcgcatggcc

SEQ ID NO: 304084 - DNA, 75 bp, synthetic construct
  source 1..75: mol_type = other DNA
ccccattgccagcgatgatgtgattaatgccacggaaaaaggcgcggatctgcaaatttccggcaccagtaatca

SEQ ID NO: 304085 - DNA, 75 bp, synthetic construct
  source 1..75: mol_type = other DNA
acgtcctgaacgccgatgaaaaaggccagccgttgaccattagcggtagcagtacggggttggcgaccggcgcac

SEQ ID NO: 304086 - DNA, 75 bp, synthetic construct
  source 1..75: mol_type = other DNA
gcagacagtgaccgtgacgctaaacggcgtcaattacagcggcaacgtgcaggcagacgggagctggagcgtcag

SEQ ID NO: 304087 - DNA, 75 bp, synthetic construct
  source 1..75: mol_type = other DNA
cagcagtgcaccgaccatcattatcaataccgtcgccagcgacaatatcgtcaacgccagcgaagccgatgcggg

SEQ ID NO: 304088 - DNA, 75 bp, synthetic construct
  source 1..75: mol_type = other DNA
agcggggcaaacggtaaccgtcacgcttaatggtgtggcttacatcggcaccgttcaggcggacggaagctggag

SEQ ID NO: 304089 - DNA, 75 bp, synthetic construct
  source 1..75: mol_type = other DNA
tggcgcagattatttccgggcgggtcagtggggcttcccctggcgacacggtcaccgtcaagttaggcgccacag

SEQ ID NO: 304090 - DNA, 75 bp, synthetic construct
  source 1..75: mol_type = other DNA
cggtcgatacccagccgccaacacttgctatcaacaccatcgctcaggacaacattgtcagcgcctcagaacata

SEQ ID NO: 304091 - DNA, 75 bp, synthetic construct
  source 1..75: mol_type = other DNA
ccagcgacgatactcttaacgtgagcgaagcgggcgcggggatcaccatcagcggcaccaccacggcgcaggccg

SEQ ID NO: 304092 - DNA, 75 bp, synthetic construct
  source 1..75: mol_type = other DNA
aaacttacgccgccacggtgctggcgaacggcagctggagcgtcggcgttcctgcgacggatgtcagtaactggc

SEQ ID NO: 304093 - DNA, 75 bp, synthetic construct
  source 1..75: mol_type = other DNA
gagcgtgaccgttcccgccgccaacgttggcgcactggctgacggcaacgccacggtgaccgccagcgtgaacga

SEQ ID NO: 304094 - DNA, 75 bp, synthetic construct
  source 1..75: mol_type = other DNA
tcacgttgacggggtcactggggacagggcttgccagcggcgaagtggcgcagattagcctcgatggtggcgcga

SEQ ID NO: 304095 - DNA, 75 bp, synthetic construct
  source 1..75: mol_type = other DNA
ggcaaaccgtggtagtgaaattcgccgggcagacctttaccaccaccgttcaggcaggtggcggctggagcctga

SEQ ID NO: 304096 - DNA, 75 bp, synthetic construct
  source 1..75: mol_type = other DNA
cttcggtaacgaacagcgtaggcaataccggcaacggcacgcgtgaaatcaccatcgacgcgaatctgccaggtc

SEQ ID NO: 304097 - DNA, 75 bp, synthetic construct
  source 1..75: mol_type = other DNA
tcagcgcctcggtgaccaattccgcaaataataccggcaccgcgacgcacgatatcgtgatagatgccaacctgc

SEQ ID NO: 304098 - DNA, 75 bp, synthetic construct
  source 1..75: mol_type = other DNA
cgacggcggatctcagcaatctgaccgccagtcagtacaccgtcagcgcctcggtaagcgataaagctggcaacc

SEQ ID NO: 304099 - DNA, 75 bp, synthetic construct
  source 1..75: mol_type = other DNA
cccatcccctctctatataaatatagcaagaataactgtaaatggaaaagaggtcactataccagatggatatat

SEQ ID NO: 304100 - DNA, 75 bp, synthetic construct
  source 1..75: mol_type = other DNA
cgggcggggaagcgggcgatgtggtgagcgttgtgctcaacggcaaaacctacaccaccacgctggatgcctccg

SEQ ID NO: 304101 - DNA, 75 bp, synthetic construct
  source 1..75: mol_type = other DNA
actgtcgatctctcggcggtggcggtcagcatcaacgccattaccgccgatgatgtgattaacgccgccgaaaaa

SEQ ID NO: 304102 - DNA, 75 bp, synthetic construct
  source 1..75: mol_type = other DNA
cgcgtcggcaactcatgcgtacagcattgacgccagcgcaccgacgctcaccattaacatcatcgccagcgacga

SEQ ID NO: 304103 - DNA, 75 bp, synthetic construct
  source 1..75: mol_type = other DNA
tctggtggatgccacgccgccggtggtaaccattaatccggtggcgaccgataacgtcatcaacacgccggaaca

SEQ ID NO: 304104 - DNA, 75 bp, synthetic construct
  source 1..75: mol_type = other DNA
atcttcaccacggtgctggatgccagcggcaactggagcgtcggtgtcccggcaagcgttgtctcggcactggca

SEQ ID NO: 304105 - DNA, 75 bp, synthetic construct
  source 1..75: mol_type = other DNA
tactgacggcacctggaactacacggtgcgggtggtggatctggcggggaacgttgggcagaccgcaacgcaaaa

SEQ ID NO: 304106 - DNA, 75 bp, synthetic construct
  source 1..75: mol_type = other DNA
gcaaaattacactgccaccacagatgcttccggcaactggagcaccacagtgccagcttccgcagtcggtgcgct

SEQ ID NO: 304107 - DNA, 75 bp, synthetic construct
  source 1..75: mol_type = other DNA
cgcacactgtcaccgtggcgctcggcgctccggtacttagcattaacaccattgccgtcgacgacatcattaatg

SEQ ID NO: 304108 - DNA, 75 bp, synthetic construct
  source 1..75: mol_type = other DNA
cgcgccgatactgagtattaacaccatcgccgttgatgacatcattaatgccacggagaaaggcgcggatctggc

SEQ ID NO: 304109 - DNA, 75 bp, synthetic construct
  source 1..75: mol_type = other DNA
attacggtgacgctgaacgggcaaaattacaccgctactaccgatagcaacggcaactggagcgccacggtgcca

SEQ ID NO: 304110 - DNA, 75 bp, synthetic construct
  source 1..75: mol_type = other DNA
cgtggcgatcaccatcaacaccctttccactgacgatgtgattaacgccgccgagaaaggctctgatttgcagct

SEQ ID NO: 304111 - DNA, 75 bp, synthetic construct
  source 1..75: mol_type = other DNA
atgatttcggttcgattagcgatgaaaagttatatgataatttactggaagaattcagaccgtggatcgatgaaa

SEQ ID NO: 304112 - DNA, 75 bp, synthetic construct
  source 1..75: mol_type = other DNA
cggcaccaacagtgccggaacaacctccaccattacccatccggttaccgtcgatctggctggggtcgccatcac

SEQ ID NO: 304113 - DNA, 75 bp, synthetic construct
  source 1..75: mol_type = other DNA
cgctggcgcagggcgatgtgaacattagcgccacggttaccgactccgccggcaacagcggcacagcctcgcacg

SEQ ID NO: 304114 - DNA, 75 bp, synthetic construct
  source 1..75: mol_type = other DNA
ggaaaacctacaccgctaccgtgcaagggaatttaagctggagcgtggacgttccggcggcggatattcaggcca

SEQ ID NO: 304115 - DNA, 75 bp, synthetic construct
  source 1..75: mol_type = other DNA
cttccttcatccagtaatgttctgcttttgcctggccgggaggagaaacaaagatggttaaaaggtaagaagaag

SEQ ID NO: 304116 - DNA, 75 bp, synthetic construct
  source 1..75: mol_type = other DNA
acctagaaaatagagctccatatgttccttctttaaaacaattttcatactggaataaaaaactcttcactaaag

SEQ ID NO: 304117 - DNA, 75 bp, synthetic construct
  source 1..75: mol_type = other DNA
gtttgatataaacattcggaatatatgcacaattagtccaaatgaaataaatctagatcacggtgctcatgctat

SEQ ID NO: 304118 - DNA, 75 bp, synthetic construct
  source 1..75: mol_type = other DNA
agacaagttctggagggaagttcatttgttttatgttgtggtgaaaaaataaacagcactataagtgaattactt

SEQ ID NO: 304119 - DNA, 75 bp, synthetic construct
  source 1..75: mol_type = other DNA
attttcagtactggattatccccgaatgaggcagagactttacttgataaagatattgcagttgcccggacagga

SEQ ID NO: 304120 - DNA, 75 bp, synthetic construct
  source 1..75: mol_type = other DNA
attaacccctgaaaaatacctttatcagacagatacaaaaaaattgacgcttaatgaaaaagaatttaactcact

SEQ ID NO: 304121 - DNA, 75 bp, synthetic construct
  source 1..75: mol_type = other DNA
accgtaacgctaaacggcgttaattacagcggcaatgtgcaggcagacgggagctggagcgtcagcgtaccaacc

SEQ ID NO: 304122 - DNA, 75 bp, synthetic construct
  source 1..75: mol_type = other DNA
acggcacggtgatccgctgcaacggttatttcctgcaagcggcgaataccgctgaacaatcggaactggtgtttg

SEQ ID NO: 304123 - DNA, 75 bp, synthetic construct
  source 1..75: mol_type = other DNA
atcagcgtaccgccagccgacttaagcgccctgaccgccagcaactacaccgttagcgcggcggtgagcgacaaa

SEQ ID NO: 304124 - DNA, 75 bp, synthetic construct
  source 1..75: mol_type = other DNA
gcaatcggccctcggcggcagccagagcggtaccaccagcggcgtggcggcaatggactacgactgggacggcgc

SEQ ID NO: 304125 - DNA, 75 bp, synthetic construct
  source 1..75: mol_type = other DNA
gacggacgaccgactcaacgccgccgaacagcagcagccgttaacccttaacggctcgaccagcgcggaagtggg

SEQ ID NO: 304126 - DNA, 75 bp, synthetic construct
  source 1..75: mol_type = other DNA
agctggagcgtgagcgttccggcggcagatattcaggcgctgggcaatggcgatttaacggtgagcgcctcggtc

SEQ ID NO: 304127 - DNA, 75 bp, synthetic construct
  source 1..75: mol_type = other DNA
catcaacaccatcgccagcgacgatattctcaatgccaacgaagcaggttcggcgctgaccatcagcggcaccag

SEQ ID NO: 304128 - DNA, 75 bp, synthetic construct
  source 1..75: mol_type = other DNA
cgctcggtgctccggtactcgccatcaacaccatcgccgtcgatgacatcatcaacgccacggagaaaggcgcag

SEQ ID NO: 304129 - DNA, 75 bp, synthetic construct
  source 1..75: mol_type = other DNA
taacactgcagaaacgactacgactatcacccatccagtcaccgtcgatctggcagctgtggcgatttccattaa

SEQ ID NO: 304130 - DNA, 75 bp, synthetic construct
  source 1..75: mol_type = other DNA
gtaatggcgatttgaccattaacgcctcggtcactaacgcgaatggcaacactggcagcggtacgcgggatatcc

SEQ ID NO: 304131 - DNA, 75 bp, synthetic construct
  source 1..75: mol_type = other DNA
agcaaaaccaccgcctgggggctgacctacggcctcgactcgcacgggatgtggacggtgctggcaaaccagcag

SEQ ID NO: 304132 - DNA, 75 bp, synthetic construct
  source 1..75: mol_type = other DNA
tgatcactggtggcagtagtggcctgaatgcaggcgtgccgttgacgatcacgattaacggtacgccttattccg

SEQ ID NO: 304133 - DNA, 75 bp, synthetic construct
  source 1..75: mol_type = other DNA
agccatccgttcaccgtcgatttaacggcggtggcaatcagcatcaacaccgttgccagcgacgacgtgattaac

SEQ ID NO: 304134 - DNA, 75 bp, synthetic construct
  source 1..75: mol_type = other DNA
tccccgtctggaaaaattgaactctactctgaagagctggaagcacttttgcctggctacggtattccgcgcgcc

SEQ ID NO: 304135 - DNA, 75 bp, synthetic construct
  source 1..75: mol_type = other DNA
ttccagtaatccatctccttcaggccaatccatctactcttctttgaaaatcattggagaaaagcttgatataat

SEQ ID NO: 304136 - DNA, 75 bp, synthetic construct
  source 1..75: mol_type = other DNA
tcacaccgacgggatccggcttaaactgacgtaccacgccagcggctacctgaaagccattcaccacacggataa

SEQ ID NO: 304137 - DNA, 75 bp, synthetic construct
  source 1..75: mol_type = other DNA
gctcaagcccccccccatggacgaacaaaaacgacacaccatactttcccaggcctggcatctgcagagcaggga

SEQ ID NO: 304138 - DNA, 75 bp, synthetic construct
  source 1..75: mol_type = other DNA
cgagagcgcagcatatgccgactatctgctgccggaatgcacctaccttgagcgtgatgaagatgtaacggacat

SEQ ID NO: 304139 - DNA, 75 bp, synthetic construct
  source 1..75: mol_type = other DNA
aagcgcagtatggcccggagagcgtggttttctcttccaaagccggttcgctctccagccatcttttccatctgg

SEQ ID NO: 304140 - DNA, 75 bp, synthetic construct
  source 1..75: mol_type = other DNA
tgataatattgatcacagtcaaaatattagctatctagatatcatccttgatccttccagcgcgatcgctgctta

SEQ ID NO: 304141 - DNA, 75 bp, synthetic construct
  source 1..75: mol_type = other DNA
ttgccaggaactacattgttagttgaaagtctggacagactttcaagagaaaaagtcggtgaagcgattgagcgt

SEQ ID NO: 304142 - DNA, 75 bp, synthetic construct
  source 1..75: mol_type = other DNA
cgctggatgcggcttataagctggcgcagttcacgcaccataaaaaggggatgccggtaaaaatcggcaaaaggt

SEQ ID NO: 304143 - DNA, 75 bp, synthetic construct
  source 1..75: mol_type = other DNA
cctgccgacgtcacctttccaggcttacctggccggcattgactggattatttacaggacagtatctgttttgtt

SEQ ID NO: 304144 - DNA, 75 bp, synthetic construct
  source 1..75: mol_type = other DNA
cattgcgatccctgttaccggcaggctggcacaaagaataggcgaattaaggttatttttactttcagtctcttt

SEQ ID NO: 304145 - DNA, 75 bp, synthetic construct
  source 1..75: mol_type = other DNA
ttgcccgcaacacccagatcatcatccaggaagaatcagaactctgccgcaccgtcgatccactggccggatcct

SEQ ID NO: 304146 - DNA, 75 bp, synthetic construct
  source 1..75: mol_type = other DNA
tttgcgctggaatccgtgaaagaacttaagggtgaaaagcagaaattttatatgttcagagcctggggcaaagtc

SEQ ID NO: 304147 - DNA, 75 bp, synthetic construct
  source 1..75: mol_type = other DNA
atgtctggatcatttcagacgaaatacattgtgatttactgagaaatgggatcaatcatatcccgatggcaaaac

SEQ ID NO: 304148 - DNA, 75 bp, synthetic construct
  source 1..75: mol_type = other DNA
taaaacgtgctggtattcgccgccgtaatccgtaccatacgcggcatacttttgcctgctggttgttgacggcag

SEQ ID NO: 304149 - DNA, 75 bp, synthetic construct
  source 1..75: mol_type = other DNA
agcgattgtctggaaaaaggtcgcgatattaccgatggcggcgcgcgttataacttctccggcgtacaggggatc

SEQ ID NO: 304150 - DNA, 75 bp, synthetic construct
  source 1..75: mol_type = other DNA
tgcacaggttcgctatttgaaaaaatcagagctggacgcctggcagaaagcgattggttatcagcaagagcaaac

SEQ ID NO: 304151 - DNA, 75 bp, synthetic construct
  source 1..75: mol_type = other DNA
actcatgaaaaggtcgcatatttatatagctgcgaccatatttcatggggagaatttctgatcaccaaagaaagt

SEQ ID NO: 304152 - DNA, 75 bp, synthetic construct
  source 1..75: mol_type = other DNA
tgcaaacttgccttatattcaattctttaagttcaagaaaaagaaacatatattattacgtaataaaaatgtaca

SEQ ID NO: 304153 - DNA, 75 bp, synthetic construct
  source 1..75: mol_type = other DNA
gcaaatgccgaatttgaaatgctgacaggactaccaagtaattcagataaaatatcaggaatcatctatcaagaa

SEQ ID NO: 304154 - DNA, 75 bp, synthetic construct
  source 1..75: mol_type = other DNA
attacattgagtcgctgaccgatcaaatcgtcaaacaagccagagctattatccaacagatcgacgaagccggtg

SEQ ID NO: 304155 - DNA, 75 bp, synthetic construct
  source 1..75: mol_type = other DNA
tccgggagtttgtctacaaccccaacgttaaaaacgccctggtactcaaggcctacgacattatcagccaccgcc

SEQ ID NO: 304156 - DNA, 75 bp, synthetic construct
  source 1..75: mol_type = other DNA
gcaaatattaagcacagttcagataggagaaaattacacatcttcactcatattcgactctctgcgatttagcgg

SEQ ID NO: 304157 - DNA, 75 bp, synthetic construct
  source 1..75: mol_type = other DNA
gaacctcgcttaggcctgtgtccatattacgtgggtaggatcaaaagacaagatttattaatgtctattgaagat

SEQ ID NO: 304158 - DNA, 75 bp, synthetic construct
  source 1..75: mol_type = other DNA
ccattgcagttcagaagagatgaagcatggttgtttaaaaatcaaataggccacagagatatagaaactccattt

SEQ ID NO: 304159 - DNA, 75 bp, synthetic construct
  source 1..75: mol_type = other DNA
aaagagggggcgctgacggtaaataaaggtgggatcagtcagggtgaactgacaggtggcggaaacctgaatgtt

SEQ ID NO: 304160 - DNA, 75 bp, synthetic construct
  source 1..75: mol_type = other DNA
ggaggtaccatcattttcgatacggatattcctgctgcgacgctcgcggagggatatatcagcgtcgatacgctg

SEQ ID NO: 304161 - DNA, 75 bp, synthetic construct
  source 1..75: mol_type = other DNA
aatgctctagacattgacttttcgatattaaaatatgactactttgatgtaaatgagtataaaaaaaattactta

SEQ ID NO: 304162 - DNA, 75 bp, synthetic construct
  source 1..75: mol_type = other DNA
aaatctttactggagagaatgttcagcgtgcagcaattgctcgtattgagtggatttttgagacatttccatcag

SEQ ID NO: 304163 - DNA, 75 bp, synthetic construct
  source 1..75: mol_type = other DNA
tgatgacagaatatccgcaaatcacccgtgaagcccttacggacctggaatatttgccgaaagccaagaacgagc

SEQ ID NO: 304164 - DNA, 75 bp, synthetic construct
  source 1..75: mol_type = other DNA
acgcttataaaatcattgtaaatcaaaaatttggtaataaagaacagcagcactcgccgaaaggatttaaccagc

SEQ ID NO: 304165 - DNA, 75 bp, synthetic construct
  source 1..75: mol_type = other DNA
tcagtttggccctgaccctaaacaggatgaagtatctttaatcgataccagagatgacaaagcacagactgattt

SEQ ID NO: 304166 - DNA, 75 bp, synthetic construct
  source 1..75: mol_type = other DNA
ctcgcccttagctcagccacaacgcacggatttcgtcagagtacccgcgtgctggcagggatgagtctgggattt

SEQ ID NO: 304167 - DNA, 75 bp, synthetic construct
  source 1..75: mol_type = other DNA
tggaaagtgaaatcctggctgcccgggtgagtgaggaaagccgccgctggctggcatcgtgcggcctgaccgtgg

SEQ ID NO: 304168 - DNA, 75 bp, synthetic construct
  source 1..75: mol_type = other DNA
caggctatgccaatcagcacagtaatactcagagtaatcgtgtgggttataaatcggatgggcgcatcagcgggt

SEQ ID NO: 304169 - DNA, 75 bp, synthetic construct
  source 1..75: mol_type = other DNA
ctccgatacagcggatcaaaccgttcctctcggaaaagtcagtaaaaatgctttttcaggcgtaggcagcgtggc

SEQ ID NO: 304170 - DNA, 75 bp, synthetic construct
  source 1..75: mol_type = other DNA
accagtccgataattcgcaggttaaactttataacgactctgcttataccgctatcgatgttgaaggcaaggctg

SEQ ID NO: 304171 - DNA, 75 bp, synthetic construct
  source 1..75: mol_type = other DNA
ctttcaatctctctcttccctaatgaatacgctattgaaattcttgcagcaaagctgagggagctattatgtgca

SEQ ID NO: 304172 - DNA, 75 bp, synthetic construct
  source 1..75: mol_type = other DNA
gcccgcctgagcatggcgcagtcagctttaagccagatagtgcgtcgtatagaagaacgattgggattgcggctt

SEQ ID NO: 304173 - DNA, 75 bp, synthetic construct
  source 1..75: mol_type = other DNA
taaataaaggaaacgaagaagttgaaggtacctggcctaacaaattgcaacctggaatatacaaaaacatgggga

SEQ ID NO: 304174 - DNA, 75 bp, synthetic construct
  source 1..75: mol_type = other DNA
agatgacaaacatgatctcatatcagggacttgttcgcaccttccctaacttatttaacccaaaatatcatgaaa

SEQ ID NO: 304175 - DNA, 75 bp, synthetic construct
  source 1..75: mol_type = other DNA
tgacgttagtgccattttcatctttttcaacaggaaataattttgaaataaataagacacgagtaatttactctg

SEQ ID NO: 304176 - DNA, 75 bp, synthetic construct
  source 1..75: mol_type = other DNA
ataacaaccttagcctgtgggggaatgtcggtgtgcaactaggtgataaaggctatagcgatactcagggcatgc

SEQ ID NO: 304177 - DNA, 75 bp, synthetic construct
  source 1..75: mol_type = other DNA
taaaacgctggtcaatgacggcctcctgaccattgcgtctcatacggcagatggggtaacgggcatggggtcgag

SEQ ID NO: 304178 - DNA, 75 bp, synthetic construct
  source 1..75: mol_type = other DNA
tatcaggaatactctatgatgggtttaagaacggcgttgcaataactacaggtttcttgaaagaaaagctacatg

SEQ ID NO: 304179 - DNA, 75 bp, synthetic construct
  source 1..75: mol_type = other DNA
cccgttaaagtcggttcaaaaatcgataccgaaggcgcgctgctcggcaatatcattttgcaagtactcgaaagc

SEQ ID NO: 304180 - DNA, 75 bp, synthetic construct
  source 1..75: mol_type = other DNA
aaggcactctggcgcagtttctggtctgggcaggcgtcatgttactggtaggcatcacggccatcattaacctga

SEQ ID NO: 304181 - DNA, 75 bp, synthetic construct
  source 1..75: mol_type = other DNA
gacggcataatgaatgccttccccgctctgaaaggcattattgatcaggtcaaaaacgtcatcccagactggcta

SEQ ID NO: 304182 - DNA, 75 bp, synthetic construct
  source 1..75: mol_type = other DNA
taaatccgtaaccaaaccggcgacgctaccctcccgttccccgggaaaagtccaggtgaatttttcgccacaaat

SEQ ID NO: 304183 - DNA, 75 bp, synthetic construct
  source 1..75: mol_type = other DNA
ccacccgcgagacgctcagccttaatctgcgcgactggagtatggattttaaccagcagcagaccacgttacagt

SEQ ID NO: 304184 - DNA, 75 bp, synthetic construct
  source 1..75: mol_type = other DNA
taatattcacattgtgttagaaaacgacaacatagtgttagtaaaaggactcaaaaaggttgtaaatgttaaatt

SEQ ID NO: 304185 - DNA, 75 bp, synthetic construct
  source 1..75: mol_type = other DNA
acggcgaagatcgcggatctggtggtcattaaggatggttcagaggcggacggttcgacggcgaacacgctgcgg

SEQ ID NO: 304186 - DNA, 75 bp, synthetic construct
  source 1..75: mol_type = other DNA
gcgaccaaaggtgggatgaatgctacaacccgcgagacgctcagccttaatctgcgcgactggagcatggatttt

SEQ ID NO: 304187 - DNA, 75 bp, synthetic construct
  source 1..75: mol_type = other DNA
tactacgctgacaggctgttttgagcgagatatctctcgtgtcgggcagggcatcgacattttaaatgattctaa

SEQ ID NO: 304188 - DNA, 75 bp, synthetic construct
  source 1..75: mol_type = other DNA
gccctgaattaagtaaaatggctcaaaaagttcatgatttagctgggggattacacagggaaagatcacgtaacg

SEQ ID NO: 304189 - DNA, 75 bp, synthetic construct
  source 1..75: mol_type = other DNA
atcaacgtaatggatgcccgtgggcgaattatcggcagcggcgatcgtgagcgtattggtgaattgcacgaaggt

SEQ ID NO: 304190 - DNA, 75 bp, synthetic construct
  source 1..75: mol_type = other DNA
gttgggaaggaaatatattataacagtcagaatgagaatctttcattcaataatgtagcgtcggttgttaatttt

SEQ ID NO: 304191 - DNA, 75 bp, synthetic construct
  source 1..75: mol_type = other DNA
atgtcaaatagcatttcgctgatagcgatactatcattatttacactattgccgtttataatagcatccgggaca

SEQ ID NO: 304192 - DNA, 75 bp, synthetic construct
  source 1..75: mol_type = other DNA
acttcagcaagtgccatcaaatatgacacttaatggggttgctttgctattgtcaatgttcgtaatgatgccggt

SEQ ID NO: 304193 - DNA, 75 bp, synthetic construct
  source 1..75: mol_type = other DNA
gacggtcagcgtgttggcaggcaacggtgccacgactgctccgacggtcaccacgcagccggacggcacggtgga

SEQ ID NO: 304194 - DNA, 75 bp, synthetic construct
  source 1..75: mol_type = other DNA
aaacagggaccggaggcgataagcctaaagacaacaagccgctcacggacaacaacactggcacgctgcgcaggc

SEQ ID NO: 304195 - DNA, 75 bp, synthetic construct
  source 1..75: mol_type = other DNA
cggtgacagcggcgaaagccgatgcccagcaggcggtggatggtctgcaggatggtccggtcaagacgggcttca

SEQ ID NO: 304196 - DNA, 75 bp, synthetic construct
  source 1..75: mol_type = other DNA
aagagtatttcatcgaaggtacgcagccgacacaacaggcggtgcacgaggtgggaacgaccattatcgataatg

SEQ ID NO: 304197 - DNA, 75 bp, synthetic construct
  source 1..75: mol_type = other DNA
ctgcgtgagcaggcgttaaaacttggctctgaaacgcagttcaccgcaggcgatgccgccagtggacaggcattt

SEQ ID NO: 304198 - DNA, 75 bp, synthetic construct
  source 1..75: mol_type = other DNA
cgtggatacttgaaaaactcggtgtgcttccggatgaagcggaaagggcgagaaagaaaatcgaagacgcacagc

SEQ ID NO: 304199 - DNA, 75 bp, synthetic construct
  source 1..75: mol_type = other DNA
ttggctctgaaacgcagttcaccgcaggcgatgccgccagtggacaggcatttcttgcaatggctggcttcacac

SEQ ID NO: 304200 - DNA, 75 bp, synthetic construct
  source 1..75: mol_type = other DNA
cacaccgaatacagcggtcacgacctgccggtgaagatgcgcggccccggcggtcagtcagtgcggttacagtgg

SEQ ID NO: 304201 - DNA, 75 bp, synthetic construct
  source 1..75: mol_type = other DNA
tcctgtttcagatttccggatgtaccacaaggaatacccttccttctgatgtttccggcgaactggaacccatta

SEQ ID NO: 304202 - DNA, 75 bp, synthetic construct
  source 1..75: mol_type = other DNA
tgacagcctcaggcaccgggctgggctatggcgaaggcgacgagtcctatggctatgacagttgtggctacctga

SEQ ID NO: 304203 - DNA, 75 bp, synthetic construct
  source 1..75: mol_type = other DNA
atgatcaccgtcgtaatctcggtcatacaacggcttccggagcgattaaagatcagatctcaggttacgaaggcg

SEQ ID NO: 304204 - DNA, 75 bp, synthetic construct
  source 1..75: mol_type = other DNA
agcgacttggtttatgtccagaacgattacatgagccagtgaagaacttttcgggagggatgcgccaacgcgtac

SEQ ID NO: 304205 - DNA, 75 bp, synthetic construct
  source 1..75: mol_type = other DNA
attacggacgggaaacacggcgggaataccggctggaccggaacggccaggtcacggcggtgacagcctcaggca

SEQ ID NO: 304206 - DNA, 75 bp, synthetic construct
  source 1..75: mol_type = other DNA
aggttaacacccaaaaacggacggttcaggagcttcaggagcagaccagcgaaattaaagagggcaatgacaaga

SEQ ID NO: 304207 - DNA, 75 bp, synthetic construct
  source 1..75: mol_type = other DNA
aaaaagagaagttaacgcatatggcggcaatcgttaaatctcaaacacacgctatggccgtccgcttgaggataa

SEQ ID NO: 304208 - DNA, 75 bp, synthetic construct
  source 1..75: mol_type = other DNA
ttcagtttattcacttgaaaaagcgggttcattaagtaattttgttaataatagcagtgagattgaaccatgggt

SEQ ID NO: 304209 - DNA, 75 bp, synthetic construct
  source 1..75: mol_type = other DNA
atgattataatgttgttaatatattgctagccaatataaaagccaaaatgtttaaaaatgaaataaataaagaag

SEQ ID NO: 304210 - DNA, 75 bp, synthetic construct
  source 1..75: mol_type = other DNA
aatcgctgattttatccgcccgaacagcggcagcctacttaagcagattgaggcaaaaactgccgccagattaaa

SEQ ID NO: 304211 - DNA, 75 bp, synthetic construct
  source 1..75: mol_type = other DNA
atatggcgggaaccacgttgtgtctcaaaatctctgatgttacattgcacaagataaaaatatatcatcatgaac

SEQ ID NO: 304212 - DNA, 75 bp, synthetic construct
  source 1..75: mol_type = other DNA
ttgcgctttctgtaagctgccaagcaacagtaatgccacaacagagccgtgttatttttcatccaggagaggtta

SEQ ID NO: 304213 - DNA, 75 bp, synthetic construct
  source 1..75: mol_type = other DNA
aacagcctgctttataccggcatgtccacggtgaccgtcgcggccgctgatgtggtgcagattgaacgtcaggtg

SEQ ID NO: 304214 - DNA, 75 bp, synthetic construct
  source 1..75: mol_type = other DNA
gcaccagagccggattatgtctgggcggcctccatttgtgcggtctgtgcgccctccctgtcaacggatccggcc

SEQ ID NO: 304215 - DNA, 75 bp, synthetic construct
  source 1..75: mol_type = other DNA
tggatgaggcgaaacaggcgaaaaaacgcgctggtcccggcgatattatctttaaaaacctgccggaagcgctgg

SEQ ID NO: 304216 - DNA, 75 bp, synthetic construct
  source 1..75: mol_type = other DNA
tggagtggtttagcgaagagtttgagtctattaacaacagcgaagaacttcacgctcagtccatcaagatgattt

SEQ ID NO: 304217 - DNA, 75 bp, synthetic construct
  source 1..75: mol_type = other DNA
aactcgctcgggcataagtcatagcggaccagtaagttcactaacatcacttttaagaaacttagacatacttaa

SEQ ID NO: 304218 - DNA, 75 bp, synthetic construct
  source 1..75: mol_type = other DNA
attttgaagttcgcagtccgctgaagtccgtgatggccggagatacagagttgctgactgtgggggaaatcacat

SEQ ID NO: 304219 - DNA, 75 bp, synthetic construct
  source 1..75: mol_type = other DNA
gcctcaacaaaatgcatcttcaattattcactttcgacaccagaaagtgagagcggattaattgaacagggtgtg

SEQ ID NO: 304220 - DNA, 75 bp, synthetic construct
  source 1..75: mol_type = other DNA
tatcctattgaccaggccagtagtgcgcctaatgttttcaaaacattcttcagagcattaagcccttacgattac

SEQ ID NO: 304221 - DNA, 75 bp, synthetic construct
  source 1..75: mol_type = other DNA
gtttattgcggatgtcaggacggcgcagatcgcggagctggtggtcattaaggacaactcagtggcagacggcgc

SEQ ID NO: 304222 - DNA, 75 bp, synthetic construct
  source 1..75: mol_type = other DNA
atgcgtggggaaaagctatctgtaccacgcagggcggtctgacgcgcagtatggaatacgatgctgccggacggg

SEQ ID NO: 304223 - DNA, 75 bp, synthetic construct
  source 1..75: mol_type = other DNA
gcgtaattctatcggcaccttagcggctggcgcacgccttgcggcctcgtctccagaagcaatgcaatcatggct

SEQ ID NO: 304224 - DNA, 75 bp, synthetic construct
  source 1..75: mol_type = other DNA
ctaactttgaagcaaggctcgacacctttaaagctcaaactttccttcctatggtgcagtccctgaagggtatgg

SEQ ID NO: 304225 - DNA, 75 bp, synthetic construct
  source 1..75: mol_type = other DNA
cgcagacagctatggacgaatcagatttgcatgcatttcattactatttataatggtacttataactaaaccaaa

SEQ ID NO: 304226 - DNA, 75 bp, synthetic construct
  source 1..75: mol_type = other DNA
agcttatcagtcttggactcaaaggggataaagttgcttttgttcggcaggcttcgaaactcgcgcgttcctatg

SEQ ID NO: 304227 - DNA, 75 bp, synthetic construct
  source 1..75: mol_type = other DNA
cacaaccggctgcacccttattacctcgtctatatcaatcgcgagggtgaagtcattcacgatcacaccgaagtc

SEQ ID NO: 304228 - DNA, 75 bp, synthetic construct
  source 1..75: mol_type = other DNA
tcagaaaacctcagcaagaagctgcgtaccagcaagacggtagaagacattttccgtggtgcgcaggccagcttc

SEQ ID NO: 304229 - DNA, 75 bp, synthetic construct
  source 1..75: mol_type = other DNA
atttaaaagtgagagaacgtctatatgaaagattattgaatcagcattttccaacattagatgttgcatatgact

SEQ ID NO: 304230 - DNA, 75 bp, synthetic construct
  source 1..75: mol_type = other DNA
ccagtttacctaagaccaccttaaaaaccggacgaaaaggttacgacacacaagaagtgctcaccttgttttctc

SEQ ID NO: 304231 - DNA, 75 bp, synthetic construct
  source 1..75: mol_type = other DNA
aacgtaacaagccaatctcgtttcattgtccgcttactactcgttcggatgtagttagcctgaatgagatctttg

SEQ ID NO: 304232 - DNA, 75 bp, synthetic construct
  source 1..75: mol_type = other DNA
gcagttaaagagatcggtaccactgttgccctcactggcgcgaccatggccgcacaacaggtcgtgggcatgatt

SEQ ID NO: 304233 - DNA, 75 bp, synthetic construct
  source 1..75: mol_type = other DNA
cgatgaacagttgggtaaggtcgtgaacgaccccggcaatctgaagtacatgcaccgaagcatcaacagccaaaa

SEQ ID NO: 304234 - DNA, 75 bp, synthetic construct
  source 1..75: mol_type = other DNA
ggtatttgtcatctatatattctgaaaaagatactcaaaaataaaaaagttcctgaaaacatatgtcgtatattc

SEQ ID NO: 304235 - DNA, 75 bp, synthetic construct
  source 1..75: mol_type = other DNA
gaactggaagctgaaaacgcatctctgaaagctgaactggcagcacaggaaaccactttcgaagtagcagcggtt

SEQ ID NO: 304236 - DNA, 75 bp, synthetic construct
  source 1..75: mol_type = other DNA
gaccctgaagcgcttcggtcggctgcagaaacgatcatggcgaactcacgcaagatcgagcggctggacgacatc

SEQ ID NO: 304237 - DNA, 75 bp, synthetic construct
  source 1..75: mol_type = other DNA
catgatcgacacagaaagatttgaacgccgggttaacggcgtgaatgttctggccggactgtccgcgaaagtgcg

SEQ ID NO: 304238 - DNA, 75 bp, synthetic construct
  source 1..75: mol_type = other DNA
caatctcaagcattccatcagaaagacggatattgattaacatcaaccacgatttccctaacaatggtaatcttt

SEQ ID NO: 304239 - DNA, 75 bp, synthetic construct
  source 1..75: mol_type = other DNA
gcgaagctgctcggtgaaaacgagtccatttatattccgctgggtgcgacgcattgcctggaaaacccggggaaa

SEQ ID NO: 304240 - DNA, 75 bp, synthetic construct
  source 1..75: mol_type = other DNA
acttgatgcgttaacggcggattttatttcctataagcgtgacggtgttttgccagatatatttggtcgcgatgc

SEQ ID NO: 304241 - DNA, 75 bp, synthetic construct
  source 1..75: mol_type = other DNA
ataggtatagggttaagttttgggttttgtcaaatccttggtagatatacgatgtctctaggatggagtaagtac

SEQ ID NO: 304242 - DNA, 75 bp, synthetic construct
  source 1..75: mol_type = other DNA
tcattaatgatctgttaaaaaacgattataaaatttccctttctccagatacaacttaccgagagctgaataaag

SEQ ID NO: 304243 - DNA, 75 bp, synthetic construct
  source 1..75: mol_type = other DNA
gttacgatgcagcaaaacactcaaaacatgaacaaatagaaagatcaataactccaccgcttaaaaattataatg

SEQ ID NO: 304244 - DNA, 75 bp, synthetic construct
  source 1..75: mol_type = other DNA
cagcggttgaagttgaagcagttgaagaaaaatccattgatgaagaactggaagaactccttaactatcgctggg

SEQ ID NO: 304245 - DNA, 75 bp, synthetic construct
  source 1..75: mol_type = other DNA
tcaaaatcggcgaatggtcagcgcattgcctacggaaactacggattctttatccgaaacgatggttcacacaca

SEQ ID NO: 304246 - DNA, 75 bp, synthetic construct
  source 1..75: mol_type = other DNA
gtcactgcaaccatcaacagcagcagccagagccggaacgtgacgtttatcgccgatgtcaggacggcgcagatc

SEQ ID NO: 304247 - DNA, 75 bp, synthetic construct
  source 1..75: mol_type = other DNA
gcagcccccggaggtgggcggggcaaaagcctcccgatctcgggattcagtgaacaggactacggctcaacgaac

SEQ ID NO: 304248 - DNA, 75 bp, synthetic construct
  source 1..75: mol_type = other DNA
cgacggtcagtccggaaatatcggcgtcagcggtgaaggcggaacatcgtactggggcggcggtggacgtgcagg

SEQ ID NO: 304249 - DNA, 75 bp, synthetic construct
  source 1..75: mol_type = other DNA
ggaggtgtgccgagtactggcgatatccgcatcactggtggatatggaggcgacggtcagtccggaaatatcggc

SEQ ID NO: 304250 - DNA, 75 bp, synthetic construct
  source 1..75: mol_type = other DNA
caatgctgcaactgcaacaaaactgcaaacagcacgcacaataggcggcgtgtcattcgatggctccgccaatat

SEQ ID NO: 304251 - DNA, 75 bp, synthetic construct
  source 1..75: mol_type = other DNA
tactgatggtgtcgcgcagcttaatgaggaaaacgtacaagtcaggaacgctgattctattcaaggcaataattg

SEQ ID NO: 304252 - DNA, 75 bp, synthetic construct
  source 1..75: mol_type = other DNA
acgatttggaacgctttgcatacatccgtcgcaatcggaagccgttgacgcaggaattcattaacacctcaattg

SEQ ID NO: 304253 - DNA, 75 bp, synthetic construct
  source 1..75: mol_type = other DNA
tgagggtgaccgatgcgttcggtaatgcgcttgccggacagacggtcagcgtgatggcggacaacggtgcagcgg

SEQ ID NO: 304254 - DNA, 75 bp, synthetic construct
  source 1..75: mol_type = other DNA
aggtttattcttttatttggacttttgatgacatggtcactatctggtttctgtatttttacttttggttatatt

SEQ ID NO: 304255 - DNA, 75 bp, synthetic construct
  source 1..75: mol_type = other DNA
aataccccttcagatcatatttgttgtaatttatagtttatttgttaacccgctttttatttattttggtatggg

SEQ ID NO: 304256 - DNA, 75 bp, synthetic construct
  source 1..75: mol_type = other DNA
ttcggtttacatgggatgtcgcgagcaagagatagttgaattgttgaacggttcagtttcactgacgaaagctat

SEQ ID NO: 304257 - DNA, 75 bp, synthetic construct
  source 1..75: mol_type = other DNA
tacgcgttgaaactgaattacaaagggggtcaaaccccgtcggcacaccaggaacggccaggctgttttccgggc

SEQ ID NO: 304258 - DNA, 75 bp, synthetic construct
  source 1..75: mol_type = other DNA
atcaaatcattatgtcaacacatgaaagaagaaattcaaacttttttgcatataaattccagaataaaacagtac

SEQ ID NO: 304259 - DNA, 75 bp, synthetic construct
  source 1..75: mol_type = other DNA
ataacacaattgaacaactaagtattgtttctaacatcgattttagtattattaatcagctaaagagtagtcttg

SEQ ID NO: 304260 - DNA, 75 bp, synthetic construct
  source 1..75: mol_type = other DNA
ttggttgagatcaaatattgaaaaggagagtaagcctggtacttatattaaaagccatgaagttaataactctgt

SEQ ID NO: 304261 - DNA, 75 bp, synthetic construct
  source 1..75: mol_type = other DNA
ggtggagatcagtgtcaccagtcagacggcgggcaccagtgccgtcactgcaaccatcaacagcagcagccagag

SEQ ID NO: 304262 - DNA, 75 bp, synthetic construct
  source 1..75: mol_type = other DNA
ggctgcgcccgccacaatgcagctcagtaacgcgctggataccgtcagagagatgtatcgaaaacagctccgaaa

SEQ ID NO: 304263 - DNA, 75 bp, synthetic construct
  source 1..75: mol_type = other DNA
atgccaattactccattttcagatgaggaatatcgtagccgttttcttaatgatagagactgtaataagaatgct

SEQ ID NO: 304264 - DNA, 75 bp, synthetic construct
  source 1..75: mol_type = other DNA
attgctgcagcgtttgtcgctgcggcggttctcatctggaaatactgggaacccatcaaggcgttttatgccggg

SEQ ID NO: 304265 - DNA, 75 bp, synthetic construct
  source 1..75: mol_type = other DNA
atgcaggtacagcgttgcgtaaaagcctggccaatctgtcatcaccgccaaaggcagcggcagaagcactgaaag

SEQ ID NO: 304266 - DNA, 75 bp, synthetic construct
  source 1..75: mol_type = other DNA
actcagtggcagacggtgcaatggcgaatatgctgcgggcgagggtcaccgatgcgttcggtaatgcgcttgccg

SEQ ID NO: 304267 - DNA, 75 bp, synthetic construct
  source 1..75: mol_type = other DNA
ctttattatcactggtatattccattaatgttgcttatgcatatacagccggttccgtaaatatcagagttactg

SEQ ID NO: 304268 - DNA, 75 bp, synthetic construct
  source 1..75: mol_type = other DNA
ttctggtcgcagcgatgttttctgttgcaggctccgcattggcagtacaaaaggatattactgtaacggccaacg

SEQ ID NO: 304269 - DNA, 75 bp, synthetic construct
  source 1..75: mol_type = other DNA
attgttgctgcgtttgtggctgcggcggttctcatctggaaatactgggaacccatcaaggcgttttatgccggg

SEQ ID NO: 304270 - DNA, 75 bp, synthetic construct
  source 1..75: mol_type = other DNA
accagccagacggcaggaatcagtgtggtcaccgccagcatcaacaacagcatccagagtcagaacgtgacgttt

SEQ ID NO: 304271 - DNA, 75 bp, synthetic construct
  source 1..75: mol_type = other DNA
gcagtatgataaggagtcggggctgtactataaccgtcaccggtactacgatccgttgcaggggcggtatatcac

SEQ ID NO: 304272 - DNA, 75 bp, synthetic construct
  source 1..75: mol_type = other DNA
agtggctgacctacggcagcggttatctggcgggcatgaagcttggcgacacgccgctgctggagtacacgcgcg

SEQ ID NO: 304273 - DNA, 75 bp, synthetic construct
  source 1..75: mol_type = other DNA
aagacactgacagggctggtgtgactaagatttctgagatacggggtgttaacgcagatgacgcagtacttacca

SEQ ID NO: 304274 - DNA, 75 bp, synthetic construct
  source 1..75: mol_type = other DNA
ctcaaaagaaagcggcttattggtcagtttcacctcttttaacgaaaacccggcagcgtaaactggcgggtttca

SEQ ID NO: 304275 - DNA, 75 bp, synthetic construct
  source 1..75: mol_type = other DNA
gctaaccgcttcacatctaacatcaaggggttaagccaggcatctcgtaatgctaatgatggtatctcactggca

SEQ ID NO: 304276 - DNA, 75 bp, synthetic construct
  source 1..75: mol_type = other DNA
atgccgcgcggcattccggtgggtacgctggcgattggtaaagctggcgcggcaaacgcggcgttactggcagca

SEQ ID NO: 304277 - DNA, 75 bp, synthetic construct
  source 1..75: mol_type = other DNA
gatgaatacggcagactgacggagaagacggaccgcatcccgacgggtgtgatacggacggacgacgagcggacc

SEQ ID NO: 304278 - DNA, 75 bp, synthetic construct
  source 1..75: mol_type = other DNA
tgttggtaattgggatgctagtgagtttggtcgagaattgaaaagaaaatactctaccaatttgaatattcaaat

SEQ ID NO: 304279 - DNA, 75 bp, synthetic construct
  source 1..75: mol_type = other DNA
tgataaggtattcaaggcagggttaagacgtaagatgcgaaaagcagccatggacaggaactatctggcgtcagt

SEQ ID NO: 304280 - DNA, 75 bp, synthetic construct
  source 1..75: mol_type = other DNA
agcaacaacccgcttcaaatgaaaataaacgccgaacgctacgcttttgttaaagttggtgctgtttatggggtt

SEQ ID NO: 304281 - DNA, 75 bp, synthetic construct
  source 1..75: mol_type = other DNA
ttatgatgcgtatggttcgcagcagttctattttccgaatgtgttgaagtatgatcctgatcagctacggcaaga

SEQ ID NO: 304282 - DNA, 75 bp, synthetic construct
  source 1..75: mol_type = other DNA
ggaatttaatgattctcactctaaaaaacataacaataatccaataggtttctatgaatgcgagaactgtagtgt

SEQ ID NO: 304283 - DNA, 75 bp, synthetic construct
  source 1..75: mol_type = other DNA
atgactctgtttattcatcatccggcagatgatttttatgtggcagacataacctgtctgcaccagcaaaagata

SEQ ID NO: 304284 - DNA, 75 bp, synthetic construct
  source 1..75: mol_type = other DNA
tctttccatgctgggaataggaggcaacaatcatcaggatgtgctgctcattcaggactatctcaagtctgctga

SEQ ID NO: 304285 - DNA, 75 bp, synthetic construct
  source 1..75: mol_type = other DNA
gtgcatcagggaaagggctacaaagccgtctgctgaaaaacttcgatacccgaacgatcaatatgatgaaggcaa

SEQ ID NO: 304286 - DNA, 75 bp, synthetic construct
  source 1..75: mol_type = other DNA
tgtattacttctggcatgtctataaagaaggttccgtggttggcgcagcggaggcgctttatttaactccacaaa

SEQ ID NO: 304287 - DNA, 75 bp, synthetic construct
  source 1..75: mol_type = other DNA
cgcgataatacaggggcaatactttcgtgccaatccggtacgtggaagacttctggttcgctcaatggttcttac

SEQ ID NO: 304288 - DNA, 75 bp, synthetic construct
  source 1..75: mol_type = other DNA
gatgcaacaaacagtgacctatgtgccgaacgtcgcgaatgccgaaattacgctggcagcctcgaaggatccggt

SEQ ID NO: 304289 - DNA, 75 bp, synthetic construct
  source 1..75: mol_type = other DNA
attgtatacacgcctctgattgcttcccctgatggttacgacatcaatctggcacttccatttgctccgggaaag

SEQ ID NO: 304290 - DNA, 75 bp, synthetic construct
  source 1..75: mol_type = other DNA
tccgtccgccggttcgacatccaatacctgcaacgcatcaaatccattttcacccgtaaagcccgcgcgctggag

SEQ ID NO: 304291 - DNA, 75 bp, synthetic construct
  source 1..75: mol_type = other DNA
cacctgacagttacgacatcaatctggcgctgccttgctcaccggggaaacttgtttttcgcaaaagtacgaatc

SEQ ID NO: 304292 - DNA, 75 bp, synthetic construct
  source 1..75: mol_type = other DNA
gttcaggagtttgccagccagtgttatgcgaagtcgtattacaagctgaagaacgtgaattcagggctgtcagcg

SEQ ID NO: 304293 - DNA, 75 bp, synthetic construct
  source 1..75: mol_type = other DNA
gaggaacgaaaatttcagcgtcgttgatatctgatgacggttcatttttgctgaaaaaacagatatcaacacctc

SEQ ID NO: 304294 - DNA, 75 bp, synthetic construct
  source 1..75: mol_type = other DNA
agttgtcagagttggaggctctgatggctgttgaaaaacagacaggtcagaaaatcagtgcggagtcacttgaaa

SEQ ID NO: 304295 - DNA, 75 bp, synthetic construct
  source 1..75: mol_type = other DNA
tttaaacgcaagggacgtggtctcgaacccagcgagctgggagaactggtctatcgctatgccgataaaatgttc

SEQ ID NO: 304296 - DNA, 75 bp, synthetic construct
  source 1..75: mol_type = other DNA
ctctgtggttccgcgtgatttgctgatcccgcctgagcagtttgctctgttgtccagcatcatcgtttcatctgc

SEQ ID NO: 304297 - DNA, 75 bp, synthetic construct
  source 1..75: mol_type = other DNA
tggcttcccgctcacactgtggggtatggagcttggctggaccgttcctgaattgcaggcagctgcgcaggttgg

SEQ ID NO: 304298 - DNA, 75 bp, synthetic construct
  source 1..75: mol_type = other DNA
gataagtatatcacttgctttttacctattaattttaatggggcttatctttcaaacacggcgtaaaattatttc

SEQ ID NO: 304299 - DNA, 75 bp, synthetic construct
  source 1..75: mol_type = other DNA
taacccagatggcgaacctctggctacgttgtgcggtgaggcgacggatatgcctatatcgatattaaccgggtt

SEQ ID NO: 304300 - DNA, 75 bp, synthetic construct
  source 1..75: mol_type = other DNA
gtgcgtaataaaatggataatttaccttctgattgtattgaagagttatcaaacaatattcaaggtgtagttact

SEQ ID NO: 304301 - DNA, 75 bp, synthetic construct
  source 1..75: mol_type = other DNA
tgtccagcatcatcgtttcatctgcaggtaaccagtccctgttgacgaaccttcagaccaacaccatcagctatc

SEQ ID NO: 304302 - DNA, 75 bp, synthetic construct
  source 1..75: mol_type = other DNA
tgaatcacaactctacaactggcgcagtaaacagcaaaatcagcagacgtcttctgaacgtgaactggagatgtc

SEQ ID NO: 304303 - DNA, 75 bp, synthetic construct
  source 1..75: mol_type = other DNA
atagtggcgctgtgttcggtattgatcgacatggtaaatccgtttctgtcgatgaaattgtgaatgttgaattca

SEQ ID NO: 304304 - DNA, 75 bp, synthetic construct
  source 1..75: mol_type = other DNA
cgatttcaataaatctcgcattcatccagatatatacatgaacgagatccttactggcatgagaataattcacca

SEQ ID NO: 304305 - DNA, 75 bp, synthetic construct
  source 1..75: mol_type = other DNA
attatacgattttctggaatgcttgatgaacctgggttgttaggaacaatttcagcacttctactgttagcggat

SEQ ID NO: 304306 - DNA, 75 bp, synthetic construct
  source 1..75: mol_type = other DNA
tgcgttcggtaatacgcttgccgggcagacggtcagcgtgacggcaggcaacggcgcaacggttgctccgacggt

SEQ ID NO: 304307 - DNA, 75 bp, synthetic construct
  source 1..75: mol_type = other DNA
ttccctacctgcagcgcatcaaatccatattcacccgcagagcccgcgcgctggagaagcgccgtgctcgccatc

SEQ ID NO: 304308 - DNA, 75 bp, synthetic construct
  source 1..75: mol_type = other DNA
aaaatccaacaaacgatgacgtatgcccactttgcccctgatcatttgtttgatgcggtgacattaaacccatta

SEQ ID NO: 304309 - DNA, 75 bp, synthetic construct
  source 1..75: mol_type = other DNA
gcgttgtccgaaggtgtggtggcctcttcccgttatccgaaacactggctgacggtgggggatcccgcccgtgaa

SEQ ID NO: 304310 - DNA, 75 bp, synthetic construct
  source 1..75: mol_type = other DNA
attaagaaggacatcaaatggatgcaggatcaagcgagcacccatggtttactcggtcatccagcgcttacgtgt

SEQ ID NO: 304311 - DNA, 75 bp, synthetic construct
  source 1..75: mol_type = other DNA
atcctttgccttttgcaaaagatgcatgtggcgataacacgttttttcgaattcataatctctgtaccttggtat

SEQ ID NO: 304312 - DNA, 75 bp, synthetic construct
  source 1..75: mol_type = other DNA
tggctggaaaaaccagctgatcggcgtcggttatctgaactgatcgaattgtggtggaagaaccacgggcaaacg

SEQ ID NO: 304313 - DNA, 75 bp, synthetic construct
  source 1..75: mol_type = other DNA
tatttctgttctgcgctggtttttgtaggcggccaagacattcaagatccaattgagttttataacgaacacaaa

SEQ ID NO: 304314 - DNA, 75 bp, synthetic construct
  source 1..75: mol_type = other DNA
agtgaaatgttaaatcactcacaattcagtcagttgacggttgcctgtctggctgagcatttgttaaaaaaatcc

SEQ ID NO: 304315 - DNA, 75 bp, synthetic construct
  source 1..75: mol_type = other DNA
ttttaatgaggggaaggcaccgggcagtgaaatgttaaatcactcacaattcagtcagttgacggttgcctgtct

SEQ ID NO: 304316 - DNA, 75 bp, synthetic construct
  source 1..75: mol_type = other DNA
tcttgaagacgcaacggccaatgctcaggtagtcaaccggttagcccgaactcacttagaccgtcttcgcgagga

SEQ ID NO: 304317 - DNA, 75 bp, synthetic construct
  source 1..75: mol_type = other DNA
tgcttttgaacatgaagagcacgccaacaccttttccgcgttccttgaccgcctttccgataccgtctctgcacg

SEQ ID NO: 304318 - DNA, 75 bp, synthetic construct
  source 1..75: mol_type = other DNA
aatggatacaggatgggagcaacgatactgcaaaccttcatatacgattgattagtgagcttacatacgaatttt

SEQ ID NO: 304319 - DNA, 75 bp, synthetic construct
  source 1..75: mol_type = other DNA
atattgtgttagttgatgagaaagacttgctcttttatgggcgcgttgagcgactgaaagccatactggcttctg

SEQ ID NO: 304320 - DNA, 75 bp, synthetic construct
  source 1..75: mol_type = other DNA
cgagtacatagctaaagctaatttccctattatatatactacaaattacgaccgatggattgaaactgccttatc

SEQ ID NO: 304321 - DNA, 75 bp, synthetic construct
  source 1..75: mol_type = other DNA
acctccagcgaacaaacgctgaatttctttgcctggatggaacaaattgatcaggctacacctgtaacgccaggt

SEQ ID NO: 304322 - DNA, 75 bp, synthetic construct
  source 1..75: mol_type = other DNA
cactgcacctatttatgctgctgatgaaggttctggcgaaattcactttaagggggaggttattgaagcaccttg

SEQ ID NO: 304323 - DNA, 75 bp, synthetic construct
  source 1..75: mol_type = other DNA
cattgatgccagtcattaccgttcgcgcggagctgcatcacacctcaaattcaacgtgtttaacgtccactcagc

SEQ ID NO: 304324 - DNA, 75 bp, synthetic construct
  source 1..75: mol_type = other DNA
agcgtgatggcggacaacggcgcaacgattgccccgacggtcatcaccgagccggacggcacggtggagatcagt

SEQ ID NO: 304325 - DNA, 75 bp, synthetic construct
  source 1..75: mol_type = other DNA
acttgctggttagcggactcgcggactcgcggactcgcggactcgcggactcgcggactcgcggactcgcggact

SEQ ID NO: 304326 - DNA, 75 bp, synthetic construct
  source 1..75: mol_type = other DNA
gcacgcgagcaaacgtatttcgtcgacaatacggctgatcatagagaaaaccgtctgtggatgatggccaacatg

SEQ ID NO: 304327 - DNA, 75 bp, synthetic construct
  source 1..75: mol_type = other DNA
gcacgcgagcaaacgtatttcgtcgacaaaacggctgatcatagagaaaaccggctgtggatgatggccaacatg

SEQ ID NO: 304328 - DNA, 75 bp, synthetic construct
  source 1..75: mol_type = other DNA
atgcttggacagtcagacatcgccgcggctttccgcgagtccattttgcgcagttccaaggggttccagtacctc

SEQ ID NO: 304329 - DNA, 75 bp, synthetic construct
  source 1..75: mol_type = other DNA
ataacgccgtggctgacggcgcaatggcggatatgctgcgggcgagggtcaccgatgcgttcggtaatgcgcttg

SEQ ID NO: 304330 - DNA, 75 bp, synthetic construct
  source 1..75: mol_type = other DNA
acaaaacggcagagcatagtgaaaaccgcctgtggatgatggccaacatggggagggttctgaggagttatcttg

SEQ ID NO: 304331 - DNA, 75 bp, synthetic construct
  source 1..75: mol_type = other DNA
gcacgcgagcaaacgtatttcgtcgacaagacggctgatcatagagaaaaccgactgtggatgatggccaacatg

SEQ ID NO: 304332 - DNA, 75 bp, synthetic construct
  source 1..75: mol_type = other DNA
gctgagttgaaattaaaaaatgagcgcttattaaaggagaacaaagatgggcagaaatctacgaatcttaaatcg

SEQ ID NO: 304333 - DNA, 75 bp, synthetic construct
  source 1..75: mol_type = other DNA
cagaatacacacctgattcaacagactcgtggatgcagctcagtaaaaaaattgataattttgcagaaactttaa

SEQ ID NO: 304334 - DNA, 75 bp, synthetic construct
  source 1..75: mol_type = other DNA
ctgaagtaattatgactttttcaggatgttcaggattcacacctgatacaacagacgcctggtctcagctcagca

SEQ ID NO: 304335 - DNA, 75 bp, synthetic construct
  source 1..75: mol_type = other DNA
agtgtaaaaatggaatcaataaaaccctgtgcagcccgcagggtcaacctgaacacgcgtttaatgaccagaacg

SEQ ID NO: 304336 - DNA, 75 bp, synthetic construct
  source 1..75: mol_type = other DNA
gtccatcggaaggtatttaagggggaaccgcagaattcggaaaaaatcgtacgctaagctaacggtgttctcgtg

SEQ ID NO: 304337 - DNA, 75 bp, synthetic construct
  source 1..75: mol_type = other DNA
gttcgtggacatttggtcataattaccattttatttgcaaataggagtgtggcatctaaaattataagttcgtta

SEQ ID NO: 304338 - DNA, 75 bp, synthetic construct
  source 1..75: mol_type = other DNA
tttctgttgccgatattttcaaccctaattttgaaaatgactgtatttcctttttgagaaaattcagcccaagga

SEQ ID NO: 304339 - DNA, 75 bp, synthetic construct
  source 1..75: mol_type = other DNA
tgccacgaataacacgcgagtttctagcaatgctttatgagctggctaactataaacgtgaacgatatgatgagc

SEQ ID NO: 304340 - DNA, 75 bp, synthetic construct
  source 1..75: mol_type = other DNA
actacaggaacattgataaaaactcaaaacatctatgctggtaattattcattcttagttacgacaggagataga

SEQ ID NO: 304341 - DNA, 75 bp, synthetic construct
  source 1..75: mol_type = other DNA
catcatgactctgaaatccctgatgcagaaaaggggcaactttttagcaggagtttatccccgccagttgactca

SEQ ID NO: 304342 - DNA, 75 bp, synthetic construct
  source 1..75: mol_type = other DNA
actgacgcgcatatacgaactaaaattcttttatggtatattaaaaatattgttcctatgatacaaagtttgcct

SEQ ID NO: 304343 - DNA, 75 bp, synthetic construct
  source 1..75: mol_type = other DNA
ccctggtttttttattcaccaattgcatacaaacaaaaaatcggagaaaattattgataatatcctatccttggc

SEQ ID NO: 304344 - DNA, 75 bp, synthetic construct
  source 1..75: mol_type = other DNA
cgtgtgaatatgagttaattggtctctatcacgttttaaaagaaggtggatataatgtagtaaatgctaccatag

SEQ ID NO: 304345 - DNA, 75 bp, synthetic construct
  source 1..75: mol_type = other DNA
ctgtatgaaactgatgaacgctatagcgaaggggggcgccgcattagcttacttggacagcacgttctttatgag

SEQ ID NO: 304346 - DNA, 75 bp, synthetic construct
  source 1..75: mol_type = other DNA
ctggtgcgatagaggatataacagcgttgtttgaatatctggccgagaatgcatctctttgggattcaaggaacg

SEQ ID NO: 304347 - DNA, 75 bp, synthetic construct
  source 1..75: mol_type = other DNA
aataatgttacatctctgtcactggaattaaattcaggttttaattatttctttacagatatactggatggctgt

SEQ ID NO: 304348 - DNA, 75 bp, synthetic construct
  source 1..75: mol_type = other DNA
aaaaagtgacgataaaccagccgcctccaccccaccatcaccagtaattgccgctgatacaggaacgcaacggcg

SEQ ID NO: 304349 - DNA, 75 bp, synthetic construct
  source 1..75: mol_type = other DNA
tggcgttatatccgggccgcttggcggcgtccgtggctggggcattgtcttcagtagcatgaccggcaacgccgg

SEQ ID NO: 304350 - DNA, 75 bp, synthetic construct
  source 1..75: mol_type = other DNA
tgatgttacatccctgccactggaaaaaaattccgatgttaattatttttttacatatatactggatggatgttc

SEQ ID NO: 304351 - DNA, 75 bp, synthetic construct
  source 1..75: mol_type = other DNA
attttatagccaccacactctattcaaacgaactgtttaaaacctatatcccgaattatgaagatcgtcctttta

SEQ ID NO: 304352 - DNA, 75 bp, synthetic construct
  source 1..75: mol_type = other DNA
ttactacacccatcgtgacctggtgacctatgcaaaagaaattgccagcagagctttgcaggtgtcagtggtagt

SEQ ID NO: 304353 - DNA, 75 bp, synthetic construct
  source 1..75: mol_type = other DNA
gagcctgtaatggcgtgggggcgttttttttctttgctgtatactttatcctgtaattttactggaaaaattatt

SEQ ID NO: 304354 - DNA, 75 bp, synthetic construct
  source 1..75: mol_type = other DNA
atgaaaatcatatccgttacggggattactgtactgaatacagaagatattcatttcttttctgattcatctgag

SEQ ID NO: 304355 - DNA, 75 bp, synthetic construct
  source 1..75: mol_type = other DNA
acattatttttcggatacagagagaaacactcaggaatatggatttttttgcgccagacatatgatatccgtaac

SEQ ID NO: 304356 - DNA, 75 bp, synthetic construct
  source 1..75: mol_type = other DNA
cctggttgtatcgactattcatggtagttctgtacagggctctctctatgctctacagcaaattgcatcagctga

SEQ ID NO: 304357 - DNA, 75 bp, synthetic construct
  source 1..75: mol_type = other DNA
ctgagattgttataccagagggggcgttcattgttgaccctggtattacgattaagaatactgtcaccatgatac

SEQ ID NO: 304358 - DNA, 75 bp, synthetic construct
  source 1..75: mol_type = other DNA
ggcgcaatggcgaatatgctgcgggcgagggtgaccgatgcgttcggtaatacgcttgccgggcagacggtcagc

SEQ ID NO: 304359 - DNA, 75 bp, synthetic construct
  source 1..75: mol_type = other DNA
tgcgcaactgaagatggcgggttgggtcgatgccaattattcaaaaagctacactattaacagaggtgaagtaag

SEQ ID NO: 304360 - DNA, 75 bp, synthetic construct
  source 1..75: mol_type = other DNA
ttaatgaggtggcaaaagagaaactgccacattacgtcatgagtgcaaccgcagagatcgggcgtgttgctgcag

SEQ ID NO: 304361 - DNA, 75 bp, synthetic construct
  source 1..75: mol_type = other DNA
ataccaaccttgccatcgcagacggtgccagacagcaaattggcagcacgctattttacgatccggcgtatgtgt

SEQ ID NO: 304362 - DNA, 75 bp, synthetic construct
  source 1..75: mol_type = other DNA
ttgccgacgatgtcagtaagttcagagacaggcgtaagccatttcagcgatactgctcttcgccagattgaaggt

SEQ ID NO: 304363 - DNA, 75 bp, synthetic construct
  source 1..75: mol_type = other DNA
ttacttataccagtatatatgatgatgtagggggaaacggtctgcctgataagtcccatgttctgaacacagagc

SEQ ID NO: 304364 - DNA, 75 bp, synthetic construct
  source 1..75: mol_type = other DNA
tatctgtcatacctccgcgaacttcagaagcaatacaaattgaccacaggggaattaactctctttggggaattt

SEQ ID NO: 304365 - DNA, 75 bp, synthetic construct
  source 1..75: mol_type = other DNA
gccgccgggggccttttggcatttgcagcagtcgcccacaaaacggcggaggttctccgtgattcattcgagcgt

SEQ ID NO: 304366 - DNA, 75 bp, synthetic construct
  source 1..75: mol_type = other DNA
catttgggcgctctaccaaagtaaataaaatacttctttctggaatgattgatataattgatccaactataaatg

SEQ ID NO: 304367 - DNA, 75 bp, synthetic construct
  source 1..75: mol_type = other DNA
acacaaagttattggcattcagagacaggttacgagaagagatcatcgccattcagaatggtgacattgactacc

SEQ ID NO: 304368 - DNA, 75 bp, synthetic construct
  source 1..75: mol_type = other DNA
tccatccgtccagccttactacttcaatggctcgaccaacgaaccagactcaaaccattattttggaccagaagc

SEQ ID NO: 304369 - DNA, 75 bp, synthetic construct
  source 1..75: mol_type = other DNA
gcagcggcaacgctccgcgaatctttccaacgcaaccaggaatacagcggcctgcgtgagcaaggcgtaacagcc

SEQ ID NO: 304370 - DNA, 75 bp, synthetic construct
  source 1..75: mol_type = other DNA
gaatttcaaactcgaaaaatcatatattctgagaacggagctgcatgaagagttaagaaaaactcgaaaaacacc

SEQ ID NO: 304371 - DNA, 75 bp, synthetic construct
  source 1..75: mol_type = other DNA
ggacacccgcgccggtgggagtgtttggccccggctggaaagcgccttctgataaccaccctcagccataccagt

SEQ ID NO: 304372 - DNA, 75 bp, synthetic construct
  source 1..75: mol_type = other DNA
gccctccggggatgttagtcggtgcggcagtcggtacggtggttattggtggtggtataataatatacaacaatc

SEQ ID NO: 304373 - DNA, 75 bp, synthetic construct
  source 1..75: mol_type = other DNA
cggaagatgcgcactatgtctaccgctacgatgaatacggcaggctggcggagaagacggaccgtatcccggaag

SEQ ID NO: 304374 - DNA, 75 bp, synthetic construct
  source 1..75: mol_type = other DNA
ttgagttcggttgtgatgatggcgcaaaactgcgtgtcacgttcgcactggactgttgcgatcgtgaagccatag

SEQ ID NO: 304375 - DNA, 75 bp, synthetic construct
  source 1..75: mol_type = other DNA
ggcttcgacagtgaaacagtacaggacgtcatgctgggagcagtggaacgccgctttggcagcgagcttccggcg

SEQ ID NO: 304376 - DNA, 75 bp, synthetic construct
  source 1..75: mol_type = other DNA
ctggggtatcgttcgccacgggaatatctgcggcggcgaaccagtaatgggttaagtgataaaaagtgtatggaa

SEQ ID NO: 304377 - DNA, 75 bp, synthetic construct
  source 1..75: mol_type = other DNA
aggaagccccagccatacttaccgccgcgccatttcgcggattgccacaaccggaagcgtacggtcgaattaaat

SEQ ID NO: 304378 - DNA, 75 bp, synthetic construct
  source 1..75: mol_type = other DNA
cttgcgaagatcccgaaaccaccaagccaggcagtatatgaagtgttcaaaaacgcgccattggacttcaaaccg

SEQ ID NO: 304379 - DNA, 75 bp, synthetic construct
  source 1..75: mol_type = other DNA
gacaaaaaagcggcagcggcaaaagctgcagctgaaaaagccgctgcagcaaaagcggccgcagaggcagatgat

SEQ ID NO: 304380 - DNA, 75 bp, synthetic construct
  source 1..75: mol_type = other DNA
acagttatgtgatgaacacccgcaaggttcacactgatgatacaccagtaaaagtactggcaccgggcaggaaga

SEQ ID NO: 304381 - DNA, 75 bp, synthetic construct
  source 1..75: mol_type = other DNA
atataaaatcacttcaagtgattttcagactgccacatctgaaaaaaaaatttatcgacataatgaacgaagcaa

SEQ ID NO: 304382 - DNA, 75 bp, synthetic construct
  source 1..75: mol_type = other DNA
cagcgtggctttgatggcaggacgcaacgttaccattatgacttgaccggaaaactcacgcagagtgaagatgag

SEQ ID NO: 304383 - DNA, 75 bp, synthetic construct
  source 1..75: mol_type = other DNA
ttgtaattactatagtaaagatattgcggaaaaacaattacatgagcattgtatgaaaagaaagtacataactaa

SEQ ID NO: 304384 - DNA, 75 bp, synthetic construct
  source 1..75: mol_type = other DNA
tcaacgtatcccgggtgatggataacgccacgcatgtggcggtgtactttggctcttacctgaaaaaaccgccgg

SEQ ID NO: 304385 - DNA, 75 bp, synthetic construct
  source 1..75: mol_type = other DNA
cgcggcgataaagacgtgttcgacgactatcaccttctttgctggcattcgctggatgtagccgcgatgtgctat

SEQ ID NO: 304386 - DNA, 75 bp, synthetic construct
  source 1..75: mol_type = other DNA
tacaccgttgccgccgctgccactgcgatgaatgtcggcaaatccacgatggataaatgggttcgacaactgaaa

SEQ ID NO: 304387 - DNA, 75 bp, synthetic construct
  source 1..75: mol_type = other DNA
ggataacacggttgctgtcacggaaatacccggagctggtgataccggatgcgctggcagttgaaggaagcagca

SEQ ID NO: 304388 - DNA, 75 bp, synthetic construct
  source 1..75: mol_type = other DNA
catattgccaaagagtatctctacttcgcgatatttttctcattaagtgttgagacactcaatattatccgtgaa

SEQ ID NO: 304389 - DNA, 75 bp, synthetic construct
  source 1..75: mol_type = other DNA
actatcaccttctttgctggcattcgctggatgtagccgcgatgggctatttaatggttaaaagaaattgcttcg

SEQ ID NO: 304390 - DNA, 75 bp, synthetic construct
  source 1..75: mol_type = other DNA
ggacgagaccagcagtggcatccgcacattcacctgtcgacaacagccggaggcgtgacgtcaggtcactcctgg

SEQ ID NO: 304391 - DNA, 75 bp, synthetic construct
  source 1..75: mol_type = other DNA
gataacgcggttgctgtcacggaaatatccggacctggtgataccggatgcgctggcagcagaaggaagcagtaa

SEQ ID NO: 304392 - DNA, 75 bp, synthetic construct
  source 1..75: mol_type = other DNA
ttcaacagggaaaccgctggcttaactggctggagaaacagccggaaggctcagtacgtcaggtggtcattgagt

SEQ ID NO: 304393 - DNA, 75 bp, synthetic construct
  source 1..75: mol_type = other DNA
acccactaccggcgtggctggaatgtcaacgtatcccgggtgatggataacgccacgcatgtggcggtgtacttt

SEQ ID NO: 304394 - DNA, 75 bp, synthetic construct
  source 1..75: mol_type = other DNA
cggttactgaaggttgacccgctgaaatgcgtgctgtgcggaagtcagatgcgttttacggggctgaagcgggga

SEQ ID NO: 304395 - DNA, 75 bp, synthetic construct
  source 1..75: mol_type = other DNA
ttcagcagggaaaccgctggcttaactggctggagaaacaaccggaaggttcagcgcgtccggtggtcattgagt

SEQ ID NO: 304396 - DNA, 75 bp, synthetic construct
  source 1..75: mol_type = other DNA
tactgtcacgaaaataccctgacctggtgataccggatgagctgaccgcggaaggaaacagcaaacgggactgga

SEQ ID NO: 304397 - DNA, 75 bp, synthetic construct
  source 1..75: mol_type = other DNA
atttttacgcccgtaaggtgatgagcatgtggcgttaccggataacacggttgctgtcacggaaataccctgacc

SEQ ID NO: 304398 - DNA, 75 bp, synthetic construct
  source 1..75: mol_type = other DNA
atggggtacacacagtggtgctgttcatctccggactgttgccacacaaaaaaggtctgcttccggtgtaaaagt

SEQ ID NO: 304399 - DNA, 75 bp, synthetic construct
  source 1..75: mol_type = other DNA
cagtggaaggaaacagcaaacgggactggaatcgcttcctggacacgcattaccgccgcggctggaatgtcaaca

SEQ ID NO: 304400 - DNA, 75 bp, synthetic construct
  source 1..75: mol_type = other DNA
tatccggacctggtgataccggatgcgctggcagcagaaggaagcagtaaacgggactggaatcgcttcctggac

SEQ ID NO: 304401 - DNA, 75 bp, synthetic construct
  source 1..75: mol_type = other DNA
tttttacgcccgtaaggtgatgagcatgtggcgttaccggataacgcggttgctgtcacggaaatacccggacct

SEQ ID NO: 304402 - DNA, 75 bp, synthetic construct
  source 1..75: mol_type = other DNA
gagtccggcgaaacggcggttactggaagaagtggtgtacatcataacggagacagtgagaaaaacggcgatgca

SEQ ID NO: 304403 - DNA, 75 bp, synthetic construct
  source 1..75: mol_type = other DNA
gtgaggtactacgggttcctgagcccggcgaaacggcacttactggaagatgttgtgtacgccataacggagaca

SEQ ID NO: 304404 - DNA, 75 bp, synthetic construct
  source 1..75: mol_type = other DNA
gtcaggatgaaattggtctgcgttacaacagtcaccggacaaaacgggaagaatacctggtaatgagtggcgatg

SEQ ID NO: 304405 - DNA, 75 bp, synthetic construct
  source 1..75: mol_type = other DNA
gatgcgttttacggggctgaagcggggttaccgactggcagagctggtcctgatgcatgagcgactggcacgaca

SEQ ID NO: 304406 - DNA, 75 bp, synthetic construct
  source 1..75: mol_type = other DNA
gatattcacggtaatccacacatggggacgagaccagcagtggcatccgcacatacacctgtcgacaacagccgg

SEQ ID NO: 304407 - DNA, 75 bp, synthetic construct
  source 1..75: mol_type = other DNA
aaatcggtctgcgttacaacagtcaccgtacaaaacgggaagaatacctgttgatgagtggagatgagttcatgg

SEQ ID NO: 304408 - DNA, 75 bp, synthetic construct
  source 1..75: mol_type = other DNA
tgagccgtctggagcactatgctggtcaggatgaaattggtctgcgttacaacagtcaccggacaaaacggaaag

SEQ ID NO: 304409 - DNA, 75 bp, synthetic construct
  source 1..75: mol_type = other DNA
aatacctgttgatgagtggagatgagttcatggaaaggttctcctggcatgtagcagataaggggttccgtatgg

SEQ ID NO: 304410 - DNA, 75 bp, synthetic construct
  source 1..75: mol_type = other DNA
gcacaccagccaggtttctctcgatttcagtacaccagtaactcagtaggagatggtgttaattttattgccgtc

SEQ ID NO: 304411 - DNA, 75 bp, synthetic construct
  source 1..75: mol_type = other DNA
ccggcgctctttgtcaaaaaccttggtttgggagaaggtgctccagctattggcgttccgttcttctggccgtcc

SEQ ID NO: 304412 - DNA, 75 bp, synthetic construct
  source 1..75: mol_type = other DNA
tgggagaaggtgctccagctattggcgttccgttcttctggccctccgcggcaatgccaaatactgtaatcgaca

SEQ ID NO: 304413 - DNA, 75 bp, synthetic construct
  source 1..75: mol_type = other DNA
cgtcggcgtgctacgtgatggttgccagccacgtggggcatacaccttcgggtgccggaatactatctgcctccg

SEQ ID NO: 304414 - DNA, 75 bp, synthetic construct
  source 1..75: mol_type = other DNA
taccctgtgctggcgaaagtgtttccttcgctggtattacctgaagcccgcggtgatttcattcgtatctgggat

SEQ ID NO: 304415 - DNA, 75 bp, synthetic construct
  source 1..75: mol_type = other DNA
aaggtgctccagctattggcgttccgttcttctggccctccgcggcaatgccaaatactgtaatcgacagttggt

SEQ ID NO: 304416 - DNA, 75 bp, synthetic construct
  source 1..75: mol_type = other DNA
aatgaagattccattacagaccttcgtgagggcagctttaaaatgccggacgggacaacattcagcgatcctgtc

SEQ ID NO: 304417 - DNA, 75 bp, synthetic construct
  source 1..75: mol_type = other DNA
ggctctgcattaccggttggggtgcctgttccgtggccttcagccactccgccaacaggctggctgaaatgcaac

SEQ ID NO: 304418 - DNA, 75 bp, synthetic construct
  source 1..75: mol_type = other DNA
ggtttgggagaaggctctgcattaccggttggggtgcctgttccgtggccttcagccactctgccaacaggctgg

SEQ ID NO: 304419 - DNA, 75 bp, synthetic construct
  source 1..75: mol_type = other DNA
acgggcgaggtgcagacggtggtcgcgaattattaagctggcaggaagctacaaacttttctcagtttgccggga

SEQ ID NO: 304420 - DNA, 75 bp, synthetic construct
  source 1..75: mol_type = other DNA
gacctctatcagaagcgggtatgcgaagggtatcactgtcagaccccgtagcattgcacttaattacattgtgag

SEQ ID NO: 304421 - DNA, 75 bp, synthetic construct
  source 1..75: mol_type = other DNA
aggctactattctgacctctatcagaagcgggtatgcgaagggtatcactgtcagaccccgtagcattgcactta

SEQ ID NO: 304422 - DNA, 75 bp, synthetic construct
  source 1..75: mol_type = other DNA
gcattttcttaaacgttggtttgggagaaggctctgcattacctgttggggtgcctgttccgtggccttcagcca

SEQ ID NO: 304423 - DNA, 75 bp, synthetic construct
  source 1..75: mol_type = other DNA
aagtgcacgggaaggcgtaaatccaggaatactagctacatacggtgacgggggaatagttaaaacggacgaacc

SEQ ID NO: 304424 - DNA, 75 bp, synthetic construct
  source 1..75: mol_type = other DNA
tgtcagcggttcgactccggtatcaccagaacttcgtccgcgtaatattgcatttaactatatcgtgagggccgc

SEQ ID NO: 304425 - DNA, 75 bp, synthetic construct
  source 1..75: mol_type = other DNA
tggtgagtttattcgtggctgggatgatgaacgtggtgtggatagtgggcgaactctgctttcagcgcaaggaga

SEQ ID NO: 304426 - DNA, 75 bp, synthetic construct
  source 1..75: mol_type = other DNA
gtgaggtactacggtttcctgagtccggtgaagcgccggttactggaaaatgttgtgtacgtcataacggagacg

SEQ ID NO: 304427 - DNA, 75 bp, synthetic construct
  source 1..75: mol_type = other DNA
ttacggggctgaagcggggctaccgtctgacagagctggccctgatgcatgagccactggcgcaacagcgggtgt

SEQ ID NO: 304428 - DNA, 75 bp, synthetic construct
  source 1..75: mol_type = other DNA
ctcagccactccgccaacaggctggctgaaatgcaacggtgcagctttttctgccgaagagtatccggaactggc

SEQ ID NO: 304429 - DNA, 75 bp, synthetic construct
  source 1..75: mol_type = other DNA
gaggaagtattggtaacacaggtggtagtgaaacccgcccccgcaatattgcatttaactatatcgtgagggcgg

SEQ ID NO: 304430 - DNA, 75 bp, synthetic construct
  source 1..75: mol_type = other DNA
aatatctatggtgagttcaagactgtaaacaccgaaaattattcaatatgggaatcagtaggctcgtttaagggg

SEQ ID NO: 304431 - DNA, 75 bp, synthetic construct
  source 1..75: mol_type = other DNA
aggatgccaccctgacggcgctggcggagcttgctacatcagcagataaactcccatattttacaggggcagatc

SEQ ID NO: 304432 - DNA, 75 bp, synthetic construct
  source 1..75: mol_type = other DNA
ccacaatcattccaaataccccaaacaatcctcatttagtcaattttgatgcttcaagagtagtgccaactgcct

SEQ ID NO: 304433 - DNA, 75 bp, synthetic construct
  source 1..75: mol_type = other DNA
gcagcattttcttctgaaatgtaccccaatctggcaaaggcctactccaccaataaattaccggatttacggggc

SEQ ID NO: 304434 - DNA, 75 bp, synthetic construct
  source 1..75: mol_type = other DNA
tgcaattcgcaatattaatggtgccattacagatgtgaggttcaacccttctgcggcagcaaacggggcattcaa

SEQ ID NO: 304435 - DNA, 75 bp, synthetic construct
  source 1..75: mol_type = other DNA
cttcctgttcaggacggattttgcctgaacaaaaacgtgagctgaacggacgtggggtctggttgcgggatggtg

SEQ ID NO: 304436 - DNA, 75 bp, synthetic construct
  source 1..75: mol_type = other DNA
acggatgacggcagggggggtaaacgctattgctgcatatcatctggaactgctgcaggaacaggcacggctgaa

SEQ ID NO: 304437 - DNA, 75 bp, synthetic construct
  source 1..75: mol_type = other DNA
ggccagccggtgcaggttatccgcgccggtgacgttgtctcttgcccggcgggcgtcaaacactggcacggggcg

SEQ ID NO: 304438 - DNA, 75 bp, synthetic construct
  source 1..75: mol_type = other DNA
acgccgggcaaacctgcgtctgcgccaaccgtttggcgtgtatgaccgctttgccgaaaaattgcagcaggcggt

SEQ ID NO: 304439 - DNA, 75 bp, synthetic construct
  source 1..75: mol_type = other DNA
tcaccggttcggcgggcgcggtgggtaacgaactgaccagcaatccgctggtgcgcaagctgtcgtttaccggct

SEQ ID NO: 304440 - DNA, 75 bp, synthetic construct
  source 1..75: mol_type = other DNA
gccagaaaaaattgctgggttgagcttccgtggcgcgaaaacaatggcagcgaagctcgagcaaaacaaagaagt

SEQ ID NO: 304441 - DNA, 75 bp, synthetic construct
  source 1..75: mol_type = other DNA
tcctcggaccggaagaggtggtgaataagtacggcgtgccgccagaactgatcatcgatttcttggcgctgatgg

SEQ ID NO: 304442 - DNA, 75 bp, synthetic construct
  source 1..75: mol_type = other DNA
cgtctgcgatccggcagatatgctcgtcattcaggtatcagaggaaaaggcgcgcgagcattcaaaaaaacgtct

SEQ ID NO: 304443 - DNA, 75 bp, synthetic construct
  source 1..75: mol_type = other DNA
ataacgacatccctgtttccggggcttatgtcacctttgaacccggcgctcgttccgcctggcatacgcatccgg

SEQ ID NO: 304444 - DNA, 75 bp, synthetic construct
  source 1..75: mol_type = other DNA
gcacaggttctgcgtgaacatggcgacaatgatgcagctacaagagctgatgaggcactgcaaaaagcgcttgag

SEQ ID NO: 304445 - DNA, 75 bp, synthetic construct
  source 1..75: mol_type = other DNA
ctgcacggcagacggtaaaccttacggctgacgtcatgaagcgcctcagtgcaacagacacgcccccgaccgccg

SEQ ID NO: 304446 - DNA, 75 bp, synthetic construct
  source 1..75: mol_type = other DNA
ctgcgcaactggttcaatttgatgatggagcatcaggacgatttagcgcgcctgatgaccctcgaacagggtaaa

SEQ ID NO: 304447 - DNA, 75 bp, synthetic construct
  source 1..75: mol_type = other DNA
atgatcgcaacttgtgctactattccactcactggtggaggttctgttttagttgttagttctttagctgcatta

SEQ ID NO: 304448 - DNA, 75 bp, synthetic construct
  source 1..75: mol_type = other DNA
cgatctttcaaaagattgcggcgtccagctttgcggcggtgcatcgtaccttgagacgaaggctgttggccctaa

SEQ ID NO: 304449 - DNA, 75 bp, synthetic construct
  source 1..75: mol_type = other DNA
gctaccccaccaggtggtgctgactcatcgggttgcctgcgcgagcccacgccgctttctgattgccgatgaagt

SEQ ID NO: 304450 - DNA, 75 bp, synthetic construct
  source 1..75: mol_type = other DNA
gccatgaaaaaatttgcggcagatgttgaaagcgcaacggatggtgaaattaagattactgtttacgggaatgct

SEQ ID NO: 304451 - DNA, 75 bp, synthetic construct
  source 1..75: mol_type = other DNA
gtcacagatgcgggaagagtggagtgaaacgctggctaaggatattcgtgatgaactgattcgtcggagggtgat

SEQ ID NO: 304452 - DNA, 75 bp, synthetic construct
  source 1..75: mol_type = other DNA
aattcaacaggcagcgcggaatgttcgtaatatgccggtaacagaagaggcatttaataattatttaaaatcaca

SEQ ID NO: 304453 - DNA, 75 bp, synthetic construct
  source 1..75: mol_type = other DNA
ttctctgcgctggcgctggcggagctggcgattcgcgcgggcattccggctggggtatttaacgtggtcaccggt

SEQ ID NO: 304454 - DNA, 75 bp, synthetic construct
  source 1..75: mol_type = other DNA
atcaggccgataaacgcctgattgttatcaagcagccgattggcatcactgctgctatcacgccgtggaactttc

SEQ ID NO: 304455 - DNA, 75 bp, synthetic construct
  source 1..75: mol_type = other DNA
aaaaagcggtagcaaaagtagaagagcatattgccgatgcgctggagaaaggcgcgcgcgtggtttgcggtggta

SEQ ID NO: 304456 - DNA, 75 bp, synthetic construct
  source 1..75: mol_type = other DNA
tctaattggtgttatcagagatgaaatttacgacagtgtgtttactcctgcagtatgtgcagatccatcatgcgg

SEQ ID NO: 304457 - DNA, 75 bp, synthetic construct
  source 1..75: mol_type = other DNA
tggctgcgggcacattgtgacgatgtggaagtgatccccctgtgccgtatgcatgacggtcccgttttccgggaa

SEQ ID NO: 304458 - DNA, 75 bp, synthetic construct
  source 1..75: mol_type = other DNA
tgtatccgtgaaatccacgaagcgcccctgcaggctatcggcatcctggaaaaatacaaacgcacacaatcataa

SEQ ID NO: 304459 - DNA, 75 bp, synthetic construct
  source 1..75: mol_type = other DNA
cctgattgctccggaacagaaacgtgaactgaataaccaggggatctggcttcgtgaaggtgaacgggcggcggc

SEQ ID NO: 304460 - DNA, 75 bp, synthetic construct
  source 1..75: mol_type = other DNA
gcaacagcaaaccgacgcccgccgccagttgaatgaaatcgagcgtcgtctcgggacacttacgggaaatagtcc

SEQ ID NO: 304461 - DNA, 75 bp, synthetic construct
  source 1..75: mol_type = other DNA
gctgattgccccggagcagaaacgcgaactgaataaccaggagatctggcttcgtgaaggtgaacgggcggcggc

SEQ ID NO: 304462 - DNA, 75 bp, synthetic construct
  source 1..75: mol_type = other DNA
ccgaagggctgattgatggctggattgtgtacggcatcatctgtgatccggctgatatgctggtggtgcagatga

SEQ ID NO: 304463 - DNA, 75 bp, synthetic construct
  source 1..75: mol_type = other DNA
gacgttacaggtccggcaggcgttgaatacgctgcgtgaacagtcgcaatggctgggatcgtccaacctgctcgg

SEQ ID NO: 304464 - DNA, 75 bp, synthetic construct
  source 1..75: mol_type = other DNA
aatacgctgcgtgaacagtcgcaatggctgggatcgtccaatctgctcggcgaagcgctgcgggcgcaggtggca

SEQ ID NO: 304465 - DNA, 75 bp, synthetic construct
  source 1..75: mol_type = other DNA
ccctcggtgcggtgctgattgccattctggtgtttatcatcaccacgcagctggtgcgcaacctgcccgcgctgc

SEQ ID NO: 304466 - DNA, 75 bp, synthetic construct
  source 1..75: mol_type = other DNA
gatattcacggtgatccacacatggggacgtgaccagcagtggcatccgcacattcacctgtcgacaacgaccgg

SEQ ID NO: 304467 - DNA, 75 bp, synthetic construct
  source 1..75: mol_type = other DNA
cgtctggagcattatgccggtcgggatgaaattggtctgcgttacaacagtcaccggacaaaacgggaagaatac

SEQ ID NO: 304468 - DNA, 75 bp, synthetic construct
  source 1..75: mol_type = other DNA
gtcgggccacacctggaaaaatcttcatttttacgcccgtaaggtgatgagcatgtggcgctaccggataacacg

SEQ ID NO: 304469 - DNA, 75 bp, synthetic construct
  source 1..75: mol_type = other DNA
tggaggcgatgacaggttaccgggaaacgtctgacccggtaaaagccagtgaagcggcgcatattgattgcccgc

SEQ ID NO: 304470 - DNA, 75 bp, synthetic construct
  source 1..75: mol_type = other DNA
gccgtaacgataacaacgttcatgacaaatattttctgtcgggcagctttctgaaaatcggctggccttccatca

SEQ ID NO: 304471 - DNA, 75 bp, synthetic construct
  source 1..75: mol_type = other DNA
gaccacactgatggggtatacacagtggtgctgttcatcaccggactgttgccacacaaaaaaggtctgcttccg

SEQ ID NO: 304472 - DNA, 75 bp, synthetic construct
  source 1..75: mol_type = other DNA
aatacgctgcgtgaacagtcacaatggctggggtcatcaaacctgctcggcgaagcgttacgggcacaggtagcg

SEQ ID NO: 304473 - DNA, 75 bp, synthetic construct
  source 1..75: mol_type = other DNA
tttgcaggaaattttcgccaactttatctctggcctgattatcctgttcgaaaaaccgattcgcattggcgatac

SEQ ID NO: 304474 - DNA, 75 bp, synthetic construct
  source 1..75: mol_type = other DNA
gcccgtccgaacggcttgtttatcgctcatttcggctggccacgcgaacgggtttcccgggggatgcgttactac

SEQ ID NO: 304475 - DNA, 75 bp, synthetic construct
  source 1..75: mol_type = other DNA
cgtaatcagttgaacagccaacgtcagcttgaggcggagcgggcgctggaaagcaccgaacttctggcggaaaac

SEQ ID NO: 304476 - DNA, 75 bp, synthetic construct
  source 1..75: mol_type = other DNA
caacggggatcctgtcactgtataaccggggagaccgccgtcggtggtactggccgtgtccgcactgtggggaat

SEQ ID NO: 304477 - DNA, 75 bp, synthetic construct
  source 1..75: mol_type = other DNA
atgtctaccgacgcgctgaatcaggaaattctccaggtcagtagtcaattgctggataaaagccgtcaggctcag

SEQ ID NO: 304478 - DNA, 75 bp, synthetic construct
  source 1..75: mol_type = other DNA
caccgctatctgttctggacttctgatgtgcgcccgatgaccatcgcctggccgctggagatcgctcaggatcta

SEQ ID NO: 304479 - DNA, 75 bp, synthetic construct
  source 1..75: mol_type = other DNA
agcgccgatttgccaaaagatatcgtcgcccagtttaaaattaaccgcgaactatcggcggcgctgaatcaacag

SEQ ID NO: 304480 - DNA, 75 bp, synthetic construct
  source 1..75: mol_type = other DNA
tatccgtcgctggatgttaatccagcggcgcagattggcatttgatcgcgcgaaacatcgccgggcagaaatgct

SEQ ID NO: 304481 - DNA, 75 bp, synthetic construct
  source 1..75: mol_type = other DNA
cggctgccggaaatgccaaaaccacaacagcttgataccgaaatggcgcagttgcgtgtgcaacggttacgttat

SEQ ID NO: 304482 - DNA, 75 bp, synthetic construct
  source 1..75: mol_type = other DNA
gaacgttcggcggcgaaagtcggcaaagtgactcaggatcacttctggctgacgttgcgcactcttttctggtcg

SEQ ID NO: 304483 - DNA, 75 bp, synthetic construct
  source 1..75: mol_type = other DNA
ttcccgccgttccagatgcgtctggaaagtctgaacggtaaacaaacgggcagaacattaacgtctgcgggtaaa

SEQ ID NO: 304484 - DNA, 75 bp, synthetic construct
  source 1..75: mol_type = other DNA
ttggcggtctggttggcttctcgatgattggcattgagtggtcgaaattgcagtggctggtcgccgcgctcggtg

SEQ ID NO: 304485 - DNA, 75 bp, synthetic construct
  source 1..75: mol_type = other DNA
aacacgttctatacgccagatttcgctgtgatgctcgccaccggcgagatggaactgcacgaagtgaaaggtttc

SEQ ID NO: 304486 - DNA, 75 bp, synthetic construct
  source 1..75: mol_type = other DNA
attcagacaacagcggttccggtggcggctcagatagcggcggatttagcggcgggggcggcgcatctggccgct

SEQ ID NO: 304487 - DNA, 75 bp, synthetic construct
  source 1..75: mol_type = other DNA
ttttccattgctgtattttccggtaatgactccaacttattggtagtgttttatgttcagataatgcccgatgac

SEQ ID NO: 304488 - DNA, 75 bp, synthetic construct
  source 1..75: mol_type = other DNA
tattatcagctcagggcgatgccatacgtaatatctatggtgagttcaagactgtaaacaccgaaaattattcaa

SEQ ID NO: 304489 - DNA, 75 bp, synthetic construct
  source 1..75: mol_type = other DNA
cgcggtgagtttattcgtggctgggatgatggacgcggtgtggatacggggagggcaatattatcatctcagggc

SEQ ID NO: 304490 - DNA, 75 bp, synthetic construct
  source 1..75: mol_type = other DNA
ggctctcgaaaaccttggtttgggagaaggctctgcattacctgttggggtgcctgttccgtggccttcagccac

SEQ ID NO: 304491 - DNA, 75 bp, synthetic construct
  source 1..75: mol_type = other DNA
tattactttgctattttttgggtatttgcagtgatgttcttccctttctggttttttcatcaaggcagtaatttt

SEQ ID NO: 304492 - DNA, 75 bp, synthetic construct
  source 1..75: mol_type = other DNA
attcagacaacagcggttccgctggaggctcagatagcggcggatttagcggcggggggggggggtgttttgggg

SEQ ID NO: 304493 - DNA, 75 bp, synthetic construct
  source 1..75: mol_type = other DNA
ccggtggaggctcaagtggcggcggatttagcggcggtggcggttcttctggaggtggcggcgcatccggccgct

SEQ ID NO: 304494 - DNA, 75 bp, synthetic construct
  source 1..75: mol_type = other DNA
ggcgggggcggttcttctggcggtggctgcgcgtccggtcgttggtatctcaaccataaaaaacggcagcccgaa

SEQ ID NO: 304495 - DNA, 75 bp, synthetic construct
  source 1..75: mol_type = other DNA
ccggagctgcgccaacaggtgaccgatattactggtaccttaagcacgtctgaacaacaatcactaacacaacag

SEQ ID NO: 304496 - DNA, 75 bp, synthetic construct
  source 1..75: mol_type = other DNA
ttttccattgctgtattttccttcttttttactttcactgaaccgccccgggaatcctggagactaaactccctg

SEQ ID NO: 304497 - DNA, 75 bp, synthetic construct
  source 1..75: mol_type = other DNA
ttcaagaattgttccaactgcaaacgaaaatcgaccccgtaacattgcctttaattatatcgtgagggctgcctg

SEQ ID NO: 304498 - DNA, 75 bp, synthetic construct
  source 1..75: mol_type = other DNA
cacgacaaaggcgtaaaagtgatgactggcactgacagcgttatcgaccactggtcgccttacggcctgggcgac

SEQ ID NO: 304499 - DNA, 75 bp, synthetic construct
  source 1..75: mol_type = other DNA
ttagccactggcgatgtattgccgctcaacgaaaaaggcgagcgcgtctggcccaaagcgcaggatgacgccagc

SEQ ID NO: 304500 - DNA, 75 bp, synthetic construct
  source 1..75: mol_type = other DNA
gccaaaagcgcaggatgacgccagctttgtgctggtggacgcctcctgttccgccgaggcggtggcgcgtatctc

SEQ ID NO: 304501 - DNA, 75 bp, synthetic construct
  source 1..75: mol_type = other DNA
gtaaacccaggaatactggctacatatggtgacgggggaatagttaaaacggacgaacccggtcttaaggtgcct

SEQ ID NO: 304502 - DNA, 75 bp, synthetic construct
  source 1..75: mol_type = other DNA
ctacgacaaaggcgtcgatattcacctgcacgaaaccactccggcaggcgtggcggccatcaattatatggttga

SEQ ID NO: 304503 - DNA, 75 bp, synthetic construct
  source 1..75: mol_type = other DNA
acctctgtgccgctcgcccatgcggcagtctctggcacaacccactgcgacgcaaataacaccatgaaaatcact

SEQ ID NO: 304504 - DNA, 75 bp, synthetic construct
  source 1..75: mol_type = other DNA
gttttggtcagttgcgcgtaaacagcgaaattaatgcaattgtcgatgttcaaagtgtgagtggggctttttacg

SEQ ID NO: 304505 - DNA, 75 bp, synthetic construct
  source 1..75: mol_type = other DNA
ggggtgatttcattcgtatctgggatgatgggcgcgggattgatgtcggacgtaccctactttcagggcaatcac

SEQ ID NO: 304506 - DNA, 75 bp, synthetic construct
  source 1..75: mol_type = other DNA
tttgagtggaaaggatgtcgctggtcttctcacataccttggtttgggagaaggagctccagctattggcgttcc

SEQ ID NO: 304507 - DNA, 75 bp, synthetic construct
  source 1..75: mol_type = other DNA
agcggcaaaacgggatgtggggacaggggaaaatcagataccggacatggcctcttgccatgtaatggatggatg

SEQ ID NO: 304508 - DNA, 75 bp, synthetic construct
  source 1..75: mol_type = other DNA
agaatacccggaactggcaaaggcttatccgacaaataaattgcctgatttacgtggtgaatttattcgtggctg

SEQ ID NO: 304509 - DNA, 75 bp, synthetic construct
  source 1..75: mol_type = other DNA
taaaacggacgaacccggtcttaaggtgccttcctcactacgagctcttagctctcgtagtgttaaacgttatgg

SEQ ID NO: 304510 - DNA, 75 bp, synthetic construct
  source 1..75: mol_type = other DNA
atgtgtttgcgggaaaaaatcggcccagatccgcgaaattttaatcagcgagtcagcttgggaagaaatgacctg

SEQ ID NO: 304511 - DNA, 75 bp, synthetic construct
  source 1..75: mol_type = other DNA
ctactattctgacctctatcagaagcgggtatgcgaagggtatcactgtcagaccccgtagcattgcacttaatt

SEQ ID NO: 304512 - DNA, 75 bp, synthetic construct
  source 1..75: mol_type = other DNA
gtgcctgttccgtggcccaccgccacaccgccagcaggctggttacagtgcaacggagctacgttcactaaagaa

SEQ ID NO: 304513 - DNA, 75 bp, synthetic construct
  source 1..75: mol_type = other DNA
tttggctctggaaatttgacaatgaatggtgttacttcttatttcggtgtccgtccacgcaacatcgcatttaac

SEQ ID NO: 304514 - DNA, 75 bp, synthetic construct
  source 1..75: mol_type = other DNA
tgccattcgaaatataattggtgcattagtggatgtcaggtttaatacctacccttctgattctggcgtttttac

SEQ ID NO: 304515 - DNA, 75 bp, synthetic construct
  source 1..75: mol_type = other DNA
ccgttggtgtgcctgttccatggccttcagccactttgccgacaggctggttgaaatgcaatggcgccgcctttg

SEQ ID NO: 304516 - DNA, 75 bp, synthetic construct
  source 1..75: mol_type = other DNA
ttgagagataaacgtggtttaggagaaggctcggcgctacccgttggtgtgcctgttccgtggcccaccgccaca

SEQ ID NO: 304517 - DNA, 75 bp, synthetic construct
  source 1..75: mol_type = other DNA
atacgcttaccaatttgagtggaaaggatgtagctggtcttctcacataccttggtttgggagaaggctctgcat

SEQ ID NO: 304518 - DNA, 75 bp, synthetic construct
  source 1..75: mol_type = other DNA
acaaagatatgactggtgggcttatgtatcagctcgcccccgcaatatcgcatttaactatatcgtgagggcggc

SEQ ID NO: 304519 - DNA, 75 bp, synthetic construct
  source 1..75: mol_type = other DNA
ttcagtacaccagtaactcagtaggagatggtgttaattttgttgctgtcagaccgcgaaatattgcatttaact

SEQ ID NO: 304520 - DNA, 75 bp, synthetic construct
  source 1..75: mol_type = other DNA
ttacctgttggtgcgcctgttccgtggccttcagagacacctccaacaggctggctgaaatgcaacggggcggct

SEQ ID NO: 304521 - DNA, 75 bp, synthetic construct
  source 1..75: mol_type = other DNA
cgacaaataaattgcctgatttacgtggtgagtttattcgtggctgggatgatgggcgtggagtggacagtgggc

SEQ ID NO: 304522 - DNA, 75 bp, synthetic construct
  source 1..75: mol_type = other DNA
accattaaaaaatcttccaagttcagacgagatgctgactttaagttccacaactaatgccttgtccccggacag

SEQ ID NO: 304523 - DNA, 75 bp, synthetic construct
  source 1..75: mol_type = other DNA
ggttaaagtgcgacgggcgcgcctttacaaaagaacaatatcctgttctggccagagcctacccgaccctccgtc

SEQ ID NO: 304524 - DNA, 75 bp, synthetic construct
  source 1..75: mol_type = other DNA
acaccgaagcgttgcaacaaatcggttcgtccagtaacagcaaagtggtgatgatgccattagacgccagcagcc

SEQ ID NO: 304525 - DNA, 75 bp, synthetic construct
  source 1..75: mol_type = other DNA
tgatgccccacgcgcagcttatgaggtcagcaatctggagctggcaatcattaacctgaccatgaccaacatccg

SEQ ID NO: 304526 - DNA, 75 bp, synthetic construct
  source 1..75: mol_type = other DNA
catatattataagacaataggtatcgattcttcgttagttgcaagaaccgcgaacgaaaaccgaccgcgcaacat

SEQ ID NO: 304527 - DNA, 75 bp, synthetic construct
  source 1..75: mol_type = other DNA
aatggtgcacctttttctgccgaagagtatccggaactggcaaaagtttatccgacaaataaattgccagattta

SEQ ID NO: 304528 - DNA, 75 bp, synthetic construct
  source 1..75: mol_type = other DNA
aaggtatgcaaaaagattacctggcgctggtgcgcggtcagtggcagtcacacgtgaaaagcgtgcaagcgccgt

SEQ ID NO: 304529 - DNA, 75 bp, synthetic construct
  source 1..75: mol_type = other DNA
ttgctggtagcgaaaaaacgctcggcgttgcgttctctgcatgagcaattacgtgaaaaagggatgcaaaaagat

SEQ ID NO: 304530 - DNA, 75 bp, synthetic construct
  source 1..75: mol_type = other DNA
gcgcatgtgcgtaaccctgatacgcagccacacagtatcaatctgacacagttgcccatcagcgaggctgaccgg

SEQ ID NO: 304531 - DNA, 75 bp, synthetic construct
  source 1..75: mol_type = other DNA
catgcagtaatttctcataatcatggaatacctacaaaagtggggtcagttactaatatcccgtatggaatagaa

SEQ ID NO: 304532 - DNA, 75 bp, synthetic construct
  source 1..75: mol_type = other DNA
tactcaaaggacagcggaggataattttaccggggcatggatatcaatgcgcccccgcaatgttgcgtttaatta

SEQ ID NO: 304533 - DNA, 75 bp, synthetic construct
  source 1..75: mol_type = other DNA
agggaacccactcatggctagagatgttggtgaattaggtacatcatccgtatttgcggtgcagttgagcattgg

SEQ ID NO: 304534 - DNA, 75 bp, synthetic construct
  source 1..75: mol_type = other DNA
gcgcgttgttttaactggtcagagccaatcagtacagcagcatactcatgatctagcgatggcatacagttcaga

SEQ ID NO: 304535 - DNA, 75 bp, synthetic construct
  source 1..75: mol_type = other DNA
acgctgttaaacgatctacagcatcaactaacgcaacgcgtaccgccattaggcgaggtgctggccgtcgatctg

SEQ ID NO: 304536 - DNA, 75 bp, synthetic construct
  source 1..75: mol_type = other DNA
cgacaaataaattgcctgatttacgtggtgagtttattcgtggctgggatgacggacgtggtatggatacgggga

SEQ ID NO: 304537 - DNA, 75 bp, synthetic construct
  source 1..75: mol_type = other DNA
aggctcagcattgcctgctggcgtacctgttccgtggccctcagccactccgccaacaggctggctaaaatgcaa

SEQ ID NO: 304538 - DNA, 75 bp, synthetic construct
  source 1..75: mol_type = other DNA
gagccggagaaaatcgaggcaggtgtgaagattctggcggaagagattgaacgcgcctgggctgagagtcattaa

SEQ ID NO: 304539 - DNA, 75 bp, synthetic construct
  source 1..75: mol_type = other DNA
gctctagcggcactagctacagcagcagataaactcccttatttcacaggtgttgatcgtgccgcgttaactgca

SEQ ID NO: 304540 - DNA, 75 bp, synthetic construct
  source 1..75: mol_type = other DNA
tggcccaccgccacaccgccagcaggctggttaaagtgcgacgggcgcacctttgcaaaagaacaatatcctgtt

SEQ ID NO: 304541 - DNA, 75 bp, synthetic construct
  source 1..75: mol_type = other DNA
gatgaacgtggtgtggatagtgggcgaactctgctttcagcgcaaggagatgctattcgaaacattactggcggt

SEQ ID NO: 304542 - DNA, 75 bp, synthetic construct
  source 1..75: mol_type = other DNA
gctgattggcattactgccggtgaagcgaagaatccgcaggtgacgctgcgcagtgccgtaggcaaggtgctgtg

SEQ ID NO: 304543 - DNA, 75 bp, synthetic construct
  source 1..75: mol_type = other DNA
tggcagcccgtttgtactgactttcgccaaaattggcattaccgcagccgcgggtattatcaactttgtggtact

SEQ ID NO: 304544 - DNA, 75 bp, synthetic construct
  source 1..75: mol_type = other DNA
cgttcttccggggatggtgccgtggtttgtgatcctgattagtcagctgcgttttcgtcgtgcgcacaaagcggc

SEQ ID NO: 304545 - DNA, 75 bp, synthetic construct
  source 1..75: mol_type = other DNA
tgataacgcttatggcgtcccgttcccgggtatcatcttcagcgaagcgcgcccgctatggaatccgaatatcgt

SEQ ID NO: 304546 - DNA, 75 bp, synthetic construct
  source 1..75: mol_type = other DNA
tacatcattcccaatccacagcgtgtgtttgtctacgctacagcgccagcgtgcttccgggtatggtgccatggt

SEQ ID NO: 304547 - DNA, 75 bp, synthetic construct
  source 1..75: mol_type = other DNA
tcccgtggaatgaaattggcagcaacggcagcccgttcgtactgactttcgccaaaatcggcattaccgcagcgg

SEQ ID NO: 304548 - DNA, 75 bp, synthetic construct
  source 1..75: mol_type = other DNA
tacggtgacgggggaatagttaaaacggatgaacccggtcttaaggtgccttcctcactacgagctattagctct

SEQ ID NO: 304549 - DNA, 75 bp, synthetic construct
  source 1..75: mol_type = other DNA
atggattcctccaatcaacaaagtaacgccaaagttgaattgcttgatagcgccaggaaaacattggcccaggcc

SEQ ID NO: 304550 - DNA, 75 bp, synthetic construct
  source 1..75: mol_type = other DNA
gaacaggcgagtcgtttaacgcaagcggtttccgcgttccgtctggcagccagcccactcaccaataaaccgcaa

SEQ ID NO: 304551 - DNA, 75 bp, synthetic construct
  source 1..75: mol_type = other DNA
ccgcgcgagcgggtgaacagggccgtggttttgccgtggtggcgggtgaagtgcgtaatcttgccagtcgcagcg

SEQ ID NO: 304552 - DNA, 75 bp, synthetic construct
  source 1..75: mol_type = other DNA
ttgtttcgtgaaaaatacatagttggtataggtagggataaagacgaaaacgttggtttaggagaaggctctgca

SEQ ID NO: 304553 - DNA, 75 bp, synthetic construct
  source 1..75: mol_type = other DNA
ctcagccactccgccaacaggctggctaaaatgcaacggagcagctttttctgctgaagaatatccggaactggc

SEQ ID NO: 304554 - DNA, 75 bp, synthetic construct
  source 1..75: mol_type = other DNA
aaaggatgtagctggtcttctcacataccttggtttgggagaaggctctgcattaccggttggggtgcctgttcc

SEQ ID NO: 304555 - DNA, 75 bp, synthetic construct
  source 1..75: mol_type = other DNA
actctataacaggtattcaaatgacggcggaagatagttttaccggggcatggatatcaatgcgcccccgcaatg

SEQ ID NO: 304556 - DNA, 75 bp, synthetic construct
  source 1..75: mol_type = other DNA
ttagctatccgagttagcggggcaacatcagctaccagcgcagatgatgtattaaaaaccggaggcacctccagt

SEQ ID NO: 304557 - DNA, 75 bp, synthetic construct
  source 1..75: mol_type = other DNA
tatttgatgcatccagcaaaggtgcacaaagatatgattggtgggcttacgtatccgcgcgtccccgtaatattg

SEQ ID NO: 304558 - DNA, 75 bp, synthetic construct
  source 1..75: mol_type = other DNA
acgccaaagttgaattgctcgatagcgccaggaaaacattggcccaggcagcgacgcattataaaaaattcaaaa

SEQ ID NO: 304559 - DNA, 75 bp, synthetic construct
  source 1..75: mol_type = other DNA
ggcgagctgacgtcaacctgggatttaatgctgcaaacgcgcattaacctgagtcgttcagcggtgcggatgatg

SEQ ID NO: 304560 - DNA, 75 bp, synthetic construct
  source 1..75: mol_type = other DNA
tacccggaactggcaaaggcttacccgacaaataaattacctgatttacgcggtgagtttattcggggctgggat

SEQ ID NO: 304561 - DNA, 75 bp, synthetic construct
  source 1..75: mol_type = other DNA
gccatccgtattgttggcctatatcatcgccgggctgttcgtctttttcatcatgcgttcaatgggcgaaatgtt

SEQ ID NO: 304562 - DNA, 75 bp, synthetic construct
  source 1..75: mol_type = other DNA
gctgggatgatgggcgtggtattgatgctggacgtgccttgctaagtcttcagaatggaggagtggaatcacaca

SEQ ID NO: 304563 - DNA, 75 bp, synthetic construct
  source 1..75: mol_type = other DNA
ggaatagaacaggttatatctgatgaaaccattttttcatcagcaaaaacagttggtgtggattactggtctaac

SEQ ID NO: 304564 - DNA, 75 bp, synthetic construct
  source 1..75: mol_type = other DNA
ttatcttggatttcctgtcggcaccaatgtaagacacataactttcccccggtcgtttacaacaacgaactattc

SEQ ID NO: 304565 - DNA, 75 bp, synthetic construct
  source 1..75: mol_type = other DNA
attacggttacgatctgaatactaatgtcaaagtaggtatcgcttttgctactgctgattctgttataactgttg

SEQ ID NO: 304566 - DNA, 75 bp, synthetic construct
  source 1..75: mol_type = other DNA
ccaacgttaaaattacctgatttacgcggtgagtttatccgtggttgggatgatgggcgaggtgtggatgcggga

SEQ ID NO: 304567 - DNA, 75 bp, synthetic construct
  source 1..75: mol_type = other DNA
cgccaacaggctggctaaaatgcaacggagcagctttttctgctgaagaatatccggaactggcaaaggcttacc

SEQ ID NO: 304568 - DNA, 75 bp, synthetic construct
  source 1..75: mol_type = other DNA
tgggatgctggaaaaacaccgccatattgttgttgccaatgatggttacgacacaaaagatgaatgggaactggc

SEQ ID NO: 304569 - DNA, 75 bp, synthetic construct
  source 1..75: mol_type = other DNA
accgacacttcattcacgagggagtatcggtaatactggcgggagtgagacccgtccacgaaatattgcatttaa

SEQ ID NO: 304570 - DNA, 75 bp, synthetic construct
  source 1..75: mol_type = other DNA
tacgctaatttggatgtctcaagagttgttcctacagcgacagaaaacagacctcgtaatattgcattcaactac

SEQ ID NO: 304571 - DNA, 75 bp, synthetic construct
  source 1..75: mol_type = other DNA
cgatgaccttggattcgacgcctctcgtgtcgtgccaacagctaatgaaaaccgtcctcgtaatattgcctttaa

SEQ ID NO: 304572 - DNA, 75 bp, synthetic construct
  source 1..75: mol_type = other DNA
acacaaaggatgaatgggagttggccacgattttcaaaaaaacatatacacaaggcaggggcttgatgccacaaa

SEQ ID NO: 304573 - DNA, 75 bp, synthetic construct
  source 1..75: mol_type = other DNA
gacggacgtggagtggataacggaaggggattattaacgcttcaggacggtgcgattgtcagtcataaccactat

SEQ ID NO: 304574 - DNA, 75 bp, synthetic construct
  source 1..75: mol_type = other DNA
ccggatttacggggtgagtttattcgtggctgggatgatggacggggaattgatcctggccgccagttgcttggg

SEQ ID NO: 304575 - DNA, 75 bp, synthetic construct
  source 1..75: mol_type = other DNA
cagttgagcattggcgatggcgggttattgtattcgtggaaggatgggagtggaacaacaaatgacagtaaacga

SEQ ID NO: 304576 - DNA, 75 bp, synthetic construct
  source 1..75: mol_type = other DNA
gatgggcgaggtgttgattccgcgagactgctgctttcaagtcaggcagcatctatccttgaacataaccatgaa

SEQ ID NO: 304577 - DNA, 75 bp, synthetic construct
  source 1..75: mol_type = other DNA
cggtgagtttattcgtggctgggatgatgggcgtggtgtagataatgggcgaagtcttctcactgttcaggggta

SEQ ID NO: 304578 - DNA, 75 bp, synthetic construct
  source 1..75: mol_type = other DNA
cgcagaaggataagttcggcgcgggtaaaaacggttttacccgtggtaacccccagactggcacgcctgctaccg

SEQ ID NO: 304579 - DNA, 75 bp, synthetic construct
  source 1..75: mol_type = other DNA
atgccagttagccgttatctctgcatttttataaacgttggtttgggagaaggttcggcattacccgttggtgtg

SEQ ID NO: 304580 - DNA, 75 bp, synthetic construct
  source 1..75: mol_type = other DNA
caactctaatgagcgggcaattggtgaaatgtatgtcgttcctgccgatactcgcccacaaaatattgcatttaa

SEQ ID NO: 304581 - DNA, 75 bp, synthetic construct
  source 1..75: mol_type = other DNA
ggctctcgaaaaccttggtttgggagaaggttctgcattgccggttggcgtccccattccgtggccgtcagcaac

SEQ ID NO: 304582 - DNA, 75 bp, synthetic construct
  source 1..75: mol_type = other DNA
ctctcgaaaaccttggtttgggagaaggctctgcattaccggttggggtgcctgttccgtggccttcagccactc

SEQ ID NO: 304583 - DNA, 75 bp, synthetic construct
  source 1..75: mol_type = other DNA
accgtaatgaaatgcctttaaaaaatttacctgaatcagaagaaatgctgacattaagctctacagttaatgcct

SEQ ID NO: 304584 - DNA, 75 bp, synthetic construct
  source 1..75: mol_type = other DNA
ttttaccgcttttggctctggaaatttgacaatgaatggtgttacttcttatttcggtgtccgtccacgcaacat

SEQ ID NO: 304585 - DNA, 75 bp, synthetic construct
  source 1..75: mol_type = other DNA
gaaacaaagataactaaccaccacggcaatggcggtaacgctgatgatatttcggctggtgtctccggttcacct

SEQ ID NO: 304586 - DNA, 75 bp, synthetic construct
  source 1..75: mol_type = other DNA
tacccggaactggcaaaggcttatccaacaaataaattacctgatttacgcggtgagtttattcgtggatgggat

SEQ ID NO: 304587 - DNA, 75 bp, synthetic construct
  source 1..75: mol_type = other DNA
atatatttgtcctgtgcaacaaattatagatacccccctgttacgcaaactcaaccagtttcgtacgtttgttcg

SEQ ID NO: 304588 - DNA, 75 bp, synthetic construct
  source 1..75: mol_type = other DNA
cgatcgccgtttgcgtcatgacgatgcctacacgccagataacgtcgcgggtaagcgcccggatcgcgccaccct

SEQ ID NO: 304589 - DNA, 75 bp, synthetic construct
  source 1..75: mol_type = other DNA
tcggcggtattgaggctagtttgcgtcgtaccgcgcattatgattactggtctgataccgtgcgccgttccgtgc

SEQ ID NO: 304590 - DNA, 75 bp, synthetic construct
  source 1..75: mol_type = other DNA
cctggctcgtctggcatcaccgccaaaggcggcggcagaagctctgaaagagctgggcgtgtccgtctcggatgc

SEQ ID NO: 304591 - DNA, 75 bp, synthetic construct
  source 1..75: mol_type = other DNA
tggcgtactgagcatggcaacggctggcggtatggacctcggtgagacggcggatattggctcaaatattctgac

SEQ ID NO: 304592 - DNA, 75 bp, synthetic construct
  source 1..75: mol_type = other DNA
ccgcttcggtaccgcaagaatcacgctgggcgtggatgaagatttcagcctgaagaactcccgtgacggcaaccc

SEQ ID NO: 304593 - DNA, 75 bp, synthetic construct
  source 1..75: mol_type = other DNA
tgaccgtagcaaattctaccgtctaatcgaagcttcgctgtacggtggtatttccagcgccattacccgttctct

SEQ ID NO: 304594 - DNA, 75 bp, synthetic construct
  source 1..75: mol_type = other DNA
gacgtgctgcgcatgtcggaagatccgaaacgtccggagcgtaaaattcagttcttcgtggcggtttatcagcat

SEQ ID NO: 304595 - DNA, 75 bp, synthetic construct
  source 1..75: mol_type = other DNA
cacgctgtttgaattgtgtgagcgtttgcaaatgcagctcatcatcgcagcgccggaaaatatcagcccggagaa

SEQ ID NO: 304596 - DNA, 75 bp, synthetic construct
  source 1..75: mol_type = other DNA
tcggcggtatcgaagccagcctgcggcgtaccgcgcattatgattactggtccgataccgtgcgccgttccgtgc

SEQ ID NO: 304597 - DNA, 75 bp, synthetic construct
  source 1..75: mol_type = other DNA
attgctgccttctttcgagaaagtgaagggcgataaagtgctgtacgcccatgcttcgcgtattctgcaccatga

SEQ ID NO: 304598 - DNA, 75 bp, synthetic construct
  source 1..75: mol_type = other DNA
caggacgttaccgaatatctgcaacagttgctggagcgcgagcgcgaggccattgttgaacgtgatgaagtgggc

SEQ ID NO: 304599 - DNA, 75 bp, synthetic construct
  source 1..75: mol_type = other DNA
ctttctcagggagtttagtctccaggatttccggggcggttcagtattcgcacgcgcaggaaaccgcgggaaaac

SEQ ID NO: 304600 - DNA, 75 bp, synthetic construct
  source 1..75: mol_type = other DNA
aagatcttagcgtggtgaaaaatacgatttacgcctcgctgggtatcgactggccgaaagataaactcaatatct

SEQ ID NO: 304601 - DNA, 75 bp, synthetic construct
  source 1..75: mol_type = other DNA
atacttctctgcggttgcaccgtcgtggctatacctccgcgtatatgcgtattccgcaggcggcggggctggcga

SEQ ID NO: 304602 - DNA, 75 bp, synthetic construct
  source 1..75: mol_type = other DNA
tacgtttgcccgtgcggatacatgggcgctctggcaggacagctacccggaagataagccgctggaaagtctgct

SEQ ID NO: 304603 - DNA, 75 bp, synthetic construct
  source 1..75: mol_type = other DNA
ggattctggtttataccgtcaataaaccccagcgcgcggcagagttgctgcgctggggcgtggattgcatctgta

SEQ ID NO: 304604 - DNA, 75 bp, synthetic construct
  source 1..75: mol_type = other DNA
tcgtcgcccatcgtggtggcggtaagctggccccggaaaacaccctggcagcaatcgacgtcggggcaagatacg

SEQ ID NO: 304605 - DNA, 75 bp, synthetic construct
  source 1..75: mol_type = other DNA
aacatgcgaaagcgggcaacatcaacaatgcgctgaaatatgccaaaggcgagttcgtgtcgattttcgactgcg

SEQ ID NO: 304606 - DNA, 75 bp, synthetic construct
  source 1..75: mol_type = other DNA
cgcgtcacacagagaaacgccgaaaccgcgctggcgggcattttcaggtctacagaatatccgtgagcgttacca

SEQ ID NO: 304607 - DNA, 75 bp, synthetic construct
  source 1..75: mol_type = other DNA
cgacgctcggctgtttctggctgatccttgcctggatttttattccgctggagcacccgcgctggcagcgtattc

SEQ ID NO: 304608 - DNA, 75 bp, synthetic construct
  source 1..75: mol_type = other DNA
agcaggcgttaaaacttggctctgaaacgcagttcaccgcaggcgatgccgccagtggacaggcatttcttgcaa

SEQ ID NO: 304609 - DNA, 75 bp, synthetic construct
  source 1..75: mol_type = other DNA
ctacgaaacggtgctggcgtggtatatcgcgccgccaacgctggtggcgctgataaatccgcataaaggcaaatt

SEQ ID NO: 304610 - DNA, 75 bp, synthetic construct
  source 1..75: mol_type = other DNA
gctggatgagataggcggcattgctgttgaaactgtaaccgaggatgcgcacacgtctttgcgtttacaccgtcg

SEQ ID NO: 304611 - DNA, 75 bp, synthetic construct
  source 1..75: mol_type = other DNA
atcgtcagccagtaccgctgccgaaagatatgtcgctgtggccatcggtggatatttttgtgccgacctacaacg

SEQ ID NO: 304612 - DNA, 75 bp, synthetic construct
  source 1..75: mol_type = other DNA
gcaaaaacgctgtcgatgaagagatcgaacgtttaagccagcctggcggctctgaagatcagcgtctgaacgcgc

SEQ ID NO: 304613 - DNA, 75 bp, synthetic construct
  source 1..75: mol_type = other DNA
ctggtcagaggcgcgttttagcgggatggtcaaaacggcgctgacgctggcagtaacgaccaccttaaaggaatt

SEQ ID NO: 304614 - DNA, 75 bp, synthetic construct
  source 1..75: mol_type = other DNA
atgacatgacctgggattttatcagcaacgtcaatagcataacccgcaatgcgacgctctatgacgcgttgaaag

SEQ ID NO: 304615 - DNA, 75 bp, synthetic construct
  source 1..75: mol_type = other DNA
tgtacgccgatatcacgcacttttcccagttctggcattacctgaacgaacaggatgaaatgcccggatttgccg

SEQ ID NO: 304616 - DNA, 75 bp, synthetic construct
  source 1..75: mol_type = other DNA
gagatggcagcggcagaatcagaaattatggagacgcgtaatacaccgcgtggactgttacgcatcgatgccgca

SEQ ID NO: 304617 - DNA, 75 bp, synthetic construct
  source 1..75: mol_type = other DNA
attcactgaacccgcttccctcaatacctggccgatagcctgtagcgatggacaattacatgaggtgaagtacgg

SEQ ID NO: 304618 - DNA, 75 bp, synthetic construct
  source 1..75: mol_type = other DNA
ggagaattggtggagttaatggcagataaagtgttgccagtggaaatgccattcagtgcagtctattacagcgac

SEQ ID NO: 304619 - DNA, 75 bp, synthetic construct
  source 1..75: mol_type = other DNA
gataccgcgaaagccattaaggcaaaactggcggaattacagccattcttcccgcagggaatgaaggttctctac

SEQ ID NO: 304620 - DNA, 75 bp, synthetic construct
  source 1..75: mol_type = other DNA
gcgctggccgaagaccagcagaaagcgattgagtcaattaagcaggctgatgcggctgttaagttggcacacgag

SEQ ID NO: 304621 - DNA, 75 bp, synthetic construct
  source 1..75: mol_type = other DNA
atgctgttcaccaacagccataccatccgcgacgttattctgttcccggcgatgcgtccggtaaaataagcatta

SEQ ID NO: 304622 - DNA, 75 bp, synthetic construct
  source 1..75: mol_type = other DNA
cgatgaagttcgccgatttcgccgtctggtcagaggcgcgttttagcgggatggtcaaaacggcgctgacgctgg

SEQ ID NO: 304623 - DNA, 75 bp, synthetic construct
  source 1..75: mol_type = other DNA
acagcaacaaatatcacttataacgatagtttttcttctcaagaatgttgagatcaaagatcctgttaatggtgt

SEQ ID NO: 304624 - DNA, 75 bp, synthetic construct
  source 1..75: mol_type = other DNA
tggaagcgactatcgaacagacgaaaggggagctggagtctctcgatcgtgactggcagaactcaatcctgtctg

SEQ ID NO: 304625 - DNA, 75 bp, synthetic construct
  source 1..75: mol_type = other DNA
tggctatggccgccggatgctgctctctgacgccatcaccgaagatgcccagatgctcacgctcgacgatgagct

SEQ ID NO: 304626 - DNA, 75 bp, synthetic construct
  source 1..75: mol_type = other DNA
accgtcgtgagctggcttatctctccgctgatgatttgcgttccatgtcggataaggcgttaggtgcgctgcgtc

SEQ ID NO: 304627 - DNA, 75 bp, synthetic construct
  source 1..75: mol_type = other DNA
tcgcattcagagtttgatgcagcgtgcgccggtttggctggcagcgcaaaacagcctcaaccagttgagcgaaca

SEQ ID NO: 304628 - DNA, 75 bp, synthetic construct
  source 1..75: mol_type = other DNA
tttaacagcaaccgtctgaccttctcggaagcgctggcgaaactgtatcaacgtcttaacccgcagattgatatg

SEQ ID NO: 304629 - DNA, 75 bp, synthetic construct
  source 1..75: mol_type = other DNA
ctggcggtggcgtttgagtctgacccggaagcagaaatccgtcaactgaacagccgtcgcgtcgaactggagcgg

SEQ ID NO: 304630 - DNA, 75 bp, synthetic construct
  source 1..75: mol_type = other DNA
ttcacgtcgtcggcctgcgaggatttgcgccgcaactccctgaaacgcttccaggaagtgacgaagcgccttccc

SEQ ID NO: 304631 - DNA, 75 bp, synthetic construct
  source 1..75: mol_type = other DNA
gtggtcggtgtgcgtctgcaacaggttgccggacgcgatcgtaaagtggatatcaaaccgtttgccattcagggt

SEQ ID NO: 304632 - DNA, 75 bp, synthetic construct
  source 1..75: mol_type = other DNA
gagcagaatcgtattcgcatgcttaaccagggcttgcagagtgtatcgtttggtcaggttaacagcgtgcgtctc

SEQ ID NO: 304633 - DNA, 75 bp, synthetic construct
  source 1..75: mol_type = other DNA
caatcaacggcccgctggcgcgtaacgaggcttgggatgtcgcccgcgaactgctgcgcgaaggggtcgatcagc

SEQ ID NO: 304634 - DNA, 75 bp, synthetic construct
  source 1..75: mol_type = other DNA
gttcagccgctttatcggcagccatctggcagtggcatttgagtctgatccagaagctgaaattcgccaactaaa

SEQ ID NO: 304635 - DNA, 75 bp, synthetic construct
  source 1..75: mol_type = other DNA
tcaagcatctgatcagcgaagcgactaactacgtggcggcggactacatgcgtcacgccaacgagcgccgtgttc

SEQ ID NO: 304636 - DNA, 75 bp, synthetic construct
  source 1..75: mol_type = other DNA
tggtcaggtgaacagcgtacgtctgaacgtgaacgtgcgtgaaacgcacgccatgctgctggatgtgctctctga

SEQ ID NO: 304637 - DNA, 75 bp, synthetic construct
  source 1..75: mol_type = other DNA
gatatcgacgaactggaagccctgcatcaggagctggaagcgcgcattgcctctctttccgacagcgtttctaac

SEQ ID NO: 304638 - DNA, 75 bp, synthetic construct
  source 1..75: mol_type = other DNA
actttgggcagggggcgctgctgttaaaacacccggaagcgattaagaacccgttcttcctgttggctccggatt

SEQ ID NO: 304639 - DNA, 75 bp, synthetic construct
  source 1..75: mol_type = other DNA
gttttccaccgctgtggtctggaagggttaagttgtcgaatgatggaaacgtccttctttatgtcacatgaatca

SEQ ID NO: 304640 - DNA, 75 bp, synthetic construct
  source 1..75: mol_type = other DNA
taaactgctctccggcggctggttgccattgagcctcggtactgtgatgtttatcgtgatgaccacctggaagag

SEQ ID NO: 304641 - DNA, 75 bp, synthetic construct
  source 1..75: mol_type = other DNA
acctatcggtattgaggttattcacgcgcacgtcactgaatatctgaacaaggtgctgattgaaaccaatcacgc

SEQ ID NO: 304642 - DNA, 75 bp, synthetic construct
  source 1..75: mol_type = other DNA
ttgagcttgaagcagaacagaaaacatcagcagccagacttgaggcgctcgaccgcacccacaaaatgttccaac

SEQ ID NO: 304643 - DNA, 75 bp, synthetic construct
  source 1..75: mol_type = other DNA
tgtccataacgtccgtcgggtacagattgaacaactgtcgcccactttctggcgcgtggtggcaagttatggttg

SEQ ID NO: 304644 - DNA, 75 bp, synthetic construct
  source 1..75: mol_type = other DNA
atgcccagctttctaccccatgcactgacagcatcataaacagcattgcaacaggcattcgcatcaaaggagact

SEQ ID NO: 304645 - DNA, 75 bp, synthetic construct
  source 1..75: mol_type = other DNA
attacaaagcgagaatgcatacatccgcaaccggtacaaagaactggacctgttaatcgggaaaaacattctggt

SEQ ID NO: 304646 - DNA, 75 bp, synthetic construct
  source 1..75: mol_type = other DNA
aacatggcactgctatggtcggtaagctttttgcgccgattatgctgacctggtttttgattctggcagctcttg

SEQ ID NO: 304647 - DNA, 75 bp, synthetic construct
  source 1..75: mol_type = other DNA
ctgactttactgtttatgattcaaaaacatggcactgctatggtcggtaagctgtttgcgcctatcatgctgacc

SEQ ID NO: 304648 - DNA, 75 bp, synthetic construct
  source 1..75: mol_type = other DNA
atgtcagccattgaaggtctggaaatcgtcgccccgcagctggatacctggatagttcccctctcaattatcgtt

SEQ ID NO: 304649 - DNA, 75 bp, synthetic construct
  source 1..75: mol_type = other DNA
aataattgcggctgttgggtttatagctggtaaggcgatattctctgataatgttgtgtttagaagaaggatgta

SEQ ID NO: 304650 - DNA, 75 bp, synthetic construct
  source 1..75: mol_type = other DNA
tagcggtgctgcactggcgatgtcaattattgatgctgcctgtgcaatgtactgccaaatgggcttactgacaca

SEQ ID NO: 304651 - DNA, 75 bp, synthetic construct
  source 1..75: mol_type = other DNA
tatcttgagttgcggccttttcttcatctcgatatgcgtcttggcgaaggtagcggtgctgcactggcgatgtca

SEQ ID NO: 304652 - DNA, 75 bp, synthetic construct
  source 1..75: mol_type = other DNA
gaggttttgctagagagggatattcagcgcacacttgctaacacctttcccaatgaacatccggaggcctttatt

SEQ ID NO: 304653 - DNA, 75 bp, synthetic construct
  source 1..75: mol_type = other DNA
tgagcgtattgaagtgatccgcggccctgcggcggcgcgctacggttcgggggcagccgggggggtggtgaacat

SEQ ID NO: 304654 - DNA, 75 bp, synthetic construct
  source 1..75: mol_type = other DNA
gctacctgatcggtaataaagatctcgatccggaaatcagcgtcaataaagaaattggactggagttcacctggg

SEQ ID NO: 304655 - DNA, 75 bp, synthetic construct
  source 1..75: mol_type = other DNA
aaaaggaattaccggtgtttgcgtactggcgcgaactaaccagacatcggtgctgccagtcgatatcggcattga

SEQ ID NO: 304656 - DNA, 75 bp, synthetic construct
  source 1..75: mol_type = other DNA
tggcgggagctactatcagtctgccaataattttttctgtagcttttatagctggtaaggcgatcttcgctgata

SEQ ID NO: 304657 - DNA, 75 bp, synthetic construct
  source 1..75: mol_type = other DNA
cattctgtttcaaagagagccagcgtggggttcacgtttgcacaggctgtttagcaacggtgttatatggcactt

SEQ ID NO: 304658 - DNA, 75 bp, synthetic construct
  source 1..75: mol_type = other DNA
tggcgggggctactatcagcctaccaatcattgcagctattggctttgtcgcaggtaaggcaattttctctgata

SEQ ID NO: 304659 - DNA, 75 bp, synthetic construct
  source 1..75: mol_type = other DNA
cgttctgtttcaaagagagccagcgtggggttcacgtctgtacaggctgtttagcgacggtgttatatggtgcct

SEQ ID NO: 304660 - DNA, 75 bp, synthetic construct
  source 1..75: mol_type = other DNA
atggaaaacaatatcatcaaatgcccgttctgtttcaaagagagccagcgtggggttcacgtctgtacaggctgt

SEQ ID NO: 304661 - DNA, 75 bp, synthetic construct
  source 1..75: mol_type = other DNA
aataattgcggctgttgggtttgtcgcaggtaaggcaattttctctgataatgttgttttcaggcgaaggatgta

SEQ ID NO: 304662 - DNA, 75 bp, synthetic construct
  source 1..75: mol_type = other DNA
ggcaactggcgacgctaagagcggactggcatggatttataacacactgtttggccctggcgaattgccggacga

SEQ ID NO: 304663 - DNA, 75 bp, synthetic construct
  source 1..75: mol_type = other DNA
aaacccgcttacgacgcgctccagggccaggtgaaactgctgctgactacctattttgaaggcgtaacgccaaat

SEQ ID NO: 304664 - DNA, 75 bp, synthetic construct
  source 1..75: mol_type = other DNA
aacgcattccggcagagcgcctgtgggtcaacccggactgtggcctgaaaacgcgcggctggccagaaacccgcg

SEQ ID NO: 304665 - DNA, 75 bp, synthetic construct
  source 1..75: mol_type = other DNA
ctgtgctgctggggccggttacctacctgtggctggggaaagtgaaaggtgaacagtttgaccgcctgagcctgc

SEQ ID NO: 304666 - DNA, 75 bp, synthetic construct
  source 1..75: mol_type = other DNA
tttgtctttacgcaaaacggttgggtacagagctacggttcccgctgcgtgaagccaccgattgtcattggtgac

SEQ ID NO: 304667 - DNA, 75 bp, synthetic construct
  source 1..75: mol_type = other DNA
gtggaatggattgaatccctgctgaagaaagcagcacaacgtattccggcagagcgcctgtgggtcaacccggac

SEQ ID NO: 304668 - DNA, 75 bp, synthetic construct
  source 1..75: mol_type = other DNA
cacggcagctctggcagagtggagcgccccaattcaggcgcgtcgtcactctactcgtgtacataatccggcggt

SEQ ID NO: 304669 - DNA, 75 bp, synthetic construct
  source 1..75: mol_type = other DNA
gaagttgtcgaaagatggcgaaatcttcctgctccatgacgacaatctcgaacgtaccagcaacggctggggcgt

SEQ ID NO: 304670 - DNA, 75 bp, synthetic construct
  source 1..75: mol_type = other DNA
ttcctgcttcatgacgacaatctcgaacgtaccagtaacggttggggcgtcgcgggtgaactgaactggcaggat

SEQ ID NO: 304671 - DNA, 75 bp, synthetic construct
  source 1..75: mol_type = other DNA
atgagtaactggccttatccccgcattgtcgcccaccgtggcggcggtaagctggccccggaaaacacactggcg

SEQ ID NO: 304672 - DNA, 75 bp, synthetic construct
  source 1..75: mol_type = other DNA
tcgtcgcacatcgtggcggcggtaagctggccccggaaaacaccctggcagcaatcgatgtgggagcaaaatacg

SEQ ID NO: 304673 - DNA, 75 bp, synthetic construct
  source 1..75: mol_type = other DNA
gccgctgctgtcatcgtttgagattgatgctttagaagctgcacaacaggctgcaccggaactgccgcgcggttt

SEQ ID NO: 304674 - DNA, 75 bp, synthetic construct
  source 1..75: mol_type = other DNA
atgcagttgaaagacgccggactgcggattctggtttataccgtcaataaaccccagcgcgccaggggagggggg

SEQ ID NO: 304675 - DNA, 75 bp, synthetic construct
  source 1..75: mol_type = other DNA
cacggcagctctggcagagtggagcgcaccgattcaggcgcgccgtcactcaacccgcgtacataatccggcggt

SEQ ID NO: 304676 - DNA, 75 bp, synthetic construct
  source 1..75: mol_type = other DNA
ttttcacgaggattaccaaacggtaatggcatacaaagtttctgaggtcatcgctgcaatccgcgccgctggcat

SEQ ID NO: 304677 - DNA, 75 bp, synthetic construct
  source 1..75: mol_type = other DNA
tactggcccgttcaatggatctggacatctataaccttcatccggcacacgctaaacgcattgaggaaattatcg

SEQ ID NO: 304678 - DNA, 75 bp, synthetic construct
  source 1..75: mol_type = other DNA
cacatctgattcagcctaccttgattactgaatatccggcagaagtgtcaccgctggcccgccgtaatgaggtta

SEQ ID NO: 304679 - DNA, 75 bp, synthetic construct
  source 1..75: mol_type = other DNA
gctaacccggctaccgtgctggaactgctggatgaacgggaaagaaaccagcaatacatcaaacgccgcgaccag

SEQ ID NO: 304680 - DNA, 75 bp, synthetic construct
  source 1..75: mol_type = other DNA
gtgagcgaaattaattatcaggcactgcgtgaaaaggcagaaaaagcaactaaaggaagctacatcgtagggcat

SEQ ID NO: 304681 - DNA, 75 bp, synthetic construct
  source 1..75: mol_type = other DNA
agaaagcaacgagtggtgtgtggtcgctagaatatggagaggagagatttgatgctggtgatgcgctaattcatc

SEQ ID NO: 304682 - DNA, 75 bp, synthetic construct
  source 1..75: mol_type = other DNA
tggtcgcattcagctgtatgtggctcgtgacgatctgccggaaggtgtttataacgatcaattcaaaaaatggga

SEQ ID NO: 304683 - DNA, 75 bp, synthetic construct
  source 1..75: mol_type = other DNA
gcattcacgttgagaagagctgggggctgggtcgtattgtgaccgagatctttgacgaagtggcagaagcgaatc

SEQ ID NO: 304684 - DNA, 75 bp, synthetic construct
  source 1..75: mol_type = other DNA
cacatctgattcagcctaccttgattactgaatatccggcagaagtatcgccgctggcccgccgtaatgaggtta

SEQ ID NO: 304685 - DNA, 75 bp, synthetic construct
  source 1..75: mol_type = other DNA
cacatctgattcagcctacctttattactgaatatccggcagaagtttcgccgctggcccgccgtaatgaggtta

SEQ ID NO: 304686 - DNA, 75 bp, synthetic construct
  source 1..75: mol_type = other DNA
cacatctgattcagcctaccttaattactgaatatccggcagaagtgtcgccgctggcccgccgtaatgaggtta

SEQ ID NO: 304687 - DNA, 75 bp, synthetic construct
  source 1..75: mol_type = other DNA
atgagtaattcactgttaccaccatcagccagcagtttcatgcgttgtgccgaagctgtcggaacgcgcattaca

SEQ ID NO: 304688 - DNA, 75 bp, synthetic construct
  source 1..75: mol_type = other DNA
agcttactattgttcgaaataatagacttgagaatcaatataaagacgataaaaacatcagtgacgcgatgcgta

SEQ ID NO: 304689 - DNA, 75 bp, synthetic construct
  source 1..75: mol_type = other DNA
tcatcaacaaggttttgccgaggggcgacgtcagggctacaccgaaggcagcctcgccgggcagcaggaagggcg

SEQ ID NO: 304690 - DNA, 75 bp, synthetic construct
  source 1..75: mol_type = other DNA
atgcgaatagtgggcgttttgataaaacaaataaagaacaacacaatcagacagaactatttgaatggcaacttg

SEQ ID NO: 304691 - DNA, 75 bp, synthetic construct
  source 1..75: mol_type = other DNA
cccgccgggcgctacttaattaccgctggcccggaaatgttcgccaactggaaaacgccattcagcgaggaatga

SEQ ID NO: 304692 - DNA, 75 bp, synthetic construct
  source 1..75: mol_type = other DNA
tcttaaaccgcgacggcgtgatttacccggacgcgttaggcctgccggaaaatgacgttgccgaccgcagcgaac

SEQ ID NO: 304693 - DNA, 75 bp, synthetic construct
  source 1..75: mol_type = other DNA
acgtaaacagcgggaagatttgctgcaactggtggaaaaagtcacccgccaggtgatccgctgcgaactggcgct

SEQ ID NO: 304694 - DNA, 75 bp, synthetic construct
  source 1..75: mol_type = other DNA
ccgctggaagccatcagcggaaaagtgaacgacttcctcgcccatatcgaacgtaaacagcgggaagatttgctg

SEQ ID NO: 304695 - DNA, 75 bp, synthetic construct
  source 1..75: mol_type = other DNA
atgaccattgaaacactgcgcgggcgctatcgcctgcaccgttttccgccgcgccagcgtgcggtgacaggagaa

SEQ ID NO: 304696 - DNA, 75 bp, synthetic construct
  source 1..75: mol_type = other DNA
cgacgccagggctacaccgaaggcagcctcgccgggcagcaggaagggcgcaaacagtttgttgaggcggcgcag

SEQ ID NO: 304697 - DNA, 75 bp, synthetic construct
  source 1..75: mol_type = other DNA
ccgctcaccgccagcatcagcgccgccgactaccagcgccagttgatggacggttttcaggaagggctgcaaaaa

SEQ ID NO: 304698 - DNA, 75 bp, synthetic construct
  source 1..75: mol_type = other DNA
cggcgatgccggagaccctgcaagtgatgctgagtacggaagagtttaaccgcctgcgcgacgcggtgccggaaa

SEQ ID NO: 304699 - DNA, 75 bp, synthetic construct
  source 1..75: mol_type = other DNA
gaagcgatacaaaataccatgagccaccatgccgcaattttgtgtcatacacaggagatcaacgctgccgcgcaa

SEQ ID NO: 304700 - DNA, 75 bp, synthetic construct
  source 1..75: mol_type = other DNA
acgagcctgtgctgggcgctgaaagaactggcaaaggatatctggagcagaccatggagcgaggaaagacgcaac

SEQ ID NO: 304701 - DNA, 75 bp, synthetic construct
  source 1..75: mol_type = other DNA
ctgacgggaaggaaaataccggacgtattcaggctgagaaagccgctaaagcggtggatggctgggtgacacttc

SEQ ID NO: 304702 - DNA, 75 bp, synthetic construct
  source 1..75: mol_type = other DNA
caatgaaattggcgtttcaggcggctcactggcggcattgacttcacccttaacctcaacaactcccgtcgccga

SEQ ID NO: 304703 - DNA, 75 bp, synthetic construct
  source 1..75: mol_type = other DNA
aaacccgcttacgacgcgctccagggccaggtgaaactgctgctgaccacctattttgaaggcgtaacgccaaac

SEQ ID NO: 304704 - DNA, 75 bp, synthetic construct
  source 1..75: mol_type = other DNA
ttgcgggcttaactgttgtttatcgtaacggccataaggcattacagaatgcatcattcagcgtccctaaaggtt

SEQ ID NO: 304705 - DNA, 75 bp, synthetic construct
  source 1..75: mol_type = other DNA
aggttgtacggtatcctgaacgccatgcgccatggcgtatcaaacggaaatgcggaagcactgaacagcaagatc

SEQ ID NO: 304706 - DNA, 75 bp, synthetic construct
  source 1..75: mol_type = other DNA
gtatgtaaaggtgataccttaacctacaacacaaaaaataattatatttactctgattctgcgctagttgctgct

SEQ ID NO: 304707 - DNA, 75 bp, synthetic construct
  source 1..75: mol_type = other DNA
ttttagccacgggcgggcctggtgaactttatcgtgacagtgtttatccggtgaactgttttagtgcgttgggca

SEQ ID NO: 304708 - DNA, 75 bp, synthetic construct
  source 1..75: mol_type = other DNA
tggcggcgggtggttcgatggattatgacactgcatatgttgaggccgtcggatcagtgaacacctgtgaaatac

SEQ ID NO: 304709 - DNA, 75 bp, synthetic construct
  source 1..75: mol_type = other DNA
aatcgatctccgtagctgaaaaggggcatattgtaacctttggaattatacctgaatatgcggaaacaggttatg

SEQ ID NO: 304710 - DNA, 75 bp, synthetic construct
  source 1..75: mol_type = other DNA
gttaaacaaattgtccaaatgctcaaaaagcaagaacgttctgaatatctatcacatcgcgaggagtttcggcct

SEQ ID NO: 304711 - DNA, 75 bp, synthetic construct
  source 1..75: mol_type = other DNA
cgcagaattgtatatgacttctggtaatcactattggaatagtggaatattcatgtttaaggcatctgtttatct

SEQ ID NO: 304712 - DNA, 75 bp, synthetic construct
  source 1..75: mol_type = other DNA
ataaaaagtgtggatcttaaaggtcctgtttttgaaaattgctattttgaggattgtaaattcaacaatatacag

SEQ ID NO: 304713 - DNA, 75 bp, synthetic construct
  source 1..75: mol_type = other DNA
ctggaatgaatctggcgagataagtgatatttctgcgttacattactcgggatatgataacaacctcgcatggag

SEQ ID NO: 304714 - DNA, 75 bp, synthetic construct
  source 1..75: mol_type = other DNA
gcacctgactgggcacaacgggaaacgtggcttgtcggtccggaggagcgttcagggctgacaacatcacgggcg

SEQ ID NO: 304715 - DNA, 75 bp, synthetic construct
  source 1..75: mol_type = other DNA
ttcgtgaaggtgaacgggcggtggcggacggcagtatcaccggaacaccacgaaattccaggattgcgtcattct

SEQ ID NO: 304716 - DNA, 75 bp, synthetic construct
  source 1..75: mol_type = other DNA
gtggggcatatctgtgaaccggtaatggcgctgtggggattgcccggtgaagcggcaaccgtccttttagccgca

SEQ ID NO: 304717 - DNA, 75 bp, synthetic construct
  source 1..75: mol_type = other DNA
tacgccagagttcaccagaaaacaaccggtatcagtatctgggattatgggtacggaaacagtggtcgcgaatcg

SEQ ID NO: 304718 - DNA, 75 bp, synthetic construct
  source 1..75: mol_type = other DNA
ggcaggtgtccgctatgacgtaaccccggatatcgctctggacctcagctatcgctatcttgatgcaggtgatgc

SEQ ID NO: 304719 - DNA, 75 bp, synthetic construct
  source 1..75: mol_type = other DNA
atgaaaaaggttattgctgtttcaacacttgcaatggcaggcatgttttcggcccagactctggctgatgagaac

SEQ ID NO: 304720 - DNA, 75 bp, synthetic construct
  source 1..75: mol_type = other DNA
acaatacttactgagaatctaaaagaatatgtccaaaagcaaataaaggagtctcataaagaatctgctacaaat

SEQ ID NO: 304721 - DNA, 75 bp, synthetic construct
  source 1..75: mol_type = other DNA
gggaactgtgtttgattgttgtaatttgaatagtattaaaatgaactgtagtcttggtaatgtgagttcagatga

SEQ ID NO: 304722 - DNA, 75 bp, synthetic construct
  source 1..75: mol_type = other DNA
caccacctttatgtcctcggggatgaccctggtcgagagttcaccggggcgggatatcaccgataccaaatggcg

SEQ ID NO: 304723 - DNA, 75 bp, synthetic construct
  source 1..75: mol_type = other DNA
tgttgatcgctacaacatccggcattcactgcgctgcagtcccaacggtgaaagtctgccggttgatccggcggc

SEQ ID NO: 304724 - DNA, 75 bp, synthetic construct
  source 1..75: mol_type = other DNA
gcggatatgctggtggtgcagatgactgagacgaaggcgcgtgagcattccagaacgcgtctttccaggacgttt

SEQ ID NO: 304725 - DNA, 75 bp, synthetic construct
  source 1..75: mol_type = other DNA
cactccatgggtatctgttggcctaggttatgcacgagtacatcataaggcgacatatactgatacctccaggaa

SEQ ID NO: 304726 - DNA, 75 bp, synthetic construct
  source 1..75: mol_type = other DNA
ttaggatattctctactgtatatttaatacctgtgtttttggggcaggttcgcggattaaatgccgaagagatag

SEQ ID NO: 304727 - DNA, 75 bp, synthetic construct
  source 1..75: mol_type = other DNA
tttcaatgtatctttttacccctataacccacgaatggggatggcaggaattactgtttccacaggcaattagag

SEQ ID NO: 304728 - DNA, 75 bp, synthetic construct
  source 1..75: mol_type = other DNA
gctgaactgtatattgttgatccgcgatggtcgtcggctgcttctcactgatactggtcgcgtcgtatttgagcg

SEQ ID NO: 304729 - DNA, 75 bp, synthetic construct
  source 1..75: mol_type = other DNA
accaatatgataggaagtgaccggattaagtttattgaatctatcataaataaaatcattccaccggaagatata

SEQ ID NO: 304730 - DNA, 75 bp, synthetic construct
  source 1..75: mol_type = other DNA
gcaattaacgagtttgactatcaaggcagtgccgtagtaatgtcatgggctgtttcttattttttaagatattgt

SEQ ID NO: 304731 - DNA, 75 bp, synthetic construct
  source 1..75: mol_type = other DNA
acgtgcaggagctctccggtcctgttccggctcggcctcgtggagttatgccagccagcaagccatctggagcca

SEQ ID NO: 304732 - DNA, 75 bp, synthetic construct
  source 1..75: mol_type = other DNA
cggtcgggatctgattagtgaagttgatatattgggtaatgaaataacactgcatccctggcaggttatgtggat

SEQ ID NO: 304733 - DNA, 75 bp, synthetic construct
  source 1..75: mol_type = other DNA
atataaccgtgcgattaaccgtaaaaaatatcacagtaaagagataacccgagaactgaacgatgaagctacatt

SEQ ID NO: 304734 - DNA, 75 bp, synthetic construct
  source 1..75: mol_type = other DNA
cgcttgcaatggcaggcatgttttcggcccaggccctggctgatgaggataaaacaggcttttatgtgaccggta

SEQ ID NO: 304735 - DNA, 75 bp, synthetic construct
  source 1..75: mol_type = other DNA
ttaaattcctgattgaccggctcaagccggaagaacgtcaattcgcgctggacctgctcagtgggcaaactacat

SEQ ID NO: 304736 - DNA, 75 bp, synthetic construct
  source 1..75: mol_type = other DNA
ccccattattagcaatggcgtgcgggatggtgaacatgcgagtttttaaaattaaatgtcctgaatgcggctcac

SEQ ID NO: 304737 - DNA, 75 bp, synthetic construct
  source 1..75: mol_type = other DNA
ccggtcgcaatatggtgaagtttcttgttgatgccatgcgcccggaagatcgccggtatgcgcttgaactactgt

SEQ ID NO: 304738 - DNA, 75 bp, synthetic construct
  source 1..75: mol_type = other DNA
tcatggtcgcctgatgctggcaaacggtcagcatgaagtggagttcccggttgatcagtgcatgaacttccatgc

SEQ ID NO: 304739 - DNA, 75 bp, synthetic construct
  source 1..75: mol_type = other DNA
gcgaaaaagcggtttacagcaaaacttattattccatcggcggtggctttatcgtcgatgaagagcatttcggtc

SEQ ID NO: 304740 - DNA, 75 bp, synthetic construct
  source 1..75: mol_type = other DNA
tggcactgcgccgtaccagcgagccgcgcgtctgcctcgataaagttatcgaaaccatgtacgaaacaggtaaag

SEQ ID NO: 304741 - DNA, 75 bp, synthetic construct
  source 1..75: mol_type = other DNA
attgctgctgcgtttgtggctgcggcggttctcatctggaaatactgggaacccattaaggcgttttatgccggg

SEQ ID NO: 304742 - DNA, 75 bp, synthetic construct
  source 1..75: mol_type = other DNA
gaatgctgtcagactcctgccagcactatggggaatggtgacgggttccgtttcgttactggggggcgctatcgg

SEQ ID NO: 304743 - DNA, 75 bp, synthetic construct
  source 1..75: mol_type = other DNA
gcgcgtgtgcctcgataaggtcatcgaaaccatgtatgaaacaggcaaagacatgaacgccaagtaccgcgaaac

SEQ ID NO: 304744 - DNA, 75 bp, synthetic construct
  source 1..75: mol_type = other DNA
gtgttcagcgggattatggaaaggctgaccccgttgcgcgaaacctttgaacggtttggccctgtttttgacgca

SEQ ID NO: 304745 - DNA, 75 bp, synthetic construct
  source 1..75: mol_type = other DNA
gggaaattcagaaaatgcgggagcttggcggagagctgaaacgccacggcatttcactgacaggcagcgataaca

SEQ ID NO: 304746 - DNA, 75 bp, synthetic construct
  source 1..75: mol_type = other DNA
gcgaatatgggtatcaggggaagtgatgccgggacggcaatgcgtgccagcctggctcgtctggcatcaccgcca

SEQ ID NO: 304747 - DNA, 75 bp, synthetic construct
  source 1..75: mol_type = other DNA
gataagaccacaactgacccaatggcggttgtcgactggatcaacatgttcgcactggcggtaaacgaagaaaac

SEQ ID NO: 304748 - DNA, 75 bp, synthetic construct
  source 1..75: mol_type = other DNA
cgccttaagccagatggtcgaaaactacgaaacgctgattttcgaagcgcactctaccgattatcaaacgccgca

SEQ ID NO: 304749 - DNA, 75 bp, synthetic construct
  source 1..75: mol_type = other DNA
gatcgcccggaatactggcaaagccactaccacggtgacggcaacgcacgtcgtctggcacgcggttacagctac

SEQ ID NO: 304750 - DNA, 75 bp, synthetic construct
  source 1..75: mol_type = other DNA
aaatcactcagcagtgcatgggaagggttgcgcatccgcattgcagatctgattgacggtccgctgcgttctgtc

SEQ ID NO: 304751 - DNA, 75 bp, synthetic construct
  source 1..75: mol_type = other DNA
ttcgcggatattggtcagactctggcaaaatattttggtacttctgatatggaatatggcaaagccatgttctga

SEQ ID NO: 304752 - DNA, 75 bp, synthetic construct
  source 1..75: mol_type = other DNA
aacgcgctaatctgccgggttacctcggtaactgccactcctccggtacggtcattctggatcagctgggcgaag

SEQ ID NO: 304753 - DNA, 75 bp, synthetic construct
  source 1..75: mol_type = other DNA
taccttcgatcatagcgttaaccactacaccaacagcgtcggcaaaatcctcggtccacaggacgatatttactg

SEQ ID NO: 304754 - DNA, 75 bp, synthetic construct
  source 1..75: mol_type = other DNA
gcaccgaccgtgctgcagaaactggttgatgaaaaacacggtcaggtggtttctgtcggtaaaattgcagacatc

SEQ ID NO: 304755 - DNA, 75 bp, synthetic construct
  source 1..75: mol_type = other DNA
ttatgcggcgggtctggaactgttcgaccgccgtctgccggagctgatgtctctgctgcgcgatgacgacatcct

SEQ ID NO: 304756 - DNA, 75 bp, synthetic construct
  source 1..75: mol_type = other DNA
ggtcactgggaaatcgccggtgtcccggttctgtttgagtggggatacttctccgatcacgaaaacagcttcccg

SEQ ID NO: 304757 - DNA, 75 bp, synthetic construct
  source 1..75: mol_type = other DNA
ctgaaaacaggtggtgcactggcaattggtgcggcagcggcgggcggctatgctgccgggcgttttttgcagcct

SEQ ID NO: 304758 - DNA, 75 bp, synthetic construct
  source 1..75: mol_type = other DNA
tctgggccgtatcgttaccgagatcttcgaagaagtggcagaagcacatctgattcagccgaccttcattactga

SEQ ID NO: 304759 - DNA, 75 bp, synthetic construct
  source 1..75: mol_type = other DNA
ccacccgcaaatacggggaagttgaccgggtatcgttctttaaggacattgccggagaagaggctttcacatcat

SEQ ID NO: 304760 - DNA, 75 bp, synthetic construct
  source 1..75: mol_type = other DNA
ccggttctcaagaaaatggttcagaaaccatggactcccggcccggccccgtcagataaggtcgacgacaaaaaa

SEQ ID NO: 304761 - DNA, 75 bp, synthetic construct
  source 1..75: mol_type = other DNA
atgcgtgccagcctggctcgtctggcatcaccgccaaaggcggcagcagaggcgctgaaagagcttggtgtggct

SEQ ID NO: 304762 - DNA, 75 bp, synthetic construct
  source 1..75: mol_type = other DNA
gggtatcagggggagtgatgctggtacggcaatgcgtgccagcctggctcgtctggcatcaccgccaaaggcggc

SEQ ID NO: 304763 - DNA, 75 bp, synthetic construct
  source 1..75: mol_type = other DNA
aagcagaaggctggttaacgcgtaaggcgcgtcgccagggtaaccgcaatgcgtcgaatgtttatcagcttaacg

SEQ ID NO: 304764 - DNA, 75 bp, synthetic construct
  source 1..75: mol_type = other DNA
tttcgtccagagtctgcttgaaaacgcggcacgggccattgccaccagcattaatctgttcgatcccgatgcggt

SEQ ID NO: 304765 - DNA, 75 bp, synthetic construct
  source 1..75: mol_type = other DNA
tgcgcgtgtggcaatcctgggtgcctggaaaccaattgctctggaatggcgctaagacgctggtacgaacaacag

SEQ ID NO: 304766 - DNA, 75 bp, synthetic construct
  source 1..75: mol_type = other DNA
ccccgaaattacccattgagcgatcttttcgtccatgcggaaaacgcccctttcgtccagagtctgcttgaaaac

SEQ ID NO: 304767 - DNA, 75 bp, synthetic construct
  source 1..75: mol_type = other DNA
ggaaataagagcttccattaaagattacgatgacttattgcgagaaattaaagagttaaccataagtcgggataa

SEQ ID NO: 304768 - DNA, 75 bp, synthetic construct
  source 1..75: mol_type = other DNA
acgcgagaatcaatataaagctaataaaaaaatcagtaacgcgatgcttaatattctggattggttcgaacggta

SEQ ID NO: 304769 - DNA, 75 bp, synthetic construct
  source 1..75: mol_type = other DNA
ttgccacagttctgtgctaaggaaggtgcgaataagcggggaaattcttctcggctgactcagtcatttcatttc

SEQ ID NO: 304770 - DNA, 75 bp, synthetic construct
  source 1..75: mol_type = other DNA
tacgatgacttattgcgagaaattaaagagttaaccagaagtcgtgataaattagtagatgataagaggacttta

SEQ ID NO: 304771 - DNA, 75 bp, synthetic construct
  source 1..75: mol_type = other DNA
aagtggcggacctggaagccgctggaattggcatcattcagattgacgaaccggcattgcgcgaaggtttaccac

SEQ ID NO: 304772 - DNA, 75 bp, synthetic construct
  source 1..75: mol_type = other DNA
aattggcatcattcagattgacgaaccggcattgcgcgaaggtttaccactgcgtcgcagcgactgggatgccta

SEQ ID NO: 304773 - DNA, 75 bp, synthetic construct
  source 1..75: mol_type = other DNA
gggcaccaataacgtggctgtctctatcgacgcggtgcattactgcgtgaaggcgcgtggcatccgcgatgcaac

SEQ ID NO: 304774 - DNA, 75 bp, synthetic construct
  source 1..75: mol_type = other DNA
gtttgatggaaacgccgcatcgcattgccaaaatgtatgtcgatgaaattttctctggtctggattacgccaact

SEQ ID NO: 304775 - DNA, 75 bp, synthetic construct
  source 1..75: mol_type = other DNA
cggtggtggcgaaaacccgccgtaacctggaagcggatgtgacgctgttctgcgatgttctgtgtgatacggacc

SEQ ID NO: 304776 - DNA, 75 bp, synthetic construct
  source 1..75: mol_type = other DNA
aaacggacatgccagatgctgacgtcgccgcaacgcgaaagttattgcttgagacgggcttcgaagagccgattt

SEQ ID NO: 304777 - DNA, 75 bp, synthetic construct
  source 1..75: mol_type = other DNA
atgacgcagtatcaactgaaacaaaacgaaagattaatgtcgcagcaatctgaactggagaggaaagtgaaacat

SEQ ID NO: 304778 - DNA, 75 bp, synthetic construct
  source 1..75: mol_type = other DNA
actaccacggtgacggcaacgcgcgtcgtctggcgcgtggttatagctactcggatcgcgtgcgctattactggc

SEQ ID NO: 304779 - DNA, 75 bp, synthetic construct
  source 1..75: mol_type = other DNA
tctgggacgcttgcgcatcttcggggatgaaactatccagcgtggcaatcatggcgcgcctggctgacttcagca

SEQ ID NO: 304780 - DNA, 75 bp, synthetic construct
  source 1..75: mol_type = other DNA
cgttgattctgggtggcgatcatctggggccaaaccgctggcaaaacctgcctgcagctcaggcgatggcaaatg

SEQ ID NO: 304781 - DNA, 75 bp, synthetic construct
  source 1..75: mol_type = other DNA
acgccacgggaactcattatcaaccatattcaggacatcctggcgcagtaccacacagcctgtgaaggccaataa

SEQ ID NO: 304782 - DNA, 75 bp, synthetic construct
  source 1..75: mol_type = other DNA
cgctcatctggtacgtaatctggcggattcaccaattccgctaccgctcatcagccagtatctgccgctgcaata

SEQ ID NO: 304783 - DNA, 75 bp, synthetic construct
  source 1..75: mol_type = other DNA
ccgtgagcaggtactggccgtgtacggtccggtgcatgcccggttgctgcgtcaggcactggaactgatcgccgg

SEQ ID NO: 304784 - DNA, 75 bp, synthetic construct
  source 1..75: mol_type = other DNA
gcgtgcagcaactggtggattatctggcatctctcaccgaacaggaggaagcaggtgaaaaaactcatcacagcg

SEQ ID NO: 304785 - DNA, 75 bp, synthetic construct
  source 1..75: mol_type = other DNA
accctcgcgcgaaaaacacaggctgtggaatttaataataagggtgatattgatacgccaggtgaatattttagc

SEQ ID NO: 304786 - DNA, 75 bp, synthetic construct
  source 1..75: mol_type = other DNA
gcacgcacacagaaaaacgtgaagacccgtacttcaaagccagttacgacaacgtggactacagccagatcccgg

SEQ ID NO: 304787 - DNA, 75 bp, synthetic construct
  source 1..75: mol_type = other DNA
aaaacttctcgtccggacgcttcgcaaccggacacgcagacggctgaacaggattttttaactcgccatcctgat

SEQ ID NO: 304788 - DNA, 75 bp, synthetic construct
  source 1..75: mol_type = other DNA
aaagatgatgagacaccgttatccgttgcggagcgcgcccgccgaaatctggaggcagatgttgaactattcatt

SEQ ID NO: 304789 - DNA, 75 bp, synthetic construct
  source 1..75: mol_type = other DNA
tcgaagaagtttcgccagaagagtggcaggccgaagcggaaaccgtggagattgtcgaagcggcggaagaacaag

SEQ ID NO: 304790 - DNA, 75 bp, synthetic construct
  source 1..75: mol_type = other DNA
cggattccgcctctgttatcttcgacgccattcaggctgcgaaggcgcgtaatgttgacgtactgattgccgata

SEQ ID NO: 304791 - DNA, 75 bp, synthetic construct
  source 1..75: mol_type = other DNA
ccgtagagattgtcgaagcggcggaagaagaagcggctaaagaagaaatcaccgacgaagagctggaagcacagg

SEQ ID NO: 304792 - DNA, 75 bp, synthetic construct
  source 1..75: mol_type = other DNA
ttttcggtgtcacatgatgcgaggaattttgccgccggtgccagtctgccgtatggctataccctggtggattac

SEQ ID NO: 304793 - DNA, 75 bp, synthetic construct
  source 1..75: mol_type = other DNA
agagcctgcgaaagtagctgaacaagctgttgaagagcagccgcaggttcatactgaagccggggcggaaacttt

SEQ ID NO: 304794 - DNA, 75 bp, synthetic construct
  source 1..75: mol_type = other DNA
ggcagaagaagagcagccggttgaagaaattgcccaggagcaggaaaaaccgaccaaagaaggtttcttcgcgcg

SEQ ID NO: 304795 - DNA, 75 bp, synthetic construct
  source 1..75: mol_type = other DNA
aaatcgtcgaagtccttggcgataatatgggcaccggcatggcggttgatatcgctctgcgtacccatgaaattc

SEQ ID NO: 304796 - DNA, 75 bp, synthetic construct
  source 1..75: mol_type = other DNA
cgcaggcagcaggcattgccactaccacggcgacgtctaccgcggcggcggcggccacaactgcagcatggacgc

SEQ ID NO: 304797 - DNA, 75 bp, synthetic construct
  source 1..75: mol_type = other DNA
acgattattgccgacggctcgggactttcacgccataacctgattgcgcctgccaccatgatgcaggtgctgcaa

SEQ ID NO: 304798 - DNA, 75 bp, synthetic construct
  source 1..75: mol_type = other DNA
caacgccgctggacagagaagcgcgtaatcgtggtacgtcggtgtacttcccttcgcaggttatcccgatgctgc

SEQ ID NO: 304799 - DNA, 75 bp, synthetic construct
  source 1..75: mol_type = other DNA
gggtgaatccagcggccagacttatcgcctgggcgatcgcgtggaagttcgcgtcgaagcggttaatatggacga

SEQ ID NO: 304800 - DNA, 75 bp, synthetic construct
  source 1..75: mol_type = other DNA
ggctaccattattcgatggaagagatgctgcaattgggtcagcactgttcgatggcggaacgtcgtgccgacgaa

SEQ ID NO: 304801 - DNA, 75 bp, synthetic construct
  source 1..75: mol_type = other DNA
gcggacagaagaataccggtacggggcagttaaatggagtcccttcctttaataatcctctgggctggctgacaa

SEQ ID NO: 304802 - DNA, 75 bp, synthetic construct
  source 1..75: mol_type = other DNA
ttcaccgttgggctgcctctcgtttacccggactggctcggcccggatcacgtcactgtttactaccgcgttgcc

SEQ ID NO: 304803 - DNA, 75 bp, synthetic construct
  source 1..75: mol_type = other DNA
gttcgcctcctggcaaggccggtgccttgatatgagccggattcagcaacttaccaatacagtttcggactggta

SEQ ID NO: 304804 - DNA, 75 bp, synthetic construct
  source 1..75: mol_type = other DNA
tgcgggatattgagcaggggatggagcagattaaccgtctgcgtacggagccggtacagattgaaatatcgcccg

SEQ ID NO: 304805 - DNA, 75 bp, synthetic construct
  source 1..75: mol_type = other DNA
agaaagaactcgcttttcttagaaaacaaggtattgagtttgcaaaaaaatatccaaaggtagcccggcgtcttg

SEQ ID NO: 304806 - DNA, 75 bp, synthetic construct
  source 1..75: mol_type = other DNA
tttttctcttgattttgtaaggttttatctaaattgcccttcaacaattgcaggtgtcatatatacattattatg

SEQ ID NO: 304807 - DNA, 75 bp, synthetic construct
  source 1..75: mol_type = other DNA
tggccgcaccctgaagatggtttttccgggaatggagggaaaggttctgaacctgcgggatattgagcaggggat

SEQ ID NO: 304808 - DNA, 75 bp, synthetic construct
  source 1..75: mol_type = other DNA
gcgaggaattttgccgccggtgtcagtctgtcgtatggctataccctggtggattatacgtattcatggagtgac

SEQ ID NO: 304809 - DNA, 75 bp, synthetic construct
  source 1..75: mol_type = other DNA
ctgcgaaatgagctgtcctggtctctgttctccctgccatatgtgggaactgtccgtgcagtgactgcactggac

SEQ ID NO: 304810 - DNA, 75 bp, synthetic construct
  source 1..75: mol_type = other DNA
ctcgatcgggaataccgtactgaacagcctcatcaacaccttcgtccagatgggcgttgagtgggttaaatcggc

SEQ ID NO: 304811 - DNA, 75 bp, synthetic construct
  source 1..75: mol_type = other DNA
tatctccggtaataacggcggttatctgcgaaatgagctgtcctggtctctgttctccctgccatatgtgggaac

SEQ ID NO: 304812 - DNA, 75 bp, synthetic construct
  source 1..75: mol_type = other DNA
tgaccagcgcttatgcccagtggtcaccggaccgtcttcatggtgtggaacaactgagcctcgggggtgagagtt

SEQ ID NO: 304813 - DNA, 75 bp, synthetic construct
  source 1..75: mol_type = other DNA
aacttgtcgatctggcaagagaggcagccaatgcgaagatcaatgtagacagcctgaataagtccacggataacc

SEQ ID NO: 304814 - DNA, 75 bp, synthetic construct
  source 1..75: mol_type = other DNA
gattgaccagctgtatagcgttcagtgttcaggccgcaaatgttgatgagtacattactcaactccccgctggtg

SEQ ID NO: 304815 - DNA, 75 bp, synthetic construct
  source 1..75: mol_type = other DNA
atggatgcactacaaacacaaactgttattagtacaaccgcgccgcagcccaactacattccggggctgattgcg

SEQ ID NO: 304816 - DNA, 75 bp, synthetic construct
  source 1..75: mol_type = other DNA
tctattgaattaaatcaaaaagcaaaatgcattcgtccaataatttttttaagggataatatatttaggtcgcta

SEQ ID NO: 304817 - DNA, 75 bp, synthetic construct
  source 1..75: mol_type = other DNA
aaaataatatagtatcacttcttgaacgctcagacaggaaagttgtcatattaatggataagctagatgaggcgt

SEQ ID NO: 304818 - DNA, 75 bp, synthetic construct
  source 1..75: mol_type = other DNA
atggctgaaagtactgtaacggcagacagcaaactgacaagtagtgatactcgtcgccgcatttgggcgattgtg

SEQ ID NO: 304819 - DNA, 75 bp, synthetic construct
  source 1..75: mol_type = other DNA
gaacgtgcgaccgggaaaatcagcatgtttctggcgcagcgcgaacggcgtttataccaaaaaatggcgcaatac

SEQ ID NO: 304820 - DNA, 75 bp, synthetic construct
  source 1..75: mol_type = other DNA
gcgccctatagcgaggtgctggaacgggcgctacaggccgtttcgttagtcgccattgtttctgaccgccgaagc

SEQ ID NO: 304821 - DNA, 75 bp, synthetic construct
  source 1..75: mol_type = other DNA
tagcgaaatttttacaggatgccactgttgctggtgaagcaacaattattaaatctattccaggtcctgaaatcg

SEQ ID NO: 304822 - DNA, 75 bp, synthetic construct
  source 1..75: mol_type = other DNA
ggcgaattatcggcagagaaaatcgatgaagtgatgctgatcttaagcaacctgcgcgaaggctgggaagggctt

SEQ ID NO: 304823 - DNA, 75 bp, synthetic construct
  source 1..75: mol_type = other DNA
ggcggtctggacattaacccgtggcgcagtaatagcgattttgtcccatcgaccacaagactggttcggcaataa

SEQ ID NO: 304824 - DNA, 75 bp, synthetic construct
  source 1..75: mol_type = other DNA
agggcagcaacaagactattatggcgatacgctatgctaatggagatagcatcatatatatcatctcattacaaa

SEQ ID NO: 304825 - DNA, 75 bp, synthetic construct
  source 1..75: mol_type = other DNA
gcatcgtttatgaaatcagcgccgacgttgagccgctgttgcagggcgggaaacaggccattgatgctctggata

SEQ ID NO: 304826 - DNA, 75 bp, synthetic construct
  source 1..75: mol_type = other DNA
tatttgcagaattacgcacgatggcaacacaacgaggtattagtattcccgcgttagttaacgtcatacttaaag

SEQ ID NO: 304827 - DNA, 75 bp, synthetic construct
  source 1..75: mol_type = other DNA
aacaattggcacctgggctccggcgttgttacttctcgcgcgtttattccagggattatctgtaggtggagaata

SEQ ID NO: 304828 - DNA, 75 bp, synthetic construct
  source 1..75: mol_type = other DNA
tccagtgaacgcgcaccgcgcaacgtcggtaaaacggcgcgcgagaaagcgaaaaaaggcgatgcaggcaaaaaa

SEQ ID NO: 304829 - DNA, 75 bp, synthetic construct
  source 1..75: mol_type = other DNA
atcttcttcccttccgggaacacgacgactcaactactacaaacagcaggtgtttttgctgcgggattcctgatg

SEQ ID NO: 304830 - DNA, 75 bp, synthetic construct
  source 1..75: mol_type = other DNA
atggaaacagccttcttctggtatgtgacattgatggccgtggtggcgtttctggtttctctgatgttgcatcgc

SEQ ID NO: 304831 - DNA, 75 bp, synthetic construct
  source 1..75: mol_type = other DNA
ctgaaccgctttacgctgacgggatgcctgccacaacgttctgagccgctcccgttggcttttgccgtgcaggat

SEQ ID NO: 304832 - DNA, 75 bp, synthetic construct
  source 1..75: mol_type = other DNA
tacgttactcaactccccgctggtgccaaccttgccctgatggtgcaaaaagtcggcgcgtcggcccccgctatt

SEQ ID NO: 304833 - DNA, 75 bp, synthetic construct
  source 1..75: mol_type = other DNA
gtttctggaaggaagtgttgacgagcaggttgagcgttttcgacaggcatttccgaaaacagaagaagagatgga

SEQ ID NO: 304834 - DNA, 75 bp, synthetic construct
  source 1..75: mol_type = other DNA
attctttcggcattgcagaacgtctcctcaccttatgcggcttttggtttggtgatgtgtgccctgctgattgtg

SEQ ID NO: 304835 - DNA, 75 bp, synthetic construct
  source 1..75: mol_type = other DNA
tccttaaagcagaaatgtttccggcacaggttcgcgccctgggcgtcggcctttcttatgcagttgctaacgcct

SEQ ID NO: 304836 - DNA, 75 bp, synthetic construct
  source 1..75: mol_type = other DNA
caaaaaatcgatgctgttatcggtgtgtatgatgtgtttcggatcgctggttatcgcctgcctcccaggttatga

SEQ ID NO: 304837 - DNA, 75 bp, synthetic construct
  source 1..75: mol_type = other DNA
tttaccgttcctattctctcagcattgcaaaacgtttcctcgccttatgccgcttttggtctggtgatgtgtgcc

SEQ ID NO: 304838 - DNA, 75 bp, synthetic construct
  source 1..75: mol_type = other DNA
tgtgccctgctgatagtgagtttttatacatcaatcagtggaatactgaaggctgagatgttcccggcacaggtt

SEQ ID NO: 304839 - DNA, 75 bp, synthetic construct
  source 1..75: mol_type = other DNA
ttattgcttctcgctcgtttatttcagggattatccgttggcggagaatatggcaccagcgccacctatatgagt

SEQ ID NO: 304840 - DNA, 75 bp, synthetic construct
  source 1..75: mol_type = other DNA
ggtacaattcaggtcgcaagccaggagggaaaaggcgcaacgttcaccctctggcttccggtcactattacgcgt

SEQ ID NO: 304841 - DNA, 75 bp, synthetic construct
  source 1..75: mol_type = other DNA
cgctgattaaccactcattacagctggtaagccaggatgcaaacagccgggagatccagttacgctttaccgcca

SEQ ID NO: 304842 - DNA, 75 bp, synthetic construct
  source 1..75: mol_type = other DNA
caagccaggagggaaaaggctcaacgttcaccctctggcttccggtcaatattacgcgtaaggacccacaaggat

SEQ ID NO: 304843 - DNA, 75 bp, synthetic construct
  source 1..75: mol_type = other DNA
ggctctcgaaaaccttggtttgggagaagcggcaaaacgaaatgtgggcaacggggaaaaccaaatccctgatat

SEQ ID NO: 304844 - DNA, 75 bp, synthetic construct
  source 1..75: mol_type = other DNA
agctggtggcgctgggacatctggccgcaggcgtcgcccatgaaatccgtaacccgctttcctcgattaaagggc

SEQ ID NO: 304845 - DNA, 75 bp, synthetic construct
  source 1..75: mol_type = other DNA
gattatcctcttcgccctggcgacggtcttgctggcaagcgtgttgtcattcttctggtatcgccgatatctgcg

SEQ ID NO: 304846 - DNA, 75 bp, synthetic construct
  source 1..75: mol_type = other DNA
ctatccacagcggcgggttattttacacggcactatgctggcggcggcagagtcggcgcgttatatcgttcatgg

SEQ ID NO: 304847 - DNA, 75 bp, synthetic construct
  source 1..75: mol_type = other DNA
ttgtgccgcagaacgactggaacatcaggagtttgttttaacgtataaagcatttgattacagcaaaagtgcagt

SEQ ID NO: 304848 - DNA, 75 bp, synthetic construct
  source 1..75: mol_type = other DNA
cgattgcgttcagtgatttagttattggtacgatttgcggcggttccgacggcaccagcggcattacgggcaatc

SEQ ID NO: 304849 - DNA, 75 bp, synthetic construct
  source 1..75: mol_type = other DNA
atcgctttcgacgccagtaatattgtgagtgccgaagatcgtgagcagagaaacaccctgattatcctcttcgcc

SEQ ID NO: 304850 - DNA, 75 bp, synthetic construct
  source 1..75: mol_type = other DNA
aacacccactctatttaaataccgtctttttgtcactgtgtgtcactggttgtcactctccgtcacggtatgtca

SEQ ID NO: 304851 - DNA, 75 bp, synthetic construct
  source 1..75: mol_type = other DNA
taatttcctgcaatggtatgtttctgagcagcatgaagaagagaaactgttcaaatcgatggtaatgactccaac

SEQ ID NO: 304852 - DNA, 75 bp, synthetic construct
  source 1..75: mol_type = other DNA
agtataggcgaattttttagtgtttatgatcggcatttttcatcttgggtatcttcttatttttttctaggtaga

SEQ ID NO: 304853 - DNA, 75 bp, synthetic construct
  source 1..75: mol_type = other DNA
atgacacaagaagaaaaagtgatgtttctgatgcggctggctgtcgatacttacaacacacaatttacggagaaa

SEQ ID NO: 304854 - DNA, 75 bp, synthetic construct
  source 1..75: mol_type = other DNA
gcgtgttattgctacgattgcttttggtcactttgatcttatgctggggggggcaggcagccgcttataccggta

SEQ ID NO: 304855 - DNA, 75 bp, synthetic construct
  source 1..75: mol_type = other DNA
atgagctttgtggttagtgaggaagtgacggtcaaagagggcggcccgaagatgattgttactgggtattccagc

SEQ ID NO: 304856 - DNA, 75 bp, synthetic construct
  source 1..75: mol_type = other DNA
atggtgagtcgtgcagccactgtgccgcccgttcaacggattgaggcaccgatgcagatcatcattcagacgcag

SEQ ID NO: 304857 - DNA, 75 bp, synthetic construct
  source 1..75: mol_type = other DNA
taacgcaacgcttcggcactgttacccctgctgctccagcgcatacttatacagcgcatttttcttcacgccgtg

SEQ ID NO: 304858 - DNA, 75 bp, synthetic construct
  source 1..75: mol_type = other DNA
ctctgttaacacccgattcacacagataaaaaacaacacggtatattctgctgcaacccaaacgggtgtttgcca

SEQ ID NO: 304859 - DNA, 75 bp, synthetic construct
  source 1..75: mol_type = other DNA
atgccatttgctcgttatttctgcattttcataaacgttggtttgggagaagcggcgaaacgaaatgtgggaaca

SEQ ID NO: 304860 - DNA, 75 bp, synthetic construct
  source 1..75: mol_type = other DNA
actgtcgtcattcctcaaatcgtcctggcgaacctgtatgagtgttacaacatcccggcatccagtagctgcacg

SEQ ID NO: 304861 - DNA, 75 bp, synthetic construct
  source 1..75: mol_type = other DNA
tttattatcctcaatatttaaaaaaagtaaaagaagaaataagccgaatattcacaggtaaagattatcaggttt

SEQ ID NO: 304862 - DNA, 75 bp, synthetic construct
  source 1..75: mol_type = other DNA
acggttacggggtcaagcgggaagcttttcatgaaaccgagcttgttccaggggaggggagtcgtcctgcggaag

SEQ ID NO: 304863 - DNA, 75 bp, synthetic construct
  source 1..75: mol_type = other DNA
atgccagccaaagccagggtaaacgccatgacatcattcagcttggtggggaaaatctggctgcagggttaaatg

SEQ ID NO: 304864 - DNA, 75 bp, synthetic construct
  source 1..75: mol_type = other DNA
gtgagactcgccccgctctaccgcaacgcccttctattaacaggacttttactttcaggaatagccgcagttcag

SEQ ID NO: 304865 - DNA, 75 bp, synthetic construct
  source 1..75: mol_type = other DNA
ttgtttaccaccggacgaggttcagtgatcggctccgtaattgcgccagtgattaaagtctgtaacaacccacaa

SEQ ID NO: 304866 - DNA, 75 bp, synthetic construct
  source 1..75: mol_type = other DNA
attccagcttgtaatttgtattttttatttttccattcctttctcattaatgatttatggtgaaacctatgtcag

SEQ ID NO: 304867 - DNA, 75 bp, synthetic construct
  source 1..75: mol_type = other DNA
ggtccctgctttacggtgtcaagcattgttgtcagtggggccacccgactgacgtctgcagaaaccgacagactg

SEQ ID NO: 304868 - DNA, 75 bp, synthetic construct
  source 1..75: mol_type = other DNA
tgacaggggatgtcctttcaattgatgtaatatgtacaaatggtgatattccatcatcaattaataatggcgatc

SEQ ID NO: 304869 - DNA, 75 bp, synthetic construct
  source 1..75: mol_type = other DNA
ctggactgccgatattccggtgggcaccttatgcccggaatgggcgcagcgtctcggcttgcctgaaagcgtggt

SEQ ID NO: 304870 - DNA, 75 bp, synthetic construct
  source 1..75: mol_type = other DNA
tagcttcatctttgtttttgaaggaaaaaacgaactcaatgcaaattatgggtttaactatcgcaatagttgcac

SEQ ID NO: 304871 - DNA, 75 bp, synthetic construct
  source 1..75: mol_type = other DNA
tattcctgctggtttcactgacctggggaaccacatggctggctatgcggatagccgctgaaactatccctccag

SEQ ID NO: 304872 - DNA, 75 bp, synthetic construct
  source 1..75: mol_type = other DNA
aggaatcttgctccccaatttttgtaccactacccttcatcatgtattgtttcatttgaaccagataagaattcc

SEQ ID NO: 304873 - DNA, 75 bp, synthetic construct
  source 1..75: mol_type = other DNA
gattaccccagtttcatctcgtttgcccaatatatatccacctgtaacggctcgtggcattgatattacagtcat

SEQ ID NO: 304874 - DNA, 75 bp, synthetic construct
  source 1..75: mol_type = other DNA
cggatttggtgagcttgatattacactaccacgtacgggaaatgtttcatacatacacaacctcacgcttgacta

SEQ ID NO: 304875 - DNA, 75 bp, synthetic construct
  source 1..75: mol_type = other DNA
tttttcgtttccagaacgatttaactttattgatataaaatttgactccggaattgagttatgttcagggagttc

SEQ ID NO: 304876 - DNA, 75 bp, synthetic construct
  source 1..75: mol_type = other DNA
tttttcatttgctgaaagattcaactttattgatataaaatttgactctgaaattgagttatgctcgggggattc

SEQ ID NO: 304877 - DNA, 75 bp, synthetic construct
  source 1..75: mol_type = other DNA
atgaataaactgttatcttactatcagaaagaactttcttttcttaaaaaacaagggactgagtttgccagaaaa

SEQ ID NO: 304878 - DNA, 75 bp, synthetic construct
  source 1..75: mol_type = other DNA
cgatttttgctgccgtcgccgcgaaagtgcacgcagacatcccatcagcccagcaaaaaatggccagtgcggtag

SEQ ID NO: 304879 - DNA, 75 bp, synthetic construct
  source 1..75: mol_type = other DNA
atgattactaaaaatttccgacttaatgcgctggcgaataagtatgcgtcggcactgtataaccacattacggct

SEQ ID NO: 304880 - DNA, 75 bp, synthetic construct
  source 1..75: mol_type = other DNA
tgcttattgctgcaggtgactcatccaaaaacttcatttctaaagtgctgtctttaactccagttgtttatgtag

SEQ ID NO: 304881 - DNA, 75 bp, synthetic construct
  source 1..75: mol_type = other DNA
gtatcttcgataaaaacggtgacgtatcggagaatgcttaccagttgcaatctgaagcaataaaatatctgctgt

SEQ ID NO: 304882 - DNA, 75 bp, synthetic construct
  source 1..75: mol_type = other DNA
aagcgcccgccagcgggagattttaaccatgttagcggctggctgtaaaaatattatggttcgccgtacaaacca

SEQ ID NO: 304883 - DNA, 75 bp, synthetic construct
  source 1..75: mol_type = other DNA
cactggagcacctcaaaaacaccatcatacactaaatcagtaagttggcagcatcaccttcagggggccagtcag

SEQ ID NO: 304884 - DNA, 75 bp, synthetic construct
  source 1..75: mol_type = other DNA
aagagtcgaaagatctcgcatcattaagcgcccgccagcgggaaattttaaccatgctggcggcaggcgaatcga

SEQ ID NO: 304885 - DNA, 75 bp, synthetic construct
  source 1..75: mol_type = other DNA
cattaatgagtcgtgttggtaaagatgccgcaggacaatttattctcgaccattgccgcaaagagaatattgata

SEQ ID NO: 304886 - DNA, 75 bp, synthetic construct
  source 1..75: mol_type = other DNA
aaatcctgcatgtgactcgccaggacagcgccgtggcgcaatctgccgcatcgtggattgagctgtgcgactggg

SEQ ID NO: 304887 - DNA, 75 bp, synthetic construct
  source 1..75: mol_type = other DNA
cgtgcttgcagagcttagcgccgagcagcgcgcagctgtggtcgggattggcgttgacacaaccggctcgacgcc

SEQ ID NO: 304888 - DNA, 75 bp, synthetic construct
  source 1..75: mol_type = other DNA
ggtaatgcatatgcttactttattgatgaacttgcgaaagatgctggaatatcaataacagatactacatatagc

SEQ ID NO: 304889 - DNA, 75 bp, synthetic construct
  source 1..75: mol_type = other DNA
attttgactcatctgcatttgagccgttactacacacatggtctctggctgttgaagagcagtattatataatat

SEQ ID NO: 304890 - DNA, 75 bp, synthetic construct
  source 1..75: mol_type = other DNA
tgccgcagggcaatttattctcgaccattgccgcaaagagaatattgatattcaaagcctgaagcaggacgtcag

SEQ ID NO: 304891 - DNA, 75 bp, synthetic construct
  source 1..75: mol_type = other DNA
tcgttgccgactggaaggtcgccgacgccggagaaacgctcgcgcaacaggcgtttggcgctggtgctaactgga

SEQ ID NO: 304892 - DNA, 75 bp, synthetic construct
  source 1..75: mol_type = other DNA
cgggcaccattctctgtttaaacgaagggcttggcgcggtgaaagccttgcgcgaacagtgccctgacaaaatca

SEQ ID NO: 304893 - DNA, 75 bp, synthetic construct
  source 1..75: mol_type = other DNA
ttgccacaaccgaataactcgcgagcaatcgtcaataataccgctttgctgattcgtcagaatgctggatcactg

SEQ ID NO: 304894 - DNA, 75 bp, synthetic construct
  source 1..75: mol_type = other DNA
attcgcgtggagtgtttgcttaacggtgtctatgacatggcggtagtttcgcgactggcggcagaaagttatctc

SEQ ID NO: 304895 - DNA, 75 bp, synthetic construct
  source 1..75: mol_type = other DNA
gaacaacactattctgattcaaaataaagcggctgaacgtctccgtcagaatgttggatcactggaagtcttcgg

SEQ ID NO: 304896 - DNA, 75 bp, synthetic construct
  source 1..75: mol_type = other DNA
ggcgctggcaggcgcagcaaatccagtgcaggtagctggcgatttccatgcacaaatcgacgctatctggggagg

SEQ ID NO: 304897 - DNA, 75 bp, synthetic construct
  source 1..75: mol_type = other DNA
cgatgaagtgggccgccgctggctggcaaaactgccggatgcggttgcggtatcaatggaagatcatatcaatcc

SEQ ID NO: 304898 - DNA, 75 bp, synthetic construct
  source 1..75: mol_type = other DNA
cttctggcgcagtggagccaactgcttggcgaaaccagcgcggtaatgggcactgttggtaacggcctgctgggg

SEQ ID NO: 304899 - DNA, 75 bp, synthetic construct
  source 1..75: mol_type = other DNA
atgccggacatgccaaagtaatggaaggtcgcgccgaagctgtgacttgcgctgttatgcaggctaaagaaaatg

SEQ ID NO: 304900 - DNA, 75 bp, synthetic construct
  source 1..75: mol_type = other DNA
atgaatactgttactactatgaatactgctgttaaaactgcttccgtgtctctggttgttgataacaccaaacca

SEQ ID NO: 304901 - DNA, 75 bp, synthetic construct
  source 1..75: mol_type = other DNA
tcagcaacctgatgctggcgctggcgacactgctggcgctgggttatccgctggccgatctgctaaaaaccgccg

SEQ ID NO: 304902 - DNA, 75 bp, synthetic construct
  source 1..75: mol_type = other DNA
aaaccgacggtggtggtggattacgctcacacgccagatgcgttggaaaaagccttacaggcggcgcgtctgcac

SEQ ID NO: 304903 - DNA, 75 bp, synthetic construct
  source 1..75: mol_type = other DNA
acgcaaaaaggcttatgcctcgcgctggagttggggccgcatacctacgttggcgagcaccagttgatttgccgt

SEQ ID NO: 304904 - DNA, 75 bp, synthetic construct
  source 1..75: mol_type = other DNA
tcttgtggcgctggcggcggagaatgcagaggtgaaggcgatatgtgatgaccgtcgcaggtttatcatgaatgt

SEQ ID NO: 304905 - DNA, 75 bp, synthetic construct
  source 1..75: mol_type = other DNA
gatgattaccggtacggtgcccattctggcggtgtggttttttttgcatgggggcgtcaataaaattaagcgcga

SEQ ID NO: 304906 - DNA, 75 bp, synthetic construct
  source 1..75: mol_type = other DNA
ttgccacagccgaacaactcacgagcaattgtcaataacactgctttgctgattcgtcagaatgctggatcactg

SEQ ID NO: 304907 - DNA, 75 bp, synthetic construct
  source 1..75: mol_type = other DNA
catctgaatgccaactggctggagatgaataatcggctcagcaagggcgacttgccgtggtatcaggccaatatt

SEQ ID NO: 304908 - DNA, 75 bp, synthetic construct
  source 1..75: mol_type = other DNA
cggtttgtactttaatcaggcgcagaagcattttcagcagttattgttgatggaagaacgtgcaaccatcgcccg

SEQ ID NO: 304909 - DNA, 75 bp, synthetic construct
  source 1..75: mol_type = other DNA
gatgaagcctgactaccggatgctggcagagatgaccggcaaccgggcatttgatgcagactgggcggatgagta

SEQ ID NO: 304910 - DNA, 75 bp, synthetic construct
  source 1..75: mol_type = other DNA
gagtcgatctctcttatcacgagagtttacaacgcattgttaaaggcgatgttgatgcggttatctggaacgtgg

SEQ ID NO: 304911 - DNA, 75 bp, synthetic construct
  source 1..75: mol_type = other DNA
gtgtcgatctctcttatcacgagagtttacaacgcattgttaaaggcgatgtcgatgcggtgatctggaatgtgg

SEQ ID NO: 304912 - DNA, 75 bp, synthetic construct
  source 1..75: mol_type = other DNA
gcgtgtatgacatggcggtggtttcccgactggcggcggaaagttatctcacgcaaaaagggttatgcctcgcgc

SEQ ID NO: 304913 - DNA, 75 bp, synthetic construct
  source 1..75: mol_type = other DNA
ttcttcctcctgcttacatgtacgctcgacaatcagcacatggtcagcttgagttcacaactgactgtttaccag

SEQ ID NO: 304914 - DNA, 75 bp, synthetic construct
  source 1..75: mol_type = other DNA
tctcacccgcttattaggcgaaaaacgaggctctacgaaggtacaacgtattcttaagggattatgtgaggctaa

SEQ ID NO: 304915 - DNA, 75 bp, synthetic construct
  source 1..75: mol_type = other DNA
aaaacgctggaatctggcggtgcgatacgtattgaacgtcgtgggcgcaatggcagttatctggttgagatggat

SEQ ID NO: 304916 - DNA, 75 bp, synthetic construct
  source 1..75: mol_type = other DNA
gagttggggcgatggggaaattgaaagtcgcctgatgggcgcattcaacgtcagcaacctgctgctggcgctggc

SEQ ID NO: 304917 - DNA, 75 bp, synthetic construct
  source 1..75: mol_type = other DNA
ggtgcttatgtctgggcaccggcggttaacgccctggaaaaagacggcaaggtgctgaccgattctgaacaggtc

SEQ ID NO: 304918 - DNA, 75 bp, synthetic construct
  source 1..75: mol_type = other DNA
gaaggggaatacctatctgacgccgcagcaacaaacggtagaactgaccggaccggtgaacaaagcgatcatcga

SEQ ID NO: 304919 - DNA, 75 bp, synthetic construct
  source 1..75: mol_type = other DNA
tgggcaccggcggttaacgccctggaaaaagacggcaaggtgttgaccgattctgaacaggtcgggcagtggggt

SEQ ID NO: 304920 - DNA, 75 bp, synthetic construct
  source 1..75: mol_type = other DNA
cgactactcccgcagtaggcaatgcggcacaatttagttgcgttgcacctgcaaataaagaagtcacgatcgcaa

SEQ ID NO: 304921 - DNA, 75 bp, synthetic construct
  source 1..75: mol_type = other DNA
aagagtaaaaccgtaagcgatgttacagcgggcacattttcagcaccagcaactttctctgtgacatacaactaa

SEQ ID NO: 304922 - DNA, 75 bp, synthetic construct
  source 1..75: mol_type = other DNA
gcaaccgtggactggcgtaagtttgacagcggggccagcatcgtgcgggcattggcctcgggcgatgtgcaaatt

SEQ ID NO: 304923 - DNA, 75 bp, synthetic construct
  source 1..75: mol_type = other DNA
tcatatcgaaatcagcgctaaccagtacgccaactggggttctaaaggcgcatcagttgatcgtctcgatgtagt

SEQ ID NO: 304924 - DNA, 75 bp, synthetic construct
  source 1..75: mol_type = other DNA
atgttgggtggagcggacaatccaaatggtgaattaccgtcttatatcactggcgctgacattcctatcgtgccg

SEQ ID NO: 304925 - DNA, 75 bp, synthetic construct
  source 1..75: mol_type = other DNA
ccgccgaaaccaggcgatatggtgattatgcaggttcaggccgacaagtggaatcacgccggaatactgctggaa

SEQ ID NO: 304926 - DNA, 75 bp, synthetic construct
  source 1..75: mol_type = other DNA
taccgcccagtttttgaaagagcagggcaaagttcccgccgtggcgaatgattacagccagtttgtcacctcgcg

SEQ ID NO: 304927 - DNA, 75 bp, synthetic construct
  source 1..75: mol_type = other DNA
tgccttatccgcataacccggcaagcattgaacaggatcaggttgatctgatcgtcaaagttgatcgtgttggtg

SEQ ID NO: 304928 - DNA, 75 bp, synthetic construct
  source 1..75: mol_type = other DNA
aagcaggcattaaagtggtttccattgaatggctgcgtgaacgtgcgcgtctgctgaccggcgaaccacagccga

SEQ ID NO: 304929 - DNA, 75 bp, synthetic construct
  source 1..75: mol_type = other DNA
ttaaagagatccgcgtgaaagcgtttattgccggacgggcgctggcaggcgcagcaaatccggcgcaagtggctg

SEQ ID NO: 304930 - DNA, 75 bp, synthetic construct
  source 1..75: mol_type = other DNA
actataagctcaccagaaataaaaaataaataccctgctgccatttgcctggctctgggattttttctaagcatt

SEQ ID NO: 304931 - DNA, 75 bp, synthetic construct
  source 1..75: mol_type = other DNA
tcaacgttccattgccgcgtcgggtggcattttactctggccacagtcgcattttgactgggtgcgcccgggcat

SEQ ID NO: 304932 - DNA, 75 bp, synthetic construct
  source 1..75: mol_type = other DNA
gatgaaactcgataccggtatgcaccgtctgggcgtaaggccggaacaggctgaggcgttttatcatcgtctgac

SEQ ID NO: 304933 - DNA, 75 bp, synthetic construct
  source 1..75: mol_type = other DNA
caaaggccatgaagattaccagattgttggcaatcagcgtctggactactccgatcgcgtcacggtggcgcgtct

SEQ ID NO: 304934 - DNA, 75 bp, synthetic construct
  source 1..75: mol_type = other DNA
tacgtctcgtgggcgtaacgggcaccaacggcaaaaccacaacgactcagcttctggcgcaatggagccaactgc

SEQ ID NO: 304935 - DNA, 75 bp, synthetic construct
  source 1..75: mol_type = other DNA
ggttgcgcaaaatctccgccgggatccgcgaacgcgccagtgaaatcagtgcgctgattgttgaagaagggggca

SEQ ID NO: 304936 - DNA, 75 bp, synthetic construct
  source 1..75: mol_type = other DNA
taatgatgcttttgacattagaaaacttgagtctataaagcgagaggtaaaaatattatttattgatgataatta

SEQ ID NO: 304937 - DNA, 75 bp, synthetic construct
  source 1..75: mol_type = other DNA
ttatccgatgagtgcacgcctggtcgtggaaaaaaataaaaccgtaaacaatgtcactgcgggtaagttttctgc

SEQ ID NO: 304938 - DNA, 75 bp, synthetic construct
  source 1..75: mol_type = other DNA
tgaccatcatctgcgccgcaccgctcgcgacggtggaaaaaggccacgcgatggcgcaacgctgcggcggtgaaa

SEQ ID NO: 304939 - DNA, 75 bp, synthetic construct
  source 1..75: mol_type = other DNA
tcgctgaaatgacgaaagtaagcgcttacgaacttattacgcgcctgacttcaagagtcgcgatgaaatacgtgg

SEQ ID NO: 304940 - DNA, 75 bp, synthetic construct
  source 1..75: mol_type = other DNA
tcgcagaaatgacgaaagtgagtgcttacgaacttatcacgcgcctgacgtcaagggtggcgatgaagtacgtgg

SEQ ID NO: 304941 - DNA, 75 bp, synthetic construct
  source 1..75: mol_type = other DNA
tgaccaatggtctgaatatcgccggtggcatgatcgtggtggttggttatgcgatggttatcaacatgatgcgtg

SEQ ID NO: 304942 - DNA, 75 bp, synthetic construct
  source 1..75: mol_type = other DNA
atggaatgtcggtccctgagcatccggctaacagagttttttatgtcagaaatgaacaaaaaaacaaactctata

SEQ ID NO: 304943 - DNA, 75 bp, synthetic construct
  source 1..75: mol_type = other DNA
tgttcctggcgcagcgtgagcggcagttataccaacaaatggcgcaataccgcccggaattaatcattcgtctgg

SEQ ID NO: 304944 - DNA, 75 bp, synthetic construct
  source 1..75: mol_type = other DNA
cagcccagcaaaaaatggccagtgcggtagagaaaaccctgcaaccgcgcagcgaacaggcacaacgctttgaac

SEQ ID NO: 304945 - DNA, 75 bp, synthetic construct
  source 1..75: mol_type = other DNA
gacctgccgattatccgggattccgaaatccagaacttctgtctgcacggcacggtcggggccggtaagtcggaa

SEQ ID NO: 304946 - DNA, 75 bp, synthetic construct
  source 1..75: mol_type = other DNA
ctgtcgaatatttgaatatcggcttaaaaataagcctgtcatctcttttattaagcacaattccgtgtaaggtat

SEQ ID NO: 304947 - DNA, 75 bp, synthetic construct
  source 1..75: mol_type = other DNA
ttatgaatctgtacgaattattgagttgtctcaaaaaattacggagattattgaggggatttataacagaagggt

SEQ ID NO: 304948 - DNA, 75 bp, synthetic construct
  source 1..75: mol_type = other DNA
gatgcagcagaacgtgcacaaccagaatgggaagcgttgcctgcaattgaacgcgccagttggttgcgcaaaatc

SEQ ID NO: 304949 - DNA, 75 bp, synthetic construct
  source 1..75: mol_type = other DNA
ccgtggaacttcccgttcttcctcattgcccgcaaaatggctcccgctcttttgaccggtaataccatcgtcatt

SEQ ID NO: 304950 - DNA, 75 bp, synthetic construct
  source 1..75: mol_type = other DNA
attattcaaagcgatcgtccaggagaaaatattcttctgtttaaacgtgcgcttggcgtgactaccggcattctg

SEQ ID NO: 304951 - DNA, 75 bp, synthetic construct
  source 1..75: mol_type = other DNA
aaatcctgcatgtaactcgccaggacaacgccgtggcacaatctgccgcatcatggattgagctgtgcgactggg

SEQ ID NO: 304952 - DNA, 75 bp, synthetic construct
  source 1..75: mol_type = other DNA
tgtatatagatggacagtttgttacctggcgtggagacgcatggattgatgtggttaaccccgcaacagaggcgg

SEQ ID NO: 304953 - DNA, 75 bp, synthetic construct
  source 1..75: mol_type = other DNA
ggatggcgtaaatccggtattggcggcgcagatggcaaacatggcctgcatgaatacctgcagacccaggtggtt

SEQ ID NO: 304954 - DNA, 75 bp, synthetic construct
  source 1..75: mol_type = other DNA
gagatccagtattacggcaaaaccttccggatgaacgctgctcaggtactgcatgataaatatatgatctggtgc

SEQ ID NO: 304955 - DNA, 75 bp, synthetic construct
  source 1..75: mol_type = other DNA
gatgctgcagaacgcgcccaaccagaatgggaagcattgcctgccattgagcgcgccagttggttacgcaaaatc

SEQ ID NO: 304956 - DNA, 75 bp, synthetic construct
  source 1..75: mol_type = other DNA
atggttaaagtgctggccagtgtctggagtcaggaagccgcttctattgcgcaagagataaagcgtctaccttaa

SEQ ID NO: 304957 - DNA, 75 bp, synthetic construct
  source 1..75: mol_type = other DNA
cagcactgtggctggtcggatgcagctccggcgaaattaataaaaactattaccagttacctgtggtgcagagcg

SEQ ID NO: 304958 - DNA, 75 bp, synthetic construct
  source 1..75: mol_type = other DNA
gcggcgtcatgtccgctttctacccgcacgaatctgaattatcacgacgagttaaacaattaatcagagcagcaa

SEQ ID NO: 304959 - DNA, 75 bp, synthetic construct
  source 1..75: mol_type = other DNA
tgcaggcggttcaatttggtaaccccgctgaacgcaacgacattgctgctggatgttcgccaggaaatgtcgatt

SEQ ID NO: 304960 - DNA, 75 bp, synthetic construct
  source 1..75: mol_type = other DNA
cccggttctgccggtggtcgcatttgacacgctggaagaggctatctcaatggctaatgacagtgattacggcct

SEQ ID NO: 304961 - DNA, 75 bp, synthetic construct
  source 1..75: mol_type = other DNA
tgcagcgtcgtgaagaggtgaacattaatgtgcaccgggagcgtggggaggatgttgagccgggagatgatttct

SEQ ID NO: 304962 - DNA, 75 bp, synthetic construct
  source 1..75: mol_type = other DNA
cagcaactgccacccgggatcagtgaatccggtgaagtggtggatatggccgcttatgaggcatggcaacaggaa

SEQ ID NO: 304963 - DNA, 75 bp, synthetic construct
  source 1..75: mol_type = other DNA
cagatgcagcgccgtgaagaggtgaatatcaacgtgcaccgggagcgcggggaggatgttgagccgggagatgat

SEQ ID NO: 304964 - DNA, 75 bp, synthetic construct
  source 1..75: mol_type = other DNA
cggttgcgccacagcagcaatatcagcagccgcaacagccggttgcgccgcagcagcagtatcaacagctgcaac

SEQ ID NO: 304965 - DNA, 75 bp, synthetic construct
  source 1..75: mol_type = other DNA
ccataagattgcagagttcgctgccggtgaaattggtgagaaagagcacctgaaagccagcgagcagtattccta

SEQ ID NO: 304966 - DNA, 75 bp, synthetic construct
  source 1..75: mol_type = other DNA
ggaccgtatccggcagtaaaactctcactgaaatatcaggcacgtccgaaggttgccccggagtttattccgcgt

SEQ ID NO: 304967 - DNA, 75 bp, synthetic construct
  source 1..75: mol_type = other DNA
aaaaatattgaaaaaataaatcaatatacagagattaatcatctcgaagttaaaattgttgagagagtcgcaaga

SEQ ID NO: 304968 - DNA, 75 bp, synthetic construct
  source 1..75: mol_type = other DNA
aacgcatctttaatgacctgttacgcttctgccagccagagaaattgagcgtttacgcacgttatacccgtcgtg

SEQ ID NO: 304969 - DNA, 75 bp, synthetic construct
  source 1..75: mol_type = other DNA
gccaaattacaacaagccgaacagcgcgtgcaaattctgctgtctgacaatgaagacgcctctctaacccctttt

SEQ ID NO: 304970 - DNA, 75 bp, synthetic construct
  source 1..75: mol_type = other DNA
acgggattggcatcggtgaaccgaaagaacccgaaggtcattatggtctgaatatcatgcgcgaacgcgcggaac

SEQ ID NO: 304971 - DNA, 75 bp, synthetic construct
  source 1..75: mol_type = other DNA
tgcatactggcataaggggctgacatgttcttcctggcggagttctcagggatactttgaaatcatgctttgttc

SEQ ID NO: 304972 - DNA, 75 bp, synthetic construct
  source 1..75: mol_type = other DNA
cactggcatcaaacttgttgatggtcgttttcctgatatggaacgcatcatcccgaaaaaagtggatttcagtat

SEQ ID NO: 304973 - DNA, 75 bp, synthetic construct
  source 1..75: mol_type = other DNA
gcgcagctctggtatgcgctgcaaaaaatgatgtccgttactacctgaatggtgtgcacatcactccgaaatata

SEQ ID NO: 304974 - DNA, 75 bp, synthetic construct
  source 1..75: mol_type = other DNA
ttaccgccagtcagcgtattgaacacggtcagttcgactcaccgccgctggataccagcctgcccaatgagctgg

SEQ ID NO: 304975 - DNA, 75 bp, synthetic construct
  source 1..75: mol_type = other DNA
tgaccgccagtcagcgtattgaacacgggcagttcgactcaccgccactggataccagcctgccgaatgaactgg

SEQ ID NO: 304976 - DNA, 75 bp, synthetic construct
  source 1..75: mol_type = other DNA
acaaccttccggcggcggcacgttagtgagtattagctttcgctctgcggagggtgaggaaagtcagttaatgta

SEQ ID NO: 304977 - DNA, 75 bp, synthetic construct
  source 1..75: mol_type = other DNA
acgggattggcatcggtgaaccgaaagaacccgaaggccattatggtctgaatatatcatgcgcgaacgcgcgga

SEQ ID NO: 304978 - DNA, 75 bp, synthetic construct
  source 1..75: mol_type = other DNA
aaccacacggtctatatccgtgacaacgggattggcatcggtgaaccgaaagaacctgaaggccattatggtctg

SEQ ID NO: 304979 - DNA, 75 bp, synthetic construct
  source 1..75: mol_type = other DNA
gcaaccttctggcggtggcacgttagtgagtattagctttcgctctgcggagggtgaggaaagccagcttatttg

SEQ ID NO: 304980 - DNA, 75 bp, synthetic construct
  source 1..75: mol_type = other DNA
tgatccggcgcgtgacgaacccatcttattacgtccgggagacagcgtgcgctttgtaccgcagaaggagggagt

SEQ ID NO: 304981 - DNA, 75 bp, synthetic construct
  source 1..75: mol_type = other DNA
acctggttactgacctaccagccactggcacacatggcgttaaaactgggtatcacgccaccctgctggccgtcg

SEQ ID NO: 304982 - DNA, 75 bp, synthetic construct
  source 1..75: mol_type = other DNA
caccctatgccaggcacggaaaataatggtaatcgtacctggatggcggcaactggagagaacgaatataccgta

SEQ ID NO: 304983 - DNA, 75 bp, synthetic construct
  source 1..75: mol_type = other DNA
accgagaagcgattgcaaaagcactggagtctcttaataaagatcaaatggctaaacagttaaaaatttttggta

SEQ ID NO: 304984 - DNA, 75 bp, synthetic construct
  source 1..75: mol_type = other DNA
cttttccgtgttatgcccccccggtgttccctgaagatgggcgattaatattatctgaagcgcaggtaaacgcga

SEQ ID NO: 304985 - DNA, 75 bp, synthetic construct
  source 1..75: mol_type = other DNA
tgcagatggcaaagttgttggcgatcagcccacatccaaccgggtcatttattggatggaatcgaaaacggtgag

SEQ ID NO: 304986 - DNA, 75 bp, synthetic construct
  source 1..75: mol_type = other DNA
tatctgattaatggcgatgatgaagcaaaagaatatcagcaaattaaggctatgggagacggactctatccacaa

SEQ ID NO: 304987 - DNA, 75 bp, synthetic construct
  source 1..75: mol_type = other DNA
ttgatgcacaagaattaatctcacgcggtgcaaagttaatcgatattcgcgatgccgatgaatatcttcgtgaac

SEQ ID NO: 304988 - DNA, 75 bp, synthetic construct
  source 1..75: mol_type = other DNA
taaacgcaccagtaataatgccgataaattagcagcgattgccgccccgcagaaatctttttactcgaagatggg

SEQ ID NO: 304989 - DNA, 75 bp, synthetic construct
  source 1..75: mol_type = other DNA
tgtggttgaagccattcccggcatgaacaatatcacggtgattttgcgtaatcctgagtcgctggcgctggatgc

SEQ ID NO: 304990 - DNA, 75 bp, synthetic construct
  source 1..75: mol_type = other DNA
attctggaacgtacactatccattatactggtggtgcagtagctacagtaactgtaccaaacggtgatgtgaata

SEQ ID NO: 304991 - DNA, 75 bp, synthetic construct
  source 1..75: mol_type = other DNA
ctcaaaaaatatcattctacgaagatctaaacacaagaaaaaacaaaacattaaatgaatgcaagaagatattaa

SEQ ID NO: 304992 - DNA, 75 bp, synthetic construct
  source 1..75: mol_type = other DNA
gccaaattacaacaagccgaacagcgcgtacaaatcctgctgtctgacaacgaagacgcctctcctacacctttt

SEQ ID NO: 304993 - DNA, 75 bp, synthetic construct
  source 1..75: mol_type = other DNA
tttgtgctggtggacgcctcctgttccgccgaggcggtggcgcgtatctcgccgagaaccgcaacgttccataaa

SEQ ID NO: 304994 - DNA, 75 bp, synthetic construct
  source 1..75: mol_type = other DNA
tggcagccatcaattatatggttgaaacggtagagaaaacgccacagctgaagggcaagctgaccatcagtcacg

SEQ ID NO: 304995 - DNA, 75 bp, synthetic construct
  source 1..75: mol_type = other DNA
ttcaggacggtaaaattgttgccctgcgcgagaacaagcagcatccggacgccacgctgccgcactatgacgctg

SEQ ID NO: 304996 - DNA, 75 bp, synthetic construct
  source 1..75: mol_type = other DNA
aaaaaaagtgttcttcagatgattataacgttaaaaagttagataattctagcgatataattaatttctataatg

SEQ ID NO: 304997 - DNA, 75 bp, synthetic construct
  source 1..75: mol_type = other DNA
ttagccactggcgatatattgccgctgaatgaaaaaggcgagcgtgtgtggcctaaagcgcaggatgacgccagt

SEQ ID NO: 304998 - DNA, 75 bp, synthetic construct
  source 1..75: mol_type = other DNA
caccatccaggacatgatcacgctcgagcagaaaatgctgccggagctgcaaccctacactcaggcgcgggcgga

SEQ ID NO: 304999 - DNA, 75 bp, synthetic construct
  source 1..75: mol_type = other DNA
gaaggctcggtgaagggctacgcgggtgacaccgccaccaccagtgaaatcaaagccaaactgctggcggacgat

SEQ ID NO: 305000 - DNA, 75 bp, synthetic construct
  source 1..75: mol_type = other DNA
cagggaaaatcatccgttttgggaaagtagacaaaatttactcaggtccagtagacgaaatgttgcgtaaacaca

SEQ ID NO: 305001 - DNA, 75 bp, synthetic construct
  source 1..75: mol_type = other DNA
tggtgagaaaatcgagaaggtagaagaagtgatccgcaaatcctacggacactttctgaccaaagatagcctgct

SEQ ID NO: 305002 - DNA, 75 bp, synthetic construct
  source 1..75: mol_type = other DNA
gaaggcggccctggtggatcatgacaacatcaagagcaccgatatctctgtcaaaaccgatcaaaaagtcgtgac

SEQ ID NO: 305003 - DNA, 75 bp, synthetic construct
  source 1..75: mol_type = other DNA
atgaataaagtcggtaatttcatggatgacagcgccatcaccgcgaaagtgaaggcggccctggtggatcatgac

SEQ ID NO: 305004 - DNA, 75 bp, synthetic construct
  source 1..75: mol_type = other DNA
caaactgcacgttcgcgacgctaaagaaggctctgtgaaaggctacgcgggtgacaccgccaccaccagtgaaat

SEQ ID NO: 305005 - DNA, 75 bp, synthetic construct
  source 1..75: mol_type = other DNA
catccgcacctgaagagttaatcacgcgtatatcgcaggtcattaaacgcaaggatggatctgaagtgaaaatta

SEQ ID NO: 305006 - DNA, 75 bp, synthetic construct
  source 1..75: mol_type = other DNA
aaagcgaaagaaccggcactgttccgtattcacgacaagccgagcaccgaagcgattacctctttccgttcagta

SEQ ID NO: 305007 - DNA, 75 bp, synthetic construct
  source 1..75: mol_type = other DNA
ccatcggcgaaaacgcagaaaatagccgctgcaactaaagcgaagcgtgcggcgaagaaaaaagtggcagagtga

SEQ ID NO: 305008 - DNA, 75 bp, synthetic construct
  source 1..75: mol_type = other DNA
tgctgcaactgggtcagcactgttcgatggcggaacgccgtgccgatgaagcgacgcgtgatgtggctgactggc

SEQ ID NO: 305009 - DNA, 75 bp, synthetic construct
  source 1..75: mol_type = other DNA
aggacccggtgaccggcgagcagagcctgcgcatgcacatgtctctgcatcctttttacgtgcagaaacgaacgt

SEQ ID NO: 305010 - DNA, 75 bp, synthetic construct
  source 1..75: mol_type = other DNA
gatgtgggaccgtgaaacccgccagcgtctgccgcactatgtctggataacaccggcagggtggcagatgctggg

SEQ ID NO: 305011 - DNA, 75 bp, synthetic construct
  source 1..75: mol_type = other DNA
atgggtaaaatcttgcttgtcgtatcagataagggtggtgtaggaaaaagtacctacgtggctaacacaggctca

SEQ ID NO: 305012 - DNA, 75 bp, synthetic construct
  source 1..75: mol_type = other DNA
cggaagtgctctctaacggtctgtgctcgctcaacccgcaggtagaccgcctgtgtatggtgtgcgagatgacgg

SEQ ID NO: 305013 - DNA, 75 bp, synthetic construct
  source 1..75: mol_type = other DNA
tgacgacagccgtctgagcttcgatatcttaatcccgcccgatcagatcatgggcgcgcggatgggctttgtggt

SEQ ID NO: 305014 - DNA, 75 bp, synthetic construct
  source 1..75: mol_type = other DNA
ctggcgtttatgggtcgcgattgccgacgtcagctactatgtgcgtccgccaacgccgctggacagagaagcgcg

SEQ ID NO: 305015 - DNA, 75 bp, synthetic construct
  source 1..75: mol_type = other DNA
attggttaccattgatggtgaagatgctcgtgactttgacgatgcggtttactgcgagaaaaaacgcggcggcgg

SEQ ID NO: 305016 - DNA, 75 bp, synthetic construct
  source 1..75: mol_type = other DNA
aaggccgccgtgaagcgcgtattgtccgcgtactggtgccaaaaaccagccagattgttggtcgctactttaccg

SEQ ID NO: 305017 - DNA, 75 bp, synthetic construct
  source 1..75: mol_type = other DNA
atttccagcgtcactggattcggtttctttgttcgcctggatgatctgtttattgatggcctggtccacgtttct

SEQ ID NO: 305018 - DNA, 75 bp, synthetic construct
  source 1..75: mol_type = other DNA
actttctgaatgataacagccttctgacagccatttacattcgacatgtcgatcgggagttcgacacggagtatc

SEQ ID NO: 305019 - DNA, 75 bp, synthetic construct
  source 1..75: mol_type = other DNA
ccacgttaaaagtgggcgacggagagaaaagtattggcctgcgggcggatatggatgcgctgccaatttatgaaa

SEQ ID NO: 305020 - DNA, 75 bp, synthetic construct
  source 1..75: mol_type = other DNA
ctaccttaaaagtcggtgacggagagaaaagtattggcttgcgtgccgatatggatgcgctgccaatttatgaaa

SEQ ID NO: 305021 - DNA, 75 bp, synthetic construct
  source 1..75: mol_type = other DNA
ccagtggggctatgaggtagagcaagggctggcgacgaccggcgtggttgccaccttaaaagtgggcgacggaga

SEQ ID NO: 305022 - DNA, 75 bp, synthetic construct
  source 1..75: mol_type = other DNA
aatgagaaacaacctttttatggtgagcatcaggcgggcattctgacaccacagcaagctgcaatgatgctggtg

SEQ ID NO: 305023 - DNA, 75 bp, synthetic construct
  source 1..75: mol_type = other DNA
ctggacagccatatccggctggcgaatccccgcacgccagagagtgagtccagcctgatgctgcgtcgtggctac

SEQ ID NO: 305024 - DNA, 75 bp, synthetic construct
  source 1..75: mol_type = other DNA
acctctagtgtttcataaagttagtacttctaccggaggagggttaagtgtattcggcgcatattatttaacgag

SEQ ID NO: 305025 - DNA, 75 bp, synthetic construct
  source 1..75: mol_type = other DNA
acgatacacagcatgaatataatattgaaacttcattagattttagttctcctttgccagagccggagcgagagc

SEQ ID NO: 305026 - DNA, 75 bp, synthetic construct
  source 1..75: mol_type = other DNA
accatagacagcatgaatataatattgaaacttcattagattttagttctcctttgccagagccggagcgagagc

SEQ ID NO: 305027 - DNA, 75 bp, synthetic construct
  source 1..75: mol_type = other DNA
caagcatcaaaccggtagtagactactacattaatggagataatctctatgaaccattatcaattcccccttatg

SEQ ID NO: 305028 - DNA, 75 bp, synthetic construct
  source 1..75: mol_type = other DNA
tggtgcataaccccggatacgacttcaacgatgcaagtctggtgccggcaagtagctactggggcgcgctggtgg

SEQ ID NO: 305029 - DNA, 75 bp, synthetic construct
  source 1..75: mol_type = other DNA
aagagatgattaatggcggtgagatcatggttaaagaggggctttttgatcatttcccctgcgatgtcattttcg

SEQ ID NO: 305030 - DNA, 75 bp, synthetic construct
  source 1..75: mol_type = other DNA
acgatagacaccatgaatataatattgaaacttcattagattttagttctcctttgccagagccggagcgagagc

SEQ ID NO: 305031 - DNA, 75 bp, synthetic construct
  source 1..75: mol_type = other DNA
ctgactcagggcggagtggcaccagaaacgcccaatcctcgcttgccgccactcgattccggcattctcggcgga

SEQ ID NO: 305032 - DNA, 75 bp, synthetic construct
  source 1..75: mol_type = other DNA
gcggaggttattgtgcgcaacaataaggcgcgctttgtccttgaggagcatcattctgattttaatgaaaaaatt

SEQ ID NO: 305033 - DNA, 75 bp, synthetic construct
  source 1..75: mol_type = other DNA
ccagtcattaaatatagcagatgatcgttccgtcagaacaatgacgcttatcttactgaaaaaaaacataatcga

SEQ ID NO: 305034 - DNA, 75 bp, synthetic construct
  source 1..75: mol_type = other DNA
ctattgtggatggtgctgtggaggaaggattgctggattttctgaacgaagtgaatcccccacactgctgtctgt

SEQ ID NO: 305035 - DNA, 75 bp, synthetic construct
  source 1..75: mol_type = other DNA
taaacagctgcatacgttacgtgccactactagcatttcgtaaaccgatcatcggattggatgctccctacttca

SEQ ID NO: 305036 - DNA, 75 bp, synthetic construct
  source 1..75: mol_type = other DNA
ggatgattttaggtttctctggcgtcaattataccggttggctctacatcgcgtggttacccggttatttgcagg

SEQ ID NO: 305037 - DNA, 75 bp, synthetic construct
  source 1..75: mol_type = other DNA
tcgccgtattcagacggtggcgctggttttattatttatggcgggaatcgttaattttctcgatcgctcatcatt

SEQ ID NO: 305038 - DNA, 75 bp, synthetic construct
  source 1..75: mol_type = other DNA
gattacgccagcgatccggaagggaaggtgattgcgctggacagccatatccggctggcgaatccccgcacggcg

SEQ ID NO: 305039 - DNA, 75 bp, synthetic construct
  source 1..75: mol_type = other DNA
ggggacgctttcaccggatgcgcgcagtgaagcgcagccgttttatggcgaacatcaggcgggtattctgacgcc

SEQ ID NO: 305040 - DNA, 75 bp, synthetic construct
  source 1..75: mol_type = other DNA
gctggatgcggcgttatgtcatggtgatgtgttgctacagatttgcgccaacacccaggacacggtgatccatgc

SEQ ID NO: 305041 - DNA, 75 bp, synthetic construct
  source 1..75: mol_type = other DNA
aagagatgattaatggcggtgagatcatggttaaagaggggctttttaatcgtttcccctgcgatgtcattttcg

SEQ ID NO: 305042 - DNA, 75 bp, synthetic construct
  source 1..75: mol_type = other DNA
cagctaccaggccgtgcgcttgattcagtttcgcgtggagttctgggatcgcacgccactaaaagagcagcagac

SEQ ID NO: 305043 - DNA, 75 bp, synthetic construct
  source 1..75: mol_type = other DNA
atgagccggaatcagagataccagtgcacatattcacgatgtagcgcgttttttaagaatggcaatatctacgaa

SEQ ID NO: 305044 - DNA, 75 bp, synthetic construct
  source 1..75: mol_type = other DNA
gcacatactcacgatgcagcgcgttttttaagaatggcaagatctacgaagtcggcgcggcattggttgacgcaa

SEQ ID NO: 305045 - DNA, 75 bp, synthetic construct
  source 1..75: mol_type = other DNA
atgacaccttctgaactattagaaagcgttaaagcgcgattcaatcctcttcttgtacgggaagaggagacactg

SEQ ID NO: 305046 - DNA, 75 bp, synthetic construct
  source 1..75: mol_type = other DNA
tattaccaccacgctgtatctgaccagtatttgcagaaacggaatctatggtcagtatgcaaaaaaaggccgcag

SEQ ID NO: 305047 - DNA, 75 bp, synthetic construct
  source 1..75: mol_type = other DNA
atgatgcaaacatccgcgttgccatcgcgggagccggggggcggtatgggccgccagttgattcaggcggcgctg

SEQ ID NO: 305048 - DNA, 75 bp, synthetic construct
  source 1..75: mol_type = other DNA
gggccgccagttgattcaggcggcgctggcattagaaggcgtgcagctgggcgcggcgctggagcgcgaaggatc

SEQ ID NO: 305049 - DNA, 75 bp, synthetic construct
  source 1..75: mol_type = other DNA
ggagaaccagaatacacgcgaaacgaagggtactttgttaatatccgtcttcttgacgatggatttgatgattcc

SEQ ID NO: 305050 - DNA, 75 bp, synthetic construct
  source 1..75: mol_type = other DNA
atgaaagatttaactttgaagtttcatgacaaactgcagtttaaggccttcctgtcatctcttgtctgggaggaa

SEQ ID NO: 305051 - DNA, 75 bp, synthetic construct
  source 1..75: mol_type = other DNA
atgaaagatttaactttgaagtttcatgacaaactgcagtttaaggccttcctgtcatctcttgactgggcggat

SEQ ID NO: 305052 - DNA, 75 bp, synthetic construct
  source 1..75: mol_type = other DNA
gtctattcggatgaattatccggatttattgaattagaactaacaggttcagaacgctggccttttcgaatgctg

SEQ ID NO: 305053 - DNA, 75 bp, synthetic construct
  source 1..75: mol_type = other DNA
ataacttttactctcatgaaaagcgtaattattcgtcgaaaatatactcaatcatagagaaaaaacatatagcag

SEQ ID NO: 305054 - DNA, 75 bp, synthetic construct
  source 1..75: mol_type = other DNA
ggtggttcagcgacgatcagcgtcgatggatttgatgatgtcaccggcttattgtgtaaaacgctggttagttac

SEQ ID NO: 305055 - DNA, 75 bp, synthetic construct
  source 1..75: mol_type = other DNA
tgctgatttgcttataacagattattcatctgtagcatttgatatcgcttatatgaaaaagcctattatatactt

SEQ ID NO: 305056 - DNA, 75 bp, synthetic construct
  source 1..75: mol_type = other DNA
agccgcaaaaatccgtttggcgatatcaaatcggacggcacggtgaaaacggctctcgaaaaccttggtttggga

SEQ ID NO: 305057 - DNA, 75 bp, synthetic construct
  source 1..75: mol_type = other DNA
ttctcatccttccccgcttgggcagaatatttaattgcggattcgtttgagagtttacggacttttgaaaagtga

SEQ ID NO: 305058 - DNA, 75 bp, synthetic construct
  source 1..75: mol_type = other DNA
cccggatgatgtggaggttatccctctctgccggataccgtccgggcagcattcccatgaacaacatattgaaga

SEQ ID NO: 305059 - DNA, 75 bp, synthetic construct
  source 1..75: mol_type = other DNA
cattacctgttggtgtgcctgttccatggccttcagccacaccgccaacaggctggctgaaatgcaacggtgcag

SEQ ID NO: 305060 - DNA, 75 bp, synthetic construct
  source 1..75: mol_type = other DNA
gccgaaaatgggcgctgatgaaacccgcgccgctatcgacgccgccaaccgcgccctgcccgcctggcgtgcgct

SEQ ID NO: 305061 - DNA, 75 bp, synthetic construct
  source 1..75: mol_type = other DNA
tgccgatctcgataaagccgtggaaggcgcgctggcctcgaaattccgtaacgccgggcaaacctgcgtctgcgc

SEQ ID NO: 305062 - DNA, 75 bp, synthetic construct
  source 1..75: mol_type = other DNA
ctggtgaaaaacagcgatggcaaactggctatcgtttcaacctctaacgcgggtactccgctgaccaccgatgcg

SEQ ID NO: 305063 - DNA, 75 bp, synthetic construct
  source 1..75: mol_type = other DNA
tggcagcgccagaagatttggtcgactctgcgcagcggcttagtgaggtatgtcagtggctggcggaaggggcac

SEQ ID NO: 305064 - DNA, 75 bp, synthetic construct
  source 1..75: mol_type = other DNA
cacagttagataacatagataagcataaaattcttatggagctttatgattatcatgctcccattcataaatctg

SEQ ID NO: 305065 - DNA, 75 bp, synthetic construct
  source 1..75: mol_type = other DNA
cgtgaaatgcatgaagctccattacaggcgctcaatattctggccagatacccgcataaaaaggacgaggtgtga

SEQ ID NO: 305066 - DNA, 75 bp, synthetic construct
  source 1..75: mol_type = other DNA
ccgttgatgtctgggaacacgcttattacatcgactatcgcaatgcacgtcctggctatctggagcacttctggg

SEQ ID NO: 305067 - DNA, 75 bp, synthetic construct
  source 1..75: mol_type = other DNA
atgtcattcgaattacctgcactaccatatgctaaagatgctctggcaccgcacatttctgcggaaaccatcgag

SEQ ID NO: 305068 - DNA, 75 bp, synthetic construct
  source 1..75: mol_type = other DNA
atgaaagatttaactttgaagtttcatgacaaactgcagtttaaggccttcctgtcatctcttgactgggtggac

SEQ ID NO: 305069 - DNA, 75 bp, synthetic construct
  source 1..75: mol_type = other DNA
aacgctggtatctgcagcgcagccaggatgcactgaaacaccgtcgggcaaaagctgcagcccgtaagcgtgcta

SEQ ID NO: 305070 - DNA, 75 bp, synthetic construct
  source 1..75: mol_type = other DNA
cgatgccatctggccggttctggtcagcttcagtgatgccggtacacacaccgtggggatgagtgtttcccgcct

SEQ ID NO: 305071 - DNA, 75 bp, synthetic construct
  source 1..75: mol_type = other DNA
ctcctcgatgccatctggccggttctggtcagcttcagtgatgccggcacacacactgtggggatgagtgtcact

SEQ ID NO: 305072 - DNA, 75 bp, synthetic construct
  source 1..75: mol_type = other DNA
aaacgcgctgtttgcctggttacgggagaacggcatcctgatagcgtccggtggacgtaaaaatgtgccgttcca

SEQ ID NO: 305073 - DNA, 75 bp, synthetic construct
  source 1..75: mol_type = other DNA
aagctctgcgcctggctgccgaactggctgaacaaaagcaacttctggaacagaaagcccaccagctaaatcagc

SEQ ID NO: 305074 - DNA, 75 bp, synthetic construct
  source 1..75: mol_type = other DNA
catcgaaaaaatactcgacgaattagaaggtgaggacggttacacaaaaagtgcaaccgtgccgccaggtggcgg

SEQ ID NO: 305075 - DNA, 75 bp, synthetic construct
  source 1..75: mol_type = other DNA
tatgccaacatgacgcatttcattaccgatgaagatgccgtttccagactggaaactttcaccagcactgagcgt

SEQ ID NO: 305076 - DNA, 75 bp, synthetic construct
  source 1..75: mol_type = other DNA
cctgcacgtttatgggattgatttcatcggctaatggcaccttgattatgcagattggcgatggcggcgtggtgg

SEQ ID NO: 305077 - DNA, 75 bp, synthetic construct
  source 1..75: mol_type = other DNA
gacactggagtcagcttccgccagaagagcaaatccgtttctgggaagcttatgaagcgggaagggcgacctctt

SEQ ID NO: 305078 - DNA, 75 bp, synthetic construct
  source 1..75: mol_type = other DNA
aaggaagcgcaccaggcgccgtcgtggcgaacactccactaaacccaaatgcgaaaatccgtcctggtatcgtcc

SEQ ID NO: 305079 - DNA, 75 bp, synthetic construct
  source 1..75: mol_type = other DNA
ataacgcagtacactggagtcagttagcacccgaagagcagatccgtttctgggaagactatgaagcgggaaggg

SEQ ID NO: 305080 - DNA, 75 bp, synthetic construct
  source 1..75: mol_type = other DNA
ctgggtggtgaaggcgcgatgcttgctgtcaatgaagcgatggcttatatgttgcagaaagtgcagggcggggaa

SEQ ID NO: 305081 - DNA, 75 bp, synthetic construct
  source 1..75: mol_type = other DNA
gaatgcggtgaaaacataatcctgtttaatcctgacacagttgaggcatatgcaaaacgtgcggagatatcaccc

SEQ ID NO: 305082 - DNA, 75 bp, synthetic construct
  source 1..75: mol_type = other DNA
ccggcacacaataagaaagttggtggtgcttctcgttcgattcatatcacgggcaaggccgcagatattgtagtg

SEQ ID NO: 305083 - DNA, 75 bp, synthetic construct
  source 1..75: mol_type = other DNA
tgccagggcagccacgccaaatacatcaacgatgaagatcttcaccgctttgaaggcttcgaaggcgagaacatg

SEQ ID NO: 305084 - DNA, 75 bp, synthetic construct
  source 1..75: mol_type = other DNA
cttccctgagcctgtatcacgcgcaggcgcatgacgttctgcggatgctgccggaaaacagtgtggacgcgctca

SEQ ID NO: 305085 - DNA, 75 bp, synthetic construct
  source 1..75: mol_type = other DNA
ttctgtgggccttctcctttagcttttatggcgagtaccttgcggggcacgtcgacagctatttttcggtgctgg

SEQ ID NO: 305086 - DNA, 75 bp, synthetic construct
  source 1..75: mol_type = other DNA
cgcgttactcgcggtgattggtgccgggattattcgctacgatcaggtcaccgatcacttctggaccggcttgct

SEQ ID NO: 305087 - DNA, 75 bp, synthetic construct
  source 1..75: mol_type = other DNA
ggtgatcctggcctcactgtgggtgcatcggaagtgggtcgctccgcgctctttacaaacggcagatgatcgcag

SEQ ID NO: 305088 - DNA, 75 bp, synthetic construct
  source 1..75: mol_type = other DNA
ccagcgtctgccacgttacgtctggataacaccggcaggctggcagatgctgggcgtcgacatggtaaaacttca

SEQ ID NO: 305089 - DNA, 75 bp, synthetic construct
  source 1..75: mol_type = other DNA
aggtaaagcgtgagaatccaccagtcgaaacaggtgcatggaaagatgctgttgactgggtactcaaagaggctt

SEQ ID NO: 305090 - DNA, 75 bp, synthetic construct
  source 1..75: mol_type = other DNA
attgactgggtgctcaaagaggtctgctgtgctgccattttgggtaaagccgacaatccatcagcatccggcaat

SEQ ID NO: 305091 - DNA, 75 bp, synthetic construct
  source 1..75: mol_type = other DNA
gaagagttgagaaaaatagccaagaaggattccaggaatataccaaaaaccgcagcaattaagattgaagaagcc

SEQ ID NO: 305092 - DNA, 75 bp, synthetic construct
  source 1..75: mol_type = other DNA
atgccaccccaattcagggatggcgcgagtagagggcgagttattcaaaattgcacggcatcgctggaagcagag

SEQ ID NO: 305093 - DNA, 75 bp, synthetic construct
  source 1..75: mol_type = other DNA
atgaagcctactggtgcacgccggaacgcttacagcagctgtccatcagggagctgtatcagcttgaactgacgc

SEQ ID NO: 305094 - DNA, 75 bp, synthetic construct
  source 1..75: mol_type = other DNA
aaaccctgaagatgagaattcggatggtgtttggtggtttaacgtcagagagtgggacaagctggccgacgaact

SEQ ID NO: 305095 - DNA, 75 bp, synthetic construct
  source 1..75: mol_type = other DNA
atcgtcccttcccgtcatgtgaaagttgaaaccaccgatggcgtggtccagctctccggtaccgtagattctcag

SEQ ID NO: 305096 - DNA, 75 bp, synthetic construct
  source 1..75: mol_type = other DNA
ctgctcgcgatgatttgcgtcagatcgtagcctatattgctaaggaaaatattcctgcagcacgcagactaaaaa

SEQ ID NO: 305097 - DNA, 75 bp, synthetic construct
  source 1..75: mol_type = other DNA
ttactacgggccgggccagttcccgacgttgcaggaatatccggcactgtggcatctgttgtcagaaccgtggtt

SEQ ID NO: 305098 - DNA, 75 bp, synthetic construct
  source 1..75: mol_type = other DNA
ggcagggattatttacctggtcgtcaacggcctgctgacgctgatgatgcgtctgatcgagcgcaaagcactggc

SEQ ID NO: 305099 - DNA, 75 bp, synthetic construct
  source 1..75: mol_type = other DNA
atgcgggacttcattgccgataaagagttatctgaccaccaaccacttcaggaaagtgacgcactcagcggatcc

SEQ ID NO: 305100 - DNA, 75 bp, synthetic construct
  source 1..75: mol_type = other DNA
aacctgtattcttccccgaccgagattgcgacggacagcacctatacctacgttgaaatgatctggatttgcccc

SEQ ID NO: 305101 - DNA, 75 bp, synthetic construct
  source 1..75: mol_type = other DNA
cttctggtatgtgaccttgatggccgtggtggcgtttctggtttctttgatgctacatcgcaaagggaaggggat

SEQ ID NO: 305102 - DNA, 75 bp, synthetic construct
  source 1..75: mol_type = other DNA
taggcgttggtctgtcatatgcggtcgctaatgctatatttggtggttcggcggagtacgtagcgttgtcgctga

SEQ ID NO: 305103 - DNA, 75 bp, synthetic construct
  source 1..75: mol_type = other DNA
aaaatataaagttagtcattgagttgactgaacaataccccctattagttacggacacaacagcctctcttttta

SEQ ID NO: 305104 - DNA, 75 bp, synthetic construct
  source 1..75: mol_type = other DNA
actaacacaatgatagctgagactttcaatgattctgatgtttctttccaaagaatatctttaagaaatatgacg

SEQ ID NO: 305105 - DNA, 75 bp, synthetic construct
  source 1..75: mol_type = other DNA
tccagttttcgaaaaattcaatgtttaatctagttgagaagatacataaaaatgatgactatattttttgtgatg

SEQ ID NO: 305106 - DNA, 75 bp, synthetic construct
  source 1..75: mol_type = other DNA
aagccgatttggtcgagtgcatggtggcgctaccgggccagctctttaccaacacccaaatcccggcctgtatct

SEQ ID NO: 305107 - DNA, 75 bp, synthetic construct
  source 1..75: mol_type = other DNA
agtattaccgttataaagttgatgaggcaggcgaggaaacaattcgctcctttgtttcattatatcttgatgcgc

SEQ ID NO: 305108 - DNA, 75 bp, synthetic construct
  source 1..75: mol_type = other DNA
atgatcgttccgctgcctccagctcaatgacgtattgccaggctgtattgtggataaagccgctgctgtccgtca

SEQ ID NO: 305109 - DNA, 75 bp, synthetic construct
  source 1..75: mol_type = other DNA
acgccgccactttgcagaaaatacgcgccgccgactactgatcgacaccatcaagcctgtcgaggtgaagcatgt

SEQ ID NO: 305110 - DNA, 75 bp, synthetic construct
  source 1..75: mol_type = other DNA
tattgtcattagtgttggcgatgcgcgtgggattggtgtggtgaaaacgcctgagcttaacggaacggcgctggt

SEQ ID NO: 305111 - DNA, 75 bp, synthetic construct
  source 1..75: mol_type = other DNA
ttggggcgttaatgaacggtatttatttgcaggcagtattgaaaggctggcgcaacagcatgttgtttaccctcg

SEQ ID NO: 305112 - DNA, 75 bp, synthetic construct
  source 1..75: mol_type = other DNA
tagcgaaatgaccttaaccagcaactggccgcatcccagttttttaggtgattttctgccagccaaacgggaagt

SEQ ID NO: 305113 - DNA, 75 bp, synthetic construct
  source 1..75: mol_type = other DNA
gcagttgaaagagcaactggaagagagcgctgagctggagaagcagattaaggcgaatctggggggattgggtta

SEQ ID NO: 305114 - DNA, 75 bp, synthetic construct
  source 1..75: mol_type = other DNA
tccataaatggcaggcggataaagactacgaagacgaagccggcttctgcttctcggcaacgctggaagacatcc

SEQ ID NO: 305115 - DNA, 75 bp, synthetic construct
  source 1..75: mol_type = other DNA
ggagaaatccgccgtagcctgatcgaagccgatctggtggagtgcatggtcgcactgccgggccagctgtttacc

SEQ ID NO: 305116 - DNA, 75 bp, synthetic construct
  source 1..75: mol_type = other DNA
acgagttttaccacaaagaaaccggacgccgccactttgcagaaaatacgcgccgccgactactgatcgacacca

SEQ ID NO: 305117 - DNA, 75 bp, synthetic construct
  source 1..75: mol_type = other DNA
gcaggtaaaaaaacttcaccagacagagcggatgtgggtcgtcggcaaaaacgagttttaccacaaagaaaccgg

SEQ ID NO: 305118 - DNA, 75 bp, synthetic construct
  source 1..75: mol_type = other DNA
acttaaagaccagttggaagaacgcgaaaaactggaagtacagattaaggtaaatctggcggagatgggttatga

SEQ ID NO: 305119 - DNA, 75 bp, synthetic construct
  source 1..75: mol_type = other DNA
gcggtgtcagtctggctgcggtcgcgaactccgaagtcgatgcactgattaaagtgctgccgcgcatgacggcac

SEQ ID NO: 305120 - DNA, 75 bp, synthetic construct
  source 1..75: mol_type = other DNA
tctacgaagcggacgaagaagttaaggcgctgatcgacatggcgcgcaaactggaaggggtcacccgtaacgctg

SEQ ID NO: 305121 - DNA, 75 bp, synthetic construct
  source 1..75: mol_type = other DNA
caacgctcggaaaccacggcggtattccagcttgaatcgcgcggcatgaaggacctgatcaagcgtctgcaacct

SEQ ID NO: 305122 - DNA, 75 bp, synthetic construct
  source 1..75: mol_type = other DNA
ggccaggccgtggttctggtgcagggtcactggtggcttacgcgttaaaaatcaccgacctcgatccgctggagt

SEQ ID NO: 305123 - DNA, 75 bp, synthetic construct
  source 1..75: mol_type = other DNA
gcgcactatcctgcggagtttatggcgggggggaaaaacccccggattgggaaaaacccggaggggggggggggg

SEQ ID NO: 305124 - DNA, 75 bp, synthetic construct
  source 1..75: mol_type = other DNA
tggatatcgccgcgatcccgctggatgacaagaaaagtttcgacatgctgcaacgctcggaaaccactgcggtat

SEQ ID NO: 305125 - DNA, 75 bp, synthetic construct
  source 1..75: mol_type = other DNA
tgacaagaaaagtttcgacatgctgcaacgctcggaaaccactgcggtattccagcttgaatcgcgcggcatgaa

SEQ ID NO: 305126 - DNA, 75 bp, synthetic construct
  source 1..75: mol_type = other DNA
gatggaaaaattcataaaaactataaccgctgggtgcgtaacctagataaagatatacaggttaacttatctaca

SEQ ID NO: 305127 - DNA, 75 bp, synthetic construct
  source 1..75: mol_type = other DNA
ctgcattcgaaccacttaagcctgtgtttcagtggattggcgacaaagtacaggcgctgtggggctggtttactg

SEQ ID NO: 305128 - DNA, 75 bp, synthetic construct
  source 1..75: mol_type = other DNA
gcgggaggtggcacgccagcttgatgaacgtgaacgcaggctgaaggcaaaagccaggagtaactacagcgatca

SEQ ID NO: 305129 - DNA, 75 bp, synthetic construct
  source 1..75: mol_type = other DNA
ccggacgaagaaagctatctgcacgcggcggtggaactggcggaagcgcgcggtttgcccgtcgtggcgaccaat

SEQ ID NO: 305130 - DNA, 75 bp, synthetic construct
  source 1..75: mol_type = other DNA
gacgtgcgctttatcgacagcagcgactttgacgcacacgaaatccgcgtcgcgatccacgacggctttaccctc

SEQ ID NO: 305131 - DNA, 75 bp, synthetic construct
  source 1..75: mol_type = other DNA
cacgctggatgaccgttccgggcggctggaagtcatgttgtttactgacgccctggataaataccagcaattgct

SEQ ID NO: 305132 - DNA, 75 bp, synthetic construct
  source 1..75: mol_type = other DNA
gtagatgagtgtgtcgcgttttatgaagagcacttcccggatcgctattttctcgaattgattcgcaccggcagg

SEQ ID NO: 305133 - DNA, 75 bp, synthetic construct
  source 1..75: mol_type = other DNA
ccagaccacgcccatttaatggaagctgatttgtgttttatgtgggcttctgactcattcgcgaagaaagggcgc

SEQ ID NO: 305134 - DNA, 75 bp, synthetic construct
  source 1..75: mol_type = other DNA
tcgctgatgagcagtcagatcttgttaagaagatggtgtttgatacgctgaaggatttgtacaaaaaaaccacct

SEQ ID NO: 305135 - DNA, 75 bp, synthetic construct
  source 1..75: mol_type = other DNA
aagagaggctggcctcattaatctcggaacgagtaaaagaagttgtggctgatatccttagaaaagaaaaaaccc

SEQ ID NO: 305136 - DNA, 75 bp, synthetic construct
  source 1..75: mol_type = other DNA
ggtactgatttttacgccgatatttttaccggttgtcaccgaactgggcatggacccgattcactttggtattgt

SEQ ID NO: 305137 - DNA, 75 bp, synthetic construct
  source 1..75: mol_type = other DNA
atggattactggttaccgattattgtgttatttggtgccttcttttttatgttggcattaggtgtacctattgtt

SEQ ID NO: 305138 - DNA, 75 bp, synthetic construct
  source 1..75: mol_type = other DNA
ggtcgcggtcagtttgctgctgttccgctgaatattctcggtgataaaaccaccgcagattatgttgatgccggt

SEQ ID NO: 305139 - DNA, 75 bp, synthetic construct
  source 1..75: mol_type = other DNA
tccgcgaactgtttgatctttgcgcccgtaccgacaccaaaaaactgaaccggcgggtgctggaaaaactgatca

SEQ ID NO: 305140 - DNA, 75 bp, synthetic construct
  source 1..75: mol_type = other DNA
gtcactggtggcctacgcgctgaaaatcaccgacctcgatccgctggaatttgatctgctgttcgaacgtttcct

SEQ ID NO: 305141 - DNA, 75 bp, synthetic construct
  source 1..75: mol_type = other DNA
gggcttcccgggctacttcctcatcgttatggaatttatccagtggtcgaaagataacggcgtaccggtagggcc

SEQ ID NO: 305142 - DNA, 75 bp, synthetic construct
  source 1..75: mol_type = other DNA
ttcagccgtggctaccccaggagttacgcctggcgattgagcatatcaaagcacacgttacggcagaaacgccaa

SEQ ID NO: 305143 - DNA, 75 bp, synthetic construct
  source 1..75: mol_type = other DNA
gatactgaacttcaggttatcaaccagatgggcttcccgggctacttcctcatcgttatggaatttatccagtgg

SEQ ID NO: 305144 - DNA, 75 bp, synthetic construct
  source 1..75: mol_type = other DNA
aagaacacttcccggatcgctattttctcgagctgatccgcaccggcaggccggacgaagaaagttatctgcacg

SEQ ID NO: 305145 - DNA, 75 bp, synthetic construct
  source 1..75: mol_type = other DNA
gccggtaccggcgaatatgtgactcgtgtcagagggtatcagcagatgctcaataatggtgccgtctatggctct

SEQ ID NO: 305146 - DNA, 75 bp, synthetic construct
  source 1..75: mol_type = other DNA
agcgatgctgatgccatggatacacgaaaagcagctgatggtgccgccagatacctaagtatgctgatgaaccgt

SEQ ID NO: 305147 - DNA, 75 bp, synthetic construct
  source 1..75: mol_type = other DNA
cgtccgatcacctgcgtcaatgtaatgttctgcgacgctcacaccgataccatcagcgatctctttgatgtgctg

SEQ ID NO: 305148 - DNA, 75 bp, synthetic construct
  source 1..75: mol_type = other DNA
ggggattgatggactatttgataaactccgcaactcgccggggatgcggaaaaataatgcgcctgaaccagcctc

SEQ ID NO: 305149 - DNA, 75 bp, synthetic construct
  source 1..75: mol_type = other DNA
atgccagttgaagaggcgcgtccggtggccaacaactcaagttactttgaccagctcggcgcacaaatggggatt

SEQ ID NO: 305150 - DNA, 75 bp, synthetic construct
  source 1..75: mol_type = other DNA
cacaacattcaacgattacacagccaagattggcgatgctatttcagcctggttcagtgacacaaccaagagtct

SEQ ID NO: 305151 - DNA, 75 bp, synthetic construct
  source 1..75: mol_type = other DNA
tccggaaggtgaccgtttggttcaggctagtgcggcgggcgaattcgctctggctgttggtacaggggccagagc

SEQ ID NO: 305152 - DNA, 75 bp, synthetic construct
  source 1..75: mol_type = other DNA
tgcctatgcaaatgcttctacagccgccggaacagctgcttatgttgatggttctgctatttatggtaccgctat

SEQ ID NO: 305153 - DNA, 75 bp, synthetic construct
  source 1..75: mol_type = other DNA
cagctcgacagttgcccacagaaacagtgtggctcttggctcaaattcacgtacaacccgtgaagatgaagttta

SEQ ID NO: 305154 - DNA, 75 bp, synthetic construct
  source 1..75: mol_type = other DNA
ctggcgcaccatcgtcggctacagcctcggtgacgtcgccaataacttcgccttcgcaatgggggcgctcttcct

SEQ ID NO: 305155 - DNA, 75 bp, synthetic construct
  source 1..75: mol_type = other DNA
gcaacccggtgatgggtatctctatgaactgtgcgtcaccgcaaaaagccagacagagtgcgacatctatccact

SEQ ID NO: 305156 - DNA, 75 bp, synthetic construct
  source 1..75: mol_type = other DNA
attttatttcctctggatctgctccagaaaatgaccctgtagttcctgccagtgcagaaggtgtgtttgcgtttg

SEQ ID NO: 305157 - DNA, 75 bp, synthetic construct
  source 1..75: mol_type = other DNA
tggtcaacaaattcatgaatggccgggggatgcgtcgggaagtcgttcagggaacgctcgaagaacgtgcacgag

SEQ ID NO: 305158 - DNA, 75 bp, synthetic construct
  source 1..75: mol_type = other DNA
tgaacttcaggttctacagcgaagaattgtcgatgccagtgaatcctctgttttagtcgaggaggaaaacgaacg

SEQ ID NO: 305159 - DNA, 75 bp, synthetic construct
  source 1..75: mol_type = other DNA
atacccctattgatacctgggatgtagaagacgtctggaaactgctgcgcggcgcgttccgctatgctcctgaat

SEQ ID NO: 305160 - DNA, 75 bp, synthetic construct
  source 1..75: mol_type = other DNA
ggtggatctcattaagaaaaccatgttgcagatcgaagccggcgctaaacgtaatggcttgccaattactcaaca

SEQ ID NO: 305161 - DNA, 75 bp, synthetic construct
  source 1..75: mol_type = other DNA
accacgctggcaaatgcgtttatctatacccctattgatacctgggatgtagaagacgtctggaaactgctgcgc

SEQ ID NO: 305162 - DNA, 75 bp, synthetic construct
  source 1..75: mol_type = other DNA
atcgtgatctgctggcatttaccaccgatccggtgaataaagacacgtttcgaaactataagcgccgtactggta

SEQ ID NO: 305163 - DNA, 75 bp, synthetic construct
  source 1..75: mol_type = other DNA
ggcgcgttccgctatgcccctgaagatatcgacgagtgggaaagcccgtggggtggaaacaaccgtccactgtgg

SEQ ID NO: 305164 - DNA, 75 bp, synthetic construct
  source 1..75: mol_type = other DNA
tcttttcagcaaaaagcagcctatacgctggctaatgttctcgatatgggggggttggtatctggtattagcagc

SEQ ID NO: 305165 - DNA, 75 bp, synthetic construct
  source 1..75: mol_type = other DNA
aactgttgatcctgtctctcgcagtgtgtcggcattaaatcgcacaatcgaaaattcacgtcctgactttgtgac

SEQ ID NO: 305166 - DNA, 75 bp, synthetic construct
  source 1..75: mol_type = other DNA
ttggcgctgaaggtaaggcaaatctcgataagttggctccgtattttgctgaactagagaataaatatggtcttc

SEQ ID NO: 305167 - DNA, 75 bp, synthetic construct
  source 1..75: mol_type = other DNA
ccagtttacgagcgttgctcgtgaggaaactggattatcccgggaagattcttttaatccggaaaaatcggcaga

SEQ ID NO: 305168 - DNA, 75 bp, synthetic construct
  source 1..75: mol_type = other DNA
acattcagaaagctgcggatacctacaacaatggcaacttagatgtaaaagtcggaagccttggcgctgaaggta

SEQ ID NO: 305169 - DNA, 75 bp, synthetic construct
  source 1..75: mol_type = other DNA
ctttcaggtgaagttgtagatgccgctgttcagagcacccctgtagcctgggttgcatcaaagctagtcaaaaaa

SEQ ID NO: 305170 - DNA, 75 bp, synthetic construct
  source 1..75: mol_type = other DNA
actccagaacgacagttggtgtgaaccctgacggaaaacttacccgtgcagaaggtgcgactaaaactatcgccg

SEQ ID NO: 305171 - DNA, 75 bp, synthetic construct
  source 1..75: mol_type = other DNA
aaagtacagctctgggagtgggagcatatgcctatgcaaatgcttcaacagccgccggaacagctgcttatgttg

SEQ ID NO: 305172 - DNA, 75 bp, synthetic construct
  source 1..75: mol_type = other DNA
cagcagtgggctcatgggctgctgcggacggtaaacaaagtacagctctgggagtgggaacatatgcttatgcaa

SEQ ID NO: 305173 - DNA, 75 bp, synthetic construct
  source 1..75: mol_type = other DNA
caacattcagcacgtctggacagccagcagcgccagattaatgaaaaccataaggaaatgaaacgagcagcagca

SEQ ID NO: 305174 - DNA, 75 bp, synthetic construct
  source 1..75: mol_type = other DNA
ttctttttatcgccgcgctacttgctttcgcgatttacgatcagttcatcatgccccgccgtaacggccctactc

SEQ ID NO: 305175 - DNA, 75 bp, synthetic construct
  source 1..75: mol_type = other DNA
ttagaacagcgtcggctgttaatccgcgttcgaaatatcgacgatctggaaaaaatttataagcttctcgtttca

SEQ ID NO: 305176 - DNA, 75 bp, synthetic construct
  source 1..75: mol_type = other DNA
tattctggatccgcgttccgaagatcatctttaaacaaaaaggttttttcttcgccaatgtctggattgaatata

SEQ ID NO: 305177 - DNA, 75 bp, synthetic construct
  source 1..75: mol_type = other DNA
cgtcatcatcgtcgcttaataccactggcaccaggaatgacattcagaaagctgcggatacctacaacaatggcc

SEQ ID NO: 305178 - DNA, 75 bp, synthetic construct
  source 1..75: mol_type = other DNA
gcacactggccagttgtcacagctacaggaagtaaactcctttcacaaagtcaccgttattcctacgattatgac

SEQ ID NO: 305179 - DNA, 75 bp, synthetic construct
  source 1..75: mol_type = other DNA
tggccgcatcccagttttttaggtgattttttgccggcgaagcgggaaattagcgcgtcaggttttcaggctaag

SEQ ID NO: 305180 - DNA, 75 bp, synthetic construct
  source 1..75: mol_type = other DNA
ccaaaaccaacgcgatgcgcgtggtcgttttattggaaagtcagggagtaaggccgcagcggaagatgcccgtgc

SEQ ID NO: 305181 - DNA, 75 bp, synthetic construct
  source 1..75: mol_type = other DNA
agcaactcaagttactttgaccaactcggcgcacaaatggggattgatggactattcgataaactccgcaactcg

SEQ ID NO: 305182 - DNA, 75 bp, synthetic construct
  source 1..75: mol_type = other DNA
gcaacagcagctggcaatgtgtatgttgatactccgatgccagttgaagaggcgcgtccggtggccagcaactca

SEQ ID NO: 305183 - DNA, 75 bp, synthetic construct
  source 1..75: mol_type = other DNA
tgcaattagaacagcgtcggctgttaatccgcgttcgaaatatcgacgatctggaaaaaatttataagcttctcg

SEQ ID NO: 305184 - DNA, 75 bp, synthetic construct
  source 1..75: mol_type = other DNA
gcaagccagttgttggggatgaatataacgcgaaaaatgccatctttactgtttcggaagcgatggaacacttca

SEQ ID NO: 305185 - DNA, 75 bp, synthetic construct
  source 1..75: mol_type = other DNA
agctcgttgatgcggccaatgcgccagcagaagtggctcacatcgatatagccaggtcatgcgggacgtgcatgt

SEQ ID NO: 305186 - DNA, 75 bp, synthetic construct
  source 1..75: mol_type = other DNA
ttctacttaactctccttttcccgcaaaccgtttttatccccagcggcaaatcgaatacaccaccagcgccacag

SEQ ID NO: 305187 - DNA, 75 bp, synthetic construct
  source 1..75: mol_type = other DNA
gggcgatgaagtgttgatgaaagtggtgaaaatccttaaatcacagatcccggtagataaaggtaaagtctaccg

SEQ ID NO: 305188 - DNA, 75 bp, synthetic construct
  source 1..75: mol_type = other DNA
ctgatgttctccctgttcaagaacggtaaatcggtgaccggtgatgaatataacgctaaaaacgccatcttcacc

SEQ ID NO: 305189 - DNA, 75 bp, synthetic construct
  source 1..75: mol_type = other DNA
gcctgtttgacgtcgataaattcaaaaacattaacgataccttcggtcatttgctgggcgatgaagtgttgatga

SEQ ID NO: 305190 - DNA, 75 bp, synthetic construct
  source 1..75: mol_type = other DNA
ttttagctaatgaagtaaagacacaggcaaaaaaagaaaatatcataaattgggatgatttgtcgtggggtaaag

SEQ ID NO: 305191 - DNA, 75 bp, synthetic construct
  source 1..75: mol_type = other DNA
ttgataatcagtacattgaagtggacggtcgcgaaatcaagtttgtaaaaggtattttcgcaatttttggccatg

SEQ ID NO: 305192 - DNA, 75 bp, synthetic construct
  source 1..75: mol_type = other DNA
gatttcaccacctcctcaaagtggatcttccagaatcccgacgtgcgctacttaaatatcaacgttagccgcttt

SEQ ID NO: 305193 - DNA, 75 bp, synthetic construct
  source 1..75: mol_type = other DNA
tgcctttggtgttcatgcctgagacagatagcctcaagcacccgctgcaattctacttaactctccttttcccgc

SEQ ID NO: 305194 - DNA, 75 bp, synthetic construct
  source 1..75: mol_type = other DNA
taatcaacgagtgaaaatacttgttaaggaaattaaagaaatcgataaaatcataagccatatcattagatatta

SEQ ID NO: 305195 - DNA, 75 bp, synthetic construct
  source 1..75: mol_type = other DNA
gttgcgacaaaacgaacgaagagtattatttgctgatgaaatgatttctgatttaggtggagggagtaaggatga

SEQ ID NO: 305196 - DNA, 75 bp, synthetic construct
  source 1..75: mol_type = other DNA
tacgagagatcaaaaagttgagtggtgtaacggaagcgctgaattataacgatagccgggagcctgttgaggtta

SEQ ID NO: 305197 - DNA, 75 bp, synthetic construct
  source 1..75: mol_type = other DNA
gctgaattgcatggtggaagtgctacgtaccattatataaataacaacaatgtgttccgaattattttaccgcaa

SEQ ID NO: 305198 - DNA, 75 bp, synthetic construct
  source 1..75: mol_type = other DNA
gctgacgatctcgctcatgaacttagaacgcccattaatgcattactgggtcagaatcaggttacgctcagtcaa

SEQ ID NO: 305199 - DNA, 75 bp, synthetic construct
  source 1..75: mol_type = other DNA
ctgccaggtagacaatatttctcttaacgccataccgaaccgaacggcagaaaagcaattacatcttgatgtaac

SEQ ID NO: 305200 - DNA, 75 bp, synthetic construct
  source 1..75: mol_type = other DNA
tacggatgtttcggtaattgaaggtgtttatgttactgagagtatggctgatatgctatcccatagtgatacctc

SEQ ID NO: 305201 - DNA, 75 bp, synthetic construct
  source 1..75: mol_type = other DNA
tgggtaatggaatatacgtcaaacaagggacatcatattcattttatcggctacctggatgggcaacgtcacaag

SEQ ID NO: 305202 - DNA, 75 bp, synthetic construct
  source 1..75: mol_type = other DNA
tgcacttcatgcgcgataaagtcagcgagaagctggaatatattccggcacaggtcgtggtcaaccgctatatcc

SEQ ID NO: 305203 - DNA, 75 bp, synthetic construct
  source 1..75: mol_type = other DNA
gcgaccaaaggcgctggaaaacgtcagcatgaaaaacccgtggcagcataaggtgaccttaacccgcagcggtca

SEQ ID NO: 305204 - DNA, 75 bp, synthetic construct
  source 1..75: mol_type = other DNA
gcaggtaaaagtgcagggaatgccggatatcaacaaattgcctgccgatcgtgaaagcctgttctacttcaacgt

SEQ ID NO: 305205 - DNA, 75 bp, synthetic construct
  source 1..75: mol_type = other DNA
gcttaactttgctttttatattattgctatctgttgctggctctgggatcgtatggaccctctatagcggtctgg

SEQ ID NO: 305206 - DNA, 75 bp, synthetic construct
  source 1..75: mol_type = other DNA
cttgataccaacggctatcttaatattgatatcgccagtcctggaacgaaaattaatgagcctgaaaaactcttc

SEQ ID NO: 305207 - DNA, 75 bp, synthetic construct
  source 1..75: mol_type = other DNA
ggctccttgatacccggaaaggcggtaaatcctgctccggctggctgtgggcttacgtcagcggagaaagagtaa

SEQ ID NO: 305208 - DNA, 75 bp, synthetic construct
  source 1..75: mol_type = other DNA
aacgccataccgaaccgaacggcagaaaagcaattacatcttgatgtaaccccactcgatgcgtggcctttggat

SEQ ID NO: 305209 - DNA, 75 bp, synthetic construct
  source 1..75: mol_type = other DNA
aagttaaagctgcaagagctcttctcgcttggtctcaacaagaactggcctccaaagcaaatgtggcaacatcta

SEQ ID NO: 305210 - DNA, 75 bp, synthetic construct
  source 1..75: mol_type = other DNA
tcttccccaaactgtttcagtaaaaaatgaaaaattcaaaattagcatcccattgattatgctaattttgttaat

SEQ ID NO: 305211 - DNA, 75 bp, synthetic construct
  source 1..75: mol_type = other DNA
tctctattcgtatgaaattcaggataaaaatgctatcggtttagttggaagcgaaagtgctttacaagaaaatga

SEQ ID NO: 305212 - DNA, 75 bp, synthetic construct
  source 1..75: mol_type = other DNA
cagtttctacgtaaaaaattgatggacatgcctaaaattaacaaagaaaatattgaaaagctgtgctctgcattg

SEQ ID NO: 305213 - DNA, 75 bp, synthetic construct
  source 1..75: mol_type = other DNA
tgctttttttatccctgttgtgcaggcaaaagaagacgaagctctggcatttgaaagattcaaacggattatgcg

SEQ ID NO: 305214 - DNA, 75 bp, synthetic construct
  source 1..75: mol_type = other DNA
atttatgatcagcttatcaaagataatcgagtgcgttttatcacctttcatcagagctttggttatgaagagttt

SEQ ID NO: 305215 - DNA, 75 bp, synthetic construct
  source 1..75: mol_type = other DNA
ccagacgatgttggcgggatattactgggtaatggaatatacaccagacaaagggcttcatattcattttatcgg

SEQ ID NO: 305216 - DNA, 75 bp, synthetic construct
  source 1..75: mol_type = other DNA
gaaagacacgcccagtttcgggcattcctgtaagcacagtatgtgtattgaaatataccgtttacttagtgaaac

SEQ ID NO: 305217 - DNA, 75 bp, synthetic construct
  source 1..75: mol_type = other DNA
ccaaacaggatcagaaagaacacggtattattctgggccgtagcaggcttcccgaaaaaagtaaccggggccgac

SEQ ID NO: 305218 - DNA, 75 bp, synthetic construct
  source 1..75: mol_type = other DNA
gcaagaagatgatgttataagttcgccattgcctaaaaacacaattctctatggcccgccaggtacaggtaaaac

SEQ ID NO: 305219 - DNA, 75 bp, synthetic construct
  source 1..75: mol_type = other DNA
tagcgcacttactcgcctacaagaacgtttatctgaaggtgaaaatatcacgctggaaacacaacagggtaaggc

SEQ ID NO: 305220 - DNA, 75 bp, synthetic construct
  source 1..75: mol_type = other DNA
ttgttgatgcggtagcgcgtaatggtagttttagcgccgcagcccaggagttgcatcgcgtcccttctgcggtca

SEQ ID NO: 305221 - DNA, 75 bp, synthetic construct
  source 1..75: mol_type = other DNA
tctatttcaacgtgcgtgagatcccgccgaaatcgaacaaacctaacacgctacagatagcgctgcagacgcgca

SEQ ID NO: 305222 - DNA, 75 bp, synthetic construct
  source 1..75: mol_type = other DNA
ctgcgtttaaacctatggctccggcagcaacttcgctggtagcgacggcggtcattgtgacttcgattctggtgc

SEQ ID NO: 305223 - DNA, 75 bp, synthetic construct
  source 1..75: mol_type = other DNA
aaaaaacgtcttattgtgtcatgattatggatatcgatcacttcaaaaaagttaacgatacgtgggggcatccgg

SEQ ID NO: 305224 - DNA, 75 bp, synthetic construct
  source 1..75: mol_type = other DNA
cccccgaaacgctggaaaatttaattgaaagttttgtgttacgcgaaggcaccgattatggtgaacatgagcgta

SEQ ID NO: 305225 - DNA, 75 bp, synthetic construct
  source 1..75: mol_type = other DNA
ctggccgtctgtgcagtcgtgccgtgactatcgcagacagtcccgcccgtgtgaaaaccggggcgctgctgaatc

SEQ ID NO: 305226 - DNA, 75 bp, synthetic construct
  source 1..75: mol_type = other DNA
tcggtggaaggggtagtgctgtccagtgatgtgacggccaaagcccaggtgaatcaggctgcgacgttacgatcc

SEQ ID NO: 305227 - DNA, 75 bp, synthetic construct
  source 1..75: mol_type = other DNA
catcaccatcacctggaccagtagcgaagcggtgcagatttaccttgtggttcgaccgtatgagagcgcgaaaga

SEQ ID NO: 305228 - DNA, 75 bp, synthetic construct
  source 1..75: mol_type = other DNA
agagcatgttctactttaacgtgcgtgaaatcccgccaaaatcgaacaaacctaatacgctgcaaattgccctgc

SEQ ID NO: 305229 - DNA, 75 bp, synthetic construct
  source 1..75: mol_type = other DNA
gctcgatcgtcagagggttaaaaaaatatatccctttgcggagcggattacggaatgctggcggtctattacgca

SEQ ID NO: 305230 - DNA, 75 bp, synthetic construct
  source 1..75: mol_type = other DNA
cgtaacaacaacgaaaagctgccttacctggcgcaaagctggctggaagacgagaagggcaacaaaatcacctcg

SEQ ID NO: 305231 - DNA, 75 bp, synthetic construct
  source 1..75: mol_type = other DNA
atctggcacaaagctggatggaagatgaacagggtaacaagattagctcgccactgacggtactgccgccggtgc

SEQ ID NO: 305232 - DNA, 75 bp, synthetic construct
  source 1..75: mol_type = other DNA
atgacgaatctattttgctctgccagaacggccgcaacgacgctggcgttactgataactgccgccagcctgtca

SEQ ID NO: 305233 - DNA, 75 bp, synthetic construct
  source 1..75: mol_type = other DNA
ggcgcgcgaatgtcgctgaactttaaatgcactggcaataattgccaggtggatgcagagcaaagccgcaaaggc

SEQ ID NO: 305234 - DNA, 75 bp, synthetic construct
  source 1..75: mol_type = other DNA
gtggtacgcacctgggaagttccgctgcaaatcaccatcagtctgttactggatgccagtctggagggcgctgca

SEQ ID NO: 305235 - DNA, 75 bp, synthetic construct
  source 1..75: mol_type = other DNA
aatccatccccaccgatcgccttcgctcaaccggcgtattaaccggcccggactggctgcggatggggctttctt

SEQ ID NO: 305236 - DNA, 75 bp, synthetic construct
  source 1..75: mol_type = other DNA
gtggcgacgggcaaatatgtcgcttttgtcgatgctgacgatgaggtctatcccaccatgtacgaaacgctgatg

SEQ ID NO: 305237 - DNA, 75 bp, synthetic construct
  source 1..75: mol_type = other DNA
ggtgctggctgcgcaggtgtcgtgctcggttgaaggcgtggtgctgagcaatgacatttccacaaaggcggaaat

SEQ ID NO: 305238 - DNA, 75 bp, synthetic construct
  source 1..75: mol_type = other DNA
aagcgcctgattaccaatgtgcgcagcgtgaaggtgggttatcaggcgttactgtggtctttccgcttatggcaa

SEQ ID NO: 305239 - DNA, 75 bp, synthetic construct
  source 1..75: mol_type = other DNA
gaatctttaatcgcgcaaacctggactgctctggaaattattattgttaacgatggatcaacggataattctgtt

SEQ ID NO: 305240 - DNA, 75 bp, synthetic construct
  source 1..75: mol_type = other DNA
gcgcgtaatcgtgggattgaggcggcgacgggcaaatatgtcgcttttgtcgatgcagatgatgaagtctatccc

SEQ ID NO: 305241 - DNA, 75 bp, synthetic construct
  source 1..75: mol_type = other DNA
gggtgtggttcattctggcggttcaggggatgcagcagggtgaagcccaggcggattatctggtgcgtctgtcca

SEQ ID NO: 305242 - DNA, 75 bp, synthetic construct
  source 1..75: mol_type = other DNA
atcagtgacgattgctgattcccccgcccgtgttgcaaccggcgcactggtcaatatgggccgcaacgataaacc

SEQ ID NO: 305243 - DNA, 75 bp, synthetic construct
  source 1..75: mol_type = other DNA
ccctgcaggcactggcaaccgcccgctacagcgtgcccatgtggtatgccgactatgacggcctttactgggctg

SEQ ID NO: 305244 - DNA, 75 bp, synthetic construct
  source 1..75: mol_type = other DNA
ctgggtgaggctgacagccagttaaaaagtgacgtgctggctgcggtgtcgaatgctggccagaactggtggggg

SEQ ID NO: 305245 - DNA, 75 bp, synthetic construct
  source 1..75: mol_type = other DNA
gcacatcagacactgtttgcccgtccactgcgtgaaatgtccactgcggccagcattaacggtgtgtcatttccg

SEQ ID NO: 305246 - DNA, 75 bp, synthetic construct
  source 1..75: mol_type = other DNA
gcacgccgcgttcgtctgctggccatcggtaagattgccgatcgctcacttaacagtacaccgggcagtattgcc

SEQ ID NO: 305247 - DNA, 75 bp, synthetic construct
  source 1..75: mol_type = other DNA
atgtcctgcgtgatattcgcaatatggctgaggagcttaacgcgctcaaaactgagcagtcatatcggggtgact

SEQ ID NO: 305248 - DNA, 75 bp, synthetic construct
  source 1..75: mol_type = other DNA
gaccagcaacaataccaatctgcaaatcagtttcgtccattcgcgctatcgtaatgaaaacgtggcgatttgcgt

SEQ ID NO: 305249 - DNA, 75 bp, synthetic construct
  source 1..75: mol_type = other DNA
tcggcatattggtattccgctggagaaagcgcccggtgagtgggtgcatagcgtcgcctcgtcgcatgaactgcc

SEQ ID NO: 305250 - DNA, 75 bp, synthetic construct
  source 1..75: mol_type = other DNA
acctgagaaacacattggtgagaatataggtatcaatcaacccgtgactgatggtgacaagccattattcatgta

SEQ ID NO: 305251 - DNA, 75 bp, synthetic construct
  source 1..75: mol_type = other DNA
gcgttgagctgggcgcgccctaagcctggcgcgactcacattacgattatgcgtaaacaggggctgcaaaaacgc

SEQ ID NO: 305252 - DNA, 75 bp, synthetic construct
  source 1..75: mol_type = other DNA
agaagttctcagcaggtggttataactttcgcttcaacgctaagggattggaggtcttcggtaagcctgcgatag

SEQ ID NO: 305253 - DNA, 75 bp, synthetic construct
  source 1..75: mol_type = other DNA
gccgcgatggcatctttcctggctgcccgtgaagagttttttgcagtggtgcgaaaagactctgccgaactgagc

SEQ ID NO: 305254 - DNA, 75 bp, synthetic construct
  source 1..75: mol_type = other DNA
gcgctcgaaaacgggattgatggagaaactcttggggccagcctgtatgaattggcgttgatcccggacttcaag

SEQ ID NO: 305255 - DNA, 75 bp, synthetic construct
  source 1..75: mol_type = other DNA
ggcgagtggtcagtcaatccaaactatgtggagtactttcgaattatcaaacctactgaccatcgattcaaccca

SEQ ID NO: 305256 - DNA, 75 bp, synthetic construct
  source 1..75: mol_type = other DNA
ttgcagcgcagtggtgtaatcgttacaacatacgaaggtcaggaaccctcaccggaggatgtgttgattactgat

SEQ ID NO: 305257 - DNA, 75 bp, synthetic construct
  source 1..75: mol_type = other DNA
cctgttgagtaacgccataaaattcaccgataccggctgtatagttttgcatgtccgcgctgatggcgattatct

SEQ ID NO: 305258 - DNA, 75 bp, synthetic construct
  source 1..75: mol_type = other DNA
ctggcggtccgcaatgcgtcgctctgtcagttcctggaaaccagtttgcagcgcagcggcatcgtcgttacaaca

SEQ ID NO: 305259 - DNA, 75 bp, synthetic construct
  source 1..75: mol_type = other DNA
cctcaagcaattaatgtagggattgaaaaaattatttccactagatgttttcgcaataatatgagtaataacatt

SEQ ID NO: 305260 - DNA, 75 bp, synthetic construct
  source 1..75: mol_type = other DNA
atgctgccagaagatgtcgataaactttatgtccgcagcgccaacggcgaaatggtgccattctctgcctttacc

SEQ ID NO: 305261 - DNA, 75 bp, synthetic construct
  source 1..75: mol_type = other DNA
tgcagccatattttaaaaataaaattgaagtagataagtactggtatcaaatttcatttgattatcgggacggta

SEQ ID NO: 305262 - DNA, 75 bp, synthetic construct
  source 1..75: mol_type = other DNA
cctgatattgcaacaacttcaggagatggcaaaccctggttacaatgatcgagtaagggaccgcgcgcaacggga

SEQ ID NO: 305263 - DNA, 75 bp, synthetic construct
  source 1..75: mol_type = other DNA
ctctgctgagcatcacgaaaataagggcggtttcttcggctggtttaataccaccttcgatcatagcgttaacca

SEQ ID NO: 305264 - DNA, 75 bp, synthetic construct
  source 1..75: mol_type = other DNA
gcggtatttatccctatggccttctttggcggttctaccggagcaatctaccgacagttctctattaccattgtt

SEQ ID NO: 305265 - DNA, 75 bp, synthetic construct
  source 1..75: mol_type = other DNA
ccgcttttggttactccatcaacacactaacgatgtttgggatggtgcttgccatcgggctgctcgtcgatgatg

SEQ ID NO: 305266 - DNA, 75 bp, synthetic construct
  source 1..75: mol_type = other DNA
tgcgacggtccggcagtgcaactgcaacctggttatgcactagatatctcaggaatggcgaaggcattcaaaaac

SEQ ID NO: 305267 - DNA, 75 bp, synthetic construct
  source 1..75: mol_type = other DNA
acagttcctcccttgggaaagtgttgttggcctggcttccggaagaccacattgatgctcttttacccacagaac

SEQ ID NO: 305268 - DNA, 75 bp, synthetic construct
  source 1..75: mol_type = other DNA
tgaccggacccgtcttgcctgccatctgggcgttctggatggttccaccggcatctatctggcgaaaaaagaaag

SEQ ID NO: 305269 - DNA, 75 bp, synthetic construct
  source 1..75: mol_type = other DNA
acatatgcccatgacgatgctggcgagttaatgaagagcttcatgctcttcaaaacaaccccatttgctggattt

SEQ ID NO: 305270 - DNA, 75 bp, synthetic construct
  source 1..75: mol_type = other DNA
gtgttcgtcatgagatgaacgacaacggctttgacataggcctgcgagaagactggcatacgccatatgtggatg

SEQ ID NO: 305271 - DNA, 75 bp, synthetic construct
  source 1..75: mol_type = other DNA
ggtttgataaaagtacagaagattttaagggtgaggagtattcaaaagattttggagatgacggttcagttatgg

SEQ ID NO: 305272 - DNA, 75 bp, synthetic construct
  source 1..75: mol_type = other DNA
atgcttgaagatactacaattcataatgcaataactgataaagcgttatcaagctactttcgcagttcgggtaat

SEQ ID NO: 305273 - DNA, 75 bp, synthetic construct
  source 1..75: mol_type = other DNA
gatatcctgatcatcagcaccccgcaggatacgccgcgcttcgagcaactgctgggcgacggcagccagtggggc

SEQ ID NO: 305274 - DNA, 75 bp, synthetic construct
  source 1..75: mol_type = other DNA
tggccggtggatctggtacacgtctctatccggttactatggcggtgagcaagcagttgttgcccatctatgaca

SEQ ID NO: 305275 - DNA, 75 bp, synthetic construct
  source 1..75: mol_type = other DNA
ccggtgccatttaaaagtggtaccggagcaattgataacgacactgtctacattggtttaggtagcgcaggtaca

SEQ ID NO: 305276 - DNA, 75 bp, synthetic construct
  source 1..75: mol_type = other DNA
aaaaagtaattatgcggtaactgggctttatttctatgataacgacgttgtcgaaatggcgaaaaaccttaagcc

SEQ ID NO: 305277 - DNA, 75 bp, synthetic construct
  source 1..75: mol_type = other DNA
gctgttaacaacgaaagtggtgcaacggtatttgcctatcacgttaatgatcctgaacgctacggtgtcgttgag

SEQ ID NO: 305278 - DNA, 75 bp, synthetic construct
  source 1..75: mol_type = other DNA
accgtaaagggtttattgatgcagagcaggtgaaagtattagctgaaccgctcaagaaaaatgcttacggccaat

SEQ ID NO: 305279 - DNA, 75 bp, synthetic construct
  source 1..75: mol_type = other DNA
atagtatatgctgaagatatgggacgggatcgcgccttttgttatcctggtgcaccaggtaataatactactcct

SEQ ID NO: 305280 - DNA, 75 bp, synthetic construct
  source 1..75: mol_type = other DNA
tgttactttcctgactttacctgttagtacaactggaaaagtgcctgcggcaggtcgttataatgcactggctat

SEQ ID NO: 305281 - DNA, 75 bp, synthetic construct
  source 1..75: mol_type = other DNA
acttattacttattacttattacttatttattgttttcgcgttgtggttggtttttaaatgagattaatgcaaaa

SEQ ID NO: 305282 - DNA, 75 bp, synthetic construct
  source 1..75: mol_type = other DNA
atgcgaaagctgaaaatgatgctcttcggcgcaagcttgataatggtggtcgggtgctcgtcaaaggaaaatgcc

SEQ ID NO: 305283 - DNA, 75 bp, synthetic construct
  source 1..75: mol_type = other DNA
tctataagagaaatgaaacaatgacagataagacagttccttttgaaaactatagcaccaattatccagcagaca

SEQ ID NO: 305284 - DNA, 75 bp, synthetic construct
  source 1..75: mol_type = other DNA
taaaagtaatttgtatattgttttttcttttaatcagtagttgctataacatcgtgtatgcagaagatatgggac

SEQ ID NO: 305285 - DNA, 75 bp, synthetic construct
  source 1..75: mol_type = other DNA
gtttcctgcccggaagaaattgcttaccgtaaagggtttgttgatgctgagcaggtgaaagtattagggaaggtg

SEQ ID NO: 305286 - DNA, 75 bp, synthetic construct
  source 1..75: mol_type = other DNA
atgaaaacgcgtaaaggtattattttagcggggggatctggtactcgtctttatcctgtcactatggctgtcagt

SEQ ID NO: 305287 - DNA, 75 bp, synthetic construct
  source 1..75: mol_type = other DNA
actgggtgatggcagccagtggggcctgaatcttcaatacaaagtgcaaccgagcccagacggtcttgcgcaagc

SEQ ID NO: 305288 - DNA, 75 bp, synthetic construct
  source 1..75: mol_type = other DNA
ttctgcccgtggtgaactggaaattaccgatattaaccgtatctatatggaacaggggcgtttatccgttgccat

SEQ ID NO: 305289 - DNA, 75 bp, synthetic construct
  source 1..75: mol_type = other DNA
cccaaccgatggcctgccttgtggacgtaagagtacagcgaatgaattactggcggtgaacaatgaaaatcactc

SEQ ID NO: 305290 - DNA, 75 bp, synthetic construct
  source 1..75: mol_type = other DNA
tgtctctggcgttgttactgctggtgggctgtcgttcacatccggaaattccggtgaatgatgagcaatcgctgg

SEQ ID NO: 305291 - DNA, 75 bp, synthetic construct
  source 1..75: mol_type = other DNA
aaacagctattaccgatttatgataaaccgatgatctattacccgctctctacactgatgttggcgggtattcgc

SEQ ID NO: 305292 - DNA, 75 bp, synthetic construct
  source 1..75: mol_type = other DNA
tgactgtcagcggttacgttctggaggtgcagaccactgaacggaacgccagcggattacagattatcgctgatc

SEQ ID NO: 305293 - DNA, 75 bp, synthetic construct
  source 1..75: mol_type = other DNA
acggtgacgccggttgttctcgacggtgtgatcactctcgatatcagtcagcaactgagtgattttgtaaagaca

SEQ ID NO: 305294 - DNA, 75 bp, synthetic construct
  source 1..75: mol_type = other DNA
tatgataataatgttgttgagatagcgaaatcattaaaaccctcgaagcgaggagagctagaaataacggatatt

SEQ ID NO: 305295 - DNA, 75 bp, synthetic construct
  source 1..75: mol_type = other DNA
ctaaatcttcagtacaaagtgcaaccgagtccagatggtcttgcgcaggcatttatcatcggtgaagagtttatc

SEQ ID NO: 305296 - DNA, 75 bp, synthetic construct
  source 1..75: mol_type = other DNA
gacacggggacacatcaaagcctgattgaggcaagcaacttcattgcaacaattgaagagcgtcaggggttgaaa

SEQ ID NO: 305297 - DNA, 75 bp, synthetic construct
  source 1..75: mol_type = other DNA
agttccggtgctggacagtgtcagctatcagggcagcagcggaacgccagtccagtctgtgacatacaggaacag

SEQ ID NO: 305298 - DNA, 75 bp, synthetic construct
  source 1..75: mol_type = other DNA
ggaacaaaacgctgggctctatccccgtagattccccactaatgcctgaccaacacattattttcggcggtcgac

SEQ ID NO: 305299 - DNA, 75 bp, synthetic construct
  source 1..75: mol_type = other DNA
tgcaggtgtgatagaggtagagggctcaggcgttgcctctgttcagcgtgcacttaagaaaatgttattgtcggg

SEQ ID NO: 305300 - DNA, 75 bp, synthetic construct
  source 1..75: mol_type = other DNA
atgcctctcgacttccataacccggcagctcacaaggaagcgttggccgctgaatgtattgctgaacagaagggc

SEQ ID NO: 305301 - DNA, 75 bp, synthetic construct
  source 1..75: mol_type = other DNA
agtatggatatctgggctctggatggagaacggaatcaaactggacgacaccactaagaagctctcatttcagta

SEQ ID NO: 305302 - DNA, 75 bp, synthetic construct
  source 1..75: mol_type = other DNA
ggattgcaatcgcccagaaatccactttgaaaataggagcatgggtcgccaagagcggtcccttgcctgtggccg

SEQ ID NO: 305303 - DNA, 75 bp, synthetic construct
  source 1..75: mol_type = other DNA
ataaacaagatggaagagatgatatcttttcagtgataatggctattgaaaatgctaaaaaaagtaatttgaagg

SEQ ID NO: 305304 - DNA, 75 bp, synthetic construct
  source 1..75: mol_type = other DNA
gtgacaaaaatcatggcatgcgggaccacgctgatgggctacacgcaagggtgctgttcgtcaccggactgttgc

SEQ ID NO: 305305 - DNA, 75 bp, synthetic construct
  source 1..75: mol_type = other DNA
gacaaaaatcatggcctgcgggaccacactgatgggttacacacagtggtgttgttcctcaccggactgttgcca

SEQ ID NO: 305306 - DNA, 75 bp, synthetic construct
  source 1..75: mol_type = other DNA
caataaccaccttaataatttcactcaatgcatacgcaaacacgaatgacattaaaactcttcaaaaacaactga

SEQ ID NO: 305307 - DNA, 75 bp, synthetic construct
  source 1..75: mol_type = other DNA
cactctttcatgcaaatgaaaaaataccatttataacttgtatagttaaaaatgttgaagagaatgaacaaggaa

SEQ ID NO: 305308 - DNA, 75 bp, synthetic construct
  source 1..75: mol_type = other DNA
gttgtgataaagacaggttgaaaaatatttatattcgcttggtttcagaacttacacagatgagtgaagaaacta

SEQ ID NO: 305309 - DNA, 75 bp, synthetic construct
  source 1..75: mol_type = other DNA
ttgttggtgccgcgctactgatggcgggttgtagctccagcaacgaattgagtgcagctggtcagagtgtacgca

SEQ ID NO: 305310 - DNA, 75 bp, synthetic construct
  source 1..75: mol_type = other DNA
gaatgctctcttccggaagaaagagaggttgatttctggtatgtacttcctctggccggccagtccaatgcaatg

SEQ ID NO: 305311 - DNA, 75 bp, synthetic construct
  source 1..75: mol_type = other DNA
atgttgacaagaaatatagagtcaggacgatcttttgatgactatagtgtgttggactgggatgtggacataaat

SEQ ID NO: 305312 - DNA, 75 bp, synthetic construct
  source 1..75: mol_type = other DNA
cctttagtattatgctggcaattatcctcagtgcctttttcattgccgcggtaatggtattaaacggtgctgcgg

SEQ ID NO: 305313 - DNA, 75 bp, synthetic construct
  source 1..75: mol_type = other DNA
atgacgattgcagaacgtcttatacagaaaggtttcgacgagggttttaaacaaggggctctagaagtggcgcgg

SEQ ID NO: 305314 - DNA, 75 bp, synthetic construct
  source 1..75: mol_type = other DNA
tacgttgacggtagcaccaactccgacgcttggggcttcggtttgaaagccggttacgacttcaaactgggtgat

SEQ ID NO: 305315 - DNA, 75 bp, synthetic construct
  source 1..75: mol_type = other DNA
tcctgtttacctctttctcagggagtttagtctccaggattcccgggtcggttcaaacgtctttgttgacggtag

SEQ ID NO: 305316 - DNA, 75 bp, synthetic construct
  source 1..75: mol_type = other DNA
aaaacacccggtgagcatatcgaaaataatggaatcatttacgatatcctgcccttcccggagatgaatatttcg

SEQ ID NO: 305317 - DNA, 75 bp, synthetic construct
  source 1..75: mol_type = other DNA
ccatggttgtgtggtgatacaacctggttagactggccccctgaatctccagacaaccaatatcacttaaataag

SEQ ID NO: 305318 - DNA, 75 bp, synthetic construct
  source 1..75: mol_type = other DNA
accggaacagcactctatgaggacttagtagcccgggttaaggtagctctggaatataacagaaagaataaactg

SEQ ID NO: 305319 - DNA, 75 bp, synthetic construct
  source 1..75: mol_type = other DNA
ctatctgtctgctggatgcaggggagtttgatcttatgtcaccagattatgaaaagcatcctgacttgttttatc

SEQ ID NO: 305320 - DNA, 75 bp, synthetic construct
  source 1..75: mol_type = other DNA
agaaaggtttcgacgaaggttttaaagaaggttttaaagaaggttttaaagaaggttttaaagaaggttttaaag

SEQ ID NO: 305321 - DNA, 75 bp, synthetic construct
  source 1..75: mol_type = other DNA
ggggattatgtttgcggcgattggttacgcaatgtatgcgggagtatggcaaagcccggtgccggaggaattgta

SEQ ID NO: 305322 - DNA, 75 bp, synthetic construct
  source 1..75: mol_type = other DNA
tgaatgcgctgacgctgacggatattaccaaaaatgcagcgtatggcgttgagatagaaagtctggtgctggaga

SEQ ID NO: 305323 - DNA, 75 bp, synthetic construct
  source 1..75: mol_type = other DNA
ttgcaaaccgtgttgcctgacgttgcctggcataacaatattcgcgccgagctgtggcgcaagctggccgtcaac

SEQ ID NO: 305324 - DNA, 75 bp, synthetic construct
  source 1..75: mol_type = other DNA
ccgaaatttttaatgtcgatccacgtacaattgaacgctggcaaactcaggggctccctccggtatctggtggcg

SEQ ID NO: 305325 - DNA, 75 bp, synthetic construct
  source 1..75: mol_type = other DNA
catttcaccatcacatcttgatgtggtgaaaactgaaatcgcgaaagcctccaatgttgcagctaaagtcggtaa

SEQ ID NO: 305326 - DNA, 75 bp, synthetic construct
  source 1..75: mol_type = other DNA
agagacttatcaaaactactcccaaaacgcaagaattagatataataatatattgcattgggacaattgggctaa

SEQ ID NO: 305327 - DNA, 75 bp, synthetic construct
  source 1..75: mol_type = other DNA
tgcaacgtgtggcacaggagatttcggggatacttgtgcgtgtgccgttgacattacagcgtaaatatccggaca

SEQ ID NO: 305328 - DNA, 75 bp, synthetic construct
  source 1..75: mol_type = other DNA
tttacaacccggcaccattgactatgaacgctaccggctcacaaaagcgcaggcagatgcgcaggaactgaaaaa

SEQ ID NO: 305329 - DNA, 75 bp, synthetic construct
  source 1..75: mol_type = other DNA
ggtcatcagaaggacatccggtcattgtttctaacagtgacacatccctgatccgttcgctgtatcgcaatttta

SEQ ID NO: 305330 - DNA, 75 bp, synthetic construct
  source 1..75: mol_type = other DNA
cacctggcatctgttcttgaacattggtcatcagaaggatatccggtcattatttctaacagtgacacatccctg

SEQ ID NO: 305331 - DNA, 75 bp, synthetic construct
  source 1..75: mol_type = other DNA
ccgcgactggttgaacctttcgcggggtcctgtgctgtgatgatggagacggattatcccagctatctggttgcg

SEQ ID NO: 305332 - DNA, 75 bp, synthetic construct
  source 1..75: mol_type = other DNA
gggaaatctgcaacagaaatcattgctgtttccgggccgagctgctggttgggatttgatccttcgcgtggcgtg

SEQ ID NO: 305333 - DNA, 75 bp, synthetic construct
  source 1..75: mol_type = other DNA
gaaataaaaccgccgtaatatccgaactgaaaaaacatcttcctgctggtccgcgactagttgaacctttcgcgg

SEQ ID NO: 305334 - DNA, 75 bp, synthetic construct
  source 1..75: mol_type = other DNA
tctgcgcaagctttgatgaaacgctggcgatgctgcaggtgggggatgtggtgtattgcgatccgccgtatgacg

SEQ ID NO: 305335 - DNA, 75 bp, synthetic construct
  source 1..75: mol_type = other DNA
aaaataacgttgaagaatatcagaaattcatcgatgtgttatctaacgctgatatacttcttttaccaaccattg

SEQ ID NO: 305336 - DNA, 75 bp, synthetic construct
  source 1..75: mol_type = other DNA
caggcaggtcagtaggctcaattactgttaagcagtgggttgatctcttcactcaggaagagagggccaacagtc

SEQ ID NO: 305337 - DNA, 75 bp, synthetic construct
  source 1..75: mol_type = other DNA
cctcatgttactgagcgaatgctcggtcatgaacttggcgggataatgtcagtatacaataaacacgactggata

SEQ ID NO: 305338 - DNA, 75 bp, synthetic construct
  source 1..75: mol_type = other DNA
gtggggagtgtggggaatttaacaaaattgaaacgcgattccccactttcccacctgtatatacctcaaaaagtg

SEQ ID NO: 305339 - DNA, 75 bp, synthetic construct
  source 1..75: mol_type = other DNA
atcgactatatcaatggttttctcttacgccgcgcccgcgcgcatgggattgccgtaccggaaaacacccgcctg

SEQ ID NO: 305340 - DNA, 75 bp, synthetic construct
  source 1..75: mol_type = other DNA
ccagaaatcccattcgccacggcagggcatgcctggacacttgacgaaaacaagcgcgatactgccgatcgtgcc

SEQ ID NO: 305341 - DNA, 75 bp, synthetic construct
  source 1..75: mol_type = other DNA
atgctggcagagttctgtcgtcagaagcgccctgcagcctgggaagcgcctcacccgcttgaacgcgcgttgcgt

SEQ ID NO: 305342 - DNA, 75 bp, synthetic construct
  source 1..75: mol_type = other DNA
gcgtggggctacttcctccatcagggcgtggtcgatccgctgggcggtattaacactctgtggccgctgtttggt

SEQ ID NO: 305343 - DNA, 75 bp, synthetic construct
  source 1..75: mol_type = other DNA
ctgccgcgcaggtggtgagtagctggggctttgcgattaccccggatacgctaaaccagattgccagcgaagtgg

SEQ ID NO: 305344 - DNA, 75 bp, synthetic construct
  source 1..75: mol_type = other DNA
tgatgccgggttaaccatcttctttatggtggtcgtggtggttctggcgctgttctcgattaagacggcactggc

SEQ ID NO: 305345 - DNA, 75 bp, synthetic construct
  source 1..75: mol_type = other DNA
ctctgatgtggaagagcagtatgcaaagcgtattgcattaacagcgctacagagcgaagagccggttggtattga

SEQ ID NO: 305346 - DNA, 75 bp, synthetic construct
  source 1..75: mol_type = other DNA
agcttttgccatgcgctcccgcagcgttggcatttaatgtctgtgatgctgagtgcggcttcttgcctggattgg

SEQ ID NO: 305347 - DNA, 75 bp, synthetic construct
  source 1..75: mol_type = other DNA
aaaaaacaccggtaaaggtggcgcactaatgcatggactaaaatacgccacgtgtgatcaagtatttttaagtga

SEQ ID NO: 305348 - DNA, 75 bp, synthetic construct
  source 1..75: mol_type = other DNA
aacaggcggctacactaacgagcaggcaggcaattcatcaacggtaaagcgttttaatgacgccgataacaatca

SEQ ID NO: 305349 - DNA, 75 bp, synthetic construct
  source 1..75: mol_type = other DNA
atggtgcgattgcggatgctgatgaagccattctgaggacgatgggcattccggtacagattacgtcgggacgac

SEQ ID NO: 305350 - DNA, 75 bp, synthetic construct
  source 1..75: mol_type = other DNA
gggaaaacgacattaatcagcgtcacggttttggtaattgccagcttgtttattcgccatgcgtggtgtcgttat

SEQ ID NO: 305351 - DNA, 75 bp, synthetic construct
  source 1..75: mol_type = other DNA
actggtgcaacggaaattgctcatcagctcagtattgcccgctccacggtttataaaattcttgaagacgaaagg

SEQ ID NO: 305352 - DNA, 75 bp, synthetic construct
  source 1..75: mol_type = other DNA
gtggacgtggtttcattggcagtgaaatcgttgaaaatcttttggctaagggtgaggatgttgaggttccaccgc

SEQ ID NO: 305353 - DNA, 75 bp, synthetic construct
  source 1..75: mol_type = other DNA
tacaacaacaggcactaaagcccccattgcaaaaatatacaatggtggagagttatttttttttccaatgtcacc

SEQ ID NO: 305354 - DNA, 75 bp, synthetic construct
  source 1..75: mol_type = other DNA
aaagacgaacttggcgaaatagccaaactcgatcaaggcaaacgcctcggtccagatccagaccagttcggcggt

SEQ ID NO: 305355 - DNA, 75 bp, synthetic construct
  source 1..75: mol_type = other DNA
ttgcaaaaagagggattaatcaaaagcatcggcgtgtgcaacttccagatccatcacctgcaacgcctgattgat

SEQ ID NO: 305356 - DNA, 75 bp, synthetic construct
  source 1..75: mol_type = other DNA
tttttataattggtgatgatcctttttctctgcgctggatgagtgaacatctggagatccttaaatcgctaaatg

SEQ ID NO: 305357 - DNA, 75 bp, synthetic construct
  source 1..75: mol_type = other DNA
gaatatttatattgccatcacgttctggtattgggtgcgctattacgaaacggcaagtagcacgacatttgtcgc

SEQ ID NO: 305358 - DNA, 75 bp, synthetic construct
  source 1..75: mol_type = other DNA
gtgatggggtacgcgatgtatgcgggcgtatggcaaagcccggtgccggaagagttgtatctgcgtttaattcca

SEQ ID NO: 305359 - DNA, 75 bp, synthetic construct
  source 1..75: mol_type = other DNA
tgtttctccggatgacgggggcagctgttatctctggctcaaccgtgggcaaccacccgctcttaaccggcgacg

SEQ ID NO: 305360 - DNA, 75 bp, synthetic construct
  source 1..75: mol_type = other DNA
ctgcgctttggtcatttcgaacatttttactaccgccgcgagccggaaaaggttcgtcagttagctgactttgcc

SEQ ID NO: 305361 - DNA, 75 bp, synthetic construct
  source 1..75: mol_type = other DNA
gggttgaaaacgaaaaaggcgagaaaatcacctcgccactggctgttctgccgcccgtgcagcgcatagaggcga

SEQ ID NO: 305362 - DNA, 75 bp, synthetic construct
  source 1..75: mol_type = other DNA
aagaagaacaaaaagacgggctgtgtgcctacggctgcaatgaagttcctgaacgtcctgcagcaggacgaccac

SEQ ID NO: 305363 - DNA, 75 bp, synthetic construct
  source 1..75: mol_type = other DNA
gactggggctggtctttgatactgaccccgtcaacgacaaaggaggcaacagtgccggaactgaacgacagtatc

SEQ ID NO: 305364 - DNA, 75 bp, synthetic construct
  source 1..75: mol_type = other DNA
aggtcacactcacgcgcagcggccaggactataccgtcaataacccgacgccgtaccacgtcatcatcagcgatg

SEQ ID NO: 305365 - DNA, 75 bp, synthetic construct
  source 1..75: mol_type = other DNA
taacagcggttcggcacaccgctgtacatatcagccgcattatacatacaacatcaacattcccgtgcgtcataa

SEQ ID NO: 305366 - DNA, 75 bp, synthetic construct
  source 1..75: mol_type = other DNA
gcgcaggataaagagacgctgttttactttaatgtgcgagaaattccgccgaaaagcgataaacccaattcgctg

SEQ ID NO: 305367 - DNA, 75 bp, synthetic construct
  source 1..75: mol_type = other DNA
attcgtcattactggtcacatcttgcagatgaggaggacaaataccgtctctggtttaccgatgttgtcgcacgt

SEQ ID NO: 305368 - DNA, 75 bp, synthetic construct
  source 1..75: mol_type = other DNA
attacaccgcctgcatgaggcgttgcgaaatcctttcagcgacagagatgatgattatgtcagccgtccaccgga

SEQ ID NO: 305369 - DNA, 75 bp, synthetic construct
  source 1..75: mol_type = other DNA
gtttgcccgttatcgggcgcgtttgcagcaagataacgtcaccgacagcgaacgtcagcaactgatgcaaagcgt

SEQ ID NO: 305370 - DNA, 75 bp, synthetic construct
  source 1..75: mol_type = other DNA
actatttgcaacagtgccctgtcggctgtggcacaggctgaacgccggaggatcctagagcgcacgaatgagggc

SEQ ID NO: 305371 - DNA, 75 bp, synthetic construct
  source 1..75: mol_type = other DNA
gggcgatggacgggcggtattgcgctctacgattcgtgaaagtctcgccagtgaggcgatgcattatctgggtat

SEQ ID NO: 305372 - DNA, 75 bp, synthetic construct
  source 1..75: mol_type = other DNA
tacagcactttcccccacgcctttaaataacgcccggctgatttggcataatgcagaactggctaacacgctggg

SEQ ID NO: 305373 - DNA, 75 bp, synthetic construct
  source 1..75: mol_type = other DNA
aacttctggatagaccggatttcgccggatgatggcggaagctgtcatctctggcttgggcgtggcgtgccgcct

SEQ ID NO: 305374 - DNA, 75 bp, synthetic construct
  source 1..75: mol_type = other DNA
atcgataaagtggtgaaaatgcctggcgtcacagcagatgatcagcgtctgttgaagaaactgaagtccgatatg

SEQ ID NO: 305375 - DNA, 75 bp, synthetic construct
  source 1..75: mol_type = other DNA
tgctgcttaatatgggatcgtctcatggtcttgccatggtgttctctatgttgctggcggcgattatctggaacc

SEQ ID NO: 305376 - DNA, 75 bp, synthetic construct
  source 1..75: mol_type = other DNA
accccggcatccgaagttatggaatcaattaaatggcctgtatgcggatgtcctgccagggttgaagagccggta

SEQ ID NO: 305377 - DNA, 75 bp, synthetic construct
  source 1..75: mol_type = other DNA
tgaaagtagcggcctggcggcagctcatgccattcataacggcatgacgcaactggaggaatgccatcattgcta

SEQ ID NO: 305378 - DNA, 75 bp, synthetic construct
  source 1..75: mol_type = other DNA
catgacctatgctcagggtatgtctgcccagatgacggcggcagtttctatcggcctggcgagttataccgggat

SEQ ID NO: 305379 - DNA, 75 bp, synthetic construct
  source 1..75: mol_type = other DNA
gcttgcactggcttttgtgctgttctacgaagccatcaatggtttccatgacacagccaacgccgtggcaactgt

SEQ ID NO: 305380 - DNA, 75 bp, synthetic construct
  source 1..75: mol_type = other DNA
ggcgcgaacgacggacagaaagggatcggcctggtgatgctggttctggtggggattgcgcccgccgggtttgtc

SEQ ID NO: 305381 - DNA, 75 bp, synthetic construct
  source 1..75: mol_type = other DNA
ggcggcattttttaacttttttggcgtattgctaggcggacttagcgttgcctatgccattgtccatatgttgcc

SEQ ID NO: 305382 - DNA, 75 bp, synthetic construct
  source 1..75: mol_type = other DNA
aaattacccgtacccgcgatgccgtcaccaacttcgaacactacctgcaacagcatcctgaactgccgcagaagt

SEQ ID NO: 305383 - DNA, 75 bp, synthetic construct
  source 1..75: mol_type = other DNA
aaactgggtgatgctggttacgtgactccttacggcagcgtttctggtctgttccagtctggtgatgactaccag

SEQ ID NO: 305384 - DNA, 75 bp, synthetic construct
  source 1..75: mol_type = other DNA
agcgcctataccgatgctaactacctcggtggtggtgacgtagatcaagactggtccgcgaacgtgggtgttaaa

SEQ ID NO: 305385 - DNA, 75 bp, synthetic construct
  source 1..75: mol_type = other DNA
agctgcgccgcattatgctgtgcatctctgatacctccgcgaagctggcgaaactgccaggcgtcagtaaagaag

SEQ ID NO: 305386 - DNA, 75 bp, synthetic construct
  source 1..75: mol_type = other DNA
caactacatttatgccgaaaacaatctcttctttttacgcctgaacaaccctaaagcgatctggtgtttgcggat

SEQ ID NO: 305387 - DNA, 75 bp, synthetic construct
  source 1..75: mol_type = other DNA
tgcagcgttgctccgcgcatctgattgatgaaatacttcatcgcgcaggtgaagaaaaactcttttccatattta

SEQ ID NO: 305388 - DNA, 75 bp, synthetic construct
  source 1..75: mol_type = other DNA
ctatatgaccgacaagttgaactgatcgagagcatccggcttcatcaactggcctcaacttttgacgctgtaaca

SEQ ID NO: 305389 - DNA, 75 bp, synthetic construct
  source 1..75: mol_type = other DNA
ggatctgttgcaaaccaaagagctgccaaaaggcgtcgatcgtctggtgacggcaatgaacaactcttccagcct

SEQ ID NO: 305390 - DNA, 75 bp, synthetic construct
  source 1..75: mol_type = other DNA
ggcgctcagtacccgcagaaaaaaagcgcggaagggttgagcgggaaacgctgctggctggcagtccgcaatgcg

SEQ ID NO: 305391 - DNA, 75 bp, synthetic construct
  source 1..75: mol_type = other DNA
catcgacacccactacagaaaacaaatattactggatttgcagcccatgcaatgcatgggttggatgtcataaaa

SEQ ID NO: 305392 - DNA, 75 bp, synthetic construct
  source 1..75: mol_type = other DNA
aaacatgatgaaaaatgaacgtctgacttatgcagcactgaatattgcagatgttcgtccaattgtaatctgcac

SEQ ID NO: 305393 - DNA, 75 bp, synthetic construct
  source 1..75: mol_type = other DNA
gaaacgtcgaaaggtcgtattttccacgacgatgagaaaattacggctgaatatatatcacgcttaaccgacacg

SEQ ID NO: 305394 - DNA, 75 bp, synthetic construct
  source 1..75: mol_type = other DNA
actattcaacgatctacgagacatgaagtcacgcagaaaatcactggaagaagaaatagctatatcagaagagaa

SEQ ID NO: 305395 - DNA, 75 bp, synthetic construct
  source 1..75: mol_type = other DNA
gagacggacaaccgaaaacgccggaagaggtaattatccgctggcagggaaaatcagatgtttttgatgcaaacc

SEQ ID NO: 305396 - DNA, 75 bp, synthetic construct
  source 1..75: mol_type = other DNA
tcatgttccgatgtttatctggtacagcccgacactgggagagtatgtcgatcgccagacggtgaacagcgtttt

SEQ ID NO: 305397 - DNA, 75 bp, synthetic construct
  source 1..75: mol_type = other DNA
agctgggggatgataaaggtatcggtgaagtagttggcgttggtcgctactggacaggcttgaatactgaagttt

SEQ ID NO: 305398 - DNA, 75 bp, synthetic construct
  source 1..75: mol_type = other DNA
cttaaagacatccaggaagaaatgacgcccatcggtattcaggtaatgagcctctcatatgtgggcaagccggag

SEQ ID NO: 305399 - DNA, 75 bp, synthetic construct
  source 1..75: mol_type = other DNA
gcgtggatgacattaccgacaccgacctgcgccagaagattgccgacgcacttaaccgactggccagcaaaatga

SEQ ID NO: 305400 - DNA, 75 bp, synthetic construct
  source 1..75: mol_type = other DNA
tgaatcacagaatgtgattaccggaatttatgccagtaaagaatcctgcctccaggcaagagacgagcaaaaaat

SEQ ID NO: 305401 - DNA, 75 bp, synthetic construct
  source 1..75: mol_type = other DNA
accttttggtcatagaggcgtttatgccggatggcgtgctgaactttcagcatcagccacgcatgtgaaaaaagg

SEQ ID NO: 305402 - DNA, 75 bp, synthetic construct
  source 1..75: mol_type = other DNA
acaggctgatgccattcgaacaaaagccctggcagaagccgatgccattcgtttacgcggcgaagctctgcgcca

SEQ ID NO: 305403 - DNA, 75 bp, synthetic construct
  source 1..75: mol_type = other DNA
gatgaagatgccgttccagcgtgcaatcaccaaaaaagagcaggctgatatgggcaaactgaaaaaagtgttcac

SEQ ID NO: 305404 - DNA, 75 bp, synthetic construct
  source 1..75: mol_type = other DNA
gtgcacccaatgaccgcgctgggccgtgaaatgggcctgcaggagatgactggattctctaagactgcgttttaa

SEQ ID NO: 305405 - DNA, 75 bp, synthetic construct
  source 1..75: mol_type = other DNA
ttacaggcggtttactctgccgtcgcgatgggcggcagtatcgccatcatgaccgttttcgccggtttcctgtat

SEQ ID NO: 305406 - DNA, 75 bp, synthetic construct
  source 1..75: mol_type = other DNA
acatgctacgtgcggaagctgccggacaggctgatgccattcgaacaaaagcccaggcagaagccgatgccattc

SEQ ID NO: 305407 - DNA, 75 bp, synthetic construct
  source 1..75: mol_type = other DNA
cgcctgcgtgaagttcatagccagaaactcagcaaagaagcacaaaagctgatgaagatgccgtttcagcgtgcg

SEQ ID NO: 305408 - DNA, 75 bp, synthetic construct
  source 1..75: mol_type = other DNA
tcaaacgtcttagcgatcgcctggacgctatccgccatcagcaagccgatctgtcactggttgaagccgcagaca

SEQ ID NO: 305409 - DNA, 75 bp, synthetic construct
  source 1..75: mol_type = other DNA
gtgagttcagcgtttgcactgatgatgacggtttttctgataacaggtgagccacagaatgtgattaccggaatt

SEQ ID NO: 305410 - DNA, 75 bp, synthetic construct
  source 1..75: mol_type = other DNA
gattggttggcgtgatatgcagcacgccctcgattatctgttcgctgacgggcagcttaagcagggaacgctggt

SEQ ID NO: 305411 - DNA, 75 bp, synthetic construct
  source 1..75: mol_type = other DNA
accggaggtgctggcgcaaaccgaagcaaaactgcgcgacctgtggaatgtgaatatcgttggcagccaggacgg

SEQ ID NO: 305412 - DNA, 75 bp, synthetic construct
  source 1..75: mol_type = other DNA
tgaatatcgttggcagtcaggatggttattttaaacccgagcagcgtcaggcgctgtttgaacgcattcatgcca

SEQ ID NO: 305413 - DNA, 75 bp, synthetic construct
  source 1..75: mol_type = other DNA
gcaaaaagtgatggatctcaactcaccgcgagttaaccgaacacagctggttgagtcgattaatatggcgaaatt

SEQ ID NO: 305414 - DNA, 75 bp, synthetic construct
  source 1..75: mol_type = other DNA
tgaaatcaccgccctgatgctgctggcttccgatgcgtttatgcaggcgaactacgcgcaagccatcgaactatg

SEQ ID NO: 305415 - DNA, 75 bp, synthetic construct
  source 1..75: mol_type = other DNA
accgcccagactcgcgcaatgatcgacaaagccctcgcgctggactctaacgaaatcaccgctctgatgctgctg

SEQ ID NO: 305416 - DNA, 75 bp, synthetic construct
  source 1..75: mol_type = other DNA
tttctgcgcttcgaccgccagattgtactggtggattgcctgcaaccgctcaacagtggtccgcaggcttttaac

SEQ ID NO: 305417 - DNA, 75 bp, synthetic construct
  source 1..75: mol_type = other DNA
cggatgttgacgcctggggtgagtccaaactggcacaggccgataaacacaccaacgccgggatgctgcgtgagc

SEQ ID NO: 305418 - DNA, 75 bp, synthetic construct
  source 1..75: mol_type = other DNA
atcccggcgaatggctgctcgacctgccgatgctggcgcaggactatttaagctggtcgcgccagatgacgggct

SEQ ID NO: 305419 - DNA, 75 bp, synthetic construct
  source 1..75: mol_type = other DNA
atgaaatccgttattacgatttccgccagcctggcgattagcctgatgctgtgctgcacggcgcaggcaaacgac

SEQ ID NO: 305420 - DNA, 75 bp, synthetic construct
  source 1..75: mol_type = other DNA
caaactggcgcaggccgataaacacaccaacgccggaatgttgcgcgagcgttttaattattactgcgagaaagt

SEQ ID NO: 305421 - DNA, 75 bp, synthetic construct
  source 1..75: mol_type = other DNA
gggctggcttccgttcaggcgaccaccagcggcatcatcgacgtcaacggcgagaaaatcccggcgctgcgcggt

SEQ ID NO: 305422 - DNA, 75 bp, synthetic construct
  source 1..75: mol_type = other DNA
tacccctggctgacgcatgtcacgaaatccgatgtgaactcacaccgggtagcgacgcgcaaagacgttgagcgt

SEQ ID NO: 305423 - DNA, 75 bp, synthetic construct
  source 1..75: mol_type = other DNA
cgtgctggaactcgacccaggctcaagcccggcagggatcaccgacaagctgattatcgacgccaccacgcctgt

SEQ ID NO: 305424 - DNA, 75 bp, synthetic construct
  source 1..75: mol_type = other DNA
cggaagtgcaggcggtaaacgccatgtacacccacggcctgctggcgattatctccaccaaaaaacgctacggcg

SEQ ID NO: 305425 - DNA, 75 bp, synthetic construct
  source 1..75: mol_type = other DNA
aaagcccgtacccgatcgccaccgcgccattgactggttttgatgtgccgtggggttcagaagtgatcctcgaag

SEQ ID NO: 305426 - DNA, 75 bp, synthetic construct
  source 1..75: mol_type = other DNA
agccagccggtggtggacttaccggaaaccaaagcctgggctgaaaaactgaccgctatgctggccgcacgtcaa

SEQ ID NO: 305427 - DNA, 75 bp, synthetic construct
  source 1..75: mol_type = other DNA
tggcgacgagatcaacctgttcgatatcctgccgctgtttcgtttaaacgatggcgatggcggtttctatctcga

SEQ ID NO: 305428 - DNA, 75 bp, synthetic construct
  source 1..75: mol_type = other DNA
atcctgccgctgtttcgtttaaacgatggcgatggcggtttctatctcgacaaagcgtgcgtggtttcccgcgat

SEQ ID NO: 305429 - DNA, 75 bp, synthetic construct
  source 1..75: mol_type = other DNA
agacgcagcaagcgtcgcatccggcatttattgtgccgctgcgtacaggccgacaatctgctccaggctggcggt

SEQ ID NO: 305430 - DNA, 75 bp, synthetic construct
  source 1..75: mol_type = other DNA
ggatatccggttttgacagagcaaccacctttatcaaaagaaaaccttattgcattggtagagttgaaaaaagga

SEQ ID NO: 305431 - DNA, 75 bp, synthetic construct
  source 1..75: mol_type = other DNA
tcaacccattgctttgactaagttgagtttaaatatttccccggacgatcgggtgaaaatagttgttactgtttc

SEQ ID NO: 305432 - DNA, 75 bp, synthetic construct
  source 1..75: mol_type = other DNA
gctttgcccgcgcggtgggcctgcgtgcgatgaccacgccgcacggtctgggctatgtgaagatggtgattatgg

SEQ ID NO: 305433 - DNA, 75 bp, synthetic construct
  source 1..75: mol_type = other DNA
ccaccctcggctggaagtattattgcgcggccgggtgccggagcgtatccagcgcctgctgttgcgatcctctgg

SEQ ID NO: 305434 - DNA, 75 bp, synthetic construct
  source 1..75: mol_type = other DNA
atccgccctacatgtgcaatcccgtaggccggataagacgcggcaagcgtcgcatccggcatttattgcgccgct

SEQ ID NO: 305435 - DNA, 75 bp, synthetic construct
  source 1..75: mol_type = other DNA
cagtttatatttactggtgaggttcatatgtgggcaagaattgaagaaaataaagtagaagagataacggaaatt

SEQ ID NO: 305436 - DNA, 75 bp, synthetic construct
  source 1..75: mol_type = other DNA
caaatctgaactactggatgcagctctaaaagatattcaggcagaaatgacgcccatcggtattcaggtaatgag

SEQ ID NO: 305437 - DNA, 75 bp, synthetic construct
  source 1..75: mol_type = other DNA
cttaaagacattcaggaagaaatgacgccaatcggcattcaggtgatgagcctctcttatgtaggtaagccagaa

SEQ ID NO: 305438 - DNA, 75 bp, synthetic construct
  source 1..75: mol_type = other DNA
gtctctacgactggacgggagcgataattgcacttttcggcatgttgattattgttgctggctggggacgcgcct

SEQ ID NO: 305439 - DNA, 75 bp, synthetic construct
  source 1..75: mol_type = other DNA
ttaatgccaaagtcacggcgaaccagaaaaccctgcaacgcgaacaggaagtaaaacagcgcgaagcggaagcta

SEQ ID NO: 305440 - DNA, 75 bp, synthetic construct
  source 1..75: mol_type = other DNA
acaggctggaatacagaggtttacatcttcccgactttcaaacaaatgaagacttacgatgagccgttcaacttc

SEQ ID NO: 305441 - DNA, 75 bp, synthetic construct
  source 1..75: mol_type = other DNA
ctcaatcgactggccagcaaaatgaccactgacaaatttatcgacggcgggaagtctgaactactggatgcagct

SEQ ID NO: 305442 - DNA, 75 bp, synthetic construct
  source 1..75: mol_type = other DNA
tcaaccctatcactatgttaaattctttattcgagtttttgtttctaagacaactcaactccaaaacaccgaaga

SEQ ID NO: 305443 - DNA, 75 bp, synthetic construct
  source 1..75: mol_type = other DNA
acactcttaaaaacacattagataaaaattctcaagctataattcaagatattgttgatagaaatgtttggaaaa

SEQ ID NO: 305444 - DNA, 75 bp, synthetic construct
  source 1..75: mol_type = other DNA
tggcagttaagcctttgcgccctagaatgccatctaggccacgggtagttaaaggaagtctggctgaagctactt

SEQ ID NO: 305445 - DNA, 75 bp, synthetic construct
  source 1..75: mol_type = other DNA
ctgttcgtattgctgctgattcaggtaatcttaccctgattggacaagctgcatgtggcaatggtgttactccag

SEQ ID NO: 305446 - DNA, 75 bp, synthetic construct
  source 1..75: mol_type = other DNA
cgtgaaggtgaaacgacacagactattgtaattactaagccattaacgcttcaggcacaaaacagttacaacgtt

SEQ ID NO: 305447 - DNA, 75 bp, synthetic construct
  source 1..75: mol_type = other DNA
aaaaatctcttacaagtaatgctttagtgggatactctacttgtaaagaagaagcgtgctttgggccaataagag

SEQ ID NO: 305448 - DNA, 75 bp, synthetic construct
  source 1..75: mol_type = other DNA
tgggcgttaccgggctgacggtggcaccggcatctgccagtgtcaatgtgggagcaaccaccacgctgaccttta

SEQ ID NO: 305449 - DNA, 75 bp, synthetic construct
  source 1..75: mol_type = other DNA
gtcaacgattcctgatgatgtgcgtgctgaagcaatcgctacagcaagggccaaatgccgtgcggcgattgcaga

SEQ ID NO: 305450 - DNA, 75 bp, synthetic construct
  source 1..75: mol_type = other DNA
gaaaacgacaacccaggggcagaaatccgttggtgatacttcggcgacgctggcctggcgtccgggtgacagcgg

SEQ ID NO: 305451 - DNA, 75 bp, synthetic construct
  source 1..75: mol_type = other DNA
atttcggggagctgcaggcatccattgagcaggatattaaccagcccgtccgccaggaaatcgatgcctttttct

SEQ ID NO: 305452 - DNA, 75 bp, synthetic construct
  source 1..75: mol_type = other DNA
gaaaacaaagacctggaacttgcagtaatgatggctgcttgtcgcgtgcttggcctgggcaaacagatatttatc

SEQ ID NO: 305453 - DNA, 75 bp, synthetic construct
  source 1..75: mol_type = other DNA
gagtcagacgttttattacggcaagaggcattcagcgcacacaggaagaattgtttgaactggcgcagtcttatg

SEQ ID NO: 305454 - DNA, 75 bp, synthetic construct
  source 1..75: mol_type = other DNA
catattgaagggaaaaaagaggttgcaatggatggattaaactttgatagagtttctcaagttctagagttgcgt

SEQ ID NO: 305455 - DNA, 75 bp, synthetic construct
  source 1..75: mol_type = other DNA
atggcgatgtttaacccccctcatcccggagaaattattgctgatattctggaagatcagaatattggaatcagg

SEQ ID NO: 305456 - DNA, 75 bp, synthetic construct
  source 1..75: mol_type = other DNA
tcagatggttttcaattgcgctatcgagtcgataaccggaaagcatccgaaggatttgcacttttccggtgacac

SEQ ID NO: 305457 - DNA, 75 bp, synthetic construct
  source 1..75: mol_type = other DNA
aaatctgagatcaaggccgcctatgacaacgccaagcgagcattgtcgggcggattggtgaaaaccaaagagcag

SEQ ID NO: 305458 - DNA, 75 bp, synthetic construct
  source 1..75: mol_type = other DNA
acagcggcaagatccggagatggcaaacgtgattttagtcaacgatgacgaaagttgcgggtattcggctacgga

SEQ ID NO: 305459 - DNA, 75 bp, synthetic construct
  source 1..75: mol_type = other DNA
ccccctgaactcaagattcaggaaagtgccagaaaaaattacgaaaaaatctctcattcaacgctgggctactgg

SEQ ID NO: 305460 - DNA, 75 bp, synthetic construct
  source 1..75: mol_type = other DNA
aggcacaggaacggcttaccgggagacttcaggcattaaatgaaagggttcctgagctcattactgacagtaagg

SEQ ID NO: 305461 - DNA, 75 bp, synthetic construct
  source 1..75: mol_type = other DNA
ctggccaatgcctctacgcccggttttcgcgcgcagttaaacgccttgcgcgcagtgccggtggaagggctttca

SEQ ID NO: 305462 - DNA, 75 bp, synthetic construct
  source 1..75: mol_type = other DNA
gacggcatttttcgtttaagcgcagaaacccaggccacgcgtgggccggtactgcaggcagatccaaccttgcgt

SEQ ID NO: 305463 - DNA, 75 bp, synthetic construct
  source 1..75: mol_type = other DNA
atgattgccagcgcgcggcgttttgaaatgcagatgaaggtgatcagcagcgtcgatgataacgcaggccgtgcc

SEQ ID NO: 305464 - DNA, 75 bp, synthetic construct
  source 1..75: mol_type = other DNA
tctggctcgacccgttcctggcgctgacggcattaagcacagtgccagtggccgcaatggcaaccatgatttatc

SEQ ID NO: 305465 - DNA, 75 bp, synthetic construct
  source 1..75: mol_type = other DNA
caatattgactctgattactattaatttgctcttcttaatattaaagtttttacttataaactatggatttatcg

SEQ ID NO: 305466 - DNA, 75 bp, synthetic construct
  source 1..75: mol_type = other DNA
ttttgttttgtattggaaaaaagcaggagttgagttttggcttctatctcttttatctctaacatatatatggaa

SEQ ID NO: 305467 - DNA, 75 bp, synthetic construct
  source 1..75: mol_type = other DNA
tttaaaactcttgttgaaggtgccacaaaaatgtgcctggtttacatcggaaataatctgcccgcagaaaaaaag

SEQ ID NO: 305468 - DNA, 75 bp, synthetic construct
  source 1..75: mol_type = other DNA
aaagaatattccagcagagaaaaaagacaggattatggcaactctgattgaaatggaactaaaaggtgaaatctg

SEQ ID NO: 305469 - DNA, 75 bp, synthetic construct
  source 1..75: mol_type = other DNA
aaacgctgaaagatctcggtggtcctgtcgattttattcttattgatggtttccctcttgctgatggcccaagtc

SEQ ID NO: 305470 - DNA, 75 bp, synthetic construct
  source 1..75: mol_type = other DNA
aaaaaatgtgcctggtgcataccggaaagaatctgcccgcagaaaaaaaaagccgaatttctggcaactctaatt

SEQ ID NO: 305471 - DNA, 75 bp, synthetic construct
  source 1..75: mol_type = other DNA
tgatatctacggtttctcaggaaatgttaaaacacttaacgatggtgttaaaaaaatgtgtctggtgcatatcat

SEQ ID NO: 305472 - DNA, 75 bp, synthetic construct
  source 1..75: mol_type = other DNA
attggctacgtgattaaaacagaaaataaagaaacccctttcactgtggttgaaatcgacggtccatcaggcaac

SEQ ID NO: 305473 - DNA, 75 bp, synthetic construct
  source 1..75: mol_type = other DNA
tgcttttgaacgccggaaatggctggatttgattcagattggttttaacggtacgcactatgccgatacatcaga

SEQ ID NO: 305474 - DNA, 75 bp, synthetic construct
  source 1..75: mol_type = other DNA
tattgcgcgtatcgaatcggcggtaagtcaggggaaatgcatcgcctggatccggaattctgtcgatgacgctat

SEQ ID NO: 305475 - DNA, 75 bp, synthetic construct
  source 1..75: mol_type = other DNA
cgaagttgaccttaagcgtaaaattctcgacgacttgcgtcacctggagtcagtggtgaccaataaaatcagcga

SEQ ID NO: 305476 - DNA, 75 bp, synthetic construct
  source 1..75: mol_type = other DNA
tctgggtaaaaccggaaggcacggcatccctgaatgtgccgctggataaagagacgcagtttgtcgccattattg

SEQ ID NO: 305477 - DNA, 75 bp, synthetic construct
  source 1..75: mol_type = other DNA
gtggcggtgccggaagagacggagaaaaaagcgcgtgacgtcaacgagaaaacggcgctgctgaagaagaaatcc

SEQ ID NO: 305478 - DNA, 75 bp, synthetic construct
  source 1..75: mol_type = other DNA
agctcgcgccagtgttcgactcgctcgataacaaaattattattaccgggcataccgatgcgatggcctacaaaa

SEQ ID NO: 305479 - DNA, 75 bp, synthetic construct
  source 1..75: mol_type = other DNA
gtcagcatggggataaagtggtgcagccgctggtgcaaaagctggataagcagcaggtgctttcgcagcgaacgc

SEQ ID NO: 305480 - DNA, 75 bp, synthetic construct
  source 1..75: mol_type = other DNA
tgatcattattggtcgccttgggcatgatccagaaatcagatattcaccatcaggaacggcatttgcaaacctta

SEQ ID NO: 305481 - DNA, 75 bp, synthetic construct
  source 1..75: mol_type = other DNA
aggcaagagacgagcaaaaattttctggtgaatgcctcccgctaaaaaaagtatcgctgtacctgaataacgaaa

SEQ ID NO: 305482 - DNA, 75 bp, synthetic construct
  source 1..75: mol_type = other DNA
agctgcataaaaaacaatcgaatgaacatataccaaaaataatcaccaatcagtattattgcagattaaacaaat

SEQ ID NO: 305483 - DNA, 75 bp, synthetic construct
  source 1..75: mol_type = other DNA
aataaggtgattatccttggtcgggtaggacaagacccggaagttcgatactcaccatcaggaacagcgttcgct

SEQ ID NO: 305484 - DNA, 75 bp, synthetic construct
  source 1..75: mol_type = other DNA
gatcagatttatttcgagggaatgctgagaaccagaaagtggaaagaccagtcagggcaagaccgttacacaacc

SEQ ID NO: 305485 - DNA, 75 bp, synthetic construct
  source 1..75: mol_type = other DNA
atgatactcagcgaaaatgtggtcactgccagcatactcgatgccagtatgttcagaatgttatcgactgcttcc

SEQ ID NO: 305486 - DNA, 75 bp, synthetic construct
  source 1..75: mol_type = other DNA
ctggatgccaaaaatccgcaaagcgcgggtaaccggcgcattgagattatggtgctcaccaaaagcgcgtccgat

SEQ ID NO: 305487 - DNA, 75 bp, synthetic construct
  source 1..75: mol_type = other DNA
cagagccaaaatataaagcgttagacatgacagagcacgccttaaaggtggcaatcagaacgatagacctccacg

SEQ ID NO: 305488 - DNA, 75 bp, synthetic construct
  source 1..75: mol_type = other DNA
cgttgacagaacgggagattgccgaagcggaacaggtaacaaccatcaacgttaaaaccggagagcagacagcat

SEQ ID NO: 305489 - DNA, 75 bp, synthetic construct
  source 1..75: mol_type = other DNA
atgacagcgaagcacacaaaaaaatcacaatcgcacgcccttgatttgactgaacactggttaagggtgtcgata

SEQ ID NO: 305490 - DNA, 75 bp, synthetic construct
  source 1..75: mol_type = other DNA
agatgacacaaaaacgcagagacagaacacagccaaaatataaagcgttagacatgacagagcacgctttaaagg

SEQ ID NO: 305491 - DNA, 75 bp, synthetic construct
  source 1..75: mol_type = other DNA
aaaatccttatgaaacagcatgataaaaattacaaatcccacgcctttaacgagatggggaattgtgaaaagtgg

SEQ ID NO: 305492 - DNA, 75 bp, synthetic construct
  source 1..75: mol_type = other DNA
cgctgacagaacgggagattgccgaagcggaactggtgacaaccatcaacgttaaaaccggagagcagacagcat

SEQ ID NO: 305493 - DNA, 75 bp, synthetic construct
  source 1..75: mol_type = other DNA
aagtgatgcaggtaagcgcaatggcggaccagatgctgctggatgccaaaatccgcaaagcgcgggcaaccggcg

SEQ ID NO: 305494 - DNA, 75 bp, synthetic construct
  source 1..75: mol_type = other DNA
acgctgcgtctcaaaaatcaccttttccggtcatacggtgaactcatcggatatggccacgctgaaaattatcgg

SEQ ID NO: 305495 - DNA, 75 bp, synthetic construct
  source 1..75: mol_type = other DNA
acgttgtatcaatattttggtcagcatggggataaggtggtgcagccgttggtgaaaaagctggataagcagcag

SEQ ID NO: 305496 - DNA, 75 bp, synthetic construct
  source 1..75: mol_type = other DNA
cacaatctcacgcccttgatttgacagaacactggctgagggtggcgataaaaatcatcgaccgcaacgccgggg

SEQ ID NO: 305497 - DNA, 75 bp, synthetic construct
  source 1..75: mol_type = other DNA
gggaaatgagcgttgtcagagtgcgtcgaagctggtggaaaaaacatcgcgatgagttctctttactggaagggg

SEQ ID NO: 305498 - DNA, 75 bp, synthetic construct
  source 1..75: mol_type = other DNA
attttggtcagcatggggataaggtggtgcagccgctggtgaaaaagctggataagcagcaggtgctttcgcacc

SEQ ID NO: 305499 - DNA, 75 bp, synthetic construct
  source 1..75: mol_type = other DNA
tatgtcagcatcgcgacctttggcgggatgcctggcccggttaacatcttcctggtggtgctgctggcggcgtat

SEQ ID NO: 305500 - DNA, 75 bp, synthetic construct
  source 1..75: mol_type = other DNA
cttgctatcgggcttatttacctgatgcgcttcgactccggtttgaagataacctttctatccgggcaatagctc

SEQ ID NO: 305501 - DNA, 75 bp, synthetic construct
  source 1..75: mol_type = other DNA
aaacgctgcgtcatccattgatgcgggcagaatacctgctttcattgcacggttttgatctcgccagcgagcagc

SEQ ID NO: 305502 - DNA, 75 bp, synthetic construct
  source 1..75: mol_type = other DNA
cacgtaccggcaactggccgctgtgggtgctgacggcactgtttggttttgccgctgtgctgatgagtctgcgtc

SEQ ID NO: 305503 - DNA, 75 bp, synthetic construct
  source 1..75: mol_type = other DNA
ccatctcaaacgatgcgtggtttggtaagtctattggtccgtggcagcacttccagatggcgcgaatgcgtgcgc

SEQ ID NO: 305504 - DNA, 75 bp, synthetic construct
  source 1..75: mol_type = other DNA
ggcgataaccgatctggaaattaatcagcaaccgttcctcaaagcactggacggtgagttgcgcgataaaggtag

SEQ ID NO: 305505 - DNA, 75 bp, synthetic construct
  source 1..75: mol_type = other DNA
atcgtacactgactgcagtggactgctgcctgatggtgatcgacgccgcaaaaggtgtagaagatcgtacccgca

SEQ ID NO: 305506 - DNA, 75 bp, synthetic construct
  source 1..75: mol_type = other DNA
atgccgcttactcaagaagaaagaattatgacgttgtctccttatttgcaagaggtggcgaagcgccgcactttt

SEQ ID NO: 305507 - DNA, 75 bp, synthetic construct
  source 1..75: mol_type = other DNA
atggcaacaacttcggaagaaacaaaaaagcttcaaaccgagtatggttcagatatgttgaaattcgttataatc

SEQ ID NO: 305508 - DNA, 75 bp, synthetic construct
  source 1..75: mol_type = other DNA
accagcatggtcaacctgcgcctggcgcaggaacgttatccggacgttcagttccaccagacccgcgagcattaa

SEQ ID NO: 305509 - DNA, 75 bp, synthetic construct
  source 1..75: mol_type = other DNA
caagaggtggcgaacgcgccgcacttttgccattattctcacccggacgccggtaagactaccatcaccgagaag

SEQ ID NO: 305510 - DNA, 75 bp, synthetic construct
  source 1..75: mol_type = other DNA
caaagagctgttccttgcaggtgaaatcaccccggtattctttggtactgcgctgggtaacttcggcgtcgatca

SEQ ID NO: 305511 - DNA, 75 bp, synthetic construct
  source 1..75: mol_type = other DNA
cgcccggataccgactacctgctgactatctccaacgatgcgtggtttggtaagtctattggtccatggcagcac

SEQ ID NO: 305512 - DNA, 75 bp, synthetic construct
  source 1..75: mol_type = other DNA
gtggaaaatcccgaggccggacaatatatgggtaatattaatattactttcacaccaagtagtcaaacactctag

SEQ ID NO: 305513 - DNA, 75 bp, synthetic construct
  source 1..75: mol_type = other DNA
atatttttggcccgcgtgacaggaacgaatcttcccccaaacataatatattaaatgactatattacagcataca

SEQ ID NO: 305514 - DNA, 75 bp, synthetic construct
  source 1..75: mol_type = other DNA
atgaataagattttatttatttttacattgtttttctcttcagtactttttacatttgctgtatcggcagataaa

SEQ ID NO: 305515 - DNA, 75 bp, synthetic construct
  source 1..75: mol_type = other DNA
aacatcgtcacccagcagccggacagtacgccgcgcggctattttaaagggggcgtcagtagccgcgacagttat

SEQ ID NO: 305516 - DNA, 75 bp, synthetic construct
  source 1..75: mol_type = other DNA
tgctattaaatgctgatgtaaatgctcccgatgcaggacagtattcaggacagatatatataacatttacaccca

SEQ ID NO: 305517 - DNA, 75 bp, synthetic construct
  source 1..75: mol_type = other DNA
ctatcatattttctgcggtggtcagtgccgggcgatacccggaaactacagtaggtaatctgacgaagagttttc

SEQ ID NO: 305518 - DNA, 75 bp, synthetic construct
  source 1..75: mol_type = other DNA
gtacaaaaaagcacacgttttgctcgatgatatgaatgttagcgaattgaactacatgcgccgagacagagctga

SEQ ID NO: 305519 - DNA, 75 bp, synthetic construct
  source 1..75: mol_type = other DNA
cacgtaccggcaactggccgctgtgggtactgacggcattgtttggttttgccgccgtgttgatgagtctgcgag

SEQ ID NO: 305520 - DNA, 75 bp, synthetic construct
  source 1..75: mol_type = other DNA
atggttcagggcgatattccgcaatcgctgaaatgggacggagaccagcttcttaatacgctgaagatttactac

SEQ ID NO: 305521 - DNA, 75 bp, synthetic construct
  source 1..75: mol_type = other DNA
tgatgaaacacttagccaggaagtgattattcagaccaaaaataagggcaactatacctacggcgacttaaggca

SEQ ID NO: 305522 - DNA, 75 bp, synthetic construct
  source 1..75: mol_type = other DNA
ggttcaggggcatgattgacgttcagaacaggaagaacacaatcaccggcgctctcgttcttgttggtatcatgg

SEQ ID NO: 305523 - DNA, 75 bp, synthetic construct
  source 1..75: mol_type = other DNA
tgttatccgcaacccgatggcggcggaggaattgacaaactatctgggcaaatacaaaaaggctcacgtcctgct

SEQ ID NO: 305524 - DNA, 75 bp, synthetic construct
  source 1..75: mol_type = other DNA
catcttggatgcaacaccggcatcgatgatagtaaataaagggaaaaacactccctataaaaaggacataaaaaa

SEQ ID NO: 305525 - DNA, 75 bp, synthetic construct
  source 1..75: mol_type = other DNA
ttacagtctggcattggcgcagaggtgatgacggcagataccccccatgatgaacgacaggacatcattcgccgt

SEQ ID NO: 305526 - DNA, 75 bp, synthetic construct
  source 1..75: mol_type = other DNA
gctctggcaaaactggtcttgcagcattcgtcactgccggaatggttgaacgtggtatgcgggtgatgtttgtct

SEQ ID NO: 305527 - DNA, 75 bp, synthetic construct
  source 1..75: mol_type = other DNA
gctgcacgggcatctcggcgcggacgcggcgggtaaggtgattgagtcgtttggtcaggtggtgatcggcggcaa

SEQ ID NO: 305528 - DNA, 75 bp, synthetic construct
  source 1..75: mol_type = other DNA
cgtggcatgcgcgttctgtttgtcgttccttataccattttgatcaaccagacagcacagcgctttgttcagtac

SEQ ID NO: 305529 - DNA, 75 bp, synthetic construct
  source 1..75: mol_type = other DNA
caccgtgcaccgtttgggttatccggattcaatcgagtacgacgatcttcccggtaagtctgatggcatggagga

SEQ ID NO: 305530 - DNA, 75 bp, synthetic construct
  source 1..75: mol_type = other DNA
ctgcgtaaaaaacgcatcctgaaggatatcgaacgtctgcgcggcaaaggcgtaaaggtgattggcctgtcgggt

SEQ ID NO: 305531 - DNA, 75 bp, synthetic construct
  source 1..75: mol_type = other DNA
ccagtcagtacgccatttttatcaacggcataaaggctgatgaagcggatattccggcggataaactgatggccc

SEQ ID NO: 305532 - DNA, 75 bp, synthetic construct
  source 1..75: mol_type = other DNA
gggttgatcaatcaggcgcaggcacaaacccgacgtaaagatgttgccagcgaggccgatttctacggcgcgatg

SEQ ID NO: 305533 - DNA, 75 bp, synthetic construct
  source 1..75: mol_type = other DNA
ttacggttaacgggtttagcttcagcggccaggcgcaaaacgccgggatggccttcgtcagcctgaaaccatggg

SEQ ID NO: 305534 - DNA, 75 bp, synthetic construct
  source 1..75: mol_type = other DNA
tcgacccgaatatgctcaaccagttccagagcacgatgccgcaggtgaaggagcagatgaaagcggcggggaaag

SEQ ID NO: 305535 - DNA, 75 bp, synthetic construct
  source 1..75: mol_type = other DNA
attgtgcgcagctatatccctgatttgtttaactatgacgatattacgcagttacataaccgtttgtcgtcgatg

SEQ ID NO: 305536 - DNA, 75 bp, synthetic construct
  source 1..75: mol_type = other DNA
ccctgctgctctccactgcggcggcgattattgtcacccgcgtcagcgataacggcgatatcgcccacgacgtgc

SEQ ID NO: 305537 - DNA, 75 bp, synthetic construct
  source 1..75: mol_type = other DNA
gaaaaaatttacaccaaaagcgacaaacaggcctggtggagtcagatcaaattctatcagcgtcagcgtgcctct

SEQ ID NO: 305538 - DNA, 75 bp, synthetic construct
  source 1..75: mol_type = other DNA
ttgatggtgcgttacagattgatcccaaaggtaatattttcctgccgaacgttggtccggtgaaagttgctggcg

SEQ ID NO: 305539 - DNA, 75 bp, synthetic construct
  source 1..75: mol_type = other DNA
cagacttacaggtgaaattgattccgatcacctcacaaaaccgtattccactgctgcaaaacggcactttcgatt

SEQ ID NO: 305540 - DNA, 75 bp, synthetic construct
  source 1..75: mol_type = other DNA
aatggccagcaataaaatatcacctggacagtacagggattctttcattcaggagtgccggatttctttttttgt

SEQ ID NO: 305541 - DNA, 75 bp, synthetic construct
  source 1..75: mol_type = other DNA
ctttctgataaacctatacctaaggctacatttgacgttttgaggaaaagaagccaattcgtcaaattgaagcag

SEQ ID NO: 305542 - DNA, 75 bp, synthetic construct
  source 1..75: mol_type = other DNA
ccgagtgttcattcgtttgacaggcaatgtattaaaactgtttccttttgctatggtgatatgccctgtggtgtg

SEQ ID NO: 305543 - DNA, 75 bp, synthetic construct
  source 1..75: mol_type = other DNA
gctattacgatattggtctacagattgaagagttactgtattcaggcgtattcaaagccggagagcgcttacctt

SEQ ID NO: 305544 - DNA, 75 bp, synthetic construct
  source 1..75: mol_type = other DNA
ccagcgaggccgatttctacggtgcgatggacggggcatcaaaatttgtgcgcggggacgccatcgccgggatga

SEQ ID NO: 305545 - DNA, 75 bp, synthetic construct
  source 1..75: mol_type = other DNA
ctacgcaaggttgtttgcgccggggctgcatgtgctgtcgtataacgaagtgccggatgagctggagttgaagat

SEQ ID NO: 305546 - DNA, 75 bp, synthetic construct
  source 1..75: mol_type = other DNA
ttggtcaggtggtgattggcggcaactttgtcgtcggtttcgtggtgtttatcatcctgatgatcatcaacttta

SEQ ID NO: 305547 - DNA, 75 bp, synthetic construct
  source 1..75: mol_type = other DNA
atgatattattcttagagtcagaaaaactgatgctgagttctattctggcacattgattaaaatggctactcaag

SEQ ID NO: 305548 - DNA, 75 bp, synthetic construct
  source 1..75: mol_type = other DNA
tctatcaagaaaagatattattggttttgttaaacagaataatatcgatgttcagatgttatctgctttatttga

SEQ ID NO: 305549 - DNA, 75 bp, synthetic construct
  source 1..75: mol_type = other DNA
tgaagataatcatgttgatgaaataaaaataaatgtttctgagttaaatgagaagataaaaattccagaacctaa

SEQ ID NO: 305550 - DNA, 75 bp, synthetic construct
  source 1..75: mol_type = other DNA
cgagctacacgtctgttgatttggacctggacgcggaagcactacttcaggcaggtacttattctacaaccttct

SEQ ID NO: 305551 - DNA, 75 bp, synthetic construct
  source 1..75: mol_type = other DNA
ctgactgttcgctggaaatggcccgtgaacgactgctgaatgaaatgggcaaggagtcctcgccgaccaacaaaa

SEQ ID NO: 305552 - DNA, 75 bp, synthetic construct
  source 1..75: mol_type = other DNA
ttattaacgatgacctgacccagttaactacaatccccatggcgatggggcgtgcagccgccagaacagtaggta

SEQ ID NO: 305553 - DNA, 75 bp, synthetic construct
  source 1..75: mol_type = other DNA
tccgcagttcaaaaagctgatggatgacaccatcgctcaggtgcagacctccggtgaagcggaaaaatggtttga

SEQ ID NO: 305554 - DNA, 75 bp, synthetic construct
  source 1..75: mol_type = other DNA
ctggaaaatcgcagtactgagatcaaaaagcagccagatccagagactctcccccaacgctgtaaacatttgtct

SEQ ID NO: 305555 - DNA, 75 bp, synthetic construct
  source 1..75: mol_type = other DNA
gcggtaatccgctgaccagtaaagtcgccattattagccgttccagcgatccgcgtgctgatgtcgattatctgt

SEQ ID NO: 305556 - DNA, 75 bp, synthetic construct
  source 1..75: mol_type = other DNA
caggatgccacaactttacgggcatctgttattcggacgaccagaaaaatattttccggcgaagtttatcttccc

SEQ ID NO: 305557 - DNA, 75 bp, synthetic construct
  source 1..75: mol_type = other DNA
ccgactgataatcagattgattattttgacgatgtcccggtgacctgtatcgatatggcgatgccagtcgtcagt

SEQ ID NO: 305558 - DNA, 75 bp, synthetic construct
  source 1..75: mol_type = other DNA
gaaggtgcggaatataaatacatcaccaccagcgataaaggtgtacctattgcgctggccacgtacgggaatata

SEQ ID NO: 305559 - DNA, 75 bp, synthetic construct
  source 1..75: mol_type = other DNA
gcacggttttgctgatgaattgttgccatccgtcagagcaatggcgcgaattgaatcgaaacgcacaggagattt

SEQ ID NO: 305560 - DNA, 75 bp, synthetic construct
  source 1..75: mol_type = other DNA
atattgaacaccccagtggtgcgcttgacgttcatttaagcaatgaaggtcaggatgccacgacgttacgtgcat

SEQ ID NO: 305561 - DNA, 75 bp, synthetic construct
  source 1..75: mol_type = other DNA
atgcaattacgtaaccctgccacagcaatcctcgccctggcgctttccgcaggactggcacaggcagatgacgcc

SEQ ID NO: 305562 - DNA, 75 bp, synthetic construct
  source 1..75: mol_type = other DNA
tatgccggatatcgccaactgaaagcgaaaaccggtttgtcagatgataaatgccgcaatctggtgaacgcctat

SEQ ID NO: 305563 - DNA, 75 bp, synthetic construct
  source 1..75: mol_type = other DNA
tcgaaatggttgccgcgatggctcttgaagcagttcgtcagcaaaaacgcctcgacaagatggaagaaaaagtta

SEQ ID NO: 305564 - DNA, 75 bp, synthetic construct
  source 1..75: mol_type = other DNA
atgggctatttaatggttaaaagaaattgcttcgggctggctgattattttcgtcaattagggatttctgacaag

SEQ ID NO: 305565 - DNA, 75 bp, synthetic construct
  source 1..75: mol_type = other DNA
gggtgaagatcgttgttactgtatctgatggacagtcactacatttgtcacaacaatggccgccttcctcagaaa

SEQ ID NO: 305566 - DNA, 75 bp, synthetic construct
  source 1..75: mol_type = other DNA
agtttaaatatttccccggaagatcgggtgaaaatagttgttactgtttctgatggacagtcacttcatttatca

SEQ ID NO: 305567 - DNA, 75 bp, synthetic construct
  source 1..75: mol_type = other DNA
caaaagaggcaccatacgcgatggttatgcaggataccgtcagctggtggcgaaaacaggtatgtcagatgcgaa

SEQ ID NO: 305568 - DNA, 75 bp, synthetic construct
  source 1..75: mol_type = other DNA
gtgttattcatctggtcgccagacaccagagcattaccaccgcagccgagcagttaaataaagttccttccgcca

SEQ ID NO: 305569 - DNA, 75 bp, synthetic construct
  source 1..75: mol_type = other DNA
atgaagataatctgcagattattattggcgatggcatgtttgtggttaacaaacatatcctgggctactgtttgt

SEQ ID NO: 305570 - DNA, 75 bp, synthetic construct
  source 1..75: mol_type = other DNA
ggtatatggacaagctacttcccgattggcgagagcgcagagatttgttgaatcggatgcccttggcgcacaacg

SEQ ID NO: 305571 - DNA, 75 bp, synthetic construct
  source 1..75: mol_type = other DNA
atcattgtcgtcgcacagctctgccctgaattcactgctcgcctggtagatcgctggcgcgaactggaagaacag

SEQ ID NO: 305572 - DNA, 75 bp, synthetic construct
  source 1..75: mol_type = other DNA
ttgcatcgcgttccttctgcggtcagctataccgtgcgtcagctggaagagtggctggcggtgccgctctttgaa

SEQ ID NO: 305573 - DNA, 75 bp, synthetic construct
  source 1..75: mol_type = other DNA
attcgtaagggacgatatattgaattatctccggcggggagttacttcatcgaacatagcaaaaatattctccgc

SEQ ID NO: 305574 - DNA, 75 bp, synthetic construct
  source 1..75: mol_type = other DNA
ttgatattgctatcagggccaatgacgcggggatatttcggggctttgcgggacttcgagggataatattgtggt

SEQ ID NO: 305575 - DNA, 75 bp, synthetic construct
  source 1..75: mol_type = other DNA
atgctttttacactgaaaaaagtgattggcggtatgttgctgccactccctctgatgttgctgattattggtgtt

SEQ ID NO: 305576 - DNA, 75 bp, synthetic construct
  source 1..75: mol_type = other DNA
atgctgcccttgccggggtggacagcacgattgttgaagtgatggggctctgtgcgcagttcacctcgggagcac

SEQ ID NO: 305577 - DNA, 75 bp, synthetic construct
  source 1..75: mol_type = other DNA
tacgatcgttgaagtgatgggactctgtgcgcagttcacctcgggggcacagtgtggcagcgaagttcagggggt

SEQ ID NO: 305578 - DNA, 75 bp, synthetic construct
  source 1..75: mol_type = other DNA
gaagtgcctgcatgtctgtggcgttgatggtgagacgggggaatccgttgagcttgcggatgttggttgggtgtt

SEQ ID NO: 305579 - DNA, 75 bp, synthetic construct
  source 1..75: mol_type = other DNA
atgcgtgattttaagaatgcctttgatgccgcccttgcgggggtggacagcacgattgttgaagtgatggggatc

SEQ ID NO: 305580 - DNA, 75 bp, synthetic construct
  source 1..75: mol_type = other DNA
tgctcggaggtggttatacctggaacccgcagtgggcaccaagttcaaatttaatcaataatagtttgccgcgcc

SEQ ID NO: 305581 - DNA, 75 bp, synthetic construct
  source 1..75: mol_type = other DNA
gagacattctgggtggatcgtgtttctccggatgacgggggcagttgctatctctggctcaaccgtgggcaaccc

SEQ ID NO: 305582 - DNA, 75 bp, synthetic construct
  source 1..75: mol_type = other DNA
cccgcgctgcaattcttcccgtggccggatgtcgatgcctggggtgagtccaaactggcgcaggccgataagcat

SEQ ID NO: 305583 - DNA, 75 bp, synthetic construct
  source 1..75: mol_type = other DNA
gcaaagaagaacgagcaaccgccgcagcaactgtaaaagacattcacgatatggctcctgtattaatgacaacct

SEQ ID NO: 305584 - DNA, 75 bp, synthetic construct
  source 1..75: mol_type = other DNA
ttttgacgatccggagtcgctgggttttgccggtggcggggtccgtattgaaggaagcagcccgtcattatttgt

SEQ ID NO: 305585 - DNA, 75 bp, synthetic construct
  source 1..75: mol_type = other DNA
atgccgcgctttccagtgtggacagcacgattgttgaagtgatgggtatcagtgcgcagttcacctccggtgcac

SEQ ID NO: 305586 - DNA, 75 bp, synthetic construct
  source 1..75: mol_type = other DNA
gcatcggccaaaaaaacaccttattgcgtcatgattatggatattgaccacttcaaaaaagtcaacgacacctgg

SEQ ID NO: 305587 - DNA, 75 bp, synthetic construct
  source 1..75: mol_type = other DNA
gttcaatgaaagaggattttatttttactggaatgaagaaacggaattcctgattgagagttggttgacgttccc

SEQ ID NO: 305588 - DNA, 75 bp, synthetic construct
  source 1..75: mol_type = other DNA
caaagagattttgtcagagcatggtattcatgaacaggaaagtcttgtagctccttcgcaagaaccacaagatgt

SEQ ID NO: 305589 - DNA, 75 bp, synthetic construct
  source 1..75: mol_type = other DNA
ttttggatattccatcattaccagcacaagctgaacaggctatttacgatatgtttgacagactggagaaaaaag

SEQ ID NO: 305590 - DNA, 75 bp, synthetic construct
  source 1..75: mol_type = other DNA
aactggcttatcagcaggcggcgaaggggtttattaagggcggcatcaatcgcattttattggccactgacggtg

SEQ ID NO: 305591 - DNA, 75 bp, synthetic construct
  source 1..75: mol_type = other DNA
caggaaagctatttttcgcactgtcttgatattgctatcagggccaatgacgcgggatatttcggggctttgcgg

SEQ ID NO: 305592 - DNA, 75 bp, synthetic construct
  source 1..75: mol_type = other DNA
ctggaagcgcgcaataattcggtagcagaccttcaatctcctccggctatcccgcctattgataaagcagaataa

SEQ ID NO: 305593 - DNA, 75 bp, synthetic construct
  source 1..75: mol_type = other DNA
ttcatggagtgaacatcaagtcatgcaatcttatcacggaggaaagctggatcttattagtgtagtattaagtaa

SEQ ID NO: 305594 - DNA, 75 bp, synthetic construct
  source 1..75: mol_type = other DNA
gaaagtcagttagttgaattcccgttggcatccgcaataaaggcaccttcagaagatatgcgttttcgcgcagca

SEQ ID NO: 305595 - DNA, 75 bp, synthetic construct
  source 1..75: mol_type = other DNA
cgcgcagcagtagctgcatatgggcaaaaattacgcggttctgaatacctgaacaatacctcctggcagcagatc

SEQ ID NO: 305596 - DNA, 75 bp, synthetic construct
  source 1..75: mol_type = other DNA
tgggcagggttcttgctgaggacaactcaaactcaccaagaattcttggatgaggcagaacagttgaagttggga

SEQ ID NO: 305597 - DNA, 75 bp, synthetic construct
  source 1..75: mol_type = other DNA
attgccgatgttggcaacggtaattacagctacattgatactctctctgaagcgcagaaagtgttaaacagcgaa

SEQ ID NO: 305598 - DNA, 75 bp, synthetic construct
  source 1..75: mol_type = other DNA
aggagatagtcaattatttcccgtctgactgggatatcaaagacaaacaatctattccggcctctaagccaatac

SEQ ID NO: 305599 - DNA, 75 bp, synthetic construct
  source 1..75: mol_type = other DNA
tgcagccagagaaaaagcagcctcccaaatcgcaaatccaggaaccgctcgctaccagcagttcgatgataatcc

SEQ ID NO: 305600 - DNA, 75 bp, synthetic construct
  source 1..75: mol_type = other DNA
ggacatcaacagaaacagctacggccatcattacagtcactggaacaccatgcgtattgatagcaacgtagactt

SEQ ID NO: 305601 - DNA, 75 bp, synthetic construct
  source 1..75: mol_type = other DNA
ctattcagcactgagcccggccaagtggatgctgtcagccgcgtgaagaacctgatggcacagaaagacattgag

SEQ ID NO: 305602 - DNA, 75 bp, synthetic construct
  source 1..75: mol_type = other DNA
aaaatactcaaaggttatctgataaaaggacgtggtctgatggatacaggggctctcaatgacagtccgaacttt

SEQ ID NO: 305603 - DNA, 75 bp, synthetic construct
  source 1..75: mol_type = other DNA
tccctatttacacgccggaagtattgacgttatgcccgaaatgcgggcatgaccagttccagagacgcccgttcg

SEQ ID NO: 305604 - DNA, 75 bp, synthetic construct
  source 1..75: mol_type = other DNA
gtgaactggtcgcgtcactgagcgaacgtctgcgcaatggcgaacgtgatatcgacgcactggtggaacaggcgc

SEQ ID NO: 305605 - DNA, 75 bp, synthetic construct
  source 1..75: mol_type = other DNA
gggaacggactactcaaaattacttggtgcgagtgacagaactccctgaacgggatttcgacatggaccactggg

SEQ ID NO: 305606 - DNA, 75 bp, synthetic construct
  source 1..75: mol_type = other DNA
ctctggctgctatcattattggtgctttctttgagtttcctgaaccggatgtacatggaaatgcaaaattgataa

SEQ ID NO: 305607 - DNA, 75 bp, synthetic construct
  source 1..75: mol_type = other DNA
gtgattttggattactacttgatggaacctttaaacaagatgttgaaccgctgtcgacagattcagtcatagagc

SEQ ID NO: 305608 - DNA, 75 bp, synthetic construct
  source 1..75: mol_type = other DNA
gtggcggcctatgtctccccggttgttgaaggaaaagtgctgcgtcatcgcggtggtgaaacccgcgtgttacgt

SEQ ID NO: 305609 - DNA, 75 bp, synthetic construct
  source 1..75: mol_type = other DNA
ctggcatcagcatcccgggatggcgctgattcgtgatgtgctgcaggaagcggcaaggcagacagagagtccgct

SEQ ID NO: 305610 - DNA, 75 bp, synthetic construct
  source 1..75: mol_type = other DNA
ttagggttaggcgctccaacccgaagcggtaaaggggtgggttttgttatccctaatctgctcaattatcgtgat

SEQ ID NO: 305611 - DNA, 75 bp, synthetic construct
  source 1..75: mol_type = other DNA
cctgagatcctgattggtaaagttgcaaaaggtagacacaagggtaaataccttaagtttgcaggacaacagttt

SEQ ID NO: 305612 - DNA, 75 bp, synthetic construct
  source 1..75: mol_type = other DNA
gaaaacctcggtaattacctgacggagagcgccagagaacgccttctggccatcactatgcttcagaatggtccg

SEQ ID NO: 305613 - DNA, 75 bp, synthetic construct
  source 1..75: mol_type = other DNA
tgcaggacggacgcctttatatcgcgggtattggtgccggtattgaaaacacccctgacggtatgcagagtcagg

SEQ ID NO: 305614 - DNA, 75 bp, synthetic construct
  source 1..75: mol_type = other DNA
atgacgttggtattctggaacgtatcaggcttctgaagtgtttttacctgtgcggtgttgacgatgaaacaggtg

SEQ ID NO: 305615 - DNA, 75 bp, synthetic construct
  source 1..75: mol_type = other DNA
tagaaacatacatttcttggcagttagagcaatttaaaaataactttttcccaagctgcgacgtcatagcgtact

SEQ ID NO: 305616 - DNA, 75 bp, synthetic construct
  source 1..75: mol_type = other DNA
gccggatacagaagggtttaccagttattcaggaaatagcttccgtttcgacgaacagaaacggctggtatctct

SEQ ID NO: 305617 - DNA, 75 bp, synthetic construct
  source 1..75: mol_type = other DNA
atgattcccttcaccatgcagcggcgttcctgtatctcaatcgtcattgttttaatggcgtcactcgctataacc

SEQ ID NO: 305618 - DNA, 75 bp, synthetic construct
  source 1..75: mol_type = other DNA
gtggaatggattgactggcagacaaagggactcgagttttcgcccctttcggatggctgctgtccgttctgtacc

SEQ ID NO: 305619 - DNA, 75 bp, synthetic construct
  source 1..75: mol_type = other DNA
tcagctcctgtccaatctgttccatcgacgggtcgttccgctggatcatcgtgagcctgccgctgcgggcatggg

SEQ ID NO: 305620 - DNA, 75 bp, synthetic construct
  source 1..75: mol_type = other DNA
tgacacgctgaagtcagtcagaaggctgttcagtaatctggtgaccgcctcctgcctgcgcctgtctgctggagt

SEQ ID NO: 305621 - DNA, 75 bp, synthetic construct
  source 1..75: mol_type = other DNA
agtttaatggcgacattaccttgcagccaggactgatacaccaggccaatggcggcattctgattatctctttgc

SEQ ID NO: 305622 - DNA, 75 bp, synthetic construct
  source 1..75: mol_type = other DNA
aagctgaaagtcattctggtaggcgaacgcgaatcattggctgatttccaggagatggagccagagctttcagag

SEQ ID NO: 305623 - DNA, 75 bp, synthetic construct
  source 1..75: mol_type = other DNA
gttcaggcgcgcgagcggtgaatgcctaaagaaccggactgtgctcatgctgacacatgacgtggagcctgtaat

SEQ ID NO: 305624 - DNA, 75 bp, synthetic construct
  source 1..75: mol_type = other DNA
tttatacgtataatcgttatgatcattttactaaaacaattgaggcactgcgtaataattatttagccgaaaact

SEQ ID NO: 305625 - DNA, 75 bp, synthetic construct
  source 1..75: mol_type = other DNA
ctggtggaagtagcgcatcgtctggcgatgggcgagccgattagtgaaatccgcgatgtgcgtaataccgcaatt

SEQ ID NO: 305626 - DNA, 75 bp, synthetic construct
  source 1..75: mol_type = other DNA
aagagctggcgacccatcacgtcggtggttatctgaagattgcgccggaacataccgaagaagggccactgtcga

SEQ ID NO: 305627 - DNA, 75 bp, synthetic construct
  source 1..75: mol_type = other DNA
tgatacccctggaaaaatcgacccgatcccgcatccgtatggtgaagatttgccgtgcgcggataacaaaccggt

SEQ ID NO: 305628 - DNA, 75 bp, synthetic construct
  source 1..75: mol_type = other DNA
gtgttgctttcacgttggctactgacccgaccgcaatttctgatcctcgacgagccaacccgcggcattgatgtt

SEQ ID NO: 305629 - DNA, 75 bp, synthetic construct
  source 1..75: mol_type = other DNA
atgcatcatttatttgatctgacaggtaaaacagctttgattacaggctccgctcgcggtctgggatttgcatat

SEQ ID NO: 305630 - DNA, 75 bp, synthetic construct
  source 1..75: mol_type = other DNA
tgccctgtgcggataacaaaccggtggccccgaaaaagcaggaagccaaagccgtaaccgtgcagccgccgcgcc

SEQ ID NO: 305631 - DNA, 75 bp, synthetic construct
  source 1..75: mol_type = other DNA
gatgaagatatggtgaatctggcgctgtggctgaaaaagcaccgcttccgcctcgaccaggtgcagaacttctat

SEQ ID NO: 305632 - DNA, 75 bp, synthetic construct
  source 1..75: mol_type = other DNA
catctctgcacaccccggtacgcgcgatgaagatatggtgaacctggcgctgtggctgaaaaagcatcgcttccg

SEQ ID NO: 305633 - DNA, 75 bp, synthetic construct
  source 1..75: mol_type = other DNA
ggccaactgccaacatgtatatgttgcgctgcaaatcgccacgcgctgagcaaacctgccgtcgtttgtcgtgcg

SEQ ID NO: 305634 - DNA, 75 bp, synthetic construct
  source 1..75: mol_type = other DNA
tgcccgtattccggcttacgaaatgattcgtttctcggtcaacattatgcgtggctgctttggcggctgctcttt

SEQ ID NO: 305635 - DNA, 75 bp, synthetic construct
  source 1..75: mol_type = other DNA
gcagccaccgcgcccgaaaccgtgggaaaaaacctacgtgttgctgccttctttcgagaaagtgaagggcgataa

SEQ ID NO: 305636 - DNA, 75 bp, synthetic construct
  source 1..75: mol_type = other DNA
tgcgcgaagctcgccgtcagaaccgtaatacccgtccggcgttgaccaaacatacgccgatggcgactcaacggc

SEQ ID NO: 305637 - DNA, 75 bp, synthetic construct
  source 1..75: mol_type = other DNA
atggtgttggaagccatcgacttaattctcggtgacgacaagaaccgtacaatggagtattacactgcaaaaaag

SEQ ID NO: 305638 - DNA, 75 bp, synthetic construct
  source 1..75: mol_type = other DNA
ggaaacccaaaacgccgaaacactggcgaaaattattgagcaaattggggatgataaccctgataaatggctcga

SEQ ID NO: 305639 - DNA, 75 bp, synthetic construct
  source 1..75: mol_type = other DNA
attgttgcagataatgagatccctcctgcaacacgtactccgctcctgatgtatctcaatttccgtgtgcgtcag

SEQ ID NO: 305640 - DNA, 75 bp, synthetic construct
  source 1..75: mol_type = other DNA
aaacgccggtgttgccagaaatatgctgaacaactgcgggctgattgccagccaggtagggttagcttcagaagc

SEQ ID NO: 305641 - DNA, 75 bp, synthetic construct
  source 1..75: mol_type = other DNA
ccgcagtcatagcgtgccacttcgggcgttgattggtccaatttgcggagcggttttattggtagttggcgcctg

SEQ ID NO: 305642 - DNA, 75 bp, synthetic construct
  source 1..75: mol_type = other DNA
ccgcagccatggcgtaccactacgggcgttgatcggcccaatttgtggcgcaattttacttgtggttggtgcctg

SEQ ID NO: 305643 - DNA, 75 bp, synthetic construct
  source 1..75: mol_type = other DNA
tttggtaggaattgtgctgttcgtttctattttgtggtttaaacaaggtatggaggggtttggtgaactggtgtc

SEQ ID NO: 305644 - DNA, 75 bp, synthetic construct
  source 1..75: mol_type = other DNA
cagatcgtgaactggtaacgtggcataaagaccttaacacgctggttaaaagttttggtacagaccaggtagagc

SEQ ID NO: 305645 - DNA, 75 bp, synthetic construct
  source 1..75: mol_type = other DNA
gagtgggggatctcgtaagttcgtttcatcgcagcggcaggatgcagcgtttatcaagcgcttcctgattgtgga

SEQ ID NO: 305646 - DNA, 75 bp, synthetic construct
  source 1..75: mol_type = other DNA
gcgctgatgagcttgaaggtgagcgtagtcttattaacggtaacaccagttttgtgcctagcgagcttgtaacgg

SEQ ID NO: 305647 - DNA, 75 bp, synthetic construct
  source 1..75: mol_type = other DNA
acatcatggaaaaccgtgttgtcagttctgtatggggggatattgttcaggtcagaacgctggacagcaattttt

SEQ ID NO: 305648 - DNA, 75 bp, synthetic construct
  source 1..75: mol_type = other DNA
tgatattgatgcggatattaagacaatggacaacatccttagtgtgttgtccggtgaaccacaaaacgccgaaat

SEQ ID NO: 305649 - DNA, 75 bp, synthetic construct
  source 1..75: mol_type = other DNA
acgtgactccatcgacggcaaacgccgcgtcattcagtgctttgacgagttccacgcctaccttgacgatccggt

SEQ ID NO: 305650 - DNA, 75 bp, synthetic construct
  source 1..75: mol_type = other DNA
tggctacaaagtttattacggcgacgccacacaggttgacctgttgcgctccgcaggtgcagaggccgcagagtc

SEQ ID NO: 305651 - DNA, 75 bp, synthetic construct
  source 1..75: mol_type = other DNA
caggtgattggtcgtttgctgatggcaaataaaatgcgcattactgtgctggagcgggatatcagtgccgttaac

SEQ ID NO: 305652 - DNA, 75 bp, synthetic construct
  source 1..75: mol_type = other DNA
cggctgggtattggcgctgtgttgggatatttgctggcagggattgcgattggcccgtgggggcttgggtttatt

SEQ ID NO: 305653 - DNA, 75 bp, synthetic construct
  source 1..75: mol_type = other DNA
tttgattgcggcagggttgttaccagaagtgggggaatcagattcttattgggtgccagaattaacgctgacacc

SEQ ID NO: 305654 - DNA, 75 bp, synthetic construct
  source 1..75: mol_type = other DNA
cgttctgctcaggttcagactccggcaggcctgacggatactgagtccgaacgtcgttatcagatgagtaaccag

SEQ ID NO: 305655 - DNA, 75 bp, synthetic construct
  source 1..75: mol_type = other DNA
atcccagcactggcgttagtgccgttgttggcggggtcggcagacgaacatttcgactggatgaagatcggcatg

SEQ ID NO: 305656 - DNA, 75 bp, synthetic construct
  source 1..75: mol_type = other DNA
ttatcgtcagttctccatcaccatcatctctgcaatgctgctttccgtggtggtggcattgaccttgactcccgc

SEQ ID NO: 305657 - DNA, 75 bp, synthetic construct
  source 1..75: mol_type = other DNA
tttctgttccggatacaggacttgtatttaacgtgattatatctgttgatcggaatgatatacagggagaaagaa

SEQ ID NO: 305658 - DNA, 75 bp, synthetic construct
  source 1..75: mol_type = other DNA
cgggaagagtaattttgcctctactcggctatatgccggatgcggcgcaagcgccttatctggcctacgattcgg

SEQ ID NO: 305659 - DNA, 75 bp, synthetic construct
  source 1..75: mol_type = other DNA
gatatttgctggcagggattgcaattggcccatgggggctggggtttattagcgacgtcgatgagatcctccact

SEQ ID NO: 305660 - DNA, 75 bp, synthetic construct
  source 1..75: mol_type = other DNA
ctggtggcggtgaaaattctcgtgctgtatctgttggcgcgactgtatggcgtgcgcagttctgagcggatgcag

SEQ ID NO: 305661 - DNA, 75 bp, synthetic construct
  source 1..75: mol_type = other DNA
gtgagaaagggatgaatcgcagcgaatctggacagctaggtttttcggttttgttgtttcaggatctggcggtga

SEQ ID NO: 305662 - DNA, 75 bp, synthetic construct
  source 1..75: mol_type = other DNA
gcgctggtggtggtgtttctctgtggtattgctgtgattggcgtgcaatttttgattgcggcagggttgttacca

SEQ ID NO: 305663 - DNA, 75 bp, synthetic construct
  source 1..75: mol_type = other DNA
atggctcttaatagtttgcaatatgcaggcgtgagagaaaccgatcttctgttacttgataaagtaaacattgac

SEQ ID NO: 305664 - DNA, 75 bp, synthetic construct
  source 1..75: mol_type = other DNA
acaatcattgatagtagtcttctgaaaagatggcaatgtttgggattttcagacatgacccattttagggggtat

SEQ ID NO: 305665 - DNA, 75 bp, synthetic construct
  source 1..75: mol_type = other DNA
catcacattcattaccagtcaatgctttccctgactatcttgtaataagtttattaagtatcgcagcaggcatcg

SEQ ID NO: 305666 - DNA, 75 bp, synthetic construct
  source 1..75: mol_type = other DNA
cccgtactcgtccggcacgctgtggggtgctgctgccgggctcagcaccacctgtggccatgtttccggttcgtt

SEQ ID NO: 305667 - DNA, 75 bp, synthetic construct
  source 1..75: mol_type = other DNA
agacatggcccattttagggggtatatgtcaatgaatagccttcaatatgcaggcgtgcgagaaaccgaattact

SEQ ID NO: 305668 - DNA, 75 bp, synthetic construct
  source 1..75: mol_type = other DNA
atggctcttaatagcctgaaatatgcaggtgtgacagaaacagaattacttctacttaataaagtaaacattgac

SEQ ID NO: 305669 - DNA, 75 bp, synthetic construct
  source 1..75: mol_type = other DNA
taaatggtaatgacggcgcggttcaactcaaaacaggtgctgttaacggggctaaagcgcaggcgctcactatca

SEQ ID NO: 305670 - DNA, 75 bp, synthetic construct
  source 1..75: mol_type = other DNA
ggcgctggctgtactggcgttgattatcccttccctgttgacctggcagagcagaaagcataatccacaagcagg

SEQ ID NO: 305671 - DNA, 75 bp, synthetic construct
  source 1..75: mol_type = other DNA
gctttgggcattgatgtgctacacagcgctgttactgctggaggtgtaccagcatgtcccggcagacaccggtct

SEQ ID NO: 305672 - DNA, 75 bp, synthetic construct
  source 1..75: mol_type = other DNA
ttgtattatggttattttcaattatctatatttatttttgtgagatattcagaagccactggattgcggtatggt

SEQ ID NO: 305673 - DNA, 75 bp, synthetic construct
  source 1..75: mol_type = other DNA
tgccgcgtatctgttttatgctcaaaaaacatcgtcaggtcagctgtttgatgtaaacggtgctattaactgtac

SEQ ID NO: 305674 - DNA, 75 bp, synthetic construct
  source 1..75: mol_type = other DNA
ccggcacatctgcccgtgaggcggcaacccatgcgactgatgctgcaggctcagcacgcgcagccagcacgtcag

SEQ ID NO: 305675 - DNA, 75 bp, synthetic construct
  source 1..75: mol_type = other DNA
gcaattccaggatcgccacaactcagaaggcttttgcagatgatatgtccgcaatggctacgaaaatggaagaga

SEQ ID NO: 305676 - DNA, 75 bp, synthetic construct
  source 1..75: mol_type = other DNA
gacaattcatcggctttagttgcggaggaacgtgaggcacgagtcgaaggcgacttggcgaacgcgaaagaaatc

SEQ ID NO: 305677 - DNA, 75 bp, synthetic construct
  source 1..75: mol_type = other DNA
tcagaacaaggtgattctgttgcaggtgtcgtagaagcagcaaatgcggcacttgaaaatgcatcatctttaatt

SEQ ID NO: 305678 - DNA, 75 bp, synthetic construct
  source 1..75: mol_type = other DNA
ctttcagctggatatgcccttactgaacatggtcgggcgctgtgctttccccctgtttgcgctggtctgtggctg

SEQ ID NO: 305679 - DNA, 75 bp, synthetic construct
  source 1..75: mol_type = other DNA
acaagtttacagagacagatcggcggcttgaagaagctcaaaacgatcttaaaacggatgtttccagtactgtaa

SEQ ID NO: 305680 - DNA, 75 bp, synthetic construct
  source 1..75: mol_type = other DNA
tcgaatactgaatcaggaaggcaaaatcgttgaacgcgatgttcttgaaactggcgaaaatataacaaaagttac

SEQ ID NO: 305681 - DNA, 75 bp, synthetic construct
  source 1..75: mol_type = other DNA
actggaatctaaagtcaatacagatctttccactgcaattagagaagagcgacaaacaagagtcactcaaaatga

SEQ ID NO: 305682 - DNA, 75 bp, synthetic construct
  source 1..75: mol_type = other DNA
tattggctttttaaatggtcttattcaagcttcgagttcagaaaatgaacggtattatcttaaagatattttatc

SEQ ID NO: 305683 - DNA, 75 bp, synthetic construct
  source 1..75: mol_type = other DNA
cctgacgaaatatttaaggaactattaaatacaactcgtgcgaaagttgtctggatctctgtagaaaaagtttta

SEQ ID NO: 305684 - DNA, 75 bp, synthetic construct
  source 1..75: mol_type = other DNA
atacactggagaatgcgcaaagcgagcttaggacggaagtttctagcactcgggaaaaagtagatgatgcattac

SEQ ID NO: 305685 - DNA, 75 bp, synthetic construct
  source 1..75: mol_type = other DNA
atcgttgaacgcgatgttcttgaaactggcgaaaacataacaaaggttacgttttcaaaagccctgtcgtcggcg

SEQ ID NO: 305686 - DNA, 75 bp, synthetic construct
  source 1..75: mol_type = other DNA
tcgtacacattgaagatggaaacttcaacgagtggagggcagaagtatgtagcgggcattgcgcttggtattgat

SEQ ID NO: 305687 - DNA, 75 bp, synthetic construct
  source 1..75: mol_type = other DNA
atgaatcagggtaaatccgttgctgtgcaacctgtcaggccggtcctgaatttctccgcgctgcagcgcgatgtc

SEQ ID NO: 305688 - DNA, 75 bp, synthetic construct
  source 1..75: mol_type = other DNA
cggtaatagcgggggtaatgggcgactggtcataaatggtcagcggattgacgtttatgacgataacaacgtctt

SEQ ID NO: 305689 - DNA, 75 bp, synthetic construct
  source 1..75: mol_type = other DNA
gtgcaggtaaacgtaactccggtcgaattgtggagtttaccaaaaacagcatcactctcgatgcgcctgtgtcgt

SEQ ID NO: 305690 - DNA, 75 bp, synthetic construct
  source 1..75: mol_type = other DNA
tcgcccatccgttgcgctcgtaacctacaacaacaaggaggacggttataagcaaaatatcgagtacgttgaaga

SEQ ID NO: 305691 - DNA, 75 bp, synthetic construct
  source 1..75: mol_type = other DNA
agagagcctgaaagaagaatctgacagcgtctttatgcgggtgattaaagaaagcttatggcaggagctggcaga

SEQ ID NO: 305692 - DNA, 75 bp, synthetic construct
  source 1..75: mol_type = other DNA
tgggctatctcagtttttggttcaggcggacaggtttggtttggtcaactctgttaacgggaagatcacaacgcc

SEQ ID NO: 305693 - DNA, 75 bp, synthetic construct
  source 1..75: mol_type = other DNA
tgtaacggtttcaatcgataacgatgaagctgatcgggttcgtgtcatcatgaagtttccttctttgcgaagcat

SEQ ID NO: 305694 - DNA, 75 bp, synthetic construct
  source 1..75: mol_type = other DNA
cagccattaaggaagagcaagaagcccgagcaacggaagattcggctctggcaagccagatcacccaacttcagg

SEQ ID NO: 305695 - DNA, 75 bp, synthetic construct
  source 1..75: mol_type = other DNA
atggccacgaaggttgaggaaattcgcgtagaaattggcgaagacattaaggccagtattctggaagagtccacc

SEQ ID NO: 305696 - DNA, 75 bp, synthetic construct
  source 1..75: mol_type = other DNA
acgtctgcaggcaggacactggtttgcgccagcgtatgccattcatctgttttttatgggctttctggtcagagt

SEQ ID NO: 305697 - DNA, 75 bp, synthetic construct
  source 1..75: mol_type = other DNA
aacacgataaagctctcgctaatacagtcgaggcaataaaggctgcaagagatgaagcggcggctcttattgcta

SEQ ID NO: 305698 - DNA, 75 bp, synthetic construct
  source 1..75: mol_type = other DNA
atactcggtatggtcttgggcaatttgtgtcggaatccatgattgacctcggccagctctaccagattggtcgat

SEQ ID NO: 305699 - DNA, 75 bp, synthetic construct
  source 1..75: mol_type = other DNA
gccatcactcaggagcaggaggccagagcaagtgctgacgaggcgctctcacgagaaattaacagcctgcgggcg

SEQ ID NO: 305700 - DNA, 75 bp, synthetic construct
  source 1..75: mol_type = other DNA
atgagttttgcgaccatttctgtcattggattgggttacattgggctgccgacggcggcggcgtttgcctcccga

SEQ ID NO: 305701 - DNA, 75 bp, synthetic construct
  source 1..75: mol_type = other DNA
tgaaaaaaggcgcgctggtgatccttgagtccacctcgccggtgggttcaaccgagaagatggcagaatggttag

SEQ ID NO: 305702 - DNA, 75 bp, synthetic construct
  source 1..75: mol_type = other DNA
ggtcgagctgattaaaaacgatcgcgtgattggcggcatgacgccggtttgctcggcccgcgccagcgaactgta

SEQ ID NO: 305703 - DNA, 75 bp, synthetic construct
  source 1..75: mol_type = other DNA
ggcatgctggttttggggaatactgctgcagatgggatccgttgttacggtgccattcaggatgcgcaggcgttg

SEQ ID NO: 305704 - DNA, 75 bp, synthetic construct
  source 1..75: mol_type = other DNA
ggcgatctggccattgtggtggcgaaaacgtcttatatagcagaagacggtatcgaaaaacgttatctgccggag

SEQ ID NO: 305705 - DNA, 75 bp, synthetic construct
  source 1..75: mol_type = other DNA
gggggatcccgcccgtgaatttaccatgacgcagtccgcgccgctgatggtgttgccggacccggatgagtttgt

SEQ ID NO: 305706 - DNA, 75 bp, synthetic construct
  source 1..75: mol_type = other DNA
tcggactgggttatatcgggctgccaacggcggcagcgtttgcctcacggcaaaaacaggtaattggtgtcgata

SEQ ID NO: 305707 - DNA, 75 bp, synthetic construct
  source 1..75: mol_type = other DNA
tggtgaaacccgcgtcttgcgtccgggctacgtcaagccgaaacacgaatttaattcccggcaggcggttgagcg

SEQ ID NO: 305708 - DNA, 75 bp, synthetic construct
  source 1..75: mol_type = other DNA
ctgttctgcagggtaagtacaccatgagcggtgaacagtttgagacggtggaagtggattttggtcgttctgccg

SEQ ID NO: 305709 - DNA, 75 bp, synthetic construct
  source 1..75: mol_type = other DNA
gcggatgcctggttgattgctgtacctacgccgtttaaaggtgatcatgaaccggatatgacttacgtcgaatcg

SEQ ID NO: 305710 - DNA, 75 bp, synthetic construct
  source 1..75: mol_type = other DNA
ccacgccgtttaaaggcgatcatgagccagatatgacctacgttgaatcggctgctcgctccattgcgccagtgc

SEQ ID NO: 305711 - DNA, 75 bp, synthetic construct
  source 1..75: mol_type = other DNA
ccgggcagggaattaacgtctgggagctgattcgtctggcgaatcgccaccctcgcgtcaatattcttcagccag

SEQ ID NO: 305712 - DNA, 75 bp, synthetic construct
  source 1..75: mol_type = other DNA
attcaccatgacgcagtccgctccgctgatggtgctgccggatccggatgagtttgtggtggtacaggtgaaata

SEQ ID NO: 305713 - DNA, 75 bp, synthetic construct
  source 1..75: mol_type = other DNA
tccacgtatgacccgaccgacgatatcgaagccttgtattatccctccagtgcagagaaaatcggccttttttct

SEQ ID NO: 305714 - DNA, 75 bp, synthetic construct
  source 1..75: mol_type = other DNA
ctggcagtggtcggtggttttaaaattggtgatatcgatcctcgtggtgaaacggctgatttcaccagcgtttct

SEQ ID NO: 305715 - DNA, 75 bp, synthetic construct
  source 1..75: mol_type = other DNA
tgaaattaaagcgccgttgacggggatggtgcgtggtttacttaacgacggactggcggtggtcggtggttttaa

SEQ ID NO: 305716 - DNA, 75 bp, synthetic construct
  source 1..75: mol_type = other DNA
tctgcgattcgttatccgaaacactggttagaggtgggggacccggggtgcgaatataccatgacgcagtctgcg

SEQ ID NO: 305717 - DNA, 75 bp, synthetic construct
  source 1..75: mol_type = other DNA
tactcgggtacaccgagcagaaagtgaaatttcgtgcgctgtttctggagctgttctttcgtcgcacgatcactt

SEQ ID NO: 305718 - DNA, 75 bp, synthetic construct
  source 1..75: mol_type = other DNA
gaggttgattttggcagatcgacgaagaataacatcatacagggtagcggtaaggagtggtcaaaacaggaccgt

SEQ ID NO: 305719 - DNA, 75 bp, synthetic construct
  source 1..75: mol_type = other DNA
atctgggcgcagtggtgtccttcaaggggtattacggcgatctggccattgtggtggcgaaaacgtcttatatag

SEQ ID NO: 305720 - DNA, 75 bp, synthetic construct
  source 1..75: mol_type = other DNA
gcgggagacattgccagtggagtggcgttacgtctgtatcatgcgggttttaaagtgatcatgctggaagttgaa

SEQ ID NO: 305721 - DNA, 75 bp, synthetic construct
  source 1..75: mol_type = other DNA
aataatcaggatcgtgaagccctcgacaaactcattgaacagcccattgcatggttggggttgctggcaagtcgc

SEQ ID NO: 305722 - DNA, 75 bp, synthetic construct
  source 1..75: mol_type = other DNA
ccgtgggcgatccgtcctgtgaattcaccatgacgcagtccgctccgctgatggtgctgccggatccggatgagt

SEQ ID NO: 305723 - DNA, 75 bp, synthetic construct
  source 1..75: mol_type = other DNA
gggaatacggcagcagaggggattcgttgctatggagccattaaggatgcacaggcgttgtccgaaggagtggtg

SEQ ID NO: 305724 - DNA, 75 bp, synthetic construct
  source 1..75: mol_type = other DNA
ttctgttcgtcataatcctgagttcacgatgatggaactctacatggcgtatgcggattaccacgatttgattga

SEQ ID NO: 305725 - DNA, 75 bp, synthetic construct
  source 1..75: mol_type = other DNA
ggttttgaacgggtattcgaaatcaaccgtaacttccgtaatgaaggtatttctgttcgccataatcctgagttc

SEQ ID NO: 305726 - DNA, 75 bp, synthetic construct
  source 1..75: mol_type = other DNA
tgattcagcctaccttgattacggaatatccggcagaagtgtccccgctggcgcggcgtaaagatgttaacccgg

SEQ ID NO: 305727 - DNA, 75 bp, synthetic construct
  source 1..75: mol_type = other DNA
cgcatccaatgatcgacccgactctgcgcaatcaacgtctgctcaacgaactcaacgactcacatactgccgttg

SEQ ID NO: 305728 - DNA, 75 bp, synthetic construct
  source 1..75: mol_type = other DNA
tgcaacttcgcgcaagaactataattataggtgttgacaatagagcaatcgagaaagcgaaagactttaatcttc

SEQ ID NO: 305729 - DNA, 75 bp, synthetic construct
  source 1..75: mol_type = other DNA
ctaaagtcacttatggcgagcatgtgtttgatttcggtaaaccgtttgaaaaactgaccatgcgtgaagcaatca

SEQ ID NO: 305730 - DNA, 75 bp, synthetic construct
  source 1..75: mol_type = other DNA
atttctggggttgccggactgtaccagcgaaaacggcaccctgtccgaacgccagcgggctgccgcgaataaaat

SEQ ID NO: 305731 - DNA, 75 bp, synthetic construct
  source 1..75: mol_type = other DNA
atgcatagacaccataaggttagcctcttactcgttggaaatcaacacagtgtatgggtccaccacatattgcaa

SEQ ID NO: 305732 - DNA, 75 bp, synthetic construct
  source 1..75: mol_type = other DNA
atactggcggtctgtcaggtaaagagctgggcgcttattcactggtggggacgaacttcaattacgatattaata

SEQ ID NO: 305733 - DNA, 75 bp, synthetic construct
  source 1..75: mol_type = other DNA
tgattcagcctaccttgattacggaatatccggcagaagtctccccgctggcgcgacgtaaggatgttaacccgg

SEQ ID NO: 305734 - DNA, 75 bp, synthetic construct
  source 1..75: mol_type = other DNA
tgattcagcctaccttgattacggaatatccggcagaagtttccccgctggcgcgtcgtaacgatgttaacccgg

SEQ ID NO: 305735 - DNA, 75 bp, synthetic construct
  source 1..75: mol_type = other DNA
tgattcagcctaccttgattacggaatatccggcagaagtatccccgctggcgcgccgtaaggatgttaacccgg

SEQ ID NO: 305736 - DNA, 75 bp, synthetic construct
  source 1..75: mol_type = other DNA
atgaataaagatctgaaaaaagaagcaaacaagatattactcaagatattactgcatttatctaaacaatgcttt

SEQ ID NO: 305737 - DNA, 75 bp, synthetic construct
  source 1..75: mol_type = other DNA
tctgccggagggcacgctggtgctggggaatacggcagcagaggggattcgttgctatggagccattaaggatgc

SEQ ID NO: 305738 - DNA, 75 bp, synthetic construct
  source 1..75: mol_type = other DNA
atctgggcgcagtggtgtccttcaaggggtattacggcgatctggccattgtggtggcgaaaacgtcttatgtgg

SEQ ID NO: 305739 - DNA, 75 bp, synthetic construct
  source 1..75: mol_type = other DNA
tcaggcgttgtccgaaggtgtggtggcctcttcccgttatccgaaacactggctgacggtaggggatcccgcccg

SEQ ID NO: 305740 - DNA, 75 bp, synthetic construct
  source 1..75: mol_type = other DNA
gcagcagagggcattcgttgctatggtgccattcaggatgcgcaggcgttgtccgaaggtgtggtggcctcttcc

SEQ ID NO: 305741 - DNA, 75 bp, synthetic construct
  source 1..75: mol_type = other DNA
gacgactttacccgctgggagttctggctgaaatccaccgcccgctttgccgatggcagcgaactgaatgccagc

SEQ ID NO: 305742 - DNA, 75 bp, synthetic construct
  source 1..75: mol_type = other DNA
cggcgaagcagaatctggtcgcctttgcccgtgagccgatgattgattatctcggtgaactggtcggtgtatatc

SEQ ID NO: 305743 - DNA, 75 bp, synthetic construct
  source 1..75: mol_type = other DNA
gaaacgaaactgcctgaaccagaagtgcaacaagaaccggaaaaagtctgcaccgcctgcggtcagaccggcgac

SEQ ID NO: 305744 - DNA, 75 bp, synthetic construct
  source 1..75: mol_type = other DNA
gtcctggggccggacgaaggattaccagaaggctgcgtggagatctacccgctaacgctgaatggtctgccgggc

SEQ ID NO: 305745 - DNA, 75 bp, synthetic construct
  source 1..75: mol_type = other DNA
atggcaaatacaccatggaaggggatcagtttgatactgtcgaggtggatttcgggcgctctgaaggaaataaca

SEQ ID NO: 305746 - DNA, 75 bp, synthetic construct
  source 1..75: mol_type = other DNA
tgaatggttttaagctgttccgcgaaaaactggatacccgtcgcggttcaaattctcaactcgaaacggcagtga

SEQ ID NO: 305747 - DNA, 75 bp, synthetic construct
  source 1..75: mol_type = other DNA
atattcatgcaagccatgtttaccatctgcgccgccaataccggatttacgccatccggcgtggaagccttgcat

SEQ ID NO: 305748 - DNA, 75 bp, synthetic construct
  source 1..75: mol_type = other DNA
gttcgtatcggacttaatttatttgaacttctgaacaaattaaacaatggctatcgccccaataaatacgataaa

SEQ ID NO: 305749 - DNA, 75 bp, synthetic construct
  source 1..75: mol_type = other DNA
taaatccagtagcgaaatcaagttttatgctggtgggctgcgagtttatcgcgctaaagcagacgacgacatgat

SEQ ID NO: 305750 - DNA, 75 bp, synthetic construct
  source 1..75: mol_type = other DNA
gaattgttctttttttgactttgagcattaccctaaattccagtttaatgaaaaaaaacagtattcatcgtttat

SEQ ID NO: 305751 - DNA, 75 bp, synthetic construct
  source 1..75: mol_type = other DNA
ggtgctgggattcccgtgcaaccagtttctggagcaagaaccgggcagcgatgaagagattaaaacttactgcac

SEQ ID NO: 305752 - DNA, 75 bp, synthetic construct
  source 1..75: mol_type = other DNA
gttatcagcggcgatttaattttcatctggatgcaacgcatagctttgccccgcgacaatcagccattgatgctt

SEQ ID NO: 305753 - DNA, 75 bp, synthetic construct
  source 1..75: mol_type = other DNA
atgggcgcaatcacattacgtaacgcgttgagtgtacttgcgaagtcatcttcgttttccgtgaccaccgtcaca

SEQ ID NO: 305754 - DNA, 75 bp, synthetic construct
  source 1..75: mol_type = other DNA
tctgcctggtgcaggcgaatcgctgaagcatgatgagatataccgccagatgtaccatgaacaactgccgaagct

SEQ ID NO: 305755 - DNA, 75 bp, synthetic construct
  source 1..75: mol_type = other DNA
atgtatggtttaagcattacgaaaccagatggcagcttgtggataagcccggggtttacgcctcagtgtctgatc

SEQ ID NO: 305756 - DNA, 75 bp, synthetic construct
  source 1..75: mol_type = other DNA
ccagctgcagctaccttcatcgcaatagatggttctaccgagctgttagtgggtatgaatgagggctctaaacga

SEQ ID NO: 305757 - DNA, 75 bp, synthetic construct
  source 1..75: mol_type = other DNA
gttatcagcaacgctttagttttcatctggatgcgacacacagctttgccccccgacaatcagctattgatgctt

SEQ ID NO: 305758 - DNA, 75 bp, synthetic construct
  source 1..75: mol_type = other DNA
atgagcgcgatcacattacgtaaagcgttaggtgtacttgcgaagtcatcttcgttttccgtaaccacagaaact

SEQ ID NO: 305759 - DNA, 75 bp, synthetic construct
  source 1..75: mol_type = other DNA
ctgcatccacttattgaccgctctggcaggtatgccagcagcacatttccccgttgagcctgattcaggcgctac

SEQ ID NO: 305760 - DNA, 75 bp, synthetic construct
  source 1..75: mol_type = other DNA
cgcctgccgccggactggcttacccaccagacggatgccacacagctcagtctattctgtaccccggttgtcaac

SEQ ID NO: 305761 - DNA, 75 bp, synthetic construct
  source 1..75: mol_type = other DNA
gtggcggcgtgggcgtcagctttggtggtggaaccaatggcggaggcctcagtatcttcgccggtatcaatggtt

SEQ ID NO: 305762 - DNA, 75 bp, synthetic construct
  source 1..75: mol_type = other DNA
gaaatacggtgatgtactgactgacagtctggcggtgaagcaggcaatagatcgtgctctgggtgaagatatccc

SEQ ID NO: 305763 - DNA, 75 bp, synthetic construct
  source 1..75: mol_type = other DNA
gcggcccgcgatattgtgactgtcgccagtgacacgctgacaacacagggacagataaccgccgggcagaatctc

SEQ ID NO: 305764 - DNA, 75 bp, synthetic construct
  source 1..75: mol_type = other DNA
cgcaatacccgtccggcgttgacgaaacatacgccgatggcgacccagcgtcagacgcctgctacggcaaaaaaa

SEQ ID NO: 305765 - DNA, 75 bp, synthetic construct
  source 1..75: mol_type = other DNA
ggagcattaggaaactggctcgaaggaaaagccccaacatctggtgcgttgatcaatggtgctggttctgctatt

SEQ ID NO: 305766 - DNA, 75 bp, synthetic construct
  source 1..75: mol_type = other DNA
gtggatggaaagtcagtgaacctgcatcacatgacgcaaaatcaaaatggaccaatagctgaggtcactcaatct

SEQ ID NO: 305767 - DNA, 75 bp, synthetic construct
  source 1..75: mol_type = other DNA
caaagtgctgggtaaccagggattaatcagcgcgaagacgctggaagtgaatggcgattcgctcagcaacggtgg

SEQ ID NO: 305768 - DNA, 75 bp, synthetic construct
  source 1..75: mol_type = other DNA
ctgttcagagtgcgctggatttggctctgaccctgagtggcgatgttattgccgccaccggcagcaaaattaccg

SEQ ID NO: 305769 - DNA, 75 bp, synthetic construct
  source 1..75: mol_type = other DNA
ttcaccccgacaggcctgtctgccgggttacagaaaattgacggcggcgtggcggagattgttatcctgctgaac

SEQ ID NO: 305770 - DNA, 75 bp, synthetic construct
  source 1..75: mol_type = other DNA
atcaacaatgtaaagcaggtaagtgtggccttgatggagatgagggtggtcatttaatagccagtatttttaatg

SEQ ID NO: 305771 - DNA, 75 bp, synthetic construct
  source 1..75: mol_type = other DNA
gtcgcagtacctgatggtgcaaattctgtttcagtcagagtgggcgatttaggtgaagatggatggggatattat

SEQ ID NO: 305772 - DNA, 75 bp, synthetic construct
  source 1..75: mol_type = other DNA
caccgcactgttgtatgcgggcaataacctctcgctgtttgccagcaccatccggaaccatcacggcgatatgct

SEQ ID NO: 305773 - DNA, 75 bp, synthetic construct
  source 1..75: mol_type = other DNA
acttcattagccgataaagttaaagaaaatatcacgctcagtcagaaagctcgcgagtcatcaaattttggtcag

SEQ ID NO: 305774 - DNA, 75 bp, synthetic construct
  source 1..75: mol_type = other DNA
tccacaccgaagaggtgatgctggacaaaattaccggaaaaacgccggtggcagcctatgtctccccggttgttg

SEQ ID NO: 305775 - DNA, 75 bp, synthetic construct
  source 1..75: mol_type = other DNA
tgcgtatcatcacagataacctcaaacaggaagagcacgccattgtccaggtggaagaaatgcaggcggtgaatg

SEQ ID NO: 305776 - DNA, 75 bp, synthetic construct
  source 1..75: mol_type = other DNA
ctgaacgacccggcctaccgtcgtctgcgtatcatcacagataacctcaaacaggaagagcacgccattgtccag

SEQ ID NO: 305777 - DNA, 75 bp, synthetic construct
  source 1..75: mol_type = other DNA
gtgggcagagtattcagatcccaagtcacgttggacagcacgtaaagggctgttttggggcgcgctgaaggtggt

SEQ ID NO: 305778 - DNA, 75 bp, synthetic construct
  source 1..75: mol_type = other DNA
aagtttaaaagttttgtcggtggcatgggcttcggctacaaaattatgtatgacgaagtaccgccaggcacgaaa

SEQ ID NO: 305779 - DNA, 75 bp, synthetic construct
  source 1..75: mol_type = other DNA
gtggtggcgaaaacgtcttatgtggcagaggacggtaccgaaaaacgttatctgccggagggcacactggtcctg

SEQ ID NO: 305780 - DNA, 75 bp, synthetic construct
  source 1..75: mol_type = other DNA
tgcttggttacaccgagcagaaagtgaaatttcgtgcgttatttctggaactgttttttcgccgcacgatcaact

SEQ ID NO: 305781 - DNA, 75 bp, synthetic construct
  source 1..75: mol_type = other DNA
ttgacctctactgcgatcaggccagcggtcttgtgaatattgccattatggacggtactgtctggcgtctgctga

SEQ ID NO: 305782 - DNA, 75 bp, synthetic construct
  source 1..75: mol_type = other DNA
acaggaagagcacgccattgtccaggtggaagagatgcaggcggtgaatgccgtgctgtatggcaaatacaccat

SEQ ID NO: 305783 - DNA, 75 bp, synthetic construct
  source 1..75: mol_type = other DNA
gaaatatcgtgcgctgtttctggagctgtttttccgccgtacggtgaatttccataccgaagaggtgatgctgga

SEQ ID NO: 305784 - DNA, 75 bp, synthetic construct
  source 1..75: mol_type = other DNA
gtgaaacccgcgtgttacgtccgggctacgtcaagccgaaacacgaatttaattaccagcaggcggttgagcgtc

SEQ ID NO: 305785 - DNA, 75 bp, synthetic construct
  source 1..75: mol_type = other DNA
gcggcgtatgtttctccggtcgtggaagggaaagtgttgcgtaaccgtggtggtgaaacgcgtgtcctgcgtccc

SEQ ID NO: 305786 - DNA, 75 bp, synthetic construct
  source 1..75: mol_type = other DNA
tatttgctcgcaggtctgtttggtagtgccattaccgggatgatggctgccctgcccgtaagttggatccagatg

SEQ ID NO: 305787 - DNA, 75 bp, synthetic construct
  source 1..75: mol_type = other DNA
ccggtttctggcacactgatgacaacagttcatcatccaccacctcacagggcagcagcatcagcgccggcggta

SEQ ID NO: 305788 - DNA, 75 bp, synthetic construct
  source 1..75: mol_type = other DNA
tcctgtgagcattattccggtggtgcaacatgggatatccgaaagccgtatatagataaagtgttggtcattaat

SEQ ID NO: 305789 - DNA, 75 bp, synthetic construct
  source 1..75: mol_type = other DNA
tgcgaatatggttactcaaccttctgagtatggtatcgccatgtataacccgtcgggtgagatgatttaccatgg

SEQ ID NO: 305790 - DNA, 75 bp, synthetic construct
  source 1..75: mol_type = other DNA
gtgaatcaggggaaacccgtaaccgtctcctcagccatcagaccacccggaccatcacggaagacagcgtcaccc

SEQ ID NO: 305791 - DNA, 75 bp, synthetic construct
  source 1..75: mol_type = other DNA
ggtatgaaactcatgccgtggcccccacggtcactgccgggaacagtctgatgctttccgccggtcgtgatgtga

SEQ ID NO: 305792 - DNA, 75 bp, synthetic construct
  source 1..75: mol_type = other DNA
gcgctgatatgcatatccgtgcaggacgactggataatgaggcatcgtttattctcgccggtggcagtatgaccc

SEQ ID NO: 305793 - DNA, 75 bp, synthetic construct
  source 1..75: mol_type = other DNA
aacatattcaaaatggttgcattaataaatttcaacaaaatatcaaacttcctgttgctgataaaacagagcaga

SEQ ID NO: 305794 - DNA, 75 bp, synthetic construct
  source 1..75: mol_type = other DNA
atctggaaaatatatcccgtaacgtgcgagatgtttttgtcgggctgtatgcttatgacaatgaaaagcacgagg

SEQ ID NO: 305795 - DNA, 75 bp, synthetic construct
  source 1..75: mol_type = other DNA
acctgggctccggagcatatcagcatgagctttattcccctgctgcggggcgaagaggcgcaggatgaccgcccg

SEQ ID NO: 305796 - DNA, 75 bp, synthetic construct
  source 1..75: mol_type = other DNA
aaaaggaccttgggtatccatgtgcaattatgccggcactggtggggtatcatagccagtatgtagcaccttatt

SEQ ID NO: 305797 - DNA, 75 bp, synthetic construct
  source 1..75: mol_type = other DNA
atcaatatggtgttttatttgttgttgcatcagggaattacattccttacaattacaacccacctctatcagttc

SEQ ID NO: 305798 - DNA, 75 bp, synthetic construct
  source 1..75: mol_type = other DNA
aactaagctttggcgtactggatggggaaagtatgaaaggcaaagtgcctatggaaggagaaaaaggaagtagcg

SEQ ID NO: 305799 - DNA, 75 bp, synthetic construct
  source 1..75: mol_type = other DNA
gtccatccccgggaagtgattaaacgcgccctgtatcacaatgccgcagccgtggtgctggcacacaatcacccg

SEQ ID NO: 305800 - DNA, 75 bp, synthetic construct
  source 1..75: mol_type = other DNA
ttgccgaacggggctggctgtaatgctgcaaaaggacaaggtcatgcaacaagaatgggggcttccctgtaccgt

SEQ ID NO: 305801 - DNA, 75 bp, synthetic construct
  source 1..75: mol_type = other DNA
agcaggacatgctgcagctcatcacgcagcgtctgcagtcgctgcaatcctctggccagtggggccagacgatgg

SEQ ID NO: 305802 - DNA, 75 bp, synthetic construct
  source 1..75: mol_type = other DNA
tattaacgggataaatcatacgaataaggctataaattatttacacatcaatggttacggtggtccaaatattgc

SEQ ID NO: 305803 - DNA, 75 bp, synthetic construct
  source 1..75: mol_type = other DNA
gtaattcgaacgcttgttacttatcaggagatcacaagggattatcagggtaaagaaatttcatcggttcaacaa

SEQ ID NO: 305804 - DNA, 75 bp, synthetic construct
  source 1..75: mol_type = other DNA
aatttcctgtaaacgagcaacgtgttatacaacgcgcactgcgattgctagagaagtatcagcgtcaacccagtg

SEQ ID NO: 305805 - DNA, 75 bp, synthetic construct
  source 1..75: mol_type = other DNA
ccgccagcgtgccagccgataaaaccgaaagccagcgcatccgcgaaaccattatcgcccaactgccggaaggcc

SEQ ID NO: 305806 - DNA, 75 bp, synthetic construct
  source 1..75: mol_type = other DNA
tccagcatcgaatttggtacgacatccagcgtgaaattcctgtatgtcgcctggccggctaactggcaatcccta

SEQ ID NO: 305807 - DNA, 75 bp, synthetic construct
  source 1..75: mol_type = other DNA
cgaaagccagcgcatccgcgaaaccattatcgcccaactgccggaaggtcagtttaccgaaagcctggtcgcgca

SEQ ID NO: 305808 - DNA, 75 bp, synthetic construct
  source 1..75: mol_type = other DNA
aagcactgagtgctgattttaatatagtagaggggctggctcagcaggaggctatgggcattttaaataagtatc

SEQ ID NO: 305809 - DNA, 75 bp, synthetic construct
  source 1..75: mol_type = other DNA
tgcagccgagctttaaatcggtgaccggcaaaggcggcatcaaagttattgatggcagcagcgtcaagtttggtc

SEQ ID NO: 305810 - DNA, 75 bp, synthetic construct
  source 1..75: mol_type = other DNA
agtttaccgaaagcctggtcgcgcaactgatggaaaaagtgatgaaggaaaagcagtcgctggagcagggcgcaa

SEQ ID NO: 305811 - DNA, 75 bp, synthetic construct
  source 1..75: mol_type = other DNA
cggtaacagcgccactcttgatcagtggaacggcaaaaattctgaaatgactgttaaacagttcggtggtggcaa

SEQ ID NO: 305812 - DNA, 75 bp, synthetic construct
  source 1..75: mol_type = other DNA
ttatgaaccgctggtgaaataccaggcagatggttcggtgatcccgtggctggcaaaaagctggatccattcgga

SEQ ID NO: 305813 - DNA, 75 bp, synthetic construct
  source 1..75: mol_type = other DNA
actcgcgcggtagctttcgaaaccggtgatatcgacctgctgtacggtaatgaagggctgctgccactcgatacc

SEQ ID NO: 305814 - DNA, 75 bp, synthetic construct
  source 1..75: mol_type = other DNA
aaaaagtactctttattaccatcaccatgatggggatctgtaccaccttaattggtgtgttaccgacctatgcac

SEQ ID NO: 305815 - DNA, 75 bp, synthetic construct
  source 1..75: mol_type = other DNA
gaactgggcaacatcccctacgcgccgatcgccaccgaaattccgttcgaacagattaaaccggtgaaaccttaa

SEQ ID NO: 305816 - DNA, 75 bp, synthetic construct
  source 1..75: mol_type = other DNA
acccgcgcagtagcgtttgaaaccggcgatatcgatctactatacggtaatgaagggctattaccgctcgatacc

SEQ ID NO: 305817 - DNA, 75 bp, synthetic construct
  source 1..75: mol_type = other DNA
gcagtttaaaaaccatgaaaccatgaacggaattaaagcgccgattggcaccgggccgtgggttttgcaggaatc

SEQ ID NO: 305818 - DNA, 75 bp, synthetic construct
  source 1..75: mol_type = other DNA
tgcagtaataacaaaggaattttccctggtgcaatctatattaaaaacggcatggaatgtaataatgaatatatt

SEQ ID NO: 305819 - DNA, 75 bp, synthetic construct
  source 1..75: mol_type = other DNA
ttcagagctgaatatttaccagtacggtggtggtaactctgcacttgctctgcaaactgatgctcgtaactctga

SEQ ID NO: 305820 - DNA, 75 bp, synthetic construct
  source 1..75: mol_type = other DNA
atgaaacttttaaaagtagcagcaattgcagcaatcgtattctctggtagcgctctggcaggttctattcctcag

SEQ ID NO: 305821 - DNA, 75 bp, synthetic construct
  source 1..75: mol_type = other DNA
gcactaaggatttggtgaaagcagcagtatcgggatggctgggcactgcgcttgaatttatggacttccagttat

SEQ ID NO: 305822 - DNA, 75 bp, synthetic construct
  source 1..75: mol_type = other DNA
tacaatatggttcatcagcggtttggtattgacagcattgatgaactttcaattgaacaaatcccgctggccgta

SEQ ID NO: 305823 - DNA, 75 bp, synthetic construct
  source 1..75: mol_type = other DNA
gcattaaaacaaattcaatcgaactattccggcagatgctacgactacggtcatgagttctcgtatgttatcgga

SEQ ID NO: 305824 - DNA, 75 bp, synthetic construct
  source 1..75: mol_type = other DNA
attcttcccgtggaccctgaactacgacgaaatcgacatggtgctggaaggggagctgcatgttcgccacgaagg

SEQ ID NO: 305825 - DNA, 75 bp, synthetic construct
  source 1..75: mol_type = other DNA
ctggactgaagcacaaaaagataatggtgatttcgagtttatcagaggctttgattatacttacgaagacgacct

SEQ ID NO: 305826 - DNA, 75 bp, synthetic construct
  source 1..75: mol_type = other DNA
ctgggaacggcaaagccactggaagaatatctacaggattatgaaataaaaaaggctaccttcggcttgccctga

SEQ ID NO: 305827 - DNA, 75 bp, synthetic construct
  source 1..75: mol_type = other DNA
gaatcagataaaagctataaatgtaatgtagtgatggatattagtggtttaaaacaagcagcatcaattaaactc

SEQ ID NO: 305828 - DNA, 75 bp, synthetic construct
  source 1..75: mol_type = other DNA
ggatgtaaaagttgattaccgctttacttcatcaggttctactggagtaacgggtaataatattcttaatattga

SEQ ID NO: 305829 - DNA, 75 bp, synthetic construct
  source 1..75: mol_type = other DNA
gttcggtggtggtaacggtgctgctgttgaccagactgcatctaactccagcgtcaacgtcactcaggttggctt

SEQ ID NO: 305830 - DNA, 75 bp, synthetic construct
  source 1..75: mol_type = other DNA
ccagcagatactggtgattttgagattatccataccttcgattatgcctcagaagatgaccttcacgatgcaatt

SEQ ID NO: 305831 - DNA, 75 bp, synthetic construct
  source 1..75: mol_type = other DNA
cgcagaccgtgcccattgagctggaacagctggtactgtcgttcaaccatatgatcgagcgtattgaggatgtct

SEQ ID NO: 305832 - DNA, 75 bp, synthetic construct
  source 1..75: mol_type = other DNA
aagttatcgtcgaaaaccccggtactcccattgcgcccgagcacttaccgcgattgtttgaccgtttctaccgcg

SEQ ID NO: 305833 - DNA, 75 bp, synthetic construct
  source 1..75: mol_type = other DNA
aaagagagagccgctatcgtctgttcgtggatgtgcagagtgacatcatcgatacccccgggcgacggatggtga

SEQ ID NO: 305834 - DNA, 75 bp, synthetic construct
  source 1..75: mol_type = other DNA
tcattctttctactttgctattaactgcttgtaattctgaaccatccgacaaagacatctataatgcattgagca

SEQ ID NO: 305835 - DNA, 75 bp, synthetic construct
  source 1..75: mol_type = other DNA
tcaggttgcgggcgatccgttgatgctgcgtcgggcgctaagcaacctgctttctaatgcccttcgttatacgcc

SEQ ID NO: 305836 - DNA, 75 bp, synthetic construct
  source 1..75: mol_type = other DNA
gctggtgacgctgcgtattattcaggggttgggtgcaggtgcggaaatttccggtgccggtacgatgctggcgga

SEQ ID NO: 305837 - DNA, 75 bp, synthetic construct
  source 1..75: mol_type = other DNA
gaagcctggccgctaatggtggaacgctatgttgcgctggcctatgacaaaggcgtaatgcgtaccgcacaagat

SEQ ID NO: 305838 - DNA, 75 bp, synthetic construct
  source 1..75: mol_type = other DNA
aactccttcaaatccgcattagtgcctttcttcgcgggtattcctcatcgcaccggctggcgcggcgagatgcgc

SEQ ID NO: 305839 - DNA, 75 bp, synthetic construct
  source 1..75: mol_type = other DNA
atttcttgaatctggagatgaggccgcgcgcttagctggtaacgcaccttttattattgataaagacagtggtga

SEQ ID NO: 305840 - DNA, 75 bp, synthetic construct
  source 1..75: mol_type = other DNA
cgacgccgcagaaggttatcaccagagcttgatcgacattactccccagcgcgtgctggaagaactcaactctct

SEQ ID NO: 305841 - DNA, 75 bp, synthetic construct
  source 1..75: mol_type = other DNA
atgaaaatactggtgatcggcccgtcttgggttggcgacatgatgatgtcgcaaagtctctatcgcacgctccag

SEQ ID NO: 305842 - DNA, 75 bp, synthetic construct
  source 1..75: mol_type = other DNA
gattgcagcctgtaaagccattgtcactaacgattctggcctgatgcacgttgcggcggcgctcaatcgtccgct

SEQ ID NO: 305843 - DNA, 75 bp, synthetic construct
  source 1..75: mol_type = other DNA
aaaaaaatccgttatgtgtgcgttgtctggctgagggtatttatacgccagcctttgtggtggatcacattatcc

SEQ ID NO: 305844 - DNA, 75 bp, synthetic construct
  source 1..75: mol_type = other DNA
gattgtgattcataactgtgcggtgcttggattatttgctctggaaaaacgtacaaatagatggcttagaaaccg

SEQ ID NO: 305845 - DNA, 75 bp, synthetic construct
  source 1..75: mol_type = other DNA
ggttaatgacagcaaccaacccacagcaaaacctgcacctgctggtagcatgttccagagcaaatccttctggct

SEQ ID NO: 305846 - DNA, 75 bp, synthetic construct
  source 1..75: mol_type = other DNA
atgattacttatcacgacgcattcgcgaaagcgaaccattaccttgatgatgcagatctcccggtcgtcattact

SEQ ID NO: 305847 - DNA, 75 bp, synthetic construct
  source 1..75: mol_type = other DNA
tttggcctgaaattacaaaaatactcacccgcagacatcgcgaaacgcaccgaatacgccctgcaatgttgtcag

SEQ ID NO: 305848 - DNA, 75 bp, synthetic construct
  source 1..75: mol_type = other DNA
acggatggtcgccgtcgcctgcctggaagcactctctccgccactattgctgctggacgagccgagtcgggattt

SEQ ID NO: 305849 - DNA, 75 bp, synthetic construct
  source 1..75: mol_type = other DNA
aaggccagatgcgcttgatctctgcggtgatgggcggacgtacttttaaaggccgtgaagccgaaagtaaaaaac

SEQ ID NO: 305850 - DNA, 75 bp, synthetic construct
  source 1..75: mol_type = other DNA
aaaatgatgaccagttacgttatcggccaggcaatgaaagccggtaaatttaaagaaactgatttagtcactatc

SEQ ID NO: 305851 - DNA, 75 bp, synthetic construct
  source 1..75: mol_type = other DNA
aattaacaaatgatcataataaaattgtgaaagagaaagcacaactagttagtgaaaacaaagataatttgacgc

SEQ ID NO: 305852 - DNA, 75 bp, synthetic construct
  source 1..75: mol_type = other DNA
ttggcttgatgaacagctacgttaacgccctgggcctgaaaaacacccacttccagacggtacatggtctggatg

SEQ ID NO: 305853 - DNA, 75 bp, synthetic construct
  source 1..75: mol_type = other DNA
gccgccggtagtcaggatgcttttgttggcctgatgaacagctacgttaacgcgctgggtctgaaaaatacccat

SEQ ID NO: 305854 - DNA, 75 bp, synthetic construct
  source 1..75: mol_type = other DNA
tgaaagatctgaaagccagctatgtgctgaacagcagtgaattgcatgcgccgctgcaaaagaatcaggtcgtcg

SEQ ID NO: 305855 - DNA, 75 bp, synthetic construct
  source 1..75: mol_type = other DNA
gaaccgttgatccgattgatcatcgccggaccgatcctgatgggctgcatgtttttgatgcgcacccatcggttg

SEQ ID NO: 305856 - DNA, 75 bp, synthetic construct
  source 1..75: mol_type = other DNA
tcgccatttacgggcaaaccttccccgccatgctcgactatccggaagtggtcgtgcgcttaacgctgtggtgta

SEQ ID NO: 305857 - DNA, 75 bp, synthetic construct
  source 1..75: mol_type = other DNA
ggcgcgaacgacgggcagaaagggatcggcctggtaatgctggtactggtggggatagcccccgcaggtttcgtc

SEQ ID NO: 305858 - DNA, 75 bp, synthetic construct
  source 1..75: mol_type = other DNA
atcggcgtgctgtggtttcccagccgcgctatcacgcagatgcatcaggcgcttaatgatcggcttgatgatgcc

SEQ ID NO: 305859 - DNA, 75 bp, synthetic construct
  source 1..75: mol_type = other DNA
tgccgctaaaccaccatcaatggtgcccgacgcctttacgaacccggactatatgcgctatacggtgaaaacgct

SEQ ID NO: 305860 - DNA, 75 bp, synthetic construct
  source 1..75: mol_type = other DNA
ccgccaacgcccgccgccaaaccgccatcaatggtcgccgatgcttttaccaatccagactatatgcgctacgcg

SEQ ID NO: 305861 - DNA, 75 bp, synthetic construct
  source 1..75: mol_type = other DNA
tgcactgggattgaaaaacactcacttccagactgttcacggtctggatgctgacggccagtacagctctgcgcg

SEQ ID NO: 305862 - DNA, 75 bp, synthetic construct
  source 1..75: mol_type = other DNA
cgctcaaatgggtgggcagtaaagcccgccttatgccgcagctgcgtcaccatctgccggaaggtaagcgcctgg

SEQ ID NO: 305863 - DNA, 75 bp, synthetic construct
  source 1..75: mol_type = other DNA
cagctatcttcacacgcttactgacgggcagttgctggctatcaaaacgctctcaatggtaagcgtcaacggagc

SEQ ID NO: 305864 - DNA, 75 bp, synthetic construct
  source 1..75: mol_type = other DNA
ttaatctctacacgggggagagtgtaaatgaggccgataagcatcaagttttttctgaaagattcactcttgata

SEQ ID NO: 305865 - DNA, 75 bp, synthetic construct
  source 1..75: mol_type = other DNA
gaaataaaaccgccgtaatgtccgaactgaaaaaacatcttcctgctggtccgcgactggttgaacctttcgcgg

SEQ ID NO: 305866 - DNA, 75 bp, synthetic construct
  source 1..75: mol_type = other DNA
cattattccgaaacgctggatatggtgcgcgatggtgatgtggtctattgcgatccgccttatctgacggattcc

SEQ ID NO: 305867 - DNA, 75 bp, synthetic construct
  source 1..75: mol_type = other DNA
atcccaggctgttttttattatgcagtgcgggatgcctttaacatgtcaggcaaggcttctggcagtgaaagcgt

SEQ ID NO: 305868 - DNA, 75 bp, synthetic construct
  source 1..75: mol_type = other DNA
cagtctccggtcaggatgcgccgtattaaaatagtaaaaaataacattgtcctgacaaaagtaaaggataatatt

SEQ ID NO: 305869 - DNA, 75 bp, synthetic construct
  source 1..75: mol_type = other DNA
ccgcagtgcctgaatgggtcactatttctgaagccgcacatattattaatcaacaaccgggtatcagtgtcaccg

SEQ ID NO: 305870 - DNA, 75 bp, synthetic construct
  source 1..75: mol_type = other DNA
tgatatggcgctgatcggccaggcgctgattcgtgacgtgccaaatgaatactctatctataaagagaaagagtt

SEQ ID NO: 305871 - DNA, 75 bp, synthetic construct
  source 1..75: mol_type = other DNA
gaaaaagcccagcgagcaacgtttatctgcgccagatttgatgaaacgctggcgatgttgaaggcgggagatgtg

SEQ ID NO: 305872 - DNA, 75 bp, synthetic construct
  source 1..75: mol_type = other DNA
tttacgactcagcactcaataattttgctttcgattttcaaaatttagcaggtatatttaaaattaacaaggaaa

SEQ ID NO: 305873 - DNA, 75 bp, synthetic construct
  source 1..75: mol_type = other DNA
tctgaatgcattgaaagaagatcgagaactcttaagttagatgataattttattaaatgtgcagacaatattaat

SEQ ID NO: 305874 - DNA, 75 bp, synthetic construct
  source 1..75: mol_type = other DNA
ccaacgcgctgttaaccggctcgtcggtgatggatgcgttaaacctgcgcgaagtcaccaagattttctcttcac

SEQ ID NO: 305875 - DNA, 75 bp, synthetic construct
  source 1..75: mol_type = other DNA
atttctggccgagggactgtctacatacaggccgctgaaagccagcaaccaatatcgtgttgatcgcctgagtgg

SEQ ID NO: 305876 - DNA, 75 bp, synthetic construct
  source 1..75: mol_type = other DNA
gcgacactgttccggcctgcgtctgtacttgtgacagtcgaagcgcagagcgtcatcaatcgccagtgggatgat

SEQ ID NO: 305877 - DNA, 75 bp, synthetic construct
  source 1..75: mol_type = other DNA
tgtcgatgctgacaacgacattcatattgaagcttacgatcgggacgtccagacccgtttagagtccaaatccgt

SEQ ID NO: 305878 - DNA, 75 bp, synthetic construct
  source 1..75: mol_type = other DNA
tttgctatctggttgcgtatgaatctgaaagaaagcccggtctttgagaaggttaacgacagtaaccaaccgaca

SEQ ID NO: 305879 - DNA, 75 bp, synthetic construct
  source 1..75: mol_type = other DNA
taaaggtactaaaattatctactgttgccactgaagagcagaccatggcaatgttgcagcaaaagtacctcacag

SEQ ID NO: 305880 - DNA, 75 bp, synthetic construct
  source 1..75: mol_type = other DNA
ctgttaagtcggataagctgattatctctgtggatacgctgagctatatccgcatcccgattgactatcaggatg

SEQ ID NO: 305881 - DNA, 75 bp, synthetic construct
  source 1..75: mol_type = other DNA
cctgctggaagatttaatggaatcccggccccctgaaggccgcgccgtcgctgtcctttctcgggctggttgtga

SEQ ID NO: 305882 - DNA, 75 bp, synthetic construct
  source 1..75: mol_type = other DNA
taaaggttcagtcccgcacaaattccgcaagtgggtaacagcagaagttctgccttcaattcgcaaatatggcga

SEQ ID NO: 305883 - DNA, 75 bp, synthetic construct
  source 1..75: mol_type = other DNA
cgcaaatgggtgacagctgaagttttgccatccattcgtaaaacggggtcttacggaaatacactgaaagctaaa

SEQ ID NO: 305884 - DNA, 75 bp, synthetic construct
  source 1..75: mol_type = other DNA
atgaaaacacccttaccgcccgtcttacgcgcagccctttaccgtcgcgctgtcgcctgtgcctggctgaccgtg

SEQ ID NO: 305885 - DNA, 75 bp, synthetic construct
  source 1..75: mol_type = other DNA
atgaaaaagccattaccgcccgtattacgcgccgcgctctatcgccgcgccgtggcctgtgcatggctgaccctg

SEQ ID NO: 305886 - DNA, 75 bp, synthetic construct
  source 1..75: mol_type = other DNA
atgcgtaatagccataacattacactaacaaatagcgaaagccttactgaggatgaagaaaccacatggtcgctg

SEQ ID NO: 305887 - DNA, 75 bp, synthetic construct
  source 1..75: mol_type = other DNA
accgcgtgttgtaagagctgcgcaactagactggccccctgaatcaccagacaaccaatatcacttatttaagtg

SEQ ID NO: 305888 - DNA, 75 bp, synthetic construct
  source 1..75: mol_type = other DNA
agctggaagatgaaaataaactcctgcagacacaaatcgaagccgggaagaattttgactctctcagtgctgaac

SEQ ID NO: 305889 - DNA, 75 bp, synthetic construct
  source 1..75: mol_type = other DNA
aggaaagagttgctggggggcaggggaggtcgtagacgtaactccgtttgccccgagtatcccccctgctgtaac

SEQ ID NO: 305890 - DNA, 75 bp, synthetic construct
  source 1..75: mol_type = other DNA
ccgccagattggtgagcgtattggcggggaatataccgctgccgagcgcgaaatgctgaaccttcagtttgaaat

SEQ ID NO: 305891 - DNA, 75 bp, synthetic construct
  source 1..75: mol_type = other DNA
gatggtcttttccatgctgctggcggcgattatctggaacctgggaacgtggttcttcggtttaccggcctccag

SEQ ID NO: 305892 - DNA, 75 bp, synthetic construct
  source 1..75: mol_type = other DNA
acacggcgaacgcggtggcaaccgttatttatactcgtgccatgcagccgcatcttgcggtagtaatggcggcat

SEQ ID NO: 305893 - DNA, 75 bp, synthetic construct
  source 1..75: mol_type = other DNA
tgcgtccgttaccggcgataaaaataccgccccgatgcagttgcgccttacaggcaaagttcagatgcctaacga

SEQ ID NO: 305894 - DNA, 75 bp, synthetic construct
  source 1..75: mol_type = other DNA
gtggcagataaagccgacaatgcgtttatgatgatttgtactgcgctggtgctgtttatgactgttccgggtatc

SEQ ID NO: 305895 - DNA, 75 bp, synthetic construct
  source 1..75: mol_type = other DNA
ttatcagtacatccacgttgcgtttcagggatcgtttgcctgtattactgtgggcctgatcgttggagcgctggc

SEQ ID NO: 305896 - DNA, 75 bp, synthetic construct
  source 1..75: mol_type = other DNA
gacgcaggtgacggtgacgtttgcactggtctgtattctctgggtggtttacggttactcgctggcgtttggtga

SEQ ID NO: 305897 - DNA, 75 bp, synthetic construct
  source 1..75: mol_type = other DNA
tgctggtgcaggttgttcctaacctgaaaaccagtcagaactggctgctcgatcgcttcttcccgaatgtcgtga

SEQ ID NO: 305898 - DNA, 75 bp, synthetic construct
  source 1..75: mol_type = other DNA
tgctggcgcaggtcgttcctaacctgaaaaccagtcagaactggctgcttgatcgcttcttcccgaacgtcgtga

SEQ ID NO: 305899 - DNA, 75 bp, synthetic construct
  source 1..75: mol_type = other DNA
ctgacggttggtctgcgtgtgccggaagaacaagagcgagaagggctggacgtcaacagtcacggcgagaatgcc

SEQ ID NO: 305900 - DNA, 75 bp, synthetic construct
  source 1..75: mol_type = other DNA
ggcggcgatatttatagtgaggaatcagttgacgggcatcatttaaaatttacggtgcgcgacgaaccgatgatc

SEQ ID NO: 305901 - DNA, 75 bp, synthetic construct
  source 1..75: mol_type = other DNA
cctcaattaaaatggttcgctgattactctggtaatattgccaaatataatattgacaaggattattttataatt

SEQ ID NO: 305902 - DNA, 75 bp, synthetic construct
  source 1..75: mol_type = other DNA
cttattcgcaccttccctagctttatctgttcgggcaatacgatgcccattgtacttgttgactggtctgatatt

SEQ ID NO: 305903 - DNA, 75 bp, synthetic construct
  source 1..75: mol_type = other DNA
atgtcgcattcgagttcttccacaagttacatgtgccattttattgcttccatgacgtggatgtttctccggaag

SEQ ID NO: 305904 - DNA, 75 bp, synthetic construct
  source 1..75: mol_type = other DNA
accaatcgctatggcaccatttcgctggccagcgcggccagtcaggcagcattgacctgggaaggggaggcacac

SEQ ID NO: 305905 - DNA, 75 bp, synthetic construct
  source 1..75: mol_type = other DNA
ccggtaactcggcgatccggctcgtcaatacgcggtgagcatccctcgagacggggtaataaagctctcaaacgg

SEQ ID NO: 305906 - DNA, 75 bp, synthetic construct
  source 1..75: mol_type = other DNA
gagttgcttctggaaaccatccgttatacgcgtgaactggcgaaaaatggcgtaacgctgtttggtgtgggcgaa

SEQ ID NO: 305907 - DNA, 75 bp, synthetic construct
  source 1..75: mol_type = other DNA
acaaagaccaggaggagaatggctacgcgtacattaagaaacagtgtatgcactgcgtcgatccgaactgtgtct

SEQ ID NO: 305908 - DNA, 75 bp, synthetic construct
  source 1..75: mol_type = other DNA
caggcttgcgtcaccaagtgtcaggatatcaacttccctgaacgtaacccacaaggggaacagacctggtcgaac

SEQ ID NO: 305909 - DNA, 75 bp, synthetic construct
  source 1..75: mol_type = other DNA
atgtcctggcaaaagtgggtggatttgatttggtcggaatagctggagtgatgttaggtgctgcttcctgcggtt

SEQ ID NO: 305910 - DNA, 75 bp, synthetic construct
  source 1..75: mol_type = other DNA
atacgatcccagccatcaattctgccgctatgtcgcgtgcacaacggcatgttgacgggttactcaaacctgttg

SEQ ID NO: 305911 - DNA, 75 bp, synthetic construct
  source 1..75: mol_type = other DNA
gggacatgatcctgaagttgtggtgggtattggtgcaaacctgccaacagataaactggctaataaagtggatgt

SEQ ID NO: 305912 - DNA, 75 bp, synthetic construct
  source 1..75: mol_type = other DNA
taactttgcgcaaatggtcgatgtgctggctggcaagcaagaagagagcggcgtgaaactgttgtggggaaccgc

SEQ ID NO: 305913 - DNA, 75 bp, synthetic construct
  source 1..75: mol_type = other DNA
aaggggaaaaccgcgacaccattaaaggtctgaaagtggcgctgtttggcccaatcgccgggattggcgatgcga

SEQ ID NO: 305914 - DNA, 75 bp, synthetic construct
  source 1..75: mol_type = other DNA
tggtattcggtatcggcctgatgctggtactgacaaagaccgcaggttcagacacattcgctgcattagcaatgc

SEQ ID NO: 305915 - DNA, 75 bp, synthetic construct
  source 1..75: mol_type = other DNA
caagaaagtggaataatgtaagttacacagactctgaaaaagaggaaattcaacggtcaatattaaaacaaatag

SEQ ID NO: 305916 - DNA, 75 bp, synthetic construct
  source 1..75: mol_type = other DNA
cggtattttatttattaccttgtttagcgttttgttattcgacgaaagtttatcgctgatgaaaattgccgggtt

SEQ ID NO: 305917 - DNA, 75 bp, synthetic construct
  source 1..75: mol_type = other DNA
gtttggctattgccacggaaattaccggtacgctgtccatgaaatgggcgagtgtcagtgagggtaacggtgggt

SEQ ID NO: 305918 - DNA, 75 bp, synthetic construct
  source 1..75: mol_type = other DNA
cctacaccctgctgatgtattacttcctgcgggtgaaaaaagcgcatccggtgctgttaatcggcgtgacgtttg

SEQ ID NO: 305919 - DNA, 75 bp, synthetic construct
  source 1..75: mol_type = other DNA
gaaagataatagtggcaagaatgtagctgaaggtgccttctcagcagttgcgaatttcaaccttacttatcagta

SEQ ID NO: 305920 - DNA, 75 bp, synthetic construct
  source 1..75: mol_type = other DNA
aggtgggtagtacctggtgcgtcgtggataccatcacactggatgccgctaccagaaccgccgaaggaggtgcgc

SEQ ID NO: 305921 - DNA, 75 bp, synthetic construct
  source 1..75: mol_type = other DNA
ggccaaatgtcactggcagatttagccaaatatgctcaggaacataatttgtctccggtgcatcagagtggtcgc

SEQ ID NO: 305922 - DNA, 75 bp, synthetic construct
  source 1..75: mol_type = other DNA
gtaaacaacttctggctggccagcgactttccgttttatccagacttaacagcaccagtggccggatggcacggc

SEQ ID NO: 305923 - DNA, 75 bp, synthetic construct
  source 1..75: mol_type = other DNA
agcgatccggctgactggctggaagaaatgacggtatattgtgcgatggagctggctgcaggatattatggggcc

SEQ ID NO: 305924 - DNA, 75 bp, synthetic construct
  source 1..75: mol_type = other DNA
gctggctgcaggatattatggggtcaccaaccgctatggcacgatttcactggccagtgctgccagccaggccgg

SEQ ID NO: 305925 - DNA, 75 bp, synthetic construct
  source 1..75: mol_type = other DNA
cctggcgctgaagcctggcagcgaataccactatccgcgtcagacgctgaaatctggcgacacttacctgcacac

SEQ ID NO: 305926 - DNA, 75 bp, synthetic construct
  source 1..75: mol_type = other DNA
tggacggcgatagcgcctcgatggctgaactctgcgccctgataagcgcccttgccgatgtgccggtgaatcaga

SEQ ID NO: 305927 - DNA, 75 bp, synthetic construct
  source 1..75: mol_type = other DNA
accttggtcgctatcagactgatggattaagtgcaaaagactttaacaaggtcttcgatcttatccgtaaacagc

SEQ ID NO: 305928 - DNA, 75 bp, synthetic construct
  source 1..75: mol_type = other DNA
ttgcgtatctgggttatcttgccggatatcagcacattaatgactgcatggaagatgaacattatcgtcatgcag

SEQ ID NO: 305929 - DNA, 75 bp, synthetic construct
  source 1..75: mol_type = other DNA
ggcaatgcgaatgctgtcacagcaggcgatggtcgccagccagatgaaacgggcagccaacgacaaagccattgc

SEQ ID NO: 305930 - DNA, 75 bp, synthetic construct
  source 1..75: mol_type = other DNA
atatttgcagtgcaagcgacgtaaagataaatctgttgagcccacccctttatattatctctggagtagggaggc

SEQ ID NO: 305931 - DNA, 75 bp, synthetic construct
  source 1..75: mol_type = other DNA
gtgtatcctgaagtgctgtcgttggtatttgatgcagctaacacatacaacgctgagcctggtgtactggaacag

SEQ ID NO: 305932 - DNA, 75 bp, synthetic construct
  source 1..75: mol_type = other DNA
tagcttgtttactgcaaaagtgacggaagcgtacttgtctttattagcgcatggcgcgaaagcgaccgtggcaaa

SEQ ID NO: 305933 - DNA, 75 bp, synthetic construct
  source 1..75: mol_type = other DNA
cgtgcagaaaacgcgttggcagagaaactggaattgaatgtgctttttgaagagtgggattcagatggcctatga

SEQ ID NO: 305934 - DNA, 75 bp, synthetic construct
  source 1..75: mol_type = other DNA
gttatctgcgaaatgagctgtcctggtctctgttctccctgccatatgtgggaactgtccgtgcagtgactgcac

SEQ ID NO: 305935 - DNA, 75 bp, synthetic construct
  source 1..75: mol_type = other DNA
tgaaaatggggcgtttcggtaaatacatggcctgcaccaacgaagagtgtaaaaacacgcgtaagattttacgta

SEQ ID NO: 305936 - DNA, 75 bp, synthetic construct
  source 1..75: mol_type = other DNA
aagagggcgaattccgcattaaaggttatgacggcccgatcgttgagtgtgaaaaatgtggctctgaaatgcacc

SEQ ID NO: 305937 - DNA, 75 bp, synthetic construct
  source 1..75: mol_type = other DNA
caacgcgctgcgcgcaaaacgtcgttgcccgaaatgcggcacggcgatggacagctatctcatcgatccgaaacg

SEQ ID NO: 305938 - DNA, 75 bp, synthetic construct
  source 1..75: mol_type = other DNA
tgtgtatcctgaagtgttgtcgttggtatttgatgcagctaacacatacaacgctgagcctggtgtactggaaca

SEQ ID NO: 305939 - DNA, 75 bp, synthetic construct
  source 1..75: mol_type = other DNA
tcagttttgacctgatgaaagagacgttacgcattaccaatcttggcgatttacaggttggggattgggtaaatg

SEQ ID NO: 305940 - DNA, 75 bp, synthetic construct
  source 1..75: mol_type = other DNA
ctgcaaaactggtgtcgattgacgagaaaccaaattttcgtactcatgtggttgagttacctgactatatgctgg

SEQ ID NO: 305941 - DNA, 75 bp, synthetic construct
  source 1..75: mol_type = other DNA
gtgacggaaattaacggcaaccatgtcagttttgacctgatgaaagaaacgttacgcattaccaatcttggcgat

SEQ ID NO: 305942 - DNA, 75 bp, synthetic construct
  source 1..75: mol_type = other DNA
agctgatggccgaggcgaaaaaacgcctggcgctgaagccaggtagcgaatatcactatccgcgtcagacgctga

SEQ ID NO: 305943 - DNA, 75 bp, synthetic construct
  source 1..75: mol_type = other DNA
gtctcgataaaggcggtctacctggctgcgtagaagtgtgcccggcgggcgcggtgattttcggtacgcgtgaag

SEQ ID NO: 305944 - DNA, 75 bp, synthetic construct
  source 1..75: mol_type = other DNA
caggcgtggggaaaagtattgggtgaagataactccattacacatctgtgtagtggtcaagtaatattggccacg

SEQ ID NO: 305945 - DNA, 75 bp, synthetic construct
  source 1..75: mol_type = other DNA
ctggaacagacggcccgggcttacattgaatcacatggtgccattgaacgtcatcttgggtgtagtgacttttaa

SEQ ID NO: 305946 - DNA, 75 bp, synthetic construct
  source 1..75: mol_type = other DNA
atttacaattaaatataaatgagcatggggtttctcatagactgattaaaaaaacgtctaataaattgctcgtct

SEQ ID NO: 305947 - DNA, 75 bp, synthetic construct
  source 1..75: mol_type = other DNA
ctggaagttatggtagagaaacaatacccattctaaatcaacaaataaagcaagaatgtggttctgactatgctc

SEQ ID NO: 305948 - DNA, 75 bp, synthetic construct
  source 1..75: mol_type = other DNA
gctcaactttgcggagcattcgctggcctttttcagcctgtttatccgcgcctttgcgctggtgtggcactggct

SEQ ID NO: 305949 - DNA, 75 bp, synthetic construct
  source 1..75: mol_type = other DNA
ctggtgtaagagtcgtgaggtggtggttctcagaaatctgattgagcaggcgtggggaaaagtattgggtgaaga

SEQ ID NO: 305950 - DNA, 75 bp, synthetic construct
  source 1..75: mol_type = other DNA
aacagttaactgccgaaaaacgtaaccattgcatgaaactgtccaaaaaattcatagagaaaaaaccatacagcc

SEQ ID NO: 305951 - DNA, 75 bp, synthetic construct
  source 1..75: mol_type = other DNA
tgaagtagtttctttgcctatggatccgactatgtctgataaagatatagagcatgtaattagcacggttaatag

SEQ ID NO: 305952 - DNA, 75 bp, synthetic construct
  source 1..75: mol_type = other DNA
cttttagtttctacccaggtaaaaacttgggggcattaggggatgctggtgctgtagtgactgacaatcaagagc

SEQ ID NO: 305953 - DNA, 75 bp, synthetic construct
  source 1..75: mol_type = other DNA
caaaaacgtctgcttccgccaccggtgacccgccctgtgacgcgctgctggccggccagcagctttacggacata

SEQ ID NO: 305954 - DNA, 75 bp, synthetic construct
  source 1..75: mol_type = other DNA
tgcgccgcgatatggccgggctggcgaacaatctttgcgacctgaaaaccaccctgaaagtgctggaagacacgt

SEQ ID NO: 305955 - DNA, 75 bp, synthetic construct
  source 1..75: mol_type = other DNA
tcgagctggccctgacctccgccaaccactttctgcgtcaacagcaagatgcgctgaaggtgcagttagccgcct

SEQ ID NO: 305956 - DNA, 75 bp, synthetic construct
  source 1..75: mol_type = other DNA
tcattattatggcggatgatttaggttatggcgatttagcaacatatggtcatcagatcgttaaaacacctaata

SEQ ID NO: 305957 - DNA, 75 bp, synthetic construct
  source 1..75: mol_type = other DNA
tttatctttaccgattagtccgacaatgacagatgctgaggtcgattacgttataaccaaattgaatgagtttaa

SEQ ID NO: 305958 - DNA, 75 bp, synthetic construct
  source 1..75: mol_type = other DNA
gtcaaatattgccttggagtagcaaatggattagatgcacttattttaacattgcgagcatggaagatattagga

SEQ ID NO: 305959 - DNA, 75 bp, synthetic construct
  source 1..75: mol_type = other DNA
aaaaataatcaatccaattatcagattgcctaaaatagataataatgcagaattatcacatgtatggcatctctt

SEQ ID NO: 305960 - DNA, 75 bp, synthetic construct
  source 1..75: mol_type = other DNA
ttggaaaagtgctggataaaatcaaagcgatgggtgaagaagataacacaatcgttatttttaccagtgataacg

SEQ ID NO: 305961 - DNA, 75 bp, synthetic construct
  source 1..75: mol_type = other DNA
gtactcacaatatatgagcgcgtatcagaagcagcatcctgatttattttatggcgactgggcagacaaaccctg

SEQ ID NO: 305962 - DNA, 75 bp, synthetic construct
  source 1..75: mol_type = other DNA
aagttaccgtcgaaaaccccggtacgcccattgcgcccgagcacttaccgcgtttgtttgaccgtttctatcgcg

SEQ ID NO: 305963 - DNA, 75 bp, synthetic construct
  source 1..75: mol_type = other DNA
aaagagaaagccgttaccggctgtttgtggatgtgcagagtgacatcatcgacactcccgggcggcggatggtga

SEQ ID NO: 305964 - DNA, 75 bp, synthetic construct
  source 1..75: mol_type = other DNA
atcagtctgccggttgggccgatggtggagggtaaaccggcttatacactctacatcgcgctgtcgatcgatttt

SEQ ID NO: 305965 - DNA, 75 bp, synthetic construct
  source 1..75: mol_type = other DNA
gggattttcccaggagcaatctatattaaaaatggcataaaatgtaataatgaacatatttctcgcaaggaagat

SEQ ID NO: 305966 - DNA, 75 bp, synthetic construct
  source 1..75: mol_type = other DNA
ccagcaacgcgcccgcagttgagtcagctcaaaatggcgaacctgagcagggcaatatgttacgcgcgacgcaat

SEQ ID NO: 305967 - DNA, 75 bp, synthetic construct
  source 1..75: mol_type = other DNA
taaagccttattctccagcgtgcggacgggaacgccggtgaaagtgatcaacgaaccggtgaaatattccgtgga

SEQ ID NO: 305968 - DNA, 75 bp, synthetic construct
  source 1..75: mol_type = other DNA
ccctaacccaacctggacgcctacggcaggcattcgtcagcgttcgctggagcgtggcattaaattaccgccagt

SEQ ID NO: 305969 - DNA, 75 bp, synthetic construct
  source 1..75: mol_type = other DNA
caaacccgccacgttctggaaactatccgcaaggtgatcgagacggcgggtggcacgatggcggatgtgaccttc

SEQ ID NO: 305970 - DNA, 75 bp, synthetic construct
  source 1..75: mol_type = other DNA
gcagcagtatgatgaggagtccggcctgtattataaccgccaccgctattatgacccgctgcgggggaggtatat

SEQ ID NO: 305971 - DNA, 75 bp, synthetic construct
  source 1..75: mol_type = other DNA
caagactggtctaatgattctttagaaacatgtaagatgaagtgctccggaaataacattggacgttttattaga

SEQ ID NO: 305972 - DNA, 75 bp, synthetic construct
  source 1..75: mol_type = other DNA
gtcacgcgccgatccgcagcgtcagccgccagatccagaatatcacttcgaaagatctcgacgttcgcctggacc

SEQ ID NO: 305973 - DNA, 75 bp, synthetic construct
  source 1..75: mol_type = other DNA
gtcgcgcataaaggcacggttgcggtaacgtcagatgcgcgggggacaaggtttattatcacattacccgcttaa

SEQ ID NO: 305974 - DNA, 75 bp, synthetic construct
  source 1..75: mol_type = other DNA
ctatatcgcactttcgatcgattttcatcttcattacataaatgatttgatgaataaacttattatgaccgcatc

SEQ ID NO: 305975 - DNA, 75 bp, synthetic construct
  source 1..75: mol_type = other DNA
aaaaaataaatgcttgctatgaacaggagttaattgaagcttgctcgcgagtaattaactctggatggtacattt

SEQ ID NO: 305976 - DNA, 75 bp, synthetic construct
  source 1..75: mol_type = other DNA
caaaaacgtaaaataaaaaaactagcatttctggcaagagatggtgaaattgttaagaaagtctttgatcttata

SEQ ID NO: 305977 - DNA, 75 bp, synthetic construct
  source 1..75: mol_type = other DNA
ttttttagttaaaaaaaataattatagggatatgctttctctttattacaacaataaagtctttgataaagaaca

SEQ ID NO: 305978 - DNA, 75 bp, synthetic construct
  source 1..75: mol_type = other DNA
aagaacctgcttataaacttctatgttctgataagatcaaaaaagttgtcgctatatcatcatcattagtttatg

SEQ ID NO: 305979 - DNA, 75 bp, synthetic construct
  source 1..75: mol_type = other DNA
tggtcactggtgtaagtgtttttgttctaggccaactcatcgtcaaaggagctattgagccttacatttcattca

SEQ ID NO: 305980 - DNA, 75 bp, synthetic construct
  source 1..75: mol_type = other DNA
ttacgcggtgaacaaaaaatcgctgattgataacgcgttgtatggcacccagcaggtcgccgacaccctgtttgc

SEQ ID NO: 305981 - DNA, 75 bp, synthetic construct
  source 1..75: mol_type = other DNA
ggcctgaaaccgcgccagtacgatccgcagaaagcgaaagcgttgctggaaaaagccggttggacgctgcctgct

SEQ ID NO: 305982 - DNA, 75 bp, synthetic construct
  source 1..75: mol_type = other DNA
ggaaagcatcttccaaagggaatggtttcagatactcccgtttatggtctggactggatgcctacgctggcgaaa

SEQ ID NO: 305983 - DNA, 75 bp, synthetic construct
  source 1..75: mol_type = other DNA
tagggcgtaatgaactcacgattgctaatctactcaaagcgcaagggtacgacacggcaatgatgggtaagctgc

SEQ ID NO: 305984 - DNA, 75 bp, synthetic construct
  source 1..75: mol_type = other DNA
tctgtcgtatatatttctctctttcgccgttaaaaaaatcgccttaggcgtagcttatgcgctgtgggaaggtat

SEQ ID NO: 305985 - DNA, 75 bp, synthetic construct
  source 1..75: mol_type = other DNA
cgtgatggtgactggaaaatgaacatcgatcgtaataataaaccgaagtatttatacaaccttaaaaccgatcgt

SEQ ID NO: 305986 - DNA, 75 bp, synthetic construct
  source 1..75: mol_type = other DNA
cttcgcccaaaaaatacctcgacatgtactcacaatatatgagcgaatatcagaagcagcatcctgatttatttt

SEQ ID NO: 305987 - DNA, 75 bp, synthetic construct
  source 1..75: mol_type = other DNA
gtatggtaagtttttaaaatataaaagtgatattgataatgattctctaatgaaagccagaggtgataaaccaga

SEQ ID NO: 305988 - DNA, 75 bp, synthetic construct
  source 1..75: mol_type = other DNA
tagtccggagcgctttgatgcacctgcagttgtaagcttgagtaatcagtgtataagcctccggcgaaatgatat

SEQ ID NO: 305989 - DNA, 75 bp, synthetic construct
  source 1..75: mol_type = other DNA
tcagcgattgtttcgccagtatggtcgcccgttaaatatcgtgctggcgctgttgctggtctattgtgcggtacg

SEQ ID NO: 305990 - DNA, 75 bp, synthetic construct
  source 1..75: mol_type = other DNA
tcagcgtttgtttcgccactatggtcgccagttgaatatcgttctggcgctgttgctggtctattgtgcggtacg

SEQ ID NO: 305991 - DNA, 75 bp, synthetic construct
  source 1..75: mol_type = other DNA
agttgggcgggggcggcatatattgtctggctggcgtggaaaatcgctaccagtccaacaaaagaagacggactt

SEQ ID NO: 305992 - DNA, 75 bp, synthetic construct
  source 1..75: mol_type = other DNA
ccgaagacctgcacagaaaagtattatcaattcctatggacccaacaatgtcagatgatgatgttaaatcagtta

SEQ ID NO: 305993 - DNA, 75 bp, synthetic construct
  source 1..75: mol_type = other DNA
ttagtgccagtatttgtagagcctgatgcaaatacctacaatttatctatcgaaggtattaaatcggcaattact

SEQ ID NO: 305994 - DNA, 75 bp, synthetic construct
  source 1..75: mol_type = other DNA
tgcctgtgcatctttatggtcaattgtgtgatatggaaaccataatgaaaatagcacgtaaacataatttgttgg

SEQ ID NO: 305995 - DNA, 75 bp, synthetic construct
  source 1..75: mol_type = other DNA
gcgcaatggtattaggcaccgcagtggctgcaccgttgattgccattgcgggctgggcttacgacagacatgtga

SEQ ID NO: 305996 - DNA, 75 bp, synthetic construct
  source 1..75: mol_type = other DNA
agaatatctcagtacggtcgttgctgccggagtttccggggctgctgcgggttttgctgtgtatagcggagtgat

SEQ ID NO: 305997 - DNA, 75 bp, synthetic construct
  source 1..75: mol_type = other DNA
cctccggcgaaatgatatttctcaaactatccagcaaagttcaccgttatggctaaccaatcagcaaagcggctg

SEQ ID NO: 305998 - DNA, 75 bp, synthetic construct
  source 1..75: mol_type = other DNA
taaccgtctcaaccagcgcgtaaacaaactggaactgaattacgacaaccttatggaagagtttaccgcgattct

SEQ ID NO: 305999 - DNA, 75 bp, synthetic construct
  source 1..75: mol_type = other DNA
taaaacaagcaacactgcaaatggttgcgcccggtatcgcagaagcgttgattgcgacggcaattggtctgttcg

SEQ ID NO: 306000 - DNA, 75 bp, synthetic construct
  source 1..75: mol_type = other DNA
ccgtaaatgagcgacaacgccaccacgaaaatggggtggcgtttgttgctaaagctgttcagcaaactattgatg

SEQ ID NO: 306001 - DNA, 75 bp, synthetic construct
  source 1..75: mol_type = other DNA
ctggtatattgtcagttggccggaaggagacttttgtaccattaccccccgcggcgaattgccgctaatcgggcg

SEQ ID NO: 306002 - DNA, 75 bp, synthetic construct
  source 1..75: mol_type = other DNA
cggacgtggtggtcgttttaccacaaccggtgaggtgaagggccagagtttccagaaaggacgtgcgcaggcacc

SEQ ID NO: 306003 - DNA, 75 bp, synthetic construct
  source 1..75: mol_type = other DNA
tgttcgggggcaaggccggagagtactggagtattcctctgccttacgggtacaacgttttcttcctgctcgggc

SEQ ID NO: 306004 - DNA, 75 bp, synthetic construct
  source 1..75: mol_type = other DNA
aaagcggcattgtcagaaatgccacggaacaggggacgattaatgcggcgcagggtggctattcacgctatcagg

SEQ ID NO: 306005 - DNA, 75 bp, synthetic construct
  source 1..75: mol_type = other DNA
ttaaccgcttcctggcaacggtgaacacgtcgtataacccggaattcctggtcagtaacttcatccgtgacgtgc

SEQ ID NO: 306006 - DNA, 75 bp, synthetic construct
  source 1..75: mol_type = other DNA
tggcgcagcagcgtgaatccatgcagggcatgaatcgcgagcagcttctggagcagtatgctgatgcggatatgg

SEQ ID NO: 306007 - DNA, 75 bp, synthetic construct
  source 1..75: mol_type = other DNA
gtgagggcgagcgttatcgtgatgaccttgccagaatgatgaagtcgttacgttctggtgcaatgactgcaaaca

SEQ ID NO: 306008 - DNA, 75 bp, synthetic construct
  source 1..75: mol_type = other DNA
gtcaattaagatttgttgatgacgtttgtgaaggcgttcttgataaagatcttttaggttataaacaccaacata

SEQ ID NO: 306009 - DNA, 75 bp, synthetic construct
  source 1..75: mol_type = other DNA
cgacagcgatgtgctgtcactgctggatgtggtgcgcaatgtaaaaccagatattctgattggcgtctcaggaca

SEQ ID NO: 306010 - DNA, 75 bp, synthetic construct
  source 1..75: mol_type = other DNA
gcattgccgaaatgatcatcgcccagacccagcgcgaaggattaagcgaggaagcggcgcggcagaaagtcttta

SEQ ID NO: 306011 - DNA, 75 bp, synthetic construct
  source 1..75: mol_type = other DNA
cgccgggctggagaaaaaatacatcgcggcagggatgcagccggaaagagccacagcactggcagccgaagctgt

SEQ ID NO: 306012 - DNA, 75 bp, synthetic construct
  source 1..75: mol_type = other DNA
tttttgtcggtggcagcaagggggcggatgaggtcatcgacactctgcctgatggaaaaaatgcggttactgata

SEQ ID NO: 306013 - DNA, 75 bp, synthetic construct
  source 1..75: mol_type = other DNA
caaattcaggctagagccgctcgcggagacaaacgcatggatatagcaagagactttgacctcagcgagggacga

SEQ ID NO: 306014 - DNA, 75 bp, synthetic construct
  source 1..75: mol_type = other DNA
agagtactggagtattcctctgccttacgggtacaacgttttcttcctgctcgggcatactgctgaaggtgtggc

SEQ ID NO: 306015 - DNA, 75 bp, synthetic construct
  source 1..75: mol_type = other DNA
aaaaaaactgaagagtatggaaatgaccgggttaacgttgtaccggagagaaaaattaagccgcgataaccttct

SEQ ID NO: 306016 - DNA, 75 bp, synthetic construct
  source 1..75: mol_type = other DNA
cgtgctgaaaacccgtgacagtgataacgccaccatccgtgaagcctggcgtaaggttgatgcgtcttatggtaa

SEQ ID NO: 306017 - DNA, 75 bp, synthetic construct
  source 1..75: mol_type = other DNA
gcattaaggacagtgacctgaaggtccgcgtggtgaagtcacagaaagaggctgaagcgctggcgggtgaatcgt

SEQ ID NO: 306018 - DNA, 75 bp, synthetic construct
  source 1..75: mol_type = other DNA
aaggattactggcaggtattcactgatgacaaaccggacaccatgcgggcgattgcagagcgtgttgatccggaa

SEQ ID NO: 306019 - DNA, 75 bp, synthetic construct
  source 1..75: mol_type = other DNA
ggcgtgcatcccgcgcacagtctccttccactcaggcgatacaggatttgagcgaatcgctgatccgcaatcgca

SEQ ID NO: 306020 - DNA, 75 bp, synthetic construct
  source 1..75: mol_type = other DNA
ccgtcacgcgccggaacgtaacgcgcatatcgcgaaaatcaacccgaaaatgccggacggcggttcggggatgac

SEQ ID NO: 306021 - DNA, 75 bp, synthetic construct
  source 1..75: mol_type = other DNA
cagcggggcagacgttcaacgcctgaggcgtacaaggcgtttgcatcctggctgaatgcgttctcaggtggcagc

SEQ ID NO: 306022 - DNA, 75 bp, synthetic construct
  source 1..75: mol_type = other DNA
atacacgaacaagctgtatgacattgcatttgagaccatctacatggtgacgaagaacagagatgcgttactgag

SEQ ID NO: 306023 - DNA, 75 bp, synthetic construct
  source 1..75: mol_type = other DNA
gattcctgttattaccaccgagcttttggcacaactttatggcaccgaaactaataacatcaaagtgaactatac

SEQ ID NO: 306024 - DNA, 75 bp, synthetic construct
  source 1..75: mol_type = other DNA
atggcaactgttacgcacgctgccaccctcgcagatagacaaggcttctgcttatcgggtggtatccggtgtgta

SEQ ID NO: 306025 - DNA, 75 bp, synthetic construct
  source 1..75: mol_type = other DNA
tggtgatccggtggtgtcagcggtacacatgaaggctgtccggtcgcgtctggaaatcaacaaggtggcttctgt

SEQ ID NO: 306026 - DNA, 75 bp, synthetic construct
  source 1..75: mol_type = other DNA
ggtgatggatttgtaaataatcctgtaaaaacgcttgccgggttgtcgtctttcatgacggatgtttacatgccg

SEQ ID NO: 306027 - DNA, 75 bp, synthetic construct
  source 1..75: mol_type = other DNA
cctccccgtccggtgatacagaaagttactcagacgccgaaaacggttcgccttaacagcctggcgctgtttgat

SEQ ID NO: 306028 - DNA, 75 bp, synthetic construct
  source 1..75: mol_type = other DNA
aaaaattacgacagcattaccggaaggtggagaaacaggacattcccgcgaaatgtccccctcttcaccgctcga

SEQ ID NO: 306029 - DNA, 75 bp, synthetic construct
  source 1..75: mol_type = other DNA
tcgcgcggagcagctcaggaaaaatgacaatgccgttatggattcaggggtgctgagagcagtcgttacggggta

SEQ ID NO: 306030 - DNA, 75 bp, synthetic construct
  source 1..75: mol_type = other DNA
agtcacaaataacacggcgctgtataactgggcgggagccgcgctgctgctggccctggcgctgtgctggcttcc

SEQ ID NO: 306031 - DNA, 75 bp, synthetic construct
  source 1..75: mol_type = other DNA
cctatcgttccggttcactaatgcttgatgagcgtaccggactgactcacgactacacccgcaaaagcggtgtgg

SEQ ID NO: 306032 - DNA, 75 bp, synthetic construct
  source 1..75: mol_type = other DNA
tgggacgaatggcggcgcgaggaagatgcacgaacacacgccaccgagaggaggcacgatcgcggttggtcacag

SEQ ID NO: 306033 - DNA, 75 bp, synthetic construct
  source 1..75: mol_type = other DNA
gtatggcgaggcccccatgcctggtaacggggaaatgacctgttaccttctgcttcacaaccggaacggagaata

SEQ ID NO: 306034 - DNA, 75 bp, synthetic construct
  source 1..75: mol_type = other DNA
aactatcaggtgttattgcaggcggtgaatggtcaggcgcgaatttccagccagacggtgaggagtttattggga

SEQ ID NO: 306035 - DNA, 75 bp, synthetic construct
  source 1..75: mol_type = other DNA
gttgatggtttcggtcgctgcactctggttggcaccggttcatcactatgcccttctggctgtgtgcttttttac

SEQ ID NO: 306036 - DNA, 75 bp, synthetic construct
  source 1..75: mol_type = other DNA
gtttatgtgatccggattgcgcttaacgactggggcaatatctggctgacggaaagccacggtgtcaacctgctc

SEQ ID NO: 306037 - DNA, 75 bp, synthetic construct
  source 1..75: mol_type = other DNA
ggccggtggctgtaacccggtgccgattgaaaactggcacaatgatgaaaaagagctggtgatccccggtaaaga

SEQ ID NO: 306038 - DNA, 75 bp, synthetic construct
  source 1..75: mol_type = other DNA
tctgacgggcggcagacccagctttcggcggtgatgctgtctgaggatgacagcgctgggcagtaccagacgcgg

SEQ ID NO: 306039 - DNA, 75 bp, synthetic construct
  source 1..75: mol_type = other DNA
ggcgcagagtacggcgctgatgcagatgctggacaaacgcaccgcgctttccggcggcgcggtggaccgccagtt

SEQ ID NO: 306040 - DNA, 75 bp, synthetic construct
  source 1..75: mol_type = other DNA
aggtaaaacagcaattgttaccggcgggaatagcggtttaggccaggcatttgccatggcgctggccaaggctgg

SEQ ID NO: 306041 - DNA, 75 bp, synthetic construct
  source 1..75: mol_type = other DNA
cacagccacaaagacccggaaacaaacaacgaatcgacccatgagcatgatttcgtcattgacgatgaacatccg

SEQ ID NO: 306042 - DNA, 75 bp, synthetic construct
  source 1..75: mol_type = other DNA
atgctcaacattctttctaatcgtacctatcgccacctgtttatggcacaggttatcgcccttattggcaccggt

SEQ ID NO: 306043 - DNA, 75 bp, synthetic construct
  source 1..75: mol_type = other DNA
tacgattgatttatctatccttccaagaagtgaatcacagcctcaacaataccttgtggctaaatttataaaaaa

SEQ ID NO: 306044 - DNA, 75 bp, synthetic construct
  source 1..75: mol_type = other DNA
tggcgttgtctgtcttcccgtcgtgatatcccggagaaggccggcgatgacggtctgccgcctgagtattttcag

SEQ ID NO: 306045 - DNA, 75 bp, synthetic construct
  source 1..75: mol_type = other DNA
gtggctgccagcgggaaatacacgcaatgtgtgaaaacggctgaagatggcagtcagttacccgttgctattctg

SEQ ID NO: 306046 - DNA, 75 bp, synthetic construct
  source 1..75: mol_type = other DNA
ccgctgacctgaaaaaagcgctccgaccgctggctatcttcctgaaagacagtgaccaggcacctgtaaccacct

SEQ ID NO: 306047 - DNA, 75 bp, synthetic construct
  source 1..75: mol_type = other DNA
caggctgatgataagttcaggtcacagcgtgagcaggagaaaacacaaattgaacgtgaagcacaatcccgtatc

SEQ ID NO: 306048 - DNA, 75 bp, synthetic construct
  source 1..75: mol_type = other DNA
actggaaaccgttgcttatcgtggtgatgcttgctgctttggttgctggatgccgtatcgcctgggtgaatcatg

SEQ ID NO: 306049 - DNA, 75 bp, synthetic construct
  source 1..75: mol_type = other DNA
aaatgattgaaaaacagggtgtcgaagttgattttatgcaggtggatatcaccgcagaaggcgcgccgcagaaga

SEQ ID NO: 306050 - DNA, 75 bp, synthetic construct
  source 1..75: mol_type = other DNA
caatagccccttctcagaaaaatacccaactcctttatccagagaggagctgttagttgctgatactgagctgca

SEQ ID NO: 306051 - DNA, 75 bp, synthetic construct
  source 1..75: mol_type = other DNA
acaacgcaacagcagctgaggctgaaaagtatcgtatcgcaggggaattctgcgagcagcaatacgattcactga

SEQ ID NO: 306052 - DNA, 75 bp, synthetic construct
  source 1..75: mol_type = other DNA
actggaaacagttgcttatagtggcaatgcttgctgcgctggtggtcatcggcatggttgcctggaatattcatg

SEQ ID NO: 306053 - DNA, 75 bp, synthetic construct
  source 1..75: mol_type = other DNA
aaacagtgtggtgtgattaacccacaaaatcccaacacggcttattttggcgatacagatggaagagtaggcgct

SEQ ID NO: 306054 - DNA, 75 bp, synthetic construct
  source 1..75: mol_type = other DNA
taaatcagacataatttataaatcagacataacttataaagttaatgggctttctatcatacctgaaaatttctt

SEQ ID NO: 306055 - DNA, 75 bp, synthetic construct
  source 1..75: mol_type = other DNA
acaatagtgagccatctatagatattcaagaatataatagtttcgccgataatactactaacacgtttatcttta

SEQ ID NO: 306056 - DNA, 75 bp, synthetic construct
  source 1..75: mol_type = other DNA
ctcgatgtttgtaattatgactcagaaaggcaagttttaaccagtcatcacggaataataagagatgaagaaaaa

SEQ ID NO: 306057 - DNA, 75 bp, synthetic construct
  source 1..75: mol_type = other DNA
aacaatttgataatggtgttatggggctaaattccacgaagaaagtacttgataaaaataacaaaataatttatt

SEQ ID NO: 306058 - DNA, 75 bp, synthetic construct
  source 1..75: mol_type = other DNA
atttctttactcttcttagtggtaattttaaagctgactggcgttgggatgtctctaaagagacgtttactaagg

SEQ ID NO: 306059 - DNA, 75 bp, synthetic construct
  source 1..75: mol_type = other DNA
acactactgctttcagaccaaaacctgaagatatcttcaaatgtggacagacgctcaaaaaaactaaacagaaat

SEQ ID NO: 306060 - DNA, 75 bp, synthetic construct
  source 1..75: mol_type = other DNA
tggatgatcgttttatccatctaattagaagcaatgctatagcatccacacctgtatatgacaattattttaata

SEQ ID NO: 306061 - DNA, 75 bp, synthetic construct
  source 1..75: mol_type = other DNA
taactgagtctgttcaaaaaagtattgttgagaaagcaatctgctcggttgtccctagtatcagcaatatatggg

SEQ ID NO: 306062 - DNA, 75 bp, synthetic construct
  source 1..75: mol_type = other DNA
tcagatgaaaaatcctactgatcctgaggaattagccaatatttttaataaaaaacataaagaacacatggatga

SEQ ID NO: 306063 - DNA, 75 bp, synthetic construct
  source 1..75: mol_type = other DNA
gtggagtttattatgtgatttattagaacacgaagacatggcttcattcgcatatgaaaataaaaaattgaaaaa

SEQ ID NO: 306064 - DNA, 75 bp, synthetic construct
  source 1..75: mol_type = other DNA
tggagaaagtatggttttacaatagtgaaccttctatagatattcaagaatataatagattcgccgacaatacta

SEQ ID NO: 306065 - DNA, 75 bp, synthetic construct
  source 1..75: mol_type = other DNA
taattgttgctatagagaatggtaaggttagaggttttgatgagataaaggaaataaatggtgaaagttattttt

SEQ ID NO: 306066 - DNA, 75 bp, synthetic construct
  source 1..75: mol_type = other DNA
gcgatgatggacatgctgctggcgaagaaacgctcggaagaccgccgtaactggttgcaagagaaaggtgatatg

SEQ ID NO: 306067 - DNA, 75 bp, synthetic construct
  source 1..75: mol_type = other DNA
aaagatgcgttcaccctgtggttgaaccagaacgtccaggctgctgaattgctggcggagatggcgatttccagc

SEQ ID NO: 306068 - DNA, 75 bp, synthetic construct
  source 1..75: mol_type = other DNA
ttcctcgcaagtccggcttcaaattatgttaacgggcatttattagtggtcgatggtggttatttagtgcgctaa

SEQ ID NO: 306069 - DNA, 75 bp, synthetic construct
  source 1..75: mol_type = other DNA
cctgatcaagaaaagactgaaggaggagggaacctcattttctgaaatattaagggatatgcgtatggagtcagc

SEQ ID NO: 306070 - DNA, 75 bp, synthetic construct
  source 1..75: mol_type = other DNA
ttctctttttgaagggataagaattgcagacgcttacacgacgtcactaagagaaaaactctgtttgtccctgct

SEQ ID NO: 306071 - DNA, 75 bp, synthetic construct
  source 1..75: mol_type = other DNA
ctccgatggtctgcacattgccacgctgctctgcgctttgtttgtaaaacacttccgcgcgttggtgaaacacgg

SEQ ID NO: 306072 - DNA, 75 bp, synthetic construct
  source 1..75: mol_type = other DNA
tttacgatacaccagcaggcccgtcagtggtgctgtgtgcagcactactgtttattatcagtatgatgaaaaaac

SEQ ID NO: 306073 - DNA, 75 bp, synthetic construct
  source 1..75: mol_type = other DNA
ctggcaatggcgcaatttactgtcgatgacgattagcccggatctggcgtttgttgatggcgtgaaattacagcg

SEQ ID NO: 306074 - DNA, 75 bp, synthetic construct
  source 1..75: mol_type = other DNA
actggtggtttaaccttttccgcgttttacgatacgccagcaggcccgtcagtggtgctgtgtgcggcgctgttg

SEQ ID NO: 306075 - DNA, 75 bp, synthetic construct
  source 1..75: mol_type = other DNA
ttcctcgcaagtccggcatcgaattatgtcaacgggcatttattagtggttgatggcggttatttagtgcgctaa

SEQ ID NO: 306076 - DNA, 75 bp, synthetic construct
  source 1..75: mol_type = other DNA
tggcaccgtcgatattctggtcaataatgccggtatttgtaagctgaataaggtgctggactttggtcgtgccga

SEQ ID NO: 306077 - DNA, 75 bp, synthetic construct
  source 1..75: mol_type = other DNA
tttatgatacgccagcaggtccgtcagtggtgctgtgcgctgcgctgctgtttatcatcagcatgatgaaaaaac

SEQ ID NO: 306078 - DNA, 75 bp, synthetic construct
  source 1..75: mol_type = other DNA
caaagggtggaaatttactgtcagcattcgaactttaccaacgtaatagtgataaagcgcctggtctgggtgaaa

SEQ ID NO: 306079 - DNA, 75 bp, synthetic construct
  source 1..75: mol_type = other DNA
gaattgcaattttactaaggcaacagttaataatgtcatatttaaatgtcgacgtttacacaatgtgatttttct

SEQ ID NO: 306080 - DNA, 75 bp, synthetic construct
  source 1..75: mol_type = other DNA
aaccgatcaggcgtgggatgtgttcgaaagactggaagactgctatttcagacaaaaggatccgtcagcgccagt

SEQ ID NO: 306081 - DNA, 75 bp, synthetic construct
  source 1..75: mol_type = other DNA
gcccgtgacctgttttgcagtgagcgtaatgcgcgggaagatcgcctgtttggcgatgcgtttgtttttatctga

SEQ ID NO: 306082 - DNA, 75 bp, synthetic construct
  source 1..75: mol_type = other DNA
gtggttcgtgacccagccgcgatttaattacagtccggagctgtcggcgagctttcagcgggccgcaattgagca

SEQ ID NO: 306083 - DNA, 75 bp, synthetic construct
  source 1..75: mol_type = other DNA
agagatgtactgctcagggaggcgacacgacttgaccagacaagcgcccttttcgaacgggcaagaccaatgttg

SEQ ID NO: 306084 - DNA, 75 bp, synthetic construct
  source 1..75: mol_type = other DNA
tacagatggagaatgcgcaggacatctgcaaacgtctgtacccgatattgaaggaactgaactcatcatacacga

SEQ ID NO: 306085 - DNA, 75 bp, synthetic construct
  source 1..75: mol_type = other DNA
actgttcccgaaaccggactacgcaaaactggcgaacgaaggtgccgatgctgacactctggcaatgatagcgct

SEQ ID NO: 306086 - DNA, 75 bp, synthetic construct
  source 1..75: mol_type = other DNA
agaccagcggaacgcattgaaaaggtgcgcccggacaaccgttatttcacggatgagaaaagcgccatggggagt

SEQ ID NO: 306087 - DNA, 75 bp, synthetic construct
  source 1..75: mol_type = other DNA
gatggcaaaaacgcggttactgatactgtcggtaaaggtctgaaggcaaccggtaaggctgtcagtgatggtgct

SEQ ID NO: 306088 - DNA, 75 bp, synthetic construct
  source 1..75: mol_type = other DNA
ttctgaaatcaacctttacgcgaaagcagtcatggaccgcatcctcaaagatcatcaaatcgtggtcgatattcc

SEQ ID NO: 306089 - DNA, 75 bp, synthetic construct
  source 1..75: mol_type = other DNA
gatcaggcatgggaagtgttcgaaaaactggaagactgctatttcagccagggaaaaacaacacaaaccgaacag

SEQ ID NO: 306090 - DNA, 75 bp, synthetic construct
  source 1..75: mol_type = other DNA
ctctcatcctctggacagaacgcggagcagcccgtcatgcaaaaatgctcgaaaccgatcaggcgtgggaagtat

SEQ ID NO: 306091 - DNA, 75 bp, synthetic construct
  source 1..75: mol_type = other DNA
agttggcatggaactggatgaccagctatttaacgtgggatggttcgacctggtcagaaagaaaaaataccctga

SEQ ID NO: 306092 - DNA, 75 bp, synthetic construct
  source 1..75: mol_type = other DNA
cgaagtttcactggcctaccgcaaaatagagtgggaacacgtcaagtctggcacctccggtgccgacgactggcg

SEQ ID NO: 306093 - DNA, 75 bp, synthetic construct
  source 1..75: mol_type = other DNA
gaccaggtgattgttccccgtctgatgcagcaactgcaacagggcggcggctgcttacgtttgccgcggggtggt

SEQ ID NO: 306094 - DNA, 75 bp, synthetic construct
  source 1..75: mol_type = other DNA
gggcctgacgaccggatgccgccaggcagccgggagccgaaggtgcgcccggcagacaggacaacactgcagtag

SEQ ID NO: 306095 - DNA, 75 bp, synthetic construct
  source 1..75: mol_type = other DNA
gatggcggtatggtttcggtaaaatcacttctggaacagatgaagttaaagcttagtgaagcttcagaaagaaac

SEQ ID NO: 306096 - DNA, 75 bp, synthetic construct
  source 1..75: mol_type = other DNA
cacgttgatgagtcagggacgtttcgtccagataatgcgttctatcttcgccgcctgacgctaaaggactttcgc

SEQ ID NO: 306097 - DNA, 75 bp, synthetic construct
  source 1..75: mol_type = other DNA
aaagcggttccgctgatgtacaacgcactggcctccggcgaaatgctgccaaccactgaactgaaccgccccggg

SEQ ID NO: 306098 - DNA, 75 bp, synthetic construct
  source 1..75: mol_type = other DNA
ggagagaattttgatatccagtgttctcccagtggttttgaccgggaaggagagttgatgttgtcattgttttac

SEQ ID NO: 306099 - DNA, 75 bp, synthetic construct
  source 1..75: mol_type = other DNA
gaagatgcaggatcagttgtttaatctttctcgctttgatggccggaagaatgaaatcagcagcaacatggatta

SEQ ID NO: 306100 - DNA, 75 bp, synthetic construct
  source 1..75: mol_type = other DNA
tgatggagttaagaaaaagcgccttacggccagcatggttctggttaacggtactggatgcattgcggagaacag

SEQ ID NO: 306101 - DNA, 75 bp, synthetic construct
  source 1..75: mol_type = other DNA
tgaattagagagggaaaatagaaatgtaaataaatttaaaataatttctattttaaaaaagcttaattgtttttt

SEQ ID NO: 306102 - DNA, 75 bp, synthetic construct
  source 1..75: mol_type = other DNA
aagcaatgtctctggaaaatcacctgcaactcaacgacgaaaccgaagagaatcagccagatagcggagaggaag

SEQ ID NO: 306103 - DNA, 75 bp, synthetic construct
  source 1..75: mol_type = other DNA
ctggacagcgccttacgttcaggccgccatattggcctcgacgaactggataatcatgcattcctgatggatttt

SEQ ID NO: 306104 - DNA, 75 bp, synthetic construct
  source 1..75: mol_type = other DNA
cagtctctgcgtttatcgccaacgatgcagaagaacaacgcgaacagtttatgctggtaaattccaccaaaccgt

SEQ ID NO: 306105 - DNA, 75 bp, synthetic construct
  source 1..75: mol_type = other DNA
ttatccgcccattccgtggcagaaaggccagtactaagcataaaccgcgctggtgtctccgtccggtcacagcgg

SEQ ID NO: 306106 - DNA, 75 bp, synthetic construct
  source 1..75: mol_type = other DNA
gaaatgaaccaagcaggaggagtaccaagccaaacacaatccgttttaaacaaactgaaaatcccaatcccctgc

SEQ ID NO: 306107 - DNA, 75 bp, synthetic construct
  source 1..75: mol_type = other DNA
ggagaagcgcctgaatatacagaaggacgcgaaggctattattgggtgaaacagggtaatgctgccaacttactg

SEQ ID NO: 306108 - DNA, 75 bp, synthetic construct
  source 1..75: mol_type = other DNA
gtaccagccttctgggggccgatgataaagcggcgctggcggccataatgaacgcacttcaatttctgatttctc

SEQ ID NO: 306109 - DNA, 75 bp, synthetic construct
  source 1..75: mol_type = other DNA
gttgctacattagttgctaatgtatcgcagaatttttcgtgcggtggtgattatatcgaaacaaccactatgaaa

SEQ ID NO: 306110 - DNA, 75 bp, synthetic construct
  source 1..75: mol_type = other DNA
ttttacaactcggcggcctgacttatccgcaatacctgatgtacgttgggctaccaatgagcgccgtgacgttat

SEQ ID NO: 306111 - DNA, 75 bp, synthetic construct
  source 1..75: mol_type = other DNA
acactgacgtactgcaatgggtgctggaaaacgactacgacccacggcttatcagtgcaatgagcgaagtgcgaa

SEQ ID NO: 306112 - DNA, 75 bp, synthetic construct
  source 1..75: mol_type = other DNA
atcatctggaagaacatcaacagggacggatcgtggtagatggcatcgaacttaatgaagatatccgcaatattg

SEQ ID NO: 306113 - DNA, 75 bp, synthetic construct
  source 1..75: mol_type = other DNA
aaatcccaatcccctgcccggacaacccagaaaaatcccttgccatccagtctgaaattgttcggattctggata

SEQ ID NO: 306114 - DNA, 75 bp, synthetic construct
  source 1..75: mol_type = other DNA
attgcgatgataatgacctccaccggcttaccagaaatgggcaccatgctggcaaaatcgacgggatcgtttatc

SEQ ID NO: 306115 - DNA, 75 bp, synthetic construct
  source 1..75: mol_type = other DNA
agtgataaaagcaggttttagttttgccattatcgtgatgttactggtggctttgatcaccggactggtgggagg

SEQ ID NO: 306116 - DNA, 75 bp, synthetic construct
  source 1..75: mol_type = other DNA
aattatctttaccggccagtctgcacaccctatgtcagcgaaaggcaagcttaagaactctcttttgatggctca

SEQ ID NO: 306117 - DNA, 75 bp, synthetic construct
  source 1..75: mol_type = other DNA
actcaattcaaaccattacaacactaatggctatgggtgttgaacaggatcgttttaaagtaattttcaatcttg

SEQ ID NO: 306118 - DNA, 75 bp, synthetic construct
  source 1..75: mol_type = other DNA
catcattgacgtaggctcatcaaatattgagcaattccttgtacagatgaatgaatatcagggaagtcatgacct

SEQ ID NO: 306119 - DNA, 75 bp, synthetic construct
  source 1..75: mol_type = other DNA
ttccgtgaaatatttgggcgaaaagtatcctgttatttatcgacactggtgaaactggataaatttctgcagaat

SEQ ID NO: 306120 - DNA, 75 bp, synthetic construct
  source 1..75: mol_type = other DNA
aagcaaattcaactttctcttcaaaactggttcttgctgtagcactcacattcccatcacttgcgatgagcgtac

SEQ ID NO: 306121 - DNA, 75 bp, synthetic construct
  source 1..75: mol_type = other DNA
acggtgctacaacgtacccatcttactgttggtgtggggatcgcccagaccaaaacgctggctaagcttgccaat

SEQ ID NO: 306122 - DNA, 75 bp, synthetic construct
  source 1..75: mol_type = other DNA
taagagcagtaaaaatgttgatgaatggattcaacagcgatcttgatgttgcctttaaaaacctcaatctcgtct

SEQ ID NO: 306123 - DNA, 75 bp, synthetic construct
  source 1..75: mol_type = other DNA
ttctccgaagataaggattttgagaagccagggtttattgtggatggtcaacaacgtactgctgctttgcgggat

SEQ ID NO: 306124 - DNA, 75 bp, synthetic construct
  source 1..75: mol_type = other DNA
tgcgaatccgacagggtgaggagaggcaactctatagccttgcgatagaaggtaaacagatcagcaaaattgcag

SEQ ID NO: 306125 - DNA, 75 bp, synthetic construct
  source 1..75: mol_type = other DNA
atgcacttgcttgtccatcctaatattagccgtttgactatgcaaaaatcagtctgggtaatatttagcgtatat

SEQ ID NO: 306126 - DNA, 75 bp, synthetic construct
  source 1..75: mol_type = other DNA
gtcggtcaatgcatggcccagacgtatggctgtggaggtggtgacaggcgttgctgaaaccagagccgaaatgat

SEQ ID NO: 306127 - DNA, 75 bp, synthetic construct
  source 1..75: mol_type = other DNA
ggtggtggttcctcttccgataacgtcgggccaatgaatctgctcaacattcgtaaagtgggctatggcgtgcgt

SEQ ID NO: 306128 - DNA, 75 bp, synthetic construct
  source 1..75: mol_type = other DNA
tgatccgtcaattctgccttgaaaaaccggttaaccgcattctgatcaatacccctgcggcgcttggcggtattg

SEQ ID NO: 306129 - DNA, 75 bp, synthetic construct
  source 1..75: mol_type = other DNA
acctgggcttgaacatcatgagctggcagaaagcatgcgtattaccccggaactggtaacagagctcaacaaagc

SEQ ID NO: 306130 - DNA, 75 bp, synthetic construct
  source 1..75: mol_type = other DNA
gcgttgaggggcttcgggtgaataaaaaccttgaggccgatagcaccggatgtgtcgacgttgaccatttaattg

SEQ ID NO: 306131 - DNA, 75 bp, synthetic construct
  source 1..75: mol_type = other DNA
tctcgacgagctggcgcagtacttcccgcacggactggaatacaaggtggcgtatgaaaccacctcgtttgttaa

SEQ ID NO: 306132 - DNA, 75 bp, synthetic construct
  source 1..75: mol_type = other DNA
ttaaccacccgtttgagacagattttgccggaaaaaggttcttttttcagaaaaacgacgttctgttgacagatg

SEQ ID NO: 306133 - DNA, 75 bp, synthetic construct
  source 1..75: mol_type = other DNA
acatttatcgtactgatactgtctgctgtttttgccatcattttcacactgatgagtcgtgaacgctcactggag

SEQ ID NO: 306134 - DNA, 75 bp, synthetic construct
  source 1..75: mol_type = other DNA
aaattgaaagattaccctctgaagagattgaacgattatatcccgtcctgcgatacagggtctttatcagcattt

SEQ ID NO: 306135 - DNA, 75 bp, synthetic construct
  source 1..75: mol_type = other DNA
tagttgctaagttagctgtttttattctctcagctgaaaataaaagctcggagataaaaatgatttcaaaggggt

SEQ ID NO: 306136 - DNA, 75 bp, synthetic construct
  source 1..75: mol_type = other DNA
gttatggtttcactgaccgaagcccttgcggataatttcccgacgatacgtactcaggtcggggaggcctttttt

SEQ ID NO: 306137 - DNA, 75 bp, synthetic construct
  source 1..75: mol_type = other DNA
gttagcgagatatcaataataccagctacgcatactgcagataaatatgtcactgtaagagatgcgattgagcat

SEQ ID NO: 306138 - DNA, 75 bp, synthetic construct
  source 1..75: mol_type = other DNA
aaaatgatcggaaatgcagttccggtcaagttaggagagattattggccaaagtataattacgtccttggccaaa

SEQ ID NO: 306139 - DNA, 75 bp, synthetic construct
  source 1..75: mol_type = other DNA
atgatcgtgcaaaaagagctggttgctatttacgattatgaggttcctgctcctgaagatccgttttccttcaga

SEQ ID NO: 306140 - DNA, 75 bp, synthetic construct
  source 1..75: mol_type = other DNA
cctgggtataaaggaaaaggcgttgccagtagtcaatgtgatacagcataacctgagcagttatgagcaactact

SEQ ID NO: 306141 - DNA, 75 bp, synthetic construct
  source 1..75: mol_type = other DNA
cttcggaaattgatgcaaaagatcgtggcattctcgaatcacaactggatgagttgcaaatctgggatgcgctga

SEQ ID NO: 306142 - DNA, 75 bp, synthetic construct
  source 1..75: mol_type = other DNA
taaataactttttttgcttcccttatcttaataaaattgacgttctaaataccccctcctgggtaaaaaatacgg

SEQ ID NO: 306143 - DNA, 75 bp, synthetic construct
  source 1..75: mol_type = other DNA
acagcgcgatgactggctgaagaaagagatactgcgcttatacgatgagaatcatcaggtatacggtggcgtaaa

SEQ ID NO: 306144 - DNA, 75 bp, synthetic construct
  source 1..75: mol_type = other DNA
ggaaaacagcccggagcctgtacgcaaccgggtaatgattttagatctcagcgatgagaaaacgccgtttgaact

SEQ ID NO: 306145 - DNA, 75 bp, synthetic construct
  source 1..75: mol_type = other DNA
ataagtaatgggaatctcacgccagaggcacggcgtagtatcaaagttgctgattttgattttctggatgttctt

SEQ ID NO: 306146 - DNA, 75 bp, synthetic construct
  source 1..75: mol_type = other DNA
ggatgctgaggtgaggaaggcccttcttcgggatttcaatactccaccctttaagaaagagcctgatgactggat

SEQ ID NO: 306147 - DNA, 75 bp, synthetic construct
  source 1..75: mol_type = other DNA
taaaaaatatgaactggttgtaaaagggataaatcattacccggataagataactgttactgtggcactggtaat

SEQ ID NO: 306148 - DNA, 75 bp, synthetic construct
  source 1..75: mol_type = other DNA
tttctctggtagccaaatgtctgggcataacaatattttagcagttcagggaggggctggtacagcaacgaatgt

SEQ ID NO: 306149 - DNA, 75 bp, synthetic construct
  source 1..75: mol_type = other DNA
cggtctgccgtccggagtcgtccctgccgttcgccagccgctggcggaggataaatcattactgccatttttcag

SEQ ID NO: 306150 - DNA, 75 bp, synthetic construct
  source 1..75: mol_type = other DNA
cagatctttacgattctggcgctgacacaaagtgcaggcattacttttttacagggcgtagagagcgtcagagaa

SEQ ID NO: 306151 - DNA, 75 bp, synthetic construct
  source 1..75: mol_type = other DNA
gtgcgggtattacttcgacctgttctggtaccggaacttgggctggtggtggttaagccgggccgtgaatccatg

SEQ ID NO: 306152 - DNA, 75 bp, synthetic construct
  source 1..75: mol_type = other DNA
agaaatgttaaatcataaagaatccgttaaacgaatgggtgaaatgattaaacaacaggttctcaaagataagga

SEQ ID NO: 306153 - DNA, 75 bp, synthetic construct
  source 1..75: mol_type = other DNA
ttgacatctcagagtctatctaaggaaggtcgcaataaagcaaaacttagtgattgggattttcttgatattatc

SEQ ID NO: 306154 - DNA, 75 bp, synthetic construct
  source 1..75: mol_type = other DNA
atgccggcagcggtgtggttctcatactctcccgaccgcaaaggcatccacccacagcaacatctggcggactac

SEQ ID NO: 306155 - DNA, 75 bp, synthetic construct
  source 1..75: mol_type = other DNA
cttaggttatcttactccttatcaggaaaatatggtatctctaaatcctgcaaccttccctgataatgcagaagt

SEQ ID NO: 306156 - DNA, 75 bp, synthetic construct
  source 1..75: mol_type = other DNA
attatgaattatcaggctaatgcccaaaggaacgaattccgccatcaacagagtcatgatgttaattcctattgg

SEQ ID NO: 306157 - DNA, 75 bp, synthetic construct
  source 1..75: mol_type = other DNA
gagtggtctttctgagcgcggtaagctgaaggtggtatggggtgagaacagccagtgccatgcggattaccggct

SEQ ID NO: 306158 - DNA, 75 bp, synthetic construct
  source 1..75: mol_type = other DNA
agtgttcctctggagcgatggctgggtaatgcggcgaatgatatcagagcaacaactcaaattctgaagtcttca

SEQ ID NO: 306159 - DNA, 75 bp, synthetic construct
  source 1..75: mol_type = other DNA
tcacagcgaaaacaagctgcgtcgaactacactgaaccttactcagcctctcggagttcttggctctgtaagtct

SEQ ID NO: 306160 - DNA, 75 bp, synthetic construct
  source 1..75: mol_type = other DNA
tttccctttcattaaattggtcacggaatcttaatcttgggaactgcaacggtagacgtttctgtacagaggata

SEQ ID NO: 306161 - DNA, 75 bp, synthetic construct
  source 1..75: mol_type = other DNA
ctccagcgcgatgcccgtgcccttaaacggggattatgggcagatgaaaatccggtaccaccatggacctggaga

SEQ ID NO: 306162 - DNA, 75 bp, synthetic construct
  source 1..75: mol_type = other DNA
aacggggattatgggcagatgaaaatccggtgccaccatgggcctggaggaaacagaataaaaaaataatcactt

SEQ ID NO: 306163 - DNA, 75 bp, synthetic construct
  source 1..75: mol_type = other DNA
ggtgaaagatgggactcctggggtcattgccggtgtgattacaaatctgctgactcacggcgttaatctggttgc

SEQ ID NO: 306164 - DNA, 75 bp, synthetic construct
  source 1..75: mol_type = other DNA
ctggggtcagatgagagcatggtgccttataaccagcgtgaatttgcgccggtggtcagaggtattgcccggacc

SEQ ID NO: 306165 - DNA, 75 bp, synthetic construct
  source 1..75: mol_type = other DNA
agccgtgatgaataccgtgatggccggccagacagggattatatcggtgcttcatatggtagcacatggaaggat

SEQ ID NO: 306166 - DNA, 75 bp, synthetic construct
  source 1..75: mol_type = other DNA
ctatgggacgacggtataccagcatttctgctgaattggcaagcgaacgcgggccgttcggaataccggggatac

SEQ ID NO: 306167 - DNA, 75 bp, synthetic construct
  source 1..75: mol_type = other DNA
gttcagttgtaactcttgaagaggagaaagaatcacatccttctgtcggggtgatgggaaacaatggggaagtat

SEQ ID NO: 306168 - DNA, 75 bp, synthetic construct
  source 1..75: mol_type = other DNA
agcagtggggggaatccggccttgcagctctcagagcccagttgcttaaacgtgaagaggaattgcgccggaagg

SEQ ID NO: 306169 - DNA, 75 bp, synthetic construct
  source 1..75: mol_type = other DNA
gctgacagagcctgcccgccgtgtggctgaccttctgaatatcgggcttcctgacaacgcaacttcgtacacact

SEQ ID NO: 306170 - DNA, 75 bp, synthetic construct
  source 1..75: mol_type = other DNA
tttgcctttggcgaatcacttacgcttctgcttgtggtctggacactgaacggtttttttcagggctggggatgg

SEQ ID NO: 306171 - DNA, 75 bp, synthetic construct
  source 1..75: mol_type = other DNA
gccaccgacgctgatgccggtaatgagttctgtcgaccgggaaacccgccagcttcagcttttgctggtcatggg

SEQ ID NO: 306172 - DNA, 75 bp, synthetic construct
  source 1..75: mol_type = other DNA
cggcagcatcactggaaggttgagaaacaggacattcccgcgagtcaaaaagcatttgaaacacagtggcagcag

SEQ ID NO: 306173 - DNA, 75 bp, synthetic construct
  source 1..75: mol_type = other DNA
aaggtcagggactggaacgaccggacacatgccgagacgtggcgtgcatcatgggctgaccatgcaaacagagca

SEQ ID NO: 306174 - DNA, 75 bp, synthetic construct
  source 1..75: mol_type = other DNA
ttcggggcggtttcggttgacgttattcattcccgagggcaactaaaggagcgtgaaaatgaaaacgcaaatgcc

SEQ ID NO: 306175 - DNA, 75 bp, synthetic construct
  source 1..75: mol_type = other DNA
gcaaggattgaggttcgccaaaacggttacctcatacacagtctgacggtagctccgggcgctttttctctgacc

SEQ ID NO: 306176 - DNA, 75 bp, synthetic construct
  source 1..75: mol_type = other DNA
agtatacctttgggacagtggatgggaagtgcgacgaataatatcagagcgacgacccaaattcttcaatctaaa

SEQ ID NO: 306177 - DNA, 75 bp, synthetic construct
  source 1..75: mol_type = other DNA
gtctgcggctctggggcttggctggtcactggggcgtctgggggcggtgtcgctggacacgacgcactcccgggg

SEQ ID NO: 306178 - DNA, 75 bp, synthetic construct
  source 1..75: mol_type = other DNA
tcattgtcgaagcctgctattacacagtcagatttagaacagcttgaggccacttcattagagtccataactaag

SEQ ID NO: 306179 - DNA, 75 bp, synthetic construct
  source 1..75: mol_type = other DNA
agctgcgagttacctatatccttctgatggctactacacactatctgatgtcctagattcataccggcatcatgg

SEQ ID NO: 306180 - DNA, 75 bp, synthetic construct
  source 1..75: mol_type = other DNA
caacaggcactcgaccaggcattagctggttttgacactgttgtactgctggcagcagaacaccgtgatgatgtt

SEQ ID NO: 306181 - DNA, 75 bp, synthetic construct
  source 1..75: mol_type = other DNA
gatcagcgatctggcggatctgttcgcagtgtcgcggccaacagtttatagaacgctttcacgaggacaaaaatg

SEQ ID NO: 306182 - DNA, 75 bp, synthetic construct
  source 1..75: mol_type = other DNA
cgggtctggcagactatcagttcggttgttacagacgccttcagtcctgaaggctttttatttgtggtaaatagg

SEQ ID NO: 306183 - DNA, 75 bp, synthetic construct
  source 1..75: mol_type = other DNA
cacaagcaaacctcaggcccactgctttgcgcaaaagcagaatgagcctatcagagacaggcttaatgatccatg

SEQ ID NO: 306184 - DNA, 75 bp, synthetic construct
  source 1..75: mol_type = other DNA
agcacgccgtacctgagctacatcaacgactacggcggacgtccggttctgcagttcagctgcagcggagagcgt

SEQ ID NO: 306185 - DNA, 75 bp, synthetic construct
  source 1..75: mol_type = other DNA
cacattaataatttacgcaattgtcttcttcatagtaaatttcctaaatgtgcaaaaattaagtcatgatatctt

SEQ ID NO: 306186 - DNA, 75 bp, synthetic construct
  source 1..75: mol_type = other DNA
actggcgctgggtactaccctctatgatcccggggaccctatgtggaagatgttttttaacgttctggcaacctt

SEQ ID NO: 306187 - DNA, 75 bp, synthetic construct
  source 1..75: mol_type = other DNA
atctcaatctcaggttgctaaagtccttggactgagtgtaagaacggtttcaaggcattggtgtaaaaccgaata

SEQ ID NO: 306188 - DNA, 75 bp, synthetic construct
  source 1..75: mol_type = other DNA
atctcaatctcaggtagctaaagtccttggactgagtgtaagaacggtttcaaggcattggtgtaaagagactta

SEQ ID NO: 306189 - DNA, 75 bp, synthetic construct
  source 1..75: mol_type = other DNA
caaaccagaaaaggttctgtgacgatttttgacgtaaatggtaaagttacccatactggcgttttaaataattgc

SEQ ID NO: 306190 - DNA, 75 bp, synthetic construct
  source 1..75: mol_type = other DNA
gttcttccatatggggatgggattccgtcgccgtgttcgcatgttctctgttgatccagcaacacatctggcgcg

SEQ ID NO: 306191 - DNA, 75 bp, synthetic construct
  source 1..75: mol_type = other DNA
gttgctacctccttaattcaaggagtggtatagtattagccactttagttataactaatttaattttatttgtta

SEQ ID NO: 306192 - DNA, 75 bp, synthetic construct
  source 1..75: mol_type = other DNA
accccaggagatcgatctcaccgttacgttacctatcagcgagttttacacggctgactgccagaaaaatacgct

SEQ ID NO: 306193 - DNA, 75 bp, synthetic construct
  source 1..75: mol_type = other DNA
atgccacttctcaatgatctgctcgatttcagtgaccatccgcttatgtcacagccctctgcacaactgtttgca

SEQ ID NO: 306194 - DNA, 75 bp, synthetic construct
  source 1..75: mol_type = other DNA
cgtttttaggcgtctttatctgctactgcctgatggacccgctcgccaacgccatggaacaacaggcgcgggcag

SEQ ID NO: 306195 - DNA, 75 bp, synthetic construct
  source 1..75: mol_type = other DNA
tcatcatcaccatgcagtcgattgatggatctatcgccctgattggcctgaaagtggcggcggctctggtgggga

SEQ ID NO: 306196 - DNA, 75 bp, synthetic construct
  source 1..75: mol_type = other DNA
aacgaaagtgcattcttcaggttttgtggcaccgtatacgctgtcgcaaggtctggatcgaactctgcagtatga

SEQ ID NO: 306197 - DNA, 75 bp, synthetic construct
  source 1..75: mol_type = other DNA
tactccggaaacacttttcggctccaaatctcaggataaacatgcgcttttccccatttttactgcgagttggcg

SEQ ID NO: 306198 - DNA, 75 bp, synthetic construct
  source 1..75: mol_type = other DNA
gcggtctgcggatgttggatcagcatattgagcagccggaagagagcaccattttccagaaatacccgctggtgt

SEQ ID NO: 306199 - DNA, 75 bp, synthetic construct
  source 1..75: mol_type = other DNA
ctggacaccgcggaagagtccctgttaacgccgtcgcgctcgctgcaacgtaccgccgaagcgatgccgggattt

SEQ ID NO: 306200 - DNA, 75 bp, synthetic construct
  source 1..75: mol_type = other DNA
atgccgtgaccgcgccttaccggcggagcgaaaccgtgctggctcactccatgctcgccaccatcccggataact

SEQ ID NO: 306201 - DNA, 75 bp, synthetic construct
  source 1..75: mol_type = other DNA
cttctgcaggttattcctgagaacattgaaaactattatcttattctctgggtcccgaatgatgctgttccttat

SEQ ID NO: 306202 - DNA, 75 bp, synthetic construct
  source 1..75: mol_type = other DNA
cgctacaaagcaaaagaggtagcggaactttaccattcacgatgggaaatcgaagtcgggttcagaaacctgaaa

SEQ ID NO: 306203 - DNA, 75 bp, synthetic construct
  source 1..75: mol_type = other DNA
atttcccgtctggaagaaagtaaaaaaataacgctggataccctggaaaaacaacgcctgcaatacacagatgcg

SEQ ID NO: 306204 - DNA, 75 bp, synthetic construct
  source 1..75: mol_type = other DNA
agcagagccacttttatccagaaatcacacagattggcgatgttcgcgatcaacaggcactcgaccaggcattag

SEQ ID NO: 306205 - DNA, 75 bp, synthetic construct
  source 1..75: mol_type = other DNA
tgatgggccagttatggtggtaagtggatttgcccctatatttccagacacctgttatcacttaacccattactg

SEQ ID NO: 306206 - DNA, 75 bp, synthetic construct
  source 1..75: mol_type = other DNA
ttcataccattgatgccacccagccgctggaggccgtgatggatgcaatccgcactaccgtgaccaactgggtga

SEQ ID NO: 306207 - DNA, 75 bp, synthetic construct
  source 1..75: mol_type = other DNA
acatatgctggcaacactgcgtgatgctgttctcggggattttcgccccgacttaacgctctatctcgatgttac

SEQ ID NO: 306208 - DNA, 75 bp, synthetic construct
  source 1..75: mol_type = other DNA
acgcttgagcaactgggtatccgcgacatggttttcactcgggaacctggcggtacgcaacttgccgaaaagtta

SEQ ID NO: 306209 - DNA, 75 bp, synthetic construct
  source 1..75: mol_type = other DNA
aacggtgttgaatctggattctgacgaagagcagacttatcgcatcgttggcgatgacgaagctgactttaaaca

SEQ ID NO: 306210 - DNA, 75 bp, synthetic construct
  source 1..75: mol_type = other DNA
atgcaagctattccgatgaccttacgcggcgctgaaaaattacgcgaagagctggattttctgaaatctgtgcgc

SEQ ID NO: 306211 - DNA, 75 bp, synthetic construct
  source 1..75: mol_type = other DNA
gccgcgcgcgttcaactggtagaaacggtcatcaaaccagcgctggctaacggcacctgggtgattggcgatcgc

SEQ ID NO: 306212 - DNA, 75 bp, synthetic construct
  source 1..75: mol_type = other DNA
tattgagatacaaaaaacatactctttaatttacacattcactaaatcattcaaagggaatttgattgatttagt

SEQ ID NO: 306213 - DNA, 75 bp, synthetic construct
  source 1..75: mol_type = other DNA
gctcattgaagcccttcaacaacgatctactcataaatgttcaaaaattccgttcgttgatatcctcaaaagttc

SEQ ID NO: 306214 - DNA, 75 bp, synthetic construct
  source 1..75: mol_type = other DNA
gtgcctgcccgatgggccttgcgcacacttttatggcggctcaggcgctggaagaggccgcagtggaagctggct

SEQ ID NO: 306215 - DNA, 75 bp, synthetic construct
  source 1..75: mol_type = other DNA
ttagcacattatttattagtacgttgctggccagtgcccctgtattcgccgatatcataatttccggcacacgta

SEQ ID NO: 306216 - DNA, 75 bp, synthetic construct
  source 1..75: mol_type = other DNA
ttggttataccctgatatatacatatatatatttatgcttttggttcttaataatacatcatttattatttctga

SEQ ID NO: 306217 - DNA, 75 bp, synthetic construct
  source 1..75: mol_type = other DNA
cgcaaccgtggttggtgtgttgttcctgatgattctgtttttatcaccgttatcgtttctgatccccggttatgc

SEQ ID NO: 306218 - DNA, 75 bp, synthetic construct
  source 1..75: mol_type = other DNA
gatgtcaccaaaatgccaaacaatggccgcgttatttttggtgctaccgtaacggtgttgaatctggattctgat

SEQ ID NO: 306219 - DNA, 75 bp, synthetic construct
  source 1..75: mol_type = other DNA
cggaatatcacctcgcgcgttctgcgttacctgattgttgaccggacagcggcaccggccgcgatttctgcggag

SEQ ID NO: 306220 - DNA, 75 bp, synthetic construct
  source 1..75: mol_type = other DNA
atgattgatgcaaaagtgcttgaaggggttaaaaactggctgcgtatttatggccgcctgacctgcggtgtactg

SEQ ID NO: 306221 - DNA, 75 bp, synthetic construct
  source 1..75: mol_type = other DNA
caccggcggaacagcggtacgtctgacttcgcagggcgaagcctatattggcgatcatttcattgtagctaacgc

SEQ ID NO: 306222 - DNA, 75 bp, synthetic construct
  source 1..75: mol_type = other DNA
tctatttaatcatctcttatgtcctgatcagtctgttccgcaaagcggaaaaacgctggttgcagcatgtgaaac

SEQ ID NO: 306223 - DNA, 75 bp, synthetic construct
  source 1..75: mol_type = other DNA
ctcagaggataaacttatcgtatttcatttgatgggtagtcatggtcctacctactatctccgttatcctgagtc

SEQ ID NO: 306224 - DNA, 75 bp, synthetic construct
  source 1..75: mol_type = other DNA
ccagtctttctgatatctgcattaaattttgtttttacaccgttctcattcaggtatatatttaaaccttttttt

SEQ ID NO: 306225 - DNA, 75 bp, synthetic construct
  source 1..75: mol_type = other DNA
ggcaataacccattacttgttcagagttggctggatactggtgatgacaatgctgagcctggcagtattaccgtc

SEQ ID NO: 306226 - DNA, 75 bp, synthetic construct
  source 1..75: mol_type = other DNA
tgcaattggcatttcgcacacgtataaaactgttctatcgcccggaagcattgaaggggaatccctcagaagcac

SEQ ID NO: 306227 - DNA, 75 bp, synthetic construct
  source 1..75: mol_type = other DNA
gaagaacagacttatcgcatcgttggcgatgacgaagctgactttaaacaaaacctgatttctgtaaactcgcct

SEQ ID NO: 306228 - DNA, 75 bp, synthetic construct
  source 1..75: mol_type = other DNA
agccttttctgcacaatcattggctgaatcattaacggtggaacaacgccttgagttattagaaaaggcgttaag

SEQ ID NO: 306229 - DNA, 75 bp, synthetic construct
  source 1..75: mol_type = other DNA
tgggataaagcgaccttaatggtgagtggtcgttatgtcacggcaaacgaaagcgcatcggaaaaagataatcag

SEQ ID NO: 306230 - DNA, 75 bp, synthetic construct
  source 1..75: mol_type = other DNA
caaagatgcgaatagtaataaatttaatgagtctggttataaaaccacgctcttcctggatttgcccctatattt

SEQ ID NO: 306231 - DNA, 75 bp, synthetic construct
  source 1..75: mol_type = other DNA
atgagtaagaaactgattgctttatgtgcctgcccgatgggtctggctcacacctttatggctgcccaggcgctg

SEQ ID NO: 306232 - DNA, 75 bp, synthetic construct
  source 1..75: mol_type = other DNA
gattcccgcgtatccggcagatcccgaaaggctatttacttgctggcagcgtattgttcgtgagttatgaaatct

SEQ ID NO: 306233 - DNA, 75 bp, synthetic construct
  source 1..75: mol_type = other DNA
gcgaaggcgctaaatgcgtttaatgacgcgtttgatattgaccatatgcaacagggcgaccccgcacgcgtaatt

SEQ ID NO: 306234 - DNA, 75 bp, synthetic construct
  source 1..75: mol_type = other DNA
caactgtggtgccaaagtttagataaaacatggcaacggaggcgttatgagctggcggccctttttgtatctgat

SEQ ID NO: 306235 - DNA, 75 bp, synthetic construct
  source 1..75: mol_type = other DNA
atcctttgtttttattatttagatatgagttttataacattaaaaacaagagcggcgcatccatttttttaatta

SEQ ID NO: 306236 - DNA, 75 bp, synthetic construct
  source 1..75: mol_type = other DNA
catcatgttaccatctgttcagtgaacatcaacaactttcaaatgaaacaacaatgacgaactccgcctccagaa

SEQ ID NO: 306237 - DNA, 75 bp, synthetic construct
  source 1..75: mol_type = other DNA
cttaggagagcgagacgtaagaatgttcgaaaatattagtcctgatgatacagataagataacaggaaggaaatt

SEQ ID NO: 306238 - DNA, 75 bp, synthetic construct
  source 1..75: mol_type = other DNA
ttgcgtcaatgtcacaagttgaatttgtaaaaaataactttttaatcaattcagcaataaaaaaaatgtatttta

SEQ ID NO: 306239 - DNA, 75 bp, synthetic construct
  source 1..75: mol_type = other DNA
cttccttaggtcatatctcaaagtttgacggcaataactctttgataaaacatgatgtggtgcaaggaaataata

SEQ ID NO: 306240 - DNA, 75 bp, synthetic construct
  source 1..75: mol_type = other DNA
gtggtgacggatggcgaacgtatcctgggtcttggtgaccagggcatcggcgggatgggtattccaatcggtaaa

SEQ ID NO: 306241 - DNA, 75 bp, synthetic construct
  source 1..75: mol_type = other DNA
aggttgttatcggcgcgaatacccgtatttgccacggtgccgttattcagggtccggtagtgattggcgcaaact

SEQ ID NO: 306242 - DNA, 75 bp, synthetic construct
  source 1..75: mol_type = other DNA
gctttttacgatgcaggaacacgatcagcgagaatgccgaataacacaactactatagacaaaaccgatgacctt

SEQ ID NO: 306243 - DNA, 75 bp, synthetic construct
  source 1..75: mol_type = other DNA
ccacccaggcttactcggcggtataccaggcaagacgcattcgcctcgcccgtaaatatctgaacggtaaaaagg

SEQ ID NO: 306244 - DNA, 75 bp, synthetic construct
  source 1..75: mol_type = other DNA
ctcttttttaccgagttatctggggtacttttttgttgccctgagtataaataactggggggcgttgttctttgt

SEQ ID NO: 306245 - DNA, 75 bp, synthetic construct
  source 1..75: mol_type = other DNA
taccgcaatatgtggctgatgggcatggcggcgcttgccatggtgattgtctttacctttttgctgttccaaaaa

SEQ ID NO: 306246 - DNA, 75 bp, synthetic construct
  source 1..75: mol_type = other DNA
caatctgaacggacagggcagcgaaagtgacctcgcggcagagctggcagacgtggaaatcatgacagagcaact

SEQ ID NO: 306247 - DNA, 75 bp, synthetic construct
  source 1..75: mol_type = other DNA
tgtcacaggaactgaaaaactatctgaagcttaatgttaaagagaaaaatattcagattgcagaccaggtgatta

SEQ ID NO: 306248 - DNA, 75 bp, synthetic construct
  source 1..75: mol_type = other DNA
ttagtctccaggattcccggggcggttcagtcggtgtcgattaaagccgcatcgttgctgggcgatcatagcgag

SEQ ID NO: 306249 - DNA, 75 bp, synthetic construct
  source 1..75: mol_type = other DNA
aatcctttccatcatcggcctgctggcactgactgccctgcttgttaccaactctaacccgcaatcggtcgctat

SEQ ID NO: 306250 - DNA, 75 bp, synthetic construct
  source 1..75: mol_type = other DNA
tattgccgataaattttcacaccgcaaaatgattacttccgcgatgatcattaccggattactgggcctgataat

SEQ ID NO: 306251 - DNA, 75 bp, synthetic construct
  source 1..75: mol_type = other DNA
atgccgttggcgcgccgattaacgccggtgattttgccgagcaaattaaccatatccgtaattcgtcaccgcgtc

SEQ ID NO: 306252 - DNA, 75 bp, synthetic construct
  source 1..75: mol_type = other DNA
gccggaaagaacggtcatgcctatcgcagtattggtaaggtgctgatcgatcgtggcgaagtgaaaaaagaagat

SEQ ID NO: 306253 - DNA, 75 bp, synthetic construct
  source 1..75: mol_type = other DNA
aaagtaccttcttatgggcacggttgtggcaatgcttgccgcctgctcttccaaaccaaccgatcgcggacagca

SEQ ID NO: 306254 - DNA, 75 bp, synthetic construct
  source 1..75: mol_type = other DNA
tatttgccacggtgccgttattcagggtccggtagtgattggcacaaactgcctgataggtaattatgcgtttat

SEQ ID NO: 306255 - DNA, 75 bp, synthetic construct
  source 1..75: mol_type = other DNA
tggcattcagttttatactcttggttgatgtcatatttagtatattcactattgctttttatatttcaaagaaaa

SEQ ID NO: 306256 - DNA, 75 bp, synthetic construct
  source 1..75: mol_type = other DNA
tgatacccgcaatatgcgtcagttcggcattgatgcctggcagatggaaggtgccgacaactatggtaacgtgca

SEQ ID NO: 306257 - DNA, 75 bp, synthetic construct
  source 1..75: mol_type = other DNA
gcccccgtgatgttgtcaggtgcatacctgcaacgtgcgggggttttctctctccagcaaccaatgccaccaggg

SEQ ID NO: 306258 - DNA, 75 bp, synthetic construct
  source 1..75: mol_type = other DNA
gtgttgtaatgacaacgtttcgcggctattcttgagttgttcaggttcaagaatggcccccgtgatgttgtcagg

SEQ ID NO: 306259 - DNA, 75 bp, synthetic construct
  source 1..75: mol_type = other DNA
tttatcgcgacgggtatcaatcgccatgcgtgcaaccgctggcacgtttcatgaaggagttcgtggaggttaaca

SEQ ID NO: 306260 - DNA, 75 bp, synthetic construct
  source 1..75: mol_type = other DNA
ggcgaagaaagggatttttatcagcgctgatgcgcaggataaggcgcagggtcaggttctggatatgactgatgc

SEQ ID NO: 306261 - DNA, 75 bp, synthetic construct
  source 1..75: mol_type = other DNA
gccggtacagggaatgccggtacagactgccctgcgcaccctgcacggcgtcattaccggctttaaacatctctc

SEQ ID NO: 306262 - DNA, 75 bp, synthetic construct
  source 1..75: mol_type = other DNA
atgacaacgtttcgcggctattcttgagtggtctaggttcaagattagcccccgtgatgttgtcaggtgcatacc

SEQ ID NO: 306263 - DNA, 75 bp, synthetic construct
  source 1..75: mol_type = other DNA
tctgatgtccaaagcggctaccgcgagtggcatggagttgctggatatcagcgatgaaattgaccagatcatgca

SEQ ID NO: 306264 - DNA, 75 bp, synthetic construct
  source 1..75: mol_type = other DNA
agcatccaattgttctcgttgtcattgctggcatagttgtgggcggtattgctggcgtcatagaagcactcagga

SEQ ID NO: 306265 - DNA, 75 bp, synthetic construct
  source 1..75: mol_type = other DNA
atgatgcattcgccaactgtctattctcatggcgaagatgtttatagttatgaaagtggcgctcatagtgatttt

SEQ ID NO: 306266 - DNA, 75 bp, synthetic construct
  source 1..75: mol_type = other DNA
tgtcggcaatggccgtatccttgaaaatggcgaagtgaagccgctggatgtgaaagttggcgacatcgttatttt

SEQ ID NO: 306267 - DNA, 75 bp, synthetic construct
  source 1..75: mol_type = other DNA
ctaatcgtctcgatttgccgctattgccggtgatattcccgacgcagcttatattgcgcatagaatgcccggacg

SEQ ID NO: 306268 - DNA, 75 bp, synthetic construct
  source 1..75: mol_type = other DNA
tttacgacgaactggagcgtctcgttagtctggcgaaggaagaaatcagccagcttctgcctttagaagagcagc

SEQ ID NO: 306269 - DNA, 75 bp, synthetic construct
  source 1..75: mol_type = other DNA
cgcttcgccatccttctgggctgtttgatggtgaaacggaagccgtatgggggctgaacacggcatacagcgtgg

SEQ ID NO: 306270 - DNA, 75 bp, synthetic construct
  source 1..75: mol_type = other DNA
taccctactcagaacgctacggctaccgcccggcgcttatcccccgccccgtaatggccggaacgctcccggcgc

SEQ ID NO: 306271 - DNA, 75 bp, synthetic construct
  source 1..75: mol_type = other DNA
tcccgtactcagagcgctacggctaccgcccggcgcttatcccccgcccggtaatggccggcacactcccggcgc

SEQ ID NO: 306272 - DNA, 75 bp, synthetic construct
  source 1..75: mol_type = other DNA
ggcgacgacgcgccagcagtgttccgcaagggcgtactgattaccggcgtgacggccagcgcggcgcgtgaccgc

SEQ ID NO: 306273 - DNA, 75 bp, synthetic construct
  source 1..75: mol_type = other DNA
attaccggcgtgacggccagcgcggcgcgtgaccgcagctatgaactgacgtttaccgccatcccgtactcagaa

SEQ ID NO: 306274 - DNA, 75 bp, synthetic construct
  source 1..75: mol_type = other DNA
atcgcattacgaccgcagagggcgatacctttgaaggcattaccgatcaggaaggtaaaactgcaactgtttata

SEQ ID NO: 306275 - DNA, 75 bp, synthetic construct
  source 1..75: mol_type = other DNA
tccggcaggtattgggatcagtagtcctgaagcattgcggttgtcatctggaaacgccagtgtggggattgttgc

SEQ ID NO: 306276 - DNA, 75 bp, synthetic construct
  source 1..75: mol_type = other DNA
gtcatggccggaacgctcccggcgcgggtcaccagcacggtgaagaacgatatctatgcccatatcgacaaggac

SEQ ID NO: 306277 - DNA, 75 bp, synthetic construct
  source 1..75: mol_type = other DNA
gggatattatgggcgtaagccgaaggcgaagctgacaccggagttgatggcgtttccagtgattgagagcgggga

SEQ ID NO: 306278 - DNA, 75 bp, synthetic construct
  source 1..75: mol_type = other DNA
agtacggaagatgagatcaagatcaccgcgaagaagaaaatcacccttaacggcggtggcagctacatccggctg

SEQ ID NO: 306279 - DNA, 75 bp, synthetic construct
  source 1..75: mol_type = other DNA
cgaagaaaaaaataacgattaatggcggtggaagttatatccggatagagggtagcggcattgagccgggaacgc

SEQ ID NO: 306280 - DNA, 75 bp, synthetic construct
  source 1..75: mol_type = other DNA
acgattaatggcggtggaagttatatccggatagagggtagcggcattgagccgggaacgccgggggattataac

SEQ ID NO: 306281 - DNA, 75 bp, synthetic construct
  source 1..75: mol_type = other DNA
ctcggccatcttgttgatgccgggaaagaacagcgcggcgaaggctttgaactgcgtaccgatctgtggggcgcg

SEQ ID NO: 306282 - DNA, 75 bp, synthetic construct
  source 1..75: mol_type = other DNA
acgtatatcaatattctggataacgaattatcgaattttaagtttaatgagaacagcaaagacgagtttatggcc

SEQ ID NO: 306283 - DNA, 75 bp, synthetic construct
  source 1..75: mol_type = other DNA
catggatgacggcgacgtgaagcccgatgcagagccatcaattcccctgcggcgtttcggcgcaacgcatgagat

SEQ ID NO: 306284 - DNA, 75 bp, synthetic construct
  source 1..75: mol_type = other DNA
atggtgaaacaagggcagggcggtcgcatcatcaacattacgtcggtacatgaacatacgccgctgccggatgcc

SEQ ID NO: 306285 - DNA, 75 bp, synthetic construct
  source 1..75: mol_type = other DNA
cggaatcatttgatctggatggtgtaagaccgtttgtgcggatcctgtccgaaaaagtgcgcgcgcgacgcggac

SEQ ID NO: 306286 - DNA, 75 bp, synthetic construct
  source 1..75: mol_type = other DNA
gcatcatcaacattacgtcggtacatgaacatacgccgctgccggatgccagcgcctacacagccgctaaacatg

SEQ ID NO: 306287 - DNA, 75 bp, synthetic construct
  source 1..75: mol_type = other DNA
cctccgattcggggatcggcaaagagtgcgcgttattactggcgcagcaagggtttgatattggcattacctggc

SEQ ID NO: 306288 - DNA, 75 bp, synthetic construct
  source 1..75: mol_type = other DNA
ggcgttttggcgcaacgcatgagattgccagcctggtgatgtggctttgttcggagggcgcaaattacaccactg

SEQ ID NO: 306289 - DNA, 75 bp, synthetic construct
  source 1..75: mol_type = other DNA
atgatcacttacgtgacctgtgatgacgttgataatgcgtttgggaacgcctggacgagtgagaacgctaaaaat

SEQ ID NO: 306290 - DNA, 75 bp, synthetic construct
  source 1..75: mol_type = other DNA
atttgttaacggagcccctatcttctggttcaggtcaggaggcttcagtatctcctgtcgttgaaaagaaaaaat

SEQ ID NO: 306291 - DNA, 75 bp, synthetic construct
  source 1..75: mol_type = other DNA
cgttcggttccgcatggggaaattgaagccgccagagcctatggcttctcgacctttaaaatgtatcgctgcatt

SEQ ID NO: 306292 - DNA, 75 bp, synthetic construct
  source 1..75: mol_type = other DNA
agtgccctcctctggtatatgcccgaccagcgccatcacatgctgttcgccaccatgtggaacaccggtatccgt

SEQ ID NO: 306293 - DNA, 75 bp, synthetic construct
  source 1..75: mol_type = other DNA
tgtttgtcgtgttccgattgtttggtcgtacatggacgcttgaccttaaggataacgaccatacagacccccgct

SEQ ID NO: 306294 - DNA, 75 bp, synthetic construct
  source 1..75: mol_type = other DNA
actgcattgcttgagcctgatttacagcttgcgctggcgctgctgaaaccgtacggactgagtcgctcacaagtc

SEQ ID NO: 306295 - DNA, 75 bp, synthetic construct
  source 1..75: mol_type = other DNA
gtcacgcgcactttcagcacgaaatagaaaaccaccctgaatattttattaaggttgacaatgtaacggtggcgt

SEQ ID NO: 306296 - DNA, 75 bp, synthetic construct
  source 1..75: mol_type = other DNA
actcagtatggacttgtcaataagtcagatgatatcacatggaagcaacatgattggtatgcctgctttcagacc

SEQ ID NO: 306297 - DNA, 75 bp, synthetic construct
  source 1..75: mol_type = other DNA
aatggtagtaaatagtaataatttcaatagtgacttgaatattttattgacacacaaaaaatatccaaaaatgcc

SEQ ID NO: 306298 - DNA, 75 bp, synthetic construct
  source 1..75: mol_type = other DNA
gtatttttattggtggtaagacattcgttgtaacttatcaggagcgagactttttttcaaacgacagtcataatt

SEQ ID NO: 306299 - DNA, 75 bp, synthetic construct
  source 1..75: mol_type = other DNA
cggcgaagatgtttatagttatgaaagtggtgctcatagtgattttgacagtattcgcactgtaataagaccggc

SEQ ID NO: 306300 - DNA, 75 bp, synthetic construct
  source 1..75: mol_type = other DNA
cagtttgctttcatgactaaaggcgaccagtcaggtgaccagcgggtcatggttgagctgtcagatcgtcttggt

SEQ ID NO: 306301 - DNA, 75 bp, synthetic construct
  source 1..75: mol_type = other DNA
gatgttactgctaagtacaaactcactgaaaaggccagaatttatcgcccaatggtagtaaatagtaataatttc

SEQ ID NO: 306302 - DNA, 75 bp, synthetic construct
  source 1..75: mol_type = other DNA
tctgatatcagcaaatcacagttctatataattgttggcggtatatctcagggagaaattgtcaaatatgaaagg

SEQ ID NO: 306303 - DNA, 75 bp, synthetic construct
  source 1..75: mol_type = other DNA
atggctcgttattacatggctaaacctacaggcattttgtataagattgatggcgaatacgtttattactttcac

SEQ ID NO: 306304 - DNA, 75 bp, synthetic construct
  source 1..75: mol_type = other DNA
ctacaggcattttgtataaggttgatggcgaatacgtttattactttcacaaccaggcgcgtgattggcgattat

SEQ ID NO: 306305 - DNA, 75 bp, synthetic construct
  source 1..75: mol_type = other DNA
ttgtccagtacgcagaacgcaaaatgaacgcatacaggcaagctataacaagtcgcggttatgatgattctggtg

SEQ ID NO: 306306 - DNA, 75 bp, synthetic construct
  source 1..75: mol_type = other DNA
agagacatcatagaaaatagtggggatgttccttatctttgtgctagccgtgataataactctgttagttcttat

SEQ ID NO: 306307 - DNA, 75 bp, synthetic construct
  source 1..75: mol_type = other DNA
atataattgttggcggtatatctcagggagaaattgtcaaatatgaaaggtcctgtttttgggtagcaatcggtg

SEQ ID NO: 306308 - DNA, 75 bp, synthetic construct
  source 1..75: mol_type = other DNA
ggggacggcaaatctggtgagaacgctcggtcatcttaatggtgacgggccgttaccggagcgccttcgctggaa

SEQ ID NO: 306309 - DNA, 75 bp, synthetic construct
  source 1..75: mol_type = other DNA
gtctcagtactcccgtagcggtaagcctgatccgttcaaagtgccggaaggtgagggcgagcgttatcgtgatga

SEQ ID NO: 306310 - DNA, 75 bp, synthetic construct
  source 1..75: mol_type = other DNA
aaaacatggcattgcgtgagaccgccggaatggatgtatcgccatgggagggggtgactgacgcagggattgaag

SEQ ID NO: 306311 - DNA, 75 bp, synthetic construct
  source 1..75: mol_type = other DNA
ggatgaaaatcaggccggacgtggtggtcgttttaccacaaccggtgaggttaagggccagagtttccagaaagg

SEQ ID NO: 306312 - DNA, 75 bp, synthetic construct
  source 1..75: mol_type = other DNA
aatggatggaaggcagaatgccctcccgttacgcggatacctggcaactgttacgcacgctgccaccctcacaga

SEQ ID NO: 306313 - DNA, 75 bp, synthetic construct
  source 1..75: mol_type = other DNA
ggcggctattcgcgttaccaggaaaatatggcgttgcgtgagaccgccggaatggatgtgtcgccgtgggagggc

SEQ ID NO: 306314 - DNA, 75 bp, synthetic construct
  source 1..75: mol_type = other DNA
gtttcgtgaagtctcaattagtaatgatactataagtgtaaaattctatagaaatgaagaaatagaatgtgcttg

SEQ ID NO: 306315 - DNA, 75 bp, synthetic construct
  source 1..75: mol_type = other DNA
cgcggggcgtcgagtacaacatggcgcagaatgctgtttatcgcgtgtgtggtggcaagctctacaaaggcgaaa

SEQ ID NO: 306316 - DNA, 75 bp, synthetic construct
  source 1..75: mol_type = other DNA
atgacgatgtgtaccgcgctatcgacttcattttcgaaggcaatcagataacgtgcggcgataaactggaacccg

SEQ ID NO: 306317 - DNA, 75 bp, synthetic construct
  source 1..75: mol_type = other DNA
gcgtaaggccaccaatggcgtgaaacatgtggtgccaatggatgttatcgagagactaccggaactgatgcatga

SEQ ID NO: 306318 - DNA, 75 bp, synthetic construct
  source 1..75: mol_type = other DNA
tgaatgccatggcggcaaaactgggcgatgctcagttgcttaatctggcgatgcggggcacggcgaagaccgtta

SEQ ID NO: 306319 - DNA, 75 bp, synthetic construct
  source 1..75: mol_type = other DNA
agcaatccggcaacaggtgcgccgtctgtgtatatcatcggctctggtcaggtatcaccaatcgccagcgcgagc

SEQ ID NO: 306320 - DNA, 75 bp, synthetic construct
  source 1..75: mol_type = other DNA
tagcgctgtatcgtagcgatattccggcgaagacgaaactcaatgcagtgaagtgggtggagagtgtaaagagca

SEQ ID NO: 306321 - DNA, 75 bp, synthetic construct
  source 1..75: mol_type = other DNA
cagcagccaatatggccttcaacaggaacacctgctgtttactccattgttcaaagcagataatgccagagtgtt

SEQ ID NO: 306322 - DNA, 75 bp, synthetic construct
  source 1..75: mol_type = other DNA
tcttcgctcattcccgggcattgccaaacgctctgatgtaaacggtgtatcgcgcggagttgagtacaacatggc

SEQ ID NO: 306323 - DNA, 75 bp, synthetic construct
  source 1..75: mol_type = other DNA
gggtatctggcaattttaggcgcgttgctggcaggcaccgcgacattaagtccttttgcgacggcggcagcgtta

SEQ ID NO: 306324 - DNA, 75 bp, synthetic construct
  source 1..75: mol_type = other DNA
tgaaaggtgtcggcaaagacttccgaaatgccgactatatcgactatctgccagtgaatatgctggctacaccca

SEQ ID NO: 306325 - DNA, 75 bp, synthetic construct
  source 1..75: mol_type = other DNA
cagcagccagtacgacaagcaacaggaacacctgctgtttactccgttgttcaaagcggataacgccagagtgtt

SEQ ID NO: 306326 - DNA, 75 bp, synthetic construct
  source 1..75: mol_type = other DNA
agtcgggcgcatcaggaaaaatgtcggcttcaaattgcgcgttatcacgaagtcacctgtcactctgtctggctg

SEQ ID NO: 306327 - DNA, 75 bp, synthetic construct
  source 1..75: mol_type = other DNA
tttcatgacggatgtttacatgccgccttcctccacgcaaaaggaactgggcgcaccaccttctgttggagatgc

SEQ ID NO: 306328 - DNA, 75 bp, synthetic construct
  source 1..75: mol_type = other DNA
ccaaaaccacggatgcggcggtgaaatcgctgaacggtattgatataccggagcagcaggtgcccttcctgggga

SEQ ID NO: 306329 - DNA, 75 bp, synthetic construct
  source 1..75: mol_type = other DNA
ggatgaggtcatcgacactctgcctgatggaaaaaacgcggttactgatactgttggtaaaggtctgaaggcaag

SEQ ID NO: 306330 - DNA, 75 bp, synthetic construct
  source 1..75: mol_type = other DNA
gctactgggaatggacgtttatggctggcaagtgatggcgctgacgctgctgttgggaactccaacgctgggatt

SEQ ID NO: 306331 - DNA, 75 bp, synthetic construct
  source 1..75: mol_type = other DNA
ttgagctgcgcgtggcgtttcgccatagcgccgaaatcgctaacccgctgtggttcttcctgattgttattaccc

SEQ ID NO: 306332 - DNA, 75 bp, synthetic construct
  source 1..75: mol_type = other DNA
gatggtgaaatcggtagagcgggatatgaaaattgccgtggatcggtttaaccgcgagtacaacaaaaaagtggg

SEQ ID NO: 306333 - DNA, 75 bp, synthetic construct
  source 1..75: mol_type = other DNA
tcttccgacgaagtgctggcttcgcaggaagtgcacgatatttcggtagcgatcggtatcgatccagacagcgac

SEQ ID NO: 306334 - DNA, 75 bp, synthetic construct
  source 1..75: mol_type = other DNA
gtcgcccgatgcgctttgccgcgccgccgagcaaaaacgtcagcaaagatgttttccatccggtgttcgacgttg

SEQ ID NO: 306335 - DNA, 75 bp, synthetic construct
  source 1..75: mol_type = other DNA
tttgacctgaccttaaatcagcgtgtttataatcaggacggtaaaacggcaaatgcggtcgttacctatgatggc

SEQ ID NO: 306336 - DNA, 75 bp, synthetic construct
  source 1..75: mol_type = other DNA
tgggtgaaagtattttaggttcacgaccagaaattcgcttctacgggacgtatatcaatattctggataacgaat

SEQ ID NO: 306337 - DNA, 75 bp, synthetic construct
  source 1..75: mol_type = other DNA
gctggataaagtcattcaacagcaatttgcgaaaaagctaaagaagtgcagtgaaaatccgcacatcccttcagc

SEQ ID NO: 306338 - DNA, 75 bp, synthetic construct
  source 1..75: mol_type = other DNA
tacaaaattaaacttcgtgcatcgggatttcgtctggtttatcaggtgattgacgatatgttaattattgcggtt

SEQ ID NO: 306339 - DNA, 75 bp, synthetic construct
  source 1..75: mol_type = other DNA
tgacttctcgcggagccagcttactcatagtaattttcgtgaatgtcagattagaaattcaaagttcaataattg

SEQ ID NO: 306340 - DNA, 75 bp, synthetic construct
  source 1..75: mol_type = other DNA
gatccgcagtttgccgggcagacgaaagagcgtctctcttcgcgtcaatgcgcggcattcgtttctggcgtggtg

SEQ ID NO: 306341 - DNA, 75 bp, synthetic construct
  source 1..75: mol_type = other DNA
ctattggggcttgtggttcggctatcgcgtcttttggggcgttgtgttatgcccgtaaggcgttaaacacatgga

SEQ ID NO: 306342 - DNA, 75 bp, synthetic construct
  source 1..75: mol_type = other DNA
gtcaatatattctgactggtggaaataaaaagtgctacttatcaaaaatagaaaaaatatattctagaattgtag

SEQ ID NO: 306343 - DNA, 75 bp, synthetic construct
  source 1..75: mol_type = other DNA
tatatcaatattctggataacgaattatcgaattttaagtttaatgagaacagcaaaaacgagtttatggccggc

SEQ ID NO: 306344 - DNA, 75 bp, synthetic construct
  source 1..75: mol_type = other DNA
caacggcgaccgactgattgttgaaggttctgccaaagtcacttcagggcagaccgtcaaggctgttgaagttca

SEQ ID NO: 306345 - DNA, 75 bp, synthetic construct
  source 1..75: mol_type = other DNA
tcttccgacgaagtgctggcttcgcaggaggtgcacgatatttcggtagcgatcggtatcgatcctgacagtgac

SEQ ID NO: 306346 - DNA, 75 bp, synthetic construct
  source 1..75: mol_type = other DNA
atttatagctacgaaacaggcgcacattctgatttcgaatctattcgtgcggttgttcgcccggcctatatttgg

SEQ ID NO: 306347 - DNA, 75 bp, synthetic construct
  source 1..75: mol_type = other DNA
cgcagaaggtttcccgccactggaaaatccggtagtggacgaacgtgaagtgaccacgcgcaagagcttcccaac

SEQ ID NO: 306348 - DNA, 75 bp, synthetic construct
  source 1..75: mol_type = other DNA
atgatgcgctcaaggaatgggtgaaactggataagaccattcaacaacagtttgtgaaaaaactaaaaaaatgca

SEQ ID NO: 306349 - DNA, 75 bp, synthetic construct
  source 1..75: mol_type = other DNA
aagatgcgctgaaagagtggcaaaaaatggacaagactattcagcaacagtttgcgaaaaagctaaaaaagtgct

SEQ ID NO: 306350 - DNA, 75 bp, synthetic construct
  source 1..75: mol_type = other DNA
gtaggttcgtattttacgcccgtcctttcctcagcgcttgcagccgtgctgctcagcgccccgctgtcgttctcg

SEQ ID NO: 306351 - DNA, 75 bp, synthetic construct
  source 1..75: mol_type = other DNA
gtgactatacccactggcgccctgctgaccccgctggttcttgtctggaccgggggggcatggatcagccgtctg

SEQ ID NO: 306352 - DNA, 75 bp, synthetic construct
  source 1..75: mol_type = other DNA
tcagcatgccaccacagagatgcaggtgacggcagcgcagatgcagaagcagtatgaggaaatcgtcgtgagctg

SEQ ID NO: 306353 - DNA, 75 bp, synthetic construct
  source 1..75: mol_type = other DNA
ccggttcggtgacattacgggcgattttccctaatccacagcagcagttgttaccgggtatgtttgttcgcgctc

SEQ ID NO: 306354 - DNA, 75 bp, synthetic construct
  source 1..75: mol_type = other DNA
attggcatttcgtcggtaacccctggcgcactggtgaccgcgtcgcaagatacagcgttaacgactattcgtggt

SEQ ID NO: 306355 - DNA, 75 bp, synthetic construct
  source 1..75: mol_type = other DNA
ttatcgggcggcatggaatgaagcccgtgctgcgttgcaacaggcgcaggcactggtaaaagccgattgccagaa

SEQ ID NO: 306356 - DNA, 75 bp, synthetic construct
  source 1..75: mol_type = other DNA
tggcaatgctgctcttatctggttgtgataatacgcaaaataacaattcatccccgtcggaaacagaagtgggcg

SEQ ID NO: 306357 - DNA, 75 bp, synthetic construct
  source 1..75: mol_type = other DNA
cagtgaaaaagggcgcctggaactcaccgaagtcgctgtggatgagtctaccggttcggtgacattacgggcgat

SEQ ID NO: 306358 - DNA, 75 bp, synthetic construct
  source 1..75: mol_type = other DNA
caacggtgaccgactgattgtcgaaggttccgccaaagtaacttcagggcagaccgtcaaggccgttgaggttca

SEQ ID NO: 306359 - DNA, 75 bp, synthetic construct
  source 1..75: mol_type = other DNA
ggtgataccaaagccgaccagcctgtttgatgatgagtcgcatttttttggggtgattacgtacatcatcaatga

SEQ ID NO: 306360 - DNA, 75 bp, synthetic construct
  source 1..75: mol_type = other DNA
aaatattatctattctcaatgacattacctgggatgatggttcccttcttgaaactttactatcccatgttcaat

SEQ ID NO: 306361 - DNA, 75 bp, synthetic construct
  source 1..75: mol_type = other DNA
gacaccagccatggccgttttgcctgggaagttcgccaggaacgcgatcagctttttgttggtggtgacgccatc

SEQ ID NO: 306362 - DNA, 75 bp, synthetic construct
  source 1..75: mol_type = other DNA
tcgcattttattagatgcgccttgttcagcaaccggtgtgattcgtcgccatccggatattaaatggttacgtcg

SEQ ID NO: 306363 - DNA, 75 bp, synthetic construct
  source 1..75: mol_type = other DNA
actggctgattaataagttaatggcccgtccgatgaccggcaaacagcggaccgtgcattacctgattatggttg

SEQ ID NO: 306364 - DNA, 75 bp, synthetic construct
  source 1..75: mol_type = other DNA
gcgacatcgttacggtgaaagaagcgacggacgccctgctgcattgtgcggagcagcttcgcaaaggaggcaacc

SEQ ID NO: 306365 - DNA, 75 bp, synthetic construct
  source 1..75: mol_type = other DNA
atgaatgcactgaccgccgtacaaaccaatactgtcgattcaggccaggactatagcggattcaccctcataccg

SEQ ID NO: 306366 - DNA, 75 bp, synthetic construct
  source 1..75: mol_type = other DNA
aagctgatgaatctgccagcgccgaatcctgatgcgccgcgtgaaggcgaagtggtgcctccggtaccggatcag

SEQ ID NO: 306367 - DNA, 75 bp, synthetic construct
  source 1..75: mol_type = other DNA
cggcaggagggggaacaatccaaagccctgcatagtaagcgtcaacggagcaccgtattgacgcttatttattgg

SEQ ID NO: 306368 - DNA, 75 bp, synthetic construct
  source 1..75: mol_type = other DNA
gccattgtcgatggcacccaaacccgggtcagtggcgcacacctgatcaaaacgttggtctggtgcgataactaa

SEQ ID NO: 306369 - DNA, 75 bp, synthetic construct
  source 1..75: mol_type = other DNA
gctcgaaaagatagaatctgatgaatacaaaacggccctaaaacatgcatggactttcaaccaagagttcgcata

SEQ ID NO: 306370 - DNA, 75 bp, synthetic construct
  source 1..75: mol_type = other DNA
tgtcgataactcagacagctatctgcgtcagccgcatcgtgtgatggagctgcacaacgacggcacatacgtcga

SEQ ID NO: 306371 - DNA, 75 bp, synthetic construct
  source 1..75: mol_type = other DNA
gattaacggtgtattacgccagttccagcgtcagcaagaagagttattagccgagtttaatgccagtgatgcacg

SEQ ID NO: 306372 - DNA, 75 bp, synthetic construct
  source 1..75: mol_type = other DNA
atccgcgaaatgcacaagcattgcccacgcccaatcgtgatgcctctctctaacccgacatcacgcgtcgaagcc

SEQ ID NO: 306373 - DNA, 75 bp, synthetic construct
  source 1..75: mol_type = other DNA
cgggatgggcattccgatcggtaaactgtcgctctataccgcctgtggcggcatcagcccggcgtatacccttcc

SEQ ID NO: 306374 - DNA, 75 bp, synthetic construct
  source 1..75: mol_type = other DNA
tttgattgggatgccgggcaagtgatgatttttccatcacagccactgaccacgctaacaccagagcaggttgct

SEQ ID NO: 306375 - DNA, 75 bp, synthetic construct
  source 1..75: mol_type = other DNA
caaaaccgaaatcgacaagcacatctacctgcgtaacatccaggatactaacgaaactctcttctaccgactggt

SEQ ID NO: 306376 - DNA, 75 bp, synthetic construct
  source 1..75: mol_type = other DNA
tggaagaacgccgtaacttcaatctgctggggttactgccggaagtggtcgaaaccatcgaagaacaagcggaac

SEQ ID NO: 306377 - DNA, 75 bp, synthetic construct
  source 1..75: mol_type = other DNA
gcattgccgaaatgatcatcgcccagacccagcgcgaaggattaagcgaggaagcagcacggcagaaagtcttta

SEQ ID NO: 306378 - DNA, 75 bp, synthetic construct
  source 1..75: mol_type = other DNA
ctatctgcatccatcctggctattaaaacgtctgcaaaaagcatatccagagcagtggcaatccatcgtcgaagc

SEQ ID NO: 306379 - DNA, 75 bp, synthetic construct
  source 1..75: mol_type = other DNA
caaggtgatggccgttacccttcccaatggtgtggcgagcaacagtttgatcgcattttattagatgcgccttgt

SEQ ID NO: 306380 - DNA, 75 bp, synthetic construct
  source 1..75: mol_type = other DNA
gttgatattgacgaacagcgcctctctcgcgtttacgacaatttaaaacgccttggtatgaaggcaaccgtgaaa

SEQ ID NO: 306381 - DNA, 75 bp, synthetic construct
  source 1..75: mol_type = other DNA
atatttttaaatataaaacaacggaacgaaaaaaatcatgcaataaatatgtttcgtgaagtctcaattagtaat

SEQ ID NO: 306382 - DNA, 75 bp, synthetic construct
  source 1..75: mol_type = other DNA
aaactggggccttattatgtcctggcacccgggctggccatgccgcatgcccgaccagaagaaggggcaaaagga

SEQ ID NO: 306383 - DNA, 75 bp, synthetic construct
  source 1..75: mol_type = other DNA
ggaatttaataacttctgtcgtcaggagtactacggttgggaggacaacttcacggaaaccccagccaccgacgc

SEQ ID NO: 306384 - DNA, 75 bp, synthetic construct
  source 1..75: mol_type = other DNA
acgtgcggcgataagctggagtccatgaccgggaaattgcaattcgacatcagcagccagtacgacaagcaacag

SEQ ID NO: 306385 - DNA, 75 bp, synthetic construct
  source 1..75: mol_type = other DNA
cggacatctcaggctgtaggcgttaatggtcaacttatcgagtatcgctatgatggtacggttaaaaccgtctca

SEQ ID NO: 306386 - DNA, 75 bp, synthetic construct
  source 1..75: mol_type = other DNA
ggtggcaagctgtacaaaggagaaagtgaagtcggtgacgttgccggaagtggtcgcgtatcaatggcgcatggt

SEQ ID NO: 306387 - DNA, 75 bp, synthetic construct
  source 1..75: mol_type = other DNA
tggtcgcgtatcaatggcgcatggtcgaacatctcaggcggtaggcgttaatggtcaactggtcgagtatcgcta

SEQ ID NO: 306388 - DNA, 75 bp, synthetic construct
  source 1..75: mol_type = other DNA
agtagggcgcatcaggaaaaacattggtttcaaattgcgcgttatcacgaagtcaccagtaacactatccgggtg

SEQ ID NO: 306389 - DNA, 75 bp, synthetic construct
  source 1..75: mol_type = other DNA
gcagagtgctgtttatcgcgtgtgtggtggcaagctgtacaaaggcgaaagcgaagtcggtgacgtcgccggaag

SEQ ID NO: 306390 - DNA, 75 bp, synthetic construct
  source 1..75: mol_type = other DNA
attgagaaaatcctccgctcctacactgctgatgaactggctgatggcgtgatggagtctctgcgatttgatgcg

SEQ ID NO: 306391 - DNA, 75 bp, synthetic construct
  source 1..75: mol_type = other DNA
agtagggcgcgtcaggaaaaatgtcggcttcaaattgcgcgttatcacgaagtcacctatcactttgtctggttg

SEQ ID NO: 306392 - DNA, 75 bp, synthetic construct
  source 1..75: mol_type = other DNA
atcttcaagtgccaatggtccgcaatggtgtgtgctgaaaacaggcctgtatgacgatgtgtaccgcgctatcga

SEQ ID NO: 306393 - DNA, 75 bp, synthetic construct
  source 1..75: mol_type = other DNA
attgagaaaatactacgctcctacactgctgatgaactggctgatggcgtgatggaatcgttgcggtttgatgcg

SEQ ID NO: 306394 - DNA, 75 bp, synthetic construct
  source 1..75: mol_type = other DNA
cgggtagggcgcatcaggaaaaatgttggcttcaaattgcgcgttatcacgaagtcacctgtcactctgtctggc

SEQ ID NO: 306395 - DNA, 75 bp, synthetic construct
  source 1..75: mol_type = other DNA
cagcagccagtacgggcttcaacaggaacacctgctgtttactccattgttcaaagcggataacgcaagagtgtt

SEQ ID NO: 306396 - DNA, 75 bp, synthetic construct
  source 1..75: mol_type = other DNA
tcttcgctcattcccgggcattgccaaacgttctgatgtgaatggtgtatcgcgcggtgtcgagtacaacatggc

SEQ ID NO: 306397 - DNA, 75 bp, synthetic construct
  source 1..75: mol_type = other DNA
cagcagccagtacgacaagcaacaggaacatctgctgtttactcctctgttcaaagcggataacgccagagtttt

SEQ ID NO: 306398 - DNA, 75 bp, synthetic construct
  source 1..75: mol_type = other DNA
atgccgattcagcaacttccgcttatgaaaggtgtcggcaaagactttcgaaacgccgactatatcgactatctg

SEQ ID NO: 306399 - DNA, 75 bp, synthetic construct
  source 1..75: mol_type = other DNA
tgatctggaggtggaatcatcgacgggtgttgctcagtacgctgaccgcctttttctctctgcaaccactgacgg

SEQ ID NO: 306400 - DNA, 75 bp, synthetic construct
  source 1..75: mol_type = other DNA
agtagggcgcatcaggaaaaatgttggcttcaaactgcgcgttatcactaagtcgcctgtcactctgtctggcgc

SEQ ID NO: 306401 - DNA, 75 bp, synthetic construct
  source 1..75: mol_type = other DNA
gcagaatgctgtttatcgtgtgtgtggcggcaagctctacaaaggcgaaagcgaagtcggtgacgtcgccggaag

SEQ ID NO: 306402 - DNA, 75 bp, synthetic construct
  source 1..75: mol_type = other DNA
gaacatattttattttcaccattaataaaggcagataatgtcattattaatgaccttgaattagaaacatcaggc

SEQ ID NO: 306403 - DNA, 75 bp, synthetic construct
  source 1..75: mol_type = other DNA
acatggcgagacttcatcgtctgctttggttcatcgacgattgaatatttctccctgactggcgcaaccaccgtt

SEQ ID NO: 306404 - DNA, 75 bp, synthetic construct
  source 1..75: mol_type = other DNA
atctatggggtgtaaaattgcgaccgcttactataaagggaatcctcctgataaagtcgaaaactggggggctgt

SEQ ID NO: 306405 - DNA, 75 bp, synthetic construct
  source 1..75: mol_type = other DNA
ggtggcgttgggcaagtcaccacgcttggcagcgacctctccgtagcgacggcgacaacgcatgtcggttttaac

SEQ ID NO: 306406 - DNA, 75 bp, synthetic construct
  source 1..75: mol_type = other DNA
gaacacctgctgtttactccactgttcaaagcggataacgccagagttttcgaccttgaggttgaatcgtcaact

SEQ ID NO: 306407 - DNA, 75 bp, synthetic construct
  source 1..75: mol_type = other DNA
acgtgcaatccttaatgattttgccgctaactacagcattcctgttttcatcagtagttctgtaaatgatgattt

SEQ ID NO: 306408 - DNA, 75 bp, synthetic construct
  source 1..75: mol_type = other DNA
gatgatattgcgcacctgaagcaggaaaaccgcctgctacgccagcggctttcccggtttgtagctcatccgtga

SEQ ID NO: 306409 - DNA, 75 bp, synthetic construct
  source 1..75: mol_type = other DNA
cttcgaactgtggcttaggccgtttggtgggaattgtgcttacgcaagcccacttcattacaggtgttccaccta

SEQ ID NO: 306410 - DNA, 75 bp, synthetic construct
  source 1..75: mol_type = other DNA
gagatgggggaaaatatcggtggcgatctgaaaaaattctttgatgttttcagtgatatcaatcgccggatttcg

SEQ ID NO: 306411 - DNA, 75 bp, synthetic construct
  source 1..75: mol_type = other DNA
gtcatcagacaaagactcaataatgactgacgttagtacaatcgcgttggtttatgcaggtttatcatgcaagtt

SEQ ID NO: 306412 - DNA, 75 bp, synthetic construct
  source 1..75: mol_type = other DNA
catgtctgcttgttttgaacaatttcaagcgttatcagaactaagtttaggatgtaggcaactattgttttcctc

SEQ ID NO: 306413 - DNA, 75 bp, synthetic construct
  source 1..75: mol_type = other DNA
cccgtatgcctttatctcgtttctggcgattttgcagaccatcgacaaatcgctgtacgaagctgcagagatgga

SEQ ID NO: 306414 - DNA, 75 bp, synthetic construct
  source 1..75: mol_type = other DNA
gatggattgtaaatgctacgcgatcgcgatggggtaagttcaaaccctggatcctgattgaaccgccccgggttt

SEQ ID NO: 306415 - DNA, 75 bp, synthetic construct
  source 1..75: mol_type = other DNA
aaagctatttgaatgccctcatggatgtggttgaactgcttcatgccgatgaacgtttcactatggaatcgttat

SEQ ID NO: 306416 - DNA, 75 bp, synthetic construct
  source 1..75: mol_type = other DNA
actttaaaacataccaggggataaattacgttcctgtaagtgattcatcaaacttgagtggttttcttggaaata

SEQ ID NO: 306417 - DNA, 75 bp, synthetic construct
  source 1..75: mol_type = other DNA
cagatagatatgaatcaggcccttatgtcacaggcttatgaagcattctattcaggtgatttaacacgataccag

SEQ ID NO: 306418 - DNA, 75 bp, synthetic construct
  source 1..75: mol_type = other DNA
gactgcctcaataccgatgaatggccagctattaagacgttatcactgccccgctgggctaaggaatatgcaaat

SEQ ID NO: 306419 - DNA, 75 bp, synthetic construct
  source 1..75: mol_type = other DNA
ctcggctcttgatctcagagttagtgaaaaaaatgccataaatagattttttgatgatggaaataataagttttt

SEQ ID NO: 306420 - DNA, 75 bp, synthetic construct
  source 1..75: mol_type = other DNA
gctaaagagtggaattataatacagctgtcaaaaagagcggcatagaaaaaaccagcccacatattgtaccggtt

SEQ ID NO: 306421 - DNA, 75 bp, synthetic construct
  source 1..75: mol_type = other DNA
acgtcaaaacatatcaaggcataaattatattcctttgacagacgctccaaattttagcggtttcttaggaaata

SEQ ID NO: 306422 - DNA, 75 bp, synthetic construct
  source 1..75: mol_type = other DNA
ttggtgcagacgcagctacctatcttagcttattagtcggcgtactggcactgtttggtattgggggcggtgtta

SEQ ID NO: 306423 - DNA, 75 bp, synthetic construct
  source 1..75: mol_type = other DNA
aatatttattagagttccgtaagctacagctcatgatgaaaccggataaccccattacccggattcattccgctg

SEQ ID NO: 306424 - DNA, 75 bp, synthetic construct
  source 1..75: mol_type = other DNA
ccgctcgcgctgtatcagcattcactaattcaatcaagcgcccaaccattaccataaacggaatcgggcggcgtc

SEQ ID NO: 306425 - DNA, 75 bp, synthetic construct
  source 1..75: mol_type = other DNA
ctgatgtgtcaggcatcctcaacgcacccgcacttaacccgcttcggcgggtttttgtttttattttcaacgcgt

SEQ ID NO: 306426 - DNA, 75 bp, synthetic construct
  source 1..75: mol_type = other DNA
tgatggtctgactccggcggatgtaccggcggtgacggatcaggacggtaacggcaaggcggatgcagcagaagc

SEQ ID NO: 306427 - DNA, 75 bp, synthetic construct
  source 1..75: mol_type = other DNA
tttcgctaatggcgggcaactcagctatcgctacgttgcccctctggcggataaaggcgtaccgatgcaggggct

SEQ ID NO: 306428 - DNA, 75 bp, synthetic construct
  source 1..75: mol_type = other DNA
gaaggactacaaagcagtcactcgcgacctgaaagcgatttatcaggctcccacggaagaggcaggccagcaggc

SEQ ID NO: 306429 - DNA, 75 bp, synthetic construct
  source 1..75: mol_type = other DNA
tgccaataaaattctgttggtaagtaacaaaaagaaacgtacagaaaagattgacgtgaatattcgtcttgcagg

SEQ ID NO: 306430 - DNA, 75 bp, synthetic construct
  source 1..75: mol_type = other DNA
ctacgcgatgtcgacgtcacgaaactgaaaaaaccgctctacattctggcgactgctgatgaagaaaccagtatg

SEQ ID NO: 306431 - DNA, 75 bp, synthetic construct
  source 1..75: mol_type = other DNA
tgcccggctggctattccaggcatagtggatttgtcagacgtggtagcagaaaatgatggtgtctcccgcattgt

SEQ ID NO: 306432 - DNA, 75 bp, synthetic construct
  source 1..75: mol_type = other DNA
ttgtttttaatgtttctgatatatcttgtattagtactgatatctttaacaaaaagtgctatttcttctaaaaaa

SEQ ID NO: 306433 - DNA, 75 bp, synthetic construct
  source 1..75: mol_type = other DNA
ttgatcaacgttctacttgttgatgaccacgaactggtgcgcgcagggatacgacgcattctggaagatataaag

SEQ ID NO: 306434 - DNA, 75 bp, synthetic construct
  source 1..75: mol_type = other DNA
gattattttagctatattgaaatttataaaaatgttctagttgcaagagatggtattgagctgggtttttattat

SEQ ID NO: 306435 - DNA, 75 bp, synthetic construct
  source 1..75: mol_type = other DNA
gtatgcagtaaagataaacaggcgatgtataatattacacaagaaaccgcccgtatccttcacgaaactgaaaca

SEQ ID NO: 306436 - DNA, 75 bp, synthetic construct
  source 1..75: mol_type = other DNA
aatatcgtattcgttatagtaaatccattagtgattttggtactcaattgttggatttgcccctatatttccaga

SEQ ID NO: 306437 - DNA, 75 bp, synthetic construct
  source 1..75: mol_type = other DNA
aagcaataaagatcaatcggacgttattcctgtttatgctgccgcgcctgcgtcggttgtgccggataatgcatc

SEQ ID NO: 306438 - DNA, 75 bp, synthetic construct
  source 1..75: mol_type = other DNA
gcgaattaacgtggtgcagccacaatcagcaccatgatgacacgctatatgttcgagctgaccttgtgaatggca

SEQ ID NO: 306439 - DNA, 75 bp, synthetic construct
  source 1..75: mol_type = other DNA
gctggctgacagaaatcagccacctgagcgaaggccaccgtgtcgctgtccactacggctacgacgataagggcc

SEQ ID NO: 306440 - DNA, 75 bp, synthetic construct
  source 1..75: mol_type = other DNA
caggattatggagcataaatcaggggttgcccgttcagtatggacggcccgccttaatggctgccagattatctg

SEQ ID NO: 306441 - DNA, 75 bp, synthetic construct
  source 1..75: mol_type = other DNA
gaagagtttaccttagtaaagaaaaggaagtatccattaaggtggtatattttataaataatgtcgccgtccata

SEQ ID NO: 306442 - DNA, 75 bp, synthetic construct
  source 1..75: mol_type = other DNA
ggcgcgcggcgcccactgcgcacccccgtggaggacgtgcggcagctgcgtggcggcgggctgggttatggctta

SEQ ID NO: 306443 - DNA, 75 bp, synthetic construct
  source 1..75: mol_type = other DNA
tactgtccggtttatcactttgggagaaaggcagtccgctgcataaatctacgcaacaggttagaacccaaggcc

SEQ ID NO: 306444 - DNA, 75 bp, synthetic construct
  source 1..75: mol_type = other DNA
gaaaaacagccagtggcagtaccggagagccggcttcacggtcctctggcgacgactttcgggccggtgcttgca

SEQ ID NO: 306445 - DNA, 75 bp, synthetic construct
  source 1..75: mol_type = other DNA
tcagttcaacaatctgaaaggttgcttctatgaggcattaaaggtcgcaatgcgcaactatccggtaactccgga

SEQ ID NO: 306446 - DNA, 75 bp, synthetic construct
  source 1..75: mol_type = other DNA
ggatggcatagagcggagcggcgccatgcttcatggtgccgaacctgtaagccaaacttacaagttgcctcccct

SEQ ID NO: 306447 - DNA, 75 bp, synthetic construct
  source 1..75: mol_type = other DNA
cgtctctacgacgatgatttacacgcatgtgctgaaagttggcggtgccggagtgcgctcaccgcttgatgcgct

SEQ ID NO: 306448 - DNA, 75 bp, synthetic construct
  source 1..75: mol_type = other DNA
cactacctgtgaagggatgtcaggacgttacagttacagcaaatgaaacttatcggattcgcaccggaagagaac

SEQ ID NO: 306449 - DNA, 75 bp, synthetic construct
  source 1..75: mol_type = other DNA
tattaatgatgatggttattatgcggcatgttatagtgagttatctgttcagcacaatttggttgttcaggggga

SEQ ID NO: 306450 - DNA, 75 bp, synthetic construct
  source 1..75: mol_type = other DNA
agctgcgttttgatttcagagacacttttggcgaagggttctattttgactccattcgcagcaccgcgtggatta

SEQ ID NO: 306451 - DNA, 75 bp, synthetic construct
  source 1..75: mol_type = other DNA
tggtacccggtgcacaaagcgcagaggcggcgcagaaggcggtttcaggtctggtgaatgcgatgccggggggaa

SEQ ID NO: 306452 - DNA, 75 bp, synthetic construct
  source 1..75: mol_type = other DNA
gttatgcgaagtatattctcataagtagacacggctttacctgttatgtattaaagggactattatacatatttt

SEQ ID NO: 306453 - DNA, 75 bp, synthetic construct
  source 1..75: mol_type = other DNA
gtaacaccggtgcaagtctcggacagtgtttatattggcaacaaaagttcagtcagtacgcacggcgaaccgtta

SEQ ID NO: 306454 - DNA, 75 bp, synthetic construct
  source 1..75: mol_type = other DNA
cgattaaggtcaagcgataccgctcttacagaggagaggtagggcaaaccgccccctatgttctccaacgagatt

SEQ ID NO: 306455 - DNA, 75 bp, synthetic construct
  source 1..75: mol_type = other DNA
agcgcagagcgcattgctgaatcacacaacggtggcacccgctccgtctgggtcgccagtctggaaggttgccgg

SEQ ID NO: 306456 - DNA, 75 bp, synthetic construct
  source 1..75: mol_type = other DNA
agtgcatcccgtatatcagaaacacacaacggcggcacccgctccgtctgggtagccagtctggaaggttgccgg

SEQ ID NO: 306457 - DNA, 75 bp, synthetic construct
  source 1..75: mol_type = other DNA
acatcagcatggcagaagcggcgcagaactggctgcgtgcgcgtggcagtcgcgtgactgacgttcgggtgttta

SEQ ID NO: 306458 - DNA, 75 bp, synthetic construct
  source 1..75: mol_type = other DNA
gggggccagtctatgcggttgttcgcccggcctatatttgggaccaatataaccagacaggtgttgaactgggct

SEQ ID NO: 306459 - DNA, 75 bp, synthetic construct
  source 1..75: mol_type = other DNA
cgcatgacgcattatttaaatcctttctcacgcatcctgacaccgcgcgggattttatggagatccacttaccca

SEQ ID NO: 306460 - DNA, 75 bp, synthetic construct
  source 1..75: mol_type = other DNA
ttgagcctttcgtgccccgtgaagaccaagcgtatgtcgaaattcgtgatgaagcgatgaaggttatcgctgagg

SEQ ID NO: 306461 - DNA, 75 bp, synthetic construct
  source 1..75: mol_type = other DNA
atgtttggtgacgaagacaaggcaccagtgcctgcacaagaacttcatgtggaaacagagctaactcccaaccac

SEQ ID NO: 306462 - DNA, 75 bp, synthetic construct
  source 1..75: mol_type = other DNA
gccatatacgtgacgacgaacctgtcaaaaaaaccgaagaaatggtttcgatagcaaatcgcaggaacatgcagt

SEQ ID NO: 306463 - DNA, 75 bp, synthetic construct
  source 1..75: mol_type = other DNA
tgaagaaagtattgagttactgcataatattgcgttagggaaggtgcgaataagcggggaaattcttctcggctg

SEQ ID NO: 306464 - DNA, 75 bp, synthetic construct
  source 1..75: mol_type = other DNA
gccgtatcccgaaaaaaacgctacttgcggcctgttgtgccctgttttatagcagcaacggtgctgcggcggaca

SEQ ID NO: 306465 - DNA, 75 bp, synthetic construct
  source 1..75: mol_type = other DNA
taactcgatctgcaatgtcggcccaaacacgctagttttcgagcgatctggtggttacgttgtactggatatctc

SEQ ID NO: 306466 - DNA, 75 bp, synthetic construct
  source 1..75: mol_type = other DNA
cagcttccagcgtggacccccggctgcttgaggcgctttccgctgttgctcccaccgtagaggtgattacctatg

SEQ ID NO: 306467 - DNA, 75 bp, synthetic construct
  source 1..75: mol_type = other DNA
atgacatttaaacactacgatgtggtcagggcggcatcgccgtcagaccttgctgaacgactgacacaaaaactg

SEQ ID NO: 306468 - DNA, 75 bp, synthetic construct
  source 1..75: mol_type = other DNA
cagaagctgattgggaaaaacattttaattatttaaagcccttttttgaagatgaacgttacttaaagcatgatg

SEQ ID NO: 306469 - DNA, 75 bp, synthetic construct
  source 1..75: mol_type = other DNA
aattattataacttgttggacaagaatacattgatttggcaagcaggtctggccaatcagtataaaattggtgca

SEQ ID NO: 306470 - DNA, 75 bp, synthetic construct
  source 1..75: mol_type = other DNA
gccgtagaatgctttttcgtaattagcggttatttgatcattagaagctttaaaaataatcaaaatatcagaaaa

SEQ ID NO: 306471 - DNA, 75 bp, synthetic construct
  source 1..75: mol_type = other DNA
acagtgatgatgaaacggaggcagccaccccgaaagcggtgaaagcggcaatggacaaagcggacggatgcctgg

SEQ ID NO: 306472 - DNA, 75 bp, synthetic construct
  source 1..75: mol_type = other DNA
ttcactcagacgaatgaaagatatagagcaaaagataatagagcttttgtgtattatcactggagtttcaagcac

SEQ ID NO: 306473 - DNA, 75 bp, synthetic construct
  source 1..75: mol_type = other DNA
ggtctaactgatgatatcaatgcgcgtatttgcgtagtcgatgtcggctggcgtggcaccattcacgataatatt

SEQ ID NO: 306474 - DNA, 75 bp, synthetic construct
  source 1..75: mol_type = other DNA
ccttttggtgtctggcaattacgcaataaagaaggcccctgtagattcaatctgtcaatgcaacacccctttcaa

SEQ ID NO: 306475 - DNA, 75 bp, synthetic construct
  source 1..75: mol_type = other DNA
atggttgcattgcccgccgggcttggtggcggtttactggctgcagccacccctgaactggccgcagcagcacag

SEQ ID NO: 306476 - DNA, 75 bp, synthetic construct
  source 1..75: mol_type = other DNA
atccggctggagctacagttgcaaatgttccttccagtggtgatcttggtggcagcttattgaaagggaaaaata

SEQ ID NO: 306477 - DNA, 75 bp, synthetic construct
  source 1..75: mol_type = other DNA
atgtattacataaaattaatatacagtaagctaactattattattataagccctgtcctgttaattacctttggc

SEQ ID NO: 306478 - DNA, 75 bp, synthetic construct
  source 1..75: mol_type = other DNA
aaaactgatgtattgcatcattatagagggaaattaacagaggttttgaaagttgtcatcaagaaggaaaatgtc

SEQ ID NO: 306479 - DNA, 75 bp, synthetic construct
  source 1..75: mol_type = other DNA
ttgatgtatgggatacaattctgcgtcgtgattgccatccagacttcataaagcggtcaactgcatattattttt

SEQ ID NO: 306480 - DNA, 75 bp, synthetic construct
  source 1..75: mol_type = other DNA
aaatcagcattcattggtcaatctggaagcgcaaaataacaaactgacaaaaattaatatttctgatagttataa

SEQ ID NO: 306481 - DNA, 75 bp, synthetic construct
  source 1..75: mol_type = other DNA
gactagaacaatggggtaataaatcggttaataatggtgaagaaagagcaattgccgtggagcgaattaaagaag

SEQ ID NO: 306482 - DNA, 75 bp, synthetic construct
  source 1..75: mol_type = other DNA
cgaaggacatcaagtgctggtttaacattgagacttactggggttttgaagagctaaccttgataaggttctatc

SEQ ID NO: 306483 - DNA, 75 bp, synthetic construct
  source 1..75: mol_type = other DNA
tggcaaatcatgatggaagccccccacgttcaggcttgtgtgcaacacattacgcgctggctttgcgcaacctca

SEQ ID NO: 306484 - DNA, 75 bp, synthetic construct
  source 1..75: mol_type = other DNA
ggagctggcaccgtcagtcattctctctctggggattatttcaattaccgatggtcttggtggattacgcgccgc

SEQ ID NO: 306485 - DNA, 75 bp, synthetic construct
  source 1..75: mol_type = other DNA
ataagctttcaactgtgttaaccacagcacgatcgatgttatatggtgcaacacgccgtaaaactattgctgtag

SEQ ID NO: 306486 - DNA, 75 bp, synthetic construct
  source 1..75: mol_type = other DNA
atggcatatggtgaaggccttccgctgccggagacatatgaccgtccggacctgcgcattaagcagctggcgcgt

SEQ ID NO: 306487 - DNA, 75 bp, synthetic construct
  source 1..75: mol_type = other DNA
ggaaaagtgcttgctgataatgtcaaaactgagcaggtaagaattttcatggataaacgagggcttgagagcaag

SEQ ID NO: 306488 - DNA, 75 bp, synthetic construct
  source 1..75: mol_type = other DNA
ccgatatatgtacaaaggctttaacgaaatgtgggtagaagcaagaaatcgcgcaggcaaaatttcaggtatttt

SEQ ID NO: 306489 - DNA, 75 bp, synthetic construct
  source 1..75: mol_type = other DNA
ccctttgatgttgctgaagcagaacaggaattacaggaaggcccgctgacagaatattccggtgccgggctggcg

SEQ ID NO: 306490 - DNA, 75 bp, synthetic construct
  source 1..75: mol_type = other DNA
agataaattcaacaataaaacaaagctatttgtagtcgccgacatagatggcaagatgtatatctccccaaaaaa

SEQ ID NO: 306491 - DNA, 75 bp, synthetic construct
  source 1..75: mol_type = other DNA
atgttcacagctttttctgtgggaatctcagaaaaaattgtcgctttgatcgggttaggatatcaatatagatgt

SEQ ID NO: 306492 - DNA, 75 bp, synthetic construct
  source 1..75: mol_type = other DNA
gtatgatcgcaaacccgcagtaactccaactctggatattccggtgctggatgtcacagttctgagcagaaaccc

SEQ ID NO: 306493 - DNA, 75 bp, synthetic construct
  source 1..75: mol_type = other DNA
tttgagcatgttgatttgcactctacatctcatctcattctgaattcagatgattttaaatctcaggatatagag

SEQ ID NO: 306494 - DNA, 75 bp, synthetic construct
  source 1..75: mol_type = other DNA
ggaagcggcagtggcattttacgaacgggcattgccctctaatgtatcaggagacttatatcctcaaccgtccat

SEQ ID NO: 306495 - DNA, 75 bp, synthetic construct
  source 1..75: mol_type = other DNA
tgataaggtatcttctgtttctaagaactggtctactttacttgatagtaatcctggaagttatgttacatccca

SEQ ID NO: 306496 - DNA, 75 bp, synthetic construct
  source 1..75: mol_type = other DNA
tccccttttgcgggcggcggcgatctgatcacccttatctatcttcttgccctgtttcgttttttctttgctctt

SEQ ID NO: 306497 - DNA, 75 bp, synthetic construct
  source 1..75: mol_type = other DNA
ggtcgtgatggcagcactgtttgtggccctgtttctgccctttgggcgcgcgcaagaactttctctcgcctgcct

SEQ ID NO: 306498 - DNA, 75 bp, synthetic construct
  source 1..75: mol_type = other DNA
gtactggcctcaatcgcagaaaacacgctggcacgcgggcgttttttactcattcaccatgtgacctggcttggc

SEQ ID NO: 306499 - DNA, 75 bp, synthetic construct
  source 1..75: mol_type = other DNA
atgttcacagctttttctgcgggcatatcagaaaaaattgttaatttgatagggttaggatatcaatatagatgt

SEQ ID NO: 306500 - DNA, 75 bp, synthetic construct
  source 1..75: mol_type = other DNA
atgctgttacgccagcatcttgatattttctctgccctgcaaaaacgtgatggcgatgcggtagaacgtgcaatg

SEQ ID NO: 306501 - DNA, 75 bp, synthetic construct
  source 1..75: mol_type = other DNA
atgggattcccttcaccagcgacggactacgtcgagcaaaggttgtctgttaactcgatctgtaatgttgggcct

SEQ ID NO: 306502 - DNA, 75 bp, synthetic construct
  source 1..75: mol_type = other DNA
acgctgagaggaaagtcgctgattaccgaagatggcgaagcgatcgagggcgaggccctggacgatgttactgtc

SEQ ID NO: 306503 - DNA, 75 bp, synthetic construct
  source 1..75: mol_type = other DNA
ctttgttgcggcatggcagtaaacatgaatcgtttgcgctgttattcagatgtgagcacagcgcagttcccgaaa

SEQ ID NO: 306504 - DNA, 75 bp, synthetic construct
  source 1..75: mol_type = other DNA
attgctgctgagcttaatatcacaaataacgagaaaaatattcacctggcagtaatttcgcaaaatgaatgttac

SEQ ID NO: 306505 - DNA, 75 bp, synthetic construct
  source 1..75: mol_type = other DNA
ctgtagttattaccggggcatgccggggaattggggccgggatcgctgaacgcttcgcccgcgatggcgcaaatc

SEQ ID NO: 306506 - DNA, 75 bp, synthetic construct
  source 1..75: mol_type = other DNA
cggcaggccattattgatgccgttgacctgctacttgcccatccagaggcagcgcatcacatcatgaacgtggtg

SEQ ID NO: 306507 - DNA, 75 bp, synthetic construct
  source 1..75: mol_type = other DNA
gaaagcagcacatcagcttacatggcaacaagcgccgaaatcatcagaaccgctaaacgattctgacctggaaca

SEQ ID NO: 306508 - DNA, 75 bp, synthetic construct
  source 1..75: mol_type = other DNA
atggaactgaaagatcgtattattgccgccaaatgtgaaaacgacccggcatttcgtgagcgttacctacgcgcc

SEQ ID NO: 306509 - DNA, 75 bp, synthetic construct
  source 1..75: mol_type = other DNA
tgctgggaactgctgatgaacggttatctcaattgcgaagatttaatcgacccggtagtgacctttgccaatagc

SEQ ID NO: 306510 - DNA, 75 bp, synthetic construct
  source 1..75: mol_type = other DNA
acgtagcggtggatatatcaatatccacaaatgtagaagatgattattttttttcttatttttccctaacaatcg

SEQ ID NO: 306511 - DNA, 75 bp, synthetic construct
  source 1..75: mol_type = other DNA
agagcggcccatgaaatcgcccgtgagccagtgccgaaagcatcagagccgttaaatatttttgacctcgatcag

SEQ ID NO: 306512 - DNA, 75 bp, synthetic construct
  source 1..75: mol_type = other DNA
atgctgtttgtgcttattctaagtcaccgggcagcatcatacggggcaattatggccgcattaccatacatgcaa

SEQ ID NO: 306513 - DNA, 75 bp, synthetic construct
  source 1..75: mol_type = other DNA
acctcaaaaacaccatcatacactaaatcagtaagttggcagcatcacctgaacgttattaatactatttttaac

SEQ ID NO: 306514 - DNA, 75 bp, synthetic construct
  source 1..75: mol_type = other DNA
ggtggatggtaaaccctggcagtcgtatgaaacagcgcaaattgcggttgatctgcgcttcttccagtttgtacc

SEQ ID NO: 306515 - DNA, 75 bp, synthetic construct
  source 1..75: mol_type = other DNA
tcggatttattcctcatgatgaaatggtaaattattatagccaaattgatgtctatgtctgtccttcaaaaattg

SEQ ID NO: 306516 - DNA, 75 bp, synthetic construct
  source 1..75: mol_type = other DNA
gtccgaacattggtagtgatggttctaacctaacaataacatgtttatcgatgagcagagtttttcttactgaaa

SEQ ID NO: 306517 - DNA, 75 bp, synthetic construct
  source 1..75: mol_type = other DNA
taggccatgaacaatttaaggtttttcaaaaagctgatggctggtttgattcaatgggggcatggattgttttta

SEQ ID NO: 306518 - DNA, 75 bp, synthetic construct
  source 1..75: mol_type = other DNA
tataccgctctgggtgttgcagtaaatcttgatgttgaaagcaatatcaatattaccaacaactcccgtgtagct

SEQ ID NO: 306519 - DNA, 75 bp, synthetic construct
  source 1..75: mol_type = other DNA
cgtccccgatggcagtggtaaacctatcggaacaggaacattctccggtaacgcgaccttctcctttacctacga

SEQ ID NO: 306520 - DNA, 75 bp, synthetic construct
  source 1..75: mol_type = other DNA
tggcgttgcttccattgattataacttccctgtctggtcgaataacttgttgtcattcccttttacagcacaact

SEQ ID NO: 306521 - DNA, 75 bp, synthetic construct
  source 1..75: mol_type = other DNA
gcccgcaaactgatcctcgataactgtcagcatattcgtccgttcgtacctgaactggtggatggtaaaccctag

SEQ ID NO: 306522 - DNA, 75 bp, synthetic construct
  source 1..75: mol_type = other DNA
ttcataaaaaagacagccacatcaaagggcaacagcgttatgtaccgcacaaacgcatgaacaacgcctttatga

SEQ ID NO: 306523 - DNA, 75 bp, synthetic construct
  source 1..75: mol_type = other DNA
accactgcacgccagctatttaaggcctatgatgaaaatgaagtagcaaccgacgagaaaatgaaaggaaaatta

SEQ ID NO: 306524 - DNA, 75 bp, synthetic construct
  source 1..75: mol_type = other DNA
atgtcggcacgtttaaaattattaccaggggtaaaatcaactgaatatgtgtattcagaccttcatgctttgctc

SEQ ID NO: 306525 - DNA, 75 bp, synthetic construct
  source 1..75: mol_type = other DNA
gcagctgctgcaattcgacagctggcatcacgtgatgcgcactgttcacgcgaaatgttgttgcggttagtcggg

SEQ ID NO: 306526 - DNA, 75 bp, synthetic construct
  source 1..75: mol_type = other DNA
gggacacgattcaagcgctgctatccactcatcaggaagtgattgaagaaatctatcccgaacatgcaagcgatc

SEQ ID NO: 306527 - DNA, 75 bp, synthetic construct
  source 1..75: mol_type = other DNA
ccgctcactatcgcaatgagcaagtgcaaagaagcaattaagcgattagaacaagacgacgaacaacaacaagga

SEQ ID NO: 306528 - DNA, 75 bp, synthetic construct
  source 1..75: mol_type = other DNA
gactacaacagaaggccgtctcggtatgacatttacccagatggggtcgtctcagaattcggaaaataaagcacg

SEQ ID NO: 306529 - DNA, 75 bp, synthetic construct
  source 1..75: mol_type = other DNA
attgaaatacattagggcaataacatctcaccgggcgccgattaaatacggcgtggaaaaggtggaaggcaaaag

SEQ ID NO: 306530 - DNA, 75 bp, synthetic construct
  source 1..75: mol_type = other DNA
ttcatacatgtggtttgagacaggcgacaacggcaatgaatatttcaaatggagaagcaaacaaagtaccacaac

SEQ ID NO: 306531 - DNA, 75 bp, synthetic construct
  source 1..75: mol_type = other DNA
gcttagaaaagatccagttcatcatccagcgcagactcttggttcactgccgtacaggcagcttagaaacgtcac

SEQ ID NO: 306532 - DNA, 75 bp, synthetic construct
  source 1..75: mol_type = other DNA
gtttatggaggagatttacgtgctaacggttttactgaactgttatttgagttagtagcacgccatagaagagat

SEQ ID NO: 306533 - DNA, 75 bp, synthetic construct
  source 1..75: mol_type = other DNA
taaacctgttggccacgtcaggtaaggtaagcgttgttacatctgctgcggtgacaacaatgtccggtcaacctg

SEQ ID NO: 306534 - DNA, 75 bp, synthetic construct
  source 1..75: mol_type = other DNA
ttactaagtgccatatatggtttagttatggcaagagtcttatcacttatagtgacctttatatttagtcgaaaa

SEQ ID NO: 306535 - DNA, 75 bp, synthetic construct
  source 1..75: mol_type = other DNA
ttgcattgcacaaatcccatttgtttcagttcaggctagtggaagatcaaaaattacagctattattcatttgct

SEQ ID NO: 306536 - DNA, 75 bp, synthetic construct
  source 1..75: mol_type = other DNA
gctcataagatacggcggttggataactatcagtaatattattagccccgtaatgagttattttgatcggtttat

SEQ ID NO: 306537 - DNA, 75 bp, synthetic construct
  source 1..75: mol_type = other DNA
caagagtcgtacaactatctgacctttcagacaatacgttagaattacttttggcagccaaaaatgacgatggtt

SEQ ID NO: 306538 - DNA, 75 bp, synthetic construct
  source 1..75: mol_type = other DNA
gttccaaagatgcgcttgatcagatttataataatgaagatgaagagtatagtcgtattagctctgctattaatg

SEQ ID NO: 306539 - DNA, 75 bp, synthetic construct
  source 1..75: mol_type = other DNA
ggatatttattatcgtgctggcgataataccgtaaaagcaacagttatcgaagcagcagatattgcaacacgttt

SEQ ID NO: 306540 - DNA, 75 bp, synthetic construct
  source 1..75: mol_type = other DNA
catcatgatagacggctgtgttgcccgcctgtgtaagtataaaccagacgaatatgagctgatcattgctcactt

SEQ ID NO: 306541 - DNA, 75 bp, synthetic construct
  source 1..75: mol_type = other DNA
aaccctttacctgactactgcaataatccatcgggtgcatggcctattattgttgataataaaatcagtctaacc

SEQ ID NO: 306542 - DNA, 75 bp, synthetic construct
  source 1..75: mol_type = other DNA
agccctacttccggctcgctgatttatgccggttttaccctggggatgaccgttggacgcttcaccggcggttgg

SEQ ID NO: 306543 - DNA, 75 bp, synthetic construct
  source 1..75: mol_type = other DNA
tcgaccgttacagtcgcgttgccgtggttcgggccagtgcactaatgggagcgttgggtattgggctgattattt

SEQ ID NO: 306544 - DNA, 75 bp, synthetic construct
  source 1..75: mol_type = other DNA
gctattgtattaacattgttggcttcattaatatggctggtccttacaaatcatataactcaggcaacattttta

SEQ ID NO: 306545 - DNA, 75 bp, synthetic construct
  source 1..75: mol_type = other DNA
acattacagagcggtcgccaattacgcgccgatgcgatcgtcgtcgcctgtggtctgggggccaatacgttactg

SEQ ID NO: 306546 - DNA, 75 bp, synthetic construct
  source 1..75: mol_type = other DNA
gatgatgatcccgcagaactgacgctctctgcctggtcgctggaactgtggcgcacgttgacgcctcagttaccg

SEQ ID NO: 306547 - DNA, 75 bp, synthetic construct
  source 1..75: mol_type = other DNA
caattcaggaggacggcctaaaggtagttttaatattaattcctataactttaaaaaaagaatgggagtctttag

SEQ ID NO: 306548 - DNA, 75 bp, synthetic construct
  source 1..75: mol_type = other DNA
acacggctgtattattttcagccagtattacgacacggcggagtggatagcgaaagaactggccaagtccttaaa

SEQ ID NO: 306549 - DNA, 75 bp, synthetic construct
  source 1..75: mol_type = other DNA
gtttgtggggcttggcattccgaccaatacaccattccaggtcgcttacgaaaaagcggaagagttcagtaagtt

SEQ ID NO: 306550 - DNA, 75 bp, synthetic construct
  source 1..75: mol_type = other DNA
ttgggagcatgagcatgaaaatgttctccgcgccgccatgattgtcttcctcatgatgcaggaaaatcagaatgg

SEQ ID NO: 306551 - DNA, 75 bp, synthetic construct
  source 1..75: mol_type = other DNA
gtggtgttgtcgaaaggcgtaccgcaggccagccacaaaatagcacaggaataccgtgttcccgttgatgttgat

SEQ ID NO: 306552 - DNA, 75 bp, synthetic construct
  source 1..75: mol_type = other DNA
ttggacattcgttcgttgttattgatgagcatcaacatcgaaatctcaaaccaaatacagaacctgtaaacatcc

SEQ ID NO: 306553 - DNA, 75 bp, synthetic construct
  source 1..75: mol_type = other DNA
ctccctgaatgataatcaggatctcccggcaaccacgattgcgttaggtgatgtctatctcaatgaactggccaa

SEQ ID NO: 306554 - DNA, 75 bp, synthetic construct
  source 1..75: mol_type = other DNA
tcagctttatgatcccaaccatacagcaactcatttacgagcagagtttaacaaatttaacttagctaaaataaa

SEQ ID NO: 306555 - DNA, 75 bp, synthetic construct
  source 1..75: mol_type = other DNA
gaagaagaaaaggctattaatgtgcctgctattatttattttgttgaaaacggttcatggggagatattattttt

SEQ ID NO: 306556 - DNA, 75 bp, synthetic construct
  source 1..75: mol_type = other DNA
aaaaataattttttaaagcttctatataagggagaaatgataatcaacactacacaatttattacttccagcaag

SEQ ID NO: 306557 - DNA, 75 bp, synthetic construct
  source 1..75: mol_type = other DNA
cgctgaaagcaaactcaatgatattgccatcaaagaatcagaagcactggtggacagcgccatcgaggcggggaa

SEQ ID NO: 306558 - DNA, 75 bp, synthetic construct
  source 1..75: mol_type = other DNA
tggcgctctgctttcagcttcctgaccttaccgatgatgcattgccggaatggctgccgatgataccggcgggaa

SEQ ID NO: 306559 - DNA, 75 bp, synthetic construct
  source 1..75: mol_type = other DNA
aggcggatagattttgtgaatttattaccatagacaataacccactccgcgccgccatgattgtctttctcatga

SEQ ID NO: 306560 - DNA, 75 bp, synthetic construct
  source 1..75: mol_type = other DNA
cgctactgttgatcatcggaataaatacgcaaagtctggccggttccagtacgttgaacgtgacggtgaggacaa

SEQ ID NO: 306561 - DNA, 75 bp, synthetic construct
  source 1..75: mol_type = other DNA
gggtattaaaggatatccaagaagtcgaagatgaagcaatgaaagtgatacggaatagtacagagcataatctcg

SEQ ID NO: 306562 - DNA, 75 bp, synthetic construct
  source 1..75: mol_type = other DNA
cttcatgatgtgctggatatgagtaaccataatcatccaaaagcagatctttcaaaaggtcagtatggttgtgtc

SEQ ID NO: 306563 - DNA, 75 bp, synthetic construct
  source 1..75: mol_type = other DNA
tttgatgaaatcattccccaggccaccagccgctttgattttaatactcagacgctgcatctttcctttccatag

SEQ ID NO: 306564 - DNA, 75 bp, synthetic construct
  source 1..75: mol_type = other DNA
aagaaaaacatcaagcggtgcagctaaaatcaaagattttgaaaaaaagatagtgcgtaaatatctaacgaaaat

SEQ ID NO: 306565 - DNA, 75 bp, synthetic construct
  source 1..75: mol_type = other DNA
ccgtatccctggaaagcgccaccggaaacatcagtaacctaacccggacagaacagtgggcgatgaacaacggat

SEQ ID NO: 306566 - DNA, 75 bp, synthetic construct
  source 1..75: mol_type = other DNA
tgggggcactaatctcacttcttgaactgattcgctaccttctccagttgaggggtttgagggccaatggaacga

SEQ ID NO: 306567 - DNA, 75 bp, synthetic construct
  source 1..75: mol_type = other DNA
ccatagcatggagaaaacgggtgattgataaagcaatcattgttcttggggcgttaattgcgttgctggaactga

SEQ ID NO: 306568 - DNA, 75 bp, synthetic construct
  source 1..75: mol_type = other DNA
atgaaatcattccccaggccaccagccgctttgattttaatactcagacgctgcatctttcctttccacaggcgg

SEQ ID NO: 306569 - DNA, 75 bp, synthetic construct
  source 1..75: mol_type = other DNA
ccggggcagcagtatgatgaggagtccggcctgtattacaaccgccaccgctattatgacccgctgcaggggcgg

SEQ ID NO: 306570 - DNA, 75 bp, synthetic construct
  source 1..75: mol_type = other DNA
atggtttatacgcatgaaatgctttgtgaggcgcgtcgggcattacatgaactgatgatcgggcgtgctgtggtt

SEQ ID NO: 306571 - DNA, 75 bp, synthetic construct
  source 1..75: mol_type = other DNA
atgatttatacgcatgagatgctttgtgatgcccgccgggcattacatgaactgatgatcggacgtgctgtggtt

SEQ ID NO: 306572 - DNA, 75 bp, synthetic construct
  source 1..75: mol_type = other DNA
tccactgccacaccggataaaaaccacctggataccggaacgctgggtttcagtgaccttcacaacgaagcggat

SEQ ID NO: 306573 - DNA, 75 bp, synthetic construct
  source 1..75: mol_type = other DNA
aaaagcggaggttttctcagtaagaaaaccacccgcaccatcagtgaggacagtgccacccgtgaagcaggctcc

SEQ ID NO: 306574 - DNA, 75 bp, synthetic construct
  source 1..75: mol_type = other DNA
aagagccgctggtcgaaagtcgctatctttacgacccgctgggccgcagggtggcaaaacgggtatggcggcgtg

SEQ ID NO: 306575 - DNA, 75 bp, synthetic construct
  source 1..75: mol_type = other DNA
actgattcgctaccttctccagttgaggggtttgagggccaatggaacgaaaacgtacgctaagaagttaattca

SEQ ID NO: 306576 - DNA, 75 bp, synthetic construct
  source 1..75: mol_type = other DNA
aatattattttctttaatgctaatagtttcaccaggcgtggtggcaagcgagaaagcgcatgaattgtatgacag

SEQ ID NO: 306577 - DNA, 75 bp, synthetic construct
  source 1..75: mol_type = other DNA
gcgtggggaaaggcggtcagcaccacgcagggcgggctgacgcgcagtatggaatacgaccttgccggacgcatc

SEQ ID NO: 306578 - DNA, 75 bp, synthetic construct
  source 1..75: mol_type = other DNA
actggtgcggtacacgtatacggaagccggtgaactgctggcggtatatgaccgcagcaatacgcaggtgcgcgc

SEQ ID NO: 306579 - DNA, 75 bp, synthetic construct
  source 1..75: mol_type = other DNA
gtgatatatataaaatattttttaaaattgtggctttgaataattcgattgttgtgagcgaaaatatgttcactc

SEQ ID NO: 306580 - DNA, 75 bp, synthetic construct
  source 1..75: mol_type = other DNA
aaattaaatgtagaaaagaaaccggacattaacgacatcatcaatgtggctattttagaaacttcttatctgcaa

SEQ ID NO: 306581 - DNA, 75 bp, synthetic construct
  source 1..75: mol_type = other DNA
attcggttgttggtactaaacagggatatgataagattcgtggtaataatttagataataccttttcccttggaa

SEQ ID NO: 306582 - DNA, 75 bp, synthetic construct
  source 1..75: mol_type = other DNA
aactgaacgctgggacgcgatccgctctgcctttgccggaatgttgaacagtaatattgaagaagttttcggcga

SEQ ID NO: 306583 - DNA, 75 bp, synthetic construct
  source 1..75: mol_type = other DNA
gaacgttgcccggatgatgtgtataacctgttcactggctggggcgttgtgcctgtaccgggtgatgtgtcgccg

SEQ ID NO: 306584 - DNA, 75 bp, synthetic construct
  source 1..75: mol_type = other DNA
ggcaatgcaggggagagcaccgatggcagtttgtatccggcgctcatctgctgtgagtgttctgcctttcaggcc

SEQ ID NO: 306585 - DNA, 75 bp, synthetic construct
  source 1..75: mol_type = other DNA
aaatgacaagaatttagttattttacgtataaaaggttattttaaatacccaccaggaatccagaaggattttat

SEQ ID NO: 306586 - DNA, 75 bp, synthetic construct
  source 1..75: mol_type = other DNA
aactatttcgcacgcattatcaagtagcagaagttgctaagatgctaaattgcgaagaggcggatgttttttatc

SEQ ID NO: 306587 - DNA, 75 bp, synthetic construct
  source 1..75: mol_type = other DNA
aaaaaggtttaatattttcttaattgtacttcaaacaagttttattctgtttatttttgcgactggttttggaag

SEQ ID NO: 306588 - DNA, 75 bp, synthetic construct
  source 1..75: mol_type = other DNA
tccaccagaacctgatgagcatgccggtcgcggcttccttgggggatggtttgaatctgatgcagcccgtcagga

SEQ ID NO: 306589 - DNA, 75 bp, synthetic construct
  source 1..75: mol_type = other DNA
tttggtaataaccatattgcaaacaaagcacaaaactttgaagcagtagcacaatatcagtttgacttcggtctg

SEQ ID NO: 306590 - DNA, 75 bp, synthetic construct
  source 1..75: mol_type = other DNA
ttcctgtcctctgttgacgaaaaaatcacgcttttagataaacaatacaaacaactgtgccagtataaaaaaggc

SEQ ID NO: 306591 - DNA, 75 bp, synthetic construct
  source 1..75: mol_type = other DNA
tgggaagagatacctctctatgctatcccaccagatgcacgaaaacgtttgagagagaaaaacccttcaatgcaa

SEQ ID NO: 306592 - DNA, 75 bp, synthetic construct
  source 1..75: mol_type = other DNA
tcagaccccctgggagatgaaattcgctcaatcctcgatggccatatctatctgagtcgcaaactcgctgggcaa

SEQ ID NO: 306593 - DNA, 75 bp, synthetic construct
  source 1..75: mol_type = other DNA
acagcgaatgcgatgaaatgcttgatgcggtccggaaattagaaagaacgttgacggaacacggcttcaggcacc

SEQ ID NO: 306594 - DNA, 75 bp, synthetic construct
  source 1..75: mol_type = other DNA
tggaagccagtatgtttatagatgaaagctctataaagatgataaataaacaaaccgcggaggagaaggggcatg

SEQ ID NO: 306595 - DNA, 75 bp, synthetic construct
  source 1..75: mol_type = other DNA
ggaaattattatcgcatatttttgatgatgtgctatttccagcaatatcctacggggctgttttcattttagggt

SEQ ID NO: 306596 - DNA, 75 bp, synthetic construct
  source 1..75: mol_type = other DNA
tgctccctcgggacaatagtactgttgctggttttgatggccaatcgagtgcagtaaacgtattaggacttgtcg

SEQ ID NO: 306597 - DNA, 75 bp, synthetic construct
  source 1..75: mol_type = other DNA
tgtatgcaatatataattcaataagaaatcgattaaatcttttattgcattttatattagttacaatcaggtact

SEQ ID NO: 306598 - DNA, 75 bp, synthetic construct
  source 1..75: mol_type = other DNA
aaactctttggtcatccccgtttccataaatatcaagattggttcatgtatgaccgtatagaccctagccgaggt

SEQ ID NO: 306599 - DNA, 75 bp, synthetic construct
  source 1..75: mol_type = other DNA
atcctcgcctggattcggaatactgactgggcgaagattggatttaaaaatgattcggatgcagacaccgattcc

SEQ ID NO: 306600 - DNA, 75 bp, synthetic construct
  source 1..75: mol_type = other DNA
ttatgtggtacgattagtgcttttattatctcaaatattaaagagaaatgtatatttttaataattttcattttt

SEQ ID NO: 306601 - DNA, 75 bp, synthetic construct
  source 1..75: mol_type = other DNA
ttaaccagaacaaaaaatcaatcacattaaaagaggtgaacgctatgagctttaaagaaacccatttcgacggac

SEQ ID NO: 306602 - DNA, 75 bp, synthetic construct
  source 1..75: mol_type = other DNA
gaacttagcgccgagcaactcttaagcaagctgtggctatgggaaggcaaagcagaaagctatggctgggggagt

SEQ ID NO: 306603 - DNA, 75 bp, synthetic construct
  source 1..75: mol_type = other DNA
tattctctagccaagactttaaatttattgaactttctgatgacttctgtacaggatccagcatcatgccgcaga

SEQ ID NO: 306604 - DNA, 75 bp, synthetic construct
  source 1..75: mol_type = other DNA
tctttccgagggaagaatgatgaggtcgtaaaatgttcaattggagaacggactattagggaaggtgcgaacaag

SEQ ID NO: 306605 - DNA, 75 bp, synthetic construct
  source 1..75: mol_type = other DNA
attgaagcattaggtgatcgaggtctgatcaggaaaatgagtgcgacttacatttttcagcctatagaaccactg

SEQ ID NO: 306606 - DNA, 75 bp, synthetic construct
  source 1..75: mol_type = other DNA
gtttgccaacctgggtcttcccggaacgggactgagttaccgcacccggattgacagaacagcacgggaaagagt

SEQ ID NO: 306607 - DNA, 75 bp, synthetic construct
  source 1..75: mol_type = other DNA
tcagcttatcatactcatggtgcagatagtcatggagaatattgggacgaaatattttcaggtaaagatgagaaa

SEQ ID NO: 306608 - DNA, 75 bp, synthetic construct
  source 1..75: mol_type = other DNA
ttcgccgccagctttctcttcccgtaccgctgctaccggtggatttactgcgtatcccgctgttttcactttcta

SEQ ID NO: 306609 - DNA, 75 bp, synthetic construct
  source 1..75: mol_type = other DNA
ggtgatatcggcgcatcgttatttagtgcggcagggccggggaatcgaccagctggtgtcatgccgcaaaccaag

SEQ ID NO: 306610 - DNA, 75 bp, synthetic construct
  source 1..75: mol_type = other DNA
aagatcacgaccgcatcaaagcacaaaaagatctgaaagctgcaatggataaaaaagtgaatgagatcctggatt

SEQ ID NO: 306611 - DNA, 75 bp, synthetic construct
  source 1..75: mol_type = other DNA
ctccgtttctgcggtcacgattggcgcaatgaccatcagtgaaaaaatcgcactggccgggctgctgctgggtgc

SEQ ID NO: 306612 - DNA, 75 bp, synthetic construct
  source 1..75: mol_type = other DNA
agaccgcagaaagctacaccgaaacaaagcagggcttggagatcattgcggcttcggtaacgcctcttatagggc

SEQ ID NO: 306613 - DNA, 75 bp, synthetic construct
  source 1..75: mol_type = other DNA
ttgttcatcatggctgcggggcttttttccctggttctgctgcccgcgtcacctgcggatatcaatattatctgg

SEQ ID NO: 306614 - DNA, 75 bp, synthetic construct
  source 1..75: mol_type = other DNA
cttgatcgtacctggtgggaagagggcttcatttcatgggacgaagcctcggaattgattactcccaacgcggta

SEQ ID NO: 306615 - DNA, 75 bp, synthetic construct
  source 1..75: mol_type = other DNA
ataagactatagctacacaaagagcccttttatacaacagaaagggaggacagccggcagagcaaaagatgctca

SEQ ID NO: 306616 - DNA, 75 bp, synthetic construct
  source 1..75: mol_type = other DNA
agtcaatatttattcatggaatgaaaatcagtttacagcagcgtattccaggagtgagtattcaggggccagtca

SEQ ID NO: 306617 - DNA, 75 bp, synthetic construct
  source 1..75: mol_type = other DNA
acatagtgcttgcaacttataatggcgaaaaatatatttcagagcaaataaaatcaatacttaacatgtcaggct

SEQ ID NO: 306618 - DNA, 75 bp, synthetic construct
  source 1..75: mol_type = other DNA
gggctgattttacagctagcatttcatcgtgtagggaatatatcgaacaagccaattgtcgtagtaatactctga

SEQ ID NO: 306619 - DNA, 75 bp, synthetic construct
  source 1..75: mol_type = other DNA
gaatgcatccttaaccaggatctttggggagattttcccgttacacaggcagacgatcccgtcggggcgatggtt

SEQ ID NO: 306620 - DNA, 75 bp, synthetic construct
  source 1..75: mol_type = other DNA
ctgatctgcttccccttcttaatactggtagacttgactgtgccatcggaacactacttaacgacgaactgcctt

SEQ ID NO: 306621 - DNA, 75 bp, synthetic construct
  source 1..75: mol_type = other DNA
atgaacgtcctaatttatgcacgagcctctaccagagaacaagattccacacgtgctgtcccggcgttacgtgag

SEQ ID NO: 306622 - DNA, 75 bp, synthetic construct
  source 1..75: mol_type = other DNA
taactctcgaggaatgttacagaatagaacactcatagaaaaaatacgggataaattaattcgtaaaaatatttt

SEQ ID NO: 306623 - DNA, 75 bp, synthetic construct
  source 1..75: mol_type = other DNA
agtcaatatttattcatggaatgaaaatcagtttacagcagcgtattccaggagtgagtattcagggggcggtaa

SEQ ID NO: 306624 - DNA, 75 bp, synthetic construct
  source 1..75: mol_type = other DNA
agtcaatatttattcatggaatgaaaatcagtttacagcagcgtattccaggagtgagtatgagtgagtattcag

SEQ ID NO: 306625 - DNA, 75 bp, synthetic construct
  source 1..75: mol_type = other DNA
gatacagcagtaacagtcagcgttttgaagttacgctcaatagtaattataccgattcgtccacgcaggactttc

SEQ ID NO: 306626 - DNA, 75 bp, synthetic construct
  source 1..75: mol_type = other DNA
gcaacatggaaataaccaggtaggtgcaaaaaaaaatggactcattgaaatcgcaaaggatttttataagttaaa

SEQ ID NO: 306627 - DNA, 75 bp, synthetic construct
  source 1..75: mol_type = other DNA
atggctttcctctcttgcctgctgctgcccgcccccgcactggggctgacgctggcacaaaaactggtgaccatg

SEQ ID NO: 306628 - DNA, 75 bp, synthetic construct
  source 1..75: mol_type = other DNA
tggcgatatcgttcgcaactggcttgagaatggcgaggatttgccgacgatctgcttctgcgtgaatgttgcgca

SEQ ID NO: 306629 - DNA, 75 bp, synthetic construct
  source 1..75: mol_type = other DNA
tgacccgtcacgactgattcagattgccagtgccgacacgctgatccgtcgtgagtttcctgacaacatcgatct

SEQ ID NO: 306630 - DNA, 75 bp, synthetic construct
  source 1..75: mol_type = other DNA
acaacacagttgcatatactgggtctgggtatcccattatgttacatgcaatagacacagctaaaataagtgtct

SEQ ID NO: 306631 - DNA, 75 bp, synthetic construct
  source 1..75: mol_type = other DNA
gccgcaggtgctgccactggagacgtggtggggatgatagccacagagatgtgcgaaatatcccctggcactgtt

SEQ ID NO: 306632 - DNA, 75 bp, synthetic construct
  source 1..75: mol_type = other DNA
gattgaccgttctgaggaatcactcaacagagaaatcaaaggggtccgaaaaacgctcgcagccggacgtttccg

SEQ ID NO: 306633 - DNA, 75 bp, synthetic construct
  source 1..75: mol_type = other DNA
tagtccataccaacctcgtctcccgtgaagagtgggagcagcgccggtcagccgcggttcaggcgcaggccgaca

SEQ ID NO: 306634 - DNA, 75 bp, synthetic construct
  source 1..75: mol_type = other DNA
tctctgaaaagtttgatgagaatttaccacaaaatacaaaagataaaataaaagcgtggaataagtgtttttttg

SEQ ID NO: 306635 - DNA, 75 bp, synthetic construct
  source 1..75: mol_type = other DNA
acatagtgcttgcaacttataacggtgaaaaatacatttctgaacaaataacatcaatactcaacatgtcaggtt

SEQ ID NO: 306636 - DNA, 75 bp, synthetic construct
  source 1..75: mol_type = other DNA
ctactcatcgagctcacatatgtgtcagtttttgtgtacggggctgtcaccctgtatcgcgcgcctttccagacg

SEQ ID NO: 306637 - DNA, 75 bp, synthetic construct
  source 1..75: mol_type = other DNA
aaagggcgtttaaggaatggaataagctcgaaaagacaatccgtgagcaattcaaaaagaagctaaaaaagcttc

SEQ ID NO: 306638 - DNA, 75 bp, synthetic construct
  source 1..75: mol_type = other DNA
ggtcatccgcctgaccagtgaaaacggcagccacaccaccttccgttaccgatgtactcgaccggctgatacagg

SEQ ID NO: 306639 - DNA, 75 bp, synthetic construct
  source 1..75: mol_type = other DNA
aagtgtctttgtggaagtggggggctctgtcgctctctgttcctcttatcctgtttttggctgttttttttggtg

SEQ ID NO: 306640 - DNA, 75 bp, synthetic construct
  source 1..75: mol_type = other DNA
taaatatcgcaaagtaccgcccgagcctgttcatgctgatattccggtcggtgcagtgagtgatgtgaaagcctg

SEQ ID NO: 306641 - DNA, 75 bp, synthetic construct
  source 1..75: mol_type = other DNA
cagcaaatcgaggcgcttattcaggccttcggcggcgaagcgaatattacgcaagtggatgcctgtattacgcgt

SEQ ID NO: 306642 - DNA, 75 bp, synthetic construct
  source 1..75: mol_type = other DNA
cgccacggcaatgatgtgattcacgaagatatcctcgaccaagcaaaaattgcagctcaacgagtcagggataaa

SEQ ID NO: 306643 - DNA, 75 bp, synthetic construct
  source 1..75: mol_type = other DNA
agcacgaaatgttcgtcaaaacgctggatctgcgggaattgcagagaggtctggaacagcgtgtgcagcatatgg

SEQ ID NO: 306644 - DNA, 75 bp, synthetic construct
  source 1..75: mol_type = other DNA
ggttaaagctggcactggtacaggttttgcgctccggatggagcattgtcattctcgtcggcctgtcgctgttca

SEQ ID NO: 306645 - DNA, 75 bp, synthetic construct
  source 1..75: mol_type = other DNA
actgcgcactggcatcgtcgtatgcaggacgcttttgaagcaatttattgccgacacaatttcaaaacagctgtt

SEQ ID NO: 306646 - DNA, 75 bp, synthetic construct
  source 1..75: mol_type = other DNA
taagcctggtctttatagcatcaagcttcataacccccgccagttatgccaaagataagctaatgagcgcaagtt

SEQ ID NO: 306647 - DNA, 75 bp, synthetic construct
  source 1..75: mol_type = other DNA
gtcagccatagtaaagcgttgcagttacagtccaatggctcgaccatcaccaccacgctttcgacctacctgatg

SEQ ID NO: 306648 - DNA, 75 bp, synthetic construct
  source 1..75: mol_type = other DNA
cgagcctgatattgctcgtaatgagtgtaggtacgccaaagagttatgccagggataaactcaccagcgcaactt

SEQ ID NO: 306649 - DNA, 75 bp, synthetic construct
  source 1..75: mol_type = other DNA
gatggacgagctcttcgataaagtttggtacaaccgccatatgaacatgatgtatcacatagataatggtgatat

SEQ ID NO: 306650 - DNA, 75 bp, synthetic construct
  source 1..75: mol_type = other DNA
actttgaatgggggatgctcaatgggaagctctctgccctacgatgggtcttgggggatgagtgggacatgctcg

SEQ ID NO: 306651 - DNA, 75 bp, synthetic construct
  source 1..75: mol_type = other DNA
atgactttctacgtgtcagtgttaacaccgaatgaggtcgcttatggttcgtataactccgcaacctacaagggc

SEQ ID NO: 306652 - DNA, 75 bp, synthetic construct
  source 1..75: mol_type = other DNA
gaagcgacgtacgttgacgctaccatccgggcgacggctccatgggcacccccacagttccagttgggtcatttc

SEQ ID NO: 306653 - DNA, 75 bp, synthetic construct
  source 1..75: mol_type = other DNA
gtaggttcgagttactgccgggggtgtaataagtggcgcgacggattacagcttgcgcgggactgcggccacgac

SEQ ID NO: 306654 - DNA, 75 bp, synthetic construct
  source 1..75: mol_type = other DNA
ggaaggcgcttctggcgctggatgaagccgaaaaagaagacgagaaagaaaagaaaccggctgaagacgaggatg

SEQ ID NO: 306655 - DNA, 75 bp, synthetic construct
  source 1..75: mol_type = other DNA
ggataacagcgcgattgctggaattgagagcggagagcagcgagagctatctgcatcgtacaagtacgtcgcaga

SEQ ID NO: 306656 - DNA, 75 bp, synthetic construct
  source 1..75: mol_type = other DNA
ttaccttcggctttcgagttgaatcggatgattacagtgtggaaaaaaatgccggaatacatcttcttacaggat

SEQ ID NO: 306657 - DNA, 75 bp, synthetic construct
  source 1..75: mol_type = other DNA
acaaattcagactggaaccaacgcatgagcagtcgcagcgtttgcggcagttatgtggttgtgcccgttttgtct

SEQ ID NO: 306658 - DNA, 75 bp, synthetic construct
  source 1..75: mol_type = other DNA
tgctaagtttgaatgcatataaactgttttctttgttattgttaatagcatctgttgttttgggtgtcgctaatg

SEQ ID NO: 306659 - DNA, 75 bp, synthetic construct
  source 1..75: mol_type = other DNA
gtaacaagatatggggtataccacaaaaaccttcaaaaattgaaagcactatcaaatggtgaaaaaattttcaaa

SEQ ID NO: 306660 - DNA, 75 bp, synthetic construct
  source 1..75: mol_type = other DNA
ggcatattaataacatcccctatgaaagtgatgaattatttgagcgattaatgcctcaactcagcaatcaggata

SEQ ID NO: 306661 - DNA, 75 bp, synthetic construct
  source 1..75: mol_type = other DNA
atgaaaaaatggaccctatttttcgcgagcctgatgctgcttgtcctgaatgttgtcggcacacccaggagctat

SEQ ID NO: 306662 - DNA, 75 bp, synthetic construct
  source 1..75: mol_type = other DNA
ctgcgcccggaaacgacgctggaacagttacgtgggttaaaagcaccatttcgtgccaatgggggtgattaccgc

SEQ ID NO: 306663 - DNA, 75 bp, synthetic construct
  source 1..75: mol_type = other DNA
caaggctgttttttctacgaacgttgccctctggcaacccacggatgtgaagtccggcaatcattaacaataagg

SEQ ID NO: 306664 - DNA, 75 bp, synthetic construct
  source 1..75: mol_type = other DNA
actgacgtgtacgcggcactcattgaagaagcaaccaaagaaaacacatgaaaactcccgagcgaccgatggagg

SEQ ID NO: 306665 - DNA, 75 bp, synthetic construct
  source 1..75: mol_type = other DNA
ggctacaaaaaatgatgtccgagtgactaaagttggtcgttttcttagaagaacctctcttgatgaattacctca

SEQ ID NO: 306666 - DNA, 75 bp, synthetic construct
  source 1..75: mol_type = other DNA
tgttgaaaagttttattgaacagccatggctaggtttcgttgttaaaggtatttatgataatataaaattggata

SEQ ID NO: 306667 - DNA, 75 bp, synthetic construct
  source 1..75: mol_type = other DNA
tctttaaaaactggacgcttagcttattaattgctttaggacttttatctttagactcatcgatcgatactcgtt

SEQ ID NO: 306668 - DNA, 75 bp, synthetic construct
  source 1..75: mol_type = other DNA
gtaaaatttacttcccctggtccagttatttttcgtcaaatcagatatggaatggatggtaaaccaatacgggtt

SEQ ID NO: 306669 - DNA, 75 bp, synthetic construct
  source 1..75: mol_type = other DNA
gtgaaactgtcttcccctggtccggttatttttagacaaattcgttatgggatggatggaaaacctatcaaagtt

SEQ ID NO: 306670 - DNA, 75 bp, synthetic construct
  source 1..75: mol_type = other DNA
aaaatgcaaaagcgagttgaatatgatttagagtacattcgagaatggagtatttggctcgatattaaaattata

SEQ ID NO: 306671 - DNA, 75 bp, synthetic construct
  source 1..75: mol_type = other DNA
acacttgaaaagatggaaaaaagagttgagtatgacttgttatacatccgtggatggagtatttggctagatctt

SEQ ID NO: 306672 - DNA, 75 bp, synthetic construct
  source 1..75: mol_type = other DNA
tgttaaaatcctcagaggaagttgatgtttttatcaaaatttttgaaagttggagaaaaaaattaccggcaatat

SEQ ID NO: 306673 - DNA, 75 bp, synthetic construct
  source 1..75: mol_type = other DNA
atatttaattaataatcattgtttctcccctgacaaggttaacgaaatctgcgaacaagccagacattatttagt

SEQ ID NO: 306674 - DNA, 75 bp, synthetic construct
  source 1..75: mol_type = other DNA
cttgttgtcctcgtgatttttcagatggtaggtggtataaccgatttctatcgttcgtggcgtggtattaaaatt

SEQ ID NO: 306675 - DNA, 75 bp, synthetic construct
  source 1..75: mol_type = other DNA
gtagatatcaattactgtgggaaccttgatgaattaatcgttgatgctcgcaatggtaaaattgatagaatatat

SEQ ID NO: 306676 - DNA, 75 bp, synthetic construct
  source 1..75: mol_type = other DNA
atttagtctgtttttttaatgccttgacctttcagacctctgatgccatgatgacacttatatcactagttattt

SEQ ID NO: 306677 - DNA, 75 bp, synthetic construct
  source 1..75: mol_type = other DNA
tgaggcgattataaagactgtagtaagtcaactaactgatacaacttgttctgtccttctcatacccgatatatt

SEQ ID NO: 306678 - DNA, 75 bp, synthetic construct
  source 1..75: mol_type = other DNA
aggggtatggaaggactttagctgaagcaaaactcacatgcaaaaatgttatatgcacacggatctctgctttcc

SEQ ID NO: 306679 - DNA, 75 bp, synthetic construct
  source 1..75: mol_type = other DNA
cttcaatattcttcattcccgtatcgaagagatgaacggcgtaccggtggtgccgctgtatgacacgccgctttc

SEQ ID NO: 306680 - DNA, 75 bp, synthetic construct
  source 1..75: mol_type = other DNA
cgcacgagtgaaaaaactggtccatcaactggcggataccacctgttcggtgctgctgatccctgatgtctttac

SEQ ID NO: 306681 - DNA, 75 bp, synthetic construct
  source 1..75: mol_type = other DNA
accttcgcttttgaagattactcccgcagcgctgcgagcgttaagcagtgtgattgttgcagcgggcagggattt

SEQ ID NO: 306682 - DNA, 75 bp, synthetic construct
  source 1..75: mol_type = other DNA
cctcagtgcaagggtaagaaggttgtaagttgtgcctgtaaagattgccatggacgcgggaaaaccgttaatcag

SEQ ID NO: 306683 - DNA, 75 bp, synthetic construct
  source 1..75: mol_type = other DNA
atcacttcgccaaatcgacaatgattagcgactctccgcgtgcaacggcgtcagactcattaaccggaacggata

SEQ ID NO: 306684 - DNA, 75 bp, synthetic construct
  source 1..75: mol_type = other DNA
gtttaataaatagaataaatacatggagtactattattaattatttcgattcctatcaagttgcgatactaggac

SEQ ID NO: 306685 - DNA, 75 bp, synthetic construct
  source 1..75: mol_type = other DNA
attatcatacgttagagaaaaattcagtggtgaaaatatgttaaaaggttacttaaggatatattattcaaatga

SEQ ID NO: 306686 - DNA, 75 bp, synthetic construct
  source 1..75: mol_type = other DNA
taacgggaggaattattggtacgctggtggtggcaatgtatctgccaattttccatttaggcgatgcgatgagtg

SEQ ID NO: 306687 - DNA, 75 bp, synthetic construct
  source 1..75: mol_type = other DNA
tgatggagagcttccgtaatcagccgtggttagggtttgaagtggtgggcgtttaccacgacccgaaaccgggcg

SEQ ID NO: 306688 - DNA, 75 bp, synthetic construct
  source 1..75: mol_type = other DNA
ttttccgccagactcgctatggcatggatggcaagccgatcaaagtgtggaagttccgttccatgaaagtgatgg

SEQ ID NO: 306689 - DNA, 75 bp, synthetic construct
  source 1..75: mol_type = other DNA
gtgctggctaaagccaacgaactgcgttcgggggatgtgctggcgggcgtcgcagcggcaagctcacaggagcgc

SEQ ID NO: 306690 - DNA, 75 bp, synthetic construct
  source 1..75: mol_type = other DNA
actggctgaccgtcaggctgcccaccatgaacagcaggaaaccatccgtaacggggacaacgccacggatgaata

SEQ ID NO: 306691 - DNA, 75 bp, synthetic construct
  source 1..75: mol_type = other DNA
aaatggcagcatcaagttgaccgggatcgggaacggtagcacctccgggattctgtttgctggcaacaacacgct

SEQ ID NO: 306692 - DNA, 75 bp, synthetic construct
  source 1..75: mol_type = other DNA
agtacgagtgggaatgccatcaaccttacaggcactgccacgctgaatgccacgaataacattactcttaccggg

SEQ ID NO: 306693 - DNA, 75 bp, synthetic construct
  source 1..75: mol_type = other DNA
ttgacaagcgccgcaacgccctggtggtggtcagcgaaatcacccccgggacgggcaggacaaaagccacaggca

SEQ ID NO: 306694 - DNA, 75 bp, synthetic construct
  source 1..75: mol_type = other DNA
ttcgcgtaatacgcccctacgcgcattgcgtagcggcgtgtacgccaacggtggagatatgtttgtccgctggta

SEQ ID NO: 306695 - DNA, 75 bp, synthetic construct
  source 1..75: mol_type = other DNA
gactactgggctgaaatggaagtttcaggtcgtaattatggcgatggtcagaaaataggtggccgtctttctggc

SEQ ID NO: 306696 - DNA, 75 bp, synthetic construct
  source 1..75: mol_type = other DNA
acctcagattgcgaatactcaatcgaaggaggtgtttatgctctgtttaggtataccggtaagcctgctggctat

SEQ ID NO: 306697 - DNA, 75 bp, synthetic construct
  source 1..75: mol_type = other DNA
agaacttagaaggttaataatatcaaataaatatgatgtgattatatttcaattggttaggttggaatatttaat

SEQ ID NO: 306698 - DNA, 75 bp, synthetic construct
  source 1..75: mol_type = other DNA
gaatgtgttttcttttttccatctgtcacaacttgttgcgccagaaatggaaaaaatggcggtggcgttattctg

SEQ ID NO: 306699 - DNA, 75 bp, synthetic construct
  source 1..75: mol_type = other DNA
ctcttgtgctcgatgcgctggcggcaatcaaagcgctgacaatccgtgtgaagggactagagaaacgggtggtgg

SEQ ID NO: 306700 - DNA, 75 bp, synthetic construct
  source 1..75: mol_type = other DNA
cggcgtgaacatcagcgctaacatcacgaacggcaccatcaccggtagtgcaaccggtaacggcaccggcgtgaa

SEQ ID NO: 306701 - DNA, 75 bp, synthetic construct
  source 1..75: mol_type = other DNA
tcttaccgaacctgggatcaatgagaaataccgagttatccagaaagatattagtacaaagcaagattcaatggg

SEQ ID NO: 306702 - DNA, 75 bp, synthetic construct
  source 1..75: mol_type = other DNA
gttttctatatatcaattcgggaaaaatccattgtggagccgaacgtaaaacattaccagtaatgacatttaatg

SEQ ID NO: 306703 - DNA, 75 bp, synthetic construct
  source 1..75: mol_type = other DNA
ctgataacgcggatgttcgtaccggctggataatgacgctggccgatgcccgttacaatcaacaagccctgaccg

SEQ ID NO: 306704 - DNA, 75 bp, synthetic construct
  source 1..75: mol_type = other DNA
ctcggcaatatgccagcacctatcctgaccgaagagggccgcctggtcttcagactccagttcatgtgcgtctac

SEQ ID NO: 306705 - DNA, 75 bp, synthetic construct
  source 1..75: mol_type = other DNA
caaaaaaaaatgctttacgtcaaatttcctataatttttcaattgttattatcgcatttgcggtattgatttctt

SEQ ID NO: 306706 - DNA, 75 bp, synthetic construct
  source 1..75: mol_type = other DNA
taacgttgatctggctgccagcggtgtggcgtacaaagagcgattgaacatacctgtcatagctgaacaggtagc

SEQ ID NO: 306707 - DNA, 75 bp, synthetic construct
  source 1..75: mol_type = other DNA
atggatccagtaaccctcaccaccattgcctccgttctgatgaaggccggaccgtcattactgcgtaccgtggga

SEQ ID NO: 306708 - DNA, 75 bp, synthetic construct
  source 1..75: mol_type = other DNA
tggaggtggagcggcagaagctggtgctggctgaccagcaggccgcacaccacgaacagcaggaaaccatccgca

SEQ ID NO: 306709 - DNA, 75 bp, synthetic construct
  source 1..75: mol_type = other DNA
caactcaatgtatggcaatcctgaatttgttgtgatgccttgtcgtgatcatggcgatttcaatgtggctcagga

SEQ ID NO: 306710 - DNA, 75 bp, synthetic construct
  source 1..75: mol_type = other DNA
acccggcaaattcagccaatgtgcacgtggtgcatgcggggctggtacaaaaccgggaacggctgcacctacgcc

SEQ ID NO: 306711 - DNA, 75 bp, synthetic construct
  source 1..75: mol_type = other DNA
tggcgcgtggccgtatgaactgaccggcatatctgtcagcagtgacggccagagttcacggccttctctcaccgt

SEQ ID NO: 306712 - DNA, 75 bp, synthetic construct
  source 1..75: mol_type = other DNA
cttgcctacgtgtaccattcgcagaataaaaactgggatgcattgcttgtcgccagtcaggcggttgacgttgat

SEQ ID NO: 306713 - DNA, 75 bp, synthetic construct
  source 1..75: mol_type = other DNA
aaatgggggcatcatatgggtgatcaagtcatagtaatggtcaccagaataataaaaaaatccattaggaaagat

SEQ ID NO: 306714 - DNA, 75 bp, synthetic construct
  source 1..75: mol_type = other DNA
aaatgggggcatcatatgggtgatcaagtcatagtaatggtcaccagaataataaaaaatccattaggaaagatg

SEQ ID NO: 306715 - DNA, 75 bp, synthetic construct
  source 1..75: mol_type = other DNA
gtggatcactattgcaccgttcgtgacacattccctgattaccactataaaaaggttgctattgagtatgttgct

SEQ ID NO: 306716 - DNA, 75 bp, synthetic construct
  source 1..75: mol_type = other DNA
gcacccgaccgcaggcatgctgctaacccacccgagccgcgccgttgaggtgagctactttggctttgacgagga

SEQ ID NO: 306717 - DNA, 75 bp, synthetic construct
  source 1..75: mol_type = other DNA
agagattgtcagcaagaaagaaagtccgttcagcgaatggtctgaggcgctgcgcaaaaccgctggcatcctgga

SEQ ID NO: 306718 - DNA, 75 bp, synthetic construct
  source 1..75: mol_type = other DNA
gctggtcacccgccagcagctgagcaccgcgctgaatattcaaaaagcgcttctggcacacccgaccgccggcat

SEQ ID NO: 306719 - DNA, 75 bp, synthetic construct
  source 1..75: mol_type = other DNA
gctcaggtaccactgggtggttcagtcgaggaaactggccagagctacatgtcgctgccagaagagtaccagcgg

SEQ ID NO: 306720 - DNA, 75 bp, synthetic construct
  source 1..75: mol_type = other DNA
cgggcgaatggccagcgccgatcactaccgattacacagatgaactgaacgacttcgacctgcgccgcctcgaag

SEQ ID NO: 306721 - DNA, 75 bp, synthetic construct
  source 1..75: mol_type = other DNA
caggctacacacacacgctcgatacactcgacagtgaaatagctctggccaccctgcctgatgatttcaatgtct

SEQ ID NO: 306722 - DNA, 75 bp, synthetic construct
  source 1..75: mol_type = other DNA
catcagggaaataataatatttatgtcagatccctgctggatatgctttccgataacatcgaagagctgacccgt

SEQ ID NO: 306723 - DNA, 75 bp, synthetic construct
  source 1..75: mol_type = other DNA
aatcgggatgttgaccatgcgcgcctgttctactggctacgttttgccaaccaaatgagctatacgcgcattgtg

SEQ ID NO: 306724 - DNA, 75 bp, synthetic construct
  source 1..75: mol_type = other DNA
taccgcaatctgcgtcctctgtatcccaaaacggtaattcgtatccgcaaaggtagctctaacggtgtggaactg

SEQ ID NO: 306725 - DNA, 75 bp, synthetic construct
  source 1..75: mol_type = other DNA
atgcatgacccggcatacccggagaatctgcccggtgcgccactggcgcggtacacgtatacggaagccggtgaa

SEQ ID NO: 306726 - DNA, 75 bp, synthetic construct
  source 1..75: mol_type = other DNA
tgacgggcgtggtggacggtttcgggctttcactggctttccaccgcgaggccgcaggcgaactggctggcgaaa

SEQ ID NO: 306727 - DNA, 75 bp, synthetic construct
  source 1..75: mol_type = other DNA
tcagcagggaaacgttcttgttcgttccatgctgatggaatacagcggagccagggaagcgaccgaaattaacac

SEQ ID NO: 306728 - DNA, 75 bp, synthetic construct
  source 1..75: mol_type = other DNA
ctcgatttagagattgcgtgtgcccttctgcctatggacttcaaccacttcgagatcccgggcagcattcttcgt

SEQ ID NO: 306729 - DNA, 75 bp, synthetic construct
  source 1..75: mol_type = other DNA
gctcgatggcttcgtgttctgggtgaaagcctcggtcctgtcagacgatccgaacaatgagccggatacggtaga

SEQ ID NO: 306730 - DNA, 75 bp, synthetic construct
  source 1..75: mol_type = other DNA
ttaatgaacctagaagcgtagccattactattgatggttatattcccgttgatataaagattattgattctaaaa

SEQ ID NO: 306731 - DNA, 75 bp, synthetic construct
  source 1..75: mol_type = other DNA
aatttctttgcctggatggaacaaattgatcaggctacacctgtaacgccaggcgcagttacagcgaatgcgacc

SEQ ID NO: 306732 - DNA, 75 bp, synthetic construct
  source 1..75: mol_type = other DNA
tttgccgatcttaccggagccaatccgacgtcaattatcagcgtggtaatttttgccgcattcctcggcgtagct

SEQ ID NO: 306733 - DNA, 75 bp, synthetic construct
  source 1..75: mol_type = other DNA
ttgcaatgccgtcggattccacacggttagctcacaggaataggccatcttatcgggccatgatggctgaacagc

SEQ ID NO: 306734 - DNA, 75 bp, synthetic construct
  source 1..75: mol_type = other DNA
tctatctggacgagaagcaaaaccagtatcagctggtatcggaagatgtcacgctttcggtcaccggcctgcgta

SEQ ID NO: 306735 - DNA, 75 bp, synthetic construct
  source 1..75: mol_type = other DNA
gcatatccatttcgtaccttttgcaatactattttttatgggatctaggtttaaaatatgtgtaagaagatatta

SEQ ID NO: 306736 - DNA, 75 bp, synthetic construct
  source 1..75: mol_type = other DNA
gactcgcagaaggtggggcggcaggtgtggtgttagatttgcatcttcgcgcgctggaaaaagggctgtcgtcac

SEQ ID NO: 306737 - DNA, 75 bp, synthetic construct
  source 1..75: mol_type = other DNA
agaaaaccatcgtcaaagagcgctcctcagtgctggacatgggaaacctggtacatgcgctggcgttgcagccag

SEQ ID NO: 306738 - DNA, 75 bp, synthetic construct
  source 1..75: mol_type = other DNA
tccgacctccagcgaacaaacgctgaatttctttgcctggatggaacaaattgatcaggctacacctgtaacgcc

SEQ ID NO: 306739 - DNA, 75 bp, synthetic construct
  source 1..75: mol_type = other DNA
aactgaaagagggtaatctctttgcggaacagtgcccgtcgcgcgaggtgttgaaacacgtcaccagccgttggg

SEQ ID NO: 306740 - DNA, 75 bp, synthetic construct
  source 1..75: mol_type = other DNA
atgttataatgacagtagattcaatccttttcttgggttgcattattattggtgttttgggatttaataccaata

SEQ ID NO: 306741 - DNA, 75 bp, synthetic construct
  source 1..75: mol_type = other DNA
cgttaatggcatctgctatgtcattctcatctcacgctgctacaacatcagcaagcgtgaatattaccggctcga

SEQ ID NO: 306742 - DNA, 75 bp, synthetic construct
  source 1..75: mol_type = other DNA
tatgcaatccattgaaatcaaggagctgcagtccacaaaatgtgtgacatatgatttgaaatatattcttaataa

SEQ ID NO: 306743 - DNA, 75 bp, synthetic construct
  source 1..75: mol_type = other DNA
tattgcactaataaacgaattggctatcatcttcaataaattaggtattgatactgaggatgttttaaaggcagc

SEQ ID NO: 306744 - DNA, 75 bp, synthetic construct
  source 1..75: mol_type = other DNA
aaaaatttataccactaaaccttctaagaaatatgatggcataatttttgctgtcgcccatgagcaatttaaaaa

SEQ ID NO: 306745 - DNA, 75 bp, synthetic construct
  source 1..75: mol_type = other DNA
tttcatagaatccggtattggatcgcaatttcagttaacctacgacgaatggcatatctttgtctgggtggaact

SEQ ID NO: 306746 - DNA, 75 bp, synthetic construct
  source 1..75: mol_type = other DNA
aaccaaaattcaaaaatgatattgctatattaaatgcagatattgcctctttaaaatttgctttagatctaaata

SEQ ID NO: 306747 - DNA, 75 bp, synthetic construct
  source 1..75: mol_type = other DNA
tatggatatacatgaaaaagtagacaataaccgagagaagaaaccagaaacaaaccgcaagaaaaaacgtaaata

SEQ ID NO: 306748 - DNA, 75 bp, synthetic construct
  source 1..75: mol_type = other DNA
gcctgctaacggcatttaccagccactccttaaaatctcccgccgttccaccaaccgtggtacaaatccaggcca

SEQ ID NO: 306749 - DNA, 75 bp, synthetic construct
  source 1..75: mol_type = other DNA
aataacacaactgatccagagctaattgctgctatcacctactttaaagaacacccacccaaaaaacaaatcata

SEQ ID NO: 306750 - DNA, 75 bp, synthetic construct
  source 1..75: mol_type = other DNA
agcaaaatttctttttttgttaatccgccgtgtaagaaacaatctttttcacggaggaaaatttaacgggaaatg

SEQ ID NO: 306751 - DNA, 75 bp, synthetic construct
  source 1..75: mol_type = other DNA
tgcttacgtttagcagcacactgattcagccaacctctgtagatgaaaacacaataaccgtaatgattgggcctg

SEQ ID NO: 306752 - DNA, 75 bp, synthetic construct
  source 1..75: mol_type = other DNA
gttaaaagaaatagaacgtcgctatggcgtgaaagtgctgtacgcctgcgaatcaggcagccgcggctgtaatgc

SEQ ID NO: 306753 - DNA, 75 bp, synthetic construct
  source 1..75: mol_type = other DNA
cttacgagtcaatattcagcgataactgtgatcctcatgttcgatggcgttttgctgaagagaaacggcgtcggg

SEQ ID NO: 306754 - DNA, 75 bp, synthetic construct
  source 1..75: mol_type = other DNA
atgtatgccgttgaaggtgcgacaaacgggtttaactcacttggcacatctgtttactgggctattgtgacggtc

SEQ ID NO: 306755 - DNA, 75 bp, synthetic construct
  source 1..75: mol_type = other DNA
tttcttgttaaaaggtaaaactgattttcggccagcatcgaatgcccatagacgatatctaaatacgtgctttat

SEQ ID NO: 306756 - DNA, 75 bp, synthetic construct
  source 1..75: mol_type = other DNA
acattttttaaagagtgcgcgggatctataacatgtgagataatagctgaaaacatcaaaataaacgtgatgttg

SEQ ID NO: 306757 - DNA, 75 bp, synthetic construct
  source 1..75: mol_type = other DNA
cagtgcaataagtaccactatcaatggtggataccaaagtatattcgggacgggagctagcgccaccagtaccat

SEQ ID NO: 306758 - DNA, 75 bp, synthetic construct
  source 1..75: mol_type = other DNA
ggagcttgaggaggattgtatccctgtacagcgttggttaaaactaggttctctttttatgtttatcatcattac

SEQ ID NO: 306759 - DNA, 75 bp, synthetic construct
  source 1..75: mol_type = other DNA
ggccatactgcgcgtcatctgtcgccggcctggaatgccgggattcagttcagtcccgtagagacggtggttatt

SEQ ID NO: 306760 - DNA, 75 bp, synthetic construct
  source 1..75: mol_type = other DNA
aattttcctgattgggtaacattagaaaatagcgataatcaacttgatttagagcgattgcgaacattgaaggtc

SEQ ID NO: 306761 - DNA, 75 bp, synthetic construct
  source 1..75: mol_type = other DNA
tacgggtggctgttctggcgttaccacttggagtcggcaatggtctctcacgcggcatctcatcttatcttagtt

SEQ ID NO: 306762 - DNA, 75 bp, synthetic construct
  source 1..75: mol_type = other DNA
gtcgcgcctgaattgcaggctttgcccgcgctggcgcaacgcgcgctattggcgctgaaccccttgctgctcgtg

SEQ ID NO: 306763 - DNA, 75 bp, synthetic construct
  source 1..75: mol_type = other DNA
agtggcatcgatgttaattttgattggttactctgtgattgctattccaaccggcattattgccgcccagttaac

SEQ ID NO: 306764 - DNA, 75 bp, synthetic construct
  source 1..75: mol_type = other DNA
aaaccagatggacccggtatacacgccggcgcgaaaaattcacctgtaccactgcgaccatcgcggcctgccgct

SEQ ID NO: 306765 - DNA, 75 bp, synthetic construct
  source 1..75: mol_type = other DNA
acccgcaccagctgcagcagctcatccgcctgccggggcagcagtatgatgaggagtccggcctgtattataacc

SEQ ID NO: 306766 - DNA, 75 bp, synthetic construct
  source 1..75: mol_type = other DNA
aaaattggataaaaattaataatgatttcatccagcgtaatttaactgaatggttcgaaatccaaaacctactat

SEQ ID NO: 306767 - DNA, 75 bp, synthetic construct
  source 1..75: mol_type = other DNA
acattatttccagttcttggtgcatgtttgtttttaatgcattcaaatgcatctaaaggaattggaaagatcatg

SEQ ID NO: 306768 - DNA, 75 bp, synthetic construct
  source 1..75: mol_type = other DNA
gggtataacaataactttgccactaacttatctaaaaatgatcgaatcttagcgaaaacatacccactatcaaag

SEQ ID NO: 306769 - DNA, 75 bp, synthetic construct
  source 1..75: mol_type = other DNA
ccagagcttgcctatggcggcaatcctcaggagtatgtggacagccctaaacgattaaagaatattgacttttca

SEQ ID NO: 306770 - DNA, 75 bp, synthetic construct
  source 1..75: mol_type = other DNA
ttccacctctgttggggggtgttctggttgtcctgctgacgcccggagacgatcctctcagggcatttttgatat

SEQ ID NO: 306771 - DNA, 75 bp, synthetic construct
  source 1..75: mol_type = other DNA
ttggcatcagccagtttttgcatttataagactaaactctcagttcgagccatcaacaatatattttattgtttc

SEQ ID NO: 306772 - DNA, 75 bp, synthetic construct
  source 1..75: mol_type = other DNA
ggattgctgctattgctcattcgaaaataaaaagaaaaagcaatgcattatcattcattggttttttgttaataa

SEQ ID NO: 306773 - DNA, 75 bp, synthetic construct
  source 1..75: mol_type = other DNA
aaaagattggcatatgacttagcatcacgaaatatgtttcaacaagccgctttaactctaaaaaatgatagtagt

SEQ ID NO: 306774 - DNA, 75 bp, synthetic construct
  source 1..75: mol_type = other DNA
tggtatgaagcaaggagaagcccaaccaatgtaataaaaatgaataccggaagcggtaaaacttcagttgggtta

SEQ ID NO: 306775 - DNA, 75 bp, synthetic construct
  source 1..75: mol_type = other DNA
atgaagaaatattggtttttgtttctactggctttgccattttgggggcaggctaaatgtactatcaacggaaat

SEQ ID NO: 306776 - DNA, 75 bp, synthetic construct
  source 1..75: mol_type = other DNA
tttgcacgaatgaagagctgtctgattggctcgctattatagcctcaaagtatcaattacattcgatttggtttg

SEQ ID NO: 306777 - DNA, 75 bp, synthetic construct
  source 1..75: mol_type = other DNA
atgaagaactaaagaaaaatgcttggcaagtcttcgaaaaactcaatctttcaccttcagaagctcttcgccttt

SEQ ID NO: 306778 - DNA, 75 bp, synthetic construct
  source 1..75: mol_type = other DNA
atgagtactgttcaaattcgtgtagatgaagaactgaagaaaaatgcctggcaggtcttcgaaaagctcaacctt

SEQ ID NO: 306779 - DNA, 75 bp, synthetic construct
  source 1..75: mol_type = other DNA
atctacccaaaaacaggcagtttgattatgtgaatgaaagtaatgccgggaagattgttatcgactcgattaagt

SEQ ID NO: 306780 - DNA, 75 bp, synthetic construct
  source 1..75: mol_type = other DNA
tcgagctgtatgaaattcctccacatatcaaaccgaactggcaggtgtggtacgagtgcgtgctgccggaagatc

SEQ ID NO: 306781 - DNA, 75 bp, synthetic construct
  source 1..75: mol_type = other DNA
gcgcggactcacctttcagcaactgacctggccggaggatctcaataaagatctccaacaggttgaaaagctgat

SEQ ID NO: 306782 - DNA, 75 bp, synthetic construct
  source 1..75: mol_type = other DNA
ctgtagaggaactctattcattatgtgcaagaaggaatcctcaaggaattacagacgatttcctcgatgcattca

SEQ ID NO: 306783 - DNA, 75 bp, synthetic construct
  source 1..75: mol_type = other DNA
acgcgcgcatgcgcgagagtgctccaaccggtgagtcgcatggtgcgccgttgcagacagccgaacctgaatacc

SEQ ID NO: 306784 - DNA, 75 bp, synthetic construct
  source 1..75: mol_type = other DNA
gaacctctgtggtcgatgcgggtttatgatcagctccgtaaccgatggcagggagatcagttttccggttcatca

SEQ ID NO: 306785 - DNA, 75 bp, synthetic construct
  source 1..75: mol_type = other DNA
tgaaagatggcatccgccatatccgcgccctcgccaaccgggaactgaataaagaaggcgaagtcgaacgtctgc

SEQ ID NO: 306786 - DNA, 75 bp, synthetic construct
  source 1..75: mol_type = other DNA
aataagcggtttaacacgtatgaagaacttctgtgattatgcccctcgtctgcaagatatacgatggacaatcgt

SEQ ID NO: 306787 - DNA, 75 bp, synthetic construct
  source 1..75: mol_type = other DNA
acacctcaattttattggtgtaaactcgaccgcttagaggttattaatacgaaacagacgattaaaaaaggccac

SEQ ID NO: 306788 - DNA, 75 bp, synthetic construct
  source 1..75: mol_type = other DNA
acgcctcaattttattggtgtaaactcgaccgcttagaggttattaacactaagcagacaattaaaaaaggccac

SEQ ID NO: 306789 - DNA, 75 bp, synthetic construct
  source 1..75: mol_type = other DNA
aaacagaagttgtttatcaaagtgttgatctggaaacaatccgtccagttgaaggtatgtcgattgaagaatcaa

SEQ ID NO: 306790 - DNA, 75 bp, synthetic construct
  source 1..75: mol_type = other DNA
gaaagtaatgctgggaagattgtcgtcgactcgattaagtcaccacaaggcccgatacgctttaagcgttttaac

SEQ ID NO: 306791 - DNA, 75 bp, synthetic construct
  source 1..75: mol_type = other DNA
ttgtattctctttgtgagcgtcgaaagcctcaaggaataaccgataaattcttagattctttcatggaaagatgc

SEQ ID NO: 306792 - DNA, 75 bp, synthetic construct
  source 1..75: mol_type = other DNA
cctgattgattatctttgtgaggaaaagattcatacggacaatttagcggaaatgctttccttttcgtgtctggc

SEQ ID NO: 306793 - DNA, 75 bp, synthetic construct
  source 1..75: mol_type = other DNA
gcagagcgccgttgtgacgggaccagcaggggaagaaatcttctgtgatgaacatggtcgcgtgcgggtgaaatt

SEQ ID NO: 306794 - DNA, 75 bp, synthetic construct
  source 1..75: mol_type = other DNA
ttgatgatgcgacagggagagaacaggtctacatccacgcgcagaagaacatggataccgaagtgctcaacgacc

SEQ ID NO: 306795 - DNA, 75 bp, synthetic construct
  source 1..75: mol_type = other DNA
aatccaaaaccttccagtgaatgtatgtataacagaaaagcaatagatgcctgggtctcttcaatgaaaaacaaa

SEQ ID NO: 306796 - DNA, 75 bp, synthetic construct
  source 1..75: mol_type = other DNA
ggtggtggcaagtgaactgcacggcgaacagccacaggcggtgccagggaccgaggggttcaggcaacagaccaa

SEQ ID NO: 306797 - DNA, 75 bp, synthetic construct
  source 1..75: mol_type = other DNA
gtgtggcacaggcgtgggcaggcaccggttttggcaacctggcgataccgcgtgtgggtcaggaggtgatagtgg

SEQ ID NO: 306798 - DNA, 75 bp, synthetic construct
  source 1..75: mol_type = other DNA
gatatctcagtgactggggtgcagagtacctgcgttaaatctgctcagttcacgcatgtggaaagtttacgtcag

SEQ ID NO: 306799 - DNA, 75 bp, synthetic construct
  source 1..75: mol_type = other DNA
attcctttacacacatggatcagaaattcattcatcatggtggtggtaaaagtaagattgaattttgtgatctta

SEQ ID NO: 306800 - DNA, 75 bp, synthetic construct
  source 1..75: mol_type = other DNA
tttgtatggggattcttttttacccagactaacccaataagctttatttctgttagcaatgatattttgatggca

SEQ ID NO: 306801 - DNA, 75 bp, synthetic construct
  source 1..75: mol_type = other DNA
tcactggaaactgctctttgccatcatcggtgtgtttggtctggtagcatggttcttactactgttcaaaatgcc

SEQ ID NO: 306802 - DNA, 75 bp, synthetic construct
  source 1..75: mol_type = other DNA
aaggccagaggctcagaaatacaaaatagttttcgcgattgccacaagtaaaaacctcccagatgacttgccttt

SEQ ID NO: 306803 - DNA, 75 bp, synthetic construct
  source 1..75: mol_type = other DNA
ataacgggtaaagatgcatttgtaattatgcctgatattgacctgaaatccatcccggagttgttaaataaaata

SEQ ID NO: 306804 - DNA, 75 bp, synthetic construct
  source 1..75: mol_type = other DNA
caaatctattaactcgtagtcaaagtagtaaagaggttgatatttttaaccttaaaattgattccgagatggata

SEQ ID NO: 306805 - DNA, 75 bp, synthetic construct
  source 1..75: mol_type = other DNA
cgcgaccggccagccggaaaatggcgctggagtggctggcaggggaaaagatgctcgacagccttgcccgctacc

SEQ ID NO: 306806 - DNA, 75 bp, synthetic construct
  source 1..75: mol_type = other DNA
atcttcgccttgaggatgtggactggagccgaaaggttatcactcttcgccataccaaaaacggcagacttcgcc

SEQ ID NO: 306807 - DNA, 75 bp, synthetic construct
  source 1..75: mol_type = other DNA
cacgataaaagtaacggaactttacttgcacgcttccccggcgcgttatcacgaagtcgttaatcgggcgatggg

SEQ ID NO: 306808 - DNA, 75 bp, synthetic construct
  source 1..75: mol_type = other DNA
tctacttagctggtacgacaaagcagaagccaaccttaacgaacaatcacagcaggacttgcaggatctcgaaaa

SEQ ID NO: 306809 - DNA, 75 bp, synthetic construct
  source 1..75: mol_type = other DNA
ctcgttattcagcgcgaaggacagaaggtaatgtgcctgcactccaccgtttgggttaacgaaaaggaccggacc

SEQ ID NO: 306810 - DNA, 75 bp, synthetic construct
  source 1..75: mol_type = other DNA
gtgatcatggtgaagcggtagagggggattcattcgaattaaaaaagccagcgggtaactttttatctgataatc

SEQ ID NO: 306811 - DNA, 75 bp, synthetic construct
  source 1..75: mol_type = other DNA
aaatattgagcgtaagaaagcaaacttccggaaaaaaattacattaaatggtggggatacattcacaataaagat

SEQ ID NO: 306812 - DNA, 75 bp, synthetic construct
  source 1..75: mol_type = other DNA
atttaatggctattctaaatggaatgaagcaaataaaagcatatgtattgcttaatatatccagtagcatattag

SEQ ID NO: 306813 - DNA, 75 bp, synthetic construct
  source 1..75: mol_type = other DNA
aatcaatgctaatgatcgaggagtggcccttaccggtggggcaaacaataacttttttggaggatgccggaacga

SEQ ID NO: 306814 - DNA, 75 bp, synthetic construct
  source 1..75: mol_type = other DNA
tcaggacagaggcacgattgccggttcggtgcatgttgacgctgtagacaatggtggcgaaggcaacggtataca

SEQ ID NO: 306815 - DNA, 75 bp, synthetic construct
  source 1..75: mol_type = other DNA
gccgatgtcagcacggcgcagatcgcgagtctggaggtgacgcaggataactcagtggctgacggcgcaatggcg

SEQ ID NO: 306816 - DNA, 75 bp, synthetic construct
  source 1..75: mol_type = other DNA
cgaccctgtaagactggttttcacccactggcagaaagaacatgaccacccgtcagcaaaactcgacgacaaacg

SEQ ID NO: 306817 - DNA, 75 bp, synthetic construct
  source 1..75: mol_type = other DNA
ggttgatctgagcagtaccgtagcggatgccagcactgttgaggctaaggtcaatcaaagcagcgatagtaaaac

SEQ ID NO: 306818 - DNA, 75 bp, synthetic construct
  source 1..75: mol_type = other DNA
tcactatatttctgtaaatccgagtcgagtagccgggatgaaatggccacctgcatcgtttcgggatttattgag

SEQ ID NO: 306819 - DNA, 75 bp, synthetic construct
  source 1..75: mol_type = other DNA
cgcttaccaatttgagtggaaaggatgtagctggtcttctcacataccttggtttgggagaggcggcaaaacggg

SEQ ID NO: 306820 - DNA, 75 bp, synthetic construct
  source 1..75: mol_type = other DNA
tgtggatggatcatcgcgcaacagccgaggcggcgcagattaacgcgacgaaggatcccgcattgcgctacgttg

SEQ ID NO: 306821 - DNA, 75 bp, synthetic construct
  source 1..75: mol_type = other DNA
cctaaagcaggaaataatagcgattatgttcctgcatcagcagataactccataacgggtactcaaaggacagcg

SEQ ID NO: 306822 - DNA, 75 bp, synthetic construct
  source 1..75: mol_type = other DNA
tcttcacaagtagagtatataacagttgaagaatcgtcgccggagaattcgggaaaagtcatctccgcatggctt

SEQ ID NO: 306823 - DNA, 75 bp, synthetic construct
  source 1..75: mol_type = other DNA
taacaaagcctggtctggcgttccgggggtaggttctcaggacgctggtgaatcagttttttatattgcagtagg

SEQ ID NO: 306824 - DNA, 75 bp, synthetic construct
  source 1..75: mol_type = other DNA
ccgcattcacagtatgcacccaatgaaagtccgacgtttaccggaacccccaaagcgccaacgccagcggcgggg

SEQ ID NO: 306825 - DNA, 75 bp, synthetic construct
  source 1..75: mol_type = other DNA
aaaggcttatccgacaaataaattgcctgatttacgtggtgagtttattcgtggctgggatgacgggcgtggtgt

SEQ ID NO: 306826 - DNA, 75 bp, synthetic construct
  source 1..75: mol_type = other DNA
ggaatcggcaaaagctcaggtttcggcttctaaagcggctatagaagcggcccgtaccaatatcattcaggcgca

SEQ ID NO: 306827 - DNA, 75 bp, synthetic construct
  source 1..75: mol_type = other DNA
actgattaccctgtgctggcgaaagtgtttccttcgctggtattacctgaagcccgcggtgatttcattcgtatc

SEQ ID NO: 306828 - DNA, 75 bp, synthetic construct
  source 1..75: mol_type = other DNA
gcacatacttattttttaataaaagtctacaaaacagagaatttatcagtcaaagataaaactgcaataaatcga

SEQ ID NO: 306829 - DNA, 75 bp, synthetic construct
  source 1..75: mol_type = other DNA
gtggtgacctggtttgaactcggggagaacgacaaaaaccagatgctgtacagcatgaaggtgcacccgccgctg

SEQ ID NO: 306830 - DNA, 75 bp, synthetic construct
  source 1..75: mol_type = other DNA
accctcgatccagaactgaaatggacttactctgaacatatgcttgaaggaggtcgttcactcaaatctcaattt

SEQ ID NO: 306831 - DNA, 75 bp, synthetic construct
  source 1..75: mol_type = other DNA
cctgtttgatgaaactggtgcactgattgctgtgggaaactgcccggagagctacaagccgaagctggcggaggg

SEQ ID NO: 306832 - DNA, 75 bp, synthetic construct
  source 1..75: mol_type = other DNA
gtgcccgttccgtggcccttagcaacaccaccaacgggctggctgaaatgcaacggtgcagcattttcttctaaa

SEQ ID NO: 306833 - DNA, 75 bp, synthetic construct
  source 1..75: mol_type = other DNA
ttcgtggctgggatgacggacgtggagtggatgccgggcgacaattattatcttcacagggggatgcaataagaa

SEQ ID NO: 306834 - DNA, 75 bp, synthetic construct
  source 1..75: mol_type = other DNA
ctcccttggctcgtccaggcttgggtggaggatatcgacgaaaagcgtattgatgcttttacatccgtgccactg

SEQ ID NO: 306835 - DNA, 75 bp, synthetic construct
  source 1..75: mol_type = other DNA
ctgccgtaacgctgaaaattgacccttcggtagttctggcaacccgacagtatgttgatgatcagatcatccagg

SEQ ID NO: 306836 - DNA, 75 bp, synthetic construct
  source 1..75: mol_type = other DNA
taaccaatgtgggcgcggcgaaactggcaaatgccacggcattgggtgcgcaggttgaaatcacccagatggctg

SEQ ID NO: 306837 - DNA, 75 bp, synthetic construct
  source 1..75: mol_type = other DNA
cttttgtgaaatcggcgatagcggcaatggtgggttctgcacctgcggcactggatacactgaacgaactggcgg

SEQ ID NO: 306838 - DNA, 75 bp, synthetic construct
  source 1..75: mol_type = other DNA
tgacggatattggcgcggcgaaacttgccagcgccgccgcgctcggcgtgccgctaaaaattacccatatggcgg

SEQ ID NO: 306839 - DNA, 75 bp, synthetic construct
  source 1..75: mol_type = other DNA
cgctgactaatttgagtggaaaggatgtagctggtcttctcgcatactttgccagtggtgattttttttttatgt

SEQ ID NO: 306840 - DNA, 75 bp, synthetic construct
  source 1..75: mol_type = other DNA
ttggtgatgcgaatggtgtcttgccgacaccagacccggcacagacaaaactgattaaccagaaacgcatcgcgc

SEQ ID NO: 306841 - DNA, 75 bp, synthetic construct
  source 1..75: mol_type = other DNA
tgccacgacaatgttgaatgctctgtcaggtaaacaaccgctggacaatacgctgactaatttgagtggaaagga

SEQ ID NO: 306842 - DNA, 75 bp, synthetic construct
  source 1..75: mol_type = other DNA
tcaaagccgaagggaagaaaaggtacatttttctctttgatgttttaaaccaggacatcttagctatctatgttg

SEQ ID NO: 306843 - DNA, 75 bp, synthetic construct
  source 1..75: mol_type = other DNA
cggcaggcggtcgggtgctgaatatggtcgatctcagcgacgtctatatgaccttcttcctgccaaccgaacagg

SEQ ID NO: 306844 - DNA, 75 bp, synthetic construct
  source 1..75: mol_type = other DNA
aatccttctctctggatttcgtccacttccgggagcagacagcggcggtgcgtccgtactattccgccgaaggct

SEQ ID NO: 306845 - DNA, 75 bp, synthetic construct
  source 1..75: mol_type = other DNA
gtggagaaagaggcgaaggagtggggggaactgcgtcagcggctgggctccggtcagtcctccgtggtgtcctac

SEQ ID NO: 306846 - DNA, 75 bp, synthetic construct
  source 1..75: mol_type = other DNA
cgccgccataccggtgcctatatcaccatcacacagaacatcgtcgactttgactctgacaaggcctccagtgcg

SEQ ID NO: 306847 - DNA, 75 bp, synthetic construct
  source 1..75: mol_type = other DNA
gcacggtatggtcgccattaccctgccccctcagaatctgcggacattcaaccagctggtcagggatgtgccccg

SEQ ID NO: 306848 - DNA, 75 bp, synthetic construct
  source 1..75: mol_type = other DNA
cgctggatcccgtctttctggaacaacagcggacgctggggaacgtgttggtgtatgacgattatcgcaaagcgc

SEQ ID NO: 306849 - DNA, 75 bp, synthetic construct
  source 1..75: mol_type = other DNA
cacgccagcaggaagtcacggctctgcgcacttatctgcaaattcgtatcggtctgcatgcggcgtttaatgcct

SEQ ID NO: 306850 - DNA, 75 bp, synthetic construct
  source 1..75: mol_type = other DNA
ctgcccctgaccctgcgccattaccgggtgtttatctcgtactgttctccctcgaagaaaaaaagccgggccgac

SEQ ID NO: 306851 - DNA, 75 bp, synthetic construct
  source 1..75: mol_type = other DNA
tcgtctatgtggcggcagcggccggcacccgtgctgcgatcaacatgactggcggcgatgcggccctggacctga

SEQ ID NO: 306852 - DNA, 75 bp, synthetic construct
  source 1..75: mol_type = other DNA
acttagtgttaccatttgcggagtggtaaaaaggaatgccgcagctggactgaactctcatatgattgcggatta

SEQ ID NO: 306853 - DNA, 75 bp, synthetic construct
  source 1..75: mol_type = other DNA
tattcatgaggcggtgtggcagctggcgtggaagaagtcagggccggagatggcttcgctggaggcctggctgga

SEQ ID NO: 306854 - DNA, 75 bp, synthetic construct
  source 1..75: mol_type = other DNA
cggggtgccgttctgcatccatctgatgtccagtcagctggttggtgacaggattgaatacgggctgcgtgagtt

SEQ ID NO: 306855 - DNA, 75 bp, synthetic construct
  source 1..75: mol_type = other DNA
gtattttaactctgatgagccgtccctgcgggatgacgcaaaaatggtggtgctggagctgggcggactggaaga

SEQ ID NO: 306856 - DNA, 75 bp, synthetic construct
  source 1..75: mol_type = other DNA
gtgtcaggaaactcgctgaacacgctccgccagcccgttttgcgcaggatccctggcgctggacactttccgccc

SEQ ID NO: 306857 - DNA, 75 bp, synthetic construct
  source 1..75: mol_type = other DNA
aactcgcgtcgaagccgcacaagccactgaacggcgcattgccgcagatatcgatgacagcgaactgaaagcccc

SEQ ID NO: 306858 - DNA, 75 bp, synthetic construct
  source 1..75: mol_type = other DNA
atggataatattaagcgccatctggcgtggtgggttgttggggtactggcggtggctgccgtcgtggcgtggtgg

SEQ ID NO: 306859 - DNA, 75 bp, synthetic construct
  source 1..75: mol_type = other DNA
atgcgtcggctgttgcactatctcatcaataatattcgcgagcatctgatgctttatctttttctctggggattg

SEQ ID NO: 306860 - DNA, 75 bp, synthetic construct
  source 1..75: mol_type = other DNA
ggtcgacctgagcgatgtctatatgaccttcttcctgccaaccgaacaggctggcacgctgaaactgggcgggga

SEQ ID NO: 306861 - DNA, 75 bp, synthetic construct
  source 1..75: mol_type = other DNA
gttgccgccgcgcaggctttgctggaacagcggcaaagtgaaactcgtgccgcgcagtcattggttaatcaacgg

SEQ ID NO: 306862 - DNA, 75 bp, synthetic construct
  source 1..75: mol_type = other DNA
ttattgcgcccggcaggtgtaccggagggttttgccgtcagtaatggtcgcattgaagcgacggaagtggatatc

SEQ ID NO: 306863 - DNA, 75 bp, synthetic construct
  source 1..75: mol_type = other DNA
atgaatataagaaaattatatatagcaatgctacttatctcgcctgcatgcctggctttgtctgcggatgaacac

SEQ ID NO: 306864 - DNA, 75 bp, synthetic construct
  source 1..75: mol_type = other DNA
cggtaaagctttatttaagctgcggcctgatatttgtttacggcctcgtaaaagtactactggttcagttattac

SEQ ID NO: 306865 - DNA, 75 bp, synthetic construct
  source 1..75: mol_type = other DNA
tatttaaatggcttgagctgcgctgtctgaaagacgatgctgataatactcatcgtttgctcacccttagcagcc

SEQ ID NO: 306866 - DNA, 75 bp, synthetic construct
  source 1..75: mol_type = other DNA
cactggggcggcggtggacgcgcaggcgctggcggtggtgttagtggtaaggcatatggttcaggtggcggtggc

SEQ ID NO: 306867 - DNA, 75 bp, synthetic construct
  source 1..75: mol_type = other DNA
ccagccccaacggtaacctggatgaagtgcatgaaggtctgctgctgcaggcggtcagggcctcctggctggcca

SEQ ID NO: 306868 - DNA, 75 bp, synthetic construct
  source 1..75: mol_type = other DNA
atgagcttcccgcagttcagccgtctgctgccgtaccgtgattacaaccaggaatccggtctgttcatgaatgac

SEQ ID NO: 306869 - DNA, 75 bp, synthetic construct
  source 1..75: mol_type = other DNA
acgtcacgtttaccaactggctgagaaaggtgttgttcagcacaatcgcaacgcatgggagaaagaaccggtgat

SEQ ID NO: 306870 - DNA, 75 bp, synthetic construct
  source 1..75: mol_type = other DNA
ctgattcgtatcgaagaagctttgggcgaaaaagcaccgtacaacggtcgtaaagagatcaaaggccaggcataa

SEQ ID NO: 306871 - DNA, 75 bp, synthetic construct
  source 1..75: mol_type = other DNA
tattctgatctgaattatcagtgtgtggaggacagttttgatctgaaggtccgggcggattacctgacgctgggg

SEQ ID NO: 306872 - DNA, 75 bp, synthetic construct
  source 1..75: mol_type = other DNA
ttaatcaagtcccagccggtctatgagatccagtattacggcaaaaccttccggatgaatgctgctcaggtactg

SEQ ID NO: 306873 - DNA, 75 bp, synthetic construct
  source 1..75: mol_type = other DNA
actggcccattctgtgggcattgctgatgacaggaataaacctgcttcagttgatactggcgaaaacctacgtca

SEQ ID NO: 306874 - DNA, 75 bp, synthetic construct
  source 1..75: mol_type = other DNA
gatgacaggaataaacctgcttcagttgattctggcaaagacctacgtcaagcgcgaagagtttgatttgctgcg

SEQ ID NO: 306875 - DNA, 75 bp, synthetic construct
  source 1..75: mol_type = other DNA
ggtaaaaccggactgatacagccacttatccgcagcgtgctggactccgggggctttgccgtggtgttcgacatg

SEQ ID NO: 306876 - DNA, 75 bp, synthetic construct
  source 1..75: mol_type = other DNA
ctgaaagaggccggcgtggtacagcgcgcagagagctttaatgtggtcaacctgatgccgttagtggcagataac

SEQ ID NO: 306877 - DNA, 75 bp, synthetic construct
  source 1..75: mol_type = other DNA
tacaaaattatcctcaaacagagtgcgaaggagttcgcgaaatataaccagttattcccggatcagttccagcca

SEQ ID NO: 306878 - DNA, 75 bp, synthetic construct
  source 1..75: mol_type = other DNA
aataacaccaactacaacatggcggtctgtggcacctccggggccggtaaaaccgggctgatacagccacttatc

SEQ ID NO: 306879 - DNA, 75 bp, synthetic construct
  source 1..75: mol_type = other DNA
ctgctggaccagtacacagccaacggtacttacggccagtattttaactctgatgaaccgtccctgcgggatgac

SEQ ID NO: 306880 - DNA, 75 bp, synthetic construct
  source 1..75: mol_type = other DNA
gtgaaatgagcttcccgcagttcagccgtctgctgccgtaccgtgattacaaccaggaatccggtctgttcatga

SEQ ID NO: 306881 - DNA, 75 bp, synthetic construct
  source 1..75: mol_type = other DNA
caggaatccggtctgttcatgaatgacaccacgatgggctttatgctggaagccattcccatcaatggtgcgaat

SEQ ID NO: 306882 - DNA, 75 bp, synthetic construct
  source 1..75: mol_type = other DNA
tgcaccctgaatggtcataatgaccactcagaccatcgaggcaaccataacgaacatcgttacagttggagcttt

SEQ ID NO: 306883 - DNA, 75 bp, synthetic construct
  source 1..75: mol_type = other DNA
tggcgggaaaataaccatctcagaaaatgggaaattaacaccgccatcgcaccagcatagtgaggcgctcattga

SEQ ID NO: 306884 - DNA, 75 bp, synthetic construct
  source 1..75: mol_type = other DNA
agctttaaacagagaatctttaaaatctcgactctgttactttcttgaggtgtttgacgcagtctctggtcagta

SEQ ID NO: 306885 - DNA, 75 bp, synthetic construct
  source 1..75: mol_type = other DNA
gaagtctcgccaaacagcgttcagggctatgactacgaagcggatggtaatggcatcgtactgttaccggagcgc

SEQ ID NO: 306886 - DNA, 75 bp, synthetic construct
  source 1..75: mol_type = other DNA
taaccggccatcctttgttgtgtccggtgatgactggaatatcacgatccgcgaagatggaaaagtaacgccgcc

SEQ ID NO: 306887 - DNA, 75 bp, synthetic construct
  source 1..75: mol_type = other DNA
ccagggcggctggagcaaagaggacagcacccgcctacagcaaacgatgaaacaagtggcaatgggcgtaataag

SEQ ID NO: 306888 - DNA, 75 bp, synthetic construct
  source 1..75: mol_type = other DNA
cgccctgattgcgctggagcgtctgaagtacccctgcaacgtgatcctgcattccgacagccagtatcttaaaaa

SEQ ID NO: 306889 - DNA, 75 bp, synthetic construct
  source 1..75: mol_type = other DNA
gcgtgcatatcgaattcgtcaaggaaggcactgttgcaaagttagcgatgaggcagccttttgtcttattcaaag

SEQ ID NO: 306890 - DNA, 75 bp, synthetic construct
  source 1..75: mol_type = other DNA
aagcgtccgcaactggaagcgctgataagcttcgcccgcaccggcgacggcactgttgcaaatagtcggtggtga

SEQ ID NO: 306891 - DNA, 75 bp, synthetic construct
  source 1..75: mol_type = other DNA
aactcaacggtcaagcttgcggcgatgttgggtggcaaaagtgtttgcacggaatatcaaaggctgggtgtcatt

SEQ ID NO: 306892 - DNA, 75 bp, synthetic construct
  source 1..75: mol_type = other DNA
ttaaggggataaataattacggggataaggttactgttactgtgaagtcggaaggtgacgggcaagcgtcgctgt

SEQ ID NO: 306893 - DNA, 75 bp, synthetic construct
  source 1..75: mol_type = other DNA
aacgcactggctgccgcacgaagtctaaagccagatgccaaacccaccagcattcccgtaccaatttcaacacac

SEQ ID NO: 306894 - DNA, 75 bp, synthetic construct
  source 1..75: mol_type = other DNA
agagagaactggaaggggagtttgctgcatactggcgtcccagcgagacactctttcttctgtcaaacgcaagtc

SEQ ID NO: 306895 - DNA, 75 bp, synthetic construct
  source 1..75: mol_type = other DNA
tcatatctggaaacctatgtggaacaggggaatttgctggagcgtcaagggtccgtcagtaatcgtcacgctcat

SEQ ID NO: 306896 - DNA, 75 bp, synthetic construct
  source 1..75: mol_type = other DNA
tatccctgatgatattgataatgcacctgtattatttgcagctgtaacacgtacaccgaacgtgaaaataaccgg

SEQ ID NO: 306897 - DNA, 75 bp, synthetic construct
  source 1..75: mol_type = other DNA
gaacgccaggagaaaaaggaaaaagaagaactttatttattcgtgtctgaccgtgagcgcaatttaaagaaaaac

SEQ ID NO: 306898 - DNA, 75 bp, synthetic construct
  source 1..75: mol_type = other DNA
ctggtcgctgtccctgtcggagaacgtagtggccgttgctgatgcattgcgtcatggcatgtcacaacacgggat

SEQ ID NO: 306899 - DNA, 75 bp, synthetic construct
  source 1..75: mol_type = other DNA
gtcactgtatgaaactgatggcattcagccctgccaccgggaatacattccggccagaagtgacactggttatgg

SEQ ID NO: 306900 - DNA, 75 bp, synthetic construct
  source 1..75: mol_type = other DNA
aggggaatttgctggaacgtcaaaggtccgccagtaatcatcacgctcatccagggggggcgcttgaaattcgga

SEQ ID NO: 306901 - DNA, 75 bp, synthetic construct
  source 1..75: mol_type = other DNA
tggtgttgatctcaaaacagccagtggtcgctataactttcgcaacatcctctctgcggcacaatacgaatccga

SEQ ID NO: 306902 - DNA, 75 bp, synthetic construct
  source 1..75: mol_type = other DNA
agtgcacagcttagtctggcataccgtttcaagattccactgatttaccgtccggcattacttgccagcaagcct

SEQ ID NO: 306903 - DNA, 75 bp, synthetic construct
  source 1..75: mol_type = other DNA
gtgctgataaaggggggaaaatgacagttcataatcccacacgttatgttgttcagcttaattatgtgaacgcgg

SEQ ID NO: 306904 - DNA, 75 bp, synthetic construct
  source 1..75: mol_type = other DNA
ttgacgccgatattaccgggattttgccccggctgggtgtggagcatcacacggggataccaggtaacccacagg

SEQ ID NO: 306905 - DNA, 75 bp, synthetic construct
  source 1..75: mol_type = other DNA
attcaaggtttaatgatcttgatatatcaagcgaaaaaaataaaagttgtggcagcacttacaccctttatgatg

SEQ ID NO: 306906 - DNA, 75 bp, synthetic construct
  source 1..75: mol_type = other DNA
caggaggctttgcccgagcgtgttattgtggcaggtaataccgccaatgcccgacagggtaagcgaactggcgtc

SEQ ID NO: 306907 - DNA, 75 bp, synthetic construct
  source 1..75: mol_type = other DNA
gcaattaaggccacccacaaagggaaagagctgacaaagcggcaggttcaggctatgggagaagtccccaccttt

SEQ ID NO: 306908 - DNA, 75 bp, synthetic construct
  source 1..75: mol_type = other DNA
acaacaaaacgtatcgttcgcgacatcaagaaaacagcgaactctaaatccgtcgataaaaaaatctatgttgaa

SEQ ID NO: 306909 - DNA, 75 bp, synthetic construct
  source 1..75: mol_type = other DNA
ttgcttgtatatgcctcccggcgttttccgccaacgcattatcagatttcgtctctgacatgcaaaaaacgtaca

SEQ ID NO: 306910 - DNA, 75 bp, synthetic construct
  source 1..75: mol_type = other DNA
attacacagaggctgagtttgttcaacttcttaaggaaattgaaaaagagaatgttgctgcaactgatgatgtgt

SEQ ID NO: 306911 - DNA, 75 bp, synthetic construct
  source 1..75: mol_type = other DNA
caattgcggaaagattgcggcaggagggggaacaatccaaagccctgcatatagccaaaataatgcttgaatccg

SEQ ID NO: 306912 - DNA, 75 bp, synthetic construct
  source 1..75: mol_type = other DNA
gatgaaatcatgcagcaccgacgtatggcgctgctggagttaattcaaaaacatattcgtcaacgcgacctgatg

SEQ ID NO: 306913 - DNA, 75 bp, synthetic construct
  source 1..75: mol_type = other DNA
atcggcattcatgaagctgcgctcccggtggcacgccgccaggagcttgcagaatgggctgactctcttacgccg

SEQ ID NO: 306914 - DNA, 75 bp, synthetic construct
  source 1..75: mol_type = other DNA
caggaggctttgcccgagcgtgttattgtggcaggtaatactgctaatgcccgacagggtaaacggactggcgtc

SEQ ID NO: 306915 - DNA, 75 bp, synthetic construct
  source 1..75: mol_type = other DNA
aaaacgtcaccgttcgcgatgaactggaggtgatggtcaaatgcccggaactggcattacgcgaagtccaggcac

SEQ ID NO: 306916 - DNA, 75 bp, synthetic construct
  source 1..75: mol_type = other DNA
gagcgcccggagaaaaaggaaaaagaagaactttatttattcgcatctgaacgcgagcgcaatttaaagaaaaac

SEQ ID NO: 306917 - DNA, 75 bp, synthetic construct
  source 1..75: mol_type = other DNA
ccacctatattctatcattctctgccaatgcagtgtcagatatggttgctgacatgcaaaaaacgtacagcaagt

SEQ ID NO: 306918 - DNA, 75 bp, synthetic construct
  source 1..75: mol_type = other DNA
atcatgtatttggcaaagtatccgatttgccatctgtaataccgatgaacaacagaagggagatgctgcttgatg

SEQ ID NO: 306919 - DNA, 75 bp, synthetic construct
  source 1..75: mol_type = other DNA
gagtttgcattatgattggtacgcaatcaaatacattaaggcaacaaaaattcttgacaaggaaggagttaggga

SEQ ID NO: 306920 - DNA, 75 bp, synthetic construct
  source 1..75: mol_type = other DNA
tcgaagaaactcagaaagaaaaaatggcgtctgtttcttctggaatgcagttgccgccaggctttaagatgccgt

SEQ ID NO: 306921 - DNA, 75 bp, synthetic construct
  source 1..75: mol_type = other DNA
acgcagcacgtcgtattgaagaaacgcagaaagaaaaaatggcctctgtatcctccggaatgcagctgccgcctg

SEQ ID NO: 306922 - DNA, 75 bp, synthetic construct
  source 1..75: mol_type = other DNA
acctgatgaagcaagcccagcagatgcaagaaaaaatgcagaaaatgcaggaagagatcgcgcagctggaagtta

SEQ ID NO: 306923 - DNA, 75 bp, synthetic construct
  source 1..75: mol_type = other DNA
aaagtatcttgagtaacaaagggctaatgccgctgctttggcgcttctttcctggtcatcctaatcttctggcgt

SEQ ID NO: 306924 - DNA, 75 bp, synthetic construct
  source 1..75: mol_type = other DNA
gagcaatgggtggagccgttatggaaaagtatcttgagtaacaaagggctaatgccgctgctttggcgcttcttt

SEQ ID NO: 306925 - DNA, 75 bp, synthetic construct
  source 1..75: mol_type = other DNA
gcattcaacgacgcagcacgtcgtatcgaagaaacgcagaaagaaaaaatggcctctgtttcctccggaatgcag

SEQ ID NO: 306926 - DNA, 75 bp, synthetic construct
  source 1..75: mol_type = other DNA
tctcatttccgttcccgccggagcgccccagccgaccggaagcctgcggcctgcggcatctggcgtttagtgttg

SEQ ID NO: 306927 - DNA, 75 bp, synthetic construct
  source 1..75: mol_type = other DNA
tccccctcagcgcagaacaacaggccgccatgcaggctgtggccgtcacagaacaacgtcgtcgtcagggatgta

SEQ ID NO: 306928 - DNA, 75 bp, synthetic construct
  source 1..75: mol_type = other DNA
ccgctggtctggtgttgttgaggagcatgatctggaaacgattttctggggggggcgggcgttttccatcactgt

SEQ ID NO: 306929 - DNA, 75 bp, synthetic construct
  source 1..75: mol_type = other DNA
cgacctggctcagtgatcccagttgtagtgatgcgtgacgataagcagctaacgttgcaggtcaccattcaggaa

SEQ ID NO: 306930 - DNA, 75 bp, synthetic construct
  source 1..75: mol_type = other DNA
gatggtcgcgtgatccgtggctacattggtatcggtggacgcgagattgctcctctgcacgcccagggtggcggc

SEQ ID NO: 306931 - DNA, 75 bp, synthetic construct
  source 1..75: mol_type = other DNA
tctttagtcatggttctcatattcactcttactttatttgctccccattctttcttgttcatgaagaaataaaaa

SEQ ID NO: 306932 - DNA, 75 bp, synthetic construct
  source 1..75: mol_type = other DNA
tcagctttgccgccgaaaacgggtatctggagaaaaacccgtttaattcaataacaccgctgaggaaatcaaaac

SEQ ID NO: 306933 - DNA, 75 bp, synthetic construct
  source 1..75: mol_type = other DNA
cagccgccacttcacccacttgaaggacggggccgaggccaaagacaggacgttgctgctgtccgcaatcctcgg

SEQ ID NO: 306934 - DNA, 75 bp, synthetic construct
  source 1..75: mol_type = other DNA
gtgctcacgccttcaggcatcgaccgcaagtactacgagttttgcgtactgaatgaactcaagggtgcattacgt

SEQ ID NO: 306935 - DNA, 75 bp, synthetic construct
  source 1..75: mol_type = other DNA
gccagcggcctcaacctggtgacggcggccatcgtgctgtggaacacggtctacctggcactgttgcaaagttag

SEQ ID NO: 306936 - DNA, 75 bp, synthetic construct
  source 1..75: mol_type = other DNA
ccagtacgcgccatttcacaccaaggtcgtgaacgtcggcgtgcgcgattcgacctacgtgctcgacggcctgct

SEQ ID NO: 306937 - DNA, 75 bp, synthetic construct
  source 1..75: mol_type = other DNA
cgtagatattcccgtggcgagcgataacccagtgcactatgcggatgccattcgttataatgctcgaacgcctct

SEQ ID NO: 306938 - DNA, 75 bp, synthetic construct
  source 1..75: mol_type = other DNA
tgacctacgccaagctgtcctggctgcaagcctggcacatccgcgacgaaacctattcggggtcggttccggctg

SEQ ID NO: 306939 - DNA, 75 bp, synthetic construct
  source 1..75: mol_type = other DNA
tcagtgttttattatctgatgaatttggtaatcctgtgaatgacggtctggatttgctgacagatgatgcagtgt

SEQ ID NO: 306940 - DNA, 75 bp, synthetic construct
  source 1..75: mol_type = other DNA
tattcaaataattatactattaaaccgggtgaagcgagtccgcatggttcacagcttcgtataagagatgatgtt

SEQ ID NO: 306941 - DNA, 75 bp, synthetic construct
  source 1..75: mol_type = other DNA
gctgaaaacgggtatctggagaaaaacccgtttaattcaataacaccactgaggaaatcaaaacctgtgccggat

SEQ ID NO: 306942 - DNA, 75 bp, synthetic construct
  source 1..75: mol_type = other DNA
ttgcgggatgagtttggtaaccctgctttagggctgacatcagaagtcatcgagtcttatattgatagtttcgcg

SEQ ID NO: 306943 - DNA, 75 bp, synthetic construct
  source 1..75: mol_type = other DNA
cgccgagcattggggcgacggcaccacgtcatcgtcggacggccagaacttccgcaccggcagcaaggccgagag

SEQ ID NO: 306944 - DNA, 75 bp, synthetic construct
  source 1..75: mol_type = other DNA
cagctcgccaccgtcaaccgcatggcgctggccaacgagctgccggacgccatcatcacggagtcgggcctgaag

SEQ ID NO: 306945 - DNA, 75 bp, synthetic construct
  source 1..75: mol_type = other DNA
gcggggcatcgtctgttcccgtccgttccttttcgtgaaggtgagcggcgtcgtcagaaaaccacgctgacagag

SEQ ID NO: 306946 - DNA, 75 bp, synthetic construct
  source 1..75: mol_type = other DNA
actccagcagcatctggaatatgtcaaaaccggattgccgggcgtagcgtgggtgcgggtgaatgaagaacttcc

SEQ ID NO: 306947 - DNA, 75 bp, synthetic construct
  source 1..75: mol_type = other DNA
gcgaaaatcgccaaagagcatccaggctgggaaattgtcactacgcagtttggctataacgatgccactaaatcg

SEQ ID NO: 306948 - DNA, 75 bp, synthetic construct
  source 1..75: mol_type = other DNA
tcgccttacttagcgcgcttggcattgccgcaatctctatgaatgtgcaggccgcagagcgtattgcatttattc

SEQ ID NO: 306949 - DNA, 75 bp, synthetic construct
  source 1..75: mol_type = other DNA
gcgtgagcagtgggcgcaacatatcgtgcaggatggcgaccagatcctgctttttcaggttattgcagggggttg

SEQ ID NO: 306950 - DNA, 75 bp, synthetic construct
  source 1..75: mol_type = other DNA
atcctatccagggtaataattggatatacaacggcaagggcaatatcaaagacagtatatggcgcatttcgcgga

SEQ ID NO: 306951 - DNA, 75 bp, synthetic construct
  source 1..75: mol_type = other DNA
agcatcctggtgggtgttaatgcatggctggaaacattgccctttgatagcgatgacgtgaaacaagacatgtca

SEQ ID NO: 306952 - DNA, 75 bp, synthetic construct
  source 1..75: mol_type = other DNA
agttattatcagtaccatcagcaactgaatgcactgacaaccttcctgaatgaaaatagcgcactgccaccactg

SEQ ID NO: 306953 - DNA, 75 bp, synthetic construct
  source 1..75: mol_type = other DNA
gaaaaactacaccggagctagataaactgtacgaaactgatcctaatatgacagtatttaataatgtaataacat

SEQ ID NO: 306954 - DNA, 75 bp, synthetic construct
  source 1..75: mol_type = other DNA
aacatacatatagttggaaaagtctagcctgggcattactctatttttgttttttttccacatttctgcagatta

SEQ ID NO: 306955 - DNA, 75 bp, synthetic construct
  source 1..75: mol_type = other DNA
gcggcttgaaaaaggagaatatggcttctgccgggatacaggcgaacctatcggtctgcaacgcctgctactcag

SEQ ID NO: 306956 - DNA, 75 bp, synthetic construct
  source 1..75: mol_type = other DNA
acgttttgttcattctatacgcaattgaggccggtggaaaagccgagcctgtaccaggtgtaaaaatactggaga

SEQ ID NO: 306957 - DNA, 75 bp, synthetic construct
  source 1..75: mol_type = other DNA
tgatcatcgttcatctgctgggcacgcacattaagtataaataccgttatccggaaggtcaggggcggtttgatg

SEQ ID NO: 306958 - DNA, 75 bp, synthetic construct
  source 1..75: mol_type = other DNA
gcgtgagcagtggacgcaacatatcgtgcaggatggcgaccagatcctactttttcaggttattgcagggggttg

SEQ ID NO: 306959 - DNA, 75 bp, synthetic construct
  source 1..75: mol_type = other DNA
ccggaactcattgagttattcgcctggagcgaagagaagtttttaaaagtcacggaaggttcggcgattcgccgt

SEQ ID NO: 306960 - DNA, 75 bp, synthetic construct
  source 1..75: mol_type = other DNA
aggcgaaatgcgtgcgtcgtagaggtacaactaccgaaaaaacagcgtctggttcgggtgattgaaaaagggtta

SEQ ID NO: 306961 - DNA, 75 bp, synthetic construct
  source 1..75: mol_type = other DNA
tatttacggttgcgatgactgccagcttatctgcccgtggaatcgctattcacaactcaccacagaagaggattt

SEQ ID NO: 306962 - DNA, 75 bp, synthetic construct
  source 1..75: mol_type = other DNA
tcgccataaatctgcgctggtcatgcagaagtacagccgccagcaggcgagggaggcagagcagaaaacccgtgc

SEQ ID NO: 306963 - DNA, 75 bp, synthetic construct
  source 1..75: mol_type = other DNA
gcacggtggagatcagtatcaccagccagacggcggggatcagtacagtcactgcaaccatcaacaacagcaccc

SEQ ID NO: 306964 - DNA, 75 bp, synthetic construct
  source 1..75: mol_type = other DNA
atggctggacaaacaataccacggcgaaatggactggatggcgcgtcacggtatgctgcgcgcccgcccccatga

SEQ ID NO: 306965 - DNA, 75 bp, synthetic construct
  source 1..75: mol_type = other DNA
cgatgcagtgcgtcgccgggctaactgttcacgatctgctcgtgcaactcaatcaacaacaagcgggcgcggcgc

SEQ ID NO: 306966 - DNA, 75 bp, synthetic construct
  source 1..75: mol_type = other DNA
cgtgagcagtggacgcaacgtatcgtgcaggatggcgaccaaatcctgctttttcaggttattgcagggggttga

SEQ ID NO: 306967 - DNA, 75 bp, synthetic construct
  source 1..75: mol_type = other DNA
atgcagatcctgtttaacgatcaaccgatgcagtgcgtcgccggactaactgttcacgaactgctggagcaactc

SEQ ID NO: 306968 - DNA, 75 bp, synthetic construct
  source 1..75: mol_type = other DNA
ggtcgtggtgcaccggtacaggtacgtgcacttgagcagtggatgatcccgaacaagctggagaacgtaatatga

SEQ ID NO: 306969 - DNA, 75 bp, synthetic construct
  source 1..75: mol_type = other DNA
gcagcagaacgcttgttcccgtcggtgcggtttcgtgtcagggaacgcagtcgccataaatccgcactggtcatg

SEQ ID NO: 306970 - DNA, 75 bp, synthetic construct
  source 1..75: mol_type = other DNA
atgacagggaaagcgcatgggaacggtaatcgttggggcgataacagcgtatgtggattgggggatcgtttacgt

SEQ ID NO: 306971 - DNA, 75 bp, synthetic construct
  source 1..75: mol_type = other DNA
aacctgccggaattggcattcgtgaagaccgtgcattgatcacccaggatatgtctcgcttctacccccatattt

SEQ ID NO: 306972 - DNA, 75 bp, synthetic construct
  source 1..75: mol_type = other DNA
gcccggactggcgcgaaaaagcccacgaatacggtttcaattttcacaccatgtacggcgagccgtactggtgtg

SEQ ID NO: 306973 - DNA, 75 bp, synthetic construct
  source 1..75: mol_type = other DNA
ttccgcattccaaaacacacctggagttttgtgcgccagtcatggctgactcaccagccatcgctttattcgcgt

SEQ ID NO: 306974 - DNA, 75 bp, synthetic construct
  source 1..75: mol_type = other DNA
gaccagctggctgtactggccagtcccaatggtacgctggacgaagtccatcacagtctgttgctgcgcggggtt

SEQ ID NO: 306975 - DNA, 75 bp, synthetic construct
  source 1..75: mol_type = other DNA
acacggtgaacgggatttacggcagctacttcaactctgatgaaccgtcactcaatgatgatgcccgtatggttg

SEQ ID NO: 306976 - DNA, 75 bp, synthetic construct
  source 1..75: mol_type = other DNA
gtggttattcctgggtattcgatatgggggatggttacaaatcactgtgcgaaaacatggggggtgtgtatctcg

SEQ ID NO: 306977 - DNA, 75 bp, synthetic construct
  source 1..75: mol_type = other DNA
aaggtggttctcaagcaggatgcgtcggaatttaaacagtacaaccagaaccgccccaaccagttcagcgagctg

SEQ ID NO: 306978 - DNA, 75 bp, synthetic construct
  source 1..75: mol_type = other DNA
tcctgggggatttacggcgaatatttcaacagcaacgagccgtcactgactgacgatgcccgctttatcgtcctg

SEQ ID NO: 306979 - DNA, 75 bp, synthetic construct
  source 1..75: mol_type = other DNA
gaatcgccaccaacggtcgcggcacgctttggtattaccgttgatgaattacgtcgcctgaatcagttccgtacc

SEQ ID NO: 306980 - DNA, 75 bp, synthetic construct
  source 1..75: mol_type = other DNA
cgttacagggggccagtatcaccacacagacggtggatgcacaggcctttatcgatattgtcggggagatgatta

SEQ ID NO: 306981 - DNA, 75 bp, synthetic construct
  source 1..75: mol_type = other DNA
cggcgtggcaatgttaatgggccaccagctcaccggcaccgctcaggtatttgccgatgtccgtacctactggtc

SEQ ID NO: 306982 - DNA, 75 bp, synthetic construct
  source 1..75: mol_type = other DNA
tgctgcgctttgcccgcgccggtttagcagtcgccagcatgaaaggtaaaagctatctgtcgctgggcggcgttt

SEQ ID NO: 306983 - DNA, 75 bp, synthetic construct
  source 1..75: mol_type = other DNA
aggctggaagctgctcaactttaaaaatgagaaggtcggtcagttcattgaaaccggctaccgtacggttcgccg

SEQ ID NO: 306984 - DNA, 75 bp, synthetic construct
  source 1..75: mol_type = other DNA
cgttgccacctgggttaatggcaatgaaagtgggcagttgattgaaacctgcgccgggctgctggataacgatga

SEQ ID NO: 306985 - DNA, 75 bp, synthetic construct
  source 1..75: mol_type = other DNA
ttggcgaagtacggaaattatttgaactgtatatgtcgcctggcggtgtaaccgagttaattcatttttttattg

SEQ ID NO: 306986 - DNA, 75 bp, synthetic construct
  source 1..75: mol_type = other DNA
taacgccggtggtggtgtcgaagatgaagatattgaagtgctcgagctgccgttcagccaggcgctggagatgat

SEQ ID NO: 306987 - DNA, 75 bp, synthetic construct
  source 1..75: mol_type = other DNA
cctcaacatcacagcattctgcaaggacaataatgaaacggcgctggaagtggagcaggacatcctgaacagctt

SEQ ID NO: 306988 - DNA, 75 bp, synthetic construct
  source 1..75: mol_type = other DNA
ggtacttacggccagtattttaactctgatgaaccgtccctgcgggatgacgcaaaaatggtggtgctggagctg

SEQ ID NO: 306989 - DNA, 75 bp, synthetic construct
  source 1..75: mol_type = other DNA
ccgaatacagtgacagccagcgcgctaacgccggcggtggtgtcgaagatgaagatattgaagtgctcgagctgc

SEQ ID NO: 306990 - DNA, 75 bp, synthetic construct
  source 1..75: mol_type = other DNA
ctgcttgaccagtacactgctaacggcacttatggccagtatttcaactccgatgagccgtccctgcgggatgat

SEQ ID NO: 306991 - DNA, 75 bp, synthetic construct
  source 1..75: mol_type = other DNA
gcgaccgggcaatgctggaagtgatgtacggcgcgggcctgcgtctttccgaactggtggggctggatatcaaac

SEQ ID NO: 306992 - DNA, 75 bp, synthetic construct
  source 1..75: mol_type = other DNA
cggcgcagcagcagttcaacagcccgaccggtctgccgctgaccctgcgtgactaccgcctgtatatttcttact

SEQ ID NO: 306993 - DNA, 75 bp, synthetic construct
  source 1..75: mol_type = other DNA
tttacgaaaaactttactttcaggaaacggaaaataaagacaagatttacaacagaattcaaatgatatttggat

SEQ ID NO: 306994 - DNA, 75 bp, synthetic construct
  source 1..75: mol_type = other DNA
gacaccgaacacgcgcagcctggcattggaagcggcgggggtagccgtcaatgcgcagggggccatcgtcatcga

SEQ ID NO: 306995 - DNA, 75 bp, synthetic construct
  source 1..75: mol_type = other DNA
ttacgggtgattttcagggtgcgatgaaggatgcgcagaatatctttgattctcttatagcgtttatcactggtg

SEQ ID NO: 306996 - DNA, 75 bp, synthetic construct
  source 1..75: mol_type = other DNA
caccgccagcatcaacaacagcagccagagccagaacgtcacctttgtacctggtgatgcatcgcaactcacttc

SEQ ID NO: 306997 - DNA, 75 bp, synthetic construct
  source 1..75: mol_type = other DNA
gcacaagggcgcgatattaagatctaccgcgaactgcgttctgatccgctggtcggcggctgtattcgtcggcgc

SEQ ID NO: 306998 - DNA, 75 bp, synthetic construct
  source 1..75: mol_type = other DNA
tctcagggccgggatatccgtatctatcgtgaactgcgtaccgacccgctggttggtggctgcatccgcaggcgg

SEQ ID NO: 306999 - DNA, 75 bp, synthetic construct
  source 1..75: mol_type = other DNA
accagtgcggtcaccgccagcatcaacaacagcagcctgagccggaacgtgacgtttgtcgccgatgtcagcacg

SEQ ID NO: 307000 - DNA, 75 bp, synthetic construct
  source 1..75: mol_type = other DNA
cgacgtggccagccccgtctggaagatgtgggaacagggaacggtcgacgatacccaggcaacccgcgacgagaa

SEQ ID NO: 307001 - DNA, 75 bp, synthetic construct
  source 1..75: mol_type = other DNA
accccgcagtacttcatgcgtgagtaccaactgcaggacggcgatattgacgagatatcaccgtcggaacgccag

SEQ ID NO: 307002 - DNA, 75 bp, synthetic construct
  source 1..75: mol_type = other DNA
ggcgcgggtgttccgctttgtgcgtgatctgtttgatgatctggatatttcacgcattacgggcgagatgaccga

SEQ ID NO: 307003 - DNA, 75 bp, synthetic construct
  source 1..75: mol_type = other DNA
cggcagggttcacggaccacgtcttcgcgttgatgcacctgctgggcttccgcttcgccccgcgcattcgtgacc

SEQ ID NO: 307004 - DNA, 75 bp, synthetic construct
  source 1..75: mol_type = other DNA
ggcgctactacgaactgtgcgcgctgtcggagctgaagaacgcgctgcgctccggcgacatctgggtgcaaggct

SEQ ID NO: 307005 - DNA, 75 bp, synthetic construct
  source 1..75: mol_type = other DNA
gttcaccagaaccggctgctcaagatcgcccgcgagggcggccagatgacgcccgccgacctggcgaagttcgag

SEQ ID NO: 307006 - DNA, 75 bp, synthetic construct
  source 1..75: mol_type = other DNA
ggacggcacggtggagatctctgtcaccagccagaccgccggaatcagtgcggtcactgccagcattaacagcag

SEQ ID NO: 307007 - DNA, 75 bp, synthetic construct
  source 1..75: mol_type = other DNA
aagatcacgccgctggacgcggcagtaccagacgccgcgcaagccatgatcgaccagacagctatgctgctgccg

SEQ ID NO: 307008 - DNA, 75 bp, synthetic construct
  source 1..75: mol_type = other DNA
gctggcccgcgccgtgttcttcaaccgcctgggggaaatccgcgaccgcagcttcgagcagcagcgctaccgggc

SEQ ID NO: 307009 - DNA, 75 bp, synthetic construct
  source 1..75: mol_type = other DNA
ctggatattctgatgaacggaggcgcgttaaatggcacgctggaacccgtactggctcctttgtttaagcgggtt

SEQ ID NO: 307010 - DNA, 75 bp, synthetic construct
  source 1..75: mol_type = other DNA
attacccgggcgtattaccggcgtgcagcacagcagcagttcaacagtccgacggggttgccgctgaccctgcgg

SEQ ID NO: 307011 - DNA, 75 bp, synthetic construct
  source 1..75: mol_type = other DNA
gtgaaaaaatttctgagcgtgctggagaacctcacgaatgctttccggatgccggatggcgcatctgagatgacg

SEQ ID NO: 307012 - DNA, 75 bp, synthetic construct
  source 1..75: mol_type = other DNA
accaactgcaggacggcgatattgacgagacaccaccgtcggaacgccagaataacatgctgccgctgtcatttg

SEQ ID NO: 307013 - DNA, 75 bp, synthetic construct
  source 1..75: mol_type = other DNA
cgttcacggtaaatatgtacctggctcgccgcttccggccgaggcggaactctgtgaggagtttgaaacctcgcg

SEQ ID NO: 307014 - DNA, 75 bp, synthetic construct
  source 1..75: mol_type = other DNA
tacggggttgccgctgaccctgcgggactaccgcctgtatatctcctactgtgtgaaagcaaagaaacgcacggc

SEQ ID NO: 307015 - DNA, 75 bp, synthetic construct
  source 1..75: mol_type = other DNA
acatggatatccatgacgccgtctaccagctggcacaacgcaacttccctgatgagatgcgcgaactggaagcgc

SEQ ID NO: 307016 - DNA, 75 bp, synthetic construct
  source 1..75: mol_type = other DNA
cagcagcagcttgacgacgcgctggacattctgatgaacggaggtgtgttaaatggcacgctggaacccgtcctg

SEQ ID NO: 307017 - DNA, 75 bp, synthetic construct
  source 1..75: mol_type = other DNA
ccctcagatgaacacggacgatctgcaggaacggctggcccgcattctctttgtggcaaatatctgggggcgtct

SEQ ID NO: 307018 - DNA, 75 bp, synthetic construct
  source 1..75: mol_type = other DNA
tggtaaggcggacagcagcgaggtattccgcgagctgatcacactgtcacgcagtgagatctccattgcattact

SEQ ID NO: 307019 - DNA, 75 bp, synthetic construct
  source 1..75: mol_type = other DNA
tgatgtcgcctgtcccgtctggaaaatgtgggaacagggaacggtcgatgatacccaggcgacccgggatgagaa

SEQ ID NO: 307020 - DNA, 75 bp, synthetic construct
  source 1..75: mol_type = other DNA
tcacagggccgggatatccgtatttatcgtgagttgcgtaccgacccgctggtcggtgggtgtatccgcaggcgt

SEQ ID NO: 307021 - DNA, 75 bp, synthetic construct
  source 1..75: mol_type = other DNA
ccactgaatttgtctcgtttgccgaaccggcaaaaacactgactgcacagattgcctcccgcagtcgtgccatcg

SEQ ID NO: 307022 - DNA, 75 bp, synthetic construct
  source 1..75: mol_type = other DNA
agggatcgtcttctctgctggtgcatttgtgtcgtcaattgtcgccgtgcgaattggtatatggctttatcaccg

SEQ ID NO: 307023 - DNA, 75 bp, synthetic construct
  source 1..75: mol_type = other DNA
tggggttgcgttctctgccggggcattcgtgtcagctatcgtcgctgtccgcattggcatatggctgtatcaccg

SEQ ID NO: 307024 - DNA, 75 bp, synthetic construct
  source 1..75: mol_type = other DNA
gtattggaatatggctctatcaccgctctgataatccacgcgacttaatgcctgggagaaacgacgatggtaact

SEQ ID NO: 307025 - DNA, 75 bp, synthetic construct
  source 1..75: mol_type = other DNA
gaattggtatatggctctatcaccgttctgataatccacgccagttaattcctgggagaaaaggcgatggtaact

SEQ ID NO: 307026 - DNA, 75 bp, synthetic construct
  source 1..75: mol_type = other DNA
cattaaatcagtggcttagcatgagttctctggcggcggtgatagcaggagtgcctcctgaggttgctttgggag

SEQ ID NO: 307027 - DNA, 75 bp, synthetic construct
  source 1..75: mol_type = other DNA
ctttaaatcagtggcttagtatgagttctcttgctgcggttatcgtaggcgttccgccagaggttgcgctcggtg

SEQ ID NO: 307028 - DNA, 75 bp, synthetic construct
  source 1..75: mol_type = other DNA
aagcgtaggttgctcctggcgctcctaagcttcctctgcggcgttctcttctataaagcgacagcttccattctg

SEQ ID NO: 307029 - DNA, 75 bp, synthetic construct
  source 1..75: mol_type = other DNA
ctacaaaccagcagcatcaattcttatcggcatagccagcctgatccctacaatcacacaggattctttcgagaa

SEQ ID NO: 307030 - DNA, 75 bp, synthetic construct
  source 1..75: mol_type = other DNA
atcggcatagccagcctgatacctaccatcacgcaggactctttcgagaaagggattgttttctctgctggcgca

SEQ ID NO: 307031 - DNA, 75 bp, synthetic construct
  source 1..75: mol_type = other DNA
tacctctgcagttgagtatccaataaaacggcggttattcttggctattctcagcttcctttgcggtcttctctt

SEQ ID NO: 307032 - DNA, 75 bp, synthetic construct
  source 1..75: mol_type = other DNA
ctttaaatcagtggcttagtgttggttctcttactgcggtaatcgcaggtgtcccgccagaagtagctctcggtt

SEQ ID NO: 307033 - DNA, 75 bp, synthetic construct
  source 1..75: mol_type = other DNA
gcattggcatctggctgtatcaccgttctgaaaatccgcgcgacatgatcccggggagaaaagacgatgaccagt

SEQ ID NO: 307034 - DNA, 75 bp, synthetic construct
  source 1..75: mol_type = other DNA
aactggtgaaaaaagttcgccattttatggaaaccgtcagcccattccccgtaggggaacatgggctggcaaaag

SEQ ID NO: 307035 - DNA, 75 bp, synthetic construct
  source 1..75: mol_type = other DNA
gggtggcgtttatgtcgcaactggatgacgtacaggtgcaggcggagaaaatccacgcccgcgtggtgtttaact

SEQ ID NO: 307036 - DNA, 75 bp, synthetic construct
  source 1..75: mol_type = other DNA
cgcgggcagaccattgatgtcaccgtttcgtcgattggcgatgccaaaagtattcgtggcggcactttgttgctg

SEQ ID NO: 307037 - DNA, 75 bp, synthetic construct
  source 1..75: mol_type = other DNA
cggcgtggcgctggcgcaatcgctggagtcgctggtcaacgtacagggcgtgcgtgaaaaccaactggtcggcta

SEQ ID NO: 307038 - DNA, 75 bp, synthetic construct
  source 1..75: mol_type = other DNA
aagatcgttgtgccacattggggatcactcacttgtatcaggggcagtcaaacaaactgatcgcctttagcgatc

SEQ ID NO: 307039 - DNA, 75 bp, synthetic construct
  source 1..75: mol_type = other DNA
gcagagctccaccaacgttaccgtgcgcgcgcccaccagccccggcgcgcgggtggcgtttatgtcgcaactgga

SEQ ID NO: 307040 - DNA, 75 bp, synthetic construct
  source 1..75: mol_type = other DNA
cgatcgccgtgagcctggcgctacccggcgtggtgctggcgcaatcgctggagtcactggtcaacgtacagggcg

SEQ ID NO: 307041 - DNA, 75 bp, synthetic construct
  source 1..75: mol_type = other DNA
tgcgccgcgacgggcatggtgggccgagaatctgaactattccgctacaccgtgaagcacagtctgatttttgcc

SEQ ID NO: 307042 - DNA, 75 bp, synthetic construct
  source 1..75: mol_type = other DNA
cgctacaccgtgaagcacagtctgatttttgccagcgttatcggcgttatcacgttgttgcaggcgtatgtgttt

SEQ ID NO: 307043 - DNA, 75 bp, synthetic construct
  source 1..75: mol_type = other DNA
atcttcagaaactgtccggtgttcagccggatattgcaagtgttgcatcagatgtcgtgaatgcgaaaaaacaac

SEQ ID NO: 307044 - DNA, 75 bp, synthetic construct
  source 1..75: mol_type = other DNA
cgggactatatcattaaaaattttgatgaaaggaaaataataaaaatataccatgatacattaacaaaatatatg

SEQ ID NO: 307045 - DNA, 75 bp, synthetic construct
  source 1..75: mol_type = other DNA
cctctgctattgtaacatcagtcatattttctgcattacatctacaatatactgactttcatacatttttgatgc

SEQ ID NO: 307046 - DNA, 75 bp, synthetic construct
  source 1..75: mol_type = other DNA
ctgttaatgcccatattacttcacatggcgatgaatgcagtcataacaggaatacaatatacgttacaatatcac

SEQ ID NO: 307047 - DNA, 75 bp, synthetic construct
  source 1..75: mol_type = other DNA
ctttaaatcagtggcttagcgtgagttctcttgctgcagtgatagcaggtgtccctccagaggtggctttgggag

SEQ ID NO: 307048 - DNA, 75 bp, synthetic construct
  source 1..75: mol_type = other DNA
atgcgaaagttcaaaataattattgaaacgggaatagccggtggaggtttcgaggatgtattcgaagtggacgat

SEQ ID NO: 307049 - DNA, 75 bp, synthetic construct
  source 1..75: mol_type = other DNA
tgcgataactgtcgtgaaatcgagcaggggcgctttgtcgatctgattgaaatcgatgccgcctcgcgcaccaaa

SEQ ID NO: 307050 - DNA, 75 bp, synthetic construct
  source 1..75: mol_type = other DNA
aggggcgctttgtcgatctgattgagatcgacgccgcctcgcgtaccaaagtcgaagatacccgcgacctgctgg

SEQ ID NO: 307051 - DNA, 75 bp, synthetic construct
  source 1..75: mol_type = other DNA
aagaaatacaacctctggcaacagtacaaaaaagagcatcagtgcaaagtgtcggacttccgtcccgggcagacc

SEQ ID NO: 307052 - DNA, 75 bp, synthetic construct
  source 1..75: mol_type = other DNA
aacggacagattgccaaattcgtaactgagcaaggccattctatggctgtttatgatgcgtatggtacacagcag

SEQ ID NO: 307053 - DNA, 75 bp, synthetic construct
  source 1..75: mol_type = other DNA
aaacgggaatagccggtggagattttgaggatgtattcgaagtggacgatgacgcaacacctgatgaaattcatg

SEQ ID NO: 307054 - DNA, 75 bp, synthetic construct
  source 1..75: mol_type = other DNA
accaaagcaaaaaagagtgaaccggcagccgctacccgcgcgcggccggtgaataacgctgcgctggaaagactg

SEQ ID NO: 307055 - DNA, 75 bp, synthetic construct
  source 1..75: mol_type = other DNA
cccacgcggtcagtgcgatgctgggtacgcttgatgacgatcaggcattgtcgttggttgaagcgatggttgggg

SEQ ID NO: 307056 - DNA, 75 bp, synthetic construct
  source 1..75: mol_type = other DNA
cgcgcccagtgccatcggcgctggaaaaagcgccagccaaaaaagaagcgtatcgctggaaggcgaccactccag

SEQ ID NO: 307057 - DNA, 75 bp, synthetic construct
  source 1..75: mol_type = other DNA
tacgcttgacgacgatcaggcgttgtcgctggttgaagcgatggtcgaggccaacggcgagcgcgtaatggcgct

SEQ ID NO: 307058 - DNA, 75 bp, synthetic construct
  source 1..75: mol_type = other DNA
ccgctgaaggcagcctgcgagacgcgttaagtctgactgaccaggcgattgccagcggtgatggtcaggtttcga

SEQ ID NO: 307059 - DNA, 75 bp, synthetic construct
  source 1..75: mol_type = other DNA
cagctttattatcagacgctactgattggtcgcaaagaactgccgtatgcgccggacagacgcatgggggttgaa

SEQ ID NO: 307060 - DNA, 75 bp, synthetic construct
  source 1..75: mol_type = other DNA
taattgagtcccgcgatgaggataataacggacctgcacgggacgcatggatatgtgatggtggtgcggtttact

SEQ ID NO: 307061 - DNA, 75 bp, synthetic construct
  source 1..75: mol_type = other DNA
tatgaaattccaggtcttccagtggttgattggcgcaacggacggtcatgcaaaaaacttctccgtatttattca

SEQ ID NO: 307062 - DNA, 75 bp, synthetic construct
  source 1..75: mol_type = other DNA
ttccggagaacgtggtgacggcagttgaaaccaatgtgttgaggttgcatggacggttaagccgagaatacggta

SEQ ID NO: 307063 - DNA, 75 bp, synthetic construct
  source 1..75: mol_type = other DNA
tccttggcggtacgggaatacacatcagcgatctcaaactggcaatggggcttaacgcatccaaaggcaaaaaaa

SEQ ID NO: 307064 - DNA, 75 bp, synthetic construct
  source 1..75: mol_type = other DNA
gtgcatatttagttaaattagatccatttcattatggtaaaaaaacaattagaaaatacctgtcaaaattaaaat

SEQ ID NO: 307065 - DNA, 75 bp, synthetic construct
  source 1..75: mol_type = other DNA
agtcattgaccacggtggacttatcagctttgatgttaatttacgagaccaaatgtggcgtgataaggaagaaat

SEQ ID NO: 307066 - DNA, 75 bp, synthetic construct
  source 1..75: mol_type = other DNA
ccttcctgatacacccgtactggaaacgtttattaatcattttccattaccgggctatgagatccttggagcaac

SEQ ID NO: 307067 - DNA, 75 bp, synthetic construct
  source 1..75: mol_type = other DNA
tataattttgcaaaatttttcgtcaaaggattgcggatcatatatatatatatcattcctttatttctagttgaa

SEQ ID NO: 307068 - DNA, 75 bp, synthetic construct
  source 1..75: mol_type = other DNA
tcggttggcttggtcgggcttgctttagctattatttactgcaagctggtagataaaaaaaattcacaagtgata

SEQ ID NO: 307069 - DNA, 75 bp, synthetic construct
  source 1..75: mol_type = other DNA
tataactttgcaaaatttttcgtcaagggattgcgtgttatatatgtatatatcatccctttgtttctagttgaa

SEQ ID NO: 307070 - DNA, 75 bp, synthetic construct
  source 1..75: mol_type = other DNA
aatatgacggtgactactgttattgataaaaatacttttacagttacgacgcaaaatacccaggatgtggatcag

SEQ ID NO: 307071 - DNA, 75 bp, synthetic construct
  source 1..75: mol_type = other DNA
aggcgattcagtatctgctggatttgcgctgcgacgccatcatgatttacccgcgttttttaagcgtggatgaga

SEQ ID NO: 307072 - DNA, 75 bp, synthetic construct
  source 1..75: mol_type = other DNA
acggtgcagtacactgcgttgattgcgtgtaaagggatgaaaatgatgacgacgatgctggaagtggcgaagcgc

SEQ ID NO: 307073 - DNA, 75 bp, synthetic construct
  source 1..75: mol_type = other DNA
cagctgctggcgcacccgccagtctccgccgaacccgctggcgcggtttcgggctgccgctacggtccgatgcgt

SEQ ID NO: 307074 - DNA, 75 bp, synthetic construct
  source 1..75: mol_type = other DNA
gataatccagttaattccctgactgaacaacaagtgcgtgacatttttagtggcgcaattaccaactggcgtact

SEQ ID NO: 307075 - DNA, 75 bp, synthetic construct
  source 1..75: mol_type = other DNA
acaaaaattggtggagtggtttttaacgccgcaggggcagagcctggtggaagatgtaggttatgtgccgatgta

SEQ ID NO: 307076 - DNA, 75 bp, synthetic construct
  source 1..75: mol_type = other DNA
acaactgttgcgccatcaggaccatatcaaaagtgggacggcaaaaagtgggtaacagatactgacgcacagcac

SEQ ID NO: 307077 - DNA, 75 bp, synthetic construct
  source 1..75: mol_type = other DNA
gattgcgtgggtgcagtacatcaaagctgttcaggcggtggatacctccactgcaccagatatcacctggcctga

SEQ ID NO: 307078 - DNA, 75 bp, synthetic construct
  source 1..75: mol_type = other DNA
ccgccgaacccgctggcgcggtttcgggctgccgctacggtccgatgcgtgaaaacccggcttgcagcgaccgtt

SEQ ID NO: 307079 - DNA, 75 bp, synthetic construct
  source 1..75: mol_type = other DNA
ctggcgacccgataaactcaataatcaactgacaccactgcgtggtaaaccgcaaattcagtttacgcaaaactg

SEQ ID NO: 307080 - DNA, 75 bp, synthetic construct
  source 1..75: mol_type = other DNA
ttttcacgaatgggaatatctggcgaactctctagactggccccctgaatctccagacaaccaatatcacttaaa

SEQ ID NO: 307081 - DNA, 75 bp, synthetic construct
  source 1..75: mol_type = other DNA
tcagcagcaactttcatctccagcctgtatggccaggcactgccactgttatctggcttatcatctgcgtcagga

SEQ ID NO: 307082 - DNA, 75 bp, synthetic construct
  source 1..75: mol_type = other DNA
ttatttatataaacagcttaatcccggcgtcggtgtgcgtgaaaatattgatacctgggcctggcgacccgataa

SEQ ID NO: 307083 - DNA, 75 bp, synthetic construct
  source 1..75: mol_type = other DNA
tacccaatttatgcctctgccttttatgcgttgagcgttataccggaagatttccacaccagggaatatctggag

SEQ ID NO: 307084 - DNA, 75 bp, synthetic construct
  source 1..75: mol_type = other DNA
aaattcagtttacgcaaaactggccgcgactcgatggtgctacggcggcgtacccaatttatgcctctgcctttt

SEQ ID NO: 307085 - DNA, 75 bp, synthetic construct
  source 1..75: mol_type = other DNA
tggtaaaaaacgcgtgcaatgggcgctagtgatcaccggtctggttgtgggcctcgccatgttttttgaagtggg

SEQ ID NO: 307086 - DNA, 75 bp, synthetic construct
  source 1..75: mol_type = other DNA
gccgcaatgttgccgccagtctgccagatgattatgtttcctcccgcgtacagaaacccacccccacacggcttt

SEQ ID NO: 307087 - DNA, 75 bp, synthetic construct
  source 1..75: mol_type = other DNA
aaccacctcgtcctgggcctcctgtacgcgtctctcatcgccaacggtgatgctggacatggtggtgggcagggt

SEQ ID NO: 307088 - DNA, 75 bp, synthetic construct
  source 1..75: mol_type = other DNA
agtgtcattgcaactaaaacatggacaatgccggataataatacgatttatgttacatgtgatagaattactact

SEQ ID NO: 307089 - DNA, 75 bp, synthetic construct
  source 1..75: mol_type = other DNA
ccacgattaccgggtggattatccctggtgggaaaacgcctatccggacaatttttatcaggattgctggtatga

SEQ ID NO: 307090 - DNA, 75 bp, synthetic construct
  source 1..75: mol_type = other DNA
ccgcctcaggaaggggacctcgtcatcatgcaggtgcaggccgataagtggaatcatgccgggattttactggag

SEQ ID NO: 307091 - DNA, 75 bp, synthetic construct
  source 1..75: mol_type = other DNA
acggtcatcttagccagcgcgtgccatatggtggctactggcaggaaagaacaatgaaagtacttcggtacaaag

SEQ ID NO: 307092 - DNA, 75 bp, synthetic construct
  source 1..75: mol_type = other DNA
ctatcagcaacaacccgctcaggaagacaatgatacttctgtcttcccgtccgtattccggggggatgtggccga

SEQ ID NO: 307093 - DNA, 75 bp, synthetic construct
  source 1..75: mol_type = other DNA
gcggcgcgtttaagcaggtattagtagatagcggtgtcgggcactatatttcacacttaatgaccggaactacgc

SEQ ID NO: 307094 - DNA, 75 bp, synthetic construct
  source 1..75: mol_type = other DNA
ttggtgaaacgttgcgtacctggacggtgatggaaacccttatttctattatgggtttgctgggcgtgttagcca

SEQ ID NO: 307095 - DNA, 75 bp, synthetic construct
  source 1..75: mol_type = other DNA
ctatcaacaacaaacagttcaggatgatagcagcacttcaatcgtcccctctatattccaggacagagtagctga

SEQ ID NO: 307096 - DNA, 75 bp, synthetic construct
  source 1..75: mol_type = other DNA
tcactggagatccttgcgctgggaagcccactgctcaatcaattggtgatcgatgaagtcctggtggctgccgat

SEQ ID NO: 307097 - DNA, 75 bp, synthetic construct
  source 1..75: mol_type = other DNA
gagggaataaaccgatactccgcggggtgtcgctgacactccatcctggcgaggtgatggccattaccggtcaat

SEQ ID NO: 307098 - DNA, 75 bp, synthetic construct
  source 1..75: mol_type = other DNA
aaaaccttaaaaaagaaatcaaagtgctttttaaggggattcatgactggtgtaaaaccaaccgcaatgagctga

SEQ ID NO: 307099 - DNA, 75 bp, synthetic construct
  source 1..75: mol_type = other DNA
cctgcgggcgcaggcagctcagaaacaggcagaaaaagcggcacagcagcagaaggaacatgaatcctctgctaa

SEQ ID NO: 307100 - DNA, 75 bp, synthetic construct
  source 1..75: mol_type = other DNA
cctgatagcccagctcaaagagggtactgcgccatggcagaagccatggaaccccggcgcacccggtgcagccct

SEQ ID NO: 307101 - DNA, 75 bp, synthetic construct
  source 1..75: mol_type = other DNA
ggcgacgtacaggcgggatcatcccggccgggatgtcgctggagtttcaggcggcagcgaacggtcaggccgatc

SEQ ID NO: 307102 - DNA, 75 bp, synthetic construct
  source 1..75: mol_type = other DNA
ttccagttttctggcgtcaaaacctaatggagaatcttccgcagcgcctgcgtcagaagaggaatcccttgaggt

SEQ ID NO: 307103 - DNA, 75 bp, synthetic construct
  source 1..75: mol_type = other DNA
acatcgctcaggaaaataccccgatcaacgtaccttataaggaacgtaaagaagctaaagagctgggtgcgaaat

SEQ ID NO: 307104 - DNA, 75 bp, synthetic construct
  source 1..75: mol_type = other DNA
aaaagtttattctttcaaacctcgatggcggtctgtcgcatcatgttcagaacatgaaccgcagccagcttaatc

SEQ ID NO: 307105 - DNA, 75 bp, synthetic construct
  source 1..75: mol_type = other DNA
agcgccgcagatggtcagtcagacccttttatggcgatgattggctgggcagaaaaagcgatttcaaaagccatt

SEQ ID NO: 307106 - DNA, 75 bp, synthetic construct
  source 1..75: mol_type = other DNA
atgagcaaagcaggtacgtcgcttgagacctgttacggccctgtcagcgccgacgttatggcaaaagcggagaac

SEQ ID NO: 307107 - DNA, 75 bp, synthetic construct
  source 1..75: mol_type = other DNA
gatctcatcgactggccagtaatggaaaaagtaggcttaagcgtggctgtggccgatgcacatccgctgttgatt

SEQ ID NO: 307108 - DNA, 75 bp, synthetic construct
  source 1..75: mol_type = other DNA
cagtccgatctggcggctgacattgaagaaaaggacacccacctttttgcggagctgggcaagcgacgtcttgcc

SEQ ID NO: 307109 - DNA, 75 bp, synthetic construct
  source 1..75: mol_type = other DNA
ccattcagggggtgccctggagtattgagccgccaccgaacgccagcgcgaatgagaaaaaggacgcggaaatgc

SEQ ID NO: 307110 - DNA, 75 bp, synthetic construct
  source 1..75: mol_type = other DNA
catattccacagccggtcggtgatgaagccgtgtttactgctcaaccggttgtcccggataacggtccgcagaaa

SEQ ID NO: 307111 - DNA, 75 bp, synthetic construct
  source 1..75: mol_type = other DNA
aatataccattgtggaaaatcccggccagaatgagcatgtgaatatcatcatgcagaccaacagcgcggttaagg

SEQ ID NO: 307112 - DNA, 75 bp, synthetic construct
  source 1..75: mol_type = other DNA
tgcaaatgccgtttgagccgtctcacgagaatatggctaatctgaagctttacccggatcaacccgttgaagtgc

SEQ ID NO: 307113 - DNA, 75 bp, synthetic construct
  source 1..75: mol_type = other DNA
ggcaaatccataacaccgttcgttttcccaacctgaatctcgacaactccgtccacatcactaacctggtctttt

SEQ ID NO: 307114 - DNA, 75 bp, synthetic construct
  source 1..75: mol_type = other DNA
atggcaaaacgcgttacaaaattaaaggccgcagctgaggcagcaccgcagacccgtgaagaggtcagccgcgat

SEQ ID NO: 307115 - DNA, 75 bp, synthetic construct
  source 1..75: mol_type = other DNA
ggcggagccggatgcggtgaaaggcattgccggtattaaggtgaataaaggcgctgaaagtttttatgtcgagcc

SEQ ID NO: 307116 - DNA, 75 bp, synthetic construct
  source 1..75: mol_type = other DNA
accaggtcattactcacagtataacggtcggcagtcgcataaccgttcaggggttcatttcatgccacaaggcaa

SEQ ID NO: 307117 - DNA, 75 bp, synthetic construct
  source 1..75: mol_type = other DNA
aggaaatcaacaaggaggcgattttactggaaccaaaagccgtcgcaggtgttgccggaattacggttaaatcgg

SEQ ID NO: 307118 - DNA, 75 bp, synthetic construct
  source 1..75: mol_type = other DNA
aaagccaccgcctcagcgatagcaatttatagctttatcgcaggacttaacgagcaaggtaaagaatgctacgcc

SEQ ID NO: 307119 - DNA, 75 bp, synthetic construct
  source 1..75: mol_type = other DNA
ttccgtgatattgccgatcctgtgctggcaagtgaggcggcttatattcagtgtccttcctgttcaggacggatt

SEQ ID NO: 307120 - DNA, 75 bp, synthetic construct
  source 1..75: mol_type = other DNA
tcaatactggaaattcactgaggaacgtatcaaacgcaacgatgatggcagcgttgtgctcgataaagatgataa

SEQ ID NO: 307121 - DNA, 75 bp, synthetic construct
  source 1..75: mol_type = other DNA
gattgaaatgctgcgccgtatggggcttgagcgtttcatccgcacgaaagaggaagtgaacaaggaagcggtcct

SEQ ID NO: 307122 - DNA, 75 bp, synthetic construct
  source 1..75: mol_type = other DNA
atggttaaacgtgttacaaaattaaaggccgcagccgaggctgcaccgcagacccgcgaagaagtcagccgcgat

SEQ ID NO: 307123 - DNA, 75 bp, synthetic construct
  source 1..75: mol_type = other DNA
atggtaatcgtacctggatggcggcaactggagagaacgaatataccgtaattgaacaaacaggtgacaaatcat

SEQ ID NO: 307124 - DNA, 75 bp, synthetic construct
  source 1..75: mol_type = other DNA
ggcctgctgtgcattaatatgaacctcgatgttcctttctcgcagattatgagcaccttcgtgccaccagagacg

SEQ ID NO: 307125 - DNA, 75 bp, synthetic construct
  source 1..75: mol_type = other DNA
aggcggcgtttgttgtaccaaaagaagatattgctgcgcagaaatacgatctctctattaatcgttataaagaag

SEQ ID NO: 307126 - DNA, 75 bp, synthetic construct
  source 1..75: mol_type = other DNA
tgagccagagtttcagcactaacttcccgcaggccagtaaaaacgccttcaacctgattctggcgaacccgccgt

SEQ ID NO: 307127 - DNA, 75 bp, synthetic construct
  source 1..75: mol_type = other DNA
cgcagctatccgtgaactgatccttcgcgcctgcaggaacatgattaagctgctcacccaggatgacaccgtcaa

SEQ ID NO: 307128 - DNA, 75 bp, synthetic construct
  source 1..75: mol_type = other DNA
ttgcactctttgcaggatctaaaatgttcagccattcgcattgctaacggtgaacatacaggccggaaggttggt

SEQ ID NO: 307129 - DNA, 75 bp, synthetic construct
  source 1..75: mol_type = other DNA
tcaaccaggttgcagatcgtctgaacatctccaagcacactgtttatctctatatccgtcagttcaagagcggtg

SEQ ID NO: 307130 - DNA, 75 bp, synthetic construct
  source 1..75: mol_type = other DNA
ggcacggtggaacacttactggtgatgccgataacgccgtttgagatcatgatggcgaaggtctggtcgatgggg

SEQ ID NO: 307131 - DNA, 75 bp, synthetic construct
  source 1..75: mol_type = other DNA
tcgatcccgctgtttatgctgggcgtggcgctcagtctgtttgccaccacgtcaatcggcatttttatggggacg

SEQ ID NO: 307132 - DNA, 75 bp, synthetic construct
  source 1..75: mol_type = other DNA
atgcgccatttacgcaatatttttaatttgggtatcaaagagttgcgcagcctgctcggtgataaagcgatgctg

SEQ ID NO: 307133 - DNA, 75 bp, synthetic construct
  source 1..75: mol_type = other DNA
gcgtaaccatgtggataacaatatgttccacggttacgattttgataccaccatgctgcgtatcgctgccatgaa

SEQ ID NO: 307134 - DNA, 75 bp, synthetic construct
  source 1..75: mol_type = other DNA
gtgatactgaaacgattaaaagatctggaaaaagagattctggcagatctggatgaactggaggggatgctgtga

SEQ ID NO: 307135 - DNA, 75 bp, synthetic construct
  source 1..75: mol_type = other DNA
tctgctcggtgataaagcgatgctgacgctgattgtcttctcgtttacggtatcggtgtattcgtcagcgaccgt

SEQ ID NO: 307136 - DNA, 75 bp, synthetic construct
  source 1..75: mol_type = other DNA
acctcgcctgcgcccagtggattgctgattttattggcgagcagttccgtccgcacgccgaagaagccgaacgtt

SEQ ID NO: 307137 - DNA, 75 bp, synthetic construct
  source 1..75: mol_type = other DNA
taccattctcggaaaagtggtgggaagtatcgctgagatgggcgctgaatacgtcaaacaaatgatcttaagcga

SEQ ID NO: 307138 - DNA, 75 bp, synthetic construct
  source 1..75: mol_type = other DNA
ccaaccgggtgtgtggagagaagctgccgcaggtgtaccgtgctctgtggatggataaaccggaaccagtggcga

SEQ ID NO: 307139 - DNA, 75 bp, synthetic construct
  source 1..75: mol_type = other DNA
ggccggatggtataccgccgggccatcgcgggactgaatgtggaggggctgaagaaaaacgcgcgggatatcagt

SEQ ID NO: 307140 - DNA, 75 bp, synthetic construct
  source 1..75: mol_type = other DNA
atgtaacaaacaacattcaaaccacaaatggattcagtgatgaagactcaagacgtctggaagacaccatgaagc

SEQ ID NO: 307141 - DNA, 75 bp, synthetic construct
  source 1..75: mol_type = other DNA
aggcactggggatggataaaccggaaccggtggtgaaggtgtgctatgcgcagatggtgaagcagttcctgagtc

SEQ ID NO: 307142 - DNA, 75 bp, synthetic construct
  source 1..75: mol_type = other DNA
atggtgaggtacttcgggttccttgccaaccgggtgagtggagaaaagctgccgcaggtgtaccgtgctctgggg

SEQ ID NO: 307143 - DNA, 75 bp, synthetic construct
  source 1..75: mol_type = other DNA
gtcgaaagactggtacaggacgccgggattatccgccatcgcgggaaaattcaggcaattattggtaatgcgcgg

SEQ ID NO: 307144 - DNA, 75 bp, synthetic construct
  source 1..75: mol_type = other DNA
atgagttttgaggatagcgaaaaaacgtctgtgataaccttacagaagcattacaattttgtaatgaaccaggct

SEQ ID NO: 307145 - DNA, 75 bp, synthetic construct
  source 1..75: mol_type = other DNA
agaaaagaccgaactgatcaaccagacggtgacctgtcatatcgacctgattttgcaaggattatcgcaaaggag

SEQ ID NO: 307146 - DNA, 75 bp, synthetic construct
  source 1..75: mol_type = other DNA
cgacaatttgttactcctttatgcaggcatgtgggctggtgaatgatcatgtggttagctgctgttgccatccgg

SEQ ID NO: 307147 - DNA, 75 bp, synthetic construct
  source 1..75: mol_type = other DNA
ccaggcgattattggtaatgcgcgggcatatctgcaaatggaacagaacggcgaaccgtttgctgactttgtctg

SEQ ID NO: 307148 - DNA, 75 bp, synthetic construct
  source 1..75: mol_type = other DNA
tgatctgccttgaagggcagcaggctggattatcgtggatcaccgtcctcaaaaaacgcgaaaactatcgcgcca

SEQ ID NO: 307149 - DNA, 75 bp, synthetic construct
  source 1..75: mol_type = other DNA
ccgatcgccattgccgatatggatcaatcgcagttgtcgaaccggatcgttaacagcttctatcgcccgtggttt

SEQ ID NO: 307150 - DNA, 75 bp, synthetic construct
  source 1..75: mol_type = other DNA
atgcacaagctgtaaaagaccctgaactagagcgccgcattgaagagttcgccattaaagccgatttggtgccgg

SEQ ID NO: 307151 - DNA, 75 bp, synthetic construct
  source 1..75: mol_type = other DNA
attatcctgaatctagagattatggtgttaaaacagatatttgggttaaaactggtgcatatctcgatgttcctc

SEQ ID NO: 307152 - DNA, 75 bp, synthetic construct
  source 1..75: mol_type = other DNA
gcgcggcgaatctaagctgcgcttcatggttgaaagagcatcttcagcagcctgaaaaaaaacgccgcgatgagc

SEQ ID NO: 307153 - DNA, 75 bp, synthetic construct
  source 1..75: mol_type = other DNA
cgaccagattatgggctatgcccttcaggccagagacgcgggccagtcagcggcagaactcccggcagatattgt

SEQ ID NO: 307154 - DNA, 75 bp, synthetic construct
  source 1..75: mol_type = other DNA
cggtgcgctcgcgcgtggaaaaaagcgaagctgacgcgcaagccatcaatgccgttattccaccagccagaatgc

SEQ ID NO: 307155 - DNA, 75 bp, synthetic construct
  source 1..75: mol_type = other DNA
tcttgaacgccgaattgaggattttgcaagtaaggctgatttggtgccgggtgagcaaccagaagacaacaaagt

SEQ ID NO: 307156 - DNA, 75 bp, synthetic construct
  source 1..75: mol_type = other DNA
gcagatagctgctgagattgaagcgctggccagtggtgcggacaaggatgcagttgtgcgggaggctcttcttcg

SEQ ID NO: 307157 - DNA, 75 bp, synthetic construct
  source 1..75: mol_type = other DNA
agacagggatactgcggtgcgggaggtccttcttcgtgatttcaatactccgccctttaagaaagagcctgatgg

SEQ ID NO: 307158 - DNA, 75 bp, synthetic construct
  source 1..75: mol_type = other DNA
gtgggattttttaccagcggtggcaacggcgcacaacaagcgggtaaagagctgggcgttgatgtgacctacgac

SEQ ID NO: 307159 - DNA, 75 bp, synthetic construct
  source 1..75: mol_type = other DNA
cgggaggctcttcttcgtgattttgataatccgccctttaaaaaagtgccggcttactggcttcatccggggctg

SEQ ID NO: 307160 - DNA, 75 bp, synthetic construct
  source 1..75: mol_type = other DNA
aaagtatgccggagctatggcgacgcgtagcaggtcagatggggatctcaatgggtgagctacgtcgccgcatgt

SEQ ID NO: 307161 - DNA, 75 bp, synthetic construct
  source 1..75: mol_type = other DNA
attgctcgcaggacctttgcgaatattttgcaggaaaagtttttaccgaccgcattgtcagaaaagtactccatt

SEQ ID NO: 307162 - DNA, 75 bp, synthetic construct
  source 1..75: mol_type = other DNA
ggcaccaaaaaactcaaagtgggggcgcttgctgaagcaaaagcctcctacggtgctgcccgtacggccatgcgc

SEQ ID NO: 307163 - DNA, 75 bp, synthetic construct
  source 1..75: mol_type = other DNA
tcagaagctccttacgccatcatggatgatactggaaactatcagtgccctcattgccaacacaaatatcgtgat

SEQ ID NO: 307164 - DNA, 75 bp, synthetic construct
  source 1..75: mol_type = other DNA
cgcgataagcaggccgaactgaaactctacgctcggcattacacagtggaaaattgcactgaagatagttgtcgg

SEQ ID NO: 307165 - DNA, 75 bp, synthetic construct
  source 1..75: mol_type = other DNA
attcggcccagcttttccctctctcgtagtgccattattcgcctgaatgcggcgaatgctcgttttgtttatcaa

SEQ ID NO: 307166 - DNA, 75 bp, synthetic construct
  source 1..75: mol_type = other DNA
accccggtggtatgtgagccaaacacgcgccagtttctgcgtatttttgcacgccaaccttctgtcgaacgcgat

SEQ ID NO: 307167 - DNA, 75 bp, synthetic construct
  source 1..75: mol_type = other DNA
tacctagaagcaacgtatcctattcgcagtgatgaaactaaaggaaagggcgagtttggttccaagaccattgaa

SEQ ID NO: 307168 - DNA, 75 bp, synthetic construct
  source 1..75: mol_type = other DNA
atgatactggaaactatcagtgccctcattgccaacacaaatatcgtgatgagatggcagcgcagaagggggagt

SEQ ID NO: 307169 - DNA, 75 bp, synthetic construct
  source 1..75: mol_type = other DNA
tttgccgtgaccgaactgatgatgccggtgctgcccgtcgtgcgcgtcgccaacgtggcggatgccattgcgctg

SEQ ID NO: 307170 - DNA, 75 bp, synthetic construct
  source 1..75: mol_type = other DNA
aacgtaaaatagctactcttctttcttcatttatatttcgcgtttcatttaaaaatttcggaacaaaaagtagta

SEQ ID NO: 307171 - DNA, 75 bp, synthetic construct
  source 1..75: mol_type = other DNA
gctggcaattctccggtaactccggatggttggataagctgtagtgagcgaatgccgccagttggtgttgatgta

SEQ ID NO: 307172 - DNA, 75 bp, synthetic construct
  source 1..75: mol_type = other DNA
gacataaaccgcagtattatcaatatacgcgatgctgctgataccaatgtacagaccgggcagaataatttgcaa

SEQ ID NO: 307173 - DNA, 75 bp, synthetic construct
  source 1..75: mol_type = other DNA
actctggctgcaatcaagatggcgaaagatgctggctacactgcagttatctctcaccgttctggtgaaactgaa

SEQ ID NO: 307174 - DNA, 75 bp, synthetic construct
  source 1..75: mol_type = other DNA
gaaactctggctgcaatcaagatggcgaaagacgctggctacactgcagttatctctcaccgttctggcgaaact

SEQ ID NO: 307175 - DNA, 75 bp, synthetic construct
  source 1..75: mol_type = other DNA
ttttttaagaagtgaagcggtgattcctgacaggtttaaaaaccttattttgcttattgatggattaagttttgg

SEQ ID NO: 307176 - DNA, 75 bp, synthetic construct
  source 1..75: mol_type = other DNA
tgtgctgaccaactacgtgaaagccatccgttacctgcaggggattgagcataacggtgagtccttcaccatccg

SEQ ID NO: 307177 - DNA, 75 bp, synthetic construct
  source 1..75: mol_type = other DNA
agctttattggttcttatagctaaaagttttgctgtccagttagcaggtgcaggtgttgaaggtgctgttcaggg

SEQ ID NO: 307178 - DNA, 75 bp, synthetic construct
  source 1..75: mol_type = other DNA
gctcgttggtctgctattatgggtaaaaataagctggcagacgtttataaacggctgtatttactggtggtgtac

SEQ ID NO: 307179 - DNA, 75 bp, synthetic construct
  source 1..75: mol_type = other DNA
actcattggtctggtattatgggtaaaaataagctggcagacgtttataaacggctgtatttactggtggtgtac

SEQ ID NO: 307180 - DNA, 75 bp, synthetic construct
  source 1..75: mol_type = other DNA
cgatgccggaactatggcgacgcgtagccaaacagatggggatctcaatgggtgaactacgccgccgcatgttag

SEQ ID NO: 307181 - DNA, 75 bp, synthetic construct
  source 1..75: mol_type = other DNA
tcgataagatactgaatccgctggatgcccgctgtgccgcctgggatttatggaaggagtgtctgacacagccgg

SEQ ID NO: 307182 - DNA, 75 bp, synthetic construct
  source 1..75: mol_type = other DNA
caacggcaaaacaggttagtgagatgaaaaaccttgcgcacctgatttacgaaacaaacgccgcgcgtgaacacc

SEQ ID NO: 307183 - DNA, 75 bp, synthetic construct
  source 1..75: mol_type = other DNA
ccggcaagaacatgcctaatgaccgtcgaaatttcgggtatctcttctggcgtaaacgcaactgcgttttcctgt

SEQ ID NO: 307184 - DNA, 75 bp, synthetic construct
  source 1..75: mol_type = other DNA
cgttaatgtccaatttgcatcacttaatgcagccataagctctctatcgtccaagatcgatggaaagatggatag

SEQ ID NO: 307185 - DNA, 75 bp, synthetic construct
  source 1..75: mol_type = other DNA
gcgggatttaatcaagtcccagccggtctatgagatccagtattacggcaaaaccttccggatgaacgctgctca

SEQ ID NO: 307186 - DNA, 75 bp, synthetic construct
  source 1..75: mol_type = other DNA
acagaaagatccggcagaagaagcgctgaaacggaaacgcgcagaactggaacgacttaaccagggcttcaagga

SEQ ID NO: 307187 - DNA, 75 bp, synthetic construct
  source 1..75: mol_type = other DNA
tcgataaaatcctgaatccgctggatgcacgctgtgctgcctgggatttgtggaaggagtgcctgacacagccgg

SEQ ID NO: 307188 - DNA, 75 bp, synthetic construct
  source 1..75: mol_type = other DNA
aaatgcctttcccgatacagcgctctcagacagaccggggaagagaattttttgccgttaaagtgcgggaaagat

SEQ ID NO: 307189 - DNA, 75 bp, synthetic construct
  source 1..75: mol_type = other DNA
acacaaatgaatgccgataaaaatataaaactgctagcgattaacggtattgcaccgactgcggaaaatattcgt

SEQ ID NO: 307190 - DNA, 75 bp, synthetic construct
  source 1..75: mol_type = other DNA
aataccgtaatacaaaaaacgcaataggctacaccttccgctattacgcgacacaaatgaacgctgacaagaata

SEQ ID NO: 307191 - DNA, 75 bp, synthetic construct
  source 1..75: mol_type = other DNA
aaacgggaatagctggtggagattttgaggatgtattcgaagtagatgatgacgcaacacctgatgaaattcatg

SEQ ID NO: 307192 - DNA, 75 bp, synthetic construct
  source 1..75: mol_type = other DNA
tgaggatgtattcgaagtggacgatgacgcaacacctgaggaaattcgtaagcgtcaacggagcaccgtattgac

SEQ ID NO: 307193 - DNA, 75 bp, synthetic construct
  source 1..75: mol_type = other DNA
tacagcaggcactggccgccgttcgccaggcattcagggtggtgaccggtacggtggacagttcgaccaaagtac

SEQ ID NO: 307194 - DNA, 75 bp, synthetic construct
  source 1..75: mol_type = other DNA
ctcgctgagattaattgatcaggctattgattcggtctgtcaaaatagaggtggttatttattcgagtctataca

SEQ ID NO: 307195 - DNA, 75 bp, synthetic construct
  source 1..75: mol_type = other DNA
cggccttgaacgaggccattatataagaagagaaatattaaaagctgaaccggtggtaaaaagaaaaatgccgga

SEQ ID NO: 307196 - DNA, 75 bp, synthetic construct
  source 1..75: mol_type = other DNA
gtatagagttaaatcaagaagaacgcagagatatatctatacagttcagagtaaacaaaagagagtttgagtatt

SEQ ID NO: 307197 - DNA, 75 bp, synthetic construct
  source 1..75: mol_type = other DNA
cgttgccgtaacttactcctgtttctacttctcttacttggttttgtcgctgggtatcaggcttatttatataaa

SEQ ID NO: 307198 - DNA, 75 bp, synthetic construct
  source 1..75: mol_type = other DNA
acaaaaaaatgattttaatttaaatatttctcggtatgttaagaaacatgaagagccggcttttgttgatcttaa

SEQ ID NO: 307199 - DNA, 75 bp, synthetic construct
  source 1..75: mol_type = other DNA
atgaagtttgatgtggttgcttctaaccctccatttaatattatcggctggaatcatgatgatttagtacataat

SEQ ID NO: 307200 - DNA, 75 bp, synthetic construct
  source 1..75: mol_type = other DNA
agcagctcgctcagcatgattatccagcctgaagccattctgttcggcaacgtgattgcgcaggcggcctgtgcg

SEQ ID NO: 307201 - DNA, 75 bp, synthetic construct
  source 1..75: mol_type = other DNA
atgaataatttaactaatacctatcgacgcagaattttaaaggctgcgttattacgccaccagcgtaaaacgggc

SEQ ID NO: 307202 - DNA, 75 bp, synthetic construct
  source 1..75: mol_type = other DNA
tgtgtggtgcaattatgaatcagggcgcagcaatggttgtttcaatagttgcggccgcattaccggacgttacga

SEQ ID NO: 307203 - DNA, 75 bp, synthetic construct
  source 1..75: mol_type = other DNA
cctgattaaagactttaaagctgctgatccgaatggtttcctggtttacttctctgaccacggtgaagaggttta

SEQ ID NO: 307204 - DNA, 75 bp, synthetic construct
  source 1..75: mol_type = other DNA
cattacgtgaactggtcgccagcggttttaatcgtgtattcctcggcacggattctgcgccgcatgcacgtcatc

SEQ ID NO: 307205 - DNA, 75 bp, synthetic construct
  source 1..75: mol_type = other DNA
cagccgactatgtccgtgacggaaatgaacggctggctgccaccatcactccgcagcatctgatgtttaaccgca

SEQ ID NO: 307206 - DNA, 75 bp, synthetic construct
  source 1..75: mol_type = other DNA
tgggttatcgactaaaacacgaaaaataaatagtgagcaatactaccagttgacacccgaactggaagtgatgac

SEQ ID NO: 307207 - DNA, 75 bp, synthetic construct
  source 1..75: mol_type = other DNA
gtcccatgtacactgttccgttcctgctgtggacctcggaaaagtggcatgctgcacatccgcgagatttttcgc

SEQ ID NO: 307208 - DNA, 75 bp, synthetic construct
  source 1..75: mol_type = other DNA
gcatatcaaatacaaataccgctacccggaaaatcagggcaagtttgatggcaataccgatcatgttccgccagg

SEQ ID NO: 307209 - DNA, 75 bp, synthetic construct
  source 1..75: mol_type = other DNA
atgcattccacagaagtccaggctaaacccctttttagctggaaagccctgggttgggcactgctctacttttgg

SEQ ID NO: 307210 - DNA, 75 bp, synthetic construct
  source 1..75: mol_type = other DNA
attttcgaagcagaccgacaaacagttctatatgaaccagcaacgtacgcagagtgcgcgtgaatacgacaccaa

SEQ ID NO: 307211 - DNA, 75 bp, synthetic construct
  source 1..75: mol_type = other DNA
gtggtgttatgggcggcctcgctggctgctctgagctattacgtcatctacgggcaagagttctcgcaaagcgtt

SEQ ID NO: 307212 - DNA, 75 bp, synthetic construct
  source 1..75: mol_type = other DNA
cggtattcctcttcccaaggcggattaaaattatcgcggcggtagtcggcgtggtgctctgggcggcctcactgg

SEQ ID NO: 307213 - DNA, 75 bp, synthetic construct
  source 1..75: mol_type = other DNA
gtcaaatcaccgtctttacttatcaggacggcgagccttgctaccgctgccttagccgtttgtttggcgaaaacg

SEQ ID NO: 307214 - DNA, 75 bp, synthetic construct
  source 1..75: mol_type = other DNA
ggattctgtcgatgacagagtcagagggctggacagtggagcaaatgattatctggtaaaacctttttcattttc

SEQ ID NO: 307215 - DNA, 75 bp, synthetic construct
  source 1..75: mol_type = other DNA
aatatcacctctgatgccgtatttaacttcttcgataacctgttacccaatagcccgattgtacgtgaccggatc

SEQ ID NO: 307216 - DNA, 75 bp, synthetic construct
  source 1..75: mol_type = other DNA
gttatacctgtattgcccgcaagccccgctgtggctcttgtattattgaagatctttgtgaatacaaagagaaag

SEQ ID NO: 307217 - DNA, 75 bp, synthetic construct
  source 1..75: mol_type = other DNA
gtcacactgaatatattacttcaaacaggattgattcattaacacactggttaaatgttacctgtgccgatttag

SEQ ID NO: 307218 - DNA, 75 bp, synthetic construct
  source 1..75: mol_type = other DNA
tttgttgccgaaactgccctgtgttgtggggaagcaggaatcaaagcctgggattatgttcgtatgggcttttta

SEQ ID NO: 307219 - DNA, 75 bp, synthetic construct
  source 1..75: mol_type = other DNA
ataccaatacggtggatgtcgccattcgcaggctccgcgcaaaagttgatgatccttttcctgaaaagctaatcg

SEQ ID NO: 307220 - DNA, 75 bp, synthetic construct
  source 1..75: mol_type = other DNA
aaccgaaggtggaatccgcccgtgacgccctgacgcggatcaacccacatatcgcgattacgccagtcaatgcac

SEQ ID NO: 307221 - DNA, 75 bp, synthetic construct
  source 1..75: mol_type = other DNA
tacgatgcgatgacctgtcagtttcgcgaaatgaaactgatgcgcaatccggggtgtgaggtgtgcgggcagtaa

SEQ ID NO: 307222 - DNA, 75 bp, synthetic construct
  source 1..75: mol_type = other DNA
acctgccagcggaaaaatcgtgatgtacgatgcgatgacctgtcagtttcgcgaaatgaaactgatgcgtaatcc

SEQ ID NO: 307223 - DNA, 75 bp, synthetic construct
  source 1..75: mol_type = other DNA
aagattcagcgcgccatgcaggaccgtatcgcgtttgatgaacgcattcagaccgcgaagtcgctgattgatgat

SEQ ID NO: 307224 - DNA, 75 bp, synthetic construct
  source 1..75: mol_type = other DNA
acccgccagcggcaaaattgtcctgtacgatgcaatgacctgccagttccgcgaaatgaaactgatgcgtaatcc

SEQ ID NO: 307225 - DNA, 75 bp, synthetic construct
  source 1..75: mol_type = other DNA
gcaagcgccggtgtcggcaacctgacgctgctcgacttcgacacggtttcgctctcgaatctgcaacgccagact

SEQ ID NO: 307226 - DNA, 75 bp, synthetic construct
  source 1..75: mol_type = other DNA
gcccgcatcggtagagaaattcccgctggtgggtctgaatagcgccatgttactggtggctgaagatggtggatt

SEQ ID NO: 307227 - DNA, 75 bp, synthetic construct
  source 1..75: mol_type = other DNA
gtacaacttagcgcttctcgcgcttttgtgatgcgtgactggattttgagtacttcccttggggttttccatcgt

SEQ ID NO: 307228 - DNA, 75 bp, synthetic construct
  source 1..75: mol_type = other DNA
cgtcagggacagcaaccagggcaaccagcagggaacaaccaatattatcaatggcgcgggaaaccgggaattaat

SEQ ID NO: 307229 - DNA, 75 bp, synthetic construct
  source 1..75: mol_type = other DNA
cagttttctgcttatgaatggcctgaatatcattcgtttctggcggatgcagaaaaggggaattgatccgtttaa

SEQ ID NO: 307230 - DNA, 75 bp, synthetic construct
  source 1..75: mol_type = other DNA
gcgacaacaccgcgctggttgacggccgctttgattcgcttgctgtacgagtcaccgaccatccgttggtggttg

SEQ ID NO: 307231 - DNA, 75 bp, synthetic construct
  source 1..75: mol_type = other DNA
acaaccgagaaagctacaacgccttaagctgttatgaaagcatctccgcgacgatttcacagaatcttgtaggct

SEQ ID NO: 307232 - DNA, 75 bp, synthetic construct
  source 1..75: mol_type = other DNA
agcaattccttaagtgtccactgagtgttgtaaagaaacgcgccagcattcgttacagcggagatgttacttgta

SEQ ID NO: 307233 - DNA, 75 bp, synthetic construct
  source 1..75: mol_type = other DNA
ccactcggtgcaatcgatgggatgcgtatcgggtcgacactgagctatttaaaccaggcgcaaagccagcaagga

SEQ ID NO: 307234 - DNA, 75 bp, synthetic construct
  source 1..75: mol_type = other DNA
cgcctgccattacatccgcaatatgagctctacgcagggctggcgaatgccgatgatgtgagtgctttcgagtta

SEQ ID NO: 307235 - DNA, 75 bp, synthetic construct
  source 1..75: mol_type = other DNA
atccgcaatggagttctgctttcgacgcgaagtcattatatttaaatccggacaaaaatacggttaatgccttta

SEQ ID NO: 307236 - DNA, 75 bp, synthetic construct
  source 1..75: mol_type = other DNA
tcgtaatgagcaacttttgggatcgttttatctcaatagtggttcgcaatttattgataccagttcctttccgcc

SEQ ID NO: 307237 - DNA, 75 bp, synthetic construct
  source 1..75: mol_type = other DNA
tattatgcaatggttaatcttgatgcggtaacatttctggattcagcaagtttatataataagctggagctggat

SEQ ID NO: 307238 - DNA, 75 bp, synthetic construct
  source 1..75: mol_type = other DNA
tctggcgtatgcagagaaggggaattgatccgtttaaagtggagaaaacatccccttccgccgtggacgaaaggg

SEQ ID NO: 307239 - DNA, 75 bp, synthetic construct
  source 1..75: mol_type = other DNA
aattggcgagctaaattggagaactagttttcctttactggttacgtgtgagatcggcgttatacctgcttatta

SEQ ID NO: 307240 - DNA, 75 bp, synthetic construct
  source 1..75: mol_type = other DNA
tgccattatcgcggtgacagccgggtgattaatccacagggcgagattatcgctactgccgacgcgcatcaggca

SEQ ID NO: 307241 - DNA, 75 bp, synthetic construct
  source 1..75: mol_type = other DNA
atggcgattggttgcgcgatttccttgacggcgtttaccgcattcagtctggtactcgggcaacaaattagcgtt

SEQ ID NO: 307242 - DNA, 75 bp, synthetic construct
  source 1..75: mol_type = other DNA
gccggctggctacaaactattaatcccaacaaagtaaaacccgaaatccgcgataaggtcatccggtatcaggaa

SEQ ID NO: 307243 - DNA, 75 bp, synthetic construct
  source 1..75: mol_type = other DNA
tggtttgttccccgatcaatatttttattgagaaagacaaactttcacttgtgccgggcatggtcattctggtca

SEQ ID NO: 307244 - DNA, 75 bp, synthetic construct
  source 1..75: mol_type = other DNA
tatcaaaaatccgcacattgataaacgaagcgaatctgctgattgattttgtcctggctgatacaggcaaaggga

SEQ ID NO: 307245 - DNA, 75 bp, synthetic construct
  source 1..75: mol_type = other DNA
tcgcgtcggcagcgatggcaacggctgccattatcgcggtgacagccgggtgattaatccacagggcgagattat

SEQ ID NO: 307246 - DNA, 75 bp, synthetic construct
  source 1..75: mol_type = other DNA
cgacttacgttttccggtgtggtcgcgcaatttcaacgattatgacctggcaatctacgtcgccaactggcctgc

SEQ ID NO: 307247 - DNA, 75 bp, synthetic construct
  source 1..75: mol_type = other DNA
cgctgttccgttgtaaagggctgaccatgcgctgcgtgatgtggttttctacttgttgctggttaactcacaaca

SEQ ID NO: 307248 - DNA, 75 bp, synthetic construct
  source 1..75: mol_type = other DNA
gtctttgctcgcgaatggcacaagctgaatatcggcactgttatcattaccgccgcgctggtcgcgttttacgcg

SEQ ID NO: 307249 - DNA, 75 bp, synthetic construct
  source 1..75: mol_type = other DNA
atgtctggagacatcctacaaacaccggacgcaccaaagccacagggcgcgctggataattattttaaaattacc

SEQ ID NO: 307250 - DNA, 75 bp, synthetic construct
  source 1..75: mol_type = other DNA
tcaccctcagagagcgaatcgtcacagtgacgaaacaggttggatatttgcaggaatacatcaaagagcagtgct

SEQ ID NO: 307251 - DNA, 75 bp, synthetic construct
  source 1..75: mol_type = other DNA
gttaatatctacgatgcaagagattctcacgatggcccggtccatcagtgcatgcggcgcgatattgtgcgagta

SEQ ID NO: 307252 - DNA, 75 bp, synthetic construct
  source 1..75: mol_type = other DNA
tctgccacgggtatccgtagctggattttgcgcaacttgccgcacggtgtggcgcacggcacggggatcggtatc

SEQ ID NO: 307253 - DNA, 75 bp, synthetic construct
  source 1..75: mol_type = other DNA
ctggggcaacatatcagtgttccggtggcgctgggtgctgtgttcctgatgggggtgctgtttacggttatttcc

SEQ ID NO: 307254 - DNA, 75 bp, synthetic construct
  source 1..75: mol_type = other DNA
cccgcttgatggtctgcccgtcgcgctgggtgatttcacgactttcccggtgatgatgtcgctggtcggcctggc

SEQ ID NO: 307255 - DNA, 75 bp, synthetic construct
  source 1..75: mol_type = other DNA
gcgaactacccggtcctggccccgagactgaactcattaaaagagactaagggcgttctctcatgcttcatgctg

SEQ ID NO: 307256 - DNA, 75 bp, synthetic construct
  source 1..75: mol_type = other DNA
ggcggtgacaaccatcacgaccacccagatccactcggtggtggtggtgcgagaatagcctgcggcatcattcca

SEQ ID NO: 307257 - DNA, 75 bp, synthetic construct
  source 1..75: mol_type = other DNA
ttgcaatgctgacagcatcatcgtgtggatactcagccacaaaagaagtcccaatgaacctggtgaatgctgatg

SEQ ID NO: 307258 - DNA, 75 bp, synthetic construct
  source 1..75: mol_type = other DNA
gttgttcgcggtactggcagtattcgacctgctgggtgcgctggttatctggactgtattgcagaacaaaccggc

SEQ ID NO: 307259 - DNA, 75 bp, synthetic construct
  source 1..75: mol_type = other DNA
tatgctggttgctgtaaccagttcagatgaaaccaatatggttgcctgtcaggtagcctactcgcttttcaacac

SEQ ID NO: 307260 - DNA, 75 bp, synthetic construct
  source 1..75: mol_type = other DNA
attaccgttgtcgataccaatggtgagcgtctgcggaccttgcaggataaatttgacctgcgagtcgttcagggt

SEQ ID NO: 307261 - DNA, 75 bp, synthetic construct
  source 1..75: mol_type = other DNA
tggttcccggcgaaagagcgttccatcgcggtaggttactttaacgtaggttcttcgattggtgcgatgattgcg

SEQ ID NO: 307262 - DNA, 75 bp, synthetic construct
  source 1..75: mol_type = other DNA
ctggctgttgctcgtggtgcggtcggtgccgcggaagccgcgatgattccggcgggtctgaaagccagctccgaa

SEQ ID NO: 307263 - DNA, 75 bp, synthetic construct
  source 1..75: mol_type = other DNA
atcggttacgcgatgtttgccgtgttgtgggctgtgttctgtggcgctaccgcgctggcaggtagctggggcggc

SEQ ID NO: 307264 - DNA, 75 bp, synthetic construct
  source 1..75: mol_type = other DNA
gtgacgcgtaaaggcgcggtgtctgcgcgtgctggtcaatatggaattattcccggttcgatgggagcaaaaagc

SEQ ID NO: 307265 - DNA, 75 bp, synthetic construct
  source 1..75: mol_type = other DNA
gcgcggattttgcggtctgttaccagtacccgtcacctatcgtgccgaaagagcgctggcggtaccagatggtca

SEQ ID NO: 307266 - DNA, 75 bp, synthetic construct
  source 1..75: mol_type = other DNA
gagtaatgagtccagtccgttgcagtcctccctgctggtcagtgaacgcatggcgttcaagctgcaccgtcaggg

SEQ ID NO: 307267 - DNA, 75 bp, synthetic construct
  source 1..75: mol_type = other DNA
ctcacgttaagcaacgttttctgcctctgacgcctcttttaatggtctcagatgtcctttggtcaccagttctgc

SEQ ID NO: 307268 - DNA, 75 bp, synthetic construct
  source 1..75: mol_type = other DNA
gaaaaaatcagccctaaagccagcggtattctgacatggcaactggctatgtctgaaacggataatgaactttac

SEQ ID NO: 307269 - DNA, 75 bp, synthetic construct
  source 1..75: mol_type = other DNA
ggcgcatccggagaaattatttacgcatgttttatatgctgactggcgggtaagactgaaaacactcagcaaaat

SEQ ID NO: 307270 - DNA, 75 bp, synthetic construct
  source 1..75: mol_type = other DNA
tgatgctcctgatggagtcaacatgaatacgcctttacttaaagttagtggcgatattcaggataacgcagactc

SEQ ID NO: 307271 - DNA, 75 bp, synthetic construct
  source 1..75: mol_type = other DNA
cgctgatgttgttatacctgaccgggacggccagggccgcttcggctgaatgtgaaggcaattttgtcaatccaa

SEQ ID NO: 307272 - DNA, 75 bp, synthetic construct
  source 1..75: mol_type = other DNA
tggtgtttctgctggccggtcatatccctgtggtgtcagcggatgcggcctgtgaggggcgtttcgtcaacccga

SEQ ID NO: 307273 - DNA, 75 bp, synthetic construct
  source 1..75: mol_type = other DNA
actggtacaagtacccgctgacgtactggctgaacatcatcacttcggcagggtgtctggaaggcggagacatgg

SEQ ID NO: 307274 - DNA, 75 bp, synthetic construct
  source 1..75: mol_type = other DNA
tctgtaatgaatatccgtccccaatcctgcccaaagaacgctggcgttatcagatggtgaatatgtatccggaca

SEQ ID NO: 307275 - DNA, 75 bp, synthetic construct
  source 1..75: mol_type = other DNA
atgagtccagtccgttgcagtcctccctgctggtcagtgaacgcatggcgttcaaactacaccgtcagggcatga

SEQ ID NO: 307276 - DNA, 75 bp, synthetic construct
  source 1..75: mol_type = other DNA
gtgatgcgctgggagacgggaaaaaatccgcccaacacaaagaaaaacttcggttacctgatgtggcgtaaacgt

SEQ ID NO: 307277 - DNA, 75 bp, synthetic construct
  source 1..75: mol_type = other DNA
ggttgagtaaaggtgtgtggctgtacgactttccgccgtggtttgagcagggggttatgttgttcaagtacaccg

SEQ ID NO: 307278 - DNA, 75 bp, synthetic construct
  source 1..75: mol_type = other DNA
aattctggctggcattactgattgtggggctgtttgttggccttgcctggcgcagcgacgagtttctgacattcg

SEQ ID NO: 307279 - DNA, 75 bp, synthetic construct
  source 1..75: mol_type = other DNA
tcgcgtcggcagcgatggcaacggctgccattatcgcggtgacagccgggtgattaatccgcaaggcgagattat

SEQ ID NO: 307280 - DNA, 75 bp, synthetic construct
  source 1..75: mol_type = other DNA
ttttcggcgtgcggcagattcctgccacgttagccagccgacgcttagcgggcaaattcgtaagctggaagatga

SEQ ID NO: 307281 - DNA, 75 bp, synthetic construct
  source 1..75: mol_type = other DNA
cccggactgtggctctcacgacaccatcccctgggctgatggctggatgtgccgggactgcgggtgtgaatgggg

SEQ ID NO: 307282 - DNA, 75 bp, synthetic construct
  source 1..75: mol_type = other DNA
acagtactggctgcggtggtgcttggcggcactagtttgctcggcgggcgcggcacgttaaccggtactttgctc

SEQ ID NO: 307283 - DNA, 75 bp, synthetic construct
  source 1..75: mol_type = other DNA
gttgatatcgaacctgcacaaattggccggatatttgcgccggatctgggcattgtttctgatgctgaaagcgcc

SEQ ID NO: 307284 - DNA, 75 bp, synthetic construct
  source 1..75: mol_type = other DNA
caaacgtcggttgcagctcaacgcaacctgtcccgcgaacggaacggccagcgccaccggcctggatgatgcaac

SEQ ID NO: 307285 - DNA, 75 bp, synthetic construct
  source 1..75: mol_type = other DNA
tcctcggcaccaaacagcacgggattatcgagttttgcctgctggtgttctccaacttagctgttgccagttcgt

SEQ ID NO: 307286 - DNA, 75 bp, synthetic construct
  source 1..75: mol_type = other DNA
tctgcattataaagcgggcaatgcgcgagtgattgtggaatggcgcggctggcgtattttgccgctggtgtgcta

SEQ ID NO: 307287 - DNA, 75 bp, synthetic construct
  source 1..75: mol_type = other DNA
agctaaagcgcagcagtgcaatgcgctgattgcaggcagtgttgcattacaaacggagtctggttcggttaaccg

SEQ ID NO: 307288 - DNA, 75 bp, synthetic construct
  source 1..75: mol_type = other DNA
acgcgcattgatgccgagctgtcgatggcggtgttaagggaatatcgcgataagtttccggcatggcgggatgcg

SEQ ID NO: 307289 - DNA, 75 bp, synthetic construct
  source 1..75: mol_type = other DNA
cgcgatggcgttgtctatcttccatgcattaagccggagccccgtcgtactattggtctggtttatcgtcctggt

SEQ ID NO: 307290 - DNA, 75 bp, synthetic construct
  source 1..75: mol_type = other DNA
gatgtggctgccatgaatgatgtgaatgtccgggcgttcaccggtaaaccggtggagtgccggatggccattgcc

SEQ ID NO: 307291 - DNA, 75 bp, synthetic construct
  source 1..75: mol_type = other DNA
atgtccattccgtactcaacgcgccagagagaaattcacctggcgcgtatttttgttcgcggcttagctacggct

SEQ ID NO: 307292 - DNA, 75 bp, synthetic construct
  source 1..75: mol_type = other DNA
gtggcaacggacaaggtagttccatgatcatgaaaatgaaagtggaccagtttttaacccaatcaaagattgacc

SEQ ID NO: 307293 - DNA, 75 bp, synthetic construct
  source 1..75: mol_type = other DNA
tgctgggcgtctgtctgcagaaaaaacgcagctactgccagtttgactcgaaactggcgcagatagtgcagcagc

SEQ ID NO: 307294 - DNA, 75 bp, synthetic construct
  source 1..75: mol_type = other DNA
gtgtggaccagcctgccagctttactgaaatcaccactcaccagtgcctgcgggatacaaagatagagcagtact

SEQ ID NO: 307295 - DNA, 75 bp, synthetic construct
  source 1..75: mol_type = other DNA
ctgcggtttgaccggatggatttcagtaacttctacagtgacctgaatgccggcaccaccattccgtcagacagt

SEQ ID NO: 307296 - DNA, 75 bp, synthetic construct
  source 1..75: mol_type = other DNA
gcaacttaacaaaaaaatgccaagtcagggcttttaatgtaaaccttgacgggaaaaataatttatttcagcaaa

SEQ ID NO: 307297 - DNA, 75 bp, synthetic construct
  source 1..75: mol_type = other DNA
gaacaacatttaatactgaaagagttttctacaaataataaaagtcattacttacactttgcattatataatcca

SEQ ID NO: 307298 - DNA, 75 bp, synthetic construct
  source 1..75: mol_type = other DNA
ctcagtactcacctgctttccagaaactgccagcggaccggcaggcttttatatcttcagtactgagcatgccgc

SEQ ID NO: 307299 - DNA, 75 bp, synthetic construct
  source 1..75: mol_type = other DNA
cctgaactcccgttataccttcatgaatacaacctttaatgtcggcctggcaaacgggcagtcggatacttaccc

SEQ ID NO: 307300 - DNA, 75 bp, synthetic construct
  source 1..75: mol_type = other DNA
gtgacgataccgcactcacagttccggttcagtatgaacggtctgaaactggtgttcagtgtcacggctccggta

SEQ ID NO: 307301 - DNA, 75 bp, synthetic construct
  source 1..75: mol_type = other DNA
ttcttatcatcgtttgtaaaaaaagaaccaaaattaaaacaaacaggaataagtggtcattttactattgatgcc

SEQ ID NO: 307302 - DNA, 75 bp, synthetic construct
  source 1..75: mol_type = other DNA
gctaatccacgtattgtcgggatctgcacagccattttcgttgccagcgtattgtggataagttcgttagccgcc

SEQ ID NO: 307303 - DNA, 75 bp, synthetic construct
  source 1..75: mol_type = other DNA
cgaaaacatatcacgttaatattccaccggaattaattccgccatttgcgttacctttttcaacccatggcttat

SEQ ID NO: 307304 - DNA, 75 bp, synthetic construct
  source 1..75: mol_type = other DNA
atgaatcctgcttatatgcaagccttgcagatatccccccacttccccgccaatataaccaggcgattatttcct

SEQ ID NO: 307305 - DNA, 75 bp, synthetic construct
  source 1..75: mol_type = other DNA
ataaaccgacacgtccggttcgaccgaattttatctatgaagatgtttcgcttaaagcgcttgtggaagggctca

SEQ ID NO: 307306 - DNA, 75 bp, synthetic construct
  source 1..75: mol_type = other DNA
ttctgatgaagcggtaacttttttcagaagctatctgaaaaataatccgggtctgttgaataaagcatggagtgg

SEQ ID NO: 307307 - DNA, 75 bp, synthetic construct
  source 1..75: mol_type = other DNA
ttcccctgtgaattcatacctggtgcacgatgtgatgttgtgcagtcacaatttaataccatcggaagaccgtat

SEQ ID NO: 307308 - DNA, 75 bp, synthetic construct
  source 1..75: mol_type = other DNA
cgaaaatatatcacgttaatatcccaccggaattaattccgtcatttgcgttacctttttcggcctataccttat

SEQ ID NO: 307309 - DNA, 75 bp, synthetic construct
  source 1..75: mol_type = other DNA
tccccgtcgaatgagtgtgatggaagaactcaatcaggcttgcgctgacatgaaacgggataaaaacattgccag

SEQ ID NO: 307310 - DNA, 75 bp, synthetic construct
  source 1..75: mol_type = other DNA
actcaaccaggcttgcgctgacatgaaacgggataaaaacattgccagtgtgtttgctaccgggctgaatgagtg

SEQ ID NO: 307311 - DNA, 75 bp, synthetic construct
  source 1..75: mol_type = other DNA
aggctggttacaaaccatcaatcccaacaaagtaaaacccgaaatccgcggcaaggtaatccagtatcaggaaga

SEQ ID NO: 307312 - DNA, 75 bp, synthetic construct
  source 1..75: mol_type = other DNA
aaatatggtcctcacagtctacggagagctgagaaacttacaccggtactcaatcagctaattaagcagaggctt

SEQ ID NO: 307313 - DNA, 75 bp, synthetic construct
  source 1..75: mol_type = other DNA
atggttacatccttcctttcggcgcaatgtcttacgaaccgtttgatattgttccaccccagtataaccataatg

SEQ ID NO: 307314 - DNA, 75 bp, synthetic construct
  source 1..75: mol_type = other DNA
tcccaatcgactgagaagagcagaaaaacttacacctgtactcaatcagttaatctgtcaggggtatttatgtat

SEQ ID NO: 307315 - DNA, 75 bp, synthetic construct
  source 1..75: mol_type = other DNA
ggggtatccgggggaacaggaagaagaggcgctgcgtaatcacgaaagaaataaaccgacacgtccggttcgacc

SEQ ID NO: 307316 - DNA, 75 bp, synthetic construct
  source 1..75: mol_type = other DNA
gatgataaacgtatccaggttcttcttatctcatggtgttttggcggatttcttgaggcggccgccggatacggt

SEQ ID NO: 307317 - DNA, 75 bp, synthetic construct
  source 1..75: mol_type = other DNA
gtgcaggtaaacagtttgccgacctttacagccgtatcgacggtgcaactgtgacgctgacacccgaagatcagc

SEQ ID NO: 307318 - DNA, 75 bp, synthetic construct
  source 1..75: mol_type = other DNA
gacgataaacgcatccaggttcttcttatctcatggtgttttggcggatttcttgaggcggccgccggatacggt

SEQ ID NO: 307319 - DNA, 75 bp, synthetic construct
  source 1..75: mol_type = other DNA
cgtaacggatatgtatgccgtgtttcgtgcaggagaaaaaattgttttaccagaaatcgaccccgaaccggttaa

SEQ ID NO: 307320 - DNA, 75 bp, synthetic construct
  source 1..75: mol_type = other DNA
atgcaccaatacctgctttttttactgggacttaccccacttttgacaatgatcattttgattctgaaagtcaaa

SEQ ID NO: 307321 - DNA, 75 bp, synthetic construct
  source 1..75: mol_type = other DNA
gagaaatgttctggcgagcgttagtgatgacaagcgtatccaggtacttcttatctcatggtgttttggcggatt

SEQ ID NO: 307322 - DNA, 75 bp, synthetic construct
  source 1..75: mol_type = other DNA
atgaacaaacgataaaatacgcagaagaacagaagaaaaggctggaaggtttcactgatttcagtaatggtttta

SEQ ID NO: 307323 - DNA, 75 bp, synthetic construct
  source 1..75: mol_type = other DNA
atgaaatctgtttatagctatatattgtttattttatcattgtttatcacacacaatgcaattgctgaaattcct

SEQ ID NO: 307324 - DNA, 75 bp, synthetic construct
  source 1..75: mol_type = other DNA
gtctgacattttcgttaatgtctcagccggatgtctttacgaattatataaataaaaatgacgtactggcgtggg

SEQ ID NO: 307325 - DNA, 75 bp, synthetic construct
  source 1..75: mol_type = other DNA
aattcatagcatggaaagacctttgaatgatctgtcgcttcagaatactgacaatctactcaatagattttcggc

SEQ ID NO: 307326 - DNA, 75 bp, synthetic construct
  source 1..75: mol_type = other DNA
tctggaacgcaccataacggtgacattacccagcggtcagacaacctcgcttacgcgttatcaaagcatcgataa

SEQ ID NO: 307327 - DNA, 75 bp, synthetic construct
  source 1..75: mol_type = other DNA
acgttacagaaggagttcgcgtcagcagatactccgcaaaaaaaagctgacttatctaaccaattgaatacagaa

SEQ ID NO: 307328 - DNA, 75 bp, synthetic construct
  source 1..75: mol_type = other DNA
ggttcgttgctgtttctgctgcacctgatcagcaaaatgcgcgatgccaaaagcggtggcgggcggatcggcatc

SEQ ID NO: 307329 - DNA, 75 bp, synthetic construct
  source 1..75: mol_type = other DNA
ccaaccgctgtacggcgcgtttgagtaccacggaaaggttgtggagtttgaatcggatggcgacctgcgtgataa

SEQ ID NO: 307330 - DNA, 75 bp, synthetic construct
  source 1..75: mol_type = other DNA
ctttgccttccactggcaggacggtaattacggcgacttaacagcggtagaaagtgaagcccgcgccattcttaa

SEQ ID NO: 307331 - DNA, 75 bp, synthetic construct
  source 1..75: mol_type = other DNA
cgccatttactacggaactgaaaattggcgaccgccagttagcaggcagtgttccggaactggccgcgtatgaga

SEQ ID NO: 307332 - DNA, 75 bp, synthetic construct
  source 1..75: mol_type = other DNA
ctgacgcgcgagatatttgacggttttctttgctatctggtaggccatccccgccccattgccgagctgctggca

SEQ ID NO: 307333 - DNA, 75 bp, synthetic construct
  source 1..75: mol_type = other DNA
acaacggcgaaaatcactacagtgtcaggagctgcgtggaggttgctccagaagacgttgcaactttgcaacgct

SEQ ID NO: 307334 - DNA, 75 bp, synthetic construct
  source 1..75: mol_type = other DNA
aaacagatgagaatgctgaagtttgtaaaacaaagggtaagctagaacctgacgccagtttgcgtgattatgaaa

SEQ ID NO: 307335 - DNA, 75 bp, synthetic construct
  source 1..75: mol_type = other DNA
gaaatgcttgaggaggtggcaacgcgggggcgaactgatgccgctggcggcggcactgatgaacctgctggttaa

SEQ ID NO: 307336 - DNA, 75 bp, synthetic construct
  source 1..75: mol_type = other DNA
acatgaaacagctgcgaatgctccacccgacagaccttgagcttatcagcaccaaagctgctgcgctggatgaaa

SEQ ID NO: 307337 - DNA, 75 bp, synthetic construct
  source 1..75: mol_type = other DNA
tcagcaaggtcctgaaagaggcggcccaaccgctgtatggcgcgtgtgagtacaacggaaaggttgtggagtttg

SEQ ID NO: 307338 - DNA, 75 bp, synthetic construct
  source 1..75: mol_type = other DNA
aagcaaattaaagatctgctcgatagcaaattatggctggcccagcgtacgttaatggaaaaagcgcagcgtatt

SEQ ID NO: 307339 - DNA, 75 bp, synthetic construct
  source 1..75: mol_type = other DNA
ccctgcccaccgacatgttttacaacaccggtatcgctacctatgtgtggattttgtcgaataaaaaagcgccag

SEQ ID NO: 307340 - DNA, 75 bp, synthetic construct
  source 1..75: mol_type = other DNA
gttgaatatgctggggagaccgggcctgacgcgcgaaatttttgacggttttctttgttatctggcaggccatcc

SEQ ID NO: 307341 - DNA, 75 bp, synthetic construct
  source 1..75: mol_type = other DNA
tttcttgatgaaaccgaaatgcagcggctgaataaagcgcatctgttaaagccttatttaaccagccgccatcag

SEQ ID NO: 307342 - DNA, 75 bp, synthetic construct
  source 1..75: mol_type = other DNA
gctagcgaccgctatggcatgggactttccctctctggtctttgcgcggcttttgaccggtatcgggctgggggc

SEQ ID NO: 307343 - DNA, 75 bp, synthetic construct
  source 1..75: mol_type = other DNA
actcgtacccctttatcatcttcatcccgcctgatgcttaccattgggctttgttttttggttgccctgatggaa

SEQ ID NO: 307344 - DNA, 75 bp, synthetic construct
  source 1..75: mol_type = other DNA
atgtggtctacagcattgatggcggctttgaagcctggcagcgccagtttcccgcagaggtggcgtacggcgcgt

SEQ ID NO: 307345 - DNA, 75 bp, synthetic construct
  source 1..75: mol_type = other DNA
tgcgattgtcgaagagtttggtctgcgacttcatcagtcgccaaccggcaatgatattcgctctctggcgggtgc

SEQ ID NO: 307346 - DNA, 75 bp, synthetic construct
  source 1..75: mol_type = other DNA
gatcacatatttgcgattgtcgaagagtttggtctgcgacttcatcagtcgccaaccggcaatgatattcgctct

SEQ ID NO: 307347 - DNA, 75 bp, synthetic construct
  source 1..75: mol_type = other DNA
acgtcgcttcggccaccggcttcggtccgtatgacggtcagcgcatactcacattctgcgccatactggttgcta

SEQ ID NO: 307348 - DNA, 75 bp, synthetic construct
  source 1..75: mol_type = other DNA
gctgggcgacggtccgcttgccttactgaagctacaggggtttacgctgcccaccgccatttttaacgttgccgc

SEQ ID NO: 307349 - DNA, 75 bp, synthetic construct
  source 1..75: mol_type = other DNA
ggattctcagccgccccttaaacaaactgactatatcgtcaaacttgccaaagatgacacagcccgtgcatacga

SEQ ID NO: 307350 - DNA, 75 bp, synthetic construct
  source 1..75: mol_type = other DNA
actggcacagttcctgcgtagcgactcgggtcggatcacgacgttcctgaaaactcatcttggcgggctcctcca

SEQ ID NO: 307351 - DNA, 75 bp, synthetic construct
  source 1..75: mol_type = other DNA
cggtaatctgagcttccggtcttggctcgcccgtgtaacccagatgcggctgaagcttcagcaggttaccagcgc

SEQ ID NO: 307352 - DNA, 75 bp, synthetic construct
  source 1..75: mol_type = other DNA
atggcatatggcagaacatcgcaccgaaactgctgggtttttatgcgcaaaaccttccggctcatccggaatgga

SEQ ID NO: 307353 - DNA, 75 bp, synthetic construct
  source 1..75: mol_type = other DNA
gtgggtatctggttccgcttcgccactgacgcgcggctgaaaatcgaagttatcgaattttacgacgaccagagt

SEQ ID NO: 307354 - DNA, 75 bp, synthetic construct
  source 1..75: mol_type = other DNA
tggccgcggtgaaaaacctccagataaatgcgggaaacaacgccgatatcggcgtcgtgaagaatatgtttatcg

SEQ ID NO: 307355 - DNA, 75 bp, synthetic construct
  source 1..75: mol_type = other DNA
tggccgccgtgaaaaacctccagataaatgcgggaaacaacgccgatatcggcgtggtgaagaatatgtttatcg

SEQ ID NO: 307356 - DNA, 75 bp, synthetic construct
  source 1..75: mol_type = other DNA
gatgcacgcgccgaaaggtgtggcggtcgccagcggcgagcacctgcaactggccgcggtgaaaaacctccagat

SEQ ID NO: 307357 - DNA, 75 bp, synthetic construct
  source 1..75: mol_type = other DNA
cgccatctaccagaaccagacggtgccgcaaatcgtcgaaaaaatcctgcgcgagcgtcatcaaatgcgcggtca

SEQ ID NO: 307358 - DNA, 75 bp, synthetic construct
  source 1..75: mol_type = other DNA
cgccatctaccagaatcagacggtgccgcaaatcgtcgaaaaaatcctgcgcgagcgccatcagatgcgcggtca

SEQ ID NO: 307359 - DNA, 75 bp, synthetic construct
  source 1..75: mol_type = other DNA
cgccatctaccagaaacagacggtgccgcaaatcgtcgaaaaaatcctgcgcgagcgtcatcacatgcgcggtca

SEQ ID NO: 307360 - DNA, 75 bp, synthetic construct
  source 1..75: mol_type = other DNA
gggtcaccagtacggtgaagaatgatatttatgcccatatcgacaaggacgggcgctaccgggtcaacctcgact

SEQ ID NO: 307361 - DNA, 75 bp, synthetic construct
  source 1..75: mol_type = other DNA
atctggtggatgccggaaaacagcagcgcggggaaggttttgaactgcgtaccgatctgtggggtgcagtacggg

SEQ ID NO: 307362 - DNA, 75 bp, synthetic construct
  source 1..75: mol_type = other DNA
cgcacccaaaggcgtggcgatcgccagcggagagcacctgcaactggccgcatcgaaaaacctgatcgcaaacgc

SEQ ID NO: 307363 - DNA, 75 bp, synthetic construct
  source 1..75: mol_type = other DNA
gatgcacgccccgaaaggcgtggcggtcgccagcggcgagcacctgcaactggccgctgtgaaaaacctccagat

SEQ ID NO: 307364 - DNA, 75 bp, synthetic construct
  source 1..75: mol_type = other DNA
gatgcacgctccgaaaggcgtggcggtcgccagcggcgagcacctgcaactggccgccgtgaaaaacctccagat

SEQ ID NO: 307365 - DNA, 75 bp, synthetic construct
  source 1..75: mol_type = other DNA
aactgcgtaccgatctgtggggtgcagtacgggcaaagaaaggcatctttatcagcgccgacgcgcaggataagg

SEQ ID NO: 307366 - DNA, 75 bp, synthetic construct
  source 1..75: mol_type = other DNA
cgccatctaccagaagcagacggtgccgcaaatcgtcgaaaaaatcctgcgcgagcgccatcatatgcgcggtca

SEQ ID NO: 307367 - DNA, 75 bp, synthetic construct
  source 1..75: mol_type = other DNA
ttcagggctacacgacggcgccacggaagccgtatgggggctgaacactgcgtacagcgtggtggagaaaagcgt

SEQ ID NO: 307368 - DNA, 75 bp, synthetic construct
  source 1..75: mol_type = other DNA
atgcagtacggtgaggacgacctgacgtttgtctcacgcctgctgtcggaagtgggtatctggttccgctttgcc

SEQ ID NO: 307369 - DNA, 75 bp, synthetic construct
  source 1..75: mol_type = other DNA
cagaaaattttaatactgattccaaacaaacaattgatgtcagattattgaatcaaaatatagacatgatattgg

SEQ ID NO: 307370 - DNA, 75 bp, synthetic construct
  source 1..75: mol_type = other DNA
actatttatacggataaaaaacaaaagattagcattcatattgtcttagatgaggaggatgggaatgaccgatct

SEQ ID NO: 307371 - DNA, 75 bp, synthetic construct
  source 1..75: mol_type = other DNA
acggcgcattcagcctgacggcaccaccggtacagggaatgccggtgcaggctgtcctgcgcaccctgtacgggg

SEQ ID NO: 307372 - DNA, 75 bp, synthetic construct
  source 1..75: mol_type = other DNA
gagccggagtcggtgctgatgcaggatggcgcattcagcctgacggcaccgccggtacagggaatgccggtacag

SEQ ID NO: 307373 - DNA, 75 bp, synthetic construct
  source 1..75: mol_type = other DNA
ctgatggaactgttggcacagaaatcgatagtgatcaccagtacggaagatgagatcaagatcaccgcgaagaag

SEQ ID NO: 307374 - DNA, 75 bp, synthetic construct
  source 1..75: mol_type = other DNA
gcgggtatcaggctgattgccaataagggcgcagtatcggtacaggcgcagcacgatctgatggagttactggcg

SEQ ID NO: 307375 - DNA, 75 bp, synthetic construct
  source 1..75: mol_type = other DNA
gcacagtcacagatgaagtcgctgtccactgatgcgcagacggcgaatgccgatccggcagatctgtcatcacag

SEQ ID NO: 307376 - DNA, 75 bp, synthetic construct
  source 1..75: mol_type = other DNA
ggtgcgggcaaagaaaggcatctttatcagcgccgacgcgcaggacaaggcgcagggtcaggtgcgcgaaatggc

SEQ ID NO: 307377 - DNA, 75 bp, synthetic construct
  source 1..75: mol_type = other DNA
attcgtgtctccagtaacggggggggggggtattttattgtgccggttcaggcgtgcgtttcccggcgtgtctgc

SEQ ID NO: 307378 - DNA, 75 bp, synthetic construct
  source 1..75: mol_type = other DNA
aggccgtatatcgccggggtaaagcacgactcggcgcacaccgaccatgtgaccatccagaactacaagcgcaac

SEQ ID NO: 307379 - DNA, 75 bp, synthetic construct
  source 1..75: mol_type = other DNA
aaaaggtcttgttcagctaagtagtgccaccaacagcgaatctgagacgctcgcagcaacgccaaaggcggttaa

SEQ ID NO: 307380 - DNA, 75 bp, synthetic construct
  source 1..75: mol_type = other DNA
tggcctcagtggatctgaccatcgacaccacaacggtgatggcgacgcaggattacgttgatgacaaaattgcag

SEQ ID NO: 307381 - DNA, 75 bp, synthetic construct
  source 1..75: mol_type = other DNA
tcactaccgccggtgcagcaaagctggcagcggcgactgcaccgggaggcaggaaggtcaacattaccacgatgg

SEQ ID NO: 307382 - DNA, 75 bp, synthetic construct
  source 1..75: mol_type = other DNA
ggcttcccggtgaaccactcgaaacgcatgagcatggtgtaaccagtattcgcagctggctggtagcaaatgttg

SEQ ID NO: 307383 - DNA, 75 bp, synthetic construct
  source 1..75: mol_type = other DNA
tacgcctggtaatccagtatcgcaaggttggcaccaccacctggcagcagcagtctccgttctattcccgcagta

SEQ ID NO: 307384 - DNA, 75 bp, synthetic construct
  source 1..75: mol_type = other DNA
cagaccatcaaaggcaaaccagccagcggtcgtgcagttttatcactggagcaggatggtattaagtcgcatggg

SEQ ID NO: 307385 - DNA, 75 bp, synthetic construct
  source 1..75: mol_type = other DNA
cggtgaaaaacctccagataaatgcgggaaacaacgccgatatcggcgtggtgaagaatatgtttatcggcgtgg

SEQ ID NO: 307386 - DNA, 75 bp, synthetic construct
  source 1..75: mol_type = other DNA
accttcgaaggccgcgaacaactgagtaccccgttccgctacgacattcagtttaccagtaccgataaagccatc

SEQ ID NO: 307387 - DNA, 75 bp, synthetic construct
  source 1..75: mol_type = other DNA
atgacgccaccgggggcgataacaccacctacggcgaagcctaccactatgccgacaacttcctgcaaaaaggcg

SEQ ID NO: 307388 - DNA, 75 bp, synthetic construct
  source 1..75: mol_type = other DNA
aaaaaaattagcgcaggcagccgcaccagatggtaaacctgtccgcctgacacatatggccgtgggtgacggcgg

SEQ ID NO: 307389 - DNA, 75 bp, synthetic construct
  source 1..75: mol_type = other DNA
ctttatagtcggaggatatatccaggggaaaaacacaattgagatgggttccggtgatgatacggtttctgtttc

SEQ ID NO: 307390 - DNA, 75 bp, synthetic construct
  source 1..75: mol_type = other DNA
gccgcgacaccgaaagcagtgaaagcagctaatgacaatgcgaatggtcgggtaccttctgcccgtaaggtgaat

SEQ ID NO: 307391 - DNA, 75 bp, synthetic construct
  source 1..75: mol_type = other DNA
tatgccggtgacgctggggtttaactctgtcgattacgatctgtttatcgcgtcatatacccccggtcaggctgc

SEQ ID NO: 307392 - DNA, 75 bp, synthetic construct
  source 1..75: mol_type = other DNA
atgcggggcatgcatattttctgtttgctgatggtatggcgtcagtggggtatgaaggggtgaagccgtggacgg

SEQ ID NO: 307393 - DNA, 75 bp, synthetic construct
  source 1..75: mol_type = other DNA
gcccagtcagacaagcgtgtgagtgttgtcgccacacgaaattatgatggcggtggtgacaggacaatcagcggt

SEQ ID NO: 307394 - DNA, 75 bp, synthetic construct
  source 1..75: mol_type = other DNA
aaaactataccgatcgggatgtcccaccgctgaccgttgaggttgagggtcagtcaattccgccaggcgagtggg

SEQ ID NO: 307395 - DNA, 75 bp, synthetic construct
  source 1..75: mol_type = other DNA
tttattgccgtcaccaacgatgacgaggccaatatcatgtccgccatgcttgccaaacgtatgggtgcgaaaaag

SEQ ID NO: 307396 - DNA, 75 bp, synthetic construct
  source 1..75: mol_type = other DNA
ctggaaaaagattacagcgttaaactcatcgaacgtaatcagcagcgcgctgccgaactggcggaaaagttgcag

SEQ ID NO: 307397 - DNA, 75 bp, synthetic construct
  source 1..75: mol_type = other DNA
tggctcggaggaaacattacctcatcatcgctaccggtagccgtttttggcgacagtcctgtatttacctccggc

SEQ ID NO: 307398 - DNA, 75 bp, synthetic construct
  source 1..75: mol_type = other DNA
atgatcgactatgaggccactggtcttaacgacacgctgagctggctggggcctttcctcgtatgccctgagaat

SEQ ID NO: 307399 - DNA, 75 bp, synthetic construct
  source 1..75: mol_type = other DNA
gccgttcctggtttgccctgaaaatgagaccgtcgatatgttcgaggtgaatttctctttcccgaacggtatttg

SEQ ID NO: 307400 - DNA, 75 bp, synthetic construct
  source 1..75: mol_type = other DNA
gaccgttgagacgggcgggaagctggcggctcagtcggaccgccgcgtaaacgttgtggcaacgcgttcctatga

SEQ ID NO: 307401 - DNA, 75 bp, synthetic construct
  source 1..75: mol_type = other DNA
ttcgggctggaggccgccaccatcgcgtggataggtgtcggcatctccgttgctgcagcagcttattcgctgttt

SEQ ID NO: 307402 - DNA, 75 bp, synthetic construct
  source 1..75: mol_type = other DNA
ggagcgctgctgcatgtcgcaaactcgctggggctggagatggacgtcgacaccatcaatgtgctggagtctgca

SEQ ID NO: 307403 - DNA, 75 bp, synthetic construct
  source 1..75: mol_type = other DNA
tatgtactggcaggcactgcgcgggcgactgctgacgcgcccttcatcctatcccggcgtgtcgctgatggcggt

SEQ ID NO: 307404 - DNA, 75 bp, synthetic construct
  source 1..75: mol_type = other DNA
ctacaactaccgtgaagccacggcggaaatgaccacaggccagcatgacgccaccgggggcgataacaccaccta

SEQ ID NO: 307405 - DNA, 75 bp, synthetic construct
  source 1..75: mol_type = other DNA
gaccgctgacgctgtagccgtgcctaaattcgctaagggtggaggtgtttaccaagctatctatggcgcgccttc

SEQ ID NO: 307406 - DNA, 75 bp, synthetic construct
  source 1..75: mol_type = other DNA
cagcaccaacacaatgaccgtattcaagcaatttgatcagatgcatacggatatgattgctaaggcacaaagcca

SEQ ID NO: 307407 - DNA, 75 bp, synthetic construct
  source 1..75: mol_type = other DNA
agtgcacgtagtgaccgagaatagctcgcttgtggttaaccacggtgttggtttctctgttcagattacagtggc

SEQ ID NO: 307408 - DNA, 75 bp, synthetic construct
  source 1..75: mol_type = other DNA
cagcatatgaccttgctaacgggaaatataccgcacaggacgctaccacagcgcgaaaaggtcttgtccagctca

SEQ ID NO: 307409 - DNA, 75 bp, synthetic construct
  source 1..75: mol_type = other DNA
gcgccactaacagcgtgtctgaaacacaagctgcaacgccgaaagcagtaaaggccgcgtatgaccttgctaacg

SEQ ID NO: 307410 - DNA, 75 bp, synthetic construct
  source 1..75: mol_type = other DNA
catttagcccagcacgtaacgacgctgtaaacgtagttaccgagaatagccagatggttgtaaaccacggcgtag

SEQ ID NO: 307411 - DNA, 75 bp, synthetic construct
  source 1..75: mol_type = other DNA
gacggcagcatgatctggcgcgtctggaattttgaaccgggcggcgaggacatgatgaaccgctacatccgggac

SEQ ID NO: 307412 - DNA, 75 bp, synthetic construct
  source 1..75: mol_type = other DNA
gcagcgcagtatcagaatgtggcgattgaagatgatcaggggacccattttcgccttgtcgtccgtcatcaggat

SEQ ID NO: 307413 - DNA, 75 bp, synthetic construct
  source 1..75: mol_type = other DNA
tttatgcgtaataacgactttgacactccggtgatggtgatgtgttatcacggcaatagcagcaaaggcgcggcg

SEQ ID NO: 307414 - DNA, 75 bp, synthetic construct
  source 1..75: mol_type = other DNA
attcagcctggcgaatatggtgaaaccgggaacctttgatcctgaaatgaaggatttcactactccgggtgtcac

SEQ ID NO: 307415 - DNA, 75 bp, synthetic construct
  source 1..75: mol_type = other DNA
tggaattttgaagcggatgccgggaaatggctcaaccgttacatcgaacgttacggcattcgtaaacagcagtaa

SEQ ID NO: 307416 - DNA, 75 bp, synthetic construct
  source 1..75: mol_type = other DNA
ttgatctggcggacatggaattttgagccgggcggctcgtactgcctcaatcgttatatcgcggactacggtatc

SEQ ID NO: 307417 - DNA, 75 bp, synthetic construct
  source 1..75: mol_type = other DNA
aagaagacgcagaagttctgcgctttgatagttttgacgatgccgttgaatgctgcgcagacctgaatgttccgt

SEQ ID NO: 307418 - DNA, 75 bp, synthetic construct
  source 1..75: mol_type = other DNA
tggcggcggcaaagaatgtgatagccaacgcaggcaacaacgccgatgttggcgtggtgaaaaatatgtttatcg

SEQ ID NO: 307419 - DNA, 75 bp, synthetic construct
  source 1..75: mol_type = other DNA
gaagcccgttacgaagtgcgccttgaaccccgtatggcgctgctggcccgcagccgccagaatgccatttaccag

SEQ ID NO: 307420 - DNA, 75 bp, synthetic construct
  source 1..75: mol_type = other DNA
gggtcaccagtacggtgaagaacgacatctacgcccatatcgacaaggacgggcgctaccgggtcaacctcgact

SEQ ID NO: 307421 - DNA, 75 bp, synthetic construct
  source 1..75: mol_type = other DNA
cacaccacaagctcaaaattcgcggcctgaaaagcccggcggatgtgctgacgtttacgggccacgaacagctca

SEQ ID NO: 307422 - DNA, 75 bp, synthetic construct
  source 1..75: mol_type = other DNA
cggaagccgtatgggggctgaacaccgcatacagcgtggtggaaaaaagcgtcaccacgcgggactacaactacc

SEQ ID NO: 307423 - DNA, 75 bp, synthetic construct
  source 1..75: mol_type = other DNA
gaatgtgatagccaacgcaggcaacaacgccgatgttggcgtggtgaaaaatatgtttatcggcgtgggacaggc

SEQ ID NO: 307424 - DNA, 75 bp, synthetic construct
  source 1..75: mol_type = other DNA
ccagcgcatccagtacggatttggggacgaaaaccacatcgtcgtttgattacggcactaaatccacgaataaca

SEQ ID NO: 307425 - DNA, 75 bp, synthetic construct
  source 1..75: mol_type = other DNA
cagtggacgcacccagactatccgcatgattctggttgtcacgaacaccaaagccatcacgctgaaaatcgaccc

SEQ ID NO: 307426 - DNA, 75 bp, synthetic construct
  source 1..75: mol_type = other DNA
tggtgctggttggttcaaattagcaacggtaaccatgccacaggcgagttctgttgtttcaattacgttgattgg

SEQ ID NO: 307427 - DNA, 75 bp, synthetic construct
  source 1..75: mol_type = other DNA
atgattctaggtaatgattacgttgatttagctccgcttttccaggctcataacactagaaattatctactcact

SEQ ID NO: 307428 - DNA, 75 bp, synthetic construct
  source 1..75: mol_type = other DNA
actggaaaaacaagtaacgcaggggggcactctcacacagtaaatattggcgcacacactcatacggtaggaatt

SEQ ID NO: 307429 - DNA, 75 bp, synthetic construct
  source 1..75: mol_type = other DNA
gataagtccgttattaatatcatgatggtgtccggccagcgaaataaacgccgtgtaatcaactatcgtatgctg

SEQ ID NO: 307430 - DNA, 75 bp, synthetic construct
  source 1..75: mol_type = other DNA
tgctgttgatttcagcgatcgtaaagaggcatttgttaacgtgaatacaccagaggagcttgcccgatggcagga

SEQ ID NO: 307431 - DNA, 75 bp, synthetic construct
  source 1..75: mol_type = other DNA
tttcagtaatgcagcaggaagctggtgagtggtttttgttttgtccgtgcgatacgccttacattccccatgatt

SEQ ID NO: 307432 - DNA, 75 bp, synthetic construct
  source 1..75: mol_type = other DNA
tgttttggtcacaatgaatcacacgtttatttttcagagttcgacgccatagccgacagccagagagcaacgcag

SEQ ID NO: 307433 - DNA, 75 bp, synthetic construct
  source 1..75: mol_type = other DNA
tacgcgactaaacgctaccgttctaacgtcatcaactgggggatgttaccgctgcagatggcggaagtgccaacc

SEQ ID NO: 307434 - DNA, 75 bp, synthetic construct
  source 1..75: mol_type = other DNA
tgagtccgtgcaggaacagggtagcaagacatctgtttcgtcaggccacggtaccgggaaatcggatatgacctc

SEQ ID NO: 307435 - DNA, 75 bp, synthetic construct
  source 1..75: mol_type = other DNA
cgaacattgatccagtgtggaaagtgttaatcaccaccggattttgtggcgggttgacaaccttctcaacatttt

SEQ ID NO: 307436 - DNA, 75 bp, synthetic construct
  source 1..75: mol_type = other DNA
ggcgagatggctgttaagtatgcgatttaacccgctgcatcaggcgattccgttggggacgctggcagcaaacct

SEQ ID NO: 307437 - DNA, 75 bp, synthetic construct
  source 1..75: mol_type = other DNA
ggatgtggctggtcttctcgcataccttggtttgggagaaacgataaataaagcctccggagctatgcagaaatc

SEQ ID NO: 307438 - DNA, 75 bp, synthetic construct
  source 1..75: mol_type = other DNA
cacgacggtgaacgcgatcacccgactattgctctggtaaaccgcgcaattgagcctttattactggaatatctg

SEQ ID NO: 307439 - DNA, 75 bp, synthetic construct
  source 1..75: mol_type = other DNA
atgatcaaaactcgtcggactaaacgtaccttttcctcggagctcaggcttgaagctatggaacaggtggttaaa

SEQ ID NO: 307440 - DNA, 75 bp, synthetic construct
  source 1..75: mol_type = other DNA
attcagacgctgccgatggatggttttcatcattacaatagctggctggatgcgcatcaattgcgccccttcaaa

SEQ ID NO: 307441 - DNA, 75 bp, synthetic construct
  source 1..75: mol_type = other DNA
gtgaaaattgaattaacggtgaatgggctgaagatacaggcacagtaccatgatgaagagatagaacgcgtgcat

SEQ ID NO: 307442 - DNA, 75 bp, synthetic construct
  source 1..75: mol_type = other DNA
cgcggtggcctttaacaaggctgaatctggtagcgccgtgctggtggatgtcaacaccggtgaagtgctggcgat

SEQ ID NO: 307443 - DNA, 75 bp, synthetic construct
  source 1..75: mol_type = other DNA
caatggcgacggcatcgcaccagataccattaatcgcattttatcaggcgaccaaaaattgcaaaaaggcagtat

SEQ ID NO: 307444 - DNA, 75 bp, synthetic construct
  source 1..75: mol_type = other DNA
cccaatatcttttcttcgtccctgactgaacgtctttttcatgtctgttgcagccttgattatgttgaagccaga

SEQ ID NO: 307445 - DNA, 75 bp, synthetic construct
  source 1..75: mol_type = other DNA
tgagtattgatgaacgcctgcaggcgctggtttatcgcgaactgaataacgcggtggcctttaacaaggctgagt

SEQ ID NO: 307446 - DNA, 75 bp, synthetic construct
  source 1..75: mol_type = other DNA
tgcgctctcttcgcgttcaacaagtatccacctcacgcggcatgattactgaccgctctggtcgcccattagcag

SEQ ID NO: 307447 - DNA, 75 bp, synthetic construct
  source 1..75: mol_type = other DNA
ggccgacccaaaagaagtgcacgacgctggcggcatcagcgttggtgaccgctggaaagcgcttgccaatgcact

SEQ ID NO: 307448 - DNA, 75 bp, synthetic construct
  source 1..75: mol_type = other DNA
tgatgaagagataaaacacgtgcataaaccattgctgcgcatgttggccgccttgcaggcggtaaatccgcagcg

SEQ ID NO: 307449 - DNA, 75 bp, synthetic construct
  source 1..75: mol_type = other DNA
tgtgcatcaattgcgacccttcaaaggcgcaccagagacattcaacgttgcgaaactggcggaaaatctgtgccg

SEQ ID NO: 307450 - DNA, 75 bp, synthetic construct
  source 1..75: mol_type = other DNA
acactgctcgggtataccgccagcctggttgataaaaaatggttgcgactggcagcaaggaggaatcatggctga

SEQ ID NO: 307451 - DNA, 75 bp, synthetic construct
  source 1..75: mol_type = other DNA
agaggatgagctgacggtcgatgaagacacggcatcctggattatctggcatgaatatgacggattacgccagcg

SEQ ID NO: 307452 - DNA, 75 bp, synthetic construct
  source 1..75: mol_type = other DNA
ttgcgttttacgtcctaataagttaaaagttgatacaaaatatctttttcattatgtaaaatcagaagcttttgt

SEQ ID NO: 307453 - DNA, 75 bp, synthetic construct
  source 1..75: mol_type = other DNA
ccgaaataccaacactgctcggatataccgccagcctggttgataaaaaatggttgcgactggcagcaaggagga

SEQ ID NO: 307454 - DNA, 75 bp, synthetic construct
  source 1..75: mol_type = other DNA
cgagcgctctgacttcaaatgattacagtattagtggcgatgccgccagcgcacaaattgtcgcgatgcaagtga

SEQ ID NO: 307455 - DNA, 75 bp, synthetic construct
  source 1..75: mol_type = other DNA
atttaacgccgccgctcactcaattgccttttgacgaatatgcgtctgaaatcttggggcatattttctggttct

SEQ ID NO: 307456 - DNA, 75 bp, synthetic construct
  source 1..75: mol_type = other DNA
cattattccaccgactatgttttcgatggaagtggtgaacgtccttgggtggaaaccgatgtgatttccccgctc

SEQ ID NO: 307457 - DNA, 75 bp, synthetic construct
  source 1..75: mol_type = other DNA
taaaaaatttcagcgtacatttgatctggttttgccggactggtcagtcggtgttgagcggatgttgactgagat

SEQ ID NO: 307458 - DNA, 75 bp, synthetic construct
  source 1..75: mol_type = other DNA
ttctggtctattgaaattattcgtagagatttacgaaacagaattactcacgagcctgatcctgagatcccttta

SEQ ID NO: 307459 - DNA, 75 bp, synthetic construct
  source 1..75: mol_type = other DNA
gccctgcagctgttcggcgcagggcgcgagaagcgcatctatgcggtgccgccgtttacccgcgtggaaagcctc

SEQ ID NO: 307460 - DNA, 75 bp, synthetic construct
  source 1..75: mol_type = other DNA
tgggttggtgtaacgcacataatcttttcgatagtttttgccgttggttactgtgtggtcgccgaagtatttccg

SEQ ID NO: 307461 - DNA, 75 bp, synthetic construct
  source 1..75: mol_type = other DNA
gtgcctggctattttcccgctacagcggttcagaaaaggcctccgataccctgtgtctgtgccgcaaaaccgtct

SEQ ID NO: 307462 - DNA, 75 bp, synthetic construct
  source 1..75: mol_type = other DNA
ctaccttgtcggcactgctgcggaattattctgtagcggaaggtattcagatggctgagcaacaagtaaagatgc

SEQ ID NO: 307463 - DNA, 75 bp, synthetic construct
  source 1..75: mol_type = other DNA
tcaatgtgccgcgtcgtgccgtagcgctgcgtcgtcagctggtttccagcgataacatctctaacgatccgatga

SEQ ID NO: 307464 - DNA, 75 bp, synthetic construct
  source 1..75: mol_type = other DNA
cggcgaagatcgcggacctggtggtcacccgggataactcagtggcagacgcttcgacggcgaatacgctgcagg

SEQ ID NO: 307465 - DNA, 75 bp, synthetic construct
  source 1..75: mol_type = other DNA
gtgcctggctgtttccccgctacagcggctctgaaaaggctgccgactccctgcgtctgtgccgggaaacagtct

SEQ ID NO: 307466 - DNA, 75 bp, synthetic construct
  source 1..75: mol_type = other DNA
tggctcaccagccacggagatatcagcctgctggatttgagcacctgcacctttaattcacctgaaggccaagat

SEQ ID NO: 307467 - DNA, 75 bp, synthetic construct
  source 1..75: mol_type = other DNA
aggtggattattcctatttatcctttttttgttttctattgaaattaaccctggttatgtcgagagtattctaaa

SEQ ID NO: 307468 - DNA, 75 bp, synthetic construct
  source 1..75: mol_type = other DNA
ggttcgaaaatctcattcagttgagccatggcgcggagctggagattggcgctgacgcaacgtttgatatgagtg

SEQ ID NO: 307469 - DNA, 75 bp, synthetic construct
  source 1..75: mol_type = other DNA
cccggttaaacacaatcctgtcgtctataaaaatggcgtaacctgggatcaggatgcaaaaactgtcaaaattcg

SEQ ID NO: 307470 - DNA, 75 bp, synthetic construct
  source 1..75: mol_type = other DNA
agtcagcgaactgcgagcatttcgggcgcgggaagccagcgtttcaacattgatgatggtcagaatggtggtggt

SEQ ID NO: 307471 - DNA, 75 bp, synthetic construct
  source 1..75: mol_type = other DNA
gcgtgtggcccggaatcattaatcagggctgctgggcaaattgattgctcgcgtaattttctcaatcctccgtat

SEQ ID NO: 307472 - DNA, 75 bp, synthetic construct
  source 1..75: mol_type = other DNA
atcacggcgggcggagtcagcatctgacgacagcactggatcagatcacagacagcgccatgcgccttgacctca

SEQ ID NO: 307473 - DNA, 75 bp, synthetic construct
  source 1..75: mol_type = other DNA
ttttggtaccgacccggcaccaaaagtctttgatgttgaatacggtgggattggcgttaacaatggtaccatgac

SEQ ID NO: 307474 - DNA, 75 bp, synthetic construct
  source 1..75: mol_type = other DNA
gcaacagagaccaccgtgtcacggacggcacgcagaaccgtacgggcaacagaggcaacacagacgctctccgcc

SEQ ID NO: 307475 - DNA, 75 bp, synthetic construct
  source 1..75: mol_type = other DNA
gtggccagctgcaacagtctcacctgttgaagcaagtgcgtcgtgatgtcgcacgcgttaagactttactgactg

SEQ ID NO: 307476 - DNA, 75 bp, synthetic construct
  source 1..75: mol_type = other DNA
ccacatcctgaaatataaagaaataataagtgtgtttatatatgtggtattaattgttctgtcatatatttcagg

SEQ ID NO: 307477 - DNA, 75 bp, synthetic construct
  source 1..75: mol_type = other DNA
ggaagttgcaaacggtctggccttcaacgtggtagcgaaaggcgacccgcgtgctgaactgggaaataatacaca

SEQ ID NO: 307478 - DNA, 75 bp, synthetic construct
  source 1..75: mol_type = other DNA
atttttgtgctggaaggccttctggagcagcagacagggctgaatccggttgggatcatgacagacacagccggt

SEQ ID NO: 307479 - DNA, 75 bp, synthetic construct
  source 1..75: mol_type = other DNA
ttgcaacagtgccaacaaaattatctcagggcagaaacgctggttagcgctaatgcacggctggttgattttcag

SEQ ID NO: 307480 - DNA, 75 bp, synthetic construct
  source 1..75: mol_type = other DNA
ctggcagcggtgacgcgccatggctggaaacggatgcaacagcaccgctaaatgtttacggtgaaacaaaattag

SEQ ID NO: 307481 - DNA, 75 bp, synthetic construct
  source 1..75: mol_type = other DNA
ttatcgccgatgtcaggacggcgaagatcgctgatctggtggtcacccgggataactcagtggctgacggcgcaa

SEQ ID NO: 307482 - DNA, 75 bp, synthetic construct
  source 1..75: mol_type = other DNA
atgaatatcctccttttcggcaaaacagggcaggtaggttgggaactacagcgttctcttgctcctctgggtaac

SEQ ID NO: 307483 - DNA, 75 bp, synthetic construct
  source 1..75: mol_type = other DNA
agacaaagcggaatcagaaccggatttcgcacaattacttaacgcgacaagcgtcgaagcgattgcaaaagcagc

SEQ ID NO: 307484 - DNA, 75 bp, synthetic construct
  source 1..75: mol_type = other DNA
ctggaaatggcgacattccatggttcgagactgatgtaaccgctccgctcaatgtttatggcaaaaccaaattgg

SEQ ID NO: 307485 - DNA, 75 bp, synthetic construct
  source 1..75: mol_type = other DNA
ggagactgatgcaaccgctccgctcaatgtttatggtaaaaccaaattggccggagaaaaagcattacaagaata

SEQ ID NO: 307486 - DNA, 75 bp, synthetic construct
  source 1..75: mol_type = other DNA
ccggtgagctggcgctgcagcaggcaaacccccgccatctgattttccgcaccagctgggtgtacgcgacccgtg

SEQ ID NO: 307487 - DNA, 75 bp, synthetic construct
  source 1..75: mol_type = other DNA
gggcgcccaccggcgctgagctgctggcagactgcacggcgatggcaatccgtgaaacgttgcgtaatccggcgc

SEQ ID NO: 307488 - DNA, 75 bp, synthetic construct
  source 1..75: mol_type = other DNA
cgccaggtgaaaccggatgtgattgtgaatgcggcagcgcacactgccgtcgataaagccgaaagcgagcgtgaa

SEQ ID NO: 307489 - DNA, 75 bp, synthetic construct
  source 1..75: mol_type = other DNA
tttgcacaattactcaatgcgacaagtgttgtagcgattgcaaaagcagccaatgaggtcggtgcatgggttatt

SEQ ID NO: 307490 - DNA, 75 bp, synthetic construct
  source 1..75: mol_type = other DNA
gagacgaaccatctggccttcgattttacgaatgtcaaactcaagtcacagccggatgccgtcgatttagagcca

SEQ ID NO: 307491 - DNA, 75 bp, synthetic construct
  source 1..75: mol_type = other DNA
taatgaaaagttccagagtacttttgatgttgttttaccgcactggaaggttggggtggagcgtgtcgttactga

SEQ ID NO: 307492 - DNA, 75 bp, synthetic construct
  source 1..75: mol_type = other DNA
cgtgtggcactgaataaaccagaagtcgcaggcttgtaccatctggtagccagtggtaccacaacctggcacgat

SEQ ID NO: 307493 - DNA, 75 bp, synthetic construct
  source 1..75: mol_type = other DNA
cctgtgccgccaacaagctggctatcgttataccctgtcatcgggtagtacgcggtgatggatcgctttcaggtt

SEQ ID NO: 307494 - DNA, 75 bp, synthetic construct
  source 1..75: mol_type = other DNA
acgatcaacgctggcaatttgtcttagcccgtgacccgagcgccgacggcgaattcgttttcgccgtacgtacca

SEQ ID NO: 307495 - DNA, 75 bp, synthetic construct
  source 1..75: mol_type = other DNA
gcggcaatgtcgctgtgttgttgctgtgcgaaagagagaatcgtactgatcaccgacgcgatgcaggcagccggg

SEQ ID NO: 307496 - DNA, 75 bp, synthetic construct
  source 1..75: mol_type = other DNA
ccatgagcgtgggtatctgctcgatctggacgagctgcttgaggttctgccgtacaaaacgaccaaacagagtat

SEQ ID NO: 307497 - DNA, 75 bp, synthetic construct
  source 1..75: mol_type = other DNA
acggctaaacagtttcgtcatggtggcgaaaacctggctgttcgttatgcgctggccgattgttcgctggggcgt

SEQ ID NO: 307498 - DNA, 75 bp, synthetic construct
  source 1..75: mol_type = other DNA
gtcgcgcaaagcgcaactgctgcgccgcgaagttgaaaatgaggagaggtaatgttggatctgtttgccgatgct

SEQ ID NO: 307499 - DNA, 75 bp, synthetic construct
  source 1..75: mol_type = other DNA
ggctgctgactgaagagggctggctcgatgaccatcagctgcgtattgctgactgtgtgatcgcggcaatcgaac

SEQ ID NO: 307500 - DNA, 75 bp, synthetic construct
  source 1..75: mol_type = other DNA
gtttaccgggcgtagcgtgggtgcgggtgaatgaagaacttccgtggcctgacgacctcgtggtgaggttgccgc

SEQ ID NO: 307501 - DNA, 75 bp, synthetic construct
  source 1..75: mol_type = other DNA
ctggaaatggcgacacgccatggctggagacggatgcaaccgcaccgctaaatgtttacggtgaaaccaagttag

SEQ ID NO: 307502 - DNA, 75 bp, synthetic construct
  source 1..75: mol_type = other DNA
tccgtaccgcgtccggtgggctggcgggcagtacgctgtctgttgatgcggcagtgcgcaacatggtcgagttga

SEQ ID NO: 307503 - DNA, 75 bp, synthetic construct
  source 1..75: mol_type = other DNA
gcaagtgctggggagttatctcgaaggaccgtacttcacgccgcagaataaaggcgcgcatccgccggagttgtt

SEQ ID NO: 307504 - DNA, 75 bp, synthetic construct
  source 1..75: mol_type = other DNA
tggcgttgtccgtaccgcgtccggtgggctggcgggcagtacgctatctgtcgatgcagcagtgcgcaacatggt

SEQ ID NO: 307505 - DNA, 75 bp, synthetic construct
  source 1..75: mol_type = other DNA
atgaagattttactgattggcaagaatggccaggtgggctgggaactgcagcgttcactgtccaccctcggcgac

SEQ ID NO: 307506 - DNA, 75 bp, synthetic construct
  source 1..75: mol_type = other DNA
gcagcattacccgggatgtacgcacagccagcaaagtatggtcgatacatttcgcgccagccttttcgataatca

SEQ ID NO: 307507 - DNA, 75 bp, synthetic construct
  source 1..75: mol_type = other DNA
acatttcgcgccagccttttcgataatcaggatatcactgtagcggatcagcagatccaggcgttgccttattcc

SEQ ID NO: 307508 - DNA, 75 bp, synthetic construct
  source 1..75: mol_type = other DNA
gtgcgccctcttattttatcgattttcgcactatttcttgcgggatgtacgcacagccagcaaagtatggtcgat

SEQ ID NO: 307509 - DNA, 75 bp, synthetic construct
  source 1..75: mol_type = other DNA
gtgctggtcaccctgggcggtcgttacgactgggcagatcaagaatctcttaaccgcgtagcgggaacgaccgat

SEQ ID NO: 307510 - DNA, 75 bp, synthetic construct
  source 1..75: mol_type = other DNA
tgcatgtcaacaacctgtttgatcgtgaatacgtcgccagctgctttaacacttatggttgcttctggggcgcag

SEQ ID NO: 307511 - DNA, 75 bp, synthetic construct
  source 1..75: mol_type = other DNA
gtcgttatactggctccagctatggtgatccggctaactcctttaaagtgggaagttatacggtcgtggatgcgt

SEQ ID NO: 307512 - DNA, 75 bp, synthetic construct
  source 1..75: mol_type = other DNA
cccccggttcccggtgaacgtgtcttcccggaatccattgtccgcaccgtggtgcatatgatggaaagcgtggcg

SEQ ID NO: 307513 - DNA, 75 bp, synthetic construct
  source 1..75: mol_type = other DNA
ccggtagtgctgtgctggtggatgtcaacaccggagaagtgttggcgatggctaatagcccgtcttacaacccaa

SEQ ID NO: 307514 - DNA, 75 bp, synthetic construct
  source 1..75: mol_type = other DNA
caacaccggtgaagtgctggcgatggctaacagcccatcatacaaccctaacaatctgagtggcacgccgaaaga

SEQ ID NO: 307515 - DNA, 75 bp, synthetic construct
  source 1..75: mol_type = other DNA
atggcgcacgacgaacaatggctcacccctcgactgcaaactgcggcaacgctgtgtaaccagacgcctgctgcg

SEQ ID NO: 307516 - DNA, 75 bp, synthetic construct
  source 1..75: mol_type = other DNA
gcgttacaggtgcatttaccgcagcacagtttgtttatgaccccgctggcgatcgccagtagtgggcgagagaaa

SEQ ID NO: 307517 - DNA, 75 bp, synthetic construct
  source 1..75: mol_type = other DNA
aaatctgggggggtaggccgcaggatctcaaagaagctgaacacaatggggataacaactgcactgcagctggcg

SEQ ID NO: 307518 - DNA, 75 bp, synthetic construct
  source 1..75: mol_type = other DNA
atgggatgaagttgcgcaactggtcaataccggacggtttagccggcgcaacttcgatctggcatcaaaatcact

SEQ ID NO: 307519 - DNA, 75 bp, synthetic construct
  source 1..75: mol_type = other DNA
ctcacgtccttctgcggataccatcattggtgagctgtccggtatggcgaaagatttcctttctcatcctggcgg

SEQ ID NO: 307520 - DNA, 75 bp, synthetic construct
  source 1..75: mol_type = other DNA
aatgcgcttgccgggcagacggtcagcgtgttggcggacaacggcgcaacgactgccccgacggttatcaccgag

SEQ ID NO: 307521 - DNA, 75 bp, synthetic construct
  source 1..75: mol_type = other DNA
gcgcgtttgatatggattactgcgtacagctcgcgtttgaaaatattaactccagtgatgtgaacggttatggcg

SEQ ID NO: 307522 - DNA, 75 bp, synthetic construct
  source 1..75: mol_type = other DNA
ccggagaaaaaacgttacaagaacattgcgcgaagcatcttattttccgtaccagctgggtatatgcaggtaaag

SEQ ID NO: 307523 - DNA, 75 bp, synthetic construct
  source 1..75: mol_type = other DNA
gcgtctggcaaaagagcgtgaagaattagccgttattaatgatcagtttggtgcgccaactggcgcagagttact

SEQ ID NO: 307524 - DNA, 75 bp, synthetic construct
  source 1..75: mol_type = other DNA
ccaaccgtggctgatcaggctctgcatgagcataacaacgttagctatcaacagcatattgcgatcgttgacgcg

SEQ ID NO: 307525 - DNA, 75 bp, synthetic construct
  source 1..75: mol_type = other DNA
cgtgccggtgaaaccgcagcgcgtgtatgaagagatgaacaaagcctttggccgcgatgtttgttatgtcaccac

SEQ ID NO: 307526 - DNA, 75 bp, synthetic construct
  source 1..75: mol_type = other DNA
tgattccattcctattttgtgcatcactggtcaggcaccgcgtgctcgtctgcataaagaagatttccaggccgt

SEQ ID NO: 307527 - DNA, 75 bp, synthetic construct
  source 1..75: mol_type = other DNA
gttgggatcatctgaaagagcaaattgttgaagctctgctggcctggcaccgacaggacagtcgcggttgcgtcg

SEQ ID NO: 307528 - DNA, 75 bp, synthetic construct
  source 1..75: mol_type = other DNA
tattgtctccgacgccaaagcggcactgacgctgctggttgaagtggcgcaggagatgcaaaaagccggtcgtct

SEQ ID NO: 307529 - DNA, 75 bp, synthetic construct
  source 1..75: mol_type = other DNA
tttaggttgtaaagcaattcgtgtcttcaaaccggaagatattgctccggcctttgatcaggcgaaagccttaat

SEQ ID NO: 307530 - DNA, 75 bp, synthetic construct
  source 1..75: mol_type = other DNA
gcgcgcagttcaacattccgtacatccatgtactggtcaacaacgcttatctggggctgattcgtcagtcacaac

SEQ ID NO: 307531 - DNA, 75 bp, synthetic construct
  source 1..75: mol_type = other DNA
gaagttaaaggcagtggctgctctgccaacggaacatgccttggcacgattgatgacatcgtctttggatacctg

SEQ ID NO: 307532 - DNA, 75 bp, synthetic construct
  source 1..75: mol_type = other DNA
ggctgacagcaacagtgattaccgggccggttctgattttgctcaccagatcaaaggacagggaagcagcagtat

SEQ ID NO: 307533 - DNA, 75 bp, synthetic construct
  source 1..75: mol_type = other DNA
aaaaaacgcagctactgtcagtttgattcgaagctggcgcagatagtccagcagcaggggcgcaacgggcagttg

SEQ ID NO: 307534 - DNA, 75 bp, synthetic construct
  source 1..75: mol_type = other DNA
atgaaagaaaagataaatacctttttcaggtctctgaattttaatgactccggaaaaccgtgcaatatttgtgca

SEQ ID NO: 307535 - DNA, 75 bp, synthetic construct
  source 1..75: mol_type = other DNA
atgaaagaaaagataaatacctttttcaggtctctgaatgttaatgactccggaagaccgcgcaatatttgtgca

SEQ ID NO: 307536 - DNA, 75 bp, synthetic construct
  source 1..75: mol_type = other DNA
atccccgggtataacgcgaacccggatgagacgcagtattacggtggggtgactgccggcggggatggcggtctg

SEQ ID NO: 307537 - DNA, 75 bp, synthetic construct
  source 1..75: mol_type = other DNA
tcattgggtttactggctgtaagcgactatccggttatgtctcacaacattataaagagtattaatttatatgtt

SEQ ID NO: 307538 - DNA, 75 bp, synthetic construct
  source 1..75: mol_type = other DNA
tgtgacgacagcacacaggattatccgacgaaaaccgacctgggcggccgcagtcatttactggtatcaacggag

SEQ ID NO: 307539 - DNA, 75 bp, synthetic construct
  source 1..75: mol_type = other DNA
tgctggcgcagtacgcctgtatggggcttggttttaagctggtggtggtctgtgatgacaacacacaggattacc

SEQ ID NO: 307540 - DNA, 75 bp, synthetic construct
  source 1..75: mol_type = other DNA
gcaaaaccatcacagagtcattcatgaacaagccgaaagacattctgtcaccggatgcgccgtttattcagaccg

SEQ ID NO: 307541 - DNA, 75 bp, synthetic construct
  source 1..75: mol_type = other DNA
tcagttaactatggttgtacaagactcgttttcagtacgccgtggtgagtttgtacgcattatgcaccaggaacg

SEQ ID NO: 307542 - DNA, 75 bp, synthetic construct
  source 1..75: mol_type = other DNA
aactctcacgcgtgcggtcgccgtcgtcacagctcccccaaccgcaaacggtctttgcaaacacgcaagcatctg

SEQ ID NO: 307543 - DNA, 75 bp, synthetic construct
  source 1..75: mol_type = other DNA
gtattgccctcggtgcagaagactatgtgcgcaacctgcgcactgagcgttccccggaagggaccgaactgctgt

SEQ ID NO: 307544 - DNA, 75 bp, synthetic construct
  source 1..75: mol_type = other DNA
atcccggacagtggcgttctgacgcagaaagtaaaagaacaaattgctgaccagctgaagcaggcaggacagtaa

SEQ ID NO: 307545 - DNA, 75 bp, synthetic construct
  source 1..75: mol_type = other DNA
attgctgtctgaattgaccacggggaaacggagaaagtcaaaatgtatgcagcggaaagtgaagtggtttatcag

SEQ ID NO: 307546 - DNA, 75 bp, synthetic construct
  source 1..75: mol_type = other DNA
cttctctgctcgttaagcaaagtcccggcatgcattacggtcacggctggattgcggggaaagatggcaggcgct

SEQ ID NO: 307547 - DNA, 75 bp, synthetic construct
  source 1..75: mol_type = other DNA
tgttcgaagaaagtgctgggtgtctgcctggagaaaaaacgcagttactgtcagtttgattcgaagctggcgcag

SEQ ID NO: 307548 - DNA, 75 bp, synthetic construct
  source 1..75: mol_type = other DNA
ggatatcgggctggccaaatgcagcagtgatgaaaaagccctggctaaagcaaaatcaaacaaactgaccgtcag

SEQ ID NO: 307549 - DNA, 75 bp, synthetic construct
  source 1..75: mol_type = other DNA
agtgatggtctgtgggggagacgtcttctgtctcgatggcgaatgcgataaggctcagagcgggaagagtaatga

SEQ ID NO: 307550 - DNA, 75 bp, synthetic construct
  source 1..75: mol_type = other DNA
cagtggaaatcgctcacgcttccgagcgtttgatcggtatcgccctcggtgcagaagactatgtgcgcaacctgc

SEQ ID NO: 307551 - DNA, 75 bp, synthetic construct
  source 1..75: mol_type = other DNA
gtatcgcgatattgaaaccattgtgcgtgtaaacgcgctggattccgaatggggtgttaacgacctggaagccgt

SEQ ID NO: 307552 - DNA, 75 bp, synthetic construct
  source 1..75: mol_type = other DNA
cgcgtcagattgatctgttgcacaacctctacgcaccaacccagaaagaagtggatcacgcccgccgcgtcgtag

SEQ ID NO: 307553 - DNA, 75 bp, synthetic construct
  source 1..75: mol_type = other DNA
taattttggtcggtatatttttaaaattaactcaaatatagatgttactttaccggatgaaaaagatctaacaga

SEQ ID NO: 307554 - DNA, 75 bp, synthetic construct
  source 1..75: mol_type = other DNA
ttcaggatgtggtcagggagcttaagggtgtgtatggccataaaaagttatggctttactccggtcttgatgagg

SEQ ID NO: 307555 - DNA, 75 bp, synthetic construct
  source 1..75: mol_type = other DNA
gcctgcccgaaagtgagcctttgcccgatgccgggcagtgacccgcagacgaacggcgatttaagtgccgatatc

SEQ ID NO: 307556 - DNA, 75 bp, synthetic construct
  source 1..75: mol_type = other DNA
cgtcctgggtggtgtcacctggcggattagcatcatatggcgcgatctgtactggattatggacctgcagaacga

SEQ ID NO: 307557 - DNA, 75 bp, synthetic construct
  source 1..75: mol_type = other DNA
gccctgaatggtgtggatgtcagggctttcacgggtgaggcgaaattctgccgtaaggccgcagccggcttcagt

SEQ ID NO: 307558 - DNA, 75 bp, synthetic construct
  source 1..75: mol_type = other DNA
gcggcgcgtccacctttacgctgaaactcaggatgaaggtccgtgataaagaatgggttccacgggtggagtggg

SEQ ID NO: 307559 - DNA, 75 bp, synthetic construct
  source 1..75: mol_type = other DNA
tctgtggtggtgatgtcttctgccttgacggtgaatgcgataaggcgcagagcggaaaaaacagtgattttggtg

SEQ ID NO: 307560 - DNA, 75 bp, synthetic construct
  source 1..75: mol_type = other DNA
aggtatcaccaccgcttttggtgttcctggagcagcaatcaatcctttctattcggcgatgcgtaagcacggtgg

SEQ ID NO: 307561 - DNA, 75 bp, synthetic construct
  source 1..75: mol_type = other DNA
gcacaaatgctgcatgtctttaaagaccgccactggatcaactgtgggcaggcaggcccgctgggctggacgatt

SEQ ID NO: 307562 - DNA, 75 bp, synthetic construct
  source 1..75: mol_type = other DNA
caacggttgggttggctgtgaatataaaccccaaaccaccacggaagccggtttacgctggatggatccgtaccg

SEQ ID NO: 307563 - DNA, 75 bp, synthetic construct
  source 1..75: mol_type = other DNA
gattatgactgtacccttctcggcggtggtggtctggcaaggacgtttcggtttattgtcttttattcccggagg

SEQ ID NO: 307564 - DNA, 75 bp, synthetic construct
  source 1..75: mol_type = other DNA
tggagagttgtccgtttaataaagcggatggcgtgctgaaaggcactgagtgttcagagccgggtggtacgaaaa

SEQ ID NO: 307565 - DNA, 75 bp, synthetic construct
  source 1..75: mol_type = other DNA
ggaaataccggacagcagtgcagtgcgcaggagataaaccgcagtgaattcacaaactatacctgtgagcgggac

SEQ ID NO: 307566 - DNA, 75 bp, synthetic construct
  source 1..75: mol_type = other DNA
cgaaattctgccgtaaggccgcagccggcttcagtaactgctgtaaggatggcggctggggtcaggatgtggggc

SEQ ID NO: 307567 - DNA, 75 bp, synthetic construct
  source 1..75: mol_type = other DNA
aattacgactgtacccttctcggcggtggtggtctggcaagggcgtttctggttactgtcttttattcccggggg

SEQ ID NO: 307568 - DNA, 75 bp, synthetic construct
  source 1..75: mol_type = other DNA
gtgggcgtttttcgccgcgctggctgccggttggctggcctcggtgagtgggatttccggcttctgggcgagcgt

SEQ ID NO: 307569 - DNA, 75 bp, synthetic construct
  source 1..75: mol_type = other DNA
atggctacatacggcggtcagtttacgcttaccggcatggcacaggctgacagcaacagtgattaccgggccggt

SEQ ID NO: 307570 - DNA, 75 bp, synthetic construct
  source 1..75: mol_type = other DNA
caggtatgtactattagatgaaattgatagaagttttcctttgttaagctcagccttagtaaggaatgaaataag

SEQ ID NO: 307571 - DNA, 75 bp, synthetic construct
  source 1..75: mol_type = other DNA
agttaaaagataaacattatgttgagctcttctggaataaggtttattacttttgggttttctttgaacatactg

SEQ ID NO: 307572 - DNA, 75 bp, synthetic construct
  source 1..75: mol_type = other DNA
cgcgagcagggactaggacaagacatcacagggttactggaaaaagtacatgaatatcagcgtcaaatggagctt

SEQ ID NO: 307573 - DNA, 75 bp, synthetic construct
  source 1..75: mol_type = other DNA
tgtgacaaccagtccagcgaaaatcccactgaggctgatctggggatttacagccatctttatgcggtaacggag

SEQ ID NO: 307574 - DNA, 75 bp, synthetic construct
  source 1..75: mol_type = other DNA
gcgcccgcccagaaagcgcaagcggctaaaaaacatcataaaaaagcaaaaactgaacagaaagcacctgagcaa

SEQ ID NO: 307575 - DNA, 75 bp, synthetic construct
  source 1..75: mol_type = other DNA
ttgccgctgctatgggtctgtcttctgccgcctttgctgcagagactgcgaccacacctgctccgactgcgacga

SEQ ID NO: 307576 - DNA, 75 bp, synthetic construct
  source 1..75: mol_type = other DNA
ttttgctgaagctgtttctcagctggcagcactggccgctgcaggtaaggatgttgcggcgctgaacggggtgga

SEQ ID NO: 307577 - DNA, 75 bp, synthetic construct
  source 1..75: mol_type = other DNA
tgttcgaaaaaagtgctgggtgtctgtctggagaaaaaacgcagctactgtcagtttgattcgaagctggcgcag

SEQ ID NO: 307578 - DNA, 75 bp, synthetic construct
  source 1..75: mol_type = other DNA
tgtctggtctgaaagctgcccgttcagcaaggagctggggaaactgacaaaacagaatgtacggaggctggcggg

SEQ ID NO: 307579 - DNA, 75 bp, synthetic construct
  source 1..75: mol_type = other DNA
gaatgggttccccgggtggagtgggtggagagttgtccgtttaataaagcggatggcgtgctgggtaatggtgcc

SEQ ID NO: 307580 - DNA, 75 bp, synthetic construct
  source 1..75: mol_type = other DNA
actgccggtgttgcttttacgtcatctcaccccgtccgggtcgggaatacaaaattcaaacgtcatacggcaatg

SEQ ID NO: 307581 - DNA, 75 bp, synthetic construct
  source 1..75: mol_type = other DNA
ggtgaaccgggctgacagcattgtgggaaacaccgggcagcagtgcagtgcgcaggagattagcaggagtgaata

SEQ ID NO: 307582 - DNA, 75 bp, synthetic construct
  source 1..75: mol_type = other DNA
cagcggtccgcacggtgacgactttgaaccttttgttgaaatgaacgggatccataacagtaaagattttgctgt

SEQ ID NO: 307583 - DNA, 75 bp, synthetic construct
  source 1..75: mol_type = other DNA
acaggcgcagtctgtactccagaccaccatcagtgccgttcgggtggcacagaaaatgaagggtaaccctgttgt

SEQ ID NO: 307584 - DNA, 75 bp, synthetic construct
  source 1..75: mol_type = other DNA
gatggggcgagtaatttgggggaaattaaacttggcgtaaatggcaacctgaatccagcggccagcgtctgggga

SEQ ID NO: 307585 - DNA, 75 bp, synthetic construct
  source 1..75: mol_type = other DNA
gcaacggtgtctccgacggtcactacagagccggacggcacggtggagatctctgtcaccagtcagacggcggga

SEQ ID NO: 307586 - DNA, 75 bp, synthetic construct
  source 1..75: mol_type = other DNA
acggtggatatctcagtcaccagccagacggcagggatcagtacagtcacagcaaccatcaacaaccatagcctg

SEQ ID NO: 307587 - DNA, 75 bp, synthetic construct
  source 1..75: mol_type = other DNA
cggaagccaatggctcacgtattgagaatgacgcaaattacaacatccagagccgacttggtttccgcaccttta

SEQ ID NO: 307588 - DNA, 75 bp, synthetic construct
  source 1..75: mol_type = other DNA
gtgctctggataccgtttccgggcagcttaacgccgccggcacagcattcaaccgcatgtctccgggattaagtg

SEQ ID NO: 307589 - DNA, 75 bp, synthetic construct
  source 1..75: mol_type = other DNA
caatacgcaggcaggttcccggtgccggagctgtatcgggtgctgttccatcgccttccggggtggcgcagttcg

SEQ ID NO: 307590 - DNA, 75 bp, synthetic construct
  source 1..75: mol_type = other DNA
gagctctggggaaaagtgttccggcatttaatgcactctctgaatccatgcccgaagccatcagtctggccagaa

SEQ ID NO: 307591 - DNA, 75 bp, synthetic construct
  source 1..75: mol_type = other DNA
atgactgagtcagccgagaagaatttccccgcttattcgcaccttccctatagcgcgaaaggtgcaaccgtctcg

SEQ ID NO: 307592 - DNA, 75 bp, synthetic construct
  source 1..75: mol_type = other DNA
cctgatgccatcagtctggccagagccaccagcgatgcggccacgtatgtacaacaggcacagtcttcgctgagc

SEQ ID NO: 307593 - DNA, 75 bp, synthetic construct
  source 1..75: mol_type = other DNA
atctggtttgacaactggcgagcgagttcttacccgctacagaaaactgatgatatgcagtggcctgaatatgtt

SEQ ID NO: 307594 - DNA, 75 bp, synthetic construct
  source 1..75: mol_type = other DNA
gctgtggctctggaaaggcaattaaatagaggtgtcgattttttaagtagtgttaataactattttcagagtgtc

SEQ ID NO: 307595 - DNA, 75 bp, synthetic construct
  source 1..75: mol_type = other DNA
agggatatctggtcattgcctgcggcggtggtggtattccggtggtgcgagacggacaacaactgaaaggtgtgg

SEQ ID NO: 307596 - DNA, 75 bp, synthetic construct
  source 1..75: mol_type = other DNA
cggcggcggtattccggtggtgcgagacgggcaacaactgaaaggtgtagaagccgtgatcgataaagatctggc

SEQ ID NO: 307597 - DNA, 75 bp, synthetic construct
  source 1..75: mol_type = other DNA
ctcgacgctatcagcgtctacgaagctcaaacgctgttgcaggaaggtcagtttggtgtcggcagtatgcaaccc

SEQ ID NO: 307598 - DNA, 75 bp, synthetic construct
  source 1..75: mol_type = other DNA
gtcccggtgatacagcaatgcagcgagcaggtgatgttctgtatcgtccgcagcattaccacatgaacattgagg

SEQ ID NO: 307599 - DNA, 75 bp, synthetic construct
  source 1..75: mol_type = other DNA
taataagtttgatgctgtgatgatacttggggataggtatgaaatcatgtcggtagcattagcagcagctatgca

SEQ ID NO: 307600 - DNA, 75 bp, synthetic construct
  source 1..75: mol_type = other DNA
tcactgttaaaacggtactttgttgtagtattccatcctgaaacactttccacgcagtcggttaatgatcaaata

SEQ ID NO: 307601 - DNA, 75 bp, synthetic construct
  source 1..75: mol_type = other DNA
ctgccccgacggtcatcacagggcaggacggcacggtggaaatcagtgtcaccagccagaccgccggaatcagtg

SEQ ID NO: 307602 - DNA, 75 bp, synthetic construct
  source 1..75: mol_type = other DNA
ggagaaaacttaaactcatatctacatattaatggttggtatgtagacgggcaaccgtcttataccatccttcct

SEQ ID NO: 307603 - DNA, 75 bp, synthetic construct
  source 1..75: mol_type = other DNA
ccactgctgacgtactggctgtcggcgatgcattcactatcgcaggcgttaacagtgtccacatgatcaagaagg

SEQ ID NO: 307604 - DNA, 75 bp, synthetic construct
  source 1..75: mol_type = other DNA
gcgagtccgagccaaaactgcaagcatggctggacaaacaataccacggcgaaatggactggatggcgcgtcacg

SEQ ID NO: 307605 - DNA, 75 bp, synthetic construct
  source 1..75: mol_type = other DNA
aaaaagcccgccagttgaagaaaaagcaggcttataaaccagatactgaagcatcgtttaactggtcggctaata

SEQ ID NO: 307606 - DNA, 75 bp, synthetic construct
  source 1..75: mol_type = other DNA
gaactggaaggggcgatcccggaagagttgcgaccgttaatgggaaaccgtatttacggttgcgatgactgccag

SEQ ID NO: 307607 - DNA, 75 bp, synthetic construct
  source 1..75: mol_type = other DNA
taaaaaaggagtgcactgcctttaatttactggcagtacatttctattcacagcaatcccgtaaaaatgtaattc

SEQ ID NO: 307608 - DNA, 75 bp, synthetic construct
  source 1..75: mol_type = other DNA
acagcagggggcgaggatttggttacggctatgtgatggcgacagaaaaaatcagaagtactggtgtgataacaa

SEQ ID NO: 307609 - DNA, 75 bp, synthetic construct
  source 1..75: mol_type = other DNA
aatcatgatggagaaaatagttttatttactctgagtcaagtctggttgcgacagtcggagtaagtaatttagta

SEQ ID NO: 307610 - DNA, 75 bp, synthetic construct
  source 1..75: mol_type = other DNA
cagcgcgacgataccggcgaaacggtggccgtcgaagtggtcatgcgtggccgtcagaaagaaatcgacaccggc

SEQ ID NO: 307611 - DNA, 75 bp, synthetic construct
  source 1..75: mol_type = other DNA
gcgttgctgacgtcgggatcgaaaagtttcaatattcccgccctgaccggtgcttacgggattatagaaaatagc

SEQ ID NO: 307612 - DNA, 75 bp, synthetic construct
  source 1..75: mol_type = other DNA
caaaaccggagtgtaaaattatgctcctgtgtagcccacagaaccccaccggtaaggtctggagttatgacgaac

SEQ ID NO: 307613 - DNA, 75 bp, synthetic construct
  source 1..75: mol_type = other DNA
gcgtcatggtgtgcgggttatttccgatgaaatccatatggatatggtctggggcgagcagccgcatattccctg

SEQ ID NO: 307614 - DNA, 75 bp, synthetic construct
  source 1..75: mol_type = other DNA
cacagcgccgatgtaaaacggcgcacgctggagaaggtagcggagatcgaacggcacattgaggagctgcaatcc

SEQ ID NO: 307615 - DNA, 75 bp, synthetic construct
  source 1..75: mol_type = other DNA
atgtctgataatctgccgtggaaaacctggacgccggacgatctcgcgccaccacaggcagagtttgtgccaatg

SEQ ID NO: 307616 - DNA, 75 bp, synthetic construct
  source 1..75: mol_type = other DNA
ggatgatctgcaatacgtcgaggagatacttggggtaaccttaggtttgcatggctggcgcctgcgtggcgatcc

SEQ ID NO: 307617 - DNA, 75 bp, synthetic construct
  source 1..75: mol_type = other DNA
atgtcgtactgcatcatgaaagtatgcaccgggcgctggcgcgatctgaacctgtgtgtggtggtggtcgcagct

SEQ ID NO: 307618 - DNA, 75 bp, synthetic construct
  source 1..75: mol_type = other DNA
caacctatttgattcatcaggaacattaattggtgtaactgataaagcgggcttaatagatggtaacggtaaatt

SEQ ID NO: 307619 - DNA, 75 bp, synthetic construct
  source 1..75: mol_type = other DNA
agcgatatcgtggcactggaaaacgcgctggatatgtaccgactggataacgggcgttatccgaccaccgagcag

SEQ ID NO: 307620 - DNA, 75 bp, synthetic construct
  source 1..75: mol_type = other DNA
ctcggccttgatgatgatgctctgtcaatggagtggtcgctcgggggcttcccggattcggttatctgggagctt

SEQ ID NO: 307621 - DNA, 75 bp, synthetic construct
  source 1..75: mol_type = other DNA
tctcgaacccggctgcacgtatctttaaagacgacgccgaagcattgggtaaagccgataagttcccgtatgtcg

SEQ ID NO: 307622 - DNA, 75 bp, synthetic construct
  source 1..75: mol_type = other DNA
acacagaattttccattggtggtactgaactgctgctgtttaagcagatgggcaaagtcacggtggatggtatcc

SEQ ID NO: 307623 - DNA, 75 bp, synthetic construct
  source 1..75: mol_type = other DNA
ctgacgctgccgaaattcacccgcaaatatgagaagtatcgcggtggcggaatgccgggtgcagtggatgtggat

SEQ ID NO: 307624 - DNA, 75 bp, synthetic construct
  source 1..75: mol_type = other DNA
ttatcatcctaaaatgattgcattgatcattttatctatgctgccttatgaagtcattcataacgatggatcact

SEQ ID NO: 307625 - DNA, 75 bp, synthetic construct
  source 1..75: mol_type = other DNA
actgcaaccatcaacagcagtactcagagtcagaacgtgacatttatcgccgatgtcaggacggcgaagatcgcg

SEQ ID NO: 307626 - DNA, 75 bp, synthetic construct
  source 1..75: mol_type = other DNA
taccggttgcatgaccgtttcaccgacagcatgtgcattctgccgaccatagaagaccgcatcggcagatacatt

SEQ ID NO: 307627 - DNA, 75 bp, synthetic construct
  source 1..75: mol_type = other DNA
tatgccgggggcggtggatgtggatttgggactggatgacagtgcactggatacagaattttccattggtggtac

SEQ ID NO: 307628 - DNA, 75 bp, synthetic construct
  source 1..75: mol_type = other DNA
accttactgcgccaggcacggcaggtgggctttaacctggaagagagcggcgagctggtgaatctgtttaacgac

SEQ ID NO: 307629 - DNA, 75 bp, synthetic construct
  source 1..75: mol_type = other DNA
cgccgactgcccgattatcgaaaatctctccggctgctgtcatcatcgggcagggggattaagacgagacggctc

SEQ ID NO: 307630 - DNA, 75 bp, synthetic construct
  source 1..75: mol_type = other DNA
atggcaatgccgcgcaaactcaaatacatgaatgtctttctgaacggctacagctatcagggcgttgcaaagtcc

SEQ ID NO: 307631 - DNA, 75 bp, synthetic construct
  source 1..75: mol_type = other DNA
aatgccgggggcagtagatgtggatctggggcttgatgacagtgcgctggacacagaattttccattggtggtac

SEQ ID NO: 307632 - DNA, 75 bp, synthetic construct
  source 1..75: mol_type = other DNA
cccggattcggttatctgggagctttacgccgcaaccggcgtggatgccgtaccgattcgttttgcaggctctta

SEQ ID NO: 307633 - DNA, 75 bp, synthetic construct
  source 1..75: mol_type = other DNA
cttatataacggtagttccggaagtgatgttattacagtaggcgaaagctttggtggcacaggcttaaacatggc

SEQ ID NO: 307634 - DNA, 75 bp, synthetic construct
  source 1..75: mol_type = other DNA
tccccgaaaaatcgccagaggctcgtcaaccgtctttattgacggcctgcccgccgccagaaccggtgatgctat

SEQ ID NO: 307635 - DNA, 75 bp, synthetic construct
  source 1..75: mol_type = other DNA
atgaaaaccatctttatcaaacccgcgccgggacgcctgattcgtgatcccgacacaatgcgcccgctggcacag

SEQ ID NO: 307636 - DNA, 75 bp, synthetic construct
  source 1..75: mol_type = other DNA
acatccttacgtatggcgctgttgcggctggcatcacagccgaaaaaagccgccgccgcgctggaagatctgaaa

SEQ ID NO: 307637 - DNA, 75 bp, synthetic construct
  source 1..75: mol_type = other DNA
aaatcccggcagaccagatgcaacgcatggctgacgcgctgactttcacgttcactacgtctaataccgacctgc

SEQ ID NO: 307638 - DNA, 75 bp, synthetic construct
  source 1..75: mol_type = other DNA
attctgttcaatgatggtagcattggtgcagttaataaagataactctcaatttggggatgtaattccttttgat

SEQ ID NO: 307639 - DNA, 75 bp, synthetic construct
  source 1..75: mol_type = other DNA
agcagtgaagccagtcctgaacttataaataccgttgtattaagcagaaaaccatctgacgtgaaacgaatctgg

SEQ ID NO: 307640 - DNA, 75 bp, synthetic construct
  source 1..75: mol_type = other DNA
tgcatacggctggcagaccgtgccggagcatcacgctccactctggcagcaggcttcggagcgcatggccgaacg

SEQ ID NO: 307641 - DNA, 75 bp, synthetic construct
  source 1..75: mol_type = other DNA
ggcctggggcgatggcatgacagcaaacgcacaggtcgtcccggttggggcgtcatgtgggatggctggtcagac

SEQ ID NO: 307642 - DNA, 75 bp, synthetic construct
  source 1..75: mol_type = other DNA
ttgaaaaaatgcaaatgctggttgcgaagactgagcgaaatcactcagactgcagtcagttctattacaccctct

SEQ ID NO: 307643 - DNA, 75 bp, synthetic construct
  source 1..75: mol_type = other DNA
ttggtaagtaattattttgaccgttttggtgagtacaacccggatgatgtggtgaaatctctgaccaccacgtta

SEQ ID NO: 307644 - DNA, 75 bp, synthetic construct
  source 1..75: mol_type = other DNA
ttgttgtgctgaaattcttatcaggaatgtgccgcgttttgatctagcgaatgttaaccagtcaggtcttactga

SEQ ID NO: 307645 - DNA, 75 bp, synthetic construct
  source 1..75: mol_type = other DNA
agttttaagcaggtatgcagcgatgcgtggaacagcgtaaaagccacaaccagcgccgtctgggaagggattaaa

SEQ ID NO: 307646 - DNA, 75 bp, synthetic construct
  source 1..75: mol_type = other DNA
atgcggccacggcgaacgccgatccggcggatatggccgcgcaggtggcgctgataaccagccggataaatgacc

SEQ ID NO: 307647 - DNA, 75 bp, synthetic construct
  source 1..75: mol_type = other DNA
aaaaatctcatacattactaaaactggacaactcaactttccatgccgctgggaatattgatataggtaaaggca

SEQ ID NO: 307648 - DNA, 75 bp, synthetic construct
  source 1..75: mol_type = other DNA
aactgaagcagagttctttcaccagtaatggcgatatgattatcgggcagggaacaggcacaacaacgacacttg

SEQ ID NO: 307649 - DNA, 75 bp, synthetic construct
  source 1..75: mol_type = other DNA
atgtcctgtaaattaatatcagcattgcttatcatggtcgtgtccgtgaattgttgtgctgaaattcttatcagg

SEQ ID NO: 307650 - DNA, 75 bp, synthetic construct
  source 1..75: mol_type = other DNA
tctttatcagcgccgacgcgcaggataaggcgcagggtcaggtacgcgaaatggccgacattatcagcgaactga

SEQ ID NO: 307651 - DNA, 75 bp, synthetic construct
  source 1..75: mol_type = other DNA
ctgtatatcgttactcacattctgaatcaggagaaacctgcggaaatatatttttctcaaaaataagtccgatag

SEQ ID NO: 307652 - DNA, 75 bp, synthetic construct
  source 1..75: mol_type = other DNA
attcggcgaagggctttttctggctgagtgcagatgaacttaagggaaaagatattcccgctgacctgatacccg

SEQ ID NO: 307653 - DNA, 75 bp, synthetic construct
  source 1..75: mol_type = other DNA
aatggcgacagacgatgaacagacgttactgctggcgtggaaaaaatacagggtactgctgaaccgtgttgatac

SEQ ID NO: 307654 - DNA, 75 bp, synthetic construct
  source 1..75: mol_type = other DNA
gtttatttttgcaaggtgttagaccgcctcaaagacctttccactatgactgaacgagagttcaccaccgatcgc

SEQ ID NO: 307655 - DNA, 75 bp, synthetic construct
  source 1..75: mol_type = other DNA
tgtgcgtatctgggctattgaggtggcgctcagcagtgaagccgggaagaaactctatgacccgatactggatgg

SEQ ID NO: 307656 - DNA, 75 bp, synthetic construct
  source 1..75: mol_type = other DNA
acatcatcacccgcgccctggtggcgctgggccagcgcccggattacgcccgtatcgcccgtcacgttatcaaca

SEQ ID NO: 307657 - DNA, 75 bp, synthetic construct
  source 1..75: mol_type = other DNA
aacttcgccagttcaggcagacaccggaacagcgcttcacgcaggaacaggagcatctgcagccgctgctgggta

SEQ ID NO: 307658 - DNA, 75 bp, synthetic construct
  source 1..75: mol_type = other DNA
aaggagtggtgggaactcaacgaaaagcccggaactttccggattgttgttggcgtactcgagaccggcatcacc

SEQ ID NO: 307659 - DNA, 75 bp, synthetic construct
  source 1..75: mol_type = other DNA
cgtgctcgacagcggcatcactgacgaaatgtatcatgagcttgagcgcctgattgaagacgccaaaccggcaag

SEQ ID NO: 307660 - DNA, 75 bp, synthetic construct
  source 1..75: mol_type = other DNA
tgtgctcgacagtggcatcactgacgaaatgtatcaggagcttgagcgcctgattgatgacgcaaaaccggcaag

SEQ ID NO: 307661 - DNA, 75 bp, synthetic construct
  source 1..75: mol_type = other DNA
aagtcgccaccttatcggtctgaacattatccaggacattcccggctatctgtatacaggcggtgtggtctgtga

SEQ ID NO: 307662 - DNA, 75 bp, synthetic construct
  source 1..75: mol_type = other DNA
acggagtggtgggaaaccagtgacccgcccggcaccttccggcttgatattggtgtactggaaagcggtatcaca

SEQ ID NO: 307663 - DNA, 75 bp, synthetic construct
  source 1..75: mol_type = other DNA
atgaaaagtggccggaagcgacaaaacgcgccgttatccgcgatgcctatttcatccactgtcataaaggcacta

SEQ ID NO: 307664 - DNA, 75 bp, synthetic construct
  source 1..75: mol_type = other DNA
tcaaacgcctgcgcctggctgatggacaccctttctgcatcgaaaccagttacttacctcaagcccgtgtcgcgg

SEQ ID NO: 307665 - DNA, 75 bp, synthetic construct
  source 1..75: mol_type = other DNA
ggcattgccggaagtattgttgaaatctggatggggctgacgggcgggaaagcaacgctggtggagttgccaaaa

SEQ ID NO: 307666 - DNA, 75 bp, synthetic construct
  source 1..75: mol_type = other DNA
gtgttcattttcccaccgttttcggctgaaacaaccaacagttttgcccgaggctggctggatttctccgctacc

SEQ ID NO: 307667 - DNA, 75 bp, synthetic construct
  source 1..75: mol_type = other DNA
gtgatacagcgcgtatacgatgaaaatcatcaggtgtacggtgtgcgtaaagtctggcgtcagttgttacgggaa

SEQ ID NO: 307668 - DNA, 75 bp, synthetic construct
  source 1..75: mol_type = other DNA
aggcgaagggaatcaggcggtgctggtcagtgggaaagacgccacaggcaatacggtcaccggcgcgcagctact

SEQ ID NO: 307669 - DNA, 75 bp, synthetic construct
  source 1..75: mol_type = other DNA
ggctacgcttacccagtcaacaccacaaaggaatccggtgtccggcttgatatcctcacgccaatagccgcagaa

SEQ ID NO: 307670 - DNA, 75 bp, synthetic construct
  source 1..75: mol_type = other DNA
gatgcactggagcaggcgttgtgggcccgtcggccgtccggcacatccatcacagcgataaaggttctcagtatg

SEQ ID NO: 307671 - DNA, 75 bp, synthetic construct
  source 1..75: mol_type = other DNA
aagaacggcagtgggatcaggagaggctcggcgctgcaaatcagtatgcagctaacctgaaggctgcacttgata

SEQ ID NO: 307672 - DNA, 75 bp, synthetic construct
  source 1..75: mol_type = other DNA
agacccttatgcgcaagctggagaaacaattggcgggtatttagttccaggagttggaacggcaggaagcatggc

SEQ ID NO: 307673 - DNA, 75 bp, synthetic construct
  source 1..75: mol_type = other DNA
cacggaagatattggcaccgccattgatgagtattttgctggtcaggctgttcagcaacaaacagttaatcaggc

SEQ ID NO: 307674 - DNA, 75 bp, synthetic construct
  source 1..75: mol_type = other DNA
agcagtgctggagtcgtgccacggacacctacggtgttaagcaccagcgaaaagaacgtccctgtgaagaaaaag

SEQ ID NO: 307675 - DNA, 75 bp, synthetic construct
  source 1..75: mol_type = other DNA
tgaggtttcaccgtcatggtttggggttacaggtgatggtgtaagcgacgatagcgatgccttacagaatgcttt

SEQ ID NO: 307676 - DNA, 75 bp, synthetic construct
  source 1..75: mol_type = other DNA
tcaacagatggagcgcagccagttattgatataaaaatccaccattgtacttttgatggtaattcttattctggc

SEQ ID NO: 307677 - DNA, 75 bp, synthetic construct
  source 1..75: mol_type = other DNA
gggatggggctggcctggcaatcacagttggctaagttaagacagcgttttgcgtcaactataacggaaatcgtt

SEQ ID NO: 307678 - DNA, 75 bp, synthetic construct
  source 1..75: mol_type = other DNA
atattataaaaatgcaaatacagttgctttcgaggatgtcgacaaaataattgggggttacgatttcatcctttg

SEQ ID NO: 307679 - DNA, 75 bp, synthetic construct
  source 1..75: mol_type = other DNA
tttcctgccttatctcgcctgggcgttctctgtggatcgctgggacgaggtctggacagaaagcgtcaagcgcca

SEQ ID NO: 307680 - DNA, 75 bp, synthetic construct
  source 1..75: mol_type = other DNA
acccggcagaccaagacagttcgtgctggatccgtgtggcacaggcgtgggcaggcaccggttttggccacctgg

SEQ ID NO: 307681 - DNA, 75 bp, synthetic construct
  source 1..75: mol_type = other DNA
tattgataaattatgctattcaatttctcaatatattccttagtctagtcatgatgaaatatctcacaacagctc

SEQ ID NO: 307682 - DNA, 75 bp, synthetic construct
  source 1..75: mol_type = other DNA
cacgcaatgaaatcccattaaaaaatcttccaagttcagacgagatgctgactttaagttccacaactaatgcct

SEQ ID NO: 307683 - DNA, 75 bp, synthetic construct
  source 1..75: mol_type = other DNA
ttatgctggcgttattgcacaggaagtaatggaggcgatacctgaagctgtgggatcgtttactcattatggtga

SEQ ID NO: 307684 - DNA, 75 bp, synthetic construct
  source 1..75: mol_type = other DNA
gtcagcgtcttccagcgcaggaacggcatcaacaaaggccactgaagcctcaaaaagtgctgccgctgcagagtc

SEQ ID NO: 307685 - DNA, 75 bp, synthetic construct
  source 1..75: mol_type = other DNA
acggcgcggttcaactcaaaacaggtgctgttaacggtgctaaagcgcaggcgctcactatcaacaaggatgagg

SEQ ID NO: 307686 - DNA, 75 bp, synthetic construct
  source 1..75: mol_type = other DNA
agatgctgtcgctaaaaaatttctttagcggagctgagatactgttaaatggtaatgacggcgcggttcaactca

SEQ ID NO: 307687 - DNA, 75 bp, synthetic construct
  source 1..75: mol_type = other DNA
tggaacacgcagcatactgataacattaataaatttataccaattgcaggcagtacaaacggcccggcaggttct

SEQ ID NO: 307688 - DNA, 75 bp, synthetic construct
  source 1..75: mol_type = other DNA
ttacgtatattctacgtattcttcaggcgcaccacgcttacaggtttccaaatctggtttgtggggttgtcataa

SEQ ID NO: 307689 - DNA, 75 bp, synthetic construct
  source 1..75: mol_type = other DNA
agggcgtgtcccctataaatactaaatatgctgaacatgtggtgaaaaatatttacccgaaaattaaacatgatt

SEQ ID NO: 307690 - DNA, 75 bp, synthetic construct
  source 1..75: mol_type = other DNA
aggcaaaaatgttgatcccactcaaccaggcaagcaaggactacacgctgcgtactggtgatataccactggctt

SEQ ID NO: 307691 - DNA, 75 bp, synthetic construct
  source 1..75: mol_type = other DNA
aaaaagaaattttacagctctattgctcagagtcggttctgaccgtgaactcactggaagaacagaatgattggc

SEQ ID NO: 307692 - DNA, 75 bp, synthetic construct
  source 1..75: mol_type = other DNA
cgaatgatgcaagtacagcgcgctctaaacttgaagtcatgtttgaagcaaaaactggccttgatgcgaatacga

SEQ ID NO: 307693 - DNA, 75 bp, synthetic construct
  source 1..75: mol_type = other DNA
tgtgtacagaaatgacagccctctaggagaacaacggacaaatagatttatagaattatataatataaaaagaga

SEQ ID NO: 307694 - DNA, 75 bp, synthetic construct
  source 1..75: mol_type = other DNA
agggtgtgtcccctataaatactaaacatgctgaacatgtggtgaaaaatatttacccggaaattaaacatgatt

SEQ ID NO: 307695 - DNA, 75 bp, synthetic construct
  source 1..75: mol_type = other DNA
gatgaggttaactcaactgttgatttaactcttacaaaacaaacagggactggaaatcgttttgttttacagaac

SEQ ID NO: 307696 - DNA, 75 bp, synthetic construct
  source 1..75: mol_type = other DNA
aacttaacgatcaaaagatccagtatttgactgcccctaatatcaatatacataaaatgtcgctatcaaatataa

SEQ ID NO: 307697 - DNA, 75 bp, synthetic construct
  source 1..75: mol_type = other DNA
gcgctgccggatgtggtgacctgtattgactgtcagcagatacgggaacacaggaggaaatcgtgtcctgggaaa

SEQ ID NO: 307698 - DNA, 75 bp, synthetic construct
  source 1..75: mol_type = other DNA
ggggcttctgcaatgactgcgggaacgttattccggcacagcgccttgcggcgctgccggatgtggtgacctgta

SEQ ID NO: 307699 - DNA, 75 bp, synthetic construct
  source 1..75: mol_type = other DNA
aaaaaaagttattttaataaggaaatcaaaaatctaattaaaaagaatatttatcctgagctatacaatgaacaa

SEQ ID NO: 307700 - DNA, 75 bp, synthetic construct
  source 1..75: mol_type = other DNA
tatatcatgttttgaaagcgacttatcaaacaccatcttttcaaatggagaaataaacaacctcttcattaaaaa

SEQ ID NO: 307701 - DNA, 75 bp, synthetic construct
  source 1..75: mol_type = other DNA
ctcttcattaaaaaaagcaacatatttggaacatcgttcactaataccaggataaaaaatttgcgctgtgaagat

SEQ ID NO: 307702 - DNA, 75 bp, synthetic construct
  source 1..75: mol_type = other DNA
tttttaaaactcttgatggagatatcatatctttattatcagattggggagagatgctattccttctcatactgt

SEQ ID NO: 307703 - DNA, 75 bp, synthetic construct
  source 1..75: mol_type = other DNA
ggacgcacttaattatcgcaaccaggcccagggtattgttggtactaacatcggtttgggatcatcaccgcgtga

SEQ ID NO: 307704 - DNA, 75 bp, synthetic construct
  source 1..75: mol_type = other DNA
ctttatgtgcaaaaccttaaagcgacaggactaattacagctaactcaggtcttgcaacattaacaggacaagac

SEQ ID NO: 307705 - DNA, 75 bp, synthetic construct
  source 1..75: mol_type = other DNA
gggtggattacatgaccaaagtaagaactaaaatagtcggtgatggggaccgtaatttcggctgcagtcgcgggt

SEQ ID NO: 307706 - DNA, 75 bp, synthetic construct
  source 1..75: mol_type = other DNA
ccgctggtaagaccggaaccacttcggaaaagaaagacgacaaagcaacgaaggatacgcctgtcccggcgaaac

SEQ ID NO: 307707 - DNA, 75 bp, synthetic construct
  source 1..75: mol_type = other DNA
tttccggggcggttcatcaaccttgaatggcaacaaatagatatgcagcgccgggtggcatggataaacccggaa

SEQ ID NO: 307708 - DNA, 75 bp, synthetic construct
  source 1..75: mol_type = other DNA
ttggcagaagctttttggcactagattccctttgcctggcccacagggtggggatcgtagcggcgggtttactac

SEQ ID NO: 307709 - DNA, 75 bp, synthetic construct
  source 1..75: mol_type = other DNA
cacctaaaaaactaaaggatgccgcaaaaaaaggacagtcatttaaatttaaggatttaacgacggttgttatta

SEQ ID NO: 307710 - DNA, 75 bp, synthetic construct
  source 1..75: mol_type = other DNA
tacgctcggccgttcggctgcggcgagcggtaccggcagtccacctggagttacccacagattcgggggtagcgg

SEQ ID NO: 307711 - DNA, 75 bp, synthetic construct
  source 1..75: mol_type = other DNA
aaggagttcctgtatcagctgaactggcgttgaactgggtaataaaccacaccgagtattcgctgcgtaccccgg

SEQ ID NO: 307712 - DNA, 75 bp, synthetic construct
  source 1..75: mol_type = other DNA
cgctgacatcaagaaaaaagaggcggttgtgcgaaacgatgatagtgaagacgataaccttgcaacttttacatt

SEQ ID NO: 307713 - DNA, 75 bp, synthetic construct
  source 1..75: mol_type = other DNA
taggtaaagaagccaattttcgttcggacaagataattgttgatgcccttaatcgtatgagacctgagctaccgc

SEQ ID NO: 307714 - DNA, 75 bp, synthetic construct
  source 1..75: mol_type = other DNA
atctttataacgatggttccgatgcttctctggttaatgactctttatccattgagcctagttcacgccactatt

SEQ ID NO: 307715 - DNA, 75 bp, synthetic construct
  source 1..75: mol_type = other DNA
gaagtggggaaacgtcaattagacgaaatcaatcggatccgctacgaactgggtaatgctgccaacttactgatt

SEQ ID NO: 307716 - DNA, 75 bp, synthetic construct
  source 1..75: mol_type = other DNA
cgctatatacaatctcatacagcatcagagactagtcatcgctcagaacttataaaaagtatgaggaagttaata

SEQ ID NO: 307717 - DNA, 75 bp, synthetic construct
  source 1..75: mol_type = other DNA
aagaaaatgttagagattttctgggaattgatggtgacgtaaattcagaaattgcaggaacactagatactgatg

SEQ ID NO: 307718 - DNA, 75 bp, synthetic construct
  source 1..75: mol_type = other DNA
aaaataaaaatgaagctcttcataacttattctcaatgaatgatggggagtggtttgaaaaacttgagagtttag

SEQ ID NO: 307719 - DNA, 75 bp, synthetic construct
  source 1..75: mol_type = other DNA
tatttctcgagacttactaaagtcgcagcctttaacatcaacgattctcaaaagtgttgatagcgtacctaaata

SEQ ID NO: 307720 - DNA, 75 bp, synthetic construct
  source 1..75: mol_type = other DNA
gttgaagagccctgtccagaaaattatggctcttgccgatatatgtacagatgaacttgatgcttatagtcgcta

SEQ ID NO: 307721 - DNA, 75 bp, synthetic construct
  source 1..75: mol_type = other DNA
aataatgaagcaaatatactgaaacatttgaagataaaaccagtacataagtgtgaaatatatccatatgtgctt

SEQ ID NO: 307722 - DNA, 75 bp, synthetic construct
  source 1..75: mol_type = other DNA
cgatgctgatattttaattagttatttttcgtcggggaacctcgatatgttgcatcttgatgggaaaccatatgt

SEQ ID NO: 307723 - DNA, 75 bp, synthetic construct
  source 1..75: mol_type = other DNA
taataggatattgtttaattaacgttatttcttactttaccttaattgaaacaaacaactatgggaatacgttaa

SEQ ID NO: 307724 - DNA, 75 bp, synthetic construct
  source 1..75: mol_type = other DNA
accgggtattgtggcgctactgtcgatgctgttctatgttgccgcctttgccatgtcctggggtccggtatgctg

SEQ ID NO: 307725 - DNA, 75 bp, synthetic construct
  source 1..75: mol_type = other DNA
gccactgcaaattatcggcgcgctcggaatggcaatcggtatgtttagcctcggtaccgcgttttacactcaggc

SEQ ID NO: 307726 - DNA, 75 bp, synthetic construct
  source 1..75: mol_type = other DNA
aattatgggcaacacgcttgcaactcaggcagtacaggaaattaaacactccctggatcatggccgcaaaaccgg

SEQ ID NO: 307727 - DNA, 75 bp, synthetic construct
  source 1..75: mol_type = other DNA
ttgcgaggtattcggcttcctgttcccgacttgcctgatccaagtgcattgaaaggccctgttcagaagcttatg

SEQ ID NO: 307728 - DNA, 75 bp, synthetic construct
  source 1..75: mol_type = other DNA
atgtgttatataatatctatgcacgcccgattccccgttttacccctcactaagttaatgttttataaagagttt

SEQ ID NO: 307729 - DNA, 75 bp, synthetic construct
  source 1..75: mol_type = other DNA
ctttgctctgaagatgggttacggtctggcacctgacccgtattatcaccatgtgaaggcggatgttgatgggac

SEQ ID NO: 307730 - DNA, 75 bp, synthetic construct
  source 1..75: mol_type = other DNA
ttttcatctatagagatattaaatattatgaatgtgttcaggtatcgactagtagaataattgatgtcttttttg

SEQ ID NO: 307731 - DNA, 75 bp, synthetic construct
  source 1..75: mol_type = other DNA
cggtggaggaaatggtaacggaggcggaaacagagctggttccagtaattgttcaggaagtaacgtcggtggtac

SEQ ID NO: 307732 - DNA, 75 bp, synthetic construct
  source 1..75: mol_type = other DNA
aaaaatcagctgtgggtaaggttatcgttagtgttgcttgctctgatggcagaattacgcctgccgaaatcaaac

SEQ ID NO: 307733 - DNA, 75 bp, synthetic construct
  source 1..75: mol_type = other DNA
tcatgggacacagcaacttcgtgaacgcattgcgcgggttctacgcgccgccatgctcaacggaggtaagtcatg

SEQ ID NO: 307734 - DNA, 75 bp, synthetic construct
  source 1..75: mol_type = other DNA
aacacgttgggatggcatcaatttgcttaatgatgatggtaaaacctggcagcagccaggctctgtcatcctgaa

SEQ ID NO: 307735 - DNA, 75 bp, synthetic construct
  source 1..75: mol_type = other DNA
acagcaataataagaaaataaaaatcaataaagaagtattgatgcgtctggcgccattattcagcctgattattt

SEQ ID NO: 307736 - DNA, 75 bp, synthetic construct
  source 1..75: mol_type = other DNA
gctaatagctttaccttgtggatggtggcttgatgaaaatcagattcatcatatgattgatgtcattaatgatag

SEQ ID NO: 307737 - DNA, 75 bp, synthetic construct
  source 1..75: mol_type = other DNA
agagtttgaacgttaccagaaggctaaactggacgcagaatttgacgccatcatggctattcatggcagcgaaat

SEQ ID NO: 307738 - DNA, 75 bp, synthetic construct
  source 1..75: mol_type = other DNA
cgggacgtgttactggaagacgtggcgcagcggaatatcccgctctcgtataaaaaactgcgcagggcgctgaag

SEQ ID NO: 307739 - DNA, 75 bp, synthetic construct
  source 1..75: mol_type = other DNA
aatcaagggcttcccagagggttgaaacgttgactgaattgccagacatcactaaattacgagtcgatcaactac

SEQ ID NO: 307740 - DNA, 75 bp, synthetic construct
  source 1..75: mol_type = other DNA
cagggtttaatggatgagcgtgttgccccgcaatttgagggctttgagaatgctcggggaattgtactaattgat

SEQ ID NO: 307741 - DNA, 75 bp, synthetic construct
  source 1..75: mol_type = other DNA
ttacacccctgcaaatgaagaggctacggctgaaattctggccttgcgcgataaagtgctggcggatgtcgaaat

SEQ ID NO: 307742 - DNA, 75 bp, synthetic construct
  source 1..75: mol_type = other DNA
ctgcccctggagcatcgctggagaaatatgctccgcacctcaacgctgaagcgctgcacgcctggggattgtata

SEQ ID NO: 307743 - DNA, 75 bp, synthetic construct
  source 1..75: mol_type = other DNA
tatgtctatgccgtaggcagtaatgaagttgctgctcatctttctggtattaaagttcagcgcgtgaaaattttc

SEQ ID NO: 307744 - DNA, 75 bp, synthetic construct
  source 1..75: mol_type = other DNA
ttaataaagaaaaattactggaggttcgtaaagagctactgactggataccagatccccaaaagtaactatattg

SEQ ID NO: 307745 - DNA, 75 bp, synthetic construct
  source 1..75: mol_type = other DNA
tagcgaaatagttagttttattttgctttttataacttgttgtaagttaggatatattaaaaaattatgtgtact

SEQ ID NO: 307746 - DNA, 75 bp, synthetic construct
  source 1..75: mol_type = other DNA
cacctacgccgtttatagcgacgaagagccagacgaaggtaaagagcgagagattcgcatgatcaaggctcaccc

SEQ ID NO: 307747 - DNA, 75 bp, synthetic construct
  source 1..75: mol_type = other DNA
gcgaattcggcatgacacctgccagccgatcaaaggttggtgcaaaaggcccggcagaagccgacccactggaag

SEQ ID NO: 307748 - DNA, 75 bp, synthetic construct
  source 1..75: mol_type = other DNA
tcgaacctataccagtgagtattcagcatttgtggaacggaatgctacatttaagtattatccagaagagtacaa

SEQ ID NO: 307749 - DNA, 75 bp, synthetic construct
  source 1..75: mol_type = other DNA
gcgatacctccgttaacttccccccgatgcaagcctggttgttggaaggacaaaaacccatttttgttcctgact

SEQ ID NO: 307750 - DNA, 75 bp, synthetic construct
  source 1..75: mol_type = other DNA
gcgctgggttatcgctcgccacgggaatatctgcggcagcgggcttgtaatgggttaagtgataacagatgtctg

SEQ ID NO: 307751 - DNA, 75 bp, synthetic construct
  source 1..75: mol_type = other DNA
aattatcctacagaaccaaaagatgttaatttactggcgatgagaactattgcgcaagcatttcctggagtcaat

SEQ ID NO: 307752 - DNA, 75 bp, synthetic construct
  source 1..75: mol_type = other DNA
gttcctgctggaggtatcggaagtggcgggaacattttaaatattactggcggaatatctcaaggtggtctgtat

SEQ ID NO: 307753 - DNA, 75 bp, synthetic construct
  source 1..75: mol_type = other DNA
gcaagttccagcaggcagcgagagcggcgattattgagcaactgcgggccgttccccggccatcctcagatctgg

SEQ ID NO: 307754 - DNA, 75 bp, synthetic construct
  source 1..75: mol_type = other DNA
aaatttgtagtcctcttaaaatggaagaattatatgaaaaagttgaaaataattatagagtgttagctcattttc

SEQ ID NO: 307755 - DNA, 75 bp, synthetic construct
  source 1..75: mol_type = other DNA
agttggattaacattgcgttctttggaatctattttttattcacgaaaattaatatcgaacaatattgacttgat

SEQ ID NO: 307756 - DNA, 75 bp, synthetic construct
  source 1..75: mol_type = other DNA
acgatctgttctcttcagattttgatgagttcatccgtttaccatataaacctgtagaaaatgttattttagaaa

SEQ ID NO: 307757 - DNA, 75 bp, synthetic construct
  source 1..75: mol_type = other DNA
cgggaaagtgagctgtctgcaggatttggtgcggcagaggcaaattgctcaccggtcatggcatttcttgtcaga

SEQ ID NO: 307758 - DNA, 75 bp, synthetic construct
  source 1..75: mol_type = other DNA
cgcgagaaattaacggttacttgcttggtcgtgacgaatgtgatcgcgccgcacggcgcaaggtgttgctggaaa

SEQ ID NO: 307759 - DNA, 75 bp, synthetic construct
  source 1..75: mol_type = other DNA
ccgcgccctgctcgctggcgcgtctggtcagttacgcaatcaggcaaccacagcaggtaatctgctccagcgcac

SEQ ID NO: 307760 - DNA, 75 bp, synthetic construct
  source 1..75: mol_type = other DNA
actcaagtctctgaactggaacaggtagcccgctacggcaccgaagttaactccatcaaaatggataagcctctg

SEQ ID NO: 307761 - DNA, 75 bp, synthetic construct
  source 1..75: mol_type = other DNA
agtaaccagcctgatcactaacaaggtggcagaggcggcacgtggtgcgctgatcccggttaacactgcgggcta

SEQ ID NO: 307762 - DNA, 75 bp, synthetic construct
  source 1..75: mol_type = other DNA
aatttacttaaatcacaacttaacacaataatgaaatacaagtgtttttttgaacgccataatatactatgttct

SEQ ID NO: 307763 - DNA, 75 bp, synthetic construct
  source 1..75: mol_type = other DNA
cggggttcctggcagattgaatttaactacaaggtcatgccattcctggtcggcttaacctcccagttcactacc

SEQ ID NO: 307764 - DNA, 75 bp, synthetic construct
  source 1..75: mol_type = other DNA
gtgaacgggctcgggctcgataagatcgaagtgaccgacgcgggtgggctgcgcatcggcgcactggtacggaac

SEQ ID NO: 307765 - DNA, 75 bp, synthetic construct
  source 1..75: mol_type = other DNA
acataccaggccgccaggctggtgggtaatgtgctgggtcttgtcgacgcaacatcagaacgggggcggtatgat

SEQ ID NO: 307766 - DNA, 75 bp, synthetic construct
  source 1..75: mol_type = other DNA
ctctcaatccactaatttctatccacgagacgacgcaaatagaaatcaagtcagtgattgcccgttgtcatttgc

SEQ ID NO: 307767 - DNA, 75 bp, synthetic construct
  source 1..75: mol_type = other DNA
ggcttatgtaacgggtgcacgcccagttcaactcgctaggctggcggtcaaagatgttcgtatcgatacacgaaa

SEQ ID NO: 307768 - DNA, 75 bp, synthetic construct
  source 1..75: mol_type = other DNA
atcaggacatcgccgcgaaaggcgagatcagcccgttctaccagaaagtaatgactgaccgttacggcatggtga

SEQ ID NO: 307769 - DNA, 75 bp, synthetic construct
  source 1..75: mol_type = other DNA
ggcaacgtctggaagaaagcggcagcgtctatgcgatgcgcaaatctaccccttatggcgctctcgaacttgaaa

SEQ ID NO: 307770 - DNA, 75 bp, synthetic construct
  source 1..75: mol_type = other DNA
tggtgagacgtgtcgcatccatgcggttcggctccccggtcagcacataccaggccgccaggctggtgggtaatg

SEQ ID NO: 307771 - DNA, 75 bp, synthetic construct
  source 1..75: mol_type = other DNA
tttttcagaaaaatatagacaaaccatattttgagggaattattaataatttaaaaaaatcatgcccaaatatta

SEQ ID NO: 307772 - DNA, 75 bp, synthetic construct
  source 1..75: mol_type = other DNA
acatacgaagagaaaagaatgtctattttgctaagaagttttcaaaattggtcgttcttacacaaagagactatt

SEQ ID NO: 307773 - DNA, 75 bp, synthetic construct
  source 1..75: mol_type = other DNA
ctggttgtgcaaaacgtatcaacaatagcctctcataccgcaacaaaccggcccttaccagaagcgattatggca

SEQ ID NO: 307774 - DNA, 75 bp, synthetic construct
  source 1..75: mol_type = other DNA
agaggagcaagcccgacgtaagatgctgggggtgatgacctttggtgagattgttattgacgccagccacaccgc

SEQ ID NO: 307775 - DNA, 75 bp, synthetic construct
  source 1..75: mol_type = other DNA
tctttttatactctccggtggctggccggtgttgtcctgcgcagggaagcgctgggtatgggcgacgttttgttg

SEQ ID NO: 307776 - DNA, 75 bp, synthetic construct
  source 1..75: mol_type = other DNA
gatgtcgcttatgaaggctccggcagtggcgactggcgcactgacgggttcatcgtgggtgttggttataaattc

SEQ ID NO: 307777 - DNA, 75 bp, synthetic construct
  source 1..75: mol_type = other DNA
ttccaacgctaaaaacatttctatcttcttttttatttgatactaacaaaagtattattaacagggatgccattc

SEQ ID NO: 307778 - DNA, 75 bp, synthetic construct
  source 1..75: mol_type = other DNA
gggcgcgaaaacggtcctgcttgtgtcgagaattgcccagcggacgcactgcaactggtcactgacgccgcactc

SEQ ID NO: 307779 - DNA, 75 bp, synthetic construct
  source 1..75: mol_type = other DNA
tctataatcgcggcagaaaagtccacattgattatttgcacggcgtcacactttgctatgcaatagcatttttat

SEQ ID NO: 307780 - DNA, 75 bp, synthetic construct
  source 1..75: mol_type = other DNA
aaagataaagaaatgtactctctttttgatgaaataggatactctctaaatgatcatggtgaaggttgttttatg

SEQ ID NO: 307781 - DNA, 75 bp, synthetic construct
  source 1..75: mol_type = other DNA
caatcaacccagaacaaaaaacaggctactataatgctgtcaatgaccgtgtaaaatctctaaaaaaagagaaag

SEQ ID NO: 307782 - DNA, 75 bp, synthetic construct
  source 1..75: mol_type = other DNA
cggcactctatctgtaaactaattttaccccacgtccttcacggtgcgcttaccattattacgcactgtaaccat

SEQ ID NO: 307783 - DNA, 75 bp, synthetic construct
  source 1..75: mol_type = other DNA
atgaactttactgcgccggtcatctgattgaagccggagtcgccttcttccaaggccacgggaaaacgacgcttg

SEQ ID NO: 307784 - DNA, 75 bp, synthetic construct
  source 1..75: mol_type = other DNA
atggcgaatatgctgcgggtgagggtgaccgatgcgttcggtaatgcgcttaccggacagacggtcagcgtgttg

SEQ ID NO: 307785 - DNA, 75 bp, synthetic construct
  source 1..75: mol_type = other DNA
cagttgttacgcgaaggtatcagggtggccagatgtacagtggcgcgcctcatgactgttatgggacttgccggt

SEQ ID NO: 307786 - DNA, 75 bp, synthetic construct
  source 1..75: mol_type = other DNA
agtaaatgtcggtgcagctatcactaatgcagctagagatggaacaagcgtggcacatcaagcaggctcaagggc

SEQ ID NO: 307787 - DNA, 75 bp, synthetic construct
  source 1..75: mol_type = other DNA
acaacgcttcggtcagcaacgagcccgcgaattttggcttatttttaatgcccaaaccccttctggaaaaacatg

SEQ ID NO: 307788 - DNA, 75 bp, synthetic construct
  source 1..75: mol_type = other DNA
tggtgttggccatatagatttatatgatccagatatcctttcgttgaataatctttatcggcatattctgccacc

SEQ ID NO: 307789 - DNA, 75 bp, synthetic construct
  source 1..75: mol_type = other DNA
ccagtctggcccgggcctttttttacattgtgctgctgtcgattctttccacgggtatcgctctgctaactctgg

SEQ ID NO: 307790 - DNA, 75 bp, synthetic construct
  source 1..75: mol_type = other DNA
tggcccggattgcgggaacggcgggcagtgcggtagcagcactgggtgcgtttccggcactggatgcaatgcggc

SEQ ID NO: 307791 - DNA, 75 bp, synthetic construct
  source 1..75: mol_type = other DNA
ggaatataaatcaagctataacattattcagagtagataaggaaagattattatcgaaatttctttatcatgttt

SEQ ID NO: 307792 - DNA, 75 bp, synthetic construct
  source 1..75: mol_type = other DNA
tccgatgaagaacttgcggatctcttttacagccacctggagagtgaaaattatccgggcgcgctaaggaaggtg

SEQ ID NO: 307793 - DNA, 75 bp, synthetic construct
  source 1..75: mol_type = other DNA
catatgaattcagtacgctgatcacgctgacgtttgtggtgtttgcgctgaactttctgacgttctggtgggaac

SEQ ID NO: 307794 - DNA, 75 bp, synthetic construct
  source 1..75: mol_type = other DNA
tgccgctggtatttaaggtgattgggatctggctgaaagtccgggaagagggggaagatgaaggcaacaagggat

SEQ ID NO: 307795 - DNA, 75 bp, synthetic construct
  source 1..75: mol_type = other DNA
gaagttgtccgacggctggtgagtccgaagagtctgacagtctctcaggacggtgaggtttatcgcggatatggt

SEQ ID NO: 307796 - DNA, 75 bp, synthetic construct
  source 1..75: mol_type = other DNA
caagtacaaccggtaaaactggcggcgatggaaggggagtggcaaacggaacctgcacctgcaccgttccatgtg

SEQ ID NO: 307797 - DNA, 75 bp, synthetic construct
  source 1..75: mol_type = other DNA
aatggaaccatcattgatggtggagggcagaaagtaacaactcaggggcatgttgatggtacaacgataaataag

SEQ ID NO: 307798 - DNA, 75 bp, synthetic construct
  source 1..75: mol_type = other DNA
tctgcttttgcaccatcacctgcgtgctgttccttgccagtggtggcggagaaatcctttatcaatggtgcgcaa

SEQ ID NO: 307799 - DNA, 75 bp, synthetic construct
  source 1..75: mol_type = other DNA
ccggcgatgcggccggtcagccaggtggtgcagatcgggctgcttccggatcaggctcatctgctcccaccggca

SEQ ID NO: 307800 - DNA, 75 bp, synthetic construct
  source 1..75: mol_type = other DNA
tctccacggcctatttttccggccaggggatcttcactgccattctggtcgccatctattccaccgaactgtatg

SEQ ID NO: 307801 - DNA, 75 bp, synthetic construct
  source 1..75: mol_type = other DNA
ccgcattggcagcaggagaagcgatcccgcatacttttgtacaaggcttctgggatcatttcctgtttataggag

SEQ ID NO: 307802 - DNA, 75 bp, synthetic construct
  source 1..75: mol_type = other DNA
tctttaccgcgttgctttgttcaatatatgcgacagaggtctatcgttggctgcaaaaacggaatattacaatta

SEQ ID NO: 307803 - DNA, 75 bp, synthetic construct
  source 1..75: mol_type = other DNA
atcattctgcgtgccccgagtggttccaaagtgttctccgcaggtcacgatattcatgaactgccatcaggcggc

SEQ ID NO: 307804 - DNA, 75 bp, synthetic construct
  source 1..75: mol_type = other DNA
atgtcttatcagtatgtgaacgttgccactatcaacaaagtggcggtcattgagtttaactatggccgaaaactt

SEQ ID NO: 307805 - DNA, 75 bp, synthetic construct
  source 1..75: mol_type = other DNA
attaagaaagcagtaataaataaaaaaatgaattatattattctctttagttttgattatattaaaaatgcgttg

SEQ ID NO: 307806 - DNA, 75 bp, synthetic construct
  source 1..75: mol_type = other DNA
taagccgcaaaattatccttgatccgcgggcacttcagggaaaattcattgccgcgactttccagcaccgctggc

SEQ ID NO: 307807 - DNA, 75 bp, synthetic construct
  source 1..75: mol_type = other DNA
aaaaagggcccacagagcccgtacggattgtgtatgagggaagcgtcagtacggtcagtcaggctggcacagcgg

SEQ ID NO: 307808 - DNA, 75 bp, synthetic construct
  source 1..75: mol_type = other DNA
tagcgtcggtaccggcagtcgcataaaatatggcgtcgtgaatgattacggggcggtgcgcgaatatgatggaat

SEQ ID NO: 307809 - DNA, 75 bp, synthetic construct
  source 1..75: mol_type = other DNA
gaacccgataaccaatcaagcgcagaccgaccgcgacaacgggcaggataccgccattcaggacgcgcagcacgc

SEQ ID NO: 307810 - DNA, 75 bp, synthetic construct
  source 1..75: mol_type = other DNA
tttattcatggcatggttgctcgaaatgaccttgagtttgtaaagggacaagctgattttaatattatttatatt

SEQ ID NO: 307811 - DNA, 75 bp, synthetic construct
  source 1..75: mol_type = other DNA
ggcagacgtgcaaccataccgcaaaccaggttccgacctgcaaatgtctgtaatggatgcggtcacttcttctgc

SEQ ID NO: 307812 - DNA, 75 bp, synthetic construct
  source 1..75: mol_type = other DNA
aaagaagtcacaactatgtttgcgatgattgaattattgagtgatgatgctcacccattggcaggaaatggattt

SEQ ID NO: 307813 - DNA, 75 bp, synthetic construct
  source 1..75: mol_type = other DNA
gggcagtgcgattgtcaccgcgcccgcaaaagcggcaacggatgtactggcacaatttgcgggcgagaagtttcg

SEQ ID NO: 307814 - DNA, 75 bp, synthetic construct
  source 1..75: mol_type = other DNA
ctacagggacacaaagacggtctggagtgggccgccaaactggcggaagccaaccaccctgaaaccggagactgg

SEQ ID NO: 307815 - DNA, 75 bp, synthetic construct
  source 1..75: mol_type = other DNA
ccgttgaatccagttacgaatacagatcctctggggttagaagtttttcctagaccattccccttgccaattcca

SEQ ID NO: 307816 - DNA, 75 bp, synthetic construct
  source 1..75: mol_type = other DNA
taccaggtgcagaacgacggccagcgatacgcgttgagtcaggcgaaatctatcgctgatgaactgatgaccggg

SEQ ID NO: 307817 - DNA, 75 bp, synthetic construct
  source 1..75: mol_type = other DNA
gcgggttatcgatcgcctccagatggatggcggaatgtgggtgaactttgactggggcagctatcgcaagaacgt

SEQ ID NO: 307818 - DNA, 75 bp, synthetic construct
  source 1..75: mol_type = other DNA
ctaagcagcagcgcactgcttggtggcgtggggatcggcatcattcaggcggtgatgccttcggtaattaagcgg

SEQ ID NO: 307819 - DNA, 75 bp, synthetic construct
  source 1..75: mol_type = other DNA
ggttcgccagcttgtgcagtatggtgtccttgatcctgatggtctggttttcaataaagagatcaatccggcatt

SEQ ID NO: 307820 - DNA, 75 bp, synthetic construct
  source 1..75: mol_type = other DNA
gaacattacgctttccagtgagttcagcctgttgccgatttgctaccgcccggatctggtgaccgccatcaccaa

SEQ ID NO: 307821 - DNA, 75 bp, synthetic construct
  source 1..75: mol_type = other DNA
gattatggatcgcatgaccatgaacggcgggcgttgggtgaattttaactgggagagctggcgtccgaatgtcgt

SEQ ID NO: 307822 - DNA, 75 bp, synthetic construct
  source 1..75: mol_type = other DNA
cgtttctgcagactgttttgagcaggccgggtatgacagtaatatagaccccgatttgttaagagccattgcaaa

SEQ ID NO: 307823 - DNA, 75 bp, synthetic construct
  source 1..75: mol_type = other DNA
ggatacgccattagaggcggaatcaaagcggcaaagcgtgcagtcattgtcacccgcaacgtttaaggggctgag

SEQ ID NO: 307824 - DNA, 75 bp, synthetic construct
  source 1..75: mol_type = other DNA
tgaaatatctgggtctggatttgcctgaagatctctttggcgcaacgttgcgttatcaaaccgatcacgatgaat

SEQ ID NO: 307825 - DNA, 75 bp, synthetic construct
  source 1..75: mol_type = other DNA
ccccccacggcatatattaatcaggggactgtattgtctgttattgttccgcgaaatatcgacttttcatccgta

SEQ ID NO: 307826 - DNA, 75 bp, synthetic construct
  source 1..75: mol_type = other DNA
taaagccgccatcaccgacacccgtaatgatgtctccgcagtgcagtcagacgtcaccaacataaaaggcgatgt

SEQ ID NO: 307827 - DNA, 75 bp, synthetic construct
  source 1..75: mol_type = other DNA
ttgaaattagtgatgtgaccgagctaaggactctattaggagtagagcggccatattgttcgtctgaacagcctg

SEQ ID NO: 307828 - DNA, 75 bp, synthetic construct
  source 1..75: mol_type = other DNA
agtgaagatgacgccatccgttccatgcaggaggcggaggaactggtcgatgccatacctggtgcatcgttgaga

SEQ ID NO: 307829 - DNA, 75 bp, synthetic construct
  source 1..75: mol_type = other DNA
acaggtaaaggttcaaatgcactagaaagacgtccgcaactgcgggcagcgctggccgcgtgtaaaaaaaaaggt

SEQ ID NO: 307830 - DNA, 75 bp, synthetic construct
  source 1..75: mol_type = other DNA
cctgggcgaatgctcgatccgttaaccattgtggatatggcggtagcgcatttttcgcccgtcaacgacctgaaa

SEQ ID NO: 307831 - DNA, 75 bp, synthetic construct
  source 1..75: mol_type = other DNA
tcgctggctcgaagagcagcagtccatgctggcactgcctccggagaaaaaagtgaaccgccccgggaatcctgg

SEQ ID NO: 307832 - DNA, 75 bp, synthetic construct
  source 1..75: mol_type = other DNA
ataatgaggatttatttaatatacttgaaagcgttttagatttgagtaaagagggtttgtcaaaactttctaatc

SEQ ID NO: 307833 - DNA, 75 bp, synthetic construct
  source 1..75: mol_type = other DNA
cgctggcctacacgcagcggcttaaggaagccggattactggcattaacagggagtacaggcgactcgtatgaca

SEQ ID NO: 307834 - DNA, 75 bp, synthetic construct
  source 1..75: mol_type = other DNA
cgcgaactacaatctcccattttcacttgggctaacaaccagcctcactcgatctgatcgccattatcgcgaact

SEQ ID NO: 307835 - DNA, 75 bp, synthetic construct
  source 1..75: mol_type = other DNA
cgcggtcaatcctgtggcaatgacaccttctcgctggcagtttacccgtcatcactgaaccgccccgggaatcct

SEQ ID NO: 307836 - DNA, 75 bp, synthetic construct
  source 1..75: mol_type = other DNA
aaagcgtccggtatggaacgtttcccgctgccgtatgtgctgaccaactgccataactcactctgcgccgtcggc

SEQ ID NO: 307837 - DNA, 75 bp, synthetic construct
  source 1..75: mol_type = other DNA
tgtttctcgccagtaataacgaaataattgccgaagaacatttcaccggccaaattaaaaaagaagaagccaaaa

SEQ ID NO: 307838 - DNA, 75 bp, synthetic construct
  source 1..75: mol_type = other DNA
gtgataatacacagcctgagtctgcatctgtgtggatgaagattacgggcggaagaacctctggtaagcttagtg

SEQ ID NO: 307839 - DNA, 75 bp, synthetic construct
  source 1..75: mol_type = other DNA
ctgcaacaagcttaagtggcggagctcagaacatctataatcttggtcatgcatcaagcaccattatttttaacg

SEQ ID NO: 307840 - DNA, 75 bp, synthetic construct
  source 1..75: mol_type = other DNA
taactggctggcgctgcacggtcgcggccaggattactgccagcttaaccctcaaccgatggcgtactacgatgg

SEQ ID NO: 307841 - DNA, 75 bp, synthetic construct
  source 1..75: mol_type = other DNA
cttggggcaataaaaataaataaaaaagattatgtgcgtgactatgatagccatcaaagacatattgagatgatg

SEQ ID NO: 307842 - DNA, 75 bp, synthetic construct
  source 1..75: mol_type = other DNA
tcattcaagcatttgacggacatgtccatcgtattatgggagatgctgtaatggctttttttcgtagcaacaaaa

SEQ ID NO: 307843 - DNA, 75 bp, synthetic construct
  source 1..75: mol_type = other DNA
tacagacaatatcttctagataacaaggcatatttcaggttcctgccctatggcctcaagaacagtaatatctgc

SEQ ID NO: 307844 - DNA, 75 bp, synthetic construct
  source 1..75: mol_type = other DNA
ttggttcagtcaatgatggatacctttgttgacccatggttggagcgaattaccaaccggaagtctatttttcca

SEQ ID NO: 307845 - DNA, 75 bp, synthetic construct
  source 1..75: mol_type = other DNA
tcatcatgtaacattaaaaggaaagcttggggcaataaaaataaataaaaaagattatgtgcgtgactatgatag

SEQ ID NO: 307846 - DNA, 75 bp, synthetic construct
  source 1..75: mol_type = other DNA
tgagtttgggaaagggcgattatggtggtggtatagtatcaaatacaaacttttttgctttaaaggaattagagc

SEQ ID NO: 307847 - DNA, 75 bp, synthetic construct
  source 1..75: mol_type = other DNA
ctccagggctcgcacaatcatttttgatatgtctgacattactctgctgggcagaagaaaaccaccctgtaatta

SEQ ID NO: 307848 - DNA, 75 bp, synthetic construct
  source 1..75: mol_type = other DNA
attatagaaggagaaaacataaattggactgtaattactgattttggtggagcgagtcaaatacaccatgaaaga

SEQ ID NO: 307849 - DNA, 75 bp, synthetic construct
  source 1..75: mol_type = other DNA
tggaaaatgcagaaaatatagaggctaaaaaatcctcgctgggagtaaatcttgctgttgaaaattgtataaaag

SEQ ID NO: 307850 - DNA, 75 bp, synthetic construct
  source 1..75: mol_type = other DNA
gggctgcagaaaatagtgaggcattaaaaaaatcagaaacaacactaggtgtgagcctagctgttgagggttgca

SEQ ID NO: 307851 - DNA, 75 bp, synthetic construct
  source 1..75: mol_type = other DNA
aaatacaggtgacggaactcgatttatatcggcgtaatttcaacccggtgatgacgtcggaagatgaaccagact

SEQ ID NO: 307852 - DNA, 75 bp, synthetic construct
  source 1..75: mol_type = other DNA
atgcagtctgaacgtatttatttggtatgggcccatcctcgtcatgattcattgaccgcacatattgctgatgcg

SEQ ID NO: 307853 - DNA, 75 bp, synthetic construct
  source 1..75: mol_type = other DNA
ccataatatttactttttctactgtgtcagtcacagcatttgcaaatgaagaaaccataggaatgcatgtaaagg

SEQ ID NO: 307854 - DNA, 75 bp, synthetic construct
  source 1..75: mol_type = other DNA
atgtttacttgcttcattctgtttaaaacagaatataaggaacatctttatgctatcattctaacaatcgcaaca

SEQ ID NO: 307855 - DNA, 75 bp, synthetic construct
  source 1..75: mol_type = other DNA
ttgtattttttggatttactacagcctttattacttattcctcttcgtcatattttacctcccagaatttgttaa

SEQ ID NO: 307856 - DNA, 75 bp, synthetic construct
  source 1..75: mol_type = other DNA
acggcgttgtcgataaagattcgctgatactcacagcaataaaagagcgtgcaaacatactaattaacgacctgt

SEQ ID NO: 307857 - DNA, 75 bp, synthetic construct
  source 1..75: mol_type = other DNA
gctcaggaaatacaacccgtgtctgtaccgttgagccacagttattactttctaatattactgcgggcgcgactg

SEQ ID NO: 307858 - DNA, 75 bp, synthetic construct
  source 1..75: mol_type = other DNA
ctatttgcaacagtgccctgtgtagcgcttctgttccatgtcattgcacgggctgcatatgaacccgaatctgtg

SEQ ID NO: 307859 - DNA, 75 bp, synthetic construct
  source 1..75: mol_type = other DNA
aacaaaaaatcaaaaacaaaattctatccaggaacaggatatcacctttcagttattttgccttcattttttata

SEQ ID NO: 307860 - DNA, 75 bp, synthetic construct
  source 1..75: mol_type = other DNA
ggcttcacctcgccgtaaatgctgaaacagcagaagagttattaaatctggcgggagtgtgtcgtgtgcttgaaa

SEQ ID NO: 307861 - DNA, 75 bp, synthetic construct
  source 1..75: mol_type = other DNA
ttatggcccggcgtatcagcgacatcggtcatgaagcaaaacttatctctccgcaattcgtgcgtccgtttgtca

SEQ ID NO: 307862 - DNA, 75 bp, synthetic construct
  source 1..75: mol_type = other DNA
tgaaaacgggcttacccgtggtgaacaaatggaactggcacggattgcgctggcatcgctggaagcagagccagt

SEQ ID NO: 307863 - DNA, 75 bp, synthetic construct
  source 1..75: mol_type = other DNA
gctgtttgtaaactggctctataaccattcctccgtgctgcatgaacgatcagaaatcattaaatgcgccgaaat

SEQ ID NO: 307864 - DNA, 75 bp, synthetic construct
  source 1..75: mol_type = other DNA
aatgcgagattactcatgaggcctggcagagcagggctgttatccgctatgacatggcggtgccgctcaatttgt

SEQ ID NO: 307865 - DNA, 75 bp, synthetic construct
  source 1..75: mol_type = other DNA
ttttgatatgctcatcagtactaataatactattcatttcaaacaattgaatttttataatgtgatcaatagcat

SEQ ID NO: 307866 - DNA, 75 bp, synthetic construct
  source 1..75: mol_type = other DNA
tcacgaccatcaatgcgttttatccagccaagaacagaaacccagcaggctatgagggcattacaccgggtcaga

SEQ ID NO: 307867 - DNA, 75 bp, synthetic construct
  source 1..75: mol_type = other DNA
cggatattccattcgaaggtgagcgccacaatgcacttgatgacgcccgttaccaggcaaaatacgtttcagcta

SEQ ID NO: 307868 - DNA, 75 bp, synthetic construct
  source 1..75: mol_type = other DNA
cgatatcggaaaaacagccgccatgctgggggctgcactggataccgtcattctgacggcatctgagcagggctt

SEQ ID NO: 307869 - DNA, 75 bp, synthetic construct
  source 1..75: mol_type = other DNA
agcacatccgctaccgtcacacagggacagttacagttaactgccataaccccggacggcggtttttcacaggta

SEQ ID NO: 307870 - DNA, 75 bp, synthetic construct
  source 1..75: mol_type = other DNA
aaaaatgttaatatcttagatttagataaagtgaaacagatagttgctgagttaaaacctgatgttgttattaat

SEQ ID NO: 307871 - DNA, 75 bp, synthetic construct
  source 1..75: mol_type = other DNA
ttgatcgattggtttttatctcaaaaaaaatatatttatggatactcaaaagctattttttctggaatgccaaca

SEQ ID NO: 307872 - DNA, 75 bp, synthetic construct
  source 1..75: mol_type = other DNA
cttaatatcgatgctactgatattgatagcattgataacgtgattaattcggttgaccctgatgttgttataaat

SEQ ID NO: 307873 - DNA, 75 bp, synthetic construct
  source 1..75: mol_type = other DNA
cgcaatatcttacaacaatgccgtaagtgagattattaacgtctggtttgaatcgctgacaaattgcgagcgtga

SEQ ID NO: 307874 - DNA, 75 bp, synthetic construct
  source 1..75: mol_type = other DNA
ggggtaattattattcatcaggaaatccaccgacatctatagaatattctattataccgttaacagcaaacttcc

SEQ ID NO: 307875 - DNA, 75 bp, synthetic construct
  source 1..75: mol_type = other DNA
acaagatgggagtataataagaattgaattggattacgcgataaataatggatacgcttcggacagatgtcttta

SEQ ID NO: 307876 - DNA, 75 bp, synthetic construct
  source 1..75: mol_type = other DNA
atgcaagaccagaaagaaacagaaacgtatggacaggtaacttcattacgtcagggttatttacggcagaagata

SEQ ID NO: 307877 - DNA, 75 bp, synthetic construct
  source 1..75: mol_type = other DNA
aaaccgatgattgaaggacaactggcggagtttattcatttcttcggtttggccgataaggagtcgctatgcgcc

SEQ ID NO: 307878 - DNA, 75 bp, synthetic construct
  source 1..75: mol_type = other DNA
tcatgccgcgtctccccagcgaagagattaaagaacccttgcataaagctattctgaaacaactcggtttgagtt

SEQ ID NO: 307879 - DNA, 75 bp, synthetic construct
  source 1..75: mol_type = other DNA
tcatgccgcgtcaccccagtgatgagataaaagaaccattgcgtaaagcaatcctgaagcaactcggtttaaatt

SEQ ID NO: 307880 - DNA, 75 bp, synthetic construct
  source 1..75: mol_type = other DNA
cagatgatctcctgttcaaaaaactattctccccttcgaaattaatgacaattatcggtgatgaaattcctctta

SEQ ID NO: 307881 - DNA, 75 bp, synthetic construct
  source 1..75: mol_type = other DNA
ggtgaccgtggggaatattcgggccggacaaatcattgccgtggagcccactgccgcaagttattacgcatttaa

SEQ ID NO: 307882 - DNA, 75 bp, synthetic construct
  source 1..75: mol_type = other DNA
aataagatcattttcagagaagcttgctcatatagaaaatggattggcgtgggaagaagaaattaatattgaata

SEQ ID NO: 307883 - DNA, 75 bp, synthetic construct
  source 1..75: mol_type = other DNA
agagataatatttttacatgccgatcttcagcaatacttaagccaaagttgcggtgcgtttgtgtgcatggcagc

SEQ ID NO: 307884 - DNA, 75 bp, synthetic construct
  source 1..75: mol_type = other DNA
aaatatggcgatgcaaatattaatcattattatagaggcttagaaataaaacactcacaaccccaaaatagagca

SEQ ID NO: 307885 - DNA, 75 bp, synthetic construct
  source 1..75: mol_type = other DNA
gccaaagttgcggtgcatttgtgtgcatggcagcccaggaagtaattgaacaaagggaaagcaattctgacagcg

SEQ ID NO: 307886 - DNA, 75 bp, synthetic construct
  source 1..75: mol_type = other DNA
cgtattgatgtggatatcaatcttgataaccaggctgacgatcatcgccttcgtgtcctggtccctacacctttt

SEQ ID NO: 307887 - DNA, 75 bp, synthetic construct
  source 1..75: mol_type = other DNA
aggcgcgagcatggctgactccagtacagtgttacaacaaaatcccatgggatgtgatgaagctcaacaaagccg

SEQ ID NO: 307888 - DNA, 75 bp, synthetic construct
  source 1..75: mol_type = other DNA
aaggcctgggcggccttcgggaattaaaatgccagtcccggactcacaactacgtggtctgctttcttgtcgcct

SEQ ID NO: 307889 - DNA, 75 bp, synthetic construct
  source 1..75: mol_type = other DNA
tttccgtactgtacaaggtcgcatagtaccgacacttgccgtattcgtggacagttcgaacgggaacgccaccga

SEQ ID NO: 307890 - DNA, 75 bp, synthetic construct
  source 1..75: mol_type = other DNA
atggggatgccttttgaagatgaataccagaaagaactagatatacttcaattagaatcattacgagaagatgaa

SEQ ID NO: 307891 - DNA, 75 bp, synthetic construct
  source 1..75: mol_type = other DNA
caattaagggtagcccttcaccaactagtgaactctttaaaaaatctactgctggtggtaaacgcttaatagtac

SEQ ID NO: 307892 - DNA, 75 bp, synthetic construct
  source 1..75: mol_type = other DNA
cccgagattcttggcacgctgtgtgttggatgggccaaagtgcgtgctcacgtagaggaggtgttctttggggat

SEQ ID NO: 307893 - DNA, 75 bp, synthetic construct
  source 1..75: mol_type = other DNA
ataatgtattaaaatacaaagaagttcatttcctttcatgcagggctctccggttaactcaggggtacattatat

SEQ ID NO: 307894 - DNA, 75 bp, synthetic construct
  source 1..75: mol_type = other DNA
gttcactggtatgtaaggcacggagagacaatttctaataaaaatgttataaaaatctttgagctccttcatcag

SEQ ID NO: 307895 - DNA, 75 bp, synthetic construct
  source 1..75: mol_type = other DNA
agcaacgttaagtatctgctggctgttcagagtggtgcgattgctctgcgctggcattctaactggcggcgtccg

SEQ ID NO: 307896 - DNA, 75 bp, synthetic construct
  source 1..75: mol_type = other DNA
tcgtctctctgactgtgggcgggaaagttattgaggggtgggattctgtgcgggtgacccgcggcattgagcgtt

SEQ ID NO: 307897 - DNA, 75 bp, synthetic construct
  source 1..75: mol_type = other DNA
acatcgaaaaacggttacatcaactcaaggcaatacaagcacaatggcagcgtcgagctaaaactcaacaactag

SEQ ID NO: 307898 - DNA, 75 bp, synthetic construct
  source 1..75: mol_type = other DNA
tcaaaagcgtaatgaggctttagattgccttgtctatggaatgatagcgattgtatatgcacaaagtaaattagg

SEQ ID NO: 307899 - DNA, 75 bp, synthetic construct
  source 1..75: mol_type = other DNA
ccagtgatatcggtgcaatagaaagtggagagtggctaacagcagagcagtttgccggaatggaagggatgccgg

SEQ ID NO: 307900 - DNA, 75 bp, synthetic construct
  source 1..75: mol_type = other DNA
cccgcctcacgggataagctgctgctgcaggctctggcgcaggttgcacgggacctgagggagggggacgtgaac

SEQ ID NO: 307901 - DNA, 75 bp, synthetic construct
  source 1..75: mol_type = other DNA
ccgaccagacagctgcattccctttgcacatggtgcatccggaacaagtaccgcaccggcgatgggtgcgattat

SEQ ID NO: 307902 - DNA, 75 bp, synthetic construct
  source 1..75: mol_type = other DNA
gaaagaaacgcagaatagatctctatgtaatgatatggaatactctggtattgtctgtaaagatactaatggaaa

SEQ ID NO: 307903 - DNA, 75 bp, synthetic construct
  source 1..75: mol_type = other DNA
gaagatgaggggcttatcaccctctggcactacgatgcgtcggaccgcatcacgcaccggacggtgaacggcgac

SEQ ID NO: 307904 - DNA, 75 bp, synthetic construct
  source 1..75: mol_type = other DNA
ggcggacgcaacgttatcattatgacctgaccggaaaactcacgcagagtgaagatgaggggcttatcaccctct

SEQ ID NO: 307905 - DNA, 75 bp, synthetic construct
  source 1..75: mol_type = other DNA
gttttcggagtaaaaaacttagcgttagtaccaaaacaatatttaaaaacccctctcttatgatagatggtatag

SEQ ID NO: 307906 - DNA, 75 bp, synthetic construct
  source 1..75: mol_type = other DNA
aaagtggtgcgctgggagggggatgctgaacgcaatccgtttggtctggcgctgaactgctatgacggtgtaccg

SEQ ID NO: 307907 - DNA, 75 bp, synthetic construct
  source 1..75: mol_type = other DNA
cgatctgcgcttttatcgtcattacattgacgatttgggtttcgtttcgtgtatcggtgctggtgttctttcagt

SEQ ID NO: 307908 - DNA, 75 bp, synthetic construct
  source 1..75: mol_type = other DNA
cagcttaatgaggagaacccgcatcccctgccccagccgtaccggctgccggggcagcagtatgataaggagtcg

SEQ ID NO: 307909 - DNA, 75 bp, synthetic construct
  source 1..75: mol_type = other DNA
taaagagcaaacagttgactatcagtataaagcgaataatgttgtttctttgaaattcatatcgattgatgatgc

SEQ ID NO: 307910 - DNA, 75 bp, synthetic construct
  source 1..75: mol_type = other DNA
tttttggattcacattcgattgaatatgaatggatcgaggatttttcaataaaaaatggtagagactacgtttcg

SEQ ID NO: 307911 - DNA, 75 bp, synthetic construct
  source 1..75: mol_type = other DNA
ctgattccgattgaaaatattatggatggtgaaacgattggtgcgcagatttatgaagtcgtccagcagcatttc

SEQ ID NO: 307912 - DNA, 75 bp, synthetic construct
  source 1..75: mol_type = other DNA
gcacctgaactggacaacgattataaagcacgcccggccaatggctgggatgtacgcgcagaaagctggctaccc

SEQ ID NO: 307913 - DNA, 75 bp, synthetic construct
  source 1..75: mol_type = other DNA
ctggccaaccgcctggatgtggacgaacgcactatccgcaaatggaaaaccggacagacccggatggtgttcacc

SEQ ID NO: 307914 - DNA, 75 bp, synthetic construct
  source 1..75: mol_type = other DNA
ctggccaaccggctagatgtggacgagcgcaccatccgtaagtggaaatccggcgagaccagaatgttgttcacc

SEQ ID NO: 307915 - DNA, 75 bp, synthetic construct
  source 1..75: mol_type = other DNA
aaatctgtcgcacagtcgatcctctggccggttcttattacatcgaatcactgaccgatcagatcgtgaaacaag

SEQ ID NO: 307916 - DNA, 75 bp, synthetic construct
  source 1..75: mol_type = other DNA
tgtgctcagccagtgatccgtgccggaacgtcacttcacagctgatattgagtgattcaggtgtcgcagcagcta

SEQ ID NO: 307917 - DNA, 75 bp, synthetic construct
  source 1..75: mol_type = other DNA
atcgctaatgcaattggtgaagaacctcaagaaatatggccaacccgatattttgataaggcaggaatgccgatc

SEQ ID NO: 307918 - DNA, 75 bp, synthetic construct
  source 1..75: mol_type = other DNA
caggacgctgatttcatttatcatttggctggagtcaatagaccaaagactaatgatgaatttaaatccggaaac

SEQ ID NO: 307919 - DNA, 75 bp, synthetic construct
  source 1..75: mol_type = other DNA
tggagggctcgtttaaataccaggctgccaccgtaaaccgtaccaccctgacagggatggatggtgtgcacggat

SEQ ID NO: 307920 - DNA, 75 bp, synthetic construct
  source 1..75: mol_type = other DNA
gtctggcttatggagaggggcataaattaccattcaataaagttcgttgggtggcgttggtagggggagacaaag

SEQ ID NO: 307921 - DNA, 75 bp, synthetic construct
  source 1..75: mol_type = other DNA
attgacgatttgggtttcgtttcgtgtatcggtgctggtgttctttcagttgggaagcccgttatatggcattgt

SEQ ID NO: 307922 - DNA, 75 bp, synthetic construct
  source 1..75: mol_type = other DNA
ccaaaaatgagaaatttattatcatccgaggaagtgcttgtttcaaatttgaaaatattgtcacgggtgaacgat

SEQ ID NO: 307923 - DNA, 75 bp, synthetic construct
  source 1..75: mol_type = other DNA
ttaacaatatagaattaactataaatgacccagcatcagaagttgaactgatgtatatcgatgatgtaatagcca

SEQ ID NO: 307924 - DNA, 75 bp, synthetic construct
  source 1..75: mol_type = other DNA
cttgagatcgacaacgtgatggtgcgtaacgagcaaattgcttcgctggaacgcattcgcgccacccgtgatgat

SEQ ID NO: 307925 - DNA, 75 bp, synthetic construct
  source 1..75: mol_type = other DNA
tatacagacctgctactacattctgagaaaaatacagaatggtacaaatacacatcctccgaggaacgctatgat

SEQ ID NO: 307926 - DNA, 75 bp, synthetic construct
  source 1..75: mol_type = other DNA
ctaatttattggcttttttcacgaaagcctcagatgcaattgatagtatcaagacccaaaaaattgacgttcaca

SEQ ID NO: 307927 - DNA, 75 bp, synthetic construct
  source 1..75: mol_type = other DNA
cttgattcactttctgtgaaagtggagttgaaagaaagcagcctgacattgacgcatgagcagcgttgccaggtg

SEQ ID NO: 307928 - DNA, 75 bp, synthetic construct
  source 1..75: mol_type = other DNA
aacaggactattgacaatactctgggacgcctggcatcccgtatggagcccgctgccccctggcaatttattacc

SEQ ID NO: 307929 - DNA, 75 bp, synthetic construct
  source 1..75: mol_type = other DNA
aacatgtttttagctggaaagccctgggatgggctctcatttatttctggtatttttccactttacttcagatta

SEQ ID NO: 307930 - DNA, 75 bp, synthetic construct
  source 1..75: mol_type = other DNA
gggcaaaaacagggcgcggtggcaaggtctacgatcttgtaaaagcaagtctcgatatagaggtttgctcttcac

SEQ ID NO: 307931 - DNA, 75 bp, synthetic construct
  source 1..75: mol_type = other DNA
ggatcctgaacatcgcaccctatggagcatcttgggtagcgatccttacagcaatgaagctgtgccaatggaggt

SEQ ID NO: 307932 - DNA, 75 bp, synthetic construct
  source 1..75: mol_type = other DNA
ccactggccggatcctattacattgagtcgctgaccgatcaaatcgtcaaacaagccagagctattatccaatag

SEQ ID NO: 307933 - DNA, 75 bp, synthetic construct
  source 1..75: mol_type = other DNA
cgaagccggtggcacggcgtttttcaaggtagttgtcgccttttgtaataaagttacgttatgcagcctcttttt

SEQ ID NO: 307934 - DNA, 75 bp, synthetic construct
  source 1..75: mol_type = other DNA
gacgcagcgatgacatgttgatcattcgcggtgtaaatgtcttcccgtcacaactggaagaagagattgtcaaat

SEQ ID NO: 307935 - DNA, 75 bp, synthetic construct
  source 1..75: mol_type = other DNA
ttaagtaaaatatgtgataaatcaatatcacaagctaaagattcattgaaaaaatctacgccacaacctttttct

SEQ ID NO: 307936 - DNA, 75 bp, synthetic construct
  source 1..75: mol_type = other DNA
tcacgctactttctgctctcactttcactctatctgccagcgccaaaataaaaggactatccgcagccggagatc

SEQ ID NO: 307937 - DNA, 75 bp, synthetic construct
  source 1..75: mol_type = other DNA
aagtatcaaacattgatgagcatggcgatggtgaaggaaaccccgtgaagctgtgtgaggccaggacgagtactt

SEQ ID NO: 307938 - DNA, 75 bp, synthetic construct
  source 1..75: mol_type = other DNA
gtttccaaaaagaaccaatggatatagctcaagagcgaagtactaaaaagattgtacttcaatcttgttcccagc

SEQ ID NO: 307939 - DNA, 75 bp, synthetic construct
  source 1..75: mol_type = other DNA
cggtgcgctggggcgatgatgaagcgcaattcatcattatgttaaccctgaacaaacacgctgcgggcgatcagc

SEQ ID NO: 307940 - DNA, 75 bp, synthetic construct
  source 1..75: mol_type = other DNA
ctgggatgtttggacaagaaagtatgcggatgggaagttggtcgagagaactgtcgattgggaagctgttgtaaa

SEQ ID NO: 307941 - DNA, 75 bp, synthetic construct
  source 1..75: mol_type = other DNA
ctatagatagcaccgcatatgacgccttaaataaaataaatagccaatctatttgcgaagataaagagttcgctg

SEQ ID NO: 307942 - DNA, 75 bp, synthetic construct
  source 1..75: mol_type = other DNA
atcgacgggaaatcaaaagcgctggttggctcggaagatttgccggtgctgaatgagaacacgttcaacagtcac

SEQ ID NO: 307943 - DNA, 75 bp, synthetic construct
  source 1..75: mol_type = other DNA
actctccaggattcccggggcggttcagtggaacaatattcgtagctatttgcaacgcccgctgcccgccataaa

SEQ ID NO: 307944 - DNA, 75 bp, synthetic construct
  source 1..75: mol_type = other DNA
ccgtggcggcaagagccgtgatacacagcttcagttaggttacagcaatagctttagccatggcatcagtatgaa

SEQ ID NO: 307945 - DNA, 75 bp, synthetic construct
  source 1..75: mol_type = other DNA
tatgggacttgccggtgttctccggggtaaatgggcccgtcgtccgtctggcaccatccatcacagcgataaagg

SEQ ID NO: 307946 - DNA, 75 bp, synthetic construct
  source 1..75: mol_type = other DNA
cgcggcatatgcacagatactttctatgggtgcacaacttgtcagtactgctaaaggtactaatatacaaggaca

SEQ ID NO: 307947 - DNA, 75 bp, synthetic construct
  source 1..75: mol_type = other DNA
gtattctaaaataagggagatttaccaggaagagtatgagcaatacattgcaaattcaatttccccagataaatt

SEQ ID NO: 307948 - DNA, 75 bp, synthetic construct
  source 1..75: mol_type = other DNA
gtaactggctggccgagaaaggttacgaccgggcaatgggcgcacgtccgatggcgcgtgtcatccaggacaacc

SEQ ID NO: 307949 - DNA, 75 bp, synthetic construct
  source 1..75: mol_type = other DNA
ttctgcatcgaattagtaatgacaaagatcaggagcaagttcataaaatggtacctgataatttgcgaggattac

SEQ ID NO: 307950 - DNA, 75 bp, synthetic construct
  source 1..75: mol_type = other DNA
tgacctgctgaacttcatttaccggaaggacggcaaggacattgtgcctgaccgtatccgttccgcgcttgggct

SEQ ID NO: 307951 - DNA, 75 bp, synthetic construct
  source 1..75: mol_type = other DNA
ccctatccaaacggggttagttggtaaagagaatggtgtttttacatttacagcaattccttttaaggacgcaga

SEQ ID NO: 307952 - DNA, 75 bp, synthetic construct
  source 1..75: mol_type = other DNA
gtactataggtgatcattttggaaaggtacgcgtgatgactatatgcttaattatatttcttattggcagcattg

SEQ ID NO: 307953 - DNA, 75 bp, synthetic construct
  source 1..75: mol_type = other DNA
ttgcggaacagatgtcagcacggtagacgtcaccttttcaggaatacccgacggaatgcagagcgaaatgctgtc

SEQ ID NO: 307954 - DNA, 75 bp, synthetic construct
  source 1..75: mol_type = other DNA
tcatccgccgatatgtgagttttacatacaagaaattccgtgataccgtttatttcaccacagttaaaatacaaa

SEQ ID NO: 307955 - DNA, 75 bp, synthetic construct
  source 1..75: mol_type = other DNA
atgtgcttttattgcagcaattctgagccatattgcgtttcacatgccaatgaaccagcagagcaaaacatatca

SEQ ID NO: 307956 - DNA, 75 bp, synthetic construct
  source 1..75: mol_type = other DNA
aggcatggagcaccatgttagtgaagagacgctcgacgcttttcgtttgtttacccagaaatacggtgccaaatg

SEQ ID NO: 307957 - DNA, 75 bp, synthetic construct
  source 1..75: mol_type = other DNA
atagtatacattttgacatagcatcttattttaatagtttatatcaccatgatattatccactggtttagctcaa

SEQ ID NO: 307958 - DNA, 75 bp, synthetic construct
  source 1..75: mol_type = other DNA
tttctgtctcagcaaaaagtcttttcgactaaacctaaaggtcatttgagacgaactgtaaaattagatccagta

SEQ ID NO: 307959 - DNA, 75 bp, synthetic construct
  source 1..75: mol_type = other DNA
tttgcccgctggcagatggacggctggcgaaacaacgcagaaaccgcgcggggaatgagccgctcgccggagata

SEQ ID NO: 307960 - DNA, 75 bp, synthetic construct
  source 1..75: mol_type = other DNA
ctgttgttttttccctgtcagttttgtttttcatcattggaaaccaattatcaaaaatcgaaaaaatatcaaacc

SEQ ID NO: 307961 - DNA, 75 bp, synthetic construct
  source 1..75: mol_type = other DNA
taatcagctgtaggtttaacaatttgaagttacttactttaactttcattaaagggcatcatccccgatgccatt

SEQ ID NO: 307962 - DNA, 75 bp, synthetic construct
  source 1..75: mol_type = other DNA
tttgattctatagatagcaccgcatatgacgccttaaataaaataaatagccaatctatttgcgaagataaagag

SEQ ID NO: 307963 - DNA, 75 bp, synthetic construct
  source 1..75: mol_type = other DNA
aacggcattctgtcgcagcaccagtacagccgtgaatgtgtgacacaggcgggcgacagccgctacgaatacgac

SEQ ID NO: 307964 - DNA, 75 bp, synthetic construct
  source 1..75: mol_type = other DNA
gtggcagacgccatccgcgatgaggtcatccgcttccttgagcgtctgccccagcttaccgggctgctgtttaat

SEQ ID NO: 307965 - DNA, 75 bp, synthetic construct
  source 1..75: mol_type = other DNA
cctcaaaggtaaaaaagcgggcacgcatacggttaccgcaacgttgggtaacaataatgccagcgatgcgcaacc

SEQ ID NO: 307966 - DNA, 75 bp, synthetic construct
  source 1..75: mol_type = other DNA
tataacgccatcggccacctgacaaacgtaacccacagcagcggtctgagtctgcgggtgatgtgtggcccgcag

SEQ ID NO: 307967 - DNA, 75 bp, synthetic construct
  source 1..75: mol_type = other DNA
agcgaatgggggatcaatgacccggcaagcggttactcccaaaatgcgaggagacgctacaaaagctgctaataa

SEQ ID NO: 307968 - DNA, 75 bp, synthetic construct
  source 1..75: mol_type = other DNA
gtgaccggcccggacggcgcaccacaggagatgtacagcgcgaacgggcggaaggtgtggacgaaacaccgcagc

SEQ ID NO: 307969 - DNA, 75 bp, synthetic construct
  source 1..75: mol_type = other DNA
gtacgcatacccgccttggccgccgtatggatagcgaaaaaccatggtcacttttcttagggagactgcagctgc

SEQ ID NO: 307970 - DNA, 75 bp, synthetic construct
  source 1..75: mol_type = other DNA
gcgagcgtgacctgacgggatggatgtcgctgtcgcggaaaccggaggtgacgtggtacgggtgggacggcgacc

SEQ ID NO: 307971 - DNA, 75 bp, synthetic construct
  source 1..75: mol_type = other DNA
gcacgattacgacaaaacatccccagaaatgagaaaataccttcagagcatcaacgagtgtatgctccttatgaa

SEQ ID NO: 307972 - DNA, 75 bp, synthetic construct
  source 1..75: mol_type = other DNA
ttttcaatatactcatctgagagatgcatatttttatagatgtaaactcatagaacatacagttcaattttattt

SEQ ID NO: 307973 - DNA, 75 bp, synthetic construct
  source 1..75: mol_type = other DNA
tttggttgtgtattatccaatatattatgttttgaaagcgacttagactggccccctgaatctccagacaaccag

SEQ ID NO: 307974 - DNA, 75 bp, synthetic construct
  source 1..75: mol_type = other DNA
gcagaattttaaaactagcaattcggcatattcacaactatgtgaaaaattatctttatttaaaagcgtgcccag

SEQ ID NO: 307975 - DNA, 75 bp, synthetic construct
  source 1..75: mol_type = other DNA
cccgcggtggcctgctttcccatacggatgccgaaggccgcacgacccattacacggaagaccgctggctgcggc

SEQ ID NO: 307976 - DNA, 75 bp, synthetic construct
  source 1..75: mol_type = other DNA
gacattgcccgggataaagtcagaactctccattttgtggatgagatagaagtctacctggccttccagaccatg

SEQ ID NO: 307977 - DNA, 75 bp, synthetic construct
  source 1..75: mol_type = other DNA
acagcatggttcccggaaaacaaacaatctgatgtatcacagatatggcatgcttttgaacatgaagagcatgcc

SEQ ID NO: 307978 - DNA, 75 bp, synthetic construct
  source 1..75: mol_type = other DNA
acgattgctgggaaggctgggccatactcctccggcagaagcagaaaaagcttattatgcttccatcggaaacaa

SEQ ID NO: 307979 - DNA, 75 bp, synthetic construct
  source 1..75: mol_type = other DNA
tatcctttaaatccactacaacaaattgaccctatgggattattgcagacttgggatgatgccagatctggagca

SEQ ID NO: 307980 - DNA, 75 bp, synthetic construct
  source 1..75: mol_type = other DNA
tggcgctcatcagcgaagaaggcaatacggtgtggagcgcggaatatgatgaatggggcaacctgctgaatgagg

SEQ ID NO: 307981 - DNA, 75 bp, synthetic construct
  source 1..75: mol_type = other DNA
cctggtactactttaataagaacatgaacgtttatactgcatacaaattcaacatgctggataaagatgaggtag

SEQ ID NO: 307982 - DNA, 75 bp, synthetic construct
  source 1..75: mol_type = other DNA
acccgcgtggagtggacctactactatgcgctgacacgcagctggttgtattaccacgtcacttaactttggaga

SEQ ID NO: 307983 - DNA, 75 bp, synthetic construct
  source 1..75: mol_type = other DNA
cttacaacatattccagcaggaagccgtgagtcgcctgaaagtggggcaacccttgtcatggaaatagccgccat

SEQ ID NO: 307984 - DNA, 75 bp, synthetic construct
  source 1..75: mol_type = other DNA
aactgagtgcggttatccgggccgacggtggcgcagaaaccttccgctatgacggtgaaggcaaaatcgccctcc

SEQ ID NO: 307985 - DNA, 75 bp, synthetic construct
  source 1..75: mol_type = other DNA
catcccaaggaaggggggagaaaaattagtcaactggactggaaatacagtaatgcgactattgttagaggtggc

SEQ ID NO: 307986 - DNA, 75 bp, synthetic construct
  source 1..75: mol_type = other DNA
ttgtgcagaatctggagatacaaaaaatttagaggaaaaaatagtctgcttcactatggttggtggtgatgttaa

SEQ ID NO: 307987 - DNA, 75 bp, synthetic construct
  source 1..75: mol_type = other DNA
tcggctgcaaaagaattagggttaactcaaccagccgtcagtaaaatcatggctttgttgaataaatcagatttc

SEQ ID NO: 307988 - DNA, 75 bp, synthetic construct
  source 1..75: mol_type = other DNA
ggcgagcgtttcccggaaggcaaatatccgaaccgttccactcatgacaccggtcttggacaatacagtaaggat

SEQ ID NO: 307989 - DNA, 75 bp, synthetic construct
  source 1..75: mol_type = other DNA
gttgctggatgatttcgccagtgtgcagaacattattaacaacagtgaagaatttgccgctgccgtgaagaagcg

SEQ ID NO: 307990 - DNA, 75 bp, synthetic construct
  source 1..75: mol_type = other DNA
cccgtaaaacagccctggcgttggcagtcgccttaagtttcgcctggcaagcgccggtatttgcccacggtggtg

SEQ ID NO: 307991 - DNA, 75 bp, synthetic construct
  source 1..75: mol_type = other DNA
agcagcgccaggcggttcgcgagaaaatgcagactaacccacagaaccagcagcgaagagaggcagcgcgtgagc

SEQ ID NO: 307992 - DNA, 75 bp, synthetic construct
  source 1..75: mol_type = other DNA
caacgtctaaacgacagtaaccgtactgccaggctgaataacgagcaacggtcagcgatacgggaacggttgtct

SEQ ID NO: 307993 - DNA, 75 bp, synthetic construct
  source 1..75: mol_type = other DNA
atgctcgacggcaaacatatcatcgaagcggtggtggatctgcaaaacaacaaactgctctcctggcaacccatt

SEQ ID NO: 307994 - DNA, 75 bp, synthetic construct
  source 1..75: mol_type = other DNA
ctgaaaggggaattaattcattaaaaagcagactgattattggcgacaagtatactaacacgaatatttttgaca

SEQ ID NO: 307995 - DNA, 75 bp, synthetic construct
  source 1..75: mol_type = other DNA
tttaagtatatttggcggtgttcaattagccgatatttatagttcttatgccgttggtataagtaaggatgttgg

SEQ ID NO: 307996 - DNA, 75 bp, synthetic construct
  source 1..75: mol_type = other DNA
aaaattctgtagacttctctctcaatagccatgatgctcttgagcgttatggtgtggatatcaatggcgaaaaaa

SEQ ID NO: 307997 - DNA, 75 bp, synthetic construct
  source 1..75: mol_type = other DNA
atacttcgaccaccccattaccaacgcctacactgagtcactgaacaatctgatccgcgtggtgaaccgtgttgg

SEQ ID NO: 307998 - DNA, 75 bp, synthetic construct
  source 1..75: mol_type = other DNA
gaagagaagcctctgatagttgtaaggtcagatacagccttactggaaatcactcgaaagaacaatcgctgactt

SEQ ID NO: 307999 - DNA, 75 bp, synthetic construct
  source 1..75: mol_type = other DNA
gttatttctctggcgaaaggttattcaaattatagttttacggccggtaagtatcgcaatgcagatatacataaa

SEQ ID NO: 308000 - DNA, 75 bp, synthetic construct
  source 1..75: mol_type = other DNA
gcttatgcggtcgggcacatctctggtgcgcattttaaccccgcggtgaccttgggtctgtgggccggtggacgc

SEQ ID NO: 308001 - DNA, 75 bp, synthetic construct
  source 1..75: mol_type = other DNA
acttgacgatgaagttcaggctaacaaacagttaaagagactgatagagaaagattatatgaactattatagata

SEQ ID NO: 308002 - DNA, 75 bp, synthetic construct
  source 1..75: mol_type = other DNA
gttttaataatcaatagggaagttgccaagaaaaaacaaagacaagacattaaaaagaatgagataaattcagtt

SEQ ID NO: 308003 - DNA, 75 bp, synthetic construct
  source 1..75: mol_type = other DNA
tagcataaatcttaagaatcatttaagcagaattgctattctacatctagaaaataatgatgaagaattaataac

SEQ ID NO: 308004 - DNA, 75 bp, synthetic construct
  source 1..75: mol_type = other DNA
taaaaatatgaaggagcttctgggcttaggtgatgaatacctgtccattcccttccgttatattaaagatgaaca

SEQ ID NO: 308005 - DNA, 75 bp, synthetic construct
  source 1..75: mol_type = other DNA
aaaatatgacgcaataatgataaaacatcaatcaagctatgataagaaagattgtaataatttaatacaagaaat

SEQ ID NO: 308006 - DNA, 75 bp, synthetic construct
  source 1..75: mol_type = other DNA
gttacgggtttagtgattatatcttaggaaaatcttataccaatcttcttgcaggaaactataaagaaacaatta

SEQ ID NO: 308007 - DNA, 75 bp, synthetic construct
  source 1..75: mol_type = other DNA
caaaaaattccattggttgcacgattgatacaaacagacactaacgttacaccagggaaaatagagtcagttata

SEQ ID NO: 308008 - DNA, 75 bp, synthetic construct
  source 1..75: mol_type = other DNA
tttttttggtattaatatttatcaccgtcataatttttgcctattcaggaaaaagtattgcggcaagatgtaagt

SEQ ID NO: 308009 - DNA, 75 bp, synthetic construct
  source 1..75: mol_type = other DNA
cgctacccgtgttggtcaccttgatgatgcgtacatgagtaacggaaaaccggtaggaatcaccctctatcaatt

SEQ ID NO: 308010 - DNA, 75 bp, synthetic construct
  source 1..75: mol_type = other DNA
gctaagtcgtttgacccaaactcaaaggaaaagattaaaatatatacagacacttctaaattaatttatgattta

SEQ ID NO: 308011 - DNA, 75 bp, synthetic construct
  source 1..75: mol_type = other DNA
acgttaagactgctttttatccaaatgactttcaggaatcacctagatggcgggacaacagtggttttggtgtcc

SEQ ID NO: 308012 - DNA, 75 bp, synthetic construct
  source 1..75: mol_type = other DNA
gatgcaggcaatggactttctggaagggaaggcctggcgcgggcagcgcagcgttgctgcacagccgctatcctg

SEQ ID NO: 308013 - DNA, 75 bp, synthetic construct
  source 1..75: mol_type = other DNA
acccgctgtggcagatggacaatgtgctgatcacgccgcatctggcctcggtcgccattcccaccagcgccgcgc

SEQ ID NO: 308014 - DNA, 75 bp, synthetic construct
  source 1..75: mol_type = other DNA
gatgctgatttctcaacgatcatgcgccaggtttaccgtttaatcctcgattatttctatataaagcatttgttg

SEQ ID NO: 308015 - DNA, 75 bp, synthetic construct
  source 1..75: mol_type = other DNA
atcgtattattgctgatgcgcatcgaaagatggcagtgtatttagacgtagcaaacagcccggataagcaggttc

SEQ ID NO: 308016 - DNA, 75 bp, synthetic construct
  source 1..75: mol_type = other DNA
aaaataaactctgcttggttcatcgcgagctgggaggcaacgcgctttcagttacctgttctacttatccacgtt

SEQ ID NO: 308017 - DNA, 75 bp, synthetic construct
  source 1..75: mol_type = other DNA
ttctctcgcaactaatcttttgacgcccccgtctgaatgctttaacaaaatcaaaggtaatttcagctttatcga

SEQ ID NO: 308018 - DNA, 75 bp, synthetic construct
  source 1..75: mol_type = other DNA
tactccattatatggagcagactcccgatacttactcttacactgcctgtcatatcggttgttcttcggtgttgg

SEQ ID NO: 308019 - DNA, 75 bp, synthetic construct
  source 1..75: mol_type = other DNA
ttgcattcgccaattatcaatcagcggatggataaagcgattgacatgatcaatgccggggacgatctctcctgc

SEQ ID NO: 308020 - DNA, 75 bp, synthetic construct
  source 1..75: mol_type = other DNA
aacgaactgatatattttccatcaaaggtgtaaccagaacagggccaacaaatcaggatattaatattaacgttg

SEQ ID NO: 308021 - DNA, 75 bp, synthetic construct
  source 1..75: mol_type = other DNA
gacgttaccttttcaggaacacccgacggaatgcagagcgaaatgctgtccattgaaagtggtacggatgcagcc

SEQ ID NO: 308022 - DNA, 75 bp, synthetic construct
  source 1..75: mol_type = other DNA
ttacatagcggtaatgtgccattaacgttttatgcgcaactgcgacctgtcggtggcggtgtgcagtcaggcaat

SEQ ID NO: 308023 - DNA, 75 bp, synthetic construct
  source 1..75: mol_type = other DNA
atgcccgccagcgggcactgttgcagactcaacaggacaccatccgccagatggctgaatacaaccgtctgctct

SEQ ID NO: 308024 - DNA, 75 bp, synthetic construct
  source 1..75: mol_type = other DNA
ggtgttgacctgtcgaatgatgcgattccacagcgcctgattgatgctcaatgtcgcctggccatcgaatcgcag

SEQ ID NO: 308025 - DNA, 75 bp, synthetic construct
  source 1..75: mol_type = other DNA
gctaaatcttgaactggtcagtgcaccgaaaggaactgctgccgatgtctttaattctcaaacacaaaatgtggg

SEQ ID NO: 308026 - DNA, 75 bp, synthetic construct
  source 1..75: mol_type = other DNA
ttgaaaaaataaaaaaatcagaatcaagtcttcacgatcatacacatgcaatatatgcgaccgcatgcgattatt

SEQ ID NO: 308027 - DNA, 75 bp, synthetic construct
  source 1..75: mol_type = other DNA
aataaaactgaccttgcaccatacgtgggcgcctccctcgaggtaatggagcgtgatactttacgtatgcgcgga

SEQ ID NO: 308028 - DNA, 75 bp, synthetic construct
  source 1..75: mol_type = other DNA
tggcctttgccatcgctgctgcaatcgctgttaacgtcgctttgttcggcggtttgttccttcttatcaatccat

SEQ ID NO: 308029 - DNA, 75 bp, synthetic construct
  source 1..75: mol_type = other DNA
tggcttttgccatcgctgctgcaatcgctgttaacgtagcgttgttcggcggtttgttccttcttgtcaatccat

SEQ ID NO: 308030 - DNA, 75 bp, synthetic construct
  source 1..75: mol_type = other DNA
ctgccctgctcggcagggtggaaaacggccgactgctggacaccgccggcagagcgctttccgtcacacttccgt

SEQ ID NO: 308031 - DNA, 75 bp, synthetic construct
  source 1..75: mol_type = other DNA
cagtacacatcaccaggttgaagatgccgccaatactttacgcacgcatcaaaaggcctttattgcccgtgggct

SEQ ID NO: 308032 - DNA, 75 bp, synthetic construct
  source 1..75: mol_type = other DNA
taaattcgacaccctgaccaactccatcaccgaaggtctcccgcgtgaaatcgagttgcgccagaaacaatacga

SEQ ID NO: 308033 - DNA, 75 bp, synthetic construct
  source 1..75: mol_type = other DNA
ccaaaggtgtgtcattacctgaggatcgtgagtctgttttttggctgaatattaaaaatattccaccctctgcaa

SEQ ID NO: 308034 - DNA, 75 bp, synthetic construct
  source 1..75: mol_type = other DNA
agtacacagtaaagcgctgtgccctgaataataacgaatggcggttaacgtcgctcaccaatacgcgcgaacagg

SEQ ID NO: 308035 - DNA, 75 bp, synthetic construct
  source 1..75: mol_type = other DNA
atgccgcctggctatcgagtcgcaggagattgacctcacgccgtcggtctccggtggcggcgcggtcatagctga

SEQ ID NO: 308036 - DNA, 75 bp, synthetic construct
  source 1..75: mol_type = other DNA
tgttatgacaaccgattttttactgaccttgagaactcctgaaggcggacttcgatacaaagctatagggaaggt

SEQ ID NO: 308037 - DNA, 75 bp, synthetic construct
  source 1..75: mol_type = other DNA
taattctgcgggaagccaaatgatttggcgatttattaatgattacggtgcagtaagtgacccgataaaaatgac

SEQ ID NO: 308038 - DNA, 75 bp, synthetic construct
  source 1..75: mol_type = other DNA
tgtcatagtggatggccatgatgtgcctctcaatatgatccgtccttttgaaacgctcactttacccctgccagc

SEQ ID NO: 308039 - DNA, 75 bp, synthetic construct
  source 1..75: mol_type = other DNA
actttcgggaaaataaagattcgtcaaccaataattttcggaaaatcccggaagcgtcaaccagctctccggtaa

SEQ ID NO: 308040 - DNA, 75 bp, synthetic construct
  source 1..75: mol_type = other DNA
agccatatcgtatctgtattgcgtatactgatgtaacgttgatcctgtgcccggagtgggcagccacgttaaccc

SEQ ID NO: 308041 - DNA, 75 bp, synthetic construct
  source 1..75: mol_type = other DNA
acgcgctggggctgattacgtccttcagttatgccaatgctgaggatgagcaaaaaacgcactacagcgataccc

SEQ ID NO: 308042 - DNA, 75 bp, synthetic construct
  source 1..75: mol_type = other DNA
atagtgtcttgcataagaaatgcgaagaactgcaaatgacagttgaactacagcgagaatttatacaatccagaa

SEQ ID NO: 308043 - DNA, 75 bp, synthetic construct
  source 1..75: mol_type = other DNA
atcagagaattatctgcctggataaaattcatggatagaaaagctaggcaagatggcttcggaggcattcatttt

SEQ ID NO: 308044 - DNA, 75 bp, synthetic construct
  source 1..75: mol_type = other DNA
gccgcccctccagcgccgatagtgccggaagaaatgtattggcaggatgcagcagcaaagcggctgcatacgcta

SEQ ID NO: 308045 - DNA, 75 bp, synthetic construct
  source 1..75: mol_type = other DNA
ttgccatggcgttggccaaagctggcgcaaatatctttattcctagtttcgtcaaagataacggcgaaacaaagg

SEQ ID NO: 308046 - DNA, 75 bp, synthetic construct
  source 1..75: mol_type = other DNA
taaaccggcccagaatctcttttagcgcaacgatattccgtgttccccgcgccagcggggataaaccggctccgg

SEQ ID NO: 308047 - DNA, 75 bp, synthetic construct
  source 1..75: mol_type = other DNA
cagcggggataaaccggaaaatgctctttgaaaatgcaatgccccgcggtgttccccgcgtcagcggggataaac

SEQ ID NO: 308048 - DNA, 75 bp, synthetic construct
  source 1..75: mol_type = other DNA
tcttagtacatggggcaaattatttgttcccgtttatagttcttccatatcaaactcgaatattaagcatcgaga

SEQ ID NO: 308049 - DNA, 75 bp, synthetic construct
  source 1..75: mol_type = other DNA
caggattcacgcgataagtggcaggcagtttatcaggatcagctggggctggttgatcatggactgacgacgtcg

SEQ ID NO: 308050 - DNA, 75 bp, synthetic construct
  source 1..75: mol_type = other DNA
tcagccaattgaattacagcagtcgggccgtattttttgctcaactgaataatatcactgacgcaatcctcttga

SEQ ID NO: 308051 - DNA, 75 bp, synthetic construct
  source 1..75: mol_type = other DNA
aaagtgctggcggcaaaaccggccatcatcgccctgcaaattgtacgcggcaatgaaagcatctatctgctgatg

SEQ ID NO: 308052 - DNA, 75 bp, synthetic construct
  source 1..75: mol_type = other DNA
tccatcacacagaccgtatgttgttagcacagtatcgcgcgtcgttgaaaagcgccattcagcgcaaggctaata

SEQ ID NO: 308053 - DNA, 75 bp, synthetic construct
  source 1..75: mol_type = other DNA
ggtacttaccgctgaattggagcgaagcaaagcggaacttgaaaagaccaccgccgacgtcgccaaattcaaaca

SEQ ID NO: 308054 - DNA, 75 bp, synthetic construct
  source 1..75: mol_type = other DNA
gcctgaatatcgattttctgctcggctatttgaaagagttgctgccgcggcgtcctgacctaaaaatcattatca

SEQ ID NO: 308055 - DNA, 75 bp, synthetic construct
  source 1..75: mol_type = other DNA
taatctcaccgccgaaaaattgaaaacaccggaaatatcattgagtgtgcagacttacaagagacgaccaacgcc

SEQ ID NO: 308056 - DNA, 75 bp, synthetic construct
  source 1..75: mol_type = other DNA
gattgtgccggtgatatcgttcgcattaagtcgctggacttcgacagccagcgcgcagacggagatcatctttac

SEQ ID NO: 308057 - DNA, 75 bp, synthetic construct
  source 1..75: mol_type = other DNA
cgacggatatccaccacctgacgttgccgtggacaccagccagtatcgcacaacgtaacggtcgcggtgcacgag

SEQ ID NO: 308058 - DNA, 75 bp, synthetic construct
  source 1..75: mol_type = other DNA
tacggattcttacgtggtgcattgcgctggcaatgtcagggagttatagcagtgtctgggctgaagacgacattc

SEQ ID NO: 308059 - DNA, 75 bp, synthetic construct
  source 1..75: mol_type = other DNA
agtgcctgggctgatgatgatattcagtttgattcccgttttctggaattaaaaggcgacacgaaaatcgatctg

SEQ ID NO: 308060 - DNA, 75 bp, synthetic construct
  source 1..75: mol_type = other DNA
cgctattgccagactgccctgagatattccgcagtagcaaagaacaagttctcgctgacctgtctgagcagcgct

SEQ ID NO: 308061 - DNA, 75 bp, synthetic construct
  source 1..75: mol_type = other DNA
cccagccgcgtcgcctggcggcaagaacggtggcgaaccgtattgcggaagagctgaaaacggagccgggcggtt

SEQ ID NO: 308062 - DNA, 75 bp, synthetic construct
  source 1..75: mol_type = other DNA
gccattttccaggagatggcgaaagagattgaccaggcggcagggaaagtcctgctgcgtgaagcggcacgaccg

SEQ ID NO: 308063 - DNA, 75 bp, synthetic construct
  source 1..75: mol_type = other DNA
atggggccagtctatgcaattgtaataccgtcacacgcgacgctattacaattgccatctggtcagggcttcgcc

SEQ ID NO: 308064 - DNA, 75 bp, synthetic construct
  source 1..75: mol_type = other DNA
tcagtaacgacgtcatcaaggtaaatgggatgagtggcagaacaagctctgcaaaagtgcattttttcgccatta

SEQ ID NO: 308065 - DNA, 75 bp, synthetic construct
  source 1..75: mol_type = other DNA
ttaccaatactcatattgagtttaatcattaccacgaaaaaatcaaagccataaatatgccacacgaaatgaaat

SEQ ID NO: 308066 - DNA, 75 bp, synthetic construct
  source 1..75: mol_type = other DNA
ggacagaagacttttataccaaaatggaacccctaataaaacttgatatatacaatcatatttatagaaaaggca

SEQ ID NO: 308067 - DNA, 75 bp, synthetic construct
  source 1..75: mol_type = other DNA
tttcagattactcgacctctcttttaaaattatttcaggaaactaaagtcaaccgattgtgtgattattataagt

SEQ ID NO: 308068 - DNA, 75 bp, synthetic construct
  source 1..75: mol_type = other DNA
ttaccgtgcaaggccattctatggctgtatatgatgcttacggtgctcagcagttctattttcctaatgtactga

SEQ ID NO: 308069 - DNA, 75 bp, synthetic construct
  source 1..75: mol_type = other DNA
ggttagtgaggagttatatgaaaaatataaatcctcatgcattatatttcatgcaaaaccgggggcggggttgga

SEQ ID NO: 308070 - DNA, 75 bp, synthetic construct
  source 1..75: mol_type = other DNA
gaaacactcattcctttgaaaccacttttcaaaactggaaagaaaatggtgaagatgttgcgttattaatgcccg

SEQ ID NO: 308071 - DNA, 75 bp, synthetic construct
  source 1..75: mol_type = other DNA
acaaaaatgtctgttgtggggcattttggggcattttggggcatggttgggacactttgttacatatgaactttg

SEQ ID NO: 308072 - DNA, 75 bp, synthetic construct
  source 1..75: mol_type = other DNA
attcctcacgatgctcgcgtattgattacctacggtggcggcagcgtgaaaaaaccggcgttctcgatcaagttc

SEQ ID NO: 308073 - DNA, 75 bp, synthetic construct
  source 1..75: mol_type = other DNA
cacgctggaaagtgtctggattcagggaaaactacgtatgtgggggcgctggtcgtatattggtgtgaagtggca

SEQ ID NO: 308074 - DNA, 75 bp, synthetic construct
  source 1..75: mol_type = other DNA
gaaaatcctacttcccagagaacaaaaagaaatctttctgtattaacgcaaccattcaaaacatgccaaatttta

SEQ ID NO: 308075 - DNA, 75 bp, synthetic construct
  source 1..75: mol_type = other DNA
ttcctcccaatttcaaggaccagatcatagaggatcttaaatctagtaaggctgttgtaatttcagggccaagaa

SEQ ID NO: 308076 - DNA, 75 bp, synthetic construct
  source 1..75: mol_type = other DNA
aaaggttacttagtggggcgttttggtggaattcctaaaataaagaatatattatcaaacgttgaagattttcag

SEQ ID NO: 308077 - DNA, 75 bp, synthetic construct
  source 1..75: mol_type = other DNA
aagaagtatcctgagttgcaaatggctcgatggagagataatggtgatgttcgtggatttggtgctgttgaaggt

SEQ ID NO: 308078 - DNA, 75 bp, synthetic construct
  source 1..75: mol_type = other DNA
tcggtggtggctctcatgaggcgattatccgcttccctgctgacagtggtcagaaaccagtgtatgtgtcggtaa

SEQ ID NO: 308079 - DNA, 75 bp, synthetic construct
  source 1..75: mol_type = other DNA
ttgtgaaggacgaacgacagcatattgccgttgtttcaggtgtaccaatgagtgtacctgttgtggatgcaaaac

SEQ ID NO: 308080 - DNA, 75 bp, synthetic construct
  source 1..75: mol_type = other DNA
agccctgaaaggcccgtttaaattcagtgcatggggtattgcgctttacggcattctgccagctgaaatagcaaa

SEQ ID NO: 308081 - DNA, 75 bp, synthetic construct
  source 1..75: mol_type = other DNA
tggccttaatggcaaagcaagttctgcaaaagtacatttttacgccattaatgattttggtggcgccattgaagg

SEQ ID NO: 308082 - DNA, 75 bp, synthetic construct
  source 1..75: mol_type = other DNA
tgtttgagttccccgcgccagcggggataaaccgtttttgttctcttcaaaacgccgaacaaccaagagttcccc

SEQ ID NO: 308083 - DNA, 75 bp, synthetic construct
  source 1..75: mol_type = other DNA
tatctggtgaggctttatctgcggcaatagcggatatctttgcagccctgaaaggtccgtttaaattcagcgcat

SEQ ID NO: 308084 - DNA, 75 bp, synthetic construct
  source 1..75: mol_type = other DNA
ccattaacgtttggttatgaagtcaatgatatgcatggtcataacattggtgttgtcggccagggcagtcagata

SEQ ID NO: 308085 - DNA, 75 bp, synthetic construct
  source 1..75: mol_type = other DNA
ggcgaatggaaatcctggagattactcacagtctaatagtgtatacgtaggctcttttgccggagacttctctat

SEQ ID NO: 308086 - DNA, 75 bp, synthetic construct
  source 1..75: mol_type = other DNA
cgatgtatatgttccagagggaaggtggcgattatcaactcctatgatcttgggtcagaagggaaaatattatgg

SEQ ID NO: 308087 - DNA, 75 bp, synthetic construct
  source 1..75: mol_type = other DNA
agaccaagtaggtggtagggaacgctttgaattacatcatgataaaccaatcagtcaggatggtggtgtctatga

SEQ ID NO: 308088 - DNA, 75 bp, synthetic construct
  source 1..75: mol_type = other DNA
gcgggcatggactcagggcaatggcctgtagcgccctggtggagtcggacctgtggtcacgcgatacggtggagc

SEQ ID NO: 308089 - DNA, 75 bp, synthetic construct
  source 1..75: mol_type = other DNA
atcaggggtttgcctcaaataatacgggattatcaggaaccgttggaagccgggatcagtttaactatggggtca

SEQ ID NO: 308090 - DNA, 75 bp, synthetic construct
  source 1..75: mol_type = other DNA
acgtcagccggacaggccgcttcgtcggctcagtcagcgtcttccagcgcaggaacggcatcaacaaaggccact

SEQ ID NO: 308091 - DNA, 75 bp, synthetic construct
  source 1..75: mol_type = other DNA
ggcgacccgaaaaacgtcggtttcgtggtgccaaccgagaaaaactctgcggtctacggcatgttgacctcgctg

SEQ ID NO: 308092 - DNA, 75 bp, synthetic construct
  source 1..75: mol_type = other DNA
gcgcattgttcattgaaattcctgaacatattgatttaaccgggctgcctgcatttgagcgtatatccatcctgc

SEQ ID NO: 308093 - DNA, 75 bp, synthetic construct
  source 1..75: mol_type = other DNA
gtctgaaaaatgaaatgatgtggctaacgagtcagtcgccagaggatgcggttaattgtgcaatttttgcggctc

SEQ ID NO: 308094 - DNA, 75 bp, synthetic construct
  source 1..75: mol_type = other DNA
gtcagtatgcatcgccgcgatggaacatttaaaaagtaaggcaacggcccctatacaaaacggaccgttgccagc

SEQ ID NO: 308095 - DNA, 75 bp, synthetic construct
  source 1..75: mol_type = other DNA
agttggacatttttttcgctgacgatctgtttaaatatgagtcagtatgcatcgccgcgatggaacatttaaaaa

SEQ ID NO: 308096 - DNA, 75 bp, synthetic construct
  source 1..75: mol_type = other DNA
gaaattccaccgctgttaccggatagcagagaaggggacgttaaggaactggatagcttaatgtacgagcctgtt

SEQ ID NO: 308097 - DNA, 75 bp, synthetic construct
  source 1..75: mol_type = other DNA
tgacgacgagttagatgtttcaggctgggagtggcgcaaggcgctgggattattgaaaggtgcgaatccgacgct

SEQ ID NO: 308098 - DNA, 75 bp, synthetic construct
  source 1..75: mol_type = other DNA
gagaaattccaccgattttaccggacagcagagacggagatgttcgggagctagataatttgctgtatcaaacag

SEQ ID NO: 308099 - DNA, 75 bp, synthetic construct
  source 1..75: mol_type = other DNA
atgaaaaaccaggcaaataaaagcaatgtaaaacgtatagcctggatcgtaaaatggatggatagtaaaggagac

SEQ ID NO: 308100 - DNA, 75 bp, synthetic construct
  source 1..75: mol_type = other DNA
ctggacaagtaaattccttaacgcataaactaagttgtagtttcgtttccgctcaaagaaatttttactctagag

SEQ ID NO: 308101 - DNA, 75 bp, synthetic construct
  source 1..75: mol_type = other DNA
tgtgaaactattaagaagttttcccagaaacatgctaacattcatttatacgaagagaataatgttggagttatt

SEQ ID NO: 308102 - DNA, 75 bp, synthetic construct
  source 1..75: mol_type = other DNA
aaattttgtggggatttttattttacacaaacagcagatcatcaggtgcattatggggtgataaatgatttactc

SEQ ID NO: 308103 - DNA, 75 bp, synthetic construct
  source 1..75: mol_type = other DNA
actaacagtgcttaccagttcggttatgatatggatgctattgttggcggagctcataatggggccgccgatgca

SEQ ID NO: 308104 - DNA, 75 bp, synthetic construct
  source 1..75: mol_type = other DNA
ttcgcaaagcaaagagaatcatttacccgggattattttactacgagtattactcaacacttagataaattaaat

SEQ ID NO: 308105 - DNA, 75 bp, synthetic construct
  source 1..75: mol_type = other DNA
aaaaacaaagaggttgatgttttagaatgccactatctttatgatgatgctctggaatatgcaaatacgctggtc

SEQ ID NO: 308106 - DNA, 75 bp, synthetic construct
  source 1..75: mol_type = other DNA
gatcaaatccaccggcaccaccgccagcaatatcgaccagacggtcaacaccagctggggcggtttacaggccac

SEQ ID NO: 308107 - DNA, 75 bp, synthetic construct
  source 1..75: mol_type = other DNA
tgacgtggtacggctcgattgtggcatttgataaagagggcgacggctatctcgacttctggattggtgacgctg

SEQ ID NO: 308108 - DNA, 75 bp, synthetic construct
  source 1..75: mol_type = other DNA
ggcgcggtggcgggcgaccgcctggtggtgaccatcgccgggcagcagtatgtcaccagcaccgatgccagcggc

SEQ ID NO: 308109 - DNA, 75 bp, synthetic construct
  source 1..75: mol_type = other DNA
tccggcaacgatgcattactggttctgagccatcatcgcgctggtacagatgcaaacatcatcgttgctgaccgt

SEQ ID NO: 308110 - DNA, 75 bp, synthetic construct
  source 1..75: mol_type = other DNA
tgttggcgcagtttgaacagcatattgaggatgactcgccgctggctgaggtgttgccgagcgtttataacaaat

SEQ ID NO: 308111 - DNA, 75 bp, synthetic construct
  source 1..75: mol_type = other DNA
ttcaacactgttttcatccctaatgatttaagccgtatagaatatcgggttgataaatcactaggtaaaagagcg

SEQ ID NO: 308112 - DNA, 75 bp, synthetic construct
  source 1..75: mol_type = other DNA
gcgggtgaagagagatgatggcatctttgaaaagccgcagaactgtttttcgaaagaggacagtgatttgtgctc

SEQ ID NO: 308113 - DNA, 75 bp, synthetic construct
  source 1..75: mol_type = other DNA
aaaatcacatcgagtaaacaaattgatcaactcgacggttatcggctcacgtcgattttcagcaaaaaactccag

SEQ ID NO: 308114 - DNA, 75 bp, synthetic construct
  source 1..75: mol_type = other DNA
aagataatcgggttgggaagcacgagccgcacgattttagtttgacccgtcgcgatctgattaaagtcagcgccg

SEQ ID NO: 308115 - DNA, 75 bp, synthetic construct
  source 1..75: mol_type = other DNA
tgcttcgcccgacagcgattacgatgtgcggtttttgtatgtccatccgctggaatggtatctgcgggtagagtc

SEQ ID NO: 308116 - DNA, 75 bp, synthetic construct
  source 1..75: mol_type = other DNA
gggggcttctgtttcttcatgcctgtcatttgtctgttactgatgttgttgttcctgctactgctactgctactg

SEQ ID NO: 308117 - DNA, 75 bp, synthetic construct
  source 1..75: mol_type = other DNA
aactccattggcttactgttccgggcaaagctcgcatgggcaatcagtatcattttgttgttgatagcgctaatt

SEQ ID NO: 308118 - DNA, 75 bp, synthetic construct
  source 1..75: mol_type = other DNA
agaggggaaaataaggcgtacgcctcttcgtcggggggccagtactttatggatggcgctcagaaatacatcaac

SEQ ID NO: 308119 - DNA, 75 bp, synthetic construct
  source 1..75: mol_type = other DNA
tggcgggcgtggtgctgtttatcgtcatcgccatcctggagccgatgctgcaactgaacaatatggttggaatgt

SEQ ID NO: 308120 - DNA, 75 bp, synthetic construct
  source 1..75: mol_type = other DNA
gaggttatgtctatgttctacctaaaagatacaagattttgtatcggctgactgaggagcatatttttattgagc

SEQ ID NO: 308121 - DNA, 75 bp, synthetic construct
  source 1..75: mol_type = other DNA
gctccaggattcgttattaccccgatgacagaaaatctgccagagaaagtcattaaccatatgatagctaaaacc

SEQ ID NO: 308122 - DNA, 75 bp, synthetic construct
  source 1..75: mol_type = other DNA
aaccaagttgttcagttaggtactgttgcggtaaatcaggaaggtacgcctgttaattttgccatgaagcctgct

SEQ ID NO: 308123 - DNA, 75 bp, synthetic construct
  source 1..75: mol_type = other DNA
atactttatggaatcaccgttgccgggttgcccatccggtggatgaccttcaccccggtcgatcaacccagggcc

SEQ ID NO: 308124 - DNA, 75 bp, synthetic construct
  source 1..75: mol_type = other DNA
ccaaccagacatcctgcggatcaaccgccacctcgcgacggccagctctgagctggcaggggaaatggcaaaaat

SEQ ID NO: 308125 - DNA, 75 bp, synthetic construct
  source 1..75: mol_type = other DNA
tgaaagatgttagggaacgtgccgcaaaatcctacagtgaagctgaattggtgaaagacaagaaaaccggaaaat

SEQ ID NO: 308126 - DNA, 75 bp, synthetic construct
  source 1..75: mol_type = other DNA
tacttgggcttccgcaaaacttgataacgaaggcttcggtgcaactagcggtacagctacagatgcaaaagtact

SEQ ID NO: 308127 - DNA, 75 bp, synthetic construct
  source 1..75: mol_type = other DNA
ccgaaccaagttgttcaactgggtactgtttcggctggccaggagggtgattttgttgatttctctatgaaacct

SEQ ID NO: 308128 - DNA, 75 bp, synthetic construct
  source 1..75: mol_type = other DNA
atgatgctgtacatgatcgcctccggcgaacagagcggcgaactggaaaccatgcttgaacaggccgcagttaac

SEQ ID NO: 308129 - DNA, 75 bp, synthetic construct
  source 1..75: mol_type = other DNA
gccatgaaggtggtcataataaatggcgtgatggcagcggccagctgaaaacccaaagcaatcgctatgttctgc

SEQ ID NO: 308130 - DNA, 75 bp, synthetic construct
  source 1..75: mol_type = other DNA
accaacaacggtacgctgatgaccggaatgtcaggacagcaagctggcaatgtgttagtggtgaaggggaactac

SEQ ID NO: 308131 - DNA, 75 bp, synthetic construct
  source 1..75: mol_type = other DNA
gtgatgaacccccaggatgcgcatagcgctgatatgactttccgtgtcaaaccggaatctctaattttgacgatt

SEQ ID NO: 308132 - DNA, 75 bp, synthetic construct
  source 1..75: mol_type = other DNA
ccgctcggcagtggaggtgctttgtctccgggaattattctgacggcggtgattacaggtctggtgaatatcagc

SEQ ID NO: 308133 - DNA, 75 bp, synthetic construct
  source 1..75: mol_type = other DNA
agttcgctattggacgcaaaattttgatattgatggttggcgtctggatgttgcgaatgaagtggatcatcattt

SEQ ID NO: 308134 - DNA, 75 bp, synthetic construct
  source 1..75: mol_type = other DNA
gtgccaattcacgttacgccgattggttctggattcataaatttcctgtttatcccgatactccaaaaagtgaat

SEQ ID NO: 308135 - DNA, 75 bp, synthetic construct
  source 1..75: mol_type = other DNA
aggccatcagccggcagctgattaagcaccgcgcggcgcagggcgaggccgttcccgacgccgcgacagccgcat

SEQ ID NO: 308136 - DNA, 75 bp, synthetic construct
  source 1..75: mol_type = other DNA
aaattggctacgggctgggagacaccgcctgcggcttcgtctggcaggccacgatgttcctgctggcctatttct

SEQ ID NO: 308137 - DNA, 75 bp, synthetic construct
  source 1..75: mol_type = other DNA
atgcgccgtcgcatgaagttctggttgaagagggggggattactgtctgcgttgttacctgaatgtagcaacttt

SEQ ID NO: 308138 - DNA, 75 bp, synthetic construct
  source 1..75: mol_type = other DNA
ccatgcttctaccagccctttctatccgctgtttgctgcactggatgttaacgccaaaattcatgaaggggagag

SEQ ID NO: 308139 - DNA, 75 bp, synthetic construct
  source 1..75: mol_type = other DNA
gtggctgcggaagggctttggcttttcaggcggctggaccgtcaatgaccagaatgatttgcttgcgcgcctctt

SEQ ID NO: 308140 - DNA, 75 bp, synthetic construct
  source 1..75: mol_type = other DNA
tccgactctggcctgtgaaaaactggctgaggttcacggcgttcatatttccaaagaaacggttcgtaagttgat

SEQ ID NO: 308141 - DNA, 75 bp, synthetic construct
  source 1..75: mol_type = other DNA
gtgacgctgctgcaccagtatcagcgggaagtgaagcgggtgacccatcgcgggcaggtcatcgagtatatcgag

SEQ ID NO: 308142 - DNA, 75 bp, synthetic construct
  source 1..75: mol_type = other DNA
ataacgcccagcgactgctgcgaccgctgaaggtggtgaacccgtatgcgcaccagttaacattcctcagcgaca

SEQ ID NO: 308143 - DNA, 75 bp, synthetic construct
  source 1..75: mol_type = other DNA
cctggtgttgacggtaaatgagagccgggagcagacgcaggccatacacgcgatgcagcgccacggccagacgct

SEQ ID NO: 308144 - DNA, 75 bp, synthetic construct
  source 1..75: mol_type = other DNA
gtgacggatgaggtcaacgaatatgaggaagatatcgagagagtggtcggcatttatgcccctcacctcggggcg

SEQ ID NO: 308145 - DNA, 75 bp, synthetic construct
  source 1..75: mol_type = other DNA
ctgaaatacggcgtatggaactgatgaacactatcgccgggattgaacgctacgcggccagcgttggtgacgtgg

SEQ ID NO: 308146 - DNA, 75 bp, synthetic construct
  source 1..75: mol_type = other DNA
gcagtatgatgaggagtccggcctgtattataaccgccaccgctattatgacccgctgcgggggaggtatatcac

SEQ ID NO: 308147 - DNA, 75 bp, synthetic construct
  source 1..75: mol_type = other DNA
acccctctgctgctgctgtcgctgcgcgtcgtggccttgtcgctgaccctgtaacggggtttgagtactttgtgc

SEQ ID NO: 308148 - DNA, 75 bp, synthetic construct
  source 1..75: mol_type = other DNA
aggcttatccgatgctggaagccatcaaggctgaactggagtttaacccccgtttaaaaaacgatttcccggagg

SEQ ID NO: 308149 - DNA, 75 bp, synthetic construct
  source 1..75: mol_type = other DNA
tgaccaacgtacttgccacctttatcgcaatcggccttgttgaccgctggggacgtaaaccaacgctaacgctgg

SEQ ID NO: 308150 - DNA, 75 bp, synthetic construct
  source 1..75: mol_type = other DNA
cccggtggctcggctccggcaacggccccggcgtggtgttcagccatgaattcccgccatcaccagccagcgttg

SEQ ID NO: 308151 - DNA, 75 bp, synthetic construct
  source 1..75: mol_type = other DNA
ttttcgtgtgaatgatgatgaagataatttattcttagaatggattgtaaaagatggttatttagaggaaataat

SEQ ID NO: 308152 - DNA, 75 bp, synthetic construct
  source 1..75: mol_type = other DNA
ggaacggatgaagccatctactgcgatccgccatacctgcctgccagcgaaaccgccaatttcactcaataccac

SEQ ID NO: 308153 - DNA, 75 bp, synthetic construct
  source 1..75: mol_type = other DNA
gatcagggagaacgatataaagttaaaaagatagttgtgaaacccggcgaaggactatccttacgaatgcaccat

SEQ ID NO: 308154 - DNA, 75 bp, synthetic construct
  source 1..75: mol_type = other DNA
gatgggcaatgattttacagcgcgctgctggcactcactacattgcggatgctgtcgcacagtctgctggtgggg

SEQ ID NO: 308155 - DNA, 75 bp, synthetic construct
  source 1..75: mol_type = other DNA
tcctcaatcatttgaaatgtctttaccaaatggacaaaaaatatgggtgcatggtaatgctacagaacatatggc

SEQ ID NO: 308156 - DNA, 75 bp, synthetic construct
  source 1..75: mol_type = other DNA
catatattccgatcaaaaaatgaaaacaataaaatcggctttttatggaatcattgatggaattgcaggtcgatt

SEQ ID NO: 308157 - DNA, 75 bp, synthetic construct
  source 1..75: mol_type = other DNA
tccttcttcatggtgcgctggcgaatgtggatttccatccctttagtgaacatcgcctgctctgccgcttcactc

SEQ ID NO: 308158 - DNA, 75 bp, synthetic construct
  source 1..75: mol_type = other DNA
tctcactgagcaaatatccccctttcatcgctgtatgcgcggcaccagtcagaaaaatccccgatgtgtcgctct

SEQ ID NO: 308159 - DNA, 75 bp, synthetic construct
  source 1..75: mol_type = other DNA
cgtcgcgcagatcatctccggacaagttagcggtgcttctcctggcgatacggtaacggtgaaattgggcactca

SEQ ID NO: 308160 - DNA, 75 bp, synthetic construct
  source 1..75: mol_type = other DNA
tgctgcgagctataaaaaaaaatcataataatgacaatcgtaaatattatatttttctattcctttcaatcgact

SEQ ID NO: 308161 - DNA, 75 bp, synthetic construct
  source 1..75: mol_type = other DNA
cgctttcttttgctgaggagaaagaagatccggataagcttgtttcatgtcttggccgtttagcctgtagaactg

SEQ ID NO: 308162 - DNA, 75 bp, synthetic construct
  source 1..75: mol_type = other DNA
ttacaggctaaagccgctcagaaactggttatttacaccagtcatacgagtgccagttgggtggatcagtcaatc

SEQ ID NO: 308163 - DNA, 75 bp, synthetic construct
  source 1..75: mol_type = other DNA
tcaatgtaaagatctgtccagtttaacattacgccgtggtatttttataggcattagaggaaccggtgttaattt

SEQ ID NO: 308164 - DNA, 75 bp, synthetic construct
  source 1..75: mol_type = other DNA
atggcgctgtctgatgcgtggttgcgttcagtcgttggaaaggaacgcgataaggttttggttaaatcagatcgt

SEQ ID NO: 308165 - DNA, 75 bp, synthetic construct
  source 1..75: mol_type = other DNA
aatccaagataatctcatcaagtcattacttgatgatgcaaaaaaaatacacgaaaaaaaagacgtattgctggg

SEQ ID NO: 308166 - DNA, 75 bp, synthetic construct
  source 1..75: mol_type = other DNA
atattgctaggatattaatatctatcatatattccgatcaaaaaatgaaaacaataaaatcggctttttatggaa

SEQ ID NO: 308167 - DNA, 75 bp, synthetic construct
  source 1..75: mol_type = other DNA
taagaaacggaaagacgttgaagagcgtcttgaaaaagaaaaagaagaacatgaatcattaaaaagaaaggtaga

SEQ ID NO: 308168 - DNA, 75 bp, synthetic construct
  source 1..75: mol_type = other DNA
acggcgcacagacgccactggcaaccatggtgcgggtttaccagctcagggatcgtaaagccgttgatgtcgccg

SEQ ID NO: 308169 - DNA, 75 bp, synthetic construct
  source 1..75: mol_type = other DNA
gtgtcgcagcgcaaatataactatatgcgcgccgagcagatctatcgcgatgaacaaggcttaagcctgatgccg

SEQ ID NO: 308170 - DNA, 75 bp, synthetic construct
  source 1..75: mol_type = other DNA
aaaacagaccagcaagggcacaccgatgacgctggcgcgtatggcggtccccccttccgtgcagccaggcagatg

SEQ ID NO: 308171 - DNA, 75 bp, synthetic construct
  source 1..75: mol_type = other DNA
cggttgatgaaaatggaaacgtcacgttgaatttttttgctaattacattgcgttagcaagtggtgttcaggccg

SEQ ID NO: 308172 - DNA, 75 bp, synthetic construct
  source 1..75: mol_type = other DNA
caccgaatgcgccctgcaactggctgctgccgccttgcgggctgctggtgaacacaccctggcggaaaatttact

SEQ ID NO: 308173 - DNA, 75 bp, synthetic construct
  source 1..75: mol_type = other DNA
gtattatctcaggaacaggacggcattaaatcgcagacccacagcgccagcgcatccagtacagatttggggacg

SEQ ID NO: 308174 - DNA, 75 bp, synthetic construct
  source 1..75: mol_type = other DNA
gggcaagcctgccagtggtcgggccgtattatctcaggaacaggacggcattaaatcgcacacccacagcgccag

SEQ ID NO: 308175 - DNA, 75 bp, synthetic construct
  source 1..75: mol_type = other DNA
gggcaaccctgccagtggtcgggccgtattctctcaggaacaggacggcattaaatcgcaaacccacagcgccag

SEQ ID NO: 308176 - DNA, 75 bp, synthetic construct
  source 1..75: mol_type = other DNA
gatagaacaataacagcatataaagcatcaagatttggttttgaagtaaaatgttatgaaaggcttccctattat

SEQ ID NO: 308177 - DNA, 75 bp, synthetic construct
  source 1..75: mol_type = other DNA
atatcgataaagatattgaaacaataaactatttttctcagaaaaataaatatcaaaaattagcaagtaactcca

SEQ ID NO: 308178 - DNA, 75 bp, synthetic construct
  source 1..75: mol_type = other DNA
gtattttctcaggaacaggacggcattaaatcgcatacccacagcgccagcgcatccagtaccgatttggggacg

SEQ ID NO: 308179 - DNA, 75 bp, synthetic construct
  source 1..75: mol_type = other DNA
tgccagcttcagaaaatggggatgacgccggagcagattaagcaggctaccggactttccgaagctgaactgaag

SEQ ID NO: 308180 - DNA, 75 bp, synthetic construct
  source 1..75: mol_type = other DNA
aattgacgagtatgtaaaccatatccttatgctcaaaaaaaatgctaattttgctgaaatgattgctaggaatgc

SEQ ID NO: 308181 - DNA, 75 bp, synthetic construct
  source 1..75: mol_type = other DNA
aagaagctacaaacttatttttattggcaacatgttttctgttcaaaattttgatgcggctttttggttttgtga

SEQ ID NO: 308182 - DNA, 75 bp, synthetic construct
  source 1..75: mol_type = other DNA
agagtacaggcgcacaaaattagggccacatacctggaaaacatcgcgacatagcgatattaaagagcaggaata

SEQ ID NO: 308183 - DNA, 75 bp, synthetic construct
  source 1..75: mol_type = other DNA
acgggatgaagcaggcaatgggtggggcggtaacttcgattactgacatgctcaatggtaacgtcgacagctgga

SEQ ID NO: 308184 - DNA, 75 bp, synthetic construct
  source 1..75: mol_type = other DNA
tattatctccggagtgtttaattcgtcctccatgtactggcgcgaacagaatggactgattgaggtaaacagttc

SEQ ID NO: 308185 - DNA, 75 bp, synthetic construct
  source 1..75: mol_type = other DNA
taggaaaaattcctacagacggtagtagaaagttaacacgaatccctggtgtggtagttacaggtgcagtagaaa

SEQ ID NO: 308186 - DNA, 75 bp, synthetic construct
  source 1..75: mol_type = other DNA
aaatgaatgagcacgattcccgtcattatcaccgggaatggcttgatagtgttggcagggagcgccagaaattga

SEQ ID NO: 308187 - DNA, 75 bp, synthetic construct
  source 1..75: mol_type = other DNA
tgagccctatattctttatattattaatcgaatgtcatttattgacacttaaagtaccatgttcaactagtgggc

SEQ ID NO: 308188 - DNA, 75 bp, synthetic construct
  source 1..75: mol_type = other DNA
ttctgattatctttttcatttctatcgatatggggggcgaattaggtattaggaatgtttcatttctcttgttgg

SEQ ID NO: 308189 - DNA, 75 bp, synthetic construct
  source 1..75: mol_type = other DNA
tcgcgccatgtgcttttgcccttgagcaattccttaaagagtacagggaaacgcgctcattgcaggtatggcaac

SEQ ID NO: 308190 - DNA, 75 bp, synthetic construct
  source 1..75: mol_type = other DNA
ccagcttaatgagagcgagcaaagcggttccggttatccgggcggcgtaccgggagcgttgtcgaatcaaccggc

SEQ ID NO: 308191 - DNA, 75 bp, synthetic construct
  source 1..75: mol_type = other DNA
agttttcgtcaatcattggtcttatcaagcgtacccagcgagtctatgggcagatctttaccgtctccggcgtga

SEQ ID NO: 308192 - DNA, 75 bp, synthetic construct
  source 1..75: mol_type = other DNA
ttgatggctttcataatgaaatgcaagatttaataactgtttatataccgactcataatcgatctgatttattaa

SEQ ID NO: 308193 - DNA, 75 bp, synthetic construct
  source 1..75: mol_type = other DNA
actgactggtgatgttaaaacatactttgtaggggtgatctcttcggcaattgcgggttctttgggggcaacagc

SEQ ID NO: 308194 - DNA, 75 bp, synthetic construct
  source 1..75: mol_type = other DNA
tcatgaattcttattcttatcacatcaaaatcttcttgatgtgatgctatccactgatggaattcatctccgtca

SEQ ID NO: 308195 - DNA, 75 bp, synthetic construct
  source 1..75: mol_type = other DNA
ttttcgatcggaataacaactggcaggggctggagtttacgattcgggcgcatcagggggttgcacaggcaatgg

SEQ ID NO: 308196 - DNA, 75 bp, synthetic construct
  source 1..75: mol_type = other DNA
atggcaagcaaggcacgtatcgcaatcgccattggttttctcttgctgtccgtgctggtggatttcaccagcaca

SEQ ID NO: 308197 - DNA, 75 bp, synthetic construct
  source 1..75: mol_type = other DNA
acagaggggatgttataactttacaagatatcctcaagaatttttcatttatcaacttgctgttttatattaaag

SEQ ID NO: 308198 - DNA, 75 bp, synthetic construct
  source 1..75: mol_type = other DNA
aactatcaaactgatgtacaccgccagtagcgtcctgccaaaagatagagaaagtgtgttctggtttaacgtact

SEQ ID NO: 308199 - DNA, 75 bp, synthetic construct
  source 1..75: mol_type = other DNA
cttacttattcaggaaatgaactgcgtaacaggattttttctgaggcatacgtggagggagacaaaatctttata

SEQ ID NO: 308200 - DNA, 75 bp, synthetic construct
  source 1..75: mol_type = other DNA
ttgcaggccagggcatcgataactcctttgccatgcgtcgtcagatgttgtcacctgattacacgacagactggc

SEQ ID NO: 308201 - DNA, 75 bp, synthetic construct
  source 1..75: mol_type = other DNA
cgttattacttgcaagtactttatctgttttcgcatcagttgcgcaggctgatattgtcattaacggaacacgtg

SEQ ID NO: 308202 - DNA, 75 bp, synthetic construct
  source 1..75: mol_type = other DNA
ttgtcgcccccttgtcttgaaaacaattcatgtcatggatggtatattttgttaaataaaaagaatattgtcgca

SEQ ID NO: 308203 - DNA, 75 bp, synthetic construct
  source 1..75: mol_type = other DNA
cagcattatgcttcgcaacctgtgtagcttttagctcatcagctatagcagatatcgtaatttccggtacacgcg

SEQ ID NO: 308204 - DNA, 75 bp, synthetic construct
  source 1..75: mol_type = other DNA
tggtggcgtaaaaagtgccgcgaggaaacattgcccccgatactggtctggtacattgccgggttgggatcattt

SEQ ID NO: 308205 - DNA, 75 bp, synthetic construct
  source 1..75: mol_type = other DNA
atgcatattctggaggcaaaagataaaaatggtttttctggattatttttagcgatatcacgtaaggataaaaat

SEQ ID NO: 308206 - DNA, 75 bp, synthetic construct
  source 1..75: mol_type = other DNA
ggtgaatattttgttagcgttgcggtgaataacaaccaaatcagtaatgggcaaaaaatcaactggcaaaaaaag

SEQ ID NO: 308207 - DNA, 75 bp, synthetic construct
  source 1..75: mol_type = other DNA
cagctatcccagaacttcttaacatgctggatattaaaggaaaaatcatcacaaccgatgcgatgggttgccaga

SEQ ID NO: 308208 - DNA, 75 bp, synthetic construct
  source 1..75: mol_type = other DNA
gcgatgacaggtagcgtcacggtaagcgcagtcacgaccgctggtggaatgcaaacagtagatataacgctggtg

SEQ ID NO: 308209 - DNA, 75 bp, synthetic construct
  source 1..75: mol_type = other DNA
agcggctctgccacattaacgtcattaacagcggtgaccgatcaaaacggaatcgcgacaacaagcgtgaaagga

SEQ ID NO: 308210 - DNA, 75 bp, synthetic construct
  source 1..75: mol_type = other DNA
gcgacacgggtttgtttatggccatgcagcgcggacatatgaacgttattaatactatttttaacgcattaccca

SEQ ID NO: 308211 - DNA, 75 bp, synthetic construct
  source 1..75: mol_type = other DNA
ctgtggctgcctctgctgtatctggtatggcacatgcctggacgaatggtgatttcaatggttcggttgatatcg

SEQ ID NO: 308212 - DNA, 75 bp, synthetic construct
  source 1..75: mol_type = other DNA
tgctttgtctataattttaggattgcccatcattgttgattatattgatacaggtttggtgagaagatttccgac

SEQ ID NO: 308213 - DNA, 75 bp, synthetic construct
  source 1..75: mol_type = other DNA
ccagacgctatgttaaatcttttccatgtctatcaaggggatttgaaatcgaaactgagcttacaattcatgctt

SEQ ID NO: 308214 - DNA, 75 bp, synthetic construct
  source 1..75: mol_type = other DNA
atgggcgatgtgattcaactggctcccaatgaatgggtttgtgaaagcgttcttatcgcgattaccgggctcaaa

SEQ ID NO: 308215 - DNA, 75 bp, synthetic construct
  source 1..75: mol_type = other DNA
gcctggtcagacgggtcaggaaactgctggagctgagccgcaataacagtaatgcccatgaggccgggctggcgc

SEQ ID NO: 308216 - DNA, 75 bp, synthetic construct
  source 1..75: mol_type = other DNA
acaggtacaggttttgactcttatcaaaacaccgtaagtcaactcacaaacgataatagaaaactggtgattact

SEQ ID NO: 308217 - DNA, 75 bp, synthetic construct
  source 1..75: mol_type = other DNA
ctggcggggtggttgctctggatgatggcgccagactgaaaaaattaatgagcatcctgccagtggaggaagtgt

SEQ ID NO: 308218 - DNA, 75 bp, synthetic construct
  source 1..75: mol_type = other DNA
taacttcggtgaagatactgcttcagcttggacatctgcaccgctgtacgccaacaccattaccgttactaacgg

SEQ ID NO: 308219 - DNA, 75 bp, synthetic construct
  source 1..75: mol_type = other DNA
ccaacaccattaccgttactaacggtggtgtgctggatgtaaacaccaacatgaatgaatcgccacggataatct

SEQ ID NO: 308220 - DNA, 75 bp, synthetic construct
  source 1..75: mol_type = other DNA
atactaggcatttcgcacatctcgcttctaatgccgaaagaaagaaaaaatacgatattgccgctcaattatggg

SEQ ID NO: 308221 - DNA, 75 bp, synthetic construct
  source 1..75: mol_type = other DNA
cagagatgttcaacgtgattccactggcaccgggccatgcctacgggatgtttatggaacgttttaaagagctgc

SEQ ID NO: 308222 - DNA, 75 bp, synthetic construct
  source 1..75: mol_type = other DNA
gagcatagcgagggtaatgggaattacgggagggatgtttgccgctatggcgctaatatgctgttgtattaatag

SEQ ID NO: 308223 - DNA, 75 bp, synthetic construct
  source 1..75: mol_type = other DNA
tggtgcatgcgggatttcgtgacggtgtgggaatggatgcccttgatacgctggttcagatggtggatgacaatc

SEQ ID NO: 308224 - DNA, 75 bp, synthetic construct
  source 1..75: mol_type = other DNA
ggttctcgtgatgatgaacctacttcgcaggtattcatcaccacccattccccatatgttctcagggaactcaag

SEQ ID NO: 308225 - DNA, 75 bp, synthetic construct
  source 1..75: mol_type = other DNA
gggtcccgtgacgctgagcctctggcacaagtctttattaccacgcactctccctacgtacttcgtgagctgaag

SEQ ID NO: 308226 - DNA, 75 bp, synthetic construct
  source 1..75: mol_type = other DNA
tatcgcgcgaatgaatgtctatccagtcagcacgacaggtgtaccaccagaaaccgggcgatttgaagccacggc

SEQ ID NO: 308227 - DNA, 75 bp, synthetic construct
  source 1..75: mol_type = other DNA
tatcgtactgccttattaaaagattcagatatcacgacacctgcacacaggcaacagacagaacattgccgggca

SEQ ID NO: 308228 - DNA, 75 bp, synthetic construct
  source 1..75: mol_type = other DNA
ttcacacaatttcctgacactaagtggggacgataaggaacaagctaccttaagggcctgcgctgaagccttttt

SEQ ID NO: 308229 - DNA, 75 bp, synthetic construct
  source 1..75: mol_type = other DNA
ggttggtgggggaacgatgagtaagacagtggggcatcttggttatggtcactggttaccggacgctggcattgg

SEQ ID NO: 308230 - DNA, 75 bp, synthetic construct
  source 1..75: mol_type = other DNA
cgctgcgccagttattctggcatcatttacgtcgtcacggcctgtggcatctggcgggcgatgttatcaggagtc

SEQ ID NO: 308231 - DNA, 75 bp, synthetic construct
  source 1..75: mol_type = other DNA
ggcatggaaggtgagcaagaagtaagtatttatataaataatgatttttacacaagagaaactttgacgttcaga

SEQ ID NO: 308232 - DNA, 75 bp, synthetic construct
  source 1..75: mol_type = other DNA
gtacccgcaggtccttttgagctgaatgacttcagtatctccggttattccggagacctggtggtcacggtcagg

SEQ ID NO: 308233 - DNA, 75 bp, synthetic construct
  source 1..75: mol_type = other DNA
cgcgttcgggcgccagctgcgcgaggaagtcaggcgacacaccacgctggtatgcggagtcggtattgcccgcac

SEQ ID NO: 308234 - DNA, 75 bp, synthetic construct
  source 1..75: mol_type = other DNA
gcacgatacccgcagataagccgcagctggcgggcaaactggccgatgttgccaccttcttcgtgtacccggagg

SEQ ID NO: 308235 - DNA, 75 bp, synthetic construct
  source 1..75: mol_type = other DNA
gcatggattggtgaaacagccgttttgccaagggcgtctgtaaatacgcctgatgttgggagcccatcactggct

SEQ ID NO: 308236 - DNA, 75 bp, synthetic construct
  source 1..75: mol_type = other DNA
tgacccgctatctgtcgcgtgtcgccctttcttcggtcgctcagggcgcgcggcaaatgggctatcaggcggcaa

SEQ ID NO: 308237 - DNA, 75 bp, synthetic construct
  source 1..75: mol_type = other DNA
gatgccaaagctctacagatcattaaactggctgaactctatgatattccagtgattgaagatattcctttggca

SEQ ID NO: 308238 - DNA, 75 bp, synthetic construct
  source 1..75: mol_type = other DNA
acaacatagtgtttcttcgggggccagtgttatttttagttacgacagccgtgattttttactgaatgctcaccg

SEQ ID NO: 308239 - DNA, 75 bp, synthetic construct
  source 1..75: mol_type = other DNA
tttacagtaatgatgacatgttgaactcccgtctgcggaactactcgccgtccatccggggatttgcgcgcacgc

SEQ ID NO: 308240 - DNA, 75 bp, synthetic construct
  source 1..75: mol_type = other DNA
gtgccgggtattcaggggcctgctggtcctgcgggcccgcgaggtgaaaccggagccagaggcgaaaaaggagag

SEQ ID NO: 308241 - DNA, 75 bp, synthetic construct
  source 1..75: mol_type = other DNA
ccacaaggggaaaaaggggacaaaggtgaccccggcccggcaggccctgccggtgagcgggggccgaaaggtgat

SEQ ID NO: 308242 - DNA, 75 bp, synthetic construct
  source 1..75: mol_type = other DNA
ggatattctgttgtaacattaacgtatgtctattttaacttccctgaaacactcagtcataaaaaacggattaca

SEQ ID NO: 308243 - DNA, 75 bp, synthetic construct
  source 1..75: mol_type = other DNA
atgcaattgtctatcatggtttataccatttgtataggttttggacagctaatttttggcccattatctgattct

SEQ ID NO: 308244 - DNA, 75 bp, synthetic construct
  source 1..75: mol_type = other DNA
gatccgcccgtagttcaaccagtagcgcagcaacctgttatcatccaattacctcaagaaccaactactccacga

SEQ ID NO: 308245 - DNA, 75 bp, synthetic construct
  source 1..75: mol_type = other DNA
tttattgacggcctgcccgccgccagaaccggtgatgctattgactgcggcggcgtggttattggtggcggtacg

SEQ ID NO: 308246 - DNA, 75 bp, synthetic construct
  source 1..75: mol_type = other DNA
aaaccatggaaagctgcagaggcgacacctttgacggttggcctgcccgtaccctgctggaggcgggcaacattc

SEQ ID NO: 308247 - DNA, 75 bp, synthetic construct
  source 1..75: mol_type = other DNA
tcatgtccagaagtgggagcgagtctgcgccgcgctgcgtgagttgaacaagcacagggatattgtacgacagat

SEQ ID NO: 308248 - DNA, 75 bp, synthetic construct
  source 1..75: mol_type = other DNA
gactgtagatggcaaccaacgagtagatgaacgaggtacaacaaataacactcatattatcaaccatggccagca

SEQ ID NO: 308249 - DNA, 75 bp, synthetic construct
  source 1..75: mol_type = other DNA
ctgaggccgaaattaagcgtttcgttgatgcctgtgatgagctgcgcgacgccacccgccgaccactcaccgaat

SEQ ID NO: 308250 - DNA, 75 bp, synthetic construct
  source 1..75: mol_type = other DNA
ctgaggccgaaattaagcgattcgttgatgcctgcgacgagctgcgcgatgcgacccgccgcccactcaccgaat

SEQ ID NO: 308251 - DNA, 75 bp, synthetic construct
  source 1..75: mol_type = other DNA
aacacaatcagaaagagggggagtatttttttgagtattacatgccagtggtgagtgactcctttcttgtttcaa

SEQ ID NO: 308252 - DNA, 75 bp, synthetic construct
  source 1..75: mol_type = other DNA
taaaacctcggcgaaaaatactaccattgatgctggcggtaagctgattgtccagaaggaggctaaaacagatag

SEQ ID NO: 308253 - DNA, 75 bp, synthetic construct
  source 1..75: mol_type = other DNA
attagcgccggaggctcgctgattgtctataccggcggtattgcacatggggttaaccaggagacgggcagtgct

SEQ ID NO: 308254 - DNA, 75 bp, synthetic construct
  source 1..75: mol_type = other DNA
gcggcacgctggtacataaaatgggtgccctgcggccatattccggtatgaccggttatgacggcctgacggccc

SEQ ID NO: 308255 - DNA, 75 bp, synthetic construct
  source 1..75: mol_type = other DNA
cgcattgtcgaaatactcgataaattcgacaccctgaccaactccatcactgaaggtcttccgcgtgaaatcgag

SEQ ID NO: 308256 - DNA, 75 bp, synthetic construct
  source 1..75: mol_type = other DNA
tgttgtttttgtctctgcgggtgaaacaattgcagatattggtcgtggaacagcctggttaggcgatgaagatgt

SEQ ID NO: 308257 - DNA, 75 bp, synthetic construct
  source 1..75: mol_type = other DNA
aggcggatgccggaccctcactccgtgatcagatcatggcactggatgaggcaaaaggggctgaggcgcaggctg

SEQ ID NO: 308258 - DNA, 75 bp, synthetic construct
  source 1..75: mol_type = other DNA
cgtggcgcgatactgtgttaaaaaagtcaccggttcccgtgcttcggagcattacggagaccgtattcccgagtt

SEQ ID NO: 308259 - DNA, 75 bp, synthetic construct
  source 1..75: mol_type = other DNA
atggttctaagttagaacgaccgcattatcatgcgattatttttggttatgattttccggataagacattacaca

SEQ ID NO: 308260 - DNA, 75 bp, synthetic construct
  source 1..75: mol_type = other DNA
aattgctggatggggttaaggttgagtggcaaacactagggaaagtgcttaaacgaactaaaggcacaaaaataa

SEQ ID NO: 308261 - DNA, 75 bp, synthetic construct
  source 1..75: mol_type = other DNA
aagggattcattaagccgtctacaaaaccaaataacgaactaccgtaaagcatttgggaaaatctatgtcatagc

SEQ ID NO: 308262 - DNA, 75 bp, synthetic construct
  source 1..75: mol_type = other DNA
ggtgtgcgtgcggattttcagcgccgtattgatgaggcccgccggatgtttgtcgacaaggtggcactttatacg

SEQ ID NO: 308263 - DNA, 75 bp, synthetic construct
  source 1..75: mol_type = other DNA
gctggcagccgcgccggcggcatcgcaaccgtcacaggaaacactttttgatcgctttatggcacagcatgctgc

SEQ ID NO: 308264 - DNA, 75 bp, synthetic construct
  source 1..75: mol_type = other DNA
ttctaatggcgaatatccttggcagcaggtacctgaattaggaaagaatgtttataaagctgttatcactcaatg

SEQ ID NO: 308265 - DNA, 75 bp, synthetic construct
  source 1..75: mol_type = other DNA
ccgcgtgaaatcgagttgcgccagaaacaatacgagtattatcgtgatttactgttcagtttcccgaaacctgat

SEQ ID NO: 308266 - DNA, 75 bp, synthetic construct
  source 1..75: mol_type = other DNA
caggctgcattaaaaaattcatcggcaaaatggattccgcgaaattgtgtaatcatagccatttctggagcaaca

SEQ ID NO: 308267 - DNA, 75 bp, synthetic construct
  source 1..75: mol_type = other DNA
ttttttgctttatgtgcaaagttgagtgcaacttacgaagttattacaaacatggacatactggtctttattgcg

SEQ ID NO: 308268 - DNA, 75 bp, synthetic construct
  source 1..75: mol_type = other DNA
atagccatactcataaccgctgttatatatttattgtttgcccggcaggcggtagagattgagatggatatatct

SEQ ID NO: 308269 - DNA, 75 bp, synthetic construct
  source 1..75: mol_type = other DNA
tttttggggcgattttattgtcactgtttatgtgtttatcaaattccctccttttccaccttaataagataaaac

SEQ ID NO: 308270 - DNA, 75 bp, synthetic construct
  source 1..75: mol_type = other DNA
aactatccatgctagcaaagtcgaaatgatcaaacgattcatgactgctaaagctgaagctgaacgcaagggtga

SEQ ID NO: 308271 - DNA, 75 bp, synthetic construct
  source 1..75: mol_type = other DNA
ataactcttgcaactaactttgcccgctcaaacaaatgcattctagaggctcctgctggaaacataaatacatca

SEQ ID NO: 308272 - DNA, 75 bp, synthetic construct
  source 1..75: mol_type = other DNA
atttgttaaaggggggcaattgcgtgttagcgttcagggaaacccatcattccgcccatctattattgtcaatgg

SEQ ID NO: 308273 - DNA, 75 bp, synthetic construct
  source 1..75: mol_type = other DNA
ttgataacaagataatgaaccttcgtaaaataacttatttgcaatctaagctagaaatttttggttcttctatta

SEQ ID NO: 308274 - DNA, 75 bp, synthetic construct
  source 1..75: mol_type = other DNA
cctgtcgttacccaacccgtagaaattttaccctccatccatagaaagcgagatacgcggctacttttgtggtct

SEQ ID NO: 308275 - DNA, 75 bp, synthetic construct
  source 1..75: mol_type = other DNA
cgaaaccactggcacgtggagaataagctgcactggcgtctggacggtgtgccgcaggaacacaagatagctgca

SEQ ID NO: 308276 - DNA, 75 bp, synthetic construct
  source 1..75: mol_type = other DNA
gggcgtaggcactgaccgtaaatcggtagtgctgaaaaccaaaaacggtcaatacttcgtttcaccagataacgg

SEQ ID NO: 308277 - DNA, 75 bp, synthetic construct
  source 1..75: mol_type = other DNA
tcgccctggaggaactctcccccatgcgcctgcgtgccggtaaacaggggctgcaactggcggttcgctggtact

SEQ ID NO: 308278 - DNA, 75 bp, synthetic construct
  source 1..75: mol_type = other DNA
ctgcaattattaacctgatcgctgatcctctatctgtttgccagtctggcttcgctgtttttactcggtctggac

SEQ ID NO: 308279 - DNA, 75 bp, synthetic construct
  source 1..75: mol_type = other DNA
tggtacagcaaaacctggacagttggttgttagtgaaactgattttggagaggttttttattttgactattctca

SEQ ID NO: 308280 - DNA, 75 bp, synthetic construct
  source 1..75: mol_type = other DNA
cgtgttagcgttcagggaaacccatcattcagaccatctattattgtcaatggctttctgccaattgatcaacaa

SEQ ID NO: 308281 - DNA, 75 bp, synthetic construct
  source 1..75: mol_type = other DNA
gattggctctggagttattaattttaaaattatatgtgagcaattgaaggagcctgttgttttttctcgtcaggt

SEQ ID NO: 308282 - DNA, 75 bp, synthetic construct
  source 1..75: mol_type = other DNA
aattgacgaatttgataaatatctgattcctgtcaccccggatgataaagcatggcaggaaagtattaagaccgc

SEQ ID NO: 308283 - DNA, 75 bp, synthetic construct
  source 1..75: mol_type = other DNA
gtgctcaacgaccgtaccaccaccgtaaaacacgatcaccgcgaaaccgtaaaaaatgaccagacggtcacgatc

SEQ ID NO: 308284 - DNA, 75 bp, synthetic construct
  source 1..75: mol_type = other DNA
agaataaggggagggatggatctcggttactggcgaacacacgatttcagaagaacgcttgttacacgtctgtcc

SEQ ID NO: 308285 - DNA, 75 bp, synthetic construct
  source 1..75: mol_type = other DNA
tgtcaattgtaagtaaactaattgcatctgtacgggaattcggtgtcggtttcatttgggggacgggaagtattg

SEQ ID NO: 308286 - DNA, 75 bp, synthetic construct
  source 1..75: mol_type = other DNA
ggaaacacgcctggcaatatcaacctgggtaatgatgtcaccgtcaatgtcaacgacgcctctggatatgcaaaa

SEQ ID NO: 308287 - DNA, 75 bp, synthetic construct
  source 1..75: mol_type = other DNA
cagccgttgctgaaaccgctggtggacggcccgcagagcgctgtcgtgacgggaccggcaggcgaggaaatcttc

SEQ ID NO: 308288 - DNA, 75 bp, synthetic construct
  source 1..75: mol_type = other DNA
catgcgactgaatacatcatggcagcccgcaatcacttcggtatcagcaaggaagaggcgatggaactcaccatg

SEQ ID NO: 308289 - DNA, 75 bp, synthetic construct
  source 1..75: mol_type = other DNA
gtagagaatgaagacggttctcacgttcctgtttcgcaaccaatcatcattaatgctgctggttaccccgtatat

SEQ ID NO: 308290 - DNA, 75 bp, synthetic construct
  source 1..75: mol_type = other DNA
caaagacgcagatgaccatccgctccaaaacgtacatgggcagcggatttaatgagctgaagtttgatgatgcga

SEQ ID NO: 308291 - DNA, 75 bp, synthetic construct
  source 1..75: mol_type = other DNA
tagaagagaacacactggattggtttggcaaaaatgccaattcatccacacgaagaggaaaaatattaatcgcca

SEQ ID NO: 308292 - DNA, 75 bp, synthetic construct
  source 1..75: mol_type = other DNA
ttagaggaacagcttctaaacactcgtcaggaagtacaaaggactgtcaaaataaattggctcacccagcgaagt

SEQ ID NO: 308293 - DNA, 75 bp, synthetic construct
  source 1..75: mol_type = other DNA
ccatacatcgcgctggggatgctgaactttttcctgctctgcggcctgtcggtgtttgtgtttggcgtaccgcat

SEQ ID NO: 308294 - DNA, 75 bp, synthetic construct
  source 1..75: mol_type = other DNA
tgctgatgatgatcccgtcaatgctaagcgccctaagcgtggtgcgggaaaaagagcttgggtcgattatcaacc

SEQ ID NO: 308295 - DNA, 75 bp, synthetic construct
  source 1..75: mol_type = other DNA
tttgtggcaactttttatcccgttgctgatagccatcccgctggtgatgggcttaagtatcctgctgctgaaaaa

SEQ ID NO: 308296 - DNA, 75 bp, synthetic construct
  source 1..75: mol_type = other DNA
gtgatcgacttcaaccgctctacggaactggcaatcagaatgttcgggggtcagtatttctctctggctgaaggt

SEQ ID NO: 308297 - DNA, 75 bp, synthetic construct
  source 1..75: mol_type = other DNA
cgctggaagggcctggacgttggatcggcgaggtttacccgaccagtcattttctgactatcgcccgcggaacgt

SEQ ID NO: 308298 - DNA, 75 bp, synthetic construct
  source 1..75: mol_type = other DNA
tgccaccggaatggggctgctgatctccacctttatgaaaagccagattgccgccattttcggaacggcgattat

SEQ ID NO: 308299 - DNA, 75 bp, synthetic construct
  source 1..75: mol_type = other DNA
tttttgacagcgccagccagaaaaaactgtcagaagtgcagtcgaaggcgctggctgaccgttttaacacggcac

SEQ ID NO: 308300 - DNA, 75 bp, synthetic construct
  source 1..75: mol_type = other DNA
ttacaacttattaaaacgaccgataaatccgcaggcaatcccgacatatcaacaagctggggacgaactggcgaa

SEQ ID NO: 308301 - DNA, 75 bp, synthetic construct
  source 1..75: mol_type = other DNA
tctatgacgatggtggagcactaatcaaaggaggttgtgatgttgcagacagggaattcagtatagagtttaata

SEQ ID NO: 308302 - DNA, 75 bp, synthetic construct
  source 1..75: mol_type = other DNA
gttggtttcctgcctgatactgcgtagtgcctggcagttactaaaagagagtacaggcgaactactggaaagtgc

SEQ ID NO: 308303 - DNA, 75 bp, synthetic construct
  source 1..75: mol_type = other DNA
aagcaattcaacgttttaatacgccacaaccggtggctggcgcaactatgatggtcattgctgtcgccggattga

SEQ ID NO: 308304 - DNA, 75 bp, synthetic construct
  source 1..75: mol_type = other DNA
ctgggccgccagcttaaagttctcgatctaggctgcgctcagggttttttcagcctgagtctggcaagcaaaggc

SEQ ID NO: 308305 - DNA, 75 bp, synthetic construct
  source 1..75: mol_type = other DNA
ttttctacaaaaaacgaatgcagaaaggcggtaagctcatgctctccatcgttgaagagttctggaaaccctgta

SEQ ID NO: 308306 - DNA, 75 bp, synthetic construct
  source 1..75: mol_type = other DNA
tgtggtcaatttggcgagtgggatccggcaacttacagcgtcgaagattcgctgtttggcaccattgaatttcat

SEQ ID NO: 308307 - DNA, 75 bp, synthetic construct
  source 1..75: mol_type = other DNA
gatcagtaaaatatacggagactcatctcttggtgtctctctggttacatctgcagtaaaagatgccctttctct

SEQ ID NO: 308308 - DNA, 75 bp, synthetic construct
  source 1..75: mol_type = other DNA
catagaagaggtaactgcattggctatcaaacaggcgagtgaaattagtgatgaaattctctctctgctaaacaa

SEQ ID NO: 308309 - DNA, 75 bp, synthetic construct
  source 1..75: mol_type = other DNA
ggaacagtagtacatgccctttcagcgaagtgcgttcttgttacggctgtctgtattatcgcccttttacggatg

SEQ ID NO: 308310 - DNA, 75 bp, synthetic construct
  source 1..75: mol_type = other DNA
ttatgaaagcctgtgtcagttccggagcactggtgtctggatcaccacacatgactggttatgtgaaaggtttat

SEQ ID NO: 308311 - DNA, 75 bp, synthetic construct
  source 1..75: mol_type = other DNA
attgaatttaactacaaggtcatgccattcctggtcggcttaacctcccagttcactacctattctctctatgac

SEQ ID NO: 308312 - DNA, 75 bp, synthetic construct
  source 1..75: mol_type = other DNA
tggtgaatatcttgtaggaaataagatggagcttataaactttttaaaacagaaatataaaggttattataattt

SEQ ID NO: 308313 - DNA, 75 bp, synthetic construct
  source 1..75: mol_type = other DNA
tcgatatcgatctggcaaaggaattatgcaaacgcatcaatacgcaatgtacgtttgtcgaaaatccgctggatg

SEQ ID NO: 308314 - DNA, 75 bp, synthetic construct
  source 1..75: mol_type = other DNA
accctatgaatttattcttactcaatcgtttatttttgaatcacccacaaaaaccctgaagaacattgattcgca

SEQ ID NO: 308315 - DNA, 75 bp, synthetic construct
  source 1..75: mol_type = other DNA
ccgacagaacaggccgtgagacggtcatgttcagtacatttttacgtgctcagatctcgcttgcctgggttatcg

SEQ ID NO: 308316 - DNA, 75 bp, synthetic construct
  source 1..75: mol_type = other DNA
atggtgccctctgttaatcggatagttcagtgtacgggaatttatttgcaagcagaactgataatattcctttgt

SEQ ID NO: 308317 - DNA, 75 bp, synthetic construct
  source 1..75: mol_type = other DNA
acagagggatgttacttgcatatgaaagcggaaccattaaagacccatacttaataaaaaacgggaagatacatc

SEQ ID NO: 308318 - DNA, 75 bp, synthetic construct
  source 1..75: mol_type = other DNA
gtccggttctgcaggcgatggtggatgacgctgtgggggccatttcggtaccgcgtgatggtcgtgattatgatc

SEQ ID NO: 308319 - DNA, 75 bp, synthetic construct
  source 1..75: mol_type = other DNA
cccagatttctgactctgcgctagagttaccctctcaattttttactcgagagggtgtaaaagttgagattactg

SEQ ID NO: 308320 - DNA, 75 bp, synthetic construct
  source 1..75: mol_type = other DNA
ttatcacgcgactggatgcgcggcgtttaataccaattgatgtcaaagtgattgcaacaacgaccgcggacctcg

SEQ ID NO: 308321 - DNA, 75 bp, synthetic construct
  source 1..75: mol_type = other DNA
aattactttctccagggaccaatttgacgtgggcaatagtggtattactcgtaacaccgcagaagaaaatggtgc

SEQ ID NO: 308322 - DNA, 75 bp, synthetic construct
  source 1..75: mol_type = other DNA
tatgggttaccggttgttgtaccaaatattggtgcctttggcgaacgactcatcggacgaaaatttagccggatt

SEQ ID NO: 308323 - DNA, 75 bp, synthetic construct
  source 1..75: mol_type = other DNA
gtcgatgagcccatcatgacaatgtacataccaggtatgccaaaagtagcgttgtctgtaactctgactggcgat

SEQ ID NO: 308324 - DNA, 75 bp, synthetic construct
  source 1..75: mol_type = other DNA
agacctttgtttattaaaccaaccgaaaattcttatgcattagagtcgaagcgttgggatgacgccttcaatatg

SEQ ID NO: 308325 - DNA, 75 bp, synthetic construct
  source 1..75: mol_type = other DNA
tcaaatacaacatctttaccactaaaagttaaatgttccggagaaaaagaaccaagaattaccttctccagcacc

SEQ ID NO: 308326 - DNA, 75 bp, synthetic construct
  source 1..75: mol_type = other DNA
tacaatggagctgtattagtatcagcaaacggtgactcaatagaggttagttggccatatgtgaacaatattaga

SEQ ID NO: 308327 - DNA, 75 bp, synthetic construct
  source 1..75: mol_type = other DNA
gtgatggatttaggatggctggctgctggtacatgtatttcattttgctgtgatataaaaataaatactcaaatg

SEQ ID NO: 308328 - DNA, 75 bp, synthetic construct
  source 1..75: mol_type = other DNA
acaacaatttcgatgagcgaaattggtcgtgatcaatttgaaaatgtagaagttggctcccccgttactacttat

SEQ ID NO: 308329 - DNA, 75 bp, synthetic construct
  source 1..75: mol_type = other DNA
aactttggtcgcctgctgcgcgaggattttgccgcttatcgcgatgaactgattatctctaccaaagccggatac

SEQ ID NO: 308330 - DNA, 75 bp, synthetic construct
  source 1..75: mol_type = other DNA
gcggcaggaaccgccgccggggggaaaaccggtttaaccgcaaccgtggttggtgtgttgttcctgatgattctg

SEQ ID NO: 308331 - DNA, 75 bp, synthetic construct
  source 1..75: mol_type = other DNA
cctcctgaaatataaagaatactgggcaaacagttacaccagatatcgtaataagattggtttaacaagcgaagg

SEQ ID NO: 308332 - DNA, 75 bp, synthetic construct
  source 1..75: mol_type = other DNA
agaaattaacggaacgctaaaaacagaaagccttcttgggtcaatgaaagaatcttctgttgatgagcgtaaagc

SEQ ID NO: 308333 - DNA, 75 bp, synthetic construct
  source 1..75: mol_type = other DNA
gccagaatctactcaagctgatgcaggaaatccctttgactgatgacgaacaagccgctgtagaaaacgatatac

SEQ ID NO: 308334 - DNA, 75 bp, synthetic construct
  source 1..75: mol_type = other DNA
gggaagcagatattcagaatagcggtaagtttgtgctgaatgttgaagaaaactggttactgaagaacagtatca

SEQ ID NO: 308335 - DNA, 75 bp, synthetic construct
  source 1..75: mol_type = other DNA
gattacttccttgagcgcctgaagttttatcgcgagaagtcgataactttaccgaaagttagcgatccggtttac

SEQ ID NO: 308336 - DNA, 75 bp, synthetic construct
  source 1..75: mol_type = other DNA
atagattccatattaagaacagaaggtgaaatagttaaacatcgtggtaagtatcatatagtaacaagtatgttt

SEQ ID NO: 308337 - DNA, 75 bp, synthetic construct
  source 1..75: mol_type = other DNA
gtgctgtgtatcgtatagatcctgtatcaccgctaaacgtaacagatactcctcctggtaatggggctgaacctg

SEQ ID NO: 308338 - DNA, 75 bp, synthetic construct
  source 1..75: mol_type = other DNA
caccgccaccacaggattgtacccggagactttatttgatggtcgggacagctttacgcccggcatgacgccgac

SEQ ID NO: 308339 - DNA, 75 bp, synthetic construct
  source 1..75: mol_type = other DNA
tacatgggatttaaagccatcaaatgatcttgtgaagctggcaaagttcaatggcgttacaatagataatgaatg

SEQ ID NO: 308340 - DNA, 75 bp, synthetic construct
  source 1..75: mol_type = other DNA
taactgcgtgcgacaaccccacgcacattaacaaaaacatcgttattagctctggcaatgagcgcagtgttgaat

SEQ ID NO: 308341 - DNA, 75 bp, synthetic construct
  source 1..75: mol_type = other DNA
ggaatcagtccttaaagacatggactgttgcatcggaactggccgcggggacagtaataaaaacggcagtaaaca

SEQ ID NO: 308342 - DNA, 75 bp, synthetic construct
  source 1..75: mol_type = other DNA
ctgtatggatatcaattgaatccgatatcagacatcgaccccctgggtttatctatgtgggaggatgcaaaatcg

SEQ ID NO: 308343 - DNA, 75 bp, synthetic construct
  source 1..75: mol_type = other DNA
ggtaccaacggcggcgccagttgcgctgcagccctgagcgaccgtctggtcgattgctgtcagaaacagtcgcca

SEQ ID NO: 308344 - DNA, 75 bp, synthetic construct
  source 1..75: mol_type = other DNA
gtttgcttcgaacctgtcagataagtttgcggtgtattcgcgtgagaagatgatatttagttcacaagcggcaac

SEQ ID NO: 308345 - DNA, 75 bp, synthetic construct
  source 1..75: mol_type = other DNA
atggctactttaatggaaaaagatgcacttttaaacggcaccagtcagtgcatcgcgtttttatcaaatatcgtc

SEQ ID NO: 308346 - DNA, 75 bp, synthetic construct
  source 1..75: mol_type = other DNA
gaaattttccggcgaaacggtcgaacgtgcaattgagagagcgatagtcagtaaactcaacattgttgtcgaagg

SEQ ID NO: 308347 - DNA, 75 bp, synthetic construct
  source 1..75: mol_type = other DNA
attcaaggttattatgatggctatacaaaaggcattattgatgagatggataattttatacccttgataagcttg

SEQ ID NO: 308348 - DNA, 75 bp, synthetic construct
  source 1..75: mol_type = other DNA
tgaattaaatttaccatcggatgatggtaaaaagacggaaaaaatagggcctataacgtataatttatacaaaga

SEQ ID NO: 308349 - DNA, 75 bp, synthetic construct
  source 1..75: mol_type = other DNA
gaatattccgtcagatgatggaaaaagtacggagaaattgggaccaatgacgtacaacttatataaagaggctct

SEQ ID NO: 308350 - DNA, 75 bp, synthetic construct
  source 1..75: mol_type = other DNA
tctatgtgaaaaatgctggaggaagcggcgcggccacgctaaatgggatcgaactcataactgtgaatggcgatg

SEQ ID NO: 308351 - DNA, 75 bp, synthetic construct
  source 1..75: mol_type = other DNA
agcgcccacagtttgaggccatcatgcgccagcgtatgcaggtgctgacactgttcaggcctgccacaaggccac

SEQ ID NO: 308352 - DNA, 75 bp, synthetic construct
  source 1..75: mol_type = other DNA
ttcgcaaaaatcccctttttaattttcattgaaaaaatggaaattgataatatgaatccaggtcatgcacattaa

SEQ ID NO: 308353 - DNA, 75 bp, synthetic construct
  source 1..75: mol_type = other DNA
acccttagccaaccattcgcaccgttcctctacacgctggcgaatgacggtgcatccattatcaaatccggcggt

SEQ ID NO: 308354 - DNA, 75 bp, synthetic construct
  source 1..75: mol_type = other DNA
tcagcacgttgataaagctggaagagttcagaaaggaaaacccctgcaagggtctggaaccactgaaagaagcgc

SEQ ID NO: 308355 - DNA, 75 bp, synthetic construct
  source 1..75: mol_type = other DNA
tattgccggagaaaataaaggtattctcatttaagtccatagattatttggagtggcatcgcgaaaatttattga

SEQ ID NO: 308356 - DNA, 75 bp, synthetic construct
  source 1..75: mol_type = other DNA
cagaacttgaaaaaaaaaagaataaacatgataaacgatctgaagagtatattgttaaaaccttcagaagaagtt

SEQ ID NO: 308357 - DNA, 75 bp, synthetic construct
  source 1..75: mol_type = other DNA
ggccgctggctggacacggttttgctgcaactgaatctgggtgaaggaaaccgtactcaaccgaaagataaagat

SEQ ID NO: 308358 - DNA, 75 bp, synthetic construct
  source 1..75: mol_type = other DNA
ctataaacgatataccacctgattgttcatcactgttagcaggtttttgctcgcttgctgactggttaggctcct

SEQ ID NO: 308359 - DNA, 75 bp, synthetic construct
  source 1..75: mol_type = other DNA
tcgctgatgtctcgggattacccgtcaatattccggtggtcaaagaagccaccgcattaggatgtgccattgcag

SEQ ID NO: 308360 - DNA, 75 bp, synthetic construct
  source 1..75: mol_type = other DNA
taattccggagtgcgttacgtacaaacgagcggcactcgaaggcttgcgatcgtcgtgtcggatgatcgaacagt

SEQ ID NO: 308361 - DNA, 75 bp, synthetic construct
  source 1..75: mol_type = other DNA
cctcgctgtacgcttacactcaggcggcagtcccgaaatgaaggactaccgttcgtgaatgcaaagcgtgtttac

SEQ ID NO: 308362 - DNA, 75 bp, synthetic construct
  source 1..75: mol_type = other DNA
ggcacggaactgtctgagctgaccgcacagattactgctctccgtcagcagaatgcaaaactgcaggagagtcag

SEQ ID NO: 308363 - DNA, 75 bp, synthetic construct
  source 1..75: mol_type = other DNA
atcggtcaggggccagcagaagcatttcccaaagatttaaagattgatgctcccgacgaacatacggtgaggttt

SEQ ID NO: 308364 - DNA, 75 bp, synthetic construct
  source 1..75: mol_type = other DNA
aactcgccaaaaccttcaatcatcatcaagcgctgtatgcggttgatctgagcattcatcacggtgaaatggtgg

SEQ ID NO: 308365 - DNA, 75 bp, synthetic construct
  source 1..75: mol_type = other DNA
acggtaaagaagccgccgcaaatgaagtgggttatcgcatcagcgcgcaactggcggagtttgtcgccaataccc

SEQ ID NO: 308366 - DNA, 75 bp, synthetic construct
  source 1..75: mol_type = other DNA
gatagtacagctgaggatttcatttccgcgttcagctcgtacattccgcaattaatggatggagcgaacggccac

SEQ ID NO: 308367 - DNA, 75 bp, synthetic construct
  source 1..75: mol_type = other DNA
attggtggtccagtagcagaaggaactccattcccgctgccaggaggtttactgtcgtacgccccgggcaaagca

SEQ ID NO: 308368 - DNA, 75 bp, synthetic construct
  source 1..75: mol_type = other DNA
atgaccctgaccaactcaggcaagatcttgcatctcaaggaggtgttaatctggtaaacggagctatctcacagg

SEQ ID NO: 308369 - DNA, 75 bp, synthetic construct
  source 1..75: mol_type = other DNA
tatggctacaaatgaactcataaaactggccaaaatagagaataatttagacctgaataaattctctactatatg

SEQ ID NO: 308370 - DNA, 75 bp, synthetic construct
  source 1..75: mol_type = other DNA
ttttgtgggctgttcatttaccctggacagtcagtgcggcaggttgtggctgtttcagcccccggcgacagggcc

SEQ ID NO: 308371 - DNA, 75 bp, synthetic construct
  source 1..75: mol_type = other DNA
gtgtacgaacacgagggctggcgaattgaatcgcagctaaccttagctaagaatgtgtatttatcagcaacttac

SEQ ID NO: 308372 - DNA, 75 bp, synthetic construct
  source 1..75: mol_type = other DNA
cattttctggcgacaacaggcctttatcatggacatttggtggtgtaactatgagcgcatatcttcctgctgata

SEQ ID NO: 308373 - DNA, 75 bp, synthetic construct
  source 1..75: mol_type = other DNA
acgacgtgaagcgcggtttgcgaaacggcgttgctccttacatacccgcggccttttgcagggatgccgggagcg

SEQ ID NO: 308374 - DNA, 75 bp, synthetic construct
  source 1..75: mol_type = other DNA
acgacgtgaagcgcggtttgcgaaacggcgttgctccttacataccagcggccttttgccgggatgcccggagcg

SEQ ID NO: 308375 - DNA, 75 bp, synthetic construct
  source 1..75: mol_type = other DNA
ttttgtgggctgttcatttaccctggacagtcagtgcggcaggttgtggctgtctcagcccccggcgacagggtc

SEQ ID NO: 308376 - DNA, 75 bp, synthetic construct
  source 1..75: mol_type = other DNA
atcaacaccattgccagcgataacatcatcaacgccagcgaagcggcggcgggcgtaacggtgtccggcaccagc

SEQ ID NO: 308377 - DNA, 75 bp, synthetic construct
  source 1..75: mol_type = other DNA
tcaggtgcgggtgctggatctggcggggaacaccggcccggtggtgtcgaaaacggtggtggtcgatacgattaa

SEQ ID NO: 308378 - DNA, 75 bp, synthetic construct
  source 1..75: mol_type = other DNA
tgagttcgcgcaaatcagcctcgacggcggcgtcacctggactacgttaaccgtcgttggcaccagctggagcta

SEQ ID NO: 308379 - DNA, 75 bp, synthetic construct
  source 1..75: mol_type = other DNA
ggttacggtctggacgggctgacgctgcgcaccggcggggggtttaaccaggactggcagggcgtcagcgccggg

SEQ ID NO: 308380 - DNA, 75 bp, synthetic construct
  source 1..75: mol_type = other DNA
aatatgattaccgcagtgcccgccagtatgtcaccggcactctgaccgggccggattttgcccggggactggcga

SEQ ID NO: 308381 - DNA, 75 bp, synthetic construct
  source 1..75: mol_type = other DNA
ccggattgcctctcaggccatccatgaaacactgtctgaacctgcagtgctggatgccgtcagcgatgatgtgcg

SEQ ID NO: 308382 - DNA, 75 bp, synthetic construct
  source 1..75: mol_type = other DNA
acgacgtgaagcgcggtttgcgaaacggcgttgctccttacatacccgcggccttttgcggggatgccaggagcg

SEQ ID NO: 308383 - DNA, 75 bp, synthetic construct
  source 1..75: mol_type = other DNA
tggataacttcagcgcagcttcatctctaggggaccccaataccgccaattacaaaggacgctgtgtcagtctgc

SEQ ID NO: 308384 - DNA, 75 bp, synthetic construct
  source 1..75: mol_type = other DNA
tagtatatccccagcggtggctgtggcaacactcatgattttaaagcgctggtaccactcactatttgaggtgac

SEQ ID NO: 308385 - DNA, 75 bp, synthetic construct
  source 1..75: mol_type = other DNA
aaaaataaattacgctttgatgaaatcggccgtaccaaaggtattgaggggcgtcatgccgtggcagaagactat

SEQ ID NO: 308386 - DNA, 75 bp, synthetic construct
  source 1..75: mol_type = other DNA
ggaggaaaatatctaacacatgatttgtcaataaagatagcggatatttctgaagaaataattcagcaagcaata

SEQ ID NO: 308387 - DNA, 75 bp, synthetic construct
  source 1..75: mol_type = other DNA
atccagcgagttgaaagcggtactgaaaagattgccctcaattgtcttctgttactgatcgtcactggattccgt

SEQ ID NO: 308388 - DNA, 75 bp, synthetic construct
  source 1..75: mol_type = other DNA
aacttgcatacctttgatgatcgtaacgatgttgctggtttcattgaagcgtcgtcaggggatggattattcgaa

SEQ ID NO: 308389 - DNA, 75 bp, synthetic construct
  source 1..75: mol_type = other DNA
tgcgactattgctattagcggtaacggcggcggtatggtggaagcggaccatattctggctgctattgaagcgcg

SEQ ID NO: 308390 - DNA, 75 bp, synthetic construct
  source 1..75: mol_type = other DNA
ctgtcaggggttttcgcgcgggctgacaggcggcctccaccgcctgccctgtatcacctgtttctgctgccctga

SEQ ID NO: 308391 - DNA, 75 bp, synthetic construct
  source 1..75: mol_type = other DNA
gccttttgcggggatgccgggagcgcaggccacggcgcgacagaggcggcgcgaccggaacggtcgctgcaagcc

SEQ ID NO: 308392 - DNA, 75 bp, synthetic construct
  source 1..75: mol_type = other DNA
tagcgaagaagaaaatgtacaaaacatctacaaaaaattcaaaaacggtgatcatgatgcaggaatgacagaggt

SEQ ID NO: 308393 - DNA, 75 bp, synthetic construct
  source 1..75: mol_type = other DNA
ccactggatttaataaagaaaactatggatactacaaacgttctggtgagggtttttatagaaaacaacactcat

SEQ ID NO: 308394 - DNA, 75 bp, synthetic construct
  source 1..75: mol_type = other DNA
gcgcctcgaggaggctcggaaaagcttcaccgtgccagactccatctgcagtgaatccgcatcagggattgcaac

SEQ ID NO: 308395 - DNA, 75 bp, synthetic construct
  source 1..75: mol_type = other DNA
cacattagatgtccgaaaaacccagaacaccaacctgaaaacaggtgagggtcttgtcattcttggcgctgaaaa

SEQ ID NO: 308396 - DNA, 75 bp, synthetic construct
  source 1..75: mol_type = other DNA
ttcactgaaaacggcggaaaactcgacctgaatggtcataaccagaccttcaaaaaaattgctgcaacagattcc

SEQ ID NO: 308397 - DNA, 75 bp, synthetic construct
  source 1..75: mol_type = other DNA
aatgagaacaaccaaaatattattgacagatatggcgtagacgttggaaatggaaaaaaagaaatcattggtttt

SEQ ID NO: 308398 - DNA, 75 bp, synthetic construct
  source 1..75: mol_type = other DNA
aaatgtttacattgataatcttgcagggaaaaatattactaataatggttttgacttcaaacaaactatcagtac

SEQ ID NO: 308399 - DNA, 75 bp, synthetic construct
  source 1..75: mol_type = other DNA
acttgtttacggtgctgtatccgggaaacagttctcctggaaggaccagggaatgaacctcaccatgaaggataa

SEQ ID NO: 308400 - DNA, 75 bp, synthetic construct
  source 1..75: mol_type = other DNA
cggagaagccttggctgtggaggttgatgtgtcctgccgtgaacaggtcttttccgcagtggatcaggttgccgt

SEQ ID NO: 308401 - DNA, 75 bp, synthetic construct
  source 1..75: mol_type = other DNA
ggggctaacacttcctcatgaacatctgttcaacgatctttcctctgttgtggatgctccttgctatcctttttc

SEQ ID NO: 308402 - DNA, 75 bp, synthetic construct
  source 1..75: mol_type = other DNA
atgaaattcggtaatgtttattatgataatcccagccatccaaccaatgacacattacactattcctacaatata

SEQ ID NO: 308403 - DNA, 75 bp, synthetic construct
  source 1..75: mol_type = other DNA
tacaatatacaagacatgaatacggccatttctttaattgtcaatgggggcggtttaaacgatcagcaaataaat

SEQ ID NO: 308404 - DNA, 75 bp, synthetic construct
  source 1..75: mol_type = other DNA
tgcgctcggcggctggcgtccggtgaactgtcaccgcccgatacggctgaagcaggacacgtttattggcgaagt

SEQ ID NO: 308405 - DNA, 75 bp, synthetic construct
  source 1..75: mol_type = other DNA
tgcctggccgtggagcaaggcttaaccacctttgaagagttaatccgcgtattggggatgccgcatggcgagtaa

SEQ ID NO: 308406 - DNA, 75 bp, synthetic construct
  source 1..75: mol_type = other DNA
acaacggcttgttgataaaaaaagtcacggcagaaatccagtgggcattaaaacacgatccttattgctgcgctg

SEQ ID NO: 308407 - DNA, 75 bp, synthetic construct
  source 1..75: mol_type = other DNA
acagccaaatagccataggtgatcaagctgtagttacacttaatggtgcaacctttctggataatactcctataa

SEQ ID NO: 308408 - DNA, 75 bp, synthetic construct
  source 1..75: mol_type = other DNA
aactatcgggcttttatcgaaccgaaaagccttggatacaatttttatgcattcatgaatattacattagatctt

SEQ ID NO: 308409 - DNA, 75 bp, synthetic construct
  source 1..75: mol_type = other DNA
tcaaccaatatttataattcccgataaagattgtttttactatgttgaaacgaaaagtgaactatctgaaattta

SEQ ID NO: 308410 - DNA, 75 bp, synthetic construct
  source 1..75: mol_type = other DNA
atccaagcgactggtattttaaaaaaggtgatgctatctggcaaccgttcctgaatgcgttgaaaaaagacgctc

SEQ ID NO: 308411 - DNA, 75 bp, synthetic construct
  source 1..75: mol_type = other DNA
tcggtttagaagatcaacaccaaaagcatataattacagatcatttatattactcgttggtaaacaaatatgcta

SEQ ID NO: 308412 - DNA, 75 bp, synthetic construct
  source 1..75: mol_type = other DNA
gaaggactgaacgcgagaattggcgggagggcatcaaaatattttttgggcatgaatggaaattccccctgttct

SEQ ID NO: 308413 - DNA, 75 bp, synthetic construct
  source 1..75: mol_type = other DNA
ttggaatgtatatcaaaacatagataatatccttgaccaatttgaaaagaacatgatcagcaaaggtctttttga

SEQ ID NO: 308414 - DNA, 75 bp, synthetic construct
  source 1..75: mol_type = other DNA
catggaggccatgaagcacatcaatgactggcttggcgaagaggtgatccgctttaacccttacgcactgttaga

SEQ ID NO: 308415 - DNA, 75 bp, synthetic construct
  source 1..75: mol_type = other DNA
acgatgtggctgcttgtgtgtcttatctggccagcgcagattcagattatatgacaggtcagtcactaattattg

SEQ ID NO: 308416 - DNA, 75 bp, synthetic construct
  source 1..75: mol_type = other DNA
ccccgttctgtttcctcttctcaggttttccccgatacgctgcccgccggtacagaatacggtgccgataacggt

SEQ ID NO: 308417 - DNA, 75 bp, synthetic construct
  source 1..75: mol_type = other DNA
tagcgctcattgcaggtcgaaaagcattagatgtagtaatgcagggtaagattagtgaagccatacatttatgtc

SEQ ID NO: 308418 - DNA, 75 bp, synthetic construct
  source 1..75: mol_type = other DNA
caatgttaagccagcgccgggggccgggcccggctggtggcgacacttgctgcctcccgcaaaggaagccatggt

SEQ ID NO: 308419 - DNA, 75 bp, synthetic construct
  source 1..75: mol_type = other DNA
gccaatgagagagccagagccgccaacggtaaaagaatatatccaaaccgagttcgtcatgtttgggtaagggag

SEQ ID NO: 308420 - DNA, 75 bp, synthetic construct
  source 1..75: mol_type = other DNA
taaccaatatacagtgactatgtttgttgatattcggaaaagctcaaggctgtctctgctacttccgttggatca

SEQ ID NO: 308421 - DNA, 75 bp, synthetic construct
  source 1..75: mol_type = other DNA
gggcttctatctgtatttcccacagcgtcgcaatattgcaccaaagctccgcgccctgattgactacgtcaaaga

SEQ ID NO: 308422 - DNA, 75 bp, synthetic construct
  source 1..75: mol_type = other DNA
gctatcggaacccaactgggctgaatgggcaaacaccatcaggctgatgcgtgtccaggacaaacgtactcacta

SEQ ID NO: 308423 - DNA, 75 bp, synthetic construct
  source 1..75: mol_type = other DNA
tttttatcaactcatcctgaagctgcggtctacacaccatccggtgcgaagtggggctctgctgaagacctcgag

SEQ ID NO: 308424 - DNA, 75 bp, synthetic construct
  source 1..75: mol_type = other DNA
tcgggtcacaggggctgcgtcacacacccggtgacatcattgaaatctgtgataacgactatgccgggaccatga

SEQ ID NO: 308425 - DNA, 75 bp, synthetic construct
  source 1..75: mol_type = other DNA
gtacgggtgagtgcagccttcaacaacttgctgcttccgggaacgttgagcgccttgaaggcgaaaatgtgcgtg

SEQ ID NO: 308426 - DNA, 75 bp, synthetic construct
  source 1..75: mol_type = other DNA
atgaaagaatataaagagatattgaataataaaaaaaagctatttgttacattgttggctcgtacaaaaatttcc

SEQ ID NO: 308427 - DNA, 75 bp, synthetic construct
  source 1..75: mol_type = other DNA
ctggatatccgcatcccgtatgccacagacccggcaggtaaccgcctgcccgacccggagctgcacccggacagc

SEQ ID NO: 308428 - DNA, 75 bp, synthetic construct
  source 1..75: mol_type = other DNA
atgacgtcaggggtggtaaacgctattactgcatatcatcaggaattgctgcagcttatgtactgcgataaccct

SEQ ID NO: 308429 - DNA, 75 bp, synthetic construct
  source 1..75: mol_type = other DNA
cagccattgcacattgtcgagccagtgtgtacgaagccccctctgtaaagaaaacgtactaccagtgccagaatc

SEQ ID NO: 308430 - DNA, 75 bp, synthetic construct
  source 1..75: mol_type = other DNA
taccagtcgaaccggagcaacctgaaaagcagcagaaaacgctcaatcgctatggctccgcgtcaaagctgtcag

SEQ ID NO: 308431 - DNA, 75 bp, synthetic construct
  source 1..75: mol_type = other DNA
gtaaaacaacagcaaacgctcaatcgctatggctccgcgtcaaaactgtcaagccgtcagcagattcctgtctga

SEQ ID NO: 308432 - DNA, 75 bp, synthetic construct
  source 1..75: mol_type = other DNA
aataaagttggtttactggataactcgcggatgaaaagcgatacccagtgggtgattgattcgatgcgggtaaaa

SEQ ID NO: 308433 - DNA, 75 bp, synthetic construct
  source 1..75: mol_type = other DNA
cctgcgcctggttaccaaattacaaattattaacgataactttggtctgaatttgacctatgccacgctggctgc

SEQ ID NO: 308434 - DNA, 75 bp, synthetic construct
  source 1..75: mol_type = other DNA
aataggttttgattgttcccatttgttttttggatacgctaataaattgcatattgaaaatccagttaagaaaac

SEQ ID NO: 308435 - DNA, 75 bp, synthetic construct
  source 1..75: mol_type = other DNA
actccgaggatacttttgattactggatagaaaaaggctgtaatattaatcacactgaccatgatggtaaatcag

SEQ ID NO: 308436 - DNA, 75 bp, synthetic construct
  source 1..75: mol_type = other DNA
ttgagcttgaaagggctgagagggctttgttaggaatgaaatcctcaacgtcattagatgaatttgaggaatatt

SEQ ID NO: 308437 - DNA, 75 bp, synthetic construct
  source 1..75: mol_type = other DNA
agtgaggaaaactgccagctactacaacacatagccgatcgcatcgctattgccgttggcaatgccgatgcctag

SEQ ID NO: 308438 - DNA, 75 bp, synthetic construct
  source 1..75: mol_type = other DNA
gagaaatcctcttgtctgattctggttcttgaccggtcaatgtcatcggtgcgcattgaaccgccccgggtttcc

SEQ ID NO: 308439 - DNA, 75 bp, synthetic construct
  source 1..75: mol_type = other DNA
gtgggcaggcaccggttttggccacctggcgataccgcgtgtgggtcaggaggtgattgtggacttcctcaacgg

SEQ ID NO: 308440 - DNA, 75 bp, synthetic construct
  source 1..75: mol_type = other DNA
aatttaatgacggtgatgatgaagatacgccgatgtggtcgcgttattacaatttgttttacaccaaacgtggca

SEQ ID NO: 308441 - DNA, 75 bp, synthetic construct
  source 1..75: mol_type = other DNA
ttcaaagatttaatctcgcaaagcaaaggtcacgccctctgcactgccctgaaaatgttcgaccgaacacgaggc

SEQ ID NO: 308442 - DNA, 75 bp, synthetic construct
  source 1..75: mol_type = other DNA
gttccattgcccaaagattggctgtacaccggagactctgcgtgtctggggacgccagcatgagcgggataccgg

SEQ ID NO: 308443 - DNA, 75 bp, synthetic construct
  source 1..75: mol_type = other DNA
ttggtggtggtgctaaaataaagagaaaagaaactatcgagaagtcaaagaaagatagggataaggtttatgtac

SEQ ID NO: 308444 - DNA, 75 bp, synthetic construct
  source 1..75: mol_type = other DNA
gtttgcaaaggccaatggctataaagatacaaaagaagccaagaaaaaactgcctgatacatttgatgatgaatt

SEQ ID NO: 308445 - DNA, 75 bp, synthetic construct
  source 1..75: mol_type = other DNA
tggcgcgatagcgacgctggacggcgtacagactaatagcggcattattgatgatgatggctcgctctatatgtc

SEQ ID NO: 308446 - DNA, 75 bp, synthetic construct
  source 1..75: mol_type = other DNA
atgatgacaagaaatttaatgagatgcttaagaaacacgccaatagtgtttctcaagctgtgagaagtagtcaaa

SEQ ID NO: 308447 - DNA, 75 bp, synthetic construct
  source 1..75: mol_type = other DNA
acagcaggggcattaaactaccagggtgcagcactcaatactggcatcatggatgataagggcaacaagggtaat

SEQ ID NO: 308448 - DNA, 75 bp, synthetic construct
  source 1..75: mol_type = other DNA
tagatattacgggtgattcttccggtttacagcgtgctttaaggtctggtactgaatcattagaggaatttggta

SEQ ID NO: 308449 - DNA, 75 bp, synthetic construct
  source 1..75: mol_type = other DNA
gagggctgtgtctttccgttttcatggagaaacagcaattggttctttaggaagagtgtcagaactagtagtagc

SEQ ID NO: 308450 - DNA, 75 bp, synthetic construct
  source 1..75: mol_type = other DNA
gcttttgattctggaggtaaaccgattgctgttttacctgaatctggttctgcttcagatgttttaattgagctg

SEQ ID NO: 308451 - DNA, 75 bp, synthetic construct
  source 1..75: mol_type = other DNA
tggtgcaggttgttgacctgagcgaaaacatcactgaattaacactggacacagattacacggtgacaggtgctg

SEQ ID NO: 308452 - DNA, 75 bp, synthetic construct
  source 1..75: mol_type = other DNA
gctggcggtttcggtacggcaatgacaggtttagcgggggctgctgcaattggtattggtggccttactgcactg

SEQ ID NO: 308453 - DNA, 75 bp, synthetic construct
  source 1..75: mol_type = other DNA
gacgtcgctcagctgattgaggtgtgcgctggaatgctggggcgctttcctgaatggctatctccatcattcaac

SEQ ID NO: 308454 - DNA, 75 bp, synthetic construct
  source 1..75: mol_type = other DNA
gaagggtttcacgcgggatgagtacgacgcggttgcggatgacttcctggcgaaacaggctgcgagaagggctaa

SEQ ID NO: 308455 - DNA, 75 bp, synthetic construct
  source 1..75: mol_type = other DNA
ttgcaggtgatgataagaaattcaatgaaatgttgaagaagcacgctaatagcgttactcaggccgtaagaagca

SEQ ID NO: 308456 - DNA, 75 bp, synthetic construct
  source 1..75: mol_type = other DNA
cagcagctattggcggcgtttagcggtcttgggcttgaaatggataagtttggggatttcaacaaggatacgctc

SEQ ID NO: 308457 - DNA, 75 bp, synthetic construct
  source 1..75: mol_type = other DNA
caggtttagcgggggctgctgcaattggtattggtggccttactgcactggtcaattcaagccgcgaatatgtgc

SEQ ID NO: 308458 - DNA, 75 bp, synthetic construct
  source 1..75: mol_type = other DNA
tattgggccaactaatacaatcgcttccgcaacgattgttaactttttccagagtcatgctaataactatccaga

SEQ ID NO: 308459 - DNA, 75 bp, synthetic construct
  source 1..75: mol_type = other DNA
actaaatcagtaagttggcagcatcacctgaaccagtcactctcttcgctcttttccctcgatctctccctggtc

SEQ ID NO: 308460 - DNA, 75 bp, synthetic construct
  source 1..75: mol_type = other DNA
gaccatccgctccaaaacatatatgggcagcgggtttaacgagctgaagtttgacgatgcgacagggaaagaaca

SEQ ID NO: 308461 - DNA, 75 bp, synthetic construct
  source 1..75: mol_type = other DNA
gcgaacctgaaccgggaatggcaggtggtggcaagtgaactgcacggcgaacagccacaggcggtgccaggacgg

SEQ ID NO: 308462 - DNA, 75 bp, synthetic construct
  source 1..75: mol_type = other DNA
tggctgaggatagtggtgctggcctggtgggttatgacgactctgagtcttatcaggatggtactgttggaagtg

SEQ ID NO: 308463 - DNA, 75 bp, synthetic construct
  source 1..75: mol_type = other DNA
cgggaaataccagaatcggacgacaggtcaacacaaaggcattcgagccaatcccagcacgggtcagtccgatcc

SEQ ID NO: 308464 - DNA, 75 bp, synthetic construct
  source 1..75: mol_type = other DNA
gggaggccctaatcgcccggaagagcgcaggctgataccttgcgtagaagcgctgagtcagatgagtttattgcc

SEQ ID NO: 308465 - DNA, 75 bp, synthetic construct
  source 1..75: mol_type = other DNA
ttccacaacaggcgagaagctggcattcggctccaatgccttcctacacttctacaagttacatgcatccttaaa

SEQ ID NO: 308466 - DNA, 75 bp, synthetic construct
  source 1..75: mol_type = other DNA
cagcattcaaggaattgaaggcggacagtttgttaatatccatctgtttggtactaagtatggttttcgtggccg

SEQ ID NO: 308467 - DNA, 75 bp, synthetic construct
  source 1..75: mol_type = other DNA
tgcttcagatgttttaattgagctggcaaataacggtgataaaaaaattggtagctcatatggaggcacagttta

SEQ ID NO: 308468 - DNA, 75 bp, synthetic construct
  source 1..75: mol_type = other DNA
cagaccgccgctctgcgtgattctcttagcgataaacctgcaaaaaatattattttgctgattggcgatggtatg

SEQ ID NO: 308469 - DNA, 75 bp, synthetic construct
  source 1..75: mol_type = other DNA
tgaaacggcaaccgctggtgaatggcagggaaaaacgctgcgtgaacaggcgcaggcgcgtggttatcagttggt

SEQ ID NO: 308470 - DNA, 75 bp, synthetic construct
  source 1..75: mol_type = other DNA
ttgactggagtgatgcaaatcttgccgggagtttgattgggcagaagctggcgatcaatgaatttgtcgcttatc

SEQ ID NO: 308471 - DNA, 75 bp, synthetic construct
  source 1..75: mol_type = other DNA
gacgttgaccagcgaccttgaacggcttggcgcgctggaaagtgccgggggattcgcttacctggctgaatgcag

SEQ ID NO: 308472 - DNA, 75 bp, synthetic construct
  source 1..75: mol_type = other DNA
attctgctggaagtcgaacggctacacagtcatttgcttaaccttggcctctcctgccatttcgttggttttgat

SEQ ID NO: 308473 - DNA, 75 bp, synthetic construct
  source 1..75: mol_type = other DNA
tatctttattatcaacatgatggctggcttccagtcctgtttggcaacgacgagcggacacttaacggtcattac

SEQ ID NO: 308474 - DNA, 75 bp, synthetic construct
  source 1..75: mol_type = other DNA
ctaatacagcagagaaaaaagaagctgtttcccagacgggggaaaatgcatctgctgatgaattatccgcaatac

SEQ ID NO: 308475 - DNA, 75 bp, synthetic construct
  source 1..75: mol_type = other DNA
attctgctggaagtcgaacggctacacagtcatttgctcaaccttggcctctcctgccattttgttggttttgat

SEQ ID NO: 308476 - DNA, 75 bp, synthetic construct
  source 1..75: mol_type = other DNA
acctacggtctgaatctgattggtggtgttcgccgcgatattctcaaagagcaacgtctgcaaacgctgaaactg

SEQ ID NO: 308477 - DNA, 75 bp, synthetic construct
  source 1..75: mol_type = other DNA
tgctggaatttgccctcgacaacatgccggataccccactgctgaccgaaggctttagctataaacctcacgcat

SEQ ID NO: 308478 - DNA, 75 bp, synthetic construct
  source 1..75: mol_type = other DNA
tcggcatcagtaaacagcatctgtcttctgaaaagcgctctggacatcgccttcaatgaagaagggaaacaaatt

SEQ ID NO: 308479 - DNA, 75 bp, synthetic construct
  source 1..75: mol_type = other DNA
gaaaacacttctttaaagctgttggtgatgagctcaaaaatttgcgactagttttaaacgagtcgcaaaatgagg

SEQ ID NO: 308480 - DNA, 75 bp, synthetic construct
  source 1..75: mol_type = other DNA
aacgccttgccgatcagttcgcactgaagaagcaggcgttcattgatgcgcttgtcatggcaggaacgtcacctg

SEQ ID NO: 308481 - DNA, 75 bp, synthetic construct
  source 1..75: mol_type = other DNA
tttaacggttcgggacgcgtgagggcagcgaaagacggcagcaacgcgccacatgattcatggcggcttccggtc

SEQ ID NO: 308482 - DNA, 75 bp, synthetic construct
  source 1..75: mol_type = other DNA
gtggattacctggctgatacggaaccgacaggaggcagaaaacactatccgtcagtgcctggataagtggcagcc

SEQ ID NO: 308483 - DNA, 75 bp, synthetic construct
  source 1..75: mol_type = other DNA
tgccttacccgccaacggtgaacacttactggcgacgtcgtgacctggacaacattctgaaagcgccactggatg

SEQ ID NO: 308484 - DNA, 75 bp, synthetic construct
  source 1..75: mol_type = other DNA
cagaaacgatgctgatggggattaacaggaagaatcgcaacgttaatgattacaaccgcgctatcagcggtaact

SEQ ID NO: 308485 - DNA, 75 bp, synthetic construct
  source 1..75: mol_type = other DNA
gatgtcagcgtgaaagaggcggacggttcggtaaccacctatctggtgccttatgcagcggtaccaaatatgctg

SEQ ID NO: 308486 - DNA, 75 bp, synthetic construct
  source 1..75: mol_type = other DNA
gttgatatgacagagaagctcgacgatccggtagagctgctgtttggcgtgcagctgggcggcggcaccgacatc

SEQ ID NO: 308487 - DNA, 75 bp, synthetic construct
  source 1..75: mol_type = other DNA
gcggtaagcggcgctcttaatcgtgcggtacgtaatcgtcgcccgcgccacgcggaaattgactggcagcgcacc

SEQ ID NO: 308488 - DNA, 75 bp, synthetic construct
  source 1..75: mol_type = other DNA
tgagcaagaaactgggtggacttggtgtggtcattgtcgattacctccagaagatgcgcatgtctgaccctgaga

SEQ ID NO: 308489 - DNA, 75 bp, synthetic construct
  source 1..75: mol_type = other DNA
ggcgttgacatggcgactgacgcgattgaggggctgactgaggaccacttcacagcaacgcctcacaaggtggct

SEQ ID NO: 308490 - DNA, 75 bp, synthetic construct
  source 1..75: mol_type = other DNA
cattgatgatctgagtccgtcaggttacggcagcgatcttattgttactgtcgaagaatccgatggctcaaagcg

SEQ ID NO: 308491 - DNA, 75 bp, synthetic construct
  source 1..75: mol_type = other DNA
agcaagtggcagaaatacttagcaagcaaaaagttagcgagcaaggtaaaatgattcaatcattaaagaacaacg

SEQ ID NO: 308492 - DNA, 75 bp, synthetic construct
  source 1..75: mol_type = other DNA
attatttgtatttggttttagtacctgtggcagaagtattccgctctcgatttcctgaaggctcagcaccattta

SEQ ID NO: 308493 - DNA, 75 bp, synthetic construct
  source 1..75: mol_type = other DNA
cgcacccgtgaaattaccactctgcgtgccataggcctgaagccgcttcacgtcacgcgcttgtttctgacagaa

SEQ ID NO: 308494 - DNA, 75 bp, synthetic construct
  source 1..75: mol_type = other DNA
tattccccggcatgatggccgccgccattcgtaaggaagatgtgaatctgtgggctgcgcaaaatggcgtagtga

SEQ ID NO: 308495 - DNA, 75 bp, synthetic construct
  source 1..75: mol_type = other DNA
ggggcaaatccacccagagcattactaacctgaacaatcaggtcactaatctggatactcgcgttactaatatcg

SEQ ID NO: 308496 - DNA, 75 bp, synthetic construct
  source 1..75: mol_type = other DNA
agcgctggggaacggcaatggagcacacctcgacacccttgcgcctcacgtctggggcctagtggcatgggagcg

SEQ ID NO: 308497 - DNA, 75 bp, synthetic construct
  source 1..75: mol_type = other DNA
ctggtgcatatgctttccaaacattggcatgctaagccaaaaacctatgtgatgactattagtccggttgaagaa

SEQ ID NO: 308498 - DNA, 75 bp, synthetic construct
  source 1..75: mol_type = other DNA
tccgagctgaacatgacgaaaagatgttggaagcttcattttggcaaacaactgattataaagctcttctcgaat

SEQ ID NO: 308499 - DNA, 75 bp, synthetic construct
  source 1..75: mol_type = other DNA
tccctattcccatttcaccggaaggtacaccagtaaaattcatcaaaaaagaggttttggcttacttctggcggg

SEQ ID NO: 308500 - DNA, 75 bp, synthetic construct
  source 1..75: mol_type = other DNA
gaaaagctaaacgcttttaatcaacattatcattttgctattcatgcactggcatcccgagagcgctggttacgt

SEQ ID NO: 308501 - DNA, 75 bp, synthetic construct
  source 1..75: mol_type = other DNA
ggcggctgaaagaatatcgccgcatcgccacgcgttacgacaaaacggcgagaaattacctggcgatagtgaaac

SEQ ID NO: 308502 - DNA, 75 bp, synthetic construct
  source 1..75: mol_type = other DNA
gaaatttgccgatacaggcaaagcctatctggtcgggctggcagtcaccgacgatccggccagtctcggcaccga

SEQ ID NO: 308503 - DNA, 75 bp, synthetic construct
  source 1..75: mol_type = other DNA
taccggtggcgatcctctacctggcgttacaaaaatacttcgtctccggcctgacctcgggcagcactaaaggat

SEQ ID NO: 308504 - DNA, 75 bp, synthetic construct
  source 1..75: mol_type = other DNA
cagcgttagctttaccgcctatgccttctcgcgttttcgctttaaggggcggcagaacggactgatgctcttcct

SEQ ID NO: 308505 - DNA, 75 bp, synthetic construct
  source 1..75: mol_type = other DNA
atcgcttaactgacaaaattacctttcctattatgaatgcagaaaagaaaaagcaaaccctgataaatttggcga

SEQ ID NO: 308506 - DNA, 75 bp, synthetic construct
  source 1..75: mol_type = other DNA
ccggaagatattctgcgctggaccgatggtaacgcgttaatcgccaccggcagcccgttcgagccggtaagccac

SEQ ID NO: 308507 - DNA, 75 bp, synthetic construct
  source 1..75: mol_type = other DNA
tcgttgtacaccgcctgcggtggtattaagccgtcgcatacgctgccaatcttattggatgcgggaacgaacaat

SEQ ID NO: 308508 - DNA, 75 bp, synthetic construct
  source 1..75: mol_type = other DNA
tgctctatattccgtattcaggcccggtattactggaatctccgctgctgaataaaggcagcggattcactgaaa

SEQ ID NO: 308509 - DNA, 75 bp, synthetic construct
  source 1..75: mol_type = other DNA
ggatattataattcatggcatcctgtcattatggcttggtggtggagagttcttggttatataacagatggtccg

SEQ ID NO: 308510 - DNA, 75 bp, synthetic construct
  source 1..75: mol_type = other DNA
ccgttgaacgcggagaggatgacggcgcgatgtacgtcgatatgaccggcacgcgttcggcatcaggccagcctt

SEQ ID NO: 308511 - DNA, 75 bp, synthetic construct
  source 1..75: mol_type = other DNA
gaccctatagtaaaaatagaacccgttgacatcaaaggatttgatggtgcattaattgccaatgaagcacgaagc

SEQ ID NO: 308512 - DNA, 75 bp, synthetic construct
  source 1..75: mol_type = other DNA
tatgcttattggtttagttatctgtgctgcaggttttttatttttccaaaaaacaaaaaaaggatttgccgatgt

SEQ ID NO: 308513 - DNA, 75 bp, synthetic construct
  source 1..75: mol_type = other DNA
aagcgggtgttcaacttatatagaaaagtcatttcacctgattataaaaaaggcgtaatgcctgattttgagtag

SEQ ID NO: 308514 - DNA, 75 bp, synthetic construct
  source 1..75: mol_type = other DNA
ccatttttgaaattcagccataacaggagattcatttatctaaaagatgattttggcagtttcaaattttggcga

SEQ ID NO: 308515 - DNA, 75 bp, synthetic construct
  source 1..75: mol_type = other DNA
gaatctcatcagtggaaagggtttgatatagaagtacagttaagaactaaactccaacatttatgggccactaca

SEQ ID NO: 308516 - DNA, 75 bp, synthetic construct
  source 1..75: mol_type = other DNA
gttcaattaggaatgtttttgggctttttctttatgagattgtataaaagagtgtattttggggcgattaaattg

SEQ ID NO: 308517 - DNA, 75 bp, synthetic construct
  source 1..75: mol_type = other DNA
caagagagttgcgattttttaatgttgttcttgtacttgttgtcttttcgttttcgcttcctcatttttttattg

SEQ ID NO: 308518 - DNA, 75 bp, synthetic construct
  source 1..75: mol_type = other DNA
tgtttttattcccaacaaattaagtgataattatattgattcaatagataaatacccttttttgtatttcccatg

SEQ ID NO: 308519 - DNA, 75 bp, synthetic construct
  source 1..75: mol_type = other DNA
tcacccgttcggtgctgtccatgatgacagaaatcctgcttaaacaggccatggtgggcattgtcgggcgtatcg

SEQ ID NO: 308520 - DNA, 75 bp, synthetic construct
  source 1..75: mol_type = other DNA
atcacgtggtgattcagaacgacggcaccaacggacaggcggggccgcagctgatgaaggcggtgtatgacatgg

SEQ ID NO: 308521 - DNA, 75 bp, synthetic construct
  source 1..75: mol_type = other DNA
gtaattctgtggcaagaggttctttgcgtcaaaattctatctatgcaggtattccctgtaagtttattaaagaaa

SEQ ID NO: 308522 - DNA, 75 bp, synthetic construct
  source 1..75: mol_type = other DNA
aatgataagagtgcttgcgttcgagctacggcaatcgagtcaacggccagggaaagatcatcaaaagttcacttt

SEQ ID NO: 308523 - DNA, 75 bp, synthetic construct
  source 1..75: mol_type = other DNA
aaacttcagctattagatgccagtaatcccagactgaccgtgagtaagcaacggaatgctatcacacagcaacta

SEQ ID NO: 308524 - DNA, 75 bp, synthetic construct
  source 1..75: mol_type = other DNA
gcccgacggcaggcagcacgctgtggctgcatctggcggaaaatcagctgcatctttttgatggtgaaacaggac

SEQ ID NO: 308525 - DNA, 75 bp, synthetic construct
  source 1..75: mol_type = other DNA
gctattttatgaggaatctaaggataatgaacctttagcgaatatacattttcaagcaataggttctggtttttt

SEQ ID NO: 308526 - DNA, 75 bp, synthetic construct
  source 1..75: mol_type = other DNA
tgccagtaatgatccgcagctgagacatatcgataaaattcttgtaaacaaaaacaggaattatgaaattttata

SEQ ID NO: 308527 - DNA, 75 bp, synthetic construct
  source 1..75: mol_type = other DNA
tataaacaatggggtaaacaatatgtaagatttaatgtgaatttgaaaaatcaggacacaaataatagttcattt

SEQ ID NO: 308528 - DNA, 75 bp, synthetic construct
  source 1..75: mol_type = other DNA
acggaatgctatcacacagcaactaatcgacaatcttattaaagggttactacaaactatgccatatgccagcaa

SEQ ID NO: 308529 - DNA, 75 bp, synthetic construct
  source 1..75: mol_type = other DNA
ctcgggtcaatcggtaaagaggtcgttgtaaaaaacaccttctttactgcgtatgcgttggctgatgagggcgat

SEQ ID NO: 308530 - DNA, 75 bp, synthetic construct
  source 1..75: mol_type = other DNA
gcaagtgatatctacaaatactatgcgaactcagcagaggccgcatttgcttatggggataacattgttggcaac

SEQ ID NO: 308531 - DNA, 75 bp, synthetic construct
  source 1..75: mol_type = other DNA
aatgaaaccaccggtggagacagtggttccggtttctatctgtatgataacgtaaaaaaagaatgggttatgctt

SEQ ID NO: 308532 - DNA, 75 bp, synthetic construct
  source 1..75: mol_type = other DNA
actcagatacgtaagcaaacagccactcatcgggataaccgcgaacatgatgattttgccgatgatagcttatcg

SEQ ID NO: 308533 - DNA, 75 bp, synthetic construct
  source 1..75: mol_type = other DNA
ttgccttggttggctggcaatgcattaccgcaacgctgctgctgagcagaaaaccagagccgatagcgctgagca

SEQ ID NO: 308534 - DNA, 75 bp, synthetic construct
  source 1..75: mol_type = other DNA
acaacaagccatgcacgatatggcgtaagggagcgggcggtaatgacgagtggggcgatcctgtcgacccatacg

SEQ ID NO: 308535 - DNA, 75 bp, synthetic construct
  source 1..75: mol_type = other DNA
ttcatattgataaacaccgcgtttgtatcggtttatccccgctggcgcggggaacacaaatatggggagcgccgt

SEQ ID NO: 308536 - DNA, 75 bp, synthetic construct
  source 1..75: mol_type = other DNA
tatccccgctggcgcggggaacacactactgtcggtagctgggaggatgaggagatcggtttatccccgctggcg

SEQ ID NO: 308537 - DNA, 75 bp, synthetic construct
  source 1..75: mol_type = other DNA
aacacgaaacgccggttgaacgtcgtgcaaaaatcatcggtttatccccgctggcgcggggaacacgactggtac

SEQ ID NO: 308538 - DNA, 75 bp, synthetic construct
  source 1..75: mol_type = other DNA
tatcaaaaaaaatatcattcagtctgctgctcttactttccccattcgcattaatattttttagttataataatg

SEQ ID NO: 308539 - DNA, 75 bp, synthetic construct
  source 1..75: mol_type = other DNA
aggttcccgtgtggatgcgacctctgttgccgttgctctgcaataccggtggtaatgatccggaggaacttctga

SEQ ID NO: 308540 - DNA, 75 bp, synthetic construct
  source 1..75: mol_type = other DNA
ctacgttcggcaacggttgtaggcatgataagacgcgcaagcgtcgcatcaggcatcgtgcaccgattgccggat

SEQ ID NO: 308541 - DNA, 75 bp, synthetic construct
  source 1..75: mol_type = other DNA
ccgctggcgcggggaacactttactacaataggtggacacgctacggcgcacggtttatccccgctggcgcgggg

SEQ ID NO: 308542 - DNA, 75 bp, synthetic construct
  source 1..75: mol_type = other DNA
ctggcgcggggaactccagggttgcgcgatgccgtgaaggcaacagagcggtttatccccgctggcgcggggaac

SEQ ID NO: 308543 - DNA, 75 bp, synthetic construct
  source 1..75: mol_type = other DNA
tctttacatcatccgcagctatataaaaattaggcggtttatccccgctggcgcggggaactctaatcacgtttt

SEQ ID NO: 308544 - DNA, 75 bp, synthetic construct
  source 1..75: mol_type = other DNA
tttttaagccagtcacaatctaccaactttacagtatcacacaaacaacacatccattatgttaaagagtacttt

SEQ ID NO: 308545 - DNA, 75 bp, synthetic construct
  source 1..75: mol_type = other DNA
gttagaaaaggaaacatcgcgccttaaagcattgtttaatatacgctcccctgatggtttttatgctcatcctat

SEQ ID NO: 308546 - DNA, 75 bp, synthetic construct
  source 1..75: mol_type = other DNA
aatgcggtttatccccgctggcgcggggaactcattaaaggattattttgatgagtctgaaaaatcggtttatcc

SEQ ID NO: 308547 - DNA, 75 bp, synthetic construct
  source 1..75: mol_type = other DNA
aaacttactggtcttgatgaaatagagtatgctggggttgttaaaattataaaaaaagatcagtctgaagctgat

SEQ ID NO: 308548 - DNA, 75 bp, synthetic construct
  source 1..75: mol_type = other DNA
attgaaatagatttcaaaggcgaaattgtcaacaaatggacgttctccactgacaataacaacaccaaaacgggc

SEQ ID NO: 308549 - DNA, 75 bp, synthetic construct
  source 1..75: mol_type = other DNA
gcagtggagatactttatgtataacaatcagttcaatgcaacaactttcattccagttgtagggctgtttactgg

SEQ ID NO: 308550 - DNA, 75 bp, synthetic construct
  source 1..75: mol_type = other DNA
ttgcctgaatgaatcgattatcgcgccttgggcgtctttactgaatcgggaggaaacatgcaccgctatgtcatc

SEQ ID NO: 308551 - DNA, 75 bp, synthetic construct
  source 1..75: mol_type = other DNA
tgcggtgatcccggcagacagaacatggcgaccacagccgttgctgaaaccgctggtggacggcccgcagagcgc

SEQ ID NO: 308552 - DNA, 75 bp, synthetic construct
  source 1..75: mol_type = other DNA
gagtacaacattggcaagactttctagggttgcttattcttcaactcaggacagaaaaaaagaacagatagccaa

SEQ ID NO: 308553 - DNA, 75 bp, synthetic construct
  source 1..75: mol_type = other DNA
atgtttgaagtaattattacttctgacatgccttgctttttttttgggagccatggaatgatcatcgaaaaagtc

SEQ ID NO: 308554 - DNA, 75 bp, synthetic construct
  source 1..75: mol_type = other DNA
ctccgccattcagaaactgaccggaaccggggcggaacttggtttcacgccagcccacgaacgtttccacctggc

SEQ ID NO: 308555 - DNA, 75 bp, synthetic construct
  source 1..75: mol_type = other DNA
atgtgtgagtcatatatggcagaactccttcgccaccgctgggggcgtctgcgcttatatcgtttccccggttat

SEQ ID NO: 308556 - DNA, 75 bp, synthetic construct
  source 1..75: mol_type = other DNA
acccgcttaggtgagccggacacccggactacactggacagtggcaatgaagaatggatttattcaatgaataac

SEQ ID NO: 308557 - DNA, 75 bp, synthetic construct
  source 1..75: mol_type = other DNA
aaataagatacttttatcatttggcttcaaaaattttagccttgcaccgacatccgattcgtttagctatagaat

SEQ ID NO: 308558 - DNA, 75 bp, synthetic construct
  source 1..75: mol_type = other DNA
gaatatagatgaagcaaaaagaaaattggctgaattaagtacacctgtcgctatgacaggacttctagagcctgg

SEQ ID NO: 308559 - DNA, 75 bp, synthetic construct
  source 1..75: mol_type = other DNA
aaaaaccagataaagcaggtaatccctcatcctggattaaagccatgctgacttcacacattaagtttgttttac

SEQ ID NO: 308560 - DNA, 75 bp, synthetic construct
  source 1..75: mol_type = other DNA
cgccggagatatggccgggacggcgaattgtgctgacggggcatccgcaggcgaacctgaaccgggaatggcagg

SEQ ID NO: 308561 - DNA, 75 bp, synthetic construct
  source 1..75: mol_type = other DNA
gcaggttaatggtgactcactgttgattaactggaactgtgcagcctcgaaatccccaccgaagacccctgatga

SEQ ID NO: 308562 - DNA, 75 bp, synthetic construct
  source 1..75: mol_type = other DNA
tctatgtttcagcggatggtaattttactactgacgctgaaactaaagctgcaaccaccgccgatccactgaaag

SEQ ID NO: 308563 - DNA, 75 bp, synthetic construct
  source 1..75: mol_type = other DNA
gacaggaatcgccagattacccgttacagcgatacccgctggcatgaagattccgtgcgtaaccgctggttcagc

SEQ ID NO: 308564 - DNA, 75 bp, synthetic construct
  source 1..75: mol_type = other DNA
aaaccctggcatctggtcggtatttatgcaacggaggatggcgcaaagtctaaacgctctgaattgaatggggag

SEQ ID NO: 308565 - DNA, 75 bp, synthetic construct
  source 1..75: mol_type = other DNA
gccgatcattatggggcgcacctaccaccaggaaaaccgcacccccggcagctgccgggaacaaagacgcagatg

SEQ ID NO: 308566 - DNA, 75 bp, synthetic construct
  source 1..75: mol_type = other DNA
ggaacggacgtactatgttaattgttcataatgagctttgtcatcgagcaggcttttcgattgattggcatagaa

SEQ ID NO: 308567 - DNA, 75 bp, synthetic construct
  source 1..75: mol_type = other DNA
cggtgcgttgggcaagttaggcgcggcgcggcccggcccggattgcgtttacccggctgtattgatgcttttgag

SEQ ID NO: 308568 - DNA, 75 bp, synthetic construct
  source 1..75: mol_type = other DNA
actgacataaagcgactaactgacatggctgaatactttattctaaatgtaaataaagactttcactttgataag

SEQ ID NO: 308569 - DNA, 75 bp, synthetic construct
  source 1..75: mol_type = other DNA
cagtgttgttaaatgggttgttctggctgaagttctggtcggtgcggtcatgtacatgatgaccaaaaacgtcaa

SEQ ID NO: 308570 - DNA, 75 bp, synthetic construct
  source 1..75: mol_type = other DNA
gttggttccttatccgcgtttttttgccagtctggcaggctttgttacggcaggtgtgacgctaccatttgttaa

SEQ ID NO: 308571 - DNA, 75 bp, synthetic construct
  source 1..75: mol_type = other DNA
tgatgctgggaaggctggagcgggagctgcgtgcgggagcggtgagtgcggagagtgaggcatggcttgcgcagt

SEQ ID NO: 308572 - DNA, 75 bp, synthetic construct
  source 1..75: mol_type = other DNA
gagcatgccgacgggagcatcacccgcagcgagtatgatgaggcggggaggctgaaggcgcagacggatgcggcg

SEQ ID NO: 308573 - DNA, 75 bp, synthetic construct
  source 1..75: mol_type = other DNA
gggctggcaacgcgatcggttagctgaccttgagcggatgctgatgcttctggacggaaaaccggttcccgacaa

SEQ ID NO: 308574 - DNA, 75 bp, synthetic construct
  source 1..75: mol_type = other DNA
ttatgacgagaatactcgctgcgataacccttttgctgagtatcgtattgaccattttggtcactattttttgtt

SEQ ID NO: 308575 - DNA, 75 bp, synthetic construct
  source 1..75: mol_type = other DNA
gctggaagcgggttacggttttgccctgaataaatcctttggtctggaagcggcgaaatatacgtggatcttcca

SEQ ID NO: 308576 - DNA, 75 bp, synthetic construct
  source 1..75: mol_type = other DNA
cggcgatgcgctcaatcgtcagcgcgaagcctttatggcccgctggattggatgggcgatgcagcaaaataatgg

SEQ ID NO: 308577 - DNA, 75 bp, synthetic construct
  source 1..75: mol_type = other DNA
tactcagatctattctggtggtacgcaaattgttgattacactagcacctcggatgttattgaaatttattccgg

SEQ ID NO: 308578 - DNA, 75 bp, synthetic construct
  source 1..75: mol_type = other DNA
atcgtattcaagcgacctgagctggtcgataagctgaacgacatcatcgcccgacactatccgggagcattggca

SEQ ID NO: 308579 - DNA, 75 bp, synthetic construct
  source 1..75: mol_type = other DNA
acaggcaaagcgctccctcgcacaattcaatatcgaactttccaggttaactcatcaatctgcacatcgcgctaa

SEQ ID NO: 308580 - DNA, 75 bp, synthetic construct
  source 1..75: mol_type = other DNA
atgcacttctcaaaatctttcgaggaaacgcaccacattggtgacattcacccatccagtaaatggttcaaataa

SEQ ID NO: 308581 - DNA, 75 bp, synthetic construct
  source 1..75: mol_type = other DNA
tggttactggacgttggctatggaaataccctcgatccgagccgcaaaagtgtgaaaaaaagccagttgtgtcgg

SEQ ID NO: 308582 - DNA, 75 bp, synthetic construct
  source 1..75: mol_type = other DNA
tctcgcagttaggggcggatctgttaaccggtggttttaccgacagtgacagttggcgtttgggagtgttggctg

SEQ ID NO: 308583 - DNA, 75 bp, synthetic construct
  source 1..75: mol_type = other DNA
aatcctatagcgcgaaaggtgcaaccgtctcgctggaagcgggctacggctttgctctgaataaatactttgatc

SEQ ID NO: 308584 - DNA, 75 bp, synthetic construct
  source 1..75: mol_type = other DNA
gggaaggctgtgacctcacagttgcagctgcaattaaattatttgtagagcgtagttctccgtactccatatttt

SEQ ID NO: 308585 - DNA, 75 bp, synthetic construct
  source 1..75: mol_type = other DNA
aaaggttattgatgaaagaaccacatcgcatattaatcgtatgcaggaagataccttgattagctcagcttatcc

SEQ ID NO: 308586 - DNA, 75 bp, synthetic construct
  source 1..75: mol_type = other DNA
aacttccgtatcttccagaacgaggacatcaaaagcatcctcggcacgatgttgcaggaaaacggggtgaccgaa

SEQ ID NO: 308587 - DNA, 75 bp, synthetic construct
  source 1..75: mol_type = other DNA
gactacacctttaaacgacccggctgggcagggcgttttgatcaggaaggccagtaccaggattaccagcgcacg

SEQ ID NO: 308588 - DNA, 75 bp, synthetic construct
  source 1..75: mol_type = other DNA
tggcgctcgccgcacgctggtcgcagccgaatcgcgaatccatcgccgccctgtgccgcgcgcgaaaaattgcgc

SEQ ID NO: 308589 - DNA, 75 bp, synthetic construct
  source 1..75: mol_type = other DNA
acaagatgatggttgtggcggacaactaaagcgcattaaacaactacacagaagaccaggtggaaaattgattat

SEQ ID NO: 308590 - DNA, 75 bp, synthetic construct
  source 1..75: mol_type = other DNA
ctggtcctgtgcgacaccgtgcgttatctgccggagtcctttgagatcccctggaatccgaacacccgtaccgag

SEQ ID NO: 308591 - DNA, 75 bp, synthetic construct
  source 1..75: mol_type = other DNA
gaccgcgatttactccgccggtgagcatctggagctctgctgtggtaaggcaaggctggtgctgacgaaggacgg

SEQ ID NO: 308592 - DNA, 75 bp, synthetic construct
  source 1..75: mol_type = other DNA
tatttcacaccttatgcgctaattgttggtcagttaggctcgaccttcaaagatgggaagggcggggtcagggtg

SEQ ID NO: 308593 - DNA, 75 bp, synthetic construct
  source 1..75: mol_type = other DNA
cttaatatgtggcatcgcgacacttgttccgcagtattttgttgctatacatctcggtgccgaattacccgcttt

SEQ ID NO: 308594 - DNA, 75 bp, synthetic construct
  source 1..75: mol_type = other DNA
actgctatgtggcatcgcgacacttattccgcaatactttgttgccgtccatcttggtgccgaattgcccgcttt

SEQ ID NO: 308595 - DNA, 75 bp, synthetic construct
  source 1..75: mol_type = other DNA
ccgacacaaaaatcaaaacagccaagcctaccgacaaggaatacaccctacaagatggcaacggactctacttgc

SEQ ID NO: 308596 - DNA, 75 bp, synthetic construct
  source 1..75: mol_type = other DNA
aagtgaatggagagatactattatagccttgaccatgaaaaacagatggtatgaagaaacttggttttttacaga

SEQ ID NO: 308597 - DNA, 75 bp, synthetic construct
  source 1..75: mol_type = other DNA
aagcataaatacgaatttgataaaaaagtggaagaggaacatcaagcatggattgagtataaaaagagtgatgaa

SEQ ID NO: 308598 - DNA, 75 bp, synthetic construct
  source 1..75: mol_type = other DNA
atttagtggcaaagagattattttgattgttatgaatattagtgaaaacggttacgttgatctcaagaatacata

SEQ ID NO: 308599 - DNA, 75 bp, synthetic construct
  source 1..75: mol_type = other DNA
ccattcagggcagaacttagtgcgaacccggcagagactgttgttgagggaccgtttagtaaagacgtaatcctc

SEQ ID NO: 308600 - DNA, 75 bp, synthetic construct
  source 1..75: mol_type = other DNA
attcaatattttagggagctttttcactacggatattttgagtgattatagccatctggatatgggtaatggact

SEQ ID NO: 308601 - DNA, 75 bp, synthetic construct
  source 1..75: mol_type = other DNA
acatcccggagaggaaacttcatctttaccactgtgaccaccggggactgccgcaggcgcttatcagcccggaag

SEQ ID NO: 308602 - DNA, 75 bp, synthetic construct
  source 1..75: mol_type = other DNA
gtggatgtcgctgtcgcgtaaaccggaggtgacatggtacgggtgggacggtgacaggctgacgacgatacagac

SEQ ID NO: 308603 - DNA, 75 bp, synthetic construct
  source 1..75: mol_type = other DNA
ggggggatcctcttgggttgtctggtgagacactggttcttggttctgccacaacagtaacaggaacaaaatttg

SEQ ID NO: 308604 - DNA, 75 bp, synthetic construct
  source 1..75: mol_type = other DNA
cactgacgatgccgggaattattgccggatgtctgctggtgatgctgccagcgatgggcctgttctatgtatccg

SEQ ID NO: 308605 - DNA, 75 bp, synthetic construct
  source 1..75: mol_type = other DNA
gcgtctggtggtggatattctgaggctaagcgccaacagacgtgatacaggaaatcgtccgcatccccatttacc

SEQ ID NO: 308606 - DNA, 75 bp, synthetic construct
  source 1..75: mol_type = other DNA
cgctaaacgtgtagggttcggtgacgacaaacgacgtactactaagcatttcactgaggaagaccggaaaagatt

SEQ ID NO: 308607 - DNA, 75 bp, synthetic construct
  source 1..75: mol_type = other DNA
tgaacggtcaggtctggcgctggcagcgtgccggaagccgggccgttattctggaggtcagtggacgctggatgg

SEQ ID NO: 308608 - DNA, 75 bp, synthetic construct
  source 1..75: mol_type = other DNA
tcggcgcaggtatctacggcaaacaccatatgaatgcgtacctccataacccggacaccgtgctggtcgccatct

SEQ ID NO: 308609 - DNA, 75 bp, synthetic construct
  source 1..75: mol_type = other DNA
ccgggcaattgctgtgccgggcagttttaacgatcagttcgccgatgcagatattcgtaatatcgggtcagcgaa

SEQ ID NO: 308610 - DNA, 75 bp, synthetic construct
  source 1..75: mol_type = other DNA
agagcgtggttttgatattgaggaattgccggatgcacatggtaaaatgcatgataccgcagtgaagggtgatgc

SEQ ID NO: 308611 - DNA, 75 bp, synthetic construct
  source 1..75: mol_type = other DNA
ttcattcaatcctgtactctatttctttgctggttgcgcagtgatatttattttaatgacaaacattattgattt

SEQ ID NO: 308612 - DNA, 75 bp, synthetic construct
  source 1..75: mol_type = other DNA
cagaacgctggatgctaccgctccgagttccactactattggtcagtggagagataatcttcgggttggggtgtt

SEQ ID NO: 308613 - DNA, 75 bp, synthetic construct
  source 1..75: mol_type = other DNA
ttgataaaaaagtgtatgaaacctggataacgctggcgggagacgtctggacattgatgctcacaccttattcac

SEQ ID NO: 308614 - DNA, 75 bp, synthetic construct
  source 1..75: mol_type = other DNA
gaagaagcaggcgtttattgatgcgcttgtcatggcaggaacgccacaagaacatgctgaaaaaatgtttatggc

SEQ ID NO: 308615 - DNA, 75 bp, synthetic construct
  source 1..75: mol_type = other DNA
acctggcgatccgtgacgataaaaccgccttcatccgaagttatgcgcctggccagctggtgacggttgaagaag

SEQ ID NO: 308616 - DNA, 75 bp, synthetic construct
  source 1..75: mol_type = other DNA
atgagtggtatttcaattttttctaccctgattccctaccagcagaagttacctatgtggaattattagataccg

SEQ ID NO: 308617 - DNA, 75 bp, synthetic construct
  source 1..75: mol_type = other DNA
gccggaaacagaagatggtacgctgtatgccgccaatgtccccgctgccagcggtaaaccgctgccagcggtaaa

SEQ ID NO: 308618 - DNA, 75 bp, synthetic construct
  source 1..75: mol_type = other DNA
atagagcgctctgatgggattggcgaaatattcgaccccctatatgatattctttctaagaacgacagagcaatt

SEQ ID NO: 308619 - DNA, 75 bp, synthetic construct
  source 1..75: mol_type = other DNA
gatttatgctacatggacaatattacctgatggcacgaaaagactttcaactgttaatacggggacattcaaatg

SEQ ID NO: 308620 - DNA, 75 bp, synthetic construct
  source 1..75: mol_type = other DNA
ttgataaaaaagtgtatgaaacctggataacgctggcgggagacgtctggatattgatgctcacaccttatccac

SEQ ID NO: 308621 - DNA, 75 bp, synthetic construct
  source 1..75: mol_type = other DNA
atgaaaataatagctaaaataatttatagattaaccattgcgttaatgatagccggatcagtccagacagcagcg

SEQ ID NO: 308622 - DNA, 75 bp, synthetic construct
  source 1..75: mol_type = other DNA
aaggaattggtagaaatagtaataccaatggttggtaacaaagctgtcgaatatgatatttataaagtaatactt

SEQ ID NO: 308623 - DNA, 75 bp, synthetic construct
  source 1..75: mol_type = other DNA
gctatcatccgaatggggttcggaggcgagcttgtagctcacggtatgcgttctattgcacgaacagcggcagag

SEQ ID NO: 308624 - DNA, 75 bp, synthetic construct
  source 1..75: mol_type = other DNA
aaaacaagacgcaaatgatcgataacatctcaattttgactaatggggaacttttcgaccgcctacgcaccttgt

SEQ ID NO: 308625 - DNA, 75 bp, synthetic construct
  source 1..75: mol_type = other DNA
aaagagatcaacccaacgccgcaacgcgttagcctggctgatatctcatgtgacaccgtcacaaccacgcaaagc

SEQ ID NO: 308626 - DNA, 75 bp, synthetic construct
  source 1..75: mol_type = other DNA
gcgcgtgctggcgtcagccaaacgtcacttgggcgatgagctgcacgataagttcagcatcaccctggcggatat

SEQ ID NO: 308627 - DNA, 75 bp, synthetic construct
  source 1..75: mol_type = other DNA
accggtaccgaaacgtatatcggggcgattaaagactttctcgatcgccatgcgggcgtgacggcgtttcagtgg

SEQ ID NO: 308628 - DNA, 75 bp, synthetic construct
  source 1..75: mol_type = other DNA
gtccgcgcccgaacgcggagcaggaagtgacattccgacggcgcaccgcgcagttcggtgacggatatcagcagg

SEQ ID NO: 308629 - DNA, 75 bp, synthetic construct
  source 1..75: mol_type = other DNA
gtggtaacatcaccgacattatcgtaaacggtcagtacgttggtgcagtagtaaaaggtgacgataacaagtacc

SEQ ID NO: 308630 - DNA, 75 bp, synthetic construct
  source 1..75: mol_type = other DNA
tcagtatccatagggcatgccatcgctcgtagaatgcaaaaaaaatcagatgtatcttcaattaaaactgaatcc

SEQ ID NO: 308631 - DNA, 75 bp, synthetic construct
  source 1..75: mol_type = other DNA
gaaggaaacgggaaacgtgataggtaagggtgtgaacagggatgcagctgagatagtcaggaagggtagtaaagc

SEQ ID NO: 308632 - DNA, 75 bp, synthetic construct
  source 1..75: mol_type = other DNA
tatctgacagctcagtttgaagaattatctcaacgtgatatgaagaagtacctgggagagatgaagcgtctggca

SEQ ID NO: 308633 - DNA, 75 bp, synthetic construct
  source 1..75: mol_type = other DNA
tatcggagaaaaaaccagttgatcgccagtgtcgaaaatagctatgattcccgcgcacctcataaaacgggtgcc

SEQ ID NO: 308634 - DNA, 75 bp, synthetic construct
  source 1..75: mol_type = other DNA
ggggcggagcaatccgcgccggtttcttcagtgtccggtaaggctaaccctgtacagtccgccaccagcgaaatt

SEQ ID NO: 308635 - DNA, 75 bp, synthetic construct
  source 1..75: mol_type = other DNA
tttttttgtgccgcatagtcacaccttatcaatggtgggctgtacgggggcggagcaatccgcgccggtttcttc

SEQ ID NO: 308636 - DNA, 75 bp, synthetic construct
  source 1..75: mol_type = other DNA
tatggcgcgcggaatccttccagatatctacccacggcaacaaaaaatacaccctcagcagcacattcatacagg

SEQ ID NO: 308637 - DNA, 75 bp, synthetic construct
  source 1..75: mol_type = other DNA
gcgggcgttgggcgcagagttagatgagatggcggcgaatactcagcaggcaaaggccacgcgggataaattcgc

SEQ ID NO: 308638 - DNA, 75 bp, synthetic construct
  source 1..75: mol_type = other DNA
cgtcgagtatcaacatacctttaaggcgattaatcaacgtaacggagagcgcaacaacgcgtttctcaccattgg

SEQ ID NO: 308639 - DNA, 75 bp, synthetic construct
  source 1..75: mol_type = other DNA
tccgccaggatattcaggcgtggacggcagattatcgagtcagctggcatcagaaggtggcaaacgggcagacta

SEQ ID NO: 308640 - DNA, 75 bp, synthetic construct
  source 1..75: mol_type = other DNA
aacactgaattaaataatgatgtttgtttttcattagaagttgttttgcaagaaggtattgcctttttatatatg

SEQ ID NO: 308641 - DNA, 75 bp, synthetic construct
  source 1..75: mol_type = other DNA
gtcgctgggatctgctgtgagtattcaactcgccagggccggtctgggcaggctgacccttattgatcctgacag

SEQ ID NO: 308642 - DNA, 75 bp, synthetic construct
  source 1..75: mol_type = other DNA
aagatttactgttaacctgtgcaccagaaagaaggaaacagaccgtacacatttttacggcctgagatcctcacg

SEQ ID NO: 308643 - DNA, 75 bp, synthetic construct
  source 1..75: mol_type = other DNA
gatgaatcctttaacattattaatcttgcatcagagttaagtaggatgtgccttctatgctctgcacagctttac

SEQ ID NO: 308644 - DNA, 75 bp, synthetic construct
  source 1..75: mol_type = other DNA
gaacaaggccaggctccatatgcggctggtttatatgagttgcatccatctagtatttatgttggtgactttcaa

SEQ ID NO: 308645 - DNA, 75 bp, synthetic construct
  source 1..75: mol_type = other DNA
tggccggagacggtatcaacccggtaacacctcagtggagcgtgagctttaccggtgacgaggcttacattcagg

SEQ ID NO: 308646 - DNA, 75 bp, synthetic construct
  source 1..75: mol_type = other DNA
cgcatccgataccatgctgcgcgccagcgcctcattctttaatggcggcaaatacagcgacgaatggcacccgaa

SEQ ID NO: 308647 - DNA, 75 bp, synthetic construct
  source 1..75: mol_type = other DNA
tcgacaacttaacagagcgtcaaaaacagtatgttattaaggttttcatgcaaggtgggctgaacgctttaatgc

SEQ ID NO: 308648 - DNA, 75 bp, synthetic construct
  source 1..75: mol_type = other DNA
gagctaaaccgacacggaaaattaggctagcatggtcacgaagcggagctctgcgctcggcacatttgcacgctg

SEQ ID NO: 308649 - DNA, 75 bp, synthetic construct
  source 1..75: mol_type = other DNA
cgatttagcggaatacgcttatttcgcgatatgcaaatgctacctgattctatgcagaactttacacctttagta

SEQ ID NO: 308650 - DNA, 75 bp, synthetic construct
  source 1..75: mol_type = other DNA
tcggccgttgccaaccgggtggcccggaggatggtcgttccgccttaccgggaaggcggccaggctcagtttata

SEQ ID NO: 308651 - DNA, 75 bp, synthetic construct
  source 1..75: mol_type = other DNA
agatatacggctaatcaaatagcccgccggatggttgctcctccttaccgggaaggcggacaggcacagtaccgg

SEQ ID NO: 308652 - DNA, 75 bp, synthetic construct
  source 1..75: mol_type = other DNA
atgcgcccgctgactgttgccattatcgccgttgccggttttagtccttttcacctttctgtaccatttatcgtg

SEQ ID NO: 308653 - DNA, 75 bp, synthetic construct
  source 1..75: mol_type = other DNA
cactagcgtggggcgcagggagtccgtttctgctaaagcgatgtcgatgcttgctgataaagccatcgtttcccg

SEQ ID NO: 308654 - DNA, 75 bp, synthetic construct
  source 1..75: mol_type = other DNA
cgccatcagtcagtatccgtggggcggataatgttattgaattactgagacgtctggggcttgagcgctttattc

SEQ ID NO: 308655 - DNA, 75 bp, synthetic construct
  source 1..75: mol_type = other DNA
ttcacctgatgcgcccggacgcgctggcagtggcagcaattgacgcgggcaacctgctacccgttgccgaagtga

SEQ ID NO: 308656 - DNA, 75 bp, synthetic construct
  source 1..75: mol_type = other DNA
cccggtgattatccgccacctgctaaccacctttgccgaccagaacaaagcaaaggcactattactagagcagcg

SEQ ID NO: 308657 - DNA, 75 bp, synthetic construct
  source 1..75: mol_type = other DNA
ccggtagagattgatgggaaatatgaaaagcagttcacaaccgtgataaatgccgttgttatggcaaccaataac

SEQ ID NO: 308658 - DNA, 75 bp, synthetic construct
  source 1..75: mol_type = other DNA
tgcagcctggaaaaatggagctcaagtggtgggcctgtgcctggggagttttgttctggcttacaccggtctgct

SEQ ID NO: 308659 - DNA, 75 bp, synthetic construct
  source 1..75: mol_type = other DNA
ttctggattaccaggatgaaggtaaagtcgagttcttcgaaggtaactttaccgagtacgaagagtataagaaac

SEQ ID NO: 308660 - DNA, 75 bp, synthetic construct
  source 1..75: mol_type = other DNA
taataactagcaatataaaaaaaccagaaatctctatcttattaatagctctgtatttaatttacttatttatag

SEQ ID NO: 308661 - DNA, 75 bp, synthetic construct
  source 1..75: mol_type = other DNA
tggggcgagtaatttgggggaaattaaacttggcgtaaatggcaacctgaatccagcggccagcgtctgggggaa

SEQ ID NO: 308662 - DNA, 75 bp, synthetic construct
  source 1..75: mol_type = other DNA
gcgccgctggattccgagcgcgccatggctgtaatccgcatcctcaacgatatggcccggaagttcgagaccgcc

SEQ ID NO: 308663 - DNA, 75 bp, synthetic construct
  source 1..75: mol_type = other DNA
gcagtgccatgcggaacagtgcatatatctatcccgatcatggacgaatctggctgacgcagcgtgtactgcgtc

SEQ ID NO: 308664 - DNA, 75 bp, synthetic construct
  source 1..75: mol_type = other DNA
gggtagcgacgcgcaaagatgttgagcgtagcgtcagcgtgggttggcttcatagtgaacaagagtgtattgcgc

SEQ ID NO: 308665 - DNA, 75 bp, synthetic construct
  source 1..75: mol_type = other DNA
gtttggtaagacttatgagtcgcgtattaactcttttttgttttcttccattataatacttgtgtttattgtgtt

SEQ ID NO: 308666 - DNA, 75 bp, synthetic construct
  source 1..75: mol_type = other DNA
tgcttttgcagtaacttatgatacctctaacagtcagcaggttgatgcatcacttgatgtggttgcgcctgcact

SEQ ID NO: 308667 - DNA, 75 bp, synthetic construct
  source 1..75: mol_type = other DNA
ttgctaataagtctgaaggatttggacggagtgtgactgcaagtgagttaagatggttgtacaggcacagatata

SEQ ID NO: 308668 - DNA, 75 bp, synthetic construct
  source 1..75: mol_type = other DNA
tattatgtcatttgtgtgtctggttcgtattttttatctggcgtgctatcgcttatatatatatattatcaaaat

SEQ ID NO: 308669 - DNA, 75 bp, synthetic construct
  source 1..75: mol_type = other DNA
tttctacttcgatgcgtccgatgaaaataattggctaattgtggatggcttgcagcggttatctacgattcgcaa

SEQ ID NO: 308670 - DNA, 75 bp, synthetic construct
  source 1..75: mol_type = other DNA
agttgagaacgacctcgcatcgctacgtctcgcagttaggggccgatctgttaaccggtggttttaccgacagtg

SEQ ID NO: 308671 - DNA, 75 bp, synthetic construct
  source 1..75: mol_type = other DNA
gatttgcatttcatttgataccgctgaaaaacgccgatacgcaacttatttgatactaaatcggcgcttttcttt

SEQ ID NO: 308672 - DNA, 75 bp, synthetic construct
  source 1..75: mol_type = other DNA
aacctggatattgaagaagtcactatgtcggcgttttgttcgcctatggtgggtagccaggttcagcgcgataaa

SEQ ID NO: 308673 - DNA, 75 bp, synthetic construct
  source 1..75: mol_type = other DNA
ttaaatgtattcagtctatagcaaccccgttaaatcaatactatttcacgaggttgataaagcaacatgaattga

SEQ ID NO: 308674 - DNA, 75 bp, synthetic construct
  source 1..75: mol_type = other DNA
aagtgaccagtgccgccgccgggcgctggccttatgtgctggctggattgtctatcgacgtgcctgattcatcgc

SEQ ID NO: 308675 - DNA, 75 bp, synthetic construct
  source 1..75: mol_type = other DNA
gatgatgctctcaaattattcaataggcatatcattagctggcacgttagcaagaaaaacagtttcggctgtcga

SEQ ID NO: 308676 - DNA, 75 bp, synthetic construct
  source 1..75: mol_type = other DNA
tcggtggtggtgcggcgggtacagtagcagcctggcagttgcgcgaccggcataatataactgtgtttgaggcaa

SEQ ID NO: 308677 - DNA, 75 bp, synthetic construct
  source 1..75: mol_type = other DNA
ccagacggaccaacgaaccttctggcatgggaaaggcttaagaacaaagaattgccgccttcactgcatcgctac

SEQ ID NO: 308678 - DNA, 75 bp, synthetic construct
  source 1..75: mol_type = other DNA
tatcaacatctgataatatgataccatatcttgaacgtacatttgtgccgactgtaagaggtgttgcgaatagcg

SEQ ID NO: 308679 - DNA, 75 bp, synthetic construct
  source 1..75: mol_type = other DNA
aacaatatcatctgttgtaccaacagacagcgccttggtacgtgcgaagtattctactatgaaaggtagtaaagc

SEQ ID NO: 308680 - DNA, 75 bp, synthetic construct
  source 1..75: mol_type = other DNA
agttagagagcaatctggctgagctgcgtggcggcagcgattacgcgcaacgtaaaatcaagatagccgctgcac

SEQ ID NO: 308681 - DNA, 75 bp, synthetic construct
  source 1..75: mol_type = other DNA
aattgttcaggcagtttccagtgcaatagcttcatcgggtgtgttcaattttgatgatgattacccaaaagtgac

SEQ ID NO: 308682 - DNA, 75 bp, synthetic construct
  source 1..75: mol_type = other DNA
attatcctttccctgctaagcaacatatgcttttaatagatatacctattgcaataacaaagcagggatggtggc

SEQ ID NO: 308683 - DNA, 75 bp, synthetic construct
  source 1..75: mol_type = other DNA
cagcttgatccaggaaatattaaaaattatggaaagtatcagccagtcgaaaatgacatccatggctgcagtagc

SEQ ID NO: 308684 - DNA, 75 bp, synthetic construct
  source 1..75: mol_type = other DNA
attcgaatccataatgaactttaacaaattctggtatactctgttatttgataaacagaacaaaccaagtattta

SEQ ID NO: 308685 - DNA, 75 bp, synthetic construct
  source 1..75: mol_type = other DNA
gtggtgttgacaccagcttaggggggcatgaaggggcagtagcgtcaggcatggtgattgcagatcggtttgggg

SEQ ID NO: 308686 - DNA, 75 bp, synthetic construct
  source 1..75: mol_type = other DNA
gcagttgtgcgagatgttgagcgatttgatgatgcatcgctggtacgtcatatctacgatacaaactgtattgtt

SEQ ID NO: 308687 - DNA, 75 bp, synthetic construct
  source 1..75: mol_type = other DNA
cctttttaatatcgatccaagtaaattgtccatttttaactatggatataaagatagtattgattttgaaagaag

SEQ ID NO: 308688 - DNA, 75 bp, synthetic construct
  source 1..75: mol_type = other DNA
acgatgtgcatgtaagagtgccaaccgacatcaccacggaagccctgcagcgtatcggtgaactgtatgccaccg

SEQ ID NO: 308689 - DNA, 75 bp, synthetic construct
  source 1..75: mol_type = other DNA
tgacggctgtcatcgttgctcaggccatgaatcatggcaaccatgtcatggcgcgaaccagcgatattccatacc

SEQ ID NO: 308690 - DNA, 75 bp, synthetic construct
  source 1..75: mol_type = other DNA
cgggcaactgccgttctgtgatgttacagacgttttccgttttgttaacgagcagtgccggttcctctccgtcat

SEQ ID NO: 308691 - DNA, 75 bp, synthetic construct
  source 1..75: mol_type = other DNA
tgaaataagcaagttgcctattgctcttctgtctctttcgataccatttgtagccatagttgctaacattcacag

SEQ ID NO: 308692 - DNA, 75 bp, synthetic construct
  source 1..75: mol_type = other DNA
gaaaatggctgcgttacgtcattgaacatatccaggactggccggcaaaccgggtacgtgatctgttgccctgga

SEQ ID NO: 308693 - DNA, 75 bp, synthetic construct
  source 1..75: mol_type = other DNA
tgtgtactgcagcaatggctgggtggaaatcgacaacaacatcgcagagaacgccttacggggagtggccgtagg

SEQ ID NO: 308694 - DNA, 75 bp, synthetic construct
  source 1..75: mol_type = other DNA
gtttatgtgatggtgagaagtatgtcagaaatgagtctcctttatggtctgatgtgattgattttttaaatgttt

SEQ ID NO: 308695 - DNA, 75 bp, synthetic construct
  source 1..75: mol_type = other DNA
ttttagagcggttggcacccatgccacttcttgttactgcgctagatgcgaaatcgaataactctaataataatg

SEQ ID NO: 308696 - DNA, 75 bp, synthetic construct
  source 1..75: mol_type = other DNA
ccaagagtgcctaattccctacaggttgaactttaagaattctgttggtgtttacatatcaacattaaaatgtca

SEQ ID NO: 308697 - DNA, 75 bp, synthetic construct
  source 1..75: mol_type = other DNA
gaatttgaacaaggtggcgaggccagggctgcgtatggtgcgcagctaatcaagcgactatcaaaggatttatgt

SEQ ID NO: 308698 - DNA, 75 bp, synthetic construct
  source 1..75: mol_type = other DNA
caaaacccctgaagatctcagtcagttcgatcgcctgctcaagaaatcagtgttgaggctgctctcaacgctgaa

SEQ ID NO: 308699 - DNA, 75 bp, synthetic construct
  source 1..75: mol_type = other DNA
aagtctgttacggatccttatggatcaacatgggcttaaagcggctgatttggcacaagaacttggctctaaatc

SEQ ID NO: 308700 - DNA, 75 bp, synthetic construct
  source 1..75: mol_type = other DNA
gaaaaagtgacgcaccggtgaccacgccagcagagctggcggatgccatcgggctgtcgtatgacacctataccg

SEQ ID NO: 308701 - DNA, 75 bp, synthetic construct
  source 1..75: mol_type = other DNA
agtaaatctttatcattatttatcaggatcttaaaacatctgaaggcgacatgtcggcgggcaaaaacgattacg

SEQ ID NO: 308702 - DNA, 75 bp, synthetic construct
  source 1..75: mol_type = other DNA
tccatacaactatagttaaaaatgaacagatcattaatcaaccaacaaatgcatttcagtctgaattcagccttg

SEQ ID NO: 308703 - DNA, 75 bp, synthetic construct
  source 1..75: mol_type = other DNA
gtttatttctatagtcaattgcacgtttcggatagcggtaagttaaaaaaaatatttccatttgctttttttatg

SEQ ID NO: 308704 - DNA, 75 bp, synthetic construct
  source 1..75: mol_type = other DNA
gctattggtgagatggctaacagtcgtaccaataaatttcttgttattatactcaatacaaacggtggttctgtt

SEQ ID NO: 308705 - DNA, 75 bp, synthetic construct
  source 1..75: mol_type = other DNA
ggtggatgtcgctgtcgcgtaaaccggaggtgacgtggtatggctgggacggagacaggctgacgacggtgcaga

SEQ ID NO: 308706 - DNA, 75 bp, synthetic construct
  source 1..75: mol_type = other DNA
gcagactgtgatgactcacggctggatttacaccgacgcccagctgttacgcgatgatattcaaacacttttcac

SEQ ID NO: 308707 - DNA, 75 bp, synthetic construct
  source 1..75: mol_type = other DNA
aaaaggtcagaaagtggcgctgaatgaggcgatgggcagcacgcaaagcattatggttgggtcggatggtgagtt

SEQ ID NO: 308708 - DNA, 75 bp, synthetic construct
  source 1..75: mol_type = other DNA
atgctcaacttatctggtgattcgttaagaatgctagccgcaattttagctggagcaccgacattatttgaaaaa

SEQ ID NO: 308709 - DNA, 75 bp, synthetic construct
  source 1..75: mol_type = other DNA
ggaacccgatgccggtgccttacggtgaaatgctggttggctcacggcgaatctcccaggacatcagtacccgtg

SEQ ID NO: 308710 - DNA, 75 bp, synthetic construct
  source 1..75: mol_type = other DNA
ttcttaaaacgtgcgctaaaaagctggctcgcattcagaaaattaagctttccaaagcactcgaaatcgttgccc

SEQ ID NO: 308711 - DNA, 75 bp, synthetic construct
  source 1..75: mol_type = other DNA
agttttcagcctccgttgattattgccgcaggagagaccagcgaggcaggttataccctacaacgcctcgaccgt

SEQ ID NO: 308712 - DNA, 75 bp, synthetic construct
  source 1..75: mol_type = other DNA
gaagacggcaatacggcgtggagcgcggaatatgatgaatggggcaaccagcttaatgaggagaacccgcatcat

SEQ ID NO: 308713 - DNA, 75 bp, synthetic construct
  source 1..75: mol_type = other DNA
atgtttccattaaatgatctgtcgttaaaaactcagtcggttcaattaaataaaatcacatcgaatactgagtct

SEQ ID NO: 308714 - DNA, 75 bp, synthetic construct
  source 1..75: mol_type = other DNA
aatatgcttcttccggtttcaggtcagattctgcctgttcgctggctggcgcaacacaacagcgaaaaaccgctc

SEQ ID NO: 308715 - DNA, 75 bp, synthetic construct
  source 1..75: mol_type = other DNA
agaattagaactcgatttcaataaccttacagaatttccacaagtacctgatggaattaccctgatctccgtaaa

SEQ ID NO: 308716 - DNA, 75 bp, synthetic construct
  source 1..75: mol_type = other DNA
gaagggattagtgacccgaatgatccgaaatgggttaaggggcaccagactcgcgagtcttcgaaccagaatcaa

SEQ ID NO: 308717 - DNA, 75 bp, synthetic construct
  source 1..75: mol_type = other DNA
cagacctgggactgatgacttccttcatcgaagcatacctggacgctgactacaccaatcgcggtctgcttacaa

SEQ ID NO: 308718 - DNA, 75 bp, synthetic construct
  source 1..75: mol_type = other DNA
gctgtcagaatttaagttattgcactcagaatatttcgaatggggtgattatagtctctggtttcaaggtttctc

SEQ ID NO: 308719 - DNA, 75 bp, synthetic construct
  source 1..75: mol_type = other DNA
atttcgctcatgggaaaagccccacagtatcatttcaatatattttcgactattttatagatagtgtagccatta

SEQ ID NO: 308720 - DNA, 75 bp, synthetic construct
  source 1..75: mol_type = other DNA
caggtggagccggaatacacaccggcgagaaaagttcatctttaccactgcgaccaccggggcctgccgctggcg

SEQ ID NO: 308721 - DNA, 75 bp, synthetic construct
  source 1..75: mol_type = other DNA
ggcaaacagtgccggagcatcacgccccgctctggcagcaggtcagtcagatggaacatcggccactgagtgcct

SEQ ID NO: 308722 - DNA, 75 bp, synthetic construct
  source 1..75: mol_type = other DNA
agaattagagctcgatttcaataattatatggtatttccaaaagtatccgatggaattacccaggtctccgtaga

SEQ ID NO: 308723 - DNA, 75 bp, synthetic construct
  source 1..75: mol_type = other DNA
atgattaatcgcatcgtatcgttttttatattatgtctggtgttatgcatacccctatgcgtagcgtactttcac

SEQ ID NO: 308724 - DNA, 75 bp, synthetic construct
  source 1..75: mol_type = other DNA
attggattaactaaatctaacgaccgagataatacattttctgatttagttaataattcacaaagaaatatcgct

SEQ ID NO: 308725 - DNA, 75 bp, synthetic construct
  source 1..75: mol_type = other DNA
ctttaatagccccctttgtcacaggatatgtcaatgctaattatcacccctgcggtaataacaagggaattttcc

SEQ ID NO: 308726 - DNA, 75 bp, synthetic construct
  source 1..75: mol_type = other DNA
gcagcgctacgacggagaaacaccggcatttgatggcattctcgtgtttaaccagggaacccggattgccaccct

SEQ ID NO: 308727 - DNA, 75 bp, synthetic construct
  source 1..75: mol_type = other DNA
ggcgttgattggtcggcattgtctgtgacccgaagcgaggcaacctcaccgcagtccaagcaagcgaaccatgaa

SEQ ID NO: 308728 - DNA, 75 bp, synthetic construct
  source 1..75: mol_type = other DNA
ctggatcacgaagtggcaaacagccggcaatttggcgaattcgtttctctggacgcgccggtcgaagcggatgcc

SEQ ID NO: 308729 - DNA, 75 bp, synthetic construct
  source 1..75: mol_type = other DNA
tacaggcggctacaccaacgaacaggcaggctattcatcaacgacaaagcgttttaatgacgccgataacaatcc

SEQ ID NO: 308730 - DNA, 75 bp, synthetic construct
  source 1..75: mol_type = other DNA
acaacagccacaaagacaacgaggatatggctgattttattgaaggttacactgtgagaggagaagcagtccgct

SEQ ID NO: 308731 - DNA, 75 bp, synthetic construct
  source 1..75: mol_type = other DNA
ttgttcgccattgagcagttccccgacaacagccacaaagacaacgaggatatggctgattttattgaaggttac

SEQ ID NO: 308732 - DNA, 75 bp, synthetic construct
  source 1..75: mol_type = other DNA
ccaaaatgcttgaagtgaaagcactgtctaaagtaggccaaaacacgcatatctatctttttgatttagatacag

SEQ ID NO: 308733 - DNA, 75 bp, synthetic construct
  source 1..75: mol_type = other DNA
tctgcacttttactggcttggttagatgatgttgatcccggaggtcgatggggaaaccgtccagcagtttcttta

SEQ ID NO: 308734 - DNA, 75 bp, synthetic construct
  source 1..75: mol_type = other DNA
tatgcgcgagaatatgttgttgccaggccatgtatcggagatgcagttttttttattgataggcatctcttctat

SEQ ID NO: 308735 - DNA, 75 bp, synthetic construct
  source 1..75: mol_type = other DNA
ccggtttgatcctgaccattctgttgttgatggcgctgaaacgcatgacccgattcctgcacgcgatgggagggc

SEQ ID NO: 308736 - DNA, 75 bp, synthetic construct
  source 1..75: mol_type = other DNA
aagctgaagcctggagaattcagatccgggtggtgcagcgacagaatctgactgggtgcgtgccggtgggcgcaa

SEQ ID NO: 308737 - DNA, 75 bp, synthetic construct
  source 1..75: mol_type = other DNA
atgaccttaagcacagatgttaagcatatattaatgctcaccgaaagaattgaacaaattttaatagatatagtt

SEQ ID NO: 308738 - DNA, 75 bp, synthetic construct
  source 1..75: mol_type = other DNA
atgtcaaaaactaatgactcaattcccacaatcctgaaggctaatcacgatgtccgtagattagcatacggtttt

SEQ ID NO: 308739 - DNA, 75 bp, synthetic construct
  source 1..75: mol_type = other DNA
agccgggcgttgtcgaaatcgacggcaaaaatatttatacgcaaattatcgatttaaccacacgcgagcggtggt

SEQ ID NO: 308740 - DNA, 75 bp, synthetic construct
  source 1..75: mol_type = other DNA
tattattatatacaactaagaggcgctttttatcggctattcatcaccagatcattgaaaaccaactggatacag

SEQ ID NO: 308741 - DNA, 75 bp, synthetic construct
  source 1..75: mol_type = other DNA
ccaggagcaatctatattaaaaatggcatgaaatgtaataatgaatatatttctcgcaaggaagattcagcagtt

SEQ ID NO: 308742 - DNA, 75 bp, synthetic construct
  source 1..75: mol_type = other DNA
aggtagtcaatttcgccacagacataacaatacagctaactcttatatttttactaatagctatcgtaatagcac

SEQ ID NO: 308743 - DNA, 75 bp, synthetic construct
  source 1..75: mol_type = other DNA
atgcgtttacatgttaaattaaaagagtttctttcgatgttttttatggccatattatttttccctgcattcaat

SEQ ID NO: 308744 - DNA, 75 bp, synthetic construct
  source 1..75: mol_type = other DNA
gagaggacagactcgaaggctgttctatcgattctgctacaatttattcacaaggtagtcttaccgataaaaaat

SEQ ID NO: 308745 - DNA, 75 bp, synthetic construct
  source 1..75: mol_type = other DNA
ccggcttttggcagcgggccggcgatactgaacgagggataaaacttcaccgtggagcctaccactttctttcca

SEQ ID NO: 308746 - DNA, 75 bp, synthetic construct
  source 1..75: mol_type = other DNA
gctaaacaggcagcccaattaccggggttacgcctgcgggggcttgagttatatgaaggcgttttacacggtgac

SEQ ID NO: 308747 - DNA, 75 bp, synthetic construct
  source 1..75: mol_type = other DNA
tcataaccaatttgatagaaatttaaattttaaatttaaagatcttgtccccctatttgacgatgttgatataga

SEQ ID NO: 308748 - DNA, 75 bp, synthetic construct
  source 1..75: mol_type = other DNA
aatattctggatggtaatggggtgttgtttaaaaaacgtacactgtgggagtttattcgcgatctttttcccgga

SEQ ID NO: 308749 - DNA, 75 bp, synthetic construct
  source 1..75: mol_type = other DNA
tacaggttggcggtagcaagattgagaaactagattatattgcgccgttttcgcaacatgagtttgttatgccaa

SEQ ID NO: 308750 - DNA, 75 bp, synthetic construct
  source 1..75: mol_type = other DNA
tagccacgacgggatcgccacagctacgctgaccagtttgaaaaatggtgattatagggttacggcctctgtgag

SEQ ID NO: 308751 - DNA, 75 bp, synthetic construct
  source 1..75: mol_type = other DNA
gccactgcgggactggcgtatggcaatgagccgctttattatcgagttcggtgaccgcctggacggtcacttctg

SEQ ID NO: 308752 - DNA, 75 bp, synthetic construct
  source 1..75: mol_type = other DNA
ggggtatttctgtcgttcaggagaggaatgtattttggaaatgggtcagatgcaggatatacaggaaacagaaca

SEQ ID NO: 308753 - DNA, 75 bp, synthetic construct
  source 1..75: mol_type = other DNA
ggatggatggctgagctggacacgcccggcgcatatggtgagtgggtaccgttgggggataccggacacacctgg

SEQ ID NO: 308754 - DNA, 75 bp, synthetic construct
  source 1..75: mol_type = other DNA
taccgttgatgtgctggctggtggctttccttgccaggcattctcttatgcaggcaaaaaacttggttttgaaga

SEQ ID NO: 308755 - DNA, 75 bp, synthetic construct
  source 1..75: mol_type = other DNA
gctcgcctcacgcttcggcgtgcgtatgccctcggcgtatgttcccggctccgagctgcgattgctgcgccgggc

SEQ ID NO: 308756 - DNA, 75 bp, synthetic construct
  source 1..75: mol_type = other DNA
atgccctcggcgtatgttcccggctccgagctgcgattgctgcgccgggcggccaaacgcgcgggcatctctggt

SEQ ID NO: 308757 - DNA, 75 bp, synthetic construct
  source 1..75: mol_type = other DNA
aaatttgatacttacaacggattcggggccgaccgtgagcatgtccggatgaccggtcgcgccatccagtcagcg

SEQ ID NO: 308758 - DNA, 75 bp, synthetic construct
  source 1..75: mol_type = other DNA
atccttgccgagctgatgaaagctcctctgcctgtagataacaaggaaatggatcctcatgcgcgtaaagcatgg

SEQ ID NO: 308759 - DNA, 75 bp, synthetic construct
  source 1..75: mol_type = other DNA
tattagattcttcgttagacaaaagtcgcaccacccataaatctaaggtcaaggattatataagaactccgaaac

SEQ ID NO: 308760 - DNA, 75 bp, synthetic construct
  source 1..75: mol_type = other DNA
ggatttcgcgttgagatgaccggaacagaggaggggcggcagaacggtttgatgatccgtcgtcagcaaacgggg

SEQ ID NO: 308761 - DNA, 75 bp, synthetic construct
  source 1..75: mol_type = other DNA
tgttccgaaagcaagtgacattaaccgggctgcaggagctgtatcaggggaaggtgctggcattacctgcggagg

SEQ ID NO: 308762 - DNA, 75 bp, synthetic construct
  source 1..75: mol_type = other DNA
ctataatgctagttttggcatgcagcatcccatacttcacgcgataatgtactgtaagactgataattgttatga

SEQ ID NO: 308763 - DNA, 75 bp, synthetic construct
  source 1..75: mol_type = other DNA
tggtgacacttatatttccagaggtcccgttttatatgcaattgagcttgagagcgatattttaatcaaaaaaac

SEQ ID NO: 308764 - DNA, 75 bp, synthetic construct
  source 1..75: mol_type = other DNA
cctaaagaaacgtcacatcctttcgttgtggaacagggttttgctggacatagccacggattaacaataacagat

SEQ ID NO: 308765 - DNA, 75 bp, synthetic construct
  source 1..75: mol_type = other DNA
ggagcgcaacggcgtgcgggcagcgtatgtgcataaggccgaacatctggaagcgcggatggaaatgatgcaatg

SEQ ID NO: 308766 - DNA, 75 bp, synthetic construct
  source 1..75: mol_type = other DNA
gtaatacaccgtaagagctggaaaaaccgtgcagaagtggaactggccacactcacgtgggtggactggtataac

SEQ ID NO: 308767 - DNA, 75 bp, synthetic construct
  source 1..75: mol_type = other DNA
gcactggagcaggcgctgtgggccagacgcccgagcggtaccatccatcacagcgacaaaggttcgcaatatgtg

SEQ ID NO: 308768 - DNA, 75 bp, synthetic construct
  source 1..75: mol_type = other DNA
ttccgcaaaccgccggcgaacaggccgtgctggcgcaacgtatcgttgacaagatctggcgcgatgcgatgagtg

SEQ ID NO: 308769 - DNA, 75 bp, synthetic construct
  source 1..75: mol_type = other DNA
gtgaaatttttagtgaagatggcctctacagcgcgcgttgagaatggcgctattgtcagccactgccgtattaaa

SEQ ID NO: 308770 - DNA, 75 bp, synthetic construct
  source 1..75: mol_type = other DNA
tttacttacaaggtggtcagtgctgtttacgccgcattcggcaccccacagtactcttcaccacgatttaatatc

SEQ ID NO: 308771 - DNA, 75 bp, synthetic construct
  source 1..75: mol_type = other DNA
aacttatcgatacgcaagatgatgatggctatattggaatttatgattcatcattaaaatttaactgtaaagcag

SEQ ID NO: 308772 - DNA, 75 bp, synthetic construct
  source 1..75: mol_type = other DNA
tagagacaatgaagaaggttttataggcgaagaaaatctcactttaatcatctctcttttggatgattttaatct

SEQ ID NO: 308773 - DNA, 75 bp, synthetic construct
  source 1..75: mol_type = other DNA
gattatgcttggctaaaacagtctctatatttgaagaggataggctttgtcctgaatgcatgtgtcacattctta

SEQ ID NO: 308774 - DNA, 75 bp, synthetic construct
  source 1..75: mol_type = other DNA
gagcctggcgctctcggagaacgtcatcgccgtagcggatgcctatcgctacgccatgaaattccacgggaaacc

SEQ ID NO: 308775 - DNA, 75 bp, synthetic construct
  source 1..75: mol_type = other DNA
gctggaagggtagcctctgtttttaacaaggtatattcgacaattggcgagcgccagatcgcagtgctcaatgaa

SEQ ID NO: 308776 - DNA, 75 bp, synthetic construct
  source 1..75: mol_type = other DNA
tggtagctcagggcagggtaagacctactgtatacaaggtttgttgatgagcttggccgatgctcaaattcggtc

SEQ ID NO: 308777 - DNA, 75 bp, synthetic construct
  source 1..75: mol_type = other DNA
gcaatgcaggatgggaatttaaagatcggtgacggcaaagttgttttgcaggctgaaaaatcatttgataacatt

SEQ ID NO: 308778 - DNA, 75 bp, synthetic construct
  source 1..75: mol_type = other DNA
aggctgagtgggaaaagcaactaggagacctatccaaaggacagtgtttatcagttggctaccatttggataacg

SEQ ID NO: 308779 - DNA, 75 bp, synthetic construct
  source 1..75: mol_type = other DNA
gtgaacatcaccgctcaacaattatgcaacttgcgtcgcttaaccacgatatttcaatgctttgtactgagtttt

SEQ ID NO: 308780 - DNA, 75 bp, synthetic construct
  source 1..75: mol_type = other DNA
tatgttggatgacctaaacgaggaagaaactgcaggaccagcacttgcaagcaagctggctcctcttgttaagtc

SEQ ID NO: 308781 - DNA, 75 bp, synthetic construct
  source 1..75: mol_type = other DNA
agcctaaaatcttcaataacaatgtcacgttcgacgaagataaaggcacgctgaaaattcgtaacgccaccttta

SEQ ID NO: 308782 - DNA, 75 bp, synthetic construct
  source 1..75: mol_type = other DNA
gatcatcatagtcgtaataccgaaaaaggtgttgaacaatggggggagcatgccctttttattgatattccttca

SEQ ID NO: 308783 - DNA, 75 bp, synthetic construct
  source 1..75: mol_type = other DNA
actggttatacggtaactggtgcaggtagttatagtggcggttctgtggttctgccatctccgcttgctgatggc

SEQ ID NO: 308784 - DNA, 75 bp, synthetic construct
  source 1..75: mol_type = other DNA
tcaccgtatgagacccgaaaacgccagccgctcagggcgaaaaaagggcgaataaaacgggcgatgtttcagaag

SEQ ID NO: 308785 - DNA, 75 bp, synthetic construct
  source 1..75: mol_type = other DNA
aaataggtggaaaagtagttaaaaatcaaatgatttcccctttgataaataccaattttctctgccaaagggggc

SEQ ID NO: 308786 - DNA, 75 bp, synthetic construct
  source 1..75: mol_type = other DNA
caaagcgtcatcaaacttttctggcgaccaaaaggtttagcgtatcccttagccgaggctccggcgaaactgcgt

SEQ ID NO: 308787 - DNA, 75 bp, synthetic construct
  source 1..75: mol_type = other DNA
caatcaatgtatcgtgcttattcattattctgatcagtacaccagctcagccagctacgatgcgataaccgtgac

SEQ ID NO: 308788 - DNA, 75 bp, synthetic construct
  source 1..75: mol_type = other DNA
ctgcgccgaaagtgtctgagatccagtcgatgttaattggtcgcttcagcacgacattttctgcattagcagaaa

SEQ ID NO: 308789 - DNA, 75 bp, synthetic construct
  source 1..75: mol_type = other DNA
attgttcgtggagaagcgggagaaaatctggcagtttgtcgacatatcgcgatgaatttactgaccgcagagaat

SEQ ID NO: 308790 - DNA, 75 bp, synthetic construct
  source 1..75: mol_type = other DNA
agattattataagccataaaggtgaagcactacgaattgcagataaaatcttgtatttagatagagcaacatcgt

SEQ ID NO: 308791 - DNA, 75 bp, synthetic construct
  source 1..75: mol_type = other DNA
acaacaaggactgcgatacagtcttaaaaaaagtgcaggcaactcccctgaactggttcgcaagcgtgctggcag

SEQ ID NO: 308792 - DNA, 75 bp, synthetic construct
  source 1..75: mol_type = other DNA
ccgaccggactacagcgacgacccacacgctgattgcccgcagttcgtaccggatgactatgtggcgcaaccgcc

SEQ ID NO: 308793 - DNA, 75 bp, synthetic construct
  source 1..75: mol_type = other DNA
acaataccaaacactacatatgcttcttttggaaacagcactgacagtgatattgtcattaatagtcctgattcg

SEQ ID NO: 308794 - DNA, 75 bp, synthetic construct
  source 1..75: mol_type = other DNA
caacattcgcaggaaatgccaaaactcgccgtcatgagcggcgcagaaagctggctattgagcgtgatgctatct

SEQ ID NO: 308795 - DNA, 75 bp, synthetic construct
  source 1..75: mol_type = other DNA
cctacgggccctgtcaaaacgggcatcatgtgttgtacacctcagcgcaaggggttggaggtagcatttcttgat

SEQ ID NO: 308796 - DNA, 75 bp, synthetic construct
  source 1..75: mol_type = other DNA
acatggcatggacacggctgccattttgaaaaatatcggctacagcgaaaacgacattcaggagttggtcagcaa

SEQ ID NO: 308797 - DNA, 75 bp, synthetic construct
  source 1..75: mol_type = other DNA
ctaaagaagaaaatcgaataaatttaggttttgtggatttctttggttataacaaagagttttttaaatccttga

SEQ ID NO: 308798 - DNA, 75 bp, synthetic construct
  source 1..75: mol_type = other DNA
tacaggcatatatggaactatcaaaggttggtgatgatggcatggctattaaaaacaaactacaagaatatatag

SEQ ID NO: 308799 - DNA, 75 bp, synthetic construct
  source 1..75: mol_type = other DNA
acggcacttattattggcaataaaacatggttaattgatgctggttacggggccagcttacaactggtaaaaaat

SEQ ID NO: 308800 - DNA, 75 bp, synthetic construct
  source 1..75: mol_type = other DNA
gcgtctgggccggtggcattgaaataccctcggtggaaacgcccagcgagggcacccgattctttgggttcgaca

SEQ ID NO: 308801 - DNA, 75 bp, synthetic construct
  source 1..75: mol_type = other DNA
caaagtgctgggcggtctggataaagcatggcgattacataagtgggcaggaatatgcgccatagcgtttgcttt

SEQ ID NO: 308802 - DNA, 75 bp, synthetic construct
  source 1..75: mol_type = other DNA
tggattatggacggtaaaaagcagtttgccattatcggtaatatgaatgccattacttataaagagatttttcca

SEQ ID NO: 308803 - DNA, 75 bp, synthetic construct
  source 1..75: mol_type = other DNA
ccgaggagcaagccgagcaggacgccattgccgattcgattattgatgaaattttgcgtgaggaagaggaccaat

SEQ ID NO: 308804 - DNA, 75 bp, synthetic construct
  source 1..75: mol_type = other DNA
gcagtcagtcaattacgtatgacctgtacgggaaaggacacgctgtgggtaggctggctgatgtgcttaagacag

SEQ ID NO: 308805 - DNA, 75 bp, synthetic construct
  source 1..75: mol_type = other DNA
atttgatattgactctgcggttggtgtgcaacttgacattcttggattgtggatcggacgtagccgtgttgtcag

SEQ ID NO: 308806 - DNA, 75 bp, synthetic construct
  source 1..75: mol_type = other DNA
gccttatttcacccgcagcctgttcccgcaggcattactcgcagagcctaatctggcaacagagagccgcgcctg

SEQ ID NO: 308807 - DNA, 75 bp, synthetic construct
  source 1..75: mol_type = other DNA
gaacgggtggctggggcggcccgcttgagctgaaagccacgccgggaaaaaaaatcgtctatatcaccgccggta

SEQ ID NO: 308808 - DNA, 75 bp, synthetic construct
  source 1..75: mol_type = other DNA
attgaccgtgaatataacacgttcactggcatgtatcctgacaaagcagaagtcgaacggtgggtgcggatgcat

SEQ ID NO: 308809 - DNA, 75 bp, synthetic construct
  source 1..75: mol_type = other DNA
ccttcattggcaggcacacgcttgttatatataactcagacgtttttgtttttctgggtcaacaaaaacagagtc

SEQ ID NO: 308810 - DNA, 75 bp, synthetic construct
  source 1..75: mol_type = other DNA
gagggcaaaagcctcccggaagttcagcccggtcagttaccgtgcacacaacctgcctgtgtcagaaaatctgtt

SEQ ID NO: 308811 - DNA, 75 bp, synthetic construct
  source 1..75: mol_type = other DNA
atgaatctggcgttgccggatctgatggtcgctcagactcacacccgcgcgtctttattcagttttttcccgcca

SEQ ID NO: 308812 - DNA, 75 bp, synthetic construct
  source 1..75: mol_type = other DNA
tgattgttattccttagtctttactgaagatttgatgaatatgtttcatctggatagtgagaatgctcaagattg

SEQ ID NO: 308813 - DNA, 75 bp, synthetic construct
  source 1..75: mol_type = other DNA
agtatgcggcgtcatgctcaggtttcctgccgaagaagcatttgaactttatcgacagattatggatgacgaatc

SEQ ID NO: 308814 - DNA, 75 bp, synthetic construct
  source 1..75: mol_type = other DNA
acactccttctgaaagggctggagtgtgatcatgccctgatactggatgccggcagcatgagtgccagcaatctg

SEQ ID NO: 308815 - DNA, 75 bp, synthetic construct
  source 1..75: mol_type = other DNA
gtggtggtgacatgcgcaggtgagtccgagggagtggagttgtataccgacgaaaaaaagcctcacagggagatg

SEQ ID NO: 308816 - DNA, 75 bp, synthetic construct
  source 1..75: mol_type = other DNA
ccggataaactggaaattctctgtgctcagcgcaataatctggttacttttcctcaattttctgatagaaacaat

SEQ ID NO: 308817 - DNA, 75 bp, synthetic construct
  source 1..75: mol_type = other DNA
ccagtaaaggcctgattgtagcgccagcgggatgtggcaaaacccacctgattactgaagcacttggttttgcgc

SEQ ID NO: 308818 - DNA, 75 bp, synthetic construct
  source 1..75: mol_type = other DNA
acatttatgctggctcatacactgatgaagaactgataaattttttggaaaccgttgtagcagaattgaaatgcc

SEQ ID NO: 308819 - DNA, 75 bp, synthetic construct
  source 1..75: mol_type = other DNA
atgatttttacgtcaagttgctgcgataatttatcaatagaaaagattgttaaacgtgctgaaaaaggcgatagc

SEQ ID NO: 308820 - DNA, 75 bp, synthetic construct
  source 1..75: mol_type = other DNA
attataatcgcgatagcgcaattgactctccggacgacgaaaaggccttttactggctgaagctggccgctgagc

SEQ ID NO: 308821 - DNA, 75 bp, synthetic construct
  source 1..75: mol_type = other DNA
tatggcgatgatggtcagtctggttccgacagataactcacaccttttccagttgggagctaatacctatgcatt

SEQ ID NO: 308822 - DNA, 75 bp, synthetic construct
  source 1..75: mol_type = other DNA
ctattcaaccgcgggattctacacgctctcagacactatgtaccagcacatggacggctatgaatttaatgatga

SEQ ID NO: 308823 - DNA, 75 bp, synthetic construct
  source 1..75: mol_type = other DNA
cgcaaaataatcttgggtggatgtacagaaatggcaacggagtcgcacaagactatgcgctggcatttttctggt

SEQ ID NO: 308824 - DNA, 75 bp, synthetic construct
  source 1..75: mol_type = other DNA
ttgctcaaaacaagacactcgccgcattctggtatttgaaaagcgcacagcagggtaatcggcatgcccagtttc

SEQ ID NO: 308825 - DNA, 75 bp, synthetic construct
  source 1..75: mol_type = other DNA
ggggcaacagcgtggtacgcagaatacgatgaatggggcaatctgctgagtgaggataacccgcatcatctgcaa

SEQ ID NO: 308826 - DNA, 75 bp, synthetic construct
  source 1..75: mol_type = other DNA
tgttgattggggttttcaatgaggaaagtttccagggtacaatctccattaacctgtttccgcaaagcaagtggc

SEQ ID NO: 308827 - DNA, 75 bp, synthetic construct
  source 1..75: mol_type = other DNA
ctcgtggtacagtgggaaagtatgctcttttagcaagagatatggcttttagtcaatccaattatggcattgttt

SEQ ID NO: 308828 - DNA, 75 bp, synthetic construct
  source 1..75: mol_type = other DNA
tgtctctcaagggagatggtgaccgggttcacaatatagcccctgaggttgcctctctgggggctgatgataccg

SEQ ID NO: 308829 - DNA, 75 bp, synthetic construct
  source 1..75: mol_type = other DNA
ttaaagacgcatgtagtttttcgtatggaaaaatgcctaagaaagaaaaaattgggcatggttcatttcagatat

SEQ ID NO: 308830 - DNA, 75 bp, synthetic construct
  source 1..75: mol_type = other DNA
aaagatgttcagtatcacttaatcgatagcaaatatgataaatacacgtcttccaaaggtgatatccttataact

SEQ ID NO: 308831 - DNA, 75 bp, synthetic construct
  source 1..75: mol_type = other DNA
actctggaatctatggctgaaaccttgtttaggcaatggtttgatgtggatagcaatgatgaatggcaagaaaaa

SEQ ID NO: 308832 - DNA, 75 bp, synthetic construct
  source 1..75: mol_type = other DNA
tgcgcggtcaggcattacgcccaatgcgcaaaccgttagtgataatgatgagtaagcgtttacttcgttttaaag

SEQ ID NO: 308833 - DNA, 75 bp, synthetic construct
  source 1..75: mol_type = other DNA
gcatggctatgacggacaagggccggagcactcttctgcgcgtcctgagcgctggctgcaactgtgcgcagaaaa

SEQ ID NO: 308834 - DNA, 75 bp, synthetic construct
  source 1..75: mol_type = other DNA
agggtgattggctatgacacaaaaacggaggtttgcggtcacggtttcaggacgatggcctgtagcgccctgaat

SEQ ID NO: 308835 - DNA, 75 bp, synthetic construct
  source 1..75: mol_type = other DNA
gatacttgagttaagtggaaaggaattttttctcgtgttggtgaaacagctttacaagttgagaaaaaatatctg

SEQ ID NO: 308836 - DNA, 75 bp, synthetic construct
  source 1..75: mol_type = other DNA
ccaaataccgcgagctggctaaaaaaagtcactacatgaatggattgtcgatgttgattactgaggtaacgcgcg

SEQ ID NO: 308837 - DNA, 75 bp, synthetic construct
  source 1..75: mol_type = other DNA
aagatcgtgaagctgtaattaagtctcttactcactggattgactcgaatttataccggcccattaccgttttag

SEQ ID NO: 308838 - DNA, 75 bp, synthetic construct
  source 1..75: mol_type = other DNA
tatggcagcgtatttgacactattacgacaagaactttcgagtctgtaaacttgaagtttccttctttaaattca

SEQ ID NO: 308839 - DNA, 75 bp, synthetic construct
  source 1..75: mol_type = other DNA
tgatgaatttttgcaaacaataatacgcaaaggagcatcaataggtgctaacgcaaccatcctgccaggaattga

SEQ ID NO: 308840 - DNA, 75 bp, synthetic construct
  source 1..75: mol_type = other DNA
aaaggagcttccattggagctaatgcaactatattacctggaataacaattggtgaaaatgctatggttggggct

SEQ ID NO: 308841 - DNA, 75 bp, synthetic construct
  source 1..75: mol_type = other DNA
ttcaaacagaacatattggtgagaacaccagagtatggcagtattcagtaattttacccgaagcaataattggag

SEQ ID NO: 308842 - DNA, 75 bp, synthetic construct
  source 1..75: mol_type = other DNA
atgaccactattaccaaagagcgactactgacaatcaagcagtggcgcgaaacatacggacctggtagcaacgtt

SEQ ID NO: 308843 - DNA, 75 bp, synthetic construct
  source 1..75: mol_type = other DNA
aagtgggaattgcttggtcaggtttataccggaccgtggaagtggacatacgtatcaactggtgaatggaaggta

SEQ ID NO: 308844 - DNA, 75 bp, synthetic construct
  source 1..75: mol_type = other DNA
gcggggagtgttgtaaccaaaaatgtaccgccatgcgcaatagtagtaggtaatccagctcgatttattaaatgg

SEQ ID NO: 308845 - DNA, 75 bp, synthetic construct
  source 1..75: mol_type = other DNA
tacctaaaaaaaagtactatagccggaaagttgatctttttattaactatattgttgcgtcctccgctaataaaa

SEQ ID NO: 308846 - DNA, 75 bp, synthetic construct
  source 1..75: mol_type = other DNA
cgccgctaccagctgccgctgggagtgacggaaatcccgcgcccgctgcaacgcgtggcggtatcgctggcgttt

SEQ ID NO: 308847 - DNA, 75 bp, synthetic construct
  source 1..75: mol_type = other DNA
ctacgacgacgccattaaaaccctgcgtgagatggcgaacggcacccgtgacctgggcctgccgacgtatgccac

SEQ ID NO: 308848 - DNA, 75 bp, synthetic construct
  source 1..75: mol_type = other DNA
gcggggtccgtagtgacgaaatctgttccagattatgctctggtatatggtaatccagcacaagtagtgaggttg

SEQ ID NO: 308849 - DNA, 75 bp, synthetic construct
  source 1..75: mol_type = other DNA
ggggcaggctctgttgtaacgaaagatgtgcctgataatgctttggttttgggtaatccagcaaggatcgtgaaa

SEQ ID NO: 308850 - DNA, 75 bp, synthetic construct
  source 1..75: mol_type = other DNA
aaggcagccgttgcggaagaaattgaagttatcaatcgtggtggacagcggtattgcgtgaaggacggcatgtct

SEQ ID NO: 308851 - DNA, 75 bp, synthetic construct
  source 1..75: mol_type = other DNA
gatgaattcatatatcctttaaataaaagaataattgtacactcaaataacatctctattataaaccatgaaggg

SEQ ID NO: 308852 - DNA, 75 bp, synthetic construct
  source 1..75: mol_type = other DNA
atccgtgcggagcgctggatcaactggcgtcgtcgccgtaccgcggcggtggcggtgatcaccggagtgaactac

SEQ ID NO: 308853 - DNA, 75 bp, synthetic construct
  source 1..75: mol_type = other DNA
ccggtggagctggtttccatgttccagaccggcagcgtggccattcgtgcggagcgctggatcaactggcgtcgt

SEQ ID NO: 308854 - DNA, 75 bp, synthetic construct
  source 1..75: mol_type = other DNA
tggctttggaagctgggcagtggtattacgctggataacaatgataatgatctagacgagaccaagcgctccctt

SEQ ID NO: 308855 - DNA, 75 bp, synthetic construct
  source 1..75: mol_type = other DNA
gactatagctatagattatataagcctgtttccggattcatatttttttattgatattccacaacttgatttata

SEQ ID NO: 308856 - DNA, 75 bp, synthetic construct
  source 1..75: mol_type = other DNA
cctttccaggtgtttctaatcttgataatgtacatcacagattgagtgcattaacttcattacatagcaagttga

SEQ ID NO: 308857 - DNA, 75 bp, synthetic construct
  source 1..75: mol_type = other DNA
cctggacggtcaaaaccaccactaattccacaccggttgcgccgcacctgtcacctaaaagcgcgcactcactta

SEQ ID NO: 308858 - DNA, 75 bp, synthetic construct
  source 1..75: mol_type = other DNA
ttcaccgcgactcttaagcaggatgacaatcagcagatccgggccggagattttaaagcgactggcatcttctca

SEQ ID NO: 308859 - DNA, 75 bp, synthetic construct
  source 1..75: mol_type = other DNA
tatcgtgctaagccccgggcagtctcatgaaagccagttcgcgcaacgacttctggacggcattggcgttcatcg

SEQ ID NO: 308860 - DNA, 75 bp, synthetic construct
  source 1..75: mol_type = other DNA
cgcgaaggcctcactctcgtcaggagatacgttaagagtcagtttttttattggagatgaggcgatacttactct

SEQ ID NO: 308861 - DNA, 75 bp, synthetic construct
  source 1..75: mol_type = other DNA
atgaataacgcagagaaaaatgaaattaaatccgcatccgccagcaccagaaagcatcttcatgatttttatgtt

SEQ ID NO: 308862 - DNA, 75 bp, synthetic construct
  source 1..75: mol_type = other DNA
agatgtcacctgaattctgctcgtgtggcatgggtcgaaaaacactgcattaaggagatgggacataatgagccg

SEQ ID NO: 308863 - DNA, 75 bp, synthetic construct
  source 1..75: mol_type = other DNA
caccattcggtaagatcaaaacctcagaggcgattacaggccgttatacgggtagtgaatttgagtacaaggtga

SEQ ID NO: 308864 - DNA, 75 bp, synthetic construct
  source 1..75: mol_type = other DNA
attttattatacccggagcgaatcagattggttgtgtggcgtttgacagaactggtactaccagaattgggcgct

SEQ ID NO: 308865 - DNA, 75 bp, synthetic construct
  source 1..75: mol_type = other DNA
gtgctaaatggggtggcattgatgctttctgcctttgtgatgtatccggtcacacagcaggccctggattattat

SEQ ID NO: 308866 - DNA, 75 bp, synthetic construct
  source 1..75: mol_type = other DNA
ccttactggccttttccaccttactgccgtttattatcgcctcagggacctgttttgttaaattttctgtggttt

SEQ ID NO: 308867 - DNA, 75 bp, synthetic construct
  source 1..75: mol_type = other DNA
tggccggtctggtctgccagattgaacgcagtgttcatgcattacgtgagacgtttgaccttgaggccgctccat

SEQ ID NO: 308868 - DNA, 75 bp, synthetic construct
  source 1..75: mol_type = other DNA
tcctgatgcgtctgccggagtggccggaggagcgactggcagagttgctgcctcttgagggatttaccttctccg

SEQ ID NO: 308869 - DNA, 75 bp, synthetic construct
  source 1..75: mol_type = other DNA
cgaagatggatcgcatggcagatgagtggtcacgcaccactggcctcaacaatgactatgttgagggcgagcgtt

SEQ ID NO: 308870 - DNA, 75 bp, synthetic construct
  source 1..75: mol_type = other DNA
gcaggattttactattcggcatggtgtttctgctgttatctggttgtgataataatccggaagaattaaaactgg

SEQ ID NO: 308871 - DNA, 75 bp, synthetic construct
  source 1..75: mol_type = other DNA
gtctatttttatttagttcatatacggtggcaaacatgaatactacaaaatattctgcatattttaaaacgcaaa

SEQ ID NO: 308872 - DNA, 75 bp, synthetic construct
  source 1..75: mol_type = other DNA
ctgctaatcacaataaagtgatggaattaatacattcagataagctcctaacacaagaagatagggaattcatat

SEQ ID NO: 308873 - DNA, 75 bp, synthetic construct
  source 1..75: mol_type = other DNA
atcagcccgcgtctggtgacgaataaagatattccggatatctgtatcagccgcaatgagttcaaagccatgagc

SEQ ID NO: 308874 - DNA, 75 bp, synthetic construct
  source 1..75: mol_type = other DNA
ttaaccgagtggattctctatgcgcagaaagtcgaatccacggatacctccatccttccagtaacgtttcccgaa

SEQ ID NO: 308875 - DNA, 75 bp, synthetic construct
  source 1..75: mol_type = other DNA
caccaccattgagggggggctgcagactgttctcaatggcggaaatgtctccgggacactcattagcggaggtga

SEQ ID NO: 308876 - DNA, 75 bp, synthetic construct
  source 1..75: mol_type = other DNA
taagattttatcttacaagaacagtcgcctatactgtcattaataagatgaacatagcgattgatacgtgtaaaa

SEQ ID NO: 308877 - DNA, 75 bp, synthetic construct
  source 1..75: mol_type = other DNA
atcaaataaaagaaaccatcaataataaattcgatcatgaaattcatgattgggacattataaaaaactcaatca

SEQ ID NO: 308878 - DNA, 75 bp, synthetic construct
  source 1..75: mol_type = other DNA
gggatacgcagagccagaaacaggatgtggcagacctgaaccgtgacgcagcacatgcaaatcagacgctgtccc

SEQ ID NO: 308879 - DNA, 75 bp, synthetic construct
  source 1..75: mol_type = other DNA
gagttgaatgaattaagaaaaagaaatgcagagcttcaagaaaaattggcacaatttgaaaatcgctctaattat

SEQ ID NO: 308880 - DNA, 75 bp, synthetic construct
  source 1..75: mol_type = other DNA
tggcagggattgcaatgtttgtcatgtcgctcctttatgtggcgatggcggtaactgcgcctgcgattactgaag

SEQ ID NO: 308881 - DNA, 75 bp, synthetic construct
  source 1..75: mol_type = other DNA
agcagagaagatttctccttacgttaatcaaacgcgcaacccaggaaaagaatttccaaaagggatgttatgcct

SEQ ID NO: 308882 - DNA, 75 bp, synthetic construct
  source 1..75: mol_type = other DNA
ctgaacattactacgccatttgtcctcgttggactggggctgatattcccgctgcttgcacgtaaagcgaataca

SEQ ID NO: 308883 - DNA, 75 bp, synthetic construct
  source 1..75: mol_type = other DNA
gagcggcggcagttacgacgtgcattacagtattacgccgttaagtactctggacggcagcaatattggttcggt

SEQ ID NO: 308884 - DNA, 75 bp, synthetic construct
  source 1..75: mol_type = other DNA
tcaagcttactcttaacagaataagtaacaatttgaactatagaaagcaaaaaccgttttttgagttagatataa

SEQ ID NO: 308885 - DNA, 75 bp, synthetic construct
  source 1..75: mol_type = other DNA
gccgtgaattacctcgcttccctggtgcgcagtcactaccgcgagcagcgcccgaaacagaagcgcgaaagctgg

SEQ ID NO: 308886 - DNA, 75 bp, synthetic construct
  source 1..75: mol_type = other DNA
atctgtttttttattctttggtgagaaacatctatgtataactccatattctcttttgcagaaatactggaatta

SEQ ID NO: 308887 - DNA, 75 bp, synthetic construct
  source 1..75: mol_type = other DNA
acgaatctctatttcaagatccgcgaagacaaccgccgcagcaggagccgagatgaacccaacgttgaggaataa

SEQ ID NO: 308888 - DNA, 75 bp, synthetic construct
  source 1..75: mol_type = other DNA
catcattgccgtactgacgtatctgacgaatctctatttcaagatccgcgaagacaaccgccgcagcaggagccg

SEQ ID NO: 308889 - DNA, 75 bp, synthetic construct
  source 1..75: mol_type = other DNA
aatggtgatttacgccattgcgaataccctgggacaagtagctgcgctggtattctcgattgatgcgccgcttaa

SEQ ID NO: 308890 - DNA, 75 bp, synthetic construct
  source 1..75: mol_type = other DNA
ccatcagataccgttccgtctggttatgccctgatgcaggggcagacttttgacaaatctgcttacccgaaactt

SEQ ID NO: 308891 - DNA, 75 bp, synthetic construct
  source 1..75: mol_type = other DNA
ttgactcacgaatctcatgcacgagataaaataaaaaaagcgaaaggtaagcctatctctgttgagaaaaaacaa

SEQ ID NO: 308892 - DNA, 75 bp, synthetic construct
  source 1..75: mol_type = other DNA
aacaggtgaagtgacgatcaatacaccacttaattctcctaaggggattaagggaaattctgatacagctacgaa

SEQ ID NO: 308893 - DNA, 75 bp, synthetic construct
  source 1..75: mol_type = other DNA
atgagattttattgggaaactacagaaaatgagaatacaggtgttatagccaatatatcagactcattttataaa

SEQ ID NO: 308894 - DNA, 75 bp, synthetic construct
  source 1..75: mol_type = other DNA
ttgtcgtatatgctattatattaatctttgttggaagaatgcagataaataatcgtaacaaaaataaaggcaata

SEQ ID NO: 308895 - DNA, 75 bp, synthetic construct
  source 1..75: mol_type = other DNA
gaagcgagtttccaataccgttagatgatgaaacaggaacgcattttttgaatggaatgaaccgccccgggaatc

SEQ ID NO: 308896 - DNA, 75 bp, synthetic construct
  source 1..75: mol_type = other DNA
ttcgatcgccagaaggcaagaggctatcgtctcaatatcgccgccggaactgcagtgcgcttcgaaccaggccaa

SEQ ID NO: 308897 - DNA, 75 bp, synthetic construct
  source 1..75: mol_type = other DNA
gatttcacctacattaccaccatttcaatgctggtttttgcggttggtggtgctgagaagatttctccttacgtt

SEQ ID NO: 308898 - DNA, 75 bp, synthetic construct
  source 1..75: mol_type = other DNA
aaaagttataactttgtcgatgatcatggtcatcgactggatatgtgccaggacttcaaagatttggttgagctt

SEQ ID NO: 308899 - DNA, 75 bp, synthetic construct
  source 1..75: mol_type = other DNA
agtttcctcgtttgaatgggaagagtcccgaggaaatcgtagagctattcaaaagttataactttgtcgatgatc

SEQ ID NO: 308900 - DNA, 75 bp, synthetic construct
  source 1..75: mol_type = other DNA
ccaataccgttagatgatgaaacaggaacgcattttttgaatggactgctatgcgcagcctctgtagaggctaag

SEQ ID NO: 308901 - DNA, 75 bp, synthetic construct
  source 1..75: mol_type = other DNA
tcgatggtctctatacctatccgatggctgcgacaaatttttgtaatgatcacatatctcaaaattcattcttga

SEQ ID NO: 308902 - DNA, 75 bp, synthetic construct
  source 1..75: mol_type = other DNA
atgggcggcaatttgttccattgccccaagattggctgtacaccagagactctgcgtgtgtgggttcgtcagcat

SEQ ID NO: 308903 - DNA, 75 bp, synthetic construct
  source 1..75: mol_type = other DNA
tggcatatatagccgctctgccgttcagcaggcctttagtttactgggatggccaagtattaaaatcaacgactg

SEQ ID NO: 308904 - DNA, 75 bp, synthetic construct
  source 1..75: mol_type = other DNA
cactagtgatcacatctattgtttgttcgatgcttttagtcagtgtttgtataatgttgctcgtgatggcagtcc

SEQ ID NO: 308905 - DNA, 75 bp, synthetic construct
  source 1..75: mol_type = other DNA
ggttttcaccggataacagcagtgggacataaagataaagcgctggaatacgggaaagacatctggatgaagttc

SEQ ID NO: 308906 - DNA, 75 bp, synthetic construct
  source 1..75: mol_type = other DNA
caagaagtgcgtgaaattgtttaattttaaatatagagagacattcaacagtgataaaactcaatgtttaaatga

SEQ ID NO: 308907 - DNA, 75 bp, synthetic construct
  source 1..75: mol_type = other DNA
tcgccagtttcgcctggtttattcgctggtttggtcgcgttgtgcctggcaaaccgagcgaggccgtcgccgatg

SEQ ID NO: 308908 - DNA, 75 bp, synthetic construct
  source 1..75: mol_type = other DNA
cgatggtcaggttgcagagggtatggtcatggtgcgtattttcatgaaaggagatcactcaataacggcgttttt

SEQ ID NO: 308909 - DNA, 75 bp, synthetic construct
  source 1..75: mol_type = other DNA
aagcatcctcggcacgattttgcaggaaaacggggtgaccgagtggagcccgctgttcagcgagcctcatccttc

SEQ ID NO: 308910 - DNA, 75 bp, synthetic construct
  source 1..75: mol_type = other DNA
ataaccccaccgcttaaaaattataatgagcggttacacaatactaatttatttaacccaaaatatcaaaaaaaa

SEQ ID NO: 308911 - DNA, 75 bp, synthetic construct
  source 1..75: mol_type = other DNA
agtatttttttgcccgcttattgaaaccagccccccagagcagttatcgcacggcagtaaaccatttcatatcaa

SEQ ID NO: 308912 - DNA, 75 bp, synthetic construct
  source 1..75: mol_type = other DNA
atgacgccagaaacagacaacgccatccgcgccgcctgccgtcgctgcaccgaggaaatccagcaggccatgcgc

SEQ ID NO: 308913 - DNA, 75 bp, synthetic construct
  source 1..75: mol_type = other DNA
ggttgctgaaagcaactttaaagatatcgccaatcattccagcgaatgtttttcttacagttgttatgccgctcc

SEQ ID NO: 308914 - DNA, 75 bp, synthetic construct
  source 1..75: mol_type = other DNA
ttgggtattgggaatcctgcttttatccaaagtcggcaatacgtttcgtatgtttaccccgtggcaatatacctt

SEQ ID NO: 308915 - DNA, 75 bp, synthetic construct
  source 1..75: mol_type = other DNA
atggttggcgagtatatcggttcagtatttctggggccgttgttacttcccgtgcttgtgtcaggtattctgtgc

SEQ ID NO: 308916 - DNA, 75 bp, synthetic construct
  source 1..75: mol_type = other DNA
gtcccaaaccgacactggaatacggtttctattagtactgataaaaccattgatataagaagtgaagataatagc

SEQ ID NO: 308917 - DNA, 75 bp, synthetic construct
  source 1..75: mol_type = other DNA
ttcaactctatgcaatgactgatggtgcctataagcattgggatgtcagaccaaggttttctgagaagacaatgc

SEQ ID NO: 308918 - DNA, 75 bp, synthetic construct
  source 1..75: mol_type = other DNA
cttgcatctcatgcagccattcgtggcattagacacacgctaggcacttcctttttctcaattgaaagtgcattt

SEQ ID NO: 308919 - DNA, 75 bp, synthetic construct
  source 1..75: mol_type = other DNA
ccgccgcaagcgatttccggcccaccaacgggcgaaaaacaaaatataacgaccggatagctaagcagatttgct

SEQ ID NO: 308920 - DNA, 75 bp, synthetic construct
  source 1..75: mol_type = other DNA
cagtggctggatgttgcctcttcagcacaacactacgctatcggttgggttgcgctatggcttgtttcgcttgct

SEQ ID NO: 308921 - DNA, 75 bp, synthetic construct
  source 1..75: mol_type = other DNA
ctggcgcacgtttacaggaggggtcctccatcgacatatctctgtgaagagcgagccagaaaagacagatgtatg

SEQ ID NO: 308922 - DNA, 75 bp, synthetic construct
  source 1..75: mol_type = other DNA
cgaaagcggcaacgctactcggcatggcacgactacaagatctgcgcaacctgccgcgcccaatacaggagaatg

SEQ ID NO: 308923 - DNA, 75 bp, synthetic construct
  source 1..75: mol_type = other DNA
aagcatcctcggcacgattttgcaggaaaacggggtgaccgactggagtccgctgttcagcgagccacatccttc

SEQ ID NO: 308924 - DNA, 75 bp, synthetic construct
  source 1..75: mol_type = other DNA
accccgcgaaaaagacttcaccctgcatgatggtgatggcctgttcttactcgtcaaaacctccggtaaaaaact

SEQ ID NO: 308925 - DNA, 75 bp, synthetic construct
  source 1..75: mol_type = other DNA
attgttgggtgaggatgtatcttcggataagctaaatgcattagttaaagaattaatgactttagtagaaaataa

SEQ ID NO: 308926 - DNA, 75 bp, synthetic construct
  source 1..75: mol_type = other DNA
ttgatcgcatgtcagtacgtgaattgcgtcaggccctgcgcgaagcccgcgaaaccaacgcagcacaacagcgcg

SEQ ID NO: 308927 - DNA, 75 bp, synthetic construct
  source 1..75: mol_type = other DNA
cacgctggcgagttcccgaattgtcgctgttataaagaaattgtttttcccacctcccattcttaccccgcctga

SEQ ID NO: 308928 - DNA, 75 bp, synthetic construct
  source 1..75: mol_type = other DNA
atggatgcgctggagcgctacagcgaaatcatcaccccctgggcgacgaaggttgctgagaactttaccgccgac

SEQ ID NO: 308929 - DNA, 75 bp, synthetic construct
  source 1..75: mol_type = other DNA
ccgcgcgaagatgatcgcccgcaccgaaatcggccgggccacgacagcgctcacccaggcgcgcgctgagtcgat

SEQ ID NO: 308930 - DNA, 75 bp, synthetic construct
  source 1..75: mol_type = other DNA
tttgacctgccggatgagccaacaggccatgccgcgccttcatggctgactgagccgacgccacagattaacggg

SEQ ID NO: 308931 - DNA, 75 bp, synthetic construct
  source 1..75: mol_type = other DNA
aacgcagcacaacagcgcgttctcgccgataaaaacgagaagattgacacgctctccacaaagctggagaagaaa

SEQ ID NO: 308932 - DNA, 75 bp, synthetic construct
  source 1..75: mol_type = other DNA
ctgaattagtagagaattcacagctatccgatgatataaacgtcaatcttaatgccatggctgagcatcgccttg

SEQ ID NO: 308933 - DNA, 75 bp, synthetic construct
  source 1..75: mol_type = other DNA
cgagtatactaggtgatggatctatctcagggatggaaaaattacttcaagaacacaaacagctatcgctgacca

SEQ ID NO: 308934 - DNA, 75 bp, synthetic construct
  source 1..75: mol_type = other DNA
tttgacctgccggacgagccaacaggctatgacgcgccttcatggctgactgagccgacgccacagattaacggg

SEQ ID NO: 308935 - DNA, 75 bp, synthetic construct
  source 1..75: mol_type = other DNA
tttgacctgccggacgagccaacaggcaatgtcgcgccttcatggctgactgagccgacgccacagattaacggg

SEQ ID NO: 308936 - DNA, 75 bp, synthetic construct
  source 1..75: mol_type = other DNA
atggatgcgctggagcgctacagcgaaatcatcaccccctgggcgactaaggttgctgagagcttcaccgccgac

SEQ ID NO: 308937 - DNA, 75 bp, synthetic construct
  source 1..75: mol_type = other DNA
acgctgctgttggcgcacagcctggggcatgtcatgaaaattgagggcgatgtggcgatctctctgttggatcgg

SEQ ID NO: 308938 - DNA, 75 bp, synthetic construct
  source 1..75: mol_type = other DNA
gaacgctgctggatgaccgttacctgagtctggacaggcagcaccaggggcttttgctgcatagccagtatcatc

SEQ ID NO: 308939 - DNA, 75 bp, synthetic construct
  source 1..75: mol_type = other DNA
atgatggtgataaatattcacgataatctgggaatcagtaagttaatcaaccttgataatgtcagtgtaatggaa

SEQ ID NO: 308940 - DNA, 75 bp, synthetic construct
  source 1..75: mol_type = other DNA
aagcatcctcggcacgattttgcaggaaaacggggtgaccgattggagcccgctgttcagcgagccgcatccttc

SEQ ID NO: 308941 - DNA, 75 bp, synthetic construct
  source 1..75: mol_type = other DNA
aagcatcctcggcacgattttgcaggaaaacggggtgaccgaatggagtccgctgttcagcgagccccatccttc

SEQ ID NO: 308942 - DNA, 75 bp, synthetic construct
  source 1..75: mol_type = other DNA
aaaagagcgttttctgaatgagttacgagaaaatggtcgaaaaatatctttagctgcagattctccggatgaggt

SEQ ID NO: 308943 - DNA, 75 bp, synthetic construct
  source 1..75: mol_type = other DNA
atcctgctcgacgaacccggtgccggtacgccggatgaaggtgtcggcatgttcgtcaacgctgacgggcaagag

SEQ ID NO: 308944 - DNA, 75 bp, synthetic construct
  source 1..75: mol_type = other DNA
ctatagcatccacacctgtatatgacaattattttaataacactactgctttcagaccaaaacctgaagatatct

SEQ ID NO: 308945 - DNA, 75 bp, synthetic construct
  source 1..75: mol_type = other DNA
cagacatgcacgcgtcacagttatttgggggccggactttgcgcgaggacttgccgggccgcttttttacgatac

SEQ ID NO: 308946 - DNA, 75 bp, synthetic construct
  source 1..75: mol_type = other DNA
agctcgatgacttcaagaccgcattcggtcgcaattggcgtttggcttcagatgggtttgaagaagcggtcaaac

SEQ ID NO: 308947 - DNA, 75 bp, synthetic construct
  source 1..75: mol_type = other DNA
tgacgggaatcactcgaccgcagcaatggcggagcagtggcctttaagggaagaaatgaaaagcgcctgccgtga

SEQ ID NO: 308948 - DNA, 75 bp, synthetic construct
  source 1..75: mol_type = other DNA
atggtctttatgcgcagtgccagacctctgtcggcctgaatggtgcattccgccaggtcaattcctctcaatcag

SEQ ID NO: 308949 - DNA, 75 bp, synthetic construct
  source 1..75: mol_type = other DNA
agcaagccctgtcgctcggtgcgtccatcgaattcatcaaccactactttggcctttctacaccggaagtctgcg

SEQ ID NO: 308950 - DNA, 75 bp, synthetic construct
  source 1..75: mol_type = other DNA
tacagcgccaactgggattaagcaccggtggtgagtctggaagacgggctgcaacggcagcggatctccggacca

SEQ ID NO: 308951 - DNA, 75 bp, synthetic construct
  source 1..75: mol_type = other DNA
ctctctgtgctgcaagatgccagccaccaacaccctgagaataaaagcgcgcaggaagtgctcaataaagtgtgg

SEQ ID NO: 308952 - DNA, 75 bp, synthetic construct
  source 1..75: mol_type = other DNA
aaattgatatgggggaagccaaacagggcgaagccacatcacacacttacgccattaaaaacacctactacaagc

SEQ ID NO: 308953 - DNA, 75 bp, synthetic construct
  source 1..75: mol_type = other DNA
catgatgggggcggtaagtattgatctcggtctggacgactccgcgcttgatgcgagctttgtcatggggggggc

SEQ ID NO: 308954 - DNA, 75 bp, synthetic construct
  source 1..75: mol_type = other DNA
ttatcatgcctacgggagcattacgtaggccatataaagcgtatacgccgcatccggtaattcaaccgcctaaag

SEQ ID NO: 308955 - DNA, 75 bp, synthetic construct
  source 1..75: mol_type = other DNA
aatgaggtaattattggggttgaaataccttatcagacgagaatcggtaaatgttttagaatttggcatgctcat

SEQ ID NO: 308956 - DNA, 75 bp, synthetic construct
  source 1..75: mol_type = other DNA
ctccctgacagctaaccgactcacagtagatgttgttggtcaaacctctgccatcggcattaacttaattggtga

SEQ ID NO: 308957 - DNA, 75 bp, synthetic construct
  source 1..75: mol_type = other DNA
gggttagtatcatttcgaaaggtaataataaatgtgaaatttattttgatgcttttggtgaatgtggaagtgtga

SEQ ID NO: 308958 - DNA, 75 bp, synthetic construct
  source 1..75: mol_type = other DNA
ttctgtttgtgaacattattattctttaatctcacaatatcgggaaattcactgggttttcatggtgtcacgctc

SEQ ID NO: 308959 - DNA, 75 bp, synthetic construct
  source 1..75: mol_type = other DNA
acgtttgcttaagtggatgcagtctaaatacagactttcgaaccggaaggctcagcgaaagctggcgctggtaag

SEQ ID NO: 308960 - DNA, 75 bp, synthetic construct
  source 1..75: mol_type = other DNA
atcgatatttcgacaataaacattatccacgtggattctctcgtcatggtgatttcaccatcaaagaggcacaac

SEQ ID NO: 308961 - DNA, 75 bp, synthetic construct
  source 1..75: mol_type = other DNA
atgcgagctttgtcagtggggggcgcagttcgtgagctgttccttaagtatggcggcacgattgacggcacgctg

SEQ ID NO: 308962 - DNA, 75 bp, synthetic construct
  source 1..75: mol_type = other DNA
tgtaaaaagcagaataaataatgaaagaatatcatctcaatccggtgcctttttattattcggtaataacgccgt

SEQ ID NO: 308963 - DNA, 75 bp, synthetic construct
  source 1..75: mol_type = other DNA
aggcagctacagagcagaaagtgtcagctgagtgctggccggtagaaagcatcctccgcaacggcgagttcccgg

SEQ ID NO: 308964 - DNA, 75 bp, synthetic construct
  source 1..75: mol_type = other DNA
gacgctgcgcattggctgttcttcaactatggcacaaaatgttctcgccgggctgacagcaaaaatgctgaaaga

SEQ ID NO: 308965 - DNA, 75 bp, synthetic construct
  source 1..75: mol_type = other DNA
ctttgggggagctgttttcttcagaacaatatgggttagttgttaaattatacgccggaaacaacgtactggtta

SEQ ID NO: 308966 - DNA, 75 bp, synthetic construct
  source 1..75: mol_type = other DNA
gtcacttttcagggtgaagtaaccgatcagacctgttccgtaaatatcaacggtcaaaccaattcagtagtattg

SEQ ID NO: 308967 - DNA, 75 bp, synthetic construct
  source 1..75: mol_type = other DNA
gccgtgctcaatattactgatgccactgtatatttaggattggaaagaacaatgaaactaatcacagaaaaatac

SEQ ID NO: 308968 - DNA, 75 bp, synthetic construct
  source 1..75: mol_type = other DNA
gtgcgataaccagttccatgactatctgtacaatacgcttctatgcaccattgacgaggtgcgcgaaaatgataa

SEQ ID NO: 308969 - DNA, 75 bp, synthetic construct
  source 1..75: mol_type = other DNA
aattacatctgaacagctcgaaagcctgtggcagcgtctggcggataacttacccgtgaaagacagctataccgc

SEQ ID NO: 308970 - DNA, 75 bp, synthetic construct
  source 1..75: mol_type = other DNA
aaagaaaaaatacatacagggatccactttctacggtcagtattgcagggaaattgacctttacacaaggttgta

SEQ ID NO: 308971 - DNA, 75 bp, synthetic construct
  source 1..75: mol_type = other DNA
cgggaactggggatgagatgggagcctctgtctctgattattttaaaaagatgcaaccccgcagagatacctgga

SEQ ID NO: 308972 - DNA, 75 bp, synthetic construct
  source 1..75: mol_type = other DNA
ctcatggatttgaatgagcgtaagcaattcagtgccgtgagtgataatacacagcctgagtctgcatctgtgtgg

SEQ ID NO: 308973 - DNA, 75 bp, synthetic construct
  source 1..75: mol_type = other DNA
gctaagcgacagcgactttatcgcccaggtgtactggtatctgatgggcgttgacctgtctcgctttaactggca

SEQ ID NO: 308974 - DNA, 75 bp, synthetic construct
  source 1..75: mol_type = other DNA
gcgtgctgcggcaattgtcagggaaagagcatggtgtgccgtaggcacaaagatgcaaaacgggacgttttgcat

SEQ ID NO: 308975 - DNA, 75 bp, synthetic construct
  source 1..75: mol_type = other DNA
cctgaatgctgtcaggctgaaggatttacgcgggcgtattcgcgggaaaatggcgaagcgccatgatctcaggga

SEQ ID NO: 308976 - DNA, 75 bp, synthetic construct
  source 1..75: mol_type = other DNA
ttatttataaagcaaacaaatttatgcaaaagcttgacggaattgactcgtttagtataaccctgctatatgata

SEQ ID NO: 308977 - DNA, 75 bp, synthetic construct
  source 1..75: mol_type = other DNA
gcagaaatggatatctacgaaccgatgctgaactacatcgaggacaacgcatttgcggaagcgatggagattttt

SEQ ID NO: 308978 - DNA, 75 bp, synthetic construct
  source 1..75: mol_type = other DNA
gatccgctgcgggttattggttcgtttgtgctgggctctatggtaacgggcgctattgtcggtgcgatgaatatc

SEQ ID NO: 308979 - DNA, 75 bp, synthetic construct
  source 1..75: mol_type = other DNA
aagggtaagcctgccagtggtcgtgctgtattgtctcaggagcaggacggcattaaatcacacgcccacagtgcc

SEQ ID NO: 308980 - DNA, 75 bp, synthetic construct
  source 1..75: mol_type = other DNA
cgtcagggagcaatcagatttccagtactgccggagcacatgctcatactgtcgatattggtcagcataaccaca

SEQ ID NO: 308981 - DNA, 75 bp, synthetic construct
  source 1..75: mol_type = other DNA
tctaacatgacccatgcaccaaacgcggcatggagtaaaggtcaacctgatggtggcccaattcttcatactgat

SEQ ID NO: 308982 - DNA, 75 bp, synthetic construct
  source 1..75: mol_type = other DNA
atgagcctggtggatatcgccattcttatcctcaaactcattgttgcagcactgcaactgcttgatgctgttctg

SEQ ID NO: 308983 - DNA, 75 bp, synthetic construct
  source 1..75: mol_type = other DNA
gaagggagcgaggacgggcacggcgtggtatttccggctgaactggtgcggctgctggacagactggaggaagaa

SEQ ID NO: 308984 - DNA, 75 bp, synthetic construct
  source 1..75: mol_type = other DNA
ctttgccgaagcaatggacattttcatgcaccattttgaaacagatatccgtgggcgggtgaaagccaggatatc

SEQ ID NO: 308985 - DNA, 75 bp, synthetic construct
  source 1..75: mol_type = other DNA
ttgtgaaaagtttgtcccctgaaagtttaagatgctattttcctaaaaatagtaatccagaacttgattcttgga

SEQ ID NO: 308986 - DNA, 75 bp, synthetic construct
  source 1..75: mol_type = other DNA
aacgatcttcatcaaaaatcctgaaaccgggcgtgtccgggaggctgaagccggtatttatgcccgcacgctgga

SEQ ID NO: 308987 - DNA, 75 bp, synthetic construct
  source 1..75: mol_type = other DNA
aaccccctgtttctaaccttacctgtttgtttattttgggcttctttagggggatatctttctgtttcactaacc

SEQ ID NO: 308988 - DNA, 75 bp, synthetic construct
  source 1..75: mol_type = other DNA
ttactcaaccagcgctatggcagtggcgatgcctggatgtacgaaaccgagtcggtgatcaccatggtcctcggt

SEQ ID NO: 308989 - DNA, 75 bp, synthetic construct
  source 1..75: mol_type = other DNA
atgagctttttaaacagaaaaccagagcagagcaaagaggcgaaattattctcccgccagggtaaatccagccgg

SEQ ID NO: 308990 - DNA, 75 bp, synthetic construct
  source 1..75: mol_type = other DNA
cgctgattagcaaggcaaaacaaggcaaatcatcgctttcactggctgaacgcccggtgtcaacgtggacaaaag

SEQ ID NO: 308991 - DNA, 75 bp, synthetic construct
  source 1..75: mol_type = other DNA
aggacggatgagaaatccaatgaaattacagctatcccagaacttcttaacatgctggatattaaaggaaaaatc

SEQ ID NO: 308992 - DNA, 75 bp, synthetic construct
  source 1..75: mol_type = other DNA
gcgacatgaagtagaaagagagtataaagaatataaactggtacaaagtgcaaaactgaatattttgtataaccc

SEQ ID NO: 308993 - DNA, 75 bp, synthetic construct
  source 1..75: mol_type = other DNA
gcggaaagtcgaagttaggcaggataacaaaagccggtgattcgtatctgcgaacgcttctggtacaggggggct

SEQ ID NO: 308994 - DNA, 75 bp, synthetic construct
  source 1..75: mol_type = other DNA
atggactgacgtctctgcgggggcaacctgaattacgttacaacgatgattggtcaagatggccgagagtgtacg

SEQ ID NO: 308995 - DNA, 75 bp, synthetic construct
  source 1..75: mol_type = other DNA
tttcgaagattcactggcaccagactggaacaaagtgatcgacgggcaaattaacctgcgcgatgcggttaacgg

SEQ ID NO: 308996 - DNA, 75 bp, synthetic construct
  source 1..75: mol_type = other DNA
tcaacggtaaacatattcatgtgcggggagcaaaactgctcttcccgccgattcaacagccgtatcctccgcttt

SEQ ID NO: 308997 - DNA, 75 bp, synthetic construct
  source 1..75: mol_type = other DNA
ttcagggggaggtcaccccggtcagtgatgttcacgccggcacccgggaagtgcggcgcttccgtctgagtgtag

SEQ ID NO: 308998 - DNA, 75 bp, synthetic construct
  source 1..75: mol_type = other DNA
aagccaaacggttatgaaggggctggttatgcaagacactccaatgctgtcagccaaaaaatccactgttattga

SEQ ID NO: 308999 - DNA, 75 bp, synthetic construct
  source 1..75: mol_type = other DNA
aacccggtaaattctctctctgagtaccaggttaaagatatttttagcggaaaaactagctgctggaataaagta

SEQ ID NO: 309000 - DNA, 75 bp, synthetic construct
  source 1..75: mol_type = other DNA
atcaagattggttccactgctgttgcatatcgtctttcagaagtgcaggcatggattcgaggtgagtggattgag

SEQ ID NO: 309001 - DNA, 75 bp, synthetic construct
  source 1..75: mol_type = other DNA
atgaaaaaaatggcaattgtcgataaaaagggtctggagtacattcctaatatcgatcgtatgatccgtgagaaa

SEQ ID NO: 309002 - DNA, 75 bp, synthetic construct
  source 1..75: mol_type = other DNA
atgaaaaaaatggcagttgttgataaaaagggtctggagtacattcctaacatcgatcgtatgatccgtgagaaa

SEQ ID NO: 309003 - DNA, 75 bp, synthetic construct
  source 1..75: mol_type = other DNA
accattagctccggcaacacaacgtccggcgtgacgattgacagcgtctataacggcagcgagtccgcactggtg

SEQ ID NO: 309004 - DNA, 75 bp, synthetic construct
  source 1..75: mol_type = other DNA
acagtgcgaaaagcactggacgcattaacgcgcgaaaatctcctgacccgtgtgccgggtaagggaacgtttgtt

SEQ ID NO: 309005 - DNA, 75 bp, synthetic construct
  source 1..75: mol_type = other DNA
aactcagagagctttatgctacttatcaaaaaatatctacccctctgaaacacatgtttaattcattttttctag

SEQ ID NO: 309006 - DNA, 75 bp, synthetic construct
  source 1..75: mol_type = other DNA
gggcgacggcattactatgcagggctcgcaattagcgcagacgctgggcctggtgcaaggttcacgcttgaatag

SEQ ID NO: 309007 - DNA, 75 bp, synthetic construct
  source 1..75: mol_type = other DNA
atgggtaacgaagttaatgaaaaaataattgcagttatagtcaagacgttagcatatagagagtctatgttgtgt

SEQ ID NO: 309008 - DNA, 75 bp, synthetic construct
  source 1..75: mol_type = other DNA
atgcggcttaatattgccgacttcaaacggcgcatcaacgccttatttaaatcctcctttttatccgcgatcgcg

SEQ ID NO: 309009 - DNA, 75 bp, synthetic construct
  source 1..75: mol_type = other DNA
cactatcagatcgcgtaatccgtgaggatgaatgccgtaagttaacaggagtgtgccgcactacacgctacgaac

SEQ ID NO: 309010 - DNA, 75 bp, synthetic construct
  source 1..75: mol_type = other DNA
atgcgttacttcaacgttgaccaaatctacgcagatttgatcacaggccgaacaacacgaacacttgtttacagt

SEQ ID NO: 309011 - DNA, 75 bp, synthetic construct
  source 1..75: mol_type = other DNA
atgattgttaataaattggcttttgctctggggttactattagcaggcaactatgcacttgctcatgggcatcat

SEQ ID NO: 309012 - DNA, 75 bp, synthetic construct
  source 1..75: mol_type = other DNA
gtttatacgccaaacgcgggctctacgtcggccaggacaccttcacctataccgtcaccagcggcggcgtcaccg

SEQ ID NO: 309013 - DNA, 75 bp, synthetic construct
  source 1..75: mol_type = other DNA
cgtgggggtgagatgaagattaactatcgttataccacgccaacgacaggtggttcacgcatggatgtcagtctt

SEQ ID NO: 309014 - DNA, 75 bp, synthetic construct
  source 1..75: mol_type = other DNA
ccaacgtagcgtaattgcattaatgaccgagggggcacgtggtgacgagttacttaataatgcgctaattaatag

SEQ ID NO: 309015 - DNA, 75 bp, synthetic construct
  source 1..75: mol_type = other DNA
ttggcaactgatcattgcataacccaatctgctttcacgtttacggtgttgaaagattaccttgaaactcaggaa

SEQ ID NO: 309016 - DNA, 75 bp, synthetic construct
  source 1..75: mol_type = other DNA
atgcgcaaggcaattttgctggcaggtttactgctaagcaccggtcactcgtgggccaatattgtcattaatggc

SEQ ID NO: 309017 - DNA, 75 bp, synthetic construct
  source 1..75: mol_type = other DNA
ttctgcgcgagcatccgttggtgaatgcgcctgttattaaaatgatcagtcatccacaaaatccctttgtcaaat

SEQ ID NO: 309018 - DNA, 75 bp, synthetic construct
  source 1..75: mol_type = other DNA
ggtgctattggcatgggtggcctggcgtctgctacgcattattagcagccgtcgtctgaatcctcatcaacagta

SEQ ID NO: 309019 - DNA, 75 bp, synthetic construct
  source 1..75: mol_type = other DNA
ctccaccgccacgctcgcctttagcgtaacgccggtggcggacgcgaaggacgatacggccagcacccatgcggg

SEQ ID NO: 309020 - DNA, 75 bp, synthetic construct
  source 1..75: mol_type = other DNA
cgacaatggcaaggtgatttatacccctaacaccacgagctacgtcggcagcgatacgttcacctataccgtcac

SEQ ID NO: 309021 - DNA, 75 bp, synthetic construct
  source 1..75: mol_type = other DNA
ataccggcgtcagcgccgcgggcagcacgcaggatctgcaaagcgccttcaacagcggccagaccagccactgga

SEQ ID NO: 309022 - DNA, 75 bp, synthetic construct
  source 1..75: mol_type = other DNA
gcgaccaaccagctgcgcttcgactttgagtacatgaacccgatgccgggcggatcggttgataactgtattacc

SEQ ID NO: 309023 - DNA, 75 bp, synthetic construct
  source 1..75: mol_type = other DNA
atcaccgcgaatgtcctgcgcaccgtagcaataacgaacatcattctggagacaaatcaatatgccaggcagcag

SEQ ID NO: 309024 - DNA, 75 bp, synthetic construct
  source 1..75: mol_type = other DNA
acgggcgattaaggttgagttcatcaggttaccaatacgcaaaaccatatcgtaaccttcccctgtcagcgccag

SEQ ID NO: 309025 - DNA, 75 bp, synthetic construct
  source 1..75: mol_type = other DNA
atggggtcgagttggcgtatgcacaggcgatcatggggcatagttcagggtctattacttacgaccgttatgcta

SEQ ID NO: 309026 - DNA, 75 bp, synthetic construct
  source 1..75: mol_type = other DNA
cagcgttgctggcactgatctcaccttccgaaggggaggctaatcagtgtcggacgatattgtcgcagatgaaga

SEQ ID NO: 309027 - DNA, 75 bp, synthetic construct
  source 1..75: mol_type = other DNA
tggtagcgaaaatcgacactgaaaaatcgtcggtctttgattatcgcggttttaatgggcgaattggcgatagcg

SEQ ID NO: 309028 - DNA, 75 bp, synthetic construct
  source 1..75: mol_type = other DNA
tttcatatcaaagagttaaaaatggagagagaaataagggggtcgaagcgcttaatcgattatatttacagaacc

SEQ ID NO: 309029 - DNA, 75 bp, synthetic construct
  source 1..75: mol_type = other DNA
ttcaaaaagcttaccccgattttgacgtacttttaaaatcaagaccagcgacacactacaaagtatacaaaattc

SEQ ID NO: 309030 - DNA, 75 bp, synthetic construct
  source 1..75: mol_type = other DNA
gtgatatgaacgttatgcctgggggggcactgcgtgtcgctaaaaccactatcagcggcaacctggagaatggcg

SEQ ID NO: 309031 - DNA, 75 bp, synthetic construct
  source 1..75: mol_type = other DNA
atgacacttccccgagacgttcatgcgtcccgccagggacagcatgactatttgtgtggcatctacagcctgatt

SEQ ID NO: 309032 - DNA, 75 bp, synthetic construct
  source 1..75: mol_type = other DNA
ttgaaaaacttaaactagaaacccaagacattgagaccggtgtacaacatcctatcgatcttgtagcagacaaat

SEQ ID NO: 309033 - DNA, 75 bp, synthetic construct
  source 1..75: mol_type = other DNA
aagtggttgatgcgtaatgaagttcgaatcaaaactctagaaatcggtatcgctcggccaaagaatgcgcaacta

SEQ ID NO: 309034 - DNA, 75 bp, synthetic construct
  source 1..75: mol_type = other DNA
atttttatcaatgtcacactataagcactgatacaaatgcaggagttaattcacctgaagctgttttttcaaaaa

SEQ ID NO: 309035 - DNA, 75 bp, synthetic construct
  source 1..75: mol_type = other DNA
gtgcggaacagttacgtaatgccgatgcgttaaccctgcaggcaccagcgcagcgcgtgacgctggaattaagcg

SEQ ID NO: 309036 - DNA, 75 bp, synthetic construct
  source 1..75: mol_type = other DNA
gaaaaggttttttatcaggcacgttaataggtgctttaggcggcttaattggcctcggtggcgctgagttccgcc

SEQ ID NO: 309037 - DNA, 75 bp, synthetic construct
  source 1..75: mol_type = other DNA
agctcagctcccccttccgctacgacattcagtttaccagccgcgataaagcaataacgccggagtcggtgctga

SEQ ID NO: 309038 - DNA, 75 bp, synthetic construct
  source 1..75: mol_type = other DNA
tttattaaagctagatttggtcaatttttttaataaaataacaccggaacttttatttaaggcattagctagaca

SEQ ID NO: 309039 - DNA, 75 bp, synthetic construct
  source 1..75: mol_type = other DNA
gggcgtttttcattttttggacaaagtgccaatcatgcgggggttattatttgggcaccggatgagatttttatt

SEQ ID NO: 309040 - DNA, 75 bp, synthetic construct
  source 1..75: mol_type = other DNA
tatttccgtgactcgatttaattctagaatagctgataatataggtctgggattagccagtacacttggaagtag

SEQ ID NO: 309041 - DNA, 75 bp, synthetic construct
  source 1..75: mol_type = other DNA
ttttaagctcgacttacgcagatctggtagatgaaagagaaagtattataaaagctattttggaaatgtaccata

SEQ ID NO: 309042 - DNA, 75 bp, synthetic construct
  source 1..75: mol_type = other DNA
gcggcaatgaaagagtttggaattacagcgattaatgatcaggccatgttcattgcacaagttgggcatgaatcc

SEQ ID NO: 309043 - DNA, 75 bp, synthetic construct
  source 1..75: mol_type = other DNA
gaagaaaacctttggtaagcgtctgacgccgtaccagtgcgaaatgctggggcgtgtcgatggtaaacaggtcgc

SEQ ID NO: 309044 - DNA, 75 bp, synthetic construct
  source 1..75: mol_type = other DNA
acacgcatgtgctgaaagttggcggtgccggagtgcgctcaccgcttgatgcgctgccgcccctcactagtgaga

SEQ ID NO: 309045 - DNA, 75 bp, synthetic construct
  source 1..75: mol_type = other DNA
ttgacatgagagacagagtgagcagacagaaccgaactgcacctgaacgggttaaatcaccgtcacgtggatttt

SEQ ID NO: 309046 - DNA, 75 bp, synthetic construct
  source 1..75: mol_type = other DNA
ccatctccctgcgtgaggatcgggcgggtgaagccaataaaataaacccgacaatgaccgatgaagacaccgcct

SEQ ID NO: 309047 - DNA, 75 bp, synthetic construct
  source 1..75: mol_type = other DNA
cttttccggggttttcgttttttgcgcacatgttctttcttggtttatccccgggttctgtggataacagggtta

SEQ ID NO: 309048 - DNA, 75 bp, synthetic construct
  source 1..75: mol_type = other DNA
atttatcagccggggagcttcacaccactcatcagagttgaaactgccaccggtgaactggccagaacgcagcgc

SEQ ID NO: 309049 - DNA, 75 bp, synthetic construct
  source 1..75: mol_type = other DNA
ttatcccaaaagctcatggtggcactgatgatgattccaatcttgagtcgttatgctgggaatgccacagagtga

SEQ ID NO: 309050 - DNA, 75 bp, synthetic construct
  source 1..75: mol_type = other DNA
gaaggacgcgatcctggagatctgacgaccattgatgatcctgcgtcattggatcagatccgccaggcgatggaa

SEQ ID NO: 309051 - DNA, 75 bp, synthetic construct
  source 1..75: mol_type = other DNA
attaatgggcgcgttagggttgtcatgccctgtcggtatgagcaatgccagtcaggatcatgtagtcgaagtggt

SEQ ID NO: 309052 - DNA, 75 bp, synthetic construct
  source 1..75: mol_type = other DNA
aattgccgatgcgggttcccctttggtcaaaaaataccttcactggggctgcacgactcaggatctgctggatac

SEQ ID NO: 309053 - DNA, 75 bp, synthetic construct
  source 1..75: mol_type = other DNA
tatcagaccgcgcgacatggcggatttatcgccgtagttggcgaatccggcgcagggaaaaccacgctacgccgt

SEQ ID NO: 309054 - DNA, 75 bp, synthetic construct
  source 1..75: mol_type = other DNA
atggcgctttacacaattggtgaagtggcgttgctttgtgatattaatcctgtcacgttacgcgcgtggcagagg

SEQ ID NO: 309055 - DNA, 75 bp, synthetic construct
  source 1..75: mol_type = other DNA
aaagctataacaagcaatattatggtcctatattttcttcagttaacggtgcgcgtcttcccgaaggcatgttta

SEQ ID NO: 309056 - DNA, 75 bp, synthetic construct
  source 1..75: mol_type = other DNA
cgaccaaacaaacgcccgacaaacgcagatttgcgtgattcaggaagcattgaacaggacgcagactcaatcatc

SEQ ID NO: 309057 - DNA, 75 bp, synthetic construct
  source 1..75: mol_type = other DNA
atatgttctgaataataaggcaaagataggaaagcgttcagcacttgtttttttatttgtcatatgtgtatttat

SEQ ID NO: 309058 - DNA, 75 bp, synthetic construct
  source 1..75: mol_type = other DNA
catacccatgggggaaaccgccttactggtcgaaaatgtcgcgtgccgttcgcccaagcgactgggagagctgga

SEQ ID NO: 309059 - DNA, 75 bp, synthetic construct
  source 1..75: mol_type = other DNA
gttaaaattctccaatgtgttagaaggtatccgcaccacatgggatgtgaagaaaacgacggcatatgagcaagt

SEQ ID NO: 309060 - DNA, 75 bp, synthetic construct
  source 1..75: mol_type = other DNA
tcgtccggcatcggacaccactagcaccggagacgtcggcgcgctcaatgtgcccggcatggcttctagtgttaa

SEQ ID NO: 309061 - DNA, 75 bp, synthetic construct
  source 1..75: mol_type = other DNA
tttccgatgcgccgctgattatcggtagtctggacccttgctactcctgtaccgaccgcatgaccgtggtcgatg

SEQ ID NO: 309062 - DNA, 75 bp, synthetic construct
  source 1..75: mol_type = other DNA
acatgatcgactacggtctggataacctgccgggcggtccgttgatggtagaaggttttacctacattccgcacc

SEQ ID NO: 309063 - DNA, 75 bp, synthetic construct
  source 1..75: mol_type = other DNA
cgacggcgtactgatcaactacatctctatttgcctggcttcggcgcgcaaaaaacagggtaaagatgcactggt

SEQ ID NO: 309064 - DNA, 75 bp, synthetic construct
  source 1..75: mol_type = other DNA
actcaggatgggcaggccacccgtcagcagatgatattcagtaatgaaacacaccgccttgaggaagccaggaag

SEQ ID NO: 309065 - DNA, 75 bp, synthetic construct
  source 1..75: mol_type = other DNA
ttggggtgagattaagtcctacacaagaagaaatactaaaatcacttatagtgtgtggtaaggctacaacgatga

SEQ ID NO: 309066 - DNA, 75 bp, synthetic construct
  source 1..75: mol_type = other DNA
gaacagcttaacgcgctttttgctccgcgtgcagaaacgacgaacggacagcagcaggaaccgaaaacagccccg

SEQ ID NO: 309067 - DNA, 75 bp, synthetic construct
  source 1..75: mol_type = other DNA
attactgaaaggctgggaagattcaccggagacgttccacgcctggacgaaaaaaggcactctgacagattttaa

SEQ ID NO: 309068 - DNA, 75 bp, synthetic construct
  source 1..75: mol_type = other DNA
ttacggttgatggcgttactttcaaagtgcgcattgatgccggagtttctcccctggactggcgcgggatggtta

SEQ ID NO: 309069 - DNA, 75 bp, synthetic construct
  source 1..75: mol_type = other DNA
gcgcaggccggacgatgatgattaacccccacgccagtctggctggcgttgatgcagcaaccggccagtgctggt

SEQ ID NO: 309070 - DNA, 75 bp, synthetic construct
  source 1..75: mol_type = other DNA
ccgtgacgatggcagtggatttgcccctatatttccagacatctgttatcacttaacccattacaagcccgctgc

SEQ ID NO: 309071 - DNA, 75 bp, synthetic construct
  source 1..75: mol_type = other DNA
ggacggggatgaagcggacaacgatgcgctgattaaagcgttgcctcgttgttttagagaaaaagctactccagt

SEQ ID NO: 309072 - DNA, 75 bp, synthetic construct
  source 1..75: mol_type = other DNA
attgataatggggctttttcagcatggaaaagtggccttgttatcgactggcagaagttttatcagtggattgcc

SEQ ID NO: 309073 - DNA, 75 bp, synthetic construct
  source 1..75: mol_type = other DNA
ggaaatttacctctatgacgtgattggcggatggggcatcactgcgcagcagtttattgctgactgtaaggatgc

SEQ ID NO: 309074 - DNA, 75 bp, synthetic construct
  source 1..75: mol_type = other DNA
tacattaaaaaaatgcccaggagacctcctgaataaatatatagtattacttgacccttgtgctgaagttcaatt

SEQ ID NO: 309075 - DNA, 75 bp, synthetic construct
  source 1..75: mol_type = other DNA
aaaatgagcagttggatgcggcggtaaatctgttagcgaaagctgacaatatttatgtgattggattacgtcgtt

SEQ ID NO: 309076 - DNA, 75 bp, synthetic construct
  source 1..75: mol_type = other DNA
tgctgaatggccgtcgatatcttttactacaaggaccgatgggcccctgcttttcacgtctggcaagctggctgc

SEQ ID NO: 309077 - DNA, 75 bp, synthetic construct
  source 1..75: mol_type = other DNA
gatggaacaacaaaccagttgaacatcagcaactccctgattcatggttcaatcacttcaatgctgcctatgggt

SEQ ID NO: 309078 - DNA, 75 bp, synthetic construct
  source 1..75: mol_type = other DNA
acagtgacttcaggttctgtaactactctggaagacagtggtttctatggtaactctgcggaacctagtgattaa

SEQ ID NO: 309079 - DNA, 75 bp, synthetic construct
  source 1..75: mol_type = other DNA
ttgcctttaccagcacctggaatagtaattttgatccgaatggtcatgattccaacggtgacggggtgaaagata

SEQ ID NO: 309080 - DNA, 75 bp, synthetic construct
  source 1..75: mol_type = other DNA
cctcgtcttacagaggctgtattgcttgcggggctgacgccattttccgcgcatgcagatgaagctgccactctt

SEQ ID NO: 309081 - DNA, 75 bp, synthetic construct
  source 1..75: mol_type = other DNA
tttccgcccggaccttcgcaacgaaccggtcatcgtactcagcaataacgatggctgtgtgatcgcgcgcagccc

SEQ ID NO: 309082 - DNA, 75 bp, synthetic construct
  source 1..75: mol_type = other DNA
aaaataaagaaatgagtgagattgttgctggatccattctccagttattacgtcaggctcaggatagccaattcc

SEQ ID NO: 309083 - DNA, 75 bp, synthetic construct
  source 1..75: mol_type = other DNA
aaaagatcacccatcagcctcagggacaatgggcctttgctgacagttatatggaagccaaagccgcaaggctag

SEQ ID NO: 309084 - DNA, 75 bp, synthetic construct
  source 1..75: mol_type = other DNA
cacgcccgggcactttcagcgctacggatttccacaaacccccaccgatttagtaggtcatccctgcatcgctta

SEQ ID NO: 309085 - DNA, 75 bp, synthetic construct
  source 1..75: mol_type = other DNA
gtatttgcatcgttctcgtaccgctggtgcaggacgtctcctacacattaacggctattctgtttacaatcatgg

SEQ ID NO: 309086 - DNA, 75 bp, synthetic construct
  source 1..75: mol_type = other DNA
ggtccgggtgacgttgcattgtctttcactgacagtacttcagactatgcaatgaagaacaatgtatatttcagc

SEQ ID NO: 309087 - DNA, 75 bp, synthetic construct
  source 1..75: mol_type = other DNA
ggcttccgcttattttgcgaaggcggagttcgaccgcctctggaaaaaaatgatgctactgctggataagctgcg

SEQ ID NO: 309088 - DNA, 75 bp, synthetic construct
  source 1..75: mol_type = other DNA
attcgtgctggatgcgctggagcaggcgttgtgggcccgtcgtccgtctggctccatccatcacagcgataaagg

SEQ ID NO: 309089 - DNA, 75 bp, synthetic construct
  source 1..75: mol_type = other DNA
caggaaacggagaggttcggtaaaaccgctgtttcagctttccgcaacgtaacaacagcagccgctggatttttg

SEQ ID NO: 309090 - DNA, 75 bp, synthetic construct
  source 1..75: mol_type = other DNA
gggaggccgcagcagacgcaacaaaggccgggcagaaaaaggatgaggctctgtcggcagcgacacgggctgaaa

SEQ ID NO: 309091 - DNA, 75 bp, synthetic construct
  source 1..75: mol_type = other DNA
taaagatgaaattaggcaactatgggtacgatatatggcaggtactcatgacattttagtaccagaaagtcgtct

SEQ ID NO: 309092 - DNA, 75 bp, synthetic construct
  source 1..75: mol_type = other DNA
tattattagcatgacagcaatgaaatatgtggaaagattccaagaaaagtttatatttctcgatacaagaatatc

SEQ ID NO: 309093 - DNA, 75 bp, synthetic construct
  source 1..75: mol_type = other DNA
gcccgtgcgtcagaagaagcatccgcagacaatgaagaggcttcccgtcgtaacgcagaatcagcgactgaaaat

SEQ ID NO: 309094 - DNA, 75 bp, synthetic construct
  source 1..75: mol_type = other DNA
catgacggaagatgatgtcatgccggaggcattgcgtcgttttgaggtaatggtggaagaagcggcacgcaacgc

SEQ ID NO: 309095 - DNA, 75 bp, synthetic construct
  source 1..75: mol_type = other DNA
ggtacaacacaacggacagggtgtgacgacaccccgacagacaccggcgtcaccggaactgccatcccctcaccc

SEQ ID NO: 309096 - DNA, 75 bp, synthetic construct
  source 1..75: mol_type = other DNA
gtcctttgagatcccctggaatccgaacacccgtaccgaagtaagcaccctctgcatcagccagttccgctacag

SEQ ID NO: 309097 - DNA, 75 bp, synthetic construct
  source 1..75: mol_type = other DNA
ccgacaacagttgatgctcttaccagaagcgtcaatcagcaagttagccgggcgtcaacaaacgcggcattttcc

SEQ ID NO: 309098 - DNA, 75 bp, synthetic construct
  source 1..75: mol_type = other DNA
agaaaacctgatgcaggtgatggctgccgcagggttcgatccgacagatgccgctaaaataaaatcaggggaact

SEQ ID NO: 309099 - DNA, 75 bp, synthetic construct
  source 1..75: mol_type = other DNA
aagattttgaaacagatgattttgatatcaaaaaaaacgagagtgagatttatgatgaaaatgacgaacagatga

SEQ ID NO: 309100 - DNA, 75 bp, synthetic construct
  source 1..75: mol_type = other DNA
cggccacagccgttgctgaaaccgctggtggacggcccgcagagcgccgtcgtgacgggaccggcaggcgaggaa

SEQ ID NO: 309101 - DNA, 75 bp, synthetic construct
  source 1..75: mol_type = other DNA
ctggtgttgggtcgattacttgaagtcaaaagcaacatagacgttgtcgctattaatgatctcacttccccataa

SEQ ID NO: 309102 - DNA, 75 bp, synthetic construct
  source 1..75: mol_type = other DNA
gcaatcatggcggtcctgccggttgagtatcgcactcgcctgatcggtgccgattgcaaaatgtctcgcctggct

SEQ ID NO: 309103 - DNA, 75 bp, synthetic construct
  source 1..75: mol_type = other DNA
cgaaagttgccgttgcgatgaatgccccgcgtcaccagaagctcaaggaactcagtgaggggattgtagagatgt

SEQ ID NO: 309104 - DNA, 75 bp, synthetic construct
  source 1..75: mol_type = other DNA
aattgtttgatctccacgatcgcgtcgcctttgtcactggcgcaggtagcggtatcggacaaatgatcgctctgg

SEQ ID NO: 309105 - DNA, 75 bp, synthetic construct
  source 1..75: mol_type = other DNA
gatttccgtcaacaaattggcgttatattacagcgctgggctacagggcttggtaattctccacatgatttttac

SEQ ID NO: 309106 - DNA, 75 bp, synthetic construct
  source 1..75: mol_type = other DNA
ttgttagaatcgaaaaagccacacgcatcagcaaacgtaaatacacctcttctctacaagacctcgcacgagagt

SEQ ID NO: 309107 - DNA, 75 bp, synthetic construct
  source 1..75: mol_type = other DNA
ataatcttttcacagaactcaccgatgattaccagcgctggctggcccgtcgcatgggagagcatgaacatgcct

SEQ ID NO: 309108 - DNA, 75 bp, synthetic construct
  source 1..75: mol_type = other DNA
gatgcgccaaattgggtacgtactgatcgtccggttacgtttgccgaactgaaaacctgggaagggcagttacag

SEQ ID NO: 309109 - DNA, 75 bp, synthetic construct
  source 1..75: mol_type = other DNA
cggccacaggttatcgtgatcgtcagggcgagacgctgtttattgatgcgcgtaacttcggcaccatgattagcc

SEQ ID NO: 309110 - DNA, 75 bp, synthetic construct
  source 1..75: mol_type = other DNA
tctgttcttgctggggagcgaagcgctggagtcaatgattaagcacgaagcgacccgtccgcttgaatgtaagcg

SEQ ID NO: 309111 - DNA, 75 bp, synthetic construct
  source 1..75: mol_type = other DNA
gatattcaggaagcatcgcaagggattcagtgcgctgcagcatctgatcgtctggaccagcctgcgccctggcca

SEQ ID NO: 309112 - DNA, 75 bp, synthetic construct
  source 1..75: mol_type = other DNA
atgttgccattgaaaccgcggcgattaccctgatgcgccatagcctgatgggcgttgcggatgcgctcgcgattt

SEQ ID NO: 309113 - DNA, 75 bp, synthetic construct
  source 1..75: mol_type = other DNA
ggcaaagaatgctcaggattatcagttgcttaataatgctctgaatgacagcgcaaaacgcgccgggatatctgg

SEQ ID NO: 309114 - DNA, 75 bp, synthetic construct
  source 1..75: mol_type = other DNA
ttgagttttgctgaagtcgaccagcacggtaacgtcggcgtgcataaattcaatggtaaaatcatgggcaccggt

SEQ ID NO: 309115 - DNA, 75 bp, synthetic construct
  source 1..75: mol_type = other DNA
ggttatgcccttgataagaaatcgccaataaaaattattaccggtatggtcagcgccatggtgggattaatgatg

SEQ ID NO: 309116 - DNA, 75 bp, synthetic construct
  source 1..75: mol_type = other DNA
tccttaaatgaggagcaaatagatttctctatccactacaacaaattcagcctgcgtgatcccatcctgcacgga

SEQ ID NO: 309117 - DNA, 75 bp, synthetic construct
  source 1..75: mol_type = other DNA
atgaagctggaggatctggatgaccttatggatctggagctcctggatgacccggtactcctggagcgcgtgaag

SEQ ID NO: 309118 - DNA, 75 bp, synthetic construct
  source 1..75: mol_type = other DNA
tgttcgttgccgggatggggaccagcgttattgccggaaattttatcgcgttctcaattgcggctcttatcaact

SEQ ID NO: 309119 - DNA, 75 bp, synthetic construct
  source 1..75: mol_type = other DNA
attgaacttaacgaagataccgttagaaactatttatcgtattacaaccactgtgagaaacagtttctggagacc

SEQ ID NO: 309120 - DNA, 75 bp, synthetic construct
  source 1..75: mol_type = other DNA
tcgccggggtattaacgggtatattctgggctttttccaccacgctcattgttaaacctatcgccaaagtgacta

SEQ ID NO: 309121 - DNA, 75 bp, synthetic construct
  source 1..75: mol_type = other DNA
aggcgaacctgaaccgggaatggcaggtggtggcaagtgaactgcacggcgagcagccacaggcggtgccgggac

SEQ ID NO: 309122 - DNA, 75 bp, synthetic construct
  source 1..75: mol_type = other DNA
gatatggccgggacgacgaattgtgctgacggggcatccgcaggcgaacctgaaccgggaatggcaggtggtggc

SEQ ID NO: 309123 - DNA, 75 bp, synthetic construct
  source 1..75: mol_type = other DNA
aacatggccgcgtgcgggtgaaatttaactgggaccgctataacccgtcaaaccagtgtatgggtccaccacata

SEQ ID NO: 309124 - DNA, 75 bp, synthetic construct
  source 1..75: mol_type = other DNA
tggatggaagggccagctgctgcgtatcagacctgggcgcaactggtttacaaattactgactgcagaacaggag

SEQ ID NO: 309125 - DNA, 75 bp, synthetic construct
  source 1..75: mol_type = other DNA
ctggccatgtccgcactgcggtgaatattttcagccagctatggatgccatgaccggctaccgtaatgaaccgga

SEQ ID NO: 309126 - DNA, 75 bp, synthetic construct
  source 1..75: mol_type = other DNA
ggaccagccgattattatggggcgtacctaccaccatgaaaaccgcacacccggcagcctgccggggacgaagac

SEQ ID NO: 309127 - DNA, 75 bp, synthetic construct
  source 1..75: mol_type = other DNA
agttggagtcattacccgcataacctgtttaccgtgagtaatgaacatggcttgtcggaatatctggcaggtaaa

SEQ ID NO: 309128 - DNA, 75 bp, synthetic construct
  source 1..75: mol_type = other DNA
attcgctgcgaagagcgtctggccctggcggtgaaacgccctgaggcgttcatctacggctccttcactgcgcct

SEQ ID NO: 309129 - DNA, 75 bp, synthetic construct
  source 1..75: mol_type = other DNA
aaagtggttcctgaaaatacgcagaaaccatacagcgaaattgagttcacgccgaaaatcactggcgtcagcacc

SEQ ID NO: 309130 - DNA, 75 bp, synthetic construct
  source 1..75: mol_type = other DNA
cggtgtatttaacgctggcgcgcaaatcttcgaccgcgaagatgcgaacgtggttatctccacggagaacgccga

SEQ ID NO: 309131 - DNA, 75 bp, synthetic construct
  source 1..75: mol_type = other DNA
cagtgtattagtcattcgcatattcaacatatccctcctcacaattgtatatgccataatacattctcttaccct

SEQ ID NO: 309132 - DNA, 75 bp, synthetic construct
  source 1..75: mol_type = other DNA
tgatgtaagcataactatagaacaatttgaaaaattaatttcagaggttgctgaaaataaaatacgtttttgctg

SEQ ID NO: 309133 - DNA, 75 bp, synthetic construct
  source 1..75: mol_type = other DNA
gttgcagtcgacggtcgacgcggaaatgcgctacggcctgaagtatgtggaggaacaggaaattctgttcggaga

SEQ ID NO: 309134 - DNA, 75 bp, synthetic construct
  source 1..75: mol_type = other DNA
acaggcatatcaaaggcggcgacatatacgctgctgattgacagtgtgaaggtggaagtgaacaacgcggatgcc

SEQ ID NO: 309135 - DNA, 75 bp, synthetic construct
  source 1..75: mol_type = other DNA
cccgtcgtccgaaagccagcgcaagaagtaattcgtggtttcgtatgcaggccagcgccgacaatcaggtagaaa

SEQ ID NO: 309136 - DNA, 75 bp, synthetic construct
  source 1..75: mol_type = other DNA
tgagtggttgccaggaattgttgaagaatttatcagcggttccatcactgccgaagaagcacgtaaaaaacactt

SEQ ID NO: 309137 - DNA, 75 bp, synthetic construct
  source 1..75: mol_type = other DNA
gagctgaccaaagacagcctgggtcgttacattctggcgaaccctgcggcgctgactggtccgactctgtggggc

SEQ ID NO: 309138 - DNA, 75 bp, synthetic construct
  source 1..75: mol_type = other DNA
cccgaaaaatcggggaggcggaaaacagcctcacgcagctggttgcgaaaaagaatgaggaccagacgctggcca

SEQ ID NO: 309139 - DNA, 75 bp, synthetic construct
  source 1..75: mol_type = other DNA
cggcagattataatcccgccgataatctatgtcgggtcaaaacaggaatcccgcaccagtaatgacatctggaca

SEQ ID NO: 309140 - DNA, 75 bp, synthetic construct
  source 1..75: mol_type = other DNA
acactgctcggatataccgccagcctggttgataaaaaatggttgcgactggcagcaaggaggagtcatggctga

SEQ ID NO: 309141 - DNA, 75 bp, synthetic construct
  source 1..75: mol_type = other DNA
aaagtaaatgaacacgcagcggttcatttcgcaggcatccccagccctaacctgttcgttgccggtgaaatgatg

SEQ ID NO: 309142 - DNA, 75 bp, synthetic construct
  source 1..75: mol_type = other DNA
caactaggacatctagagtttaaggcagaaatacttgacgagtcaggtaatgctactagtgccgatcttgggcat

SEQ ID NO: 309143 - DNA, 75 bp, synthetic construct
  source 1..75: mol_type = other DNA
tccgcttgccggagaacagaagtaaggacacgcataatctcggcaagactacgctagggcgcttgctcgactttg

SEQ ID NO: 309144 - DNA, 75 bp, synthetic construct
  source 1..75: mol_type = other DNA
caaaaagtagccaaagtattaaattaccctgaagggtatttctatacaccagatgataattttgcagaattaatt

SEQ ID NO: 309145 - DNA, 75 bp, synthetic construct
  source 1..75: mol_type = other DNA
cacgagaagcagctaatatttctcaagaaaaacttgcacagatggttgacatagaatccgttaacagtcgctcac

SEQ ID NO: 309146 - DNA, 75 bp, synthetic construct
  source 1..75: mol_type = other DNA
attctgcctattttctggctcaaacccacgacgaaggcccgtaacaatagtcaggatggtctgacctttaccgac

SEQ ID NO: 309147 - DNA, 75 bp, synthetic construct
  source 1..75: mol_type = other DNA
aaggtatctatacaagatattgatggtcaaaaattcaaacagacaaaaacagtagaaatagagtgtatgaatagc

SEQ ID NO: 309148 - DNA, 75 bp, synthetic construct
  source 1..75: mol_type = other DNA
atccttgctctggatatgagcactcagggtgcatcaggtggcgagccggatatcaaactttggggtactgacgta

SEQ ID NO: 309149 - DNA, 75 bp, synthetic construct
  source 1..75: mol_type = other DNA
ggatggatatcaatgcctggctggtttcccgctcactgtggaatgcggaacagtctcaggatgttgagacgcttt

SEQ ID NO: 309150 - DNA, 75 bp, synthetic construct
  source 1..75: mol_type = other DNA
cttaaatttcacctattcatctcaaatataatgtatttttctttaatagctaaggatgaatattcagaactatta

SEQ ID NO: 309151 - DNA, 75 bp, synthetic construct
  source 1..75: mol_type = other DNA
aggtagcactctcgtaaatagcaagagatttcaaccagccgtagatgaaatacttaatcatttccgtggtcgtat

SEQ ID NO: 309152 - DNA, 75 bp, synthetic construct
  source 1..75: mol_type = other DNA
aaatcctacggaggaacagctgttggttggcttacgccgactcgctttcaccctcttatttgtacgatgtcggtc

SEQ ID NO: 309153 - DNA, 75 bp, synthetic construct
  source 1..75: mol_type = other DNA
tttttatgagtttacgaaagcagcaggcatcccggcagacaaaaaagatgatattcaggcatcgtttgaacgcct

SEQ ID NO: 309154 - DNA, 75 bp, synthetic construct
  source 1..75: mol_type = other DNA
acaagacacggggatttttggctctgttttatgtatcagtgagccggctcaggagataaaaaaatcacctgagca

SEQ ID NO: 309155 - DNA, 75 bp, synthetic construct
  source 1..75: mol_type = other DNA
ttcggcagaacgaacagggcgctatcaacctgtcagcggttacctggtgaaaagccgcagtctgttcagtgggaa

SEQ ID NO: 309156 - DNA, 75 bp, synthetic construct
  source 1..75: mol_type = other DNA
gtcatggagaatattgggacgaaatattttcaggtaaagatgagaaaatagttaaaagtaaagataacaatatca

SEQ ID NO: 309157 - DNA, 75 bp, synthetic construct
  source 1..75: mol_type = other DNA
gtatgaccgtgactacgggtggaatgacaacggcgacctggtgcgcatcagcggtccgcgacagacgcgggaata

SEQ ID NO: 309158 - DNA, 75 bp, synthetic construct
  source 1..75: mol_type = other DNA
gcagcacccggcagatgacctggagccgctacgggcagttgctggcgttcaccgactgctcgggctaccagaccc

SEQ ID NO: 309159 - DNA, 75 bp, synthetic construct
  source 1..75: mol_type = other DNA
gtacctctgaatgaagatacagtaaaccattatatacaccatcgccatacaggggaaaaaccaacctacgacggg

SEQ ID NO: 309160 - DNA, 75 bp, synthetic construct
  source 1..75: mol_type = other DNA
gtgggtaaaaccaaatctgacttgtacgccacaggatgatccccagtatccagggatggatacaaagacagcaag

SEQ ID NO: 309161 - DNA, 75 bp, synthetic construct
  source 1..75: mol_type = other DNA
cgttgatccgaccaaggtgacggcttccatgaaagacggcgtactggaagtgcggcttgtcaaggccgagcaagc

SEQ ID NO: 309162 - DNA, 75 bp, synthetic construct
  source 1..75: mol_type = other DNA
atgcaatatttttttcattgctctcagtatttagtgatgtagcaaacttaagagcattcctcacatcaggaatgc

SEQ ID NO: 309163 - DNA, 75 bp, synthetic construct
  source 1..75: mol_type = other DNA
gaaactatttatcttgtcacaatcaccaagggaagcaacttctggataaatgcccacatttgctaaaaaagtctt

SEQ ID NO: 309164 - DNA, 75 bp, synthetic construct
  source 1..75: mol_type = other DNA
cgccatagcgagatacatcggtgttacgccacaagcggtgaatctgtggttttctaaaaactccgttccttctcg

SEQ ID NO: 309165 - DNA, 75 bp, synthetic construct
  source 1..75: mol_type = other DNA
atactgcagaatataagagcctcatatctgaaagagaaatacaaaagactacacaaataatcccatctgaaacta

SEQ ID NO: 309166 - DNA, 75 bp, synthetic construct
  source 1..75: mol_type = other DNA
aggcgataaacagcatttatccgcagacagaggttcagttgtgcgtcattcaccaaatcagtaactcgattaaat

SEQ ID NO: 309167 - DNA, 75 bp, synthetic construct
  source 1..75: mol_type = other DNA
atgtactggattattaacaataatattgagttctggccggaacacaagaaattaatttcggtacatgacgccgag

SEQ ID NO: 309168 - DNA, 75 bp, synthetic construct
  source 1..75: mol_type = other DNA
attatccaaaagaaaaatacacttacgtcagaaagagttttagaacgaaaggtacaatgggccaaacggaaattg

SEQ ID NO: 309169 - DNA, 75 bp, synthetic construct
  source 1..75: mol_type = other DNA
ttttcagcctgactctcgcctccatcgaaggctttcttctctccaactgggatgctgttgataatgggttgacgg

SEQ ID NO: 309170 - DNA, 75 bp, synthetic construct
  source 1..75: mol_type = other DNA
gcactgtgccatgagatcaagaacagtctcgtcgaggcattccacaacgaacccactagggtggatgagttatcc

SEQ ID NO: 309171 - DNA, 75 bp, synthetic construct
  source 1..75: mol_type = other DNA
acctgttgctctggttgctgcaggccgatctgggaacctattttgatggagctgaggggccgttcggcggattca

SEQ ID NO: 309172 - DNA, 75 bp, synthetic construct
  source 1..75: mol_type = other DNA
gttgttcacttacaaacagcaatatttgcggaagaggtttcttctgattccgttgcaagagcaatagattcattg

SEQ ID NO: 309173 - DNA, 75 bp, synthetic construct
  source 1..75: mol_type = other DNA
acgggacctgacgggctggatgtcgctgtcacggaaaccgcaagtgacctggtacggctgggacggcgaccggct

SEQ ID NO: 309174 - DNA, 75 bp, synthetic construct
  source 1..75: mol_type = other DNA
gaccataaatctggcaaagcactcgatgaaacaccagccgaaaccttgaccatgatgaaaaaaagctttatttcc

SEQ ID NO: 309175 - DNA, 75 bp, synthetic construct
  source 1..75: mol_type = other DNA
tttccagttagtcaaaatggctcaggcctgcaatgaaggaaatgtggccaacagcgaagagagctgggcaacgga

SEQ ID NO: 309176 - DNA, 75 bp, synthetic construct
  source 1..75: mol_type = other DNA
cttgataaggttcaccctacctggcgaagcgagtttccaataccgttagatgatgaaacaggaacgcattttttg

SEQ ID NO: 309177 - DNA, 75 bp, synthetic construct
  source 1..75: mol_type = other DNA
ccaccacctgcgatggtcacggcctccatcctggagcgccgtggcgacacagcagcccttacacggctacaggat

SEQ ID NO: 309178 - DNA, 75 bp, synthetic construct
  source 1..75: mol_type = other DNA
tgcgcagctttgtcttgcctgacaacgttgatccgaccaaggtgacggcttccatgaaagacggcgtactggaag

SEQ ID NO: 309179 - DNA, 75 bp, synthetic construct
  source 1..75: mol_type = other DNA
ttcatggtcagacccgtcgcgtgcacagtatttctctgtgcagttttctgagggtatccgtcgggcatatcgcga

SEQ ID NO: 309180 - DNA, 75 bp, synthetic construct
  source 1..75: mol_type = other DNA
gaagattattccgttagcatttattctgtattttttaactatatggatcgtgttaatattgggtttgccgcttta

SEQ ID NO: 309181 - DNA, 75 bp, synthetic construct
  source 1..75: mol_type = other DNA
taatgacactatcctctggtgcctcacagcctttgcttgctgatgttcaatatttcgaactctatagtagttcgg

SEQ ID NO: 309182 - DNA, 75 bp, synthetic construct
  source 1..75: mol_type = other DNA
ctacttcacgttctatgaagccaactcggcatccctacctgaagttcatagagaaacactctcaaaaattgtggc

SEQ ID NO: 309183 - DNA, 75 bp, synthetic construct
  source 1..75: mol_type = other DNA
catgaagaggtcatgctccgctataaacaggttataaaagccatcgatagtgaaatctcacagctacaatgcagt

SEQ ID NO: 309184 - DNA, 75 bp, synthetic construct
  source 1..75: mol_type = other DNA
tgattctcggcgcgatgatgcgcaagctggcacaggtggcgtatggagtgctgaagtcaggcgtgccgttcgatg

SEQ ID NO: 309185 - DNA, 75 bp, synthetic construct
  source 1..75: mol_type = other DNA
cgggatcaaaacccgtgcggatgcacacgacaacctgaaaacacaggttgccagcctgtcggcagagctggaaac

SEQ ID NO: 309186 - DNA, 75 bp, synthetic construct
  source 1..75: mol_type = other DNA
cagccgccattccacagcggaaaaaccggtatttaaccgcaccgttgggctgcgtgatacctgggcgaaagtagg

SEQ ID NO: 309187 - DNA, 75 bp, synthetic construct
  source 1..75: mol_type = other DNA
acttatgacgccgacaccttaagcaaagatccggcagatggtcgtaaagtcaaaggtgttattcactgggtgagc

SEQ ID NO: 309188 - DNA, 75 bp, synthetic construct
  source 1..75: mol_type = other DNA
tttattccgggagataaagtcacagccatcacagctcagaacgggatgctggcagataaacgactgacgtctgcc

SEQ ID NO: 309189 - DNA, 75 bp, synthetic construct
  source 1..75: mol_type = other DNA
ctgaagatttttcagatgttccctatggccgctatgatgaggatggtcctgataatggacaacgtttccgtgaaa

SEQ ID NO: 309190 - DNA, 75 bp, synthetic construct
  source 1..75: mol_type = other DNA
acaccgtaaccgtgccggataaaaagaccgccaccgctgcgctgtcggctgaagatatcgccgccgcccatctgc

SEQ ID NO: 309191 - DNA, 75 bp, synthetic construct
  source 1..75: mol_type = other DNA
caaattatgttgaatatatttcaaaaaacaaccccccttatttatcaaaaaagagagatgccagtataaatctaa

SEQ ID NO: 309192 - DNA, 75 bp, synthetic construct
  source 1..75: mol_type = other DNA
agaggaagcataaagcagggccagctatcgatgctgttcctacgcaacaagatttaaacaaggttctgaatgaca

SEQ ID NO: 309193 - DNA, 75 bp, synthetic construct
  source 1..75: mol_type = other DNA
tatcgaagcagctacaggcgctggtttaggtgcagtaacaggacctgtaaatttaaatgtatttcttaaaggaga

SEQ ID NO: 309194 - DNA, 75 bp, synthetic construct
  source 1..75: mol_type = other DNA
ttataataacagccatgctgacaaacacaacacaggcaaagacaccattatcctataagatagatgacctggaat

SEQ ID NO: 309195 - DNA, 75 bp, synthetic construct
  source 1..75: mol_type = other DNA
cgatactgccgttcgtcacgcagctggtggagcagaacaggcacacgggcttattgctgggggaagtgaaacagg

SEQ ID NO: 309196 - DNA, 75 bp, synthetic construct
  source 1..75: mol_type = other DNA
taaagaagttatatctaatttttgggtaactttacgcccgctgatattactgccttttatttaccaagggaatat

SEQ ID NO: 309197 - DNA, 75 bp, synthetic construct
  source 1..75: mol_type = other DNA
atgtgcctgatggcgatagcgaagacgactatgaggaaaattgcttattgccagatgggaactgacagcagaaca

SEQ ID NO: 309198 - DNA, 75 bp, synthetic construct
  source 1..75: mol_type = other DNA
tgacctgtatcagctggtgaccgacagggttgtgacggccattgaaaatggtgtgccaccctggaaacgtccctg

SEQ ID NO: 309199 - DNA, 75 bp, synthetic construct
  source 1..75: mol_type = other DNA
agtatcattcggtttaattgtcccttttgttgtgttttcagaaaaattaaatcccttaaaatgggaaatattttt

SEQ ID NO: 309200 - DNA, 75 bp, synthetic construct
  source 1..75: mol_type = other DNA
caaggaaataagtttgttattaatttctatgatcccaatcagaccgcgacgcataaacgagtatttttttgcact

SEQ ID NO: 309201 - DNA, 75 bp, synthetic construct
  source 1..75: mol_type = other DNA
atatgttaagacatgcatgtggctataacctggctgaactgggaaatgatacaagattaattcaggattatcttg

SEQ ID NO: 309202 - DNA, 75 bp, synthetic construct
  source 1..75: mol_type = other DNA
aggccgcgccggctcagaaagccgatctttaccagcaggtcaccgacaaaatcattgctgccctgggaaaagggg

SEQ ID NO: 309203 - DNA, 75 bp, synthetic construct
  source 1..75: mol_type = other DNA
gatccaatgatgccggttaatgcactgacacgtagcgcttaccgtgggatcaatgtgttgctgttgtggctcgcc

SEQ ID NO: 309204 - DNA, 75 bp, synthetic construct
  source 1..75: mol_type = other DNA
ataccgtttaacgattcactggatatgattacggggttttcgccgtcatataaaaagattgttattggtgatgat

SEQ ID NO: 309205 - DNA, 75 bp, synthetic construct
  source 1..75: mol_type = other DNA
cccaactgaaaataatatctataatagaccgcttacgtgtcttgtcgaggtaaatagaaattggggcgatattcc

SEQ ID NO: 309206 - DNA, 75 bp, synthetic construct
  source 1..75: mol_type = other DNA
ttcgacaatctggtgaccgtctctttggcgcaaaccatccctataaggctattgatctcggacggcatcgccgtt

SEQ ID NO: 309207 - DNA, 75 bp, synthetic construct
  source 1..75: mol_type = other DNA
gcgtatttcacagtacgcttgatttctcgggaggtaatgactccaacttactgatagtgttttatgttcagataa

SEQ ID NO: 309208 - DNA, 75 bp, synthetic construct
  source 1..75: mol_type = other DNA
cacgagtacgactcttgcggctcctaaaggtatctgtactccggataatggcgtttttcatagcgtgcttgattt

SEQ ID NO: 309209 - DNA, 75 bp, synthetic construct
  source 1..75: mol_type = other DNA
cagcctcatcgaagaatgcagcgaaaacctcagaaacgaatgcagctaacagcgcacaggcggcagcggcctcgc

SEQ ID NO: 309210 - DNA, 75 bp, synthetic construct
  source 1..75: mol_type = other DNA
gccccgtgtcacatatgcttatttcaagtacggtgctggaaacaagaaaacataatcacatactggatatgctgc

SEQ ID NO: 309211 - DNA, 75 bp, synthetic construct
  source 1..75: mol_type = other DNA
ctgcgtaacggcctgtccggcgggtattgctcacacctatatggctgcggaatatctggaaaaagccggacgcaa

SEQ ID NO: 309212 - DNA, 75 bp, synthetic construct
  source 1..75: mol_type = other DNA
cggaatctcttttgccgtaccgttgattgtcgcgggggcacggtgctggcggtcgcggtattactgtcgcaaatc

SEQ ID NO: 309213 - DNA, 75 bp, synthetic construct
  source 1..75: mol_type = other DNA
tctctttattggaaccgttcatgggttctgcttgcgccatctgttgatgccctatgggcgactggccgatctgcc

SEQ ID NO: 309214 - DNA, 75 bp, synthetic construct
  source 1..75: mol_type = other DNA
atgcgggctgttgcccggcatccaacgccattcatggccatatcgattcacccgggatttggttctgatcatgtg

SEQ ID NO: 309215 - DNA, 75 bp, synthetic construct
  source 1..75: mol_type = other DNA
cacaacttgttgacagagatgcggttgttaacgcgctgaagtctgggcacctggcaggatacgctggtgatgtct

SEQ ID NO: 309216 - DNA, 75 bp, synthetic construct
  source 1..75: mol_type = other DNA
ttatggatgggagaacacaccaattagaattactagatgctaaaagtggtctgcttctcaaacaagtcgcaacgt

SEQ ID NO: 309217 - DNA, 75 bp, synthetic construct
  source 1..75: mol_type = other DNA
tgacgagcagtttgatgaaatcaatattgtgcgcggtcagccagtatctggtggacggctgggtgtgaagattta

SEQ ID NO: 309218 - DNA, 75 bp, synthetic construct
  source 1..75: mol_type = other DNA
ggaaagcgttatcgccgggctgtggcgcttattgttcgccagcagcggctgaaattaagcctgtccggaaggctg

SEQ ID NO: 309219 - DNA, 75 bp, synthetic construct
  source 1..75: mol_type = other DNA
ttgaaaaccattatcggtcatgtgacgtattagttatcccgtctaggtgggaaggatttgcgatggttccaattg

SEQ ID NO: 309220 - DNA, 69 bp, synthetic construct
  source 1..69: mol_type = other DNA
aagaaattgtctggtggcaatcaggtggcgttttcgcggatccctggcccgttaatatatcccggctga

SEQ ID NO: 309221 - DNA, 75 bp, synthetic construct
  source 1..75: mol_type = other DNA
tgacgcatgcgggagtgttaatggacgatgagcagtttgatgaaatcaatatcgttcgtggtcagccagtatctg

SEQ ID NO: 309222 - DNA, 75 bp, synthetic construct
  source 1..75: mol_type = other DNA
ttaagcctgtccggaaggctggcgataaaggtgattgcagagccaccggataagcgtcgtcgcgacctggacaac

SEQ ID NO: 309223 - DNA, 75 bp, synthetic construct
  source 1..75: mol_type = other DNA
tcttctcggtttccggtcgcaccatcgtcatcgagctgcaacgctcctaccagcatctacgcgacttcacgcgtc

SEQ ID NO: 309224 - DNA, 75 bp, synthetic construct
  source 1..75: mol_type = other DNA
catagactcaatcattgaggaggatgacagtaagattgatagatatcatgcttcaaaagagcactttgatgagtt

SEQ ID NO: 309225 - DNA, 75 bp, synthetic construct
  source 1..75: mol_type = other DNA
acatcacgtaactatcattatcccgaattatgaatcgttggatgatattcaggattgtctctcttctattcgcaa

SEQ ID NO: 309226 - DNA, 75 bp, synthetic construct
  source 1..75: mol_type = other DNA
tatatgggatcattgagcgtgctttacagataaatacagaaaagattatctgtgttagtaagtatgagaaagagt

SEQ ID NO: 309227 - DNA, 75 bp, synthetic construct
  source 1..75: mol_type = other DNA
cagacaagtgtccttaagaaaaggatatatgggatcattgagcgtgctttacagataaatacagaaaagattatc

SEQ ID NO: 309228 - DNA, 75 bp, synthetic construct
  source 1..75: mol_type = other DNA
cccagtggaattggtacgggcatgctgcccgagctgccggtggcgatgctggacaccgagggcgagcaactggtt

SEQ ID NO: 309229 - DNA, 75 bp, synthetic construct
  source 1..75: mol_type = other DNA
taaacagtttaaacgcagtaagctgcgctggcgtaaaagtggcggtgctgggcgtagtcttggttgggttccgtt

SEQ ID NO: 309230 - DNA, 75 bp, synthetic construct
  source 1..75: mol_type = other DNA
tattctgccttcctcaaccaatccgacgctaccctataccgtcaacactattgatgagcatctggacatgctgat

SEQ ID NO: 309231 - DNA, 75 bp, synthetic construct
  source 1..75: mol_type = other DNA
aacctgactattttgaacattggcccatgtatgaacgggttagtgggagttgtgattttcctatatcacgtatgt

SEQ ID NO: 309232 - DNA, 75 bp, synthetic construct
  source 1..75: mol_type = other DNA
gatgctgtgtgcctcctgggtcgcccagacggatctttcggagttctttaagaaatggaatccgggcgcgaatgc

SEQ ID NO: 309233 - DNA, 75 bp, synthetic construct
  source 1..75: mol_type = other DNA
gttcgacaaaaattcttttaggcttatttttacttctttgtggtcattttgggattttacacctaatggaaggta

SEQ ID NO: 309234 - DNA, 75 bp, synthetic construct
  source 1..75: mol_type = other DNA
tttacagcagttcctatggctatgacaatcgtaagttttttattttccatttttattttcagatcagaattaagg

SEQ ID NO: 309235 - DNA, 75 bp, synthetic construct
  source 1..75: mol_type = other DNA
cgggcttcaatacgctggtaacgtcgtcaattctgacggaagaagtcgcaatcagagagatgattaaccgcggcg

SEQ ID NO: 309236 - DNA, 75 bp, synthetic construct
  source 1..75: mol_type = other DNA
aaaaagcggtgctggaacgcctgggctgggcgccgttccgcgcttccagcgacctgcaactggtgccgattcgcc

SEQ ID NO: 309237 - DNA, 75 bp, synthetic construct
  source 1..75: mol_type = other DNA
tatttctggggccgttgttacttcccgtgcttgtgtcaggtattctgtgcgtatttattaaaaaaaaacgtaact

SEQ ID NO: 309238 - DNA, 75 bp, synthetic construct
  source 1..75: mol_type = other DNA
gatgatgagaaacgggaacagattcaagaattgttcaagcttctggcggaaaacatatcagagaatattactgac

SEQ ID NO: 309239 - DNA, 75 bp, synthetic construct
  source 1..75: mol_type = other DNA
tttcatttttctaaaaatatattatgcgtgtccattctttctgcaattgcattccaagctgacagactatttatt

SEQ ID NO: 309240 - DNA, 75 bp, synthetic construct
  source 1..75: mol_type = other DNA
atgtattttgtacctttatacttattattttattgcacattaaggcaataaaaaacggattattagaaataacaa

SEQ ID NO: 309241 - DNA, 75 bp, synthetic construct
  source 1..75: mol_type = other DNA
tattgaataaaaaatataagatatacaatataagtaaagcagagtaccaaagtgtttattttatcttttttatat

SEQ ID NO: 309242 - DNA, 75 bp, synthetic construct
  source 1..75: mol_type = other DNA
ggatatatcggcaatcactcgattcacctgctgtcgatgcgggaaggattggggttcgagcgaaatattcttagt

SEQ ID NO: 309243 - DNA, 75 bp, synthetic construct
  source 1..75: mol_type = other DNA
gttcgcttcatgtttgacggaattacagacgcgtttacgcgaaagtctggctctgcgtcaacaaaatgaatcggt

SEQ ID NO: 309244 - DNA, 75 bp, synthetic construct
  source 1..75: mol_type = other DNA
tcgtcccctttacatcacactcagtcttattattgaggaaggtatgccgatggctgatctggtcagaatcatcga

SEQ ID NO: 309245 - DNA, 75 bp, synthetic construct
  source 1..75: mol_type = other DNA
tggaaggcgagcatcgtttgttcgcccagcttctgtatggaacgggcatgcggatcagtgagggtttgcaactgc

SEQ ID NO: 309246 - DNA, 75 bp, synthetic construct
  source 1..75: mol_type = other DNA
caaggtaattgtgggacagccctcatatcgcgaggcactacatatcgcgagagaaacataacaaataccgggtca

SEQ ID NO: 309247 - DNA, 75 bp, synthetic construct
  source 1..75: mol_type = other DNA
ttgattggtttttttcggtataataagaataaaattatttgctgggaacattatccatttgacaagaatagtatt

SEQ ID NO: 309248 - DNA, 75 bp, synthetic construct
  source 1..75: mol_type = other DNA
atgaaaataaaataggtggcactgagaaagcagttgaaaatctaattgatatattaactaaaaacagcctacaag

SEQ ID NO: 309249 - DNA, 75 bp, synthetic construct
  source 1..75: mol_type = other DNA
ttgcatcatcagggagtcgccaccctgatagctctaacgaaagagcaaggcgaatatcatccagtggcattaaac

SEQ ID NO: 309250 - DNA, 75 bp, synthetic construct
  source 1..75: mol_type = other DNA
atggttgatccgcaatacatcgcccgtggcgacttcaccttcgaagccggaagcaaagcgatgcagcagctgctt

SEQ ID NO: 309251 - DNA, 75 bp, synthetic construct
  source 1..75: mol_type = other DNA
agatcatcatattgatgctgaaaaaaagacaatgcattctttattttcagaaaaaatcagttttgatatttataa

SEQ ID NO: 309252 - DNA, 75 bp, synthetic construct
  source 1..75: mol_type = other DNA
ggggggcggagcctatggaaaaacgcctgcggcgctggcttcttccggtgctttgctttttgctcacatgttctt

SEQ ID NO: 309253 - DNA, 75 bp, synthetic construct
  source 1..75: mol_type = other DNA
taactcatattacaaaaatgaagctgtttacaattattcactttttaatcgttatccaaaaacatgctttattac

SEQ ID NO: 309254 - DNA, 75 bp, synthetic construct
  source 1..75: mol_type = other DNA
gagatctttgggactccaccgacagcgctcatgctcagatcattgacctcaataacggcaaccactatgcacaac

SEQ ID NO: 309255 - DNA, 75 bp, synthetic construct
  source 1..75: mol_type = other DNA
gggcaatcctgccagtggtcgggccgtattttctcaggaacaggacggcattaaatcgcacacccacagcgccag

SEQ ID NO: 309256 - DNA, 75 bp, synthetic construct
  source 1..75: mol_type = other DNA
ccggcagaagccacatggggcgggctgctcccctcacgggtacgggagtaccgttacgacagcgcgggtaatgtg

SEQ ID NO: 309257 - DNA, 75 bp, synthetic construct
  source 1..75: mol_type = other DNA
tgacgaacgcgggcgggtgaatgtcaccactcagggccgacgggccattgaataccactaccccgacgaacacac

SEQ ID NO: 309258 - DNA, 75 bp, synthetic construct
  source 1..75: mol_type = other DNA
acgctttggcaggaacacatagaagatacgtttcttgatgaaatcaaaatgaatgctgtagcttcaagtgataat

SEQ ID NO: 309259 - DNA, 75 bp, synthetic construct
  source 1..75: mol_type = other DNA
cggacgggaaacacggcgggagtaccggctggaccggaacggccaggtcacggcggtgacagcctcaggcaccgg

SEQ ID NO: 309260 - DNA, 75 bp, synthetic construct
  source 1..75: mol_type = other DNA
ctacgataaagacacgctgcaactgacagaagtcattaacccgcagggtgagtcatatctttatgttctggataa

SEQ ID NO: 309261 - DNA, 75 bp, synthetic construct
  source 1..75: mol_type = other DNA
tatcgcccggaaacagagcggttccggtgggacagccgtgaccagctgaccgggtattgcagcgcacagggtgag

SEQ ID NO: 309262 - DNA, 75 bp, synthetic construct
  source 1..75: mol_type = other DNA
gaacgagttatgaagaacgcttatgttgttcctgagttgcgagtagataaacctgaaaatgcgaaagcaacaaaa

SEQ ID NO: 309263 - DNA, 75 bp, synthetic construct
  source 1..75: mol_type = other DNA
gaaacatttcagcgcaggactgatgcaaatctatagcaagaattttaaagcacttggtcttgataatgaaaatgt

SEQ ID NO: 309264 - DNA, 75 bp, synthetic construct
  source 1..75: mol_type = other DNA
tattgattttttaagtcagtcacaatctaccaacttaacagaaacacacaaacaacacatccattatgttaaaga

SEQ ID NO: 309265 - DNA, 75 bp, synthetic construct
  source 1..75: mol_type = other DNA
gcagaaaaaataagcctttcggataaagcaagagatctttttagacaaggaaaagtaagagaagcattagatgtt

SEQ ID NO: 309266 - DNA, 75 bp, synthetic construct
  source 1..75: mol_type = other DNA
cctggcaacctggcagcgcaatgcagaaacagcttgacccgaatgaagtcgctgcacggcgtagccttgcaagca

SEQ ID NO: 309267 - DNA, 75 bp, synthetic construct
  source 1..75: mol_type = other DNA
ggtaataacaaacggggttatgtgaaggaaagcaatggcaaaagttatatcgatataattgaggaaaaagccgga

SEQ ID NO: 309268 - DNA, 75 bp, synthetic construct
  source 1..75: mol_type = other DNA
aggtggtggaagcgaggattgaatgatcatcatcccaaaggtactgagatggaacagaaattttacgagacgatt

SEQ ID NO: 309269 - DNA, 75 bp, synthetic construct
  source 1..75: mol_type = other DNA
cgtgtactgcagtaatggctgggtggaaatcgacaacaacatcgcagagaacgccttacggggagtggccgtagg

SEQ ID NO: 309270 - DNA, 75 bp, synthetic construct
  source 1..75: mol_type = other DNA
agggggagcagtgggaataccgctacgacgccagcggcaggcggacggaaaaacgctgcgaccggaagaaaatcc

SEQ ID NO: 309271 - DNA, 75 bp, synthetic construct
  source 1..75: mol_type = other DNA
gtgacagcctcaggcaccgggctgggctatggcgaaggcgatgagtcctatggctatgacagctgtggctacctg

SEQ ID NO: 309272 - DNA, 75 bp, synthetic construct
  source 1..75: mol_type = other DNA
tgtttactgcaaaagtgacggaagcgtacttgtctttattagcgcatggtgcgaaagcgaccgtggcgaaatatt

SEQ ID NO: 309273 - DNA, 75 bp, synthetic construct
  source 1..75: mol_type = other DNA
caccgctggattgccagagatttatggtggttcggcattacctcatggctatactgccagcgcactggtaagtgt

SEQ ID NO: 309274 - DNA, 75 bp, synthetic construct
  source 1..75: mol_type = other DNA
cagggcgcgtgctggttcgatggcaggcacaccctgcggcttttacaaccgcaaggtaaactgttgttcagtgaa

SEQ ID NO: 309275 - DNA, 75 bp, synthetic construct
  source 1..75: mol_type = other DNA
ggggggcgctgccgccggatatccggttaagcccgcatctttacctggcgaccaacagcgcacaggggctgtggt

SEQ ID NO: 309276 - DNA, 75 bp, synthetic construct
  source 1..75: mol_type = other DNA
cattgatgatattcaagaatttgatagattgaatggtattataaatggtgagaaagcatcctatgttgagagtgg

SEQ ID NO: 309277 - DNA, 75 bp, synthetic construct
  source 1..75: mol_type = other DNA
cgtacctgtgggacggcgacagtattgcggaaatccgggaataccgcgatgataaactgtacagcgtaaggcacc

SEQ ID NO: 309278 - DNA, 75 bp, synthetic construct
  source 1..75: mol_type = other DNA
agaaaaagaatcaaacaatttactttcaacacaggctactgttttacaagatgatttgaatcttagattcagtga

SEQ ID NO: 309279 - DNA, 75 bp, synthetic construct
  source 1..75: mol_type = other DNA
gtaatttagtaatagttaacgcaacagctttagcgtctagcggcgctttgacgattttgaaccagtttttagaac

SEQ ID NO: 309280 - DNA, 75 bp, synthetic construct
  source 1..75: mol_type = other DNA
atgaaggaagtaatcagattcctctatttattcgcccgcgtacatatggaaacaatgtctcaagcgggcaaataa

SEQ ID NO: 309281 - DNA, 75 bp, synthetic construct
  source 1..75: mol_type = other DNA
atgctggtggagtgggggaacatcgtgaagaaagggaaagtagaaatcactatccgtcgttttcgtgcagctgcc

SEQ ID NO: 309282 - DNA, 75 bp, synthetic construct
  source 1..75: mol_type = other DNA
tcaatcttaagcgtggggtttggaatcaaggcaagagaaacaagtcagcacgtgagcattcgctgcctttaagca

SEQ ID NO: 309283 - DNA, 75 bp, synthetic construct
  source 1..75: mol_type = other DNA
tggtatgcaatcccagtatgagctttgggttgcttcgcaaactgctcgcccaaatattcgcccattatttcacca

SEQ ID NO: 309284 - DNA, 75 bp, synthetic construct
  source 1..75: mol_type = other DNA
cagctgtgttttttaaatatttgtgctctgatgcgtttatgccaggtaagtgtgtaaataaaaataaaggagggt

SEQ ID NO: 309285 - DNA, 75 bp, synthetic construct
  source 1..75: mol_type = other DNA
ctaagaagaaaaatttataccaaaacgaagtgtcgtatgttaaaaatttacatattgcactatgctttgaccgtg

SEQ ID NO: 309286 - DNA, 75 bp, synthetic construct
  source 1..75: mol_type = other DNA
cattgcacaaagatttaagtctgattgaatcggcaatggttttagctataagtgccactattacttcaggtattt

SEQ ID NO: 309287 - DNA, 75 bp, synthetic construct
  source 1..75: mol_type = other DNA
atagcgtccttgactgaggcttttttcgacggccttgaagaaaaaatgaaatcacggacactaaaggaaagtgaa

SEQ ID NO: 309288 - DNA, 75 bp, synthetic construct
  source 1..75: mol_type = other DNA
aaccaggtgaaagtcaatgatgatggtaaatttaataatgatgtggcaggaaccagtggaatttatcaggctggg

SEQ ID NO: 309289 - DNA, 75 bp, synthetic construct
  source 1..75: mol_type = other DNA
gggtagcggcaatttttatatgcgtactgatatggccactcatcagagcgaccaacttaatgttactggtcaggc

SEQ ID NO: 309290 - DNA, 75 bp, synthetic construct
  source 1..75: mol_type = other DNA
cgcaacagattaatttaggtgtcaatttacatgatatcaaggattggtttgctaagagggatttgtttgaaaaag

SEQ ID NO: 309291 - DNA, 75 bp, synthetic construct
  source 1..75: mol_type = other DNA
acggtatcggggggataaagtccctgtacgtaaaatttaggcctgacatgaatattatatgtgggcctaacggag

SEQ ID NO: 309292 - DNA, 75 bp, synthetic construct
  source 1..75: mol_type = other DNA
ctacccatcgtcgctacgattatgttagcttcgaaaatatagatgaaatattacgtcttctgctgtggcttgaag

SEQ ID NO: 309293 - DNA, 75 bp, synthetic construct
  source 1..75: mol_type = other DNA
ttattgaggggatgacgctgcattttgtcaccgaccgtaagccgctatcgcgcgaggagattttgaggatggttg

SEQ ID NO: 309294 - DNA, 75 bp, synthetic construct
  source 1..75: mol_type = other DNA
ccagccacgcagatgaaaatccgccaggcaatggagcaggaacccacgctgagcgaaggcacctggcttacacca

SEQ ID NO: 309295 - DNA, 75 bp, synthetic construct
  source 1..75: mol_type = other DNA
aggaccgattcttggatttatcggtgcaattagtagttacaaagttaattttgaattactatcttcgctggcaaa

SEQ ID NO: 309296 - DNA, 75 bp, synthetic construct
  source 1..75: mol_type = other DNA
tattcggaaaataaataatatattgtttaatagcctactaaaattatggagtaatgacaaaaaaagtaaaacaac

SEQ ID NO: 309297 - DNA, 75 bp, synthetic construct
  source 1..75: mol_type = other DNA
gtcggtgaacaacgtggaacatatatactcaagccactgagtatgaaaggtaatctaaccaccgaaaaaattgaa

SEQ ID NO: 309298 - DNA, 75 bp, synthetic construct
  source 1..75: mol_type = other DNA
tttaatgacctgtggttttgaagatcaatccatcgacactggacgatttgtactgtctcgtatcaataatgaaaa

SEQ ID NO: 309299 - DNA, 75 bp, synthetic construct
  source 1..75: mol_type = other DNA
gaacgccttgctgatttggtcccgccagcaatggctcaacccgatccggttacaagggaagttttcgatgaaaag

SEQ ID NO: 309300 - DNA, 75 bp, synthetic construct
  source 1..75: mol_type = other DNA
cagcaccggctggtgcactacacgcggacacaatatgaagagccgctggtcgaaagtcgctatctttacgacccg

SEQ ID NO: 309301 - DNA, 75 bp, synthetic construct
  source 1..75: mol_type = other DNA
gatatatcactcaggatccgattggactgaaggggggatggaacctgtatggatatcaattgaatccgatatcag

SEQ ID NO: 309302 - DNA, 75 bp, synthetic construct
  source 1..75: mol_type = other DNA
ttttttagtacccgcattattaaccctggggggtctggataatcgcgctgcatctggcagattatcaatttcgcc

SEQ ID NO: 309303 - DNA, 75 bp, synthetic construct
  source 1..75: mol_type = other DNA
tgtttctttacgtgaaggttttgacctgtctacaccaatcggtaaagcaatgcttactatgatggctggtttagc

SEQ ID NO: 309304 - DNA, 75 bp, synthetic construct
  source 1..75: mol_type = other DNA
atctggtggtcttgacaatctcgattttttgttttagctttccaatcagccagttaatggctacggcgatcccag

SEQ ID NO: 309305 - DNA, 75 bp, synthetic construct
  source 1..75: mol_type = other DNA
gggcgcgcccagacgagtttccgccaaggaacatgcgcacgagcaaggggctgcgggcgctcggttacaacgtga

SEQ ID NO: 309306 - DNA, 75 bp, synthetic construct
  source 1..75: mol_type = other DNA
tattcaggacagcactattaatatgctgcgcctcagcgatcccgacgcggcactcattatcagtcggggccagat

SEQ ID NO: 309307 - DNA, 75 bp, synthetic construct
  source 1..75: mol_type = other DNA
ctgttgtaacttttcccgggaatattattcaggacagcactattaatatgctgcgcctcagcgatcccgacgcgg

SEQ ID NO: 309308 - DNA, 75 bp, synthetic construct
  source 1..75: mol_type = other DNA
tgcaaaaatagtcaaagataaatttaaaacggatattccttttcacagtagtcttcctcaaaaagaaggaaatta

SEQ ID NO: 309309 - DNA, 75 bp, synthetic construct
  source 1..75: mol_type = other DNA
tgccagtgataacagcagtgagcagatctacatgctctctttatctgtgcctttatctggctggtggggaaatag

SEQ ID NO: 309310 - DNA, 75 bp, synthetic construct
  source 1..75: mol_type = other DNA
ttctggcacacagcgaaggggtaacgttaagtcaggagttaggtgaaactattgctcttgttaaagcacctgggg

SEQ ID NO: 309311 - DNA, 75 bp, synthetic construct
  source 1..75: mol_type = other DNA
ttgctaattgaacgggcagccctgcgggcagaaatcactaccctgactgtgaaagcgcagggactcaaaaaatcc

SEQ ID NO: 309312 - DNA, 75 bp, synthetic construct
  source 1..75: mol_type = other DNA
atgagttaccagactaatcaggaaaaggtgttggctgaactacgcgccacgctgggtaatatcagcgccgatgag

SEQ ID NO: 309313 - DNA, 75 bp, synthetic construct
  source 1..75: mol_type = other DNA
agtttgatggcactgccgaacaggcgcaattgccagggaaactgtttacgcaaaatattggtgcgcacgaaagca

SEQ ID NO: 309314 - DNA, 75 bp, synthetic construct
  source 1..75: mol_type = other DNA
ttttccagggtgtgcccgcacgtaaaagggccgatgcgtggcagacccattgagctggagccgtggcagcagttc

SEQ ID NO: 309315 - DNA, 75 bp, synthetic construct
  source 1..75: mol_type = other DNA
agcggtattcactggggaggtggttctggctccggtaatggcggtggtgaacatgggagtcaaacaggttggggg

SEQ ID NO: 309316 - DNA, 75 bp, synthetic construct
  source 1..75: mol_type = other DNA
ggttgatgtaaacaaaaaatttcaaaaagcaaatagtggggacactatgcttgacaatgcaatgaaaagcaaaga

SEQ ID NO: 309317 - DNA, 75 bp, synthetic construct
  source 1..75: mol_type = other DNA
ttatgtatgcccaatgggcaatgagcttcagaatcgatttatctcaatagaggacggactggagcaacatttata

SEQ ID NO: 309318 - DNA, 75 bp, synthetic construct
  source 1..75: mol_type = other DNA
tgcagtggttaaagcggagtttgtgactcatgtgggttatcgcgttctcttcagagtgttaaatgcaaatggtaa

SEQ ID NO: 309319 - DNA, 75 bp, synthetic construct
  source 1..75: mol_type = other DNA
cacattatctttataaatcaaatatagcagataatgaaacaataaaggaaacaagaaaagacaattcattaaaaa

SEQ ID NO: 309320 - DNA, 75 bp, synthetic construct
  source 1..75: mol_type = other DNA
taattgatttcttatcaggaacaggaggagataacagttcaaatgaacgttttgaaatttatacatcagtgtttt

SEQ ID NO: 309321 - DNA, 75 bp, synthetic construct
  source 1..75: mol_type = other DNA
agttaaaggttaaaatagagtctttaggtaaaaccagtgacacgattgggaaatccagcaatgcgcaggcagtat

SEQ ID NO: 309322 - DNA, 75 bp, synthetic construct
  source 1..75: mol_type = other DNA
ccgctaccttctgccagcgttttgcctgtgccgtctaccgctcatcagttgctgatgcgctgccaggcgttactt

SEQ ID NO: 309323 - DNA, 75 bp, synthetic construct
  source 1..75: mol_type = other DNA
tgtataaagaacttaataagtttatgcacgattacgacaaaacatccccagaaatgagaaaataccttaaaagca

SEQ ID NO: 309324 - DNA, 75 bp, synthetic construct
  source 1..75: mol_type = other DNA
gacaatgtaacgctaaataatgatgtgtatcaagaattgactaagtatatgcacgattacgacaaaacatctccg

SEQ ID NO: 309325 - DNA, 75 bp, synthetic construct
  source 1..75: mol_type = other DNA
acctggatacaacgtaatattaccgcgttacgaagccagattatgatcggcgatacgtggacggcgagcgatatt

SEQ ID NO: 309326 - DNA, 75 bp, synthetic construct
  source 1..75: mol_type = other DNA
acagtaccttaaacacaaccggtggtcgtgcggaatacaactccatcagtacttgggcacaacgtgatattgctg

SEQ ID NO: 309327 - DNA, 75 bp, synthetic construct
  source 1..75: mol_type = other DNA
attcaggaattgtcggtgaccgtggcgaactttatctttctggtctaccagaaaaaggacaggttacgttatcct

SEQ ID NO: 309328 - DNA, 75 bp, synthetic construct
  source 1..75: mol_type = other DNA
ggggaggagacgcagtcacgaaatgtacctttggctactcactttcagtaccagaaaatgagaatggtttaattg

SEQ ID NO: 309329 - DNA, 75 bp, synthetic construct
  source 1..75: mol_type = other DNA
attgcccttattaaagcaccgggagccgcaggtctggaaattgataatatgcgcggggcggcaacagactggcgt

SEQ ID NO: 309330 - DNA, 75 bp, synthetic construct
  source 1..75: mol_type = other DNA
gggcgaaaatgcgaccacaaaatgtaccttcgattacactctctcattacctgcaagtgaaagtggattaattga

SEQ ID NO: 309331 - DNA, 75 bp, synthetic construct
  source 1..75: mol_type = other DNA
taacagtaataatgcctgtttataatgcggaaaaatacatatatgaatctataaaaagtattttggtgcagtcat

SEQ ID NO: 309332 - DNA, 75 bp, synthetic construct
  source 1..75: mol_type = other DNA
atgacctacttgccttgttttccggatagcgatgagccacttatcctgcatcgtctaatgatgaaaaagccagag

SEQ ID NO: 309333 - DNA, 75 bp, synthetic construct
  source 1..75: mol_type = other DNA
aatttaaagttggcgatatcgtttacttggttagcggtggtccaagcatgtccgttgccgagcagattaaggact

SEQ ID NO: 309334 - DNA, 75 bp, synthetic construct
  source 1..75: mol_type = other DNA
cttaatctgattcgacaaaatggtcgttatcgcctgtctgatggtgttctcggtcagcgcagcaatgctgattta

SEQ ID NO: 309335 - DNA, 75 bp, synthetic construct
  source 1..75: mol_type = other DNA
aggtccttcatgtccactctgtaacggtccgacggtgaaacggaagggaaaaagcggttttttctggggatgctc

SEQ ID NO: 309336 - DNA, 75 bp, synthetic construct
  source 1..75: mol_type = other DNA
acgccggttctggcacagctcgatcccggttttgtttcacgtatctggaatgacaaaaaaattacggcgcaccat

SEQ ID NO: 309337 - DNA, 75 bp, synthetic construct
  source 1..75: mol_type = other DNA
aggggatatttgcgctgtcaccggtgctgaggttaaggatatgaaaaccagtccgccaaaaccgttcacggaggg

SEQ ID NO: 309338 - DNA, 75 bp, synthetic construct
  source 1..75: mol_type = other DNA
ggctggcggagaagacggaccgcatcccggaaggggtgatacggatgcacgacgagcggacccaccactaccact

SEQ ID NO: 309339 - DNA, 75 bp, synthetic construct
  source 1..75: mol_type = other DNA
ataaaggccgcctgacgggcgaacggcagacggtggagaacccggagacgggggagatgctgtgggagcatgaga

SEQ ID NO: 309340 - DNA, 75 bp, synthetic construct
  source 1..75: mol_type = other DNA
cgggcggaagccttccgtaaacagcgcgccacgtctttatcttcccctgccggtccccgttctgcttcctcttct

SEQ ID NO: 309341 - DNA, 75 bp, synthetic construct
  source 1..75: mol_type = other DNA
aatccgccctgaccagcaaagggaaggacgagcgcgccattatggcctctgggtatcactaccgcgggctggcga

SEQ ID NO: 309342 - DNA, 75 bp, synthetic construct
  source 1..75: mol_type = other DNA
cagtttcggcgcccgggcatggacatcgagctgggcggccgggtcggtatcttcactgccgagtatcgccagtac

SEQ ID NO: 309343 - DNA, 75 bp, synthetic construct
  source 1..75: mol_type = other DNA
atacgcccgacgcttgtcgattaccgtggctgtgcgtgggttttttccacaccaaacggtatcgacgagagcaat

SEQ ID NO: 309344 - DNA, 75 bp, synthetic construct
  source 1..75: mol_type = other DNA
tgataaaaaaattacggctcaccatgccattattccgacccggcaggtttttgacctcagctcactgaacggtga

SEQ ID NO: 309345 - DNA, 75 bp, synthetic construct
  source 1..75: mol_type = other DNA
tgaccatgtacgcatgtcttccgcaataaccattgtgggcctgattgtgtgcggtatgggctggttcttattcaa

SEQ ID NO: 309346 - DNA, 75 bp, synthetic construct
  source 1..75: mol_type = other DNA
gcttataaaaaaagcaacggtagtcatctattcgaaagctttaaagagatgactgatgctgttaaaagcgcatac

SEQ ID NO: 309347 - DNA, 75 bp, synthetic construct
  source 1..75: mol_type = other DNA
agacgagtaataggcgactgaatctgagatggcaaggagcttatggtgagctgactggtatgtacagttacggca

SEQ ID NO: 309348 - DNA, 75 bp, synthetic construct
  source 1..75: mol_type = other DNA
aatgaaattaccgctgcactggaagttggttacttgctgcgactggcgcacaacacctcgtcgatggttgaatag

SEQ ID NO: 309349 - DNA, 75 bp, synthetic construct
  source 1..75: mol_type = other DNA
atattggccaccggtcttattaactgtattgcattttcagcacaggcagtggatacgacgattactgtgacgggt

SEQ ID NO: 309350 - DNA, 75 bp, synthetic construct
  source 1..75: mol_type = other DNA
cgcccgtagaggtgttgtccgtattgcaggtcatgtaccagactatggttggacagcaggcgatgtcaccagcgc

SEQ ID NO: 309351 - DNA, 75 bp, synthetic construct
  source 1..75: mol_type = other DNA
ccattctcggcaaagagggtggttatgttgatcacccgaacgataagggcggcccaacgaactggggaattactc

SEQ ID NO: 309352 - DNA, 75 bp, synthetic construct
  source 1..75: mol_type = other DNA
acttcgtggtggtcgcagaagaagagcacgtgggacgcgcagccgagcgattacatatctcgcaatcaccgctga

SEQ ID NO: 309353 - DNA, 75 bp, synthetic construct
  source 1..75: mol_type = other DNA
gatgaagaaaagcctgacagtgatgaaagtggaaacatattgccccctttgataaagggagaactctgtgctctg

SEQ ID NO: 309354 - DNA, 75 bp, synthetic construct
  source 1..75: mol_type = other DNA
agtcagggcgccagatacctcgaactggcggagggccgcgaagccaacgaggattttctctacggctgggttaag

SEQ ID NO: 309355 - DNA, 75 bp, synthetic construct
  source 1..75: mol_type = other DNA
acactggcgtgaacatggggcccagcgtcgccagtaagtttttccagcgctggctcactgccctgaacatgcgcg

SEQ ID NO: 309356 - DNA, 75 bp, synthetic construct
  source 1..75: mol_type = other DNA
acacgccagcaggcactcgaaatactcgaggctgattactggtatggtccacgcttcgaccaggtagctaccgtg

SEQ ID NO: 309357 - DNA, 75 bp, synthetic construct
  source 1..75: mol_type = other DNA
cgtgctgaatggtgccgttgaaatcgttgtgtgggtgaacgcatccgcactggtgcctgactcaaccgtattctg

SEQ ID NO: 309358 - DNA, 75 bp, synthetic construct
  source 1..75: mol_type = other DNA
tagtacaaagtcttcaatacttcataactaaaaaaattgatgaagcaaccgataataaaaaagataaggataaaa

SEQ ID NO: 309359 - DNA, 75 bp, synthetic construct
  source 1..75: mol_type = other DNA
gttggctttgttcgtccgccgatgctgcgcacttacgttaagcagggcgaggactatttcagcaaagtcgccgac

SEQ ID NO: 309360 - DNA, 75 bp, synthetic construct
  source 1..75: mol_type = other DNA
tcaacggtacgctggttggcggttgtattgggctaattttatatttgttgtcgcagctcccggccttgttccccc

SEQ ID NO: 309361 - DNA, 75 bp, synthetic construct
  source 1..75: mol_type = other DNA
taaaaagctgggatgctcgggatatgtcgcggcaaatcgagttaaatatcggcaaagatctgcagtttatccgtg

SEQ ID NO: 309362 - DNA, 75 bp, synthetic construct
  source 1..75: mol_type = other DNA
acgggaatggctgaaagcggatatcaatagtgaagattctcgtgtgaaagaacgtatcgcgcgggcgggtcaatg

SEQ ID NO: 309363 - DNA, 75 bp, synthetic construct
  source 1..75: mol_type = other DNA
gcctgatgccgccgttaatgtctcttgtcattatcagaacctatctcggatcttttgataatgcatctctgttta

SEQ ID NO: 309364 - DNA, 75 bp, synthetic construct
  source 1..75: mol_type = other DNA
acggcggcgagcgtggagcactgctgtacgggctgatcggcacctgccgtctgaacggtatcgatccggaagcgt

SEQ ID NO: 309365 - DNA, 75 bp, synthetic construct
  source 1..75: mol_type = other DNA
gacttcgtgaacagcggcggcgaacgctcacagggactggttaaccgtcgtactgattttcgtgcatggtgctta

SEQ ID NO: 309366 - DNA, 75 bp, synthetic construct
  source 1..75: mol_type = other DNA
cgataatgatgtgcgccagtatctgcccggcccggcttactttggctggttctacatggcgaatatgcagagctt

SEQ ID NO: 309367 - DNA, 75 bp, synthetic construct
  source 1..75: mol_type = other DNA
ggggatgaacttccgtacggttgatggtgccggtgaagagggtttcaccggcaatcagctgattctggttgttca

SEQ ID NO: 309368 - DNA, 75 bp, synthetic construct
  source 1..75: mol_type = other DNA
cattgtgggaagctggaagctgcactcaaccaattgcaaaaccgtttcccatttgcgtgtgagccgcaaattgtg

SEQ ID NO: 309369 - DNA, 75 bp, synthetic construct
  source 1..75: mol_type = other DNA
ttgcaacatcaaaaggaaatccagcaattgttgcaatgaagcttgatagaggtggtcatgcggtagttgttgatg

SEQ ID NO: 309370 - DNA, 75 bp, synthetic construct
  source 1..75: mol_type = other DNA
gttaattactgatgctaaagttactcctcagggagctcgaatgaacaatttagcttcagcaatgagaaaccaagg

SEQ ID NO: 309371 - DNA, 75 bp, synthetic construct
  source 1..75: mol_type = other DNA
aaccacccttgctaaccagcgcgtgaagcgcagtgagttagggaaggtgcgaataagtggggaaattcttctcgg

SEQ ID NO: 309372 - DNA, 75 bp, synthetic construct
  source 1..75: mol_type = other DNA
cacaggccatgatatttcctgcaatttaggttcgttgaatattgcgcacaccatggattcccccgattttgcccg

SEQ ID NO: 309373 - DNA, 75 bp, synthetic construct
  source 1..75: mol_type = other DNA
gatactcttctcttaagcttcttgctcaactttaaaaatagttatgccagttcggtatcgataaggggcagtttg

SEQ ID NO: 309374 - DNA, 75 bp, synthetic construct
  source 1..75: mol_type = other DNA
cacctggaccaatggatgtacggttatatctccagggcaaaatcttaactggggggggagcactcgtattgtttt

SEQ ID NO: 309375 - DNA, 75 bp, synthetic construct
  source 1..75: mol_type = other DNA
aactcgacaaaatgttttccttgatgttcaggatgttcgtatcaatcctgaatggaacctgagaacgggtaacaa

SEQ ID NO: 309376 - DNA, 75 bp, synthetic construct
  source 1..75: mol_type = other DNA
gcagcactaacgatgtttttcggattcgcttccgtgatctactggcaaaccatggcgggaagctggaagtagtgc

SEQ ID NO: 309377 - DNA, 75 bp, synthetic construct
  source 1..75: mol_type = other DNA
acaagcgcctgcggaaagaaagctctcatctggcggttgttagcgatctgcaaaacgccgtcaagggcgctttac

SEQ ID NO: 309378 - DNA, 75 bp, synthetic construct
  source 1..75: mol_type = other DNA
ctatacttgtggtggccaagaccaacggggagaatcaaaaggagatggtctatgggggccaggtaaagcaagtaa

SEQ ID NO: 309379 - DNA, 75 bp, synthetic construct
  source 1..75: mol_type = other DNA
cgcatccagacgatttatcagccggggagcttcacgccactcatcagagttgaaaccgccaccggtgagctggcg

SEQ ID NO: 309380 - DNA, 75 bp, synthetic construct
  source 1..75: mol_type = other DNA
agaatctaaagtcggtcgaacagggttaacaacccgagtacggcaagaggtagcgcgggatattaagattttgag

SEQ ID NO: 309381 - DNA, 75 bp, synthetic construct
  source 1..75: mol_type = other DNA
ggcattcttaccactggctgcggctcaacaggaaacgtgaaaaaccggttatacagtgaaaatgaggtggctgag

SEQ ID NO: 309382 - DNA, 75 bp, synthetic construct
  source 1..75: mol_type = other DNA
aaggcattccgccgaaggagggtgacaggtgggcggaagggaaggacggggagaagaaggctgacaaagtcactc

SEQ ID NO: 309383 - DNA, 75 bp, synthetic construct
  source 1..75: mol_type = other DNA
caaaatcggtattttcggcatcctgaaagtagcgatggatctgctggcgcaaacgggtttgccgctgtggtgggg

SEQ ID NO: 309384 - DNA, 75 bp, synthetic construct
  source 1..75: mol_type = other DNA
ggagcgaggttcttaagcaatcgtccttgcttgacccaacattaatgctgttggcctttgtgtttgtgctaattg

SEQ ID NO: 309385 - DNA, 75 bp, synthetic construct
  source 1..75: mol_type = other DNA
cagcgccggaaatccggtcagcgtcagccatccgttcaccgtcgatttaacggcggtggcgatcagcatcaacac

SEQ ID NO: 309386 - DNA, 75 bp, synthetic construct
  source 1..75: mol_type = other DNA
agaagttttcggtgctggcggcagagaatgcggagcttaaacagtcggagaaggaatttaataacttctgtcgtc

SEQ ID NO: 309387 - DNA, 75 bp, synthetic construct
  source 1..75: mol_type = other DNA
gtacagccgcagcagccgtattatgcacctgcagctgaacaacctgcgcaacaaccttactacgctcctgcggcg

SEQ ID NO: 309388 - DNA, 75 bp, synthetic construct
  source 1..75: mol_type = other DNA
aatggtcaatggtgctggtggaggccggaaagccatcacccagcctcgcggggctttataaaggaaacactaaag

SEQ ID NO: 309389 - DNA, 75 bp, synthetic construct
  source 1..75: mol_type = other DNA
tgcccgccagacgggtttacatccctaaaagcaacggcaaatgcgaccactgggtatccccgcgttgcgggatcg

SEQ ID NO: 309390 - DNA, 75 bp, synthetic construct
  source 1..75: mol_type = other DNA
attagctaaatcagatcaaggttacaagaatcattatttatcagatgaactgttggctggtaagaaagaacttta

SEQ ID NO: 309391 - DNA, 75 bp, synthetic construct
  source 1..75: mol_type = other DNA
agcattaccagcattatcaaaatcagtttaacggtgctggttataggttatgctctcggcaaaatcgcgatgttg

SEQ ID NO: 309392 - DNA, 75 bp, synthetic construct
  source 1..75: mol_type = other DNA
tagtacttgaagcgtttccgaaacaagagatgctggcccgtcttaatacaaggctggaaggcggagatgctcatc

SEQ ID NO: 309393 - DNA, 75 bp, synthetic construct
  source 1..75: mol_type = other DNA
taagctgcatgatgcagaagcgcagcagaagcacgattttcatcaaaaacaggaacgtcaacgccgcgatgcacg

SEQ ID NO: 309394 - DNA, 75 bp, synthetic construct
  source 1..75: mol_type = other DNA
agccatccgttcaccgtcgatttaacggcggtggcgatcagcatcaacaccgttgccagcgacgacgtaattaac

SEQ ID NO: 309395 - DNA, 75 bp, synthetic construct
  source 1..75: mol_type = other DNA
gacgcgccagcgtcgcatcaggcaaccggctcgggcgttggatgtcggatgcggcgtaaccgccttatccgacct

SEQ ID NO: 309396 - DNA, 75 bp, synthetic construct
  source 1..75: mol_type = other DNA
cgtaaccttctccaatgccagcgttacgatcatcgtgcatttgtaaacgagatactgagcttcttgctggaagaa

SEQ ID NO: 309397 - DNA, 75 bp, synthetic construct
  source 1..75: mol_type = other DNA
gagttactctttttcactatctgcaaaacttggggccgtaataaaaaataacaatgaggctagcaattactttgc

SEQ ID NO: 309398 - DNA, 75 bp, synthetic construct
  source 1..75: mol_type = other DNA
gaagtatcctccacaggctcaattgagccgggaagtggaagctcttccgaccaggtaccggaagtaaacgatcag

SEQ ID NO: 309399 - DNA, 75 bp, synthetic construct
  source 1..75: mol_type = other DNA
ggcatcaaactctaatctgaatgtaattatgttcaatgatggtagtattgctgcagttaaaaaagatggtgccca

SEQ ID NO: 309400 - DNA, 75 bp, synthetic construct
  source 1..75: mol_type = other DNA
gatagttggttttggtcgaggcggttatgatgtcgtatatgggaaggatggttcttaccgcattgaagaaaccgc

SEQ ID NO: 309401 - DNA, 75 bp, synthetic construct
  source 1..75: mol_type = other DNA
atcaacgcgacggaaaaaggatctggcgctttccggcaccagcgatcagcccgcgggcacggcgatcaccgtcac

SEQ ID NO: 309402 - DNA, 75 bp, synthetic construct
  source 1..75: mol_type = other DNA
tgaccatcaccggcagcagcactgcggaagcggggcagacggtgaccgtcaccctcaatggcgaaaactataccg

SEQ ID NO: 309403 - DNA, 75 bp, synthetic construct
  source 1..75: mol_type = other DNA
agcgggcaaccccggcagcgccagccataatctggcggtagacaccaccgcgccggttctcaccattaacactgt

SEQ ID NO: 309404 - DNA, 75 bp, synthetic construct
  source 1..75: mol_type = other DNA
gtcagatctttccggatactgctgattcggaattcctctatctgcacgcccgtttacgtggtttaagcaaaaaag

SEQ ID NO: 309405 - DNA, 75 bp, synthetic construct
  source 1..75: mol_type = other DNA
ttagtaaaaaacttaatgcatacattctaccaaccattgaggctgaagccaataaagaggatttcagctcaatcc

SEQ ID NO: 309406 - DNA, 75 bp, synthetic construct
  source 1..75: mol_type = other DNA
gcaatattttccatggtgcgatgtgtatatgttgtttttaaggttgttaaggataaatgccctgaagaacatcaa

SEQ ID NO: 309407 - DNA, 75 bp, synthetic construct
  source 1..75: mol_type = other DNA
ctgctgttagtgaattggaagaggcaatatgggcttttattgagaaacaaatagatgaaaaaggagcttgcgaaa

SEQ ID NO: 309408 - DNA, 75 bp, synthetic construct
  source 1..75: mol_type = other DNA
agacaaccgctgggtgcctggctggatgtgttcaccacgtccacagacggatgccactgaacgcgccgataacct

SEQ ID NO: 309409 - DNA, 75 bp, synthetic construct
  source 1..75: mol_type = other DNA
gtggacaaaaattagataacccctgccgtggcgatgccactgaagtaataaaccattcatggaaatttgagagct

SEQ ID NO: 309410 - DNA, 75 bp, synthetic construct
  source 1..75: mol_type = other DNA
agggtaatagaaaattaacaggagtgcttgcggacttccatttttgccctaccgaattaactaaacagaatttaa

SEQ ID NO: 309411 - DNA, 75 bp, synthetic construct
  source 1..75: mol_type = other DNA
ttattgatggtggaaaaggattttcggataatgaagcagttaaagaatatattaatacttggaaggagtttcatg

SEQ ID NO: 309412 - DNA, 75 bp, synthetic construct
  source 1..75: mol_type = other DNA
aagaaaaacacaaatcaaaaatagattaaaattgcaattaaagtattttaaaataatcaaatttggattctttcc

SEQ ID NO: 309413 - DNA, 75 bp, synthetic construct
  source 1..75: mol_type = other DNA
ctccacgagctttgctgcgggtaagaatgtcaatgttgagttcagcaaaggccatagtgatcctacccacgtaat

SEQ ID NO: 309414 - DNA, 75 bp, synthetic construct
  source 1..75: mol_type = other DNA
tggatatcttcccatttgcagaattgaaggagcacatccagaaagcggtttcgatgaagatttccaaatggaaca

SEQ ID NO: 309415 - DNA, 75 bp, synthetic construct
  source 1..75: mol_type = other DNA
ttttcattggagcacctgtgttgttctgaggtgagcatatcacctctgttcaggtggccaaattcagtgtgccac

SEQ ID NO: 309416 - DNA, 75 bp, synthetic construct
  source 1..75: mol_type = other DNA
cattgcgggtgttcatcacatagttgtatagggcatcatttggcggaaccatcaactggcagcacgcatcaatcc

SEQ ID NO: 309417 - DNA, 75 bp, synthetic construct
  source 1..75: mol_type = other DNA
aatgattattgtgttgctatttcagaaaaaataataccaggcctagtagactatagaattgcctacgagcatttt

SEQ ID NO: 309418 - DNA, 75 bp, synthetic construct
  source 1..75: mol_type = other DNA
gcgttaacgaatataggtgctgaaagtttaataccaaaaatcatttcgaaaaaagattctggcagtgagttttat

SEQ ID NO: 309419 - DNA, 75 bp, synthetic construct
  source 1..75: mol_type = other DNA
cgatccggaagcgtatctgcgccatattctgagcgtactgccggaatggccctccaaccgtgttggcgaactcct

SEQ ID NO: 309420 - DNA, 75 bp, synthetic construct
  source 1..75: mol_type = other DNA
tcatgttcttctccacgacagggggcggtaagacagaaacactgttctccctgatgctgaactcactctgccatg

SEQ ID NO: 309421 - DNA, 75 bp, synthetic construct
  source 1..75: mol_type = other DNA
tggaagtggacggcctgccgccggatgcttttgcggtggtttcctttcatctcacccagtcactctcttcacttt

SEQ ID NO: 309422 - DNA, 75 bp, synthetic construct
  source 1..75: mol_type = other DNA
aggaagcttaatggtatgccttcctcaaatcttgataatggcggttgctggtctgtacaacatgtattgtggact

SEQ ID NO: 309423 - DNA, 75 bp, synthetic construct
  source 1..75: mol_type = other DNA
ctcgaatgaaagcactcctgaaattgacctctcggtggtatccggggactggcgggttctgcctccacgtctgat

SEQ ID NO: 309424 - DNA, 75 bp, synthetic construct
  source 1..75: mol_type = other DNA
aagatattaagaaaatcaaaaacagtactaaagaaagtgattggagatcctatacatcctcatctaagacagtaa

SEQ ID NO: 309425 - DNA, 75 bp, synthetic construct
  source 1..75: mol_type = other DNA
aaaggtgagtataaatcaatcaatagccgtattgtgctagagtgtgaaagctgcgcaagaatcagagatataaca

SEQ ID NO: 309426 - DNA, 75 bp, synthetic construct
  source 1..75: mol_type = other DNA
tggctctgatgcagtcctcgcagatcggtttgcataaatcgttgagggtcgggctgggttatgacgtcaaagtcg

SEQ ID NO: 309427 - DNA, 75 bp, synthetic construct
  source 1..75: mol_type = other DNA
cagaaaggactaattagtcttttttctaaaatttccattagtatacaatccatatctttattattaaagggactg

SEQ ID NO: 309428 - DNA, 75 bp, synthetic construct
  source 1..75: mol_type = other DNA
tttaatcctgctaatgggcctcttgcaaactatctaaataagggtgatagtggctctcctttatttgcgtatgac

SEQ ID NO: 309429 - DNA, 75 bp, synthetic construct
  source 1..75: mol_type = other DNA
agggtgtccgccctgaacggccagacatggatggggggcgggattatcaccgataaaggaacccacgttctgtgg

SEQ ID NO: 309430 - DNA, 75 bp, synthetic construct
  source 1..75: mol_type = other DNA
ctatttattggtgttgtggacgtcatctggacgagtgccgataccagtggtgaagcagaaaaacaacctaaaaat

SEQ ID NO: 309431 - DNA, 75 bp, synthetic construct
  source 1..75: mol_type = other DNA
ccatagtcgctggatgtgatagtttcaaatcaacagaaaacattgactttgcaaaaggaagtccttatggctgct

SEQ ID NO: 309432 - DNA, 75 bp, synthetic construct
  source 1..75: mol_type = other DNA
ggaaagaaggcggccagtcgctcatagactgggggaaatgggagccgggtatcaaatatgcccaaaaggcttttg

SEQ ID NO: 309433 - DNA, 75 bp, synthetic construct
  source 1..75: mol_type = other DNA
gcgtcttagcagcatgccgtattaccgagctaaccagtacgctcagatgctgggtctggatgaaaacaccctgat

SEQ ID NO: 309434 - DNA, 75 bp, synthetic construct
  source 1..75: mol_type = other DNA
caatatccattaactccaactcaagtaagatagaattaatggaaaaaattaaaaacataatcccagggcttattg

SEQ ID NO: 309435 - DNA, 75 bp, synthetic construct
  source 1..75: mol_type = other DNA
caaattgccagaatgttggcgggtgagcagaacaccgcaggcagtgatatgaaagcgttagatgatgctggtgga

SEQ ID NO: 309436 - DNA, 75 bp, synthetic construct
  source 1..75: mol_type = other DNA
gtgacctgaaacagactgtcctcgatctcggaaaagcgctggcaaagttgctcaatatcgaccctaaatcctggt

SEQ ID NO: 309437 - DNA, 75 bp, synthetic construct
  source 1..75: mol_type = other DNA
tctcggtcttgccgcggccatcgctttgctatgggaggattaccagacctggaaggagggcggtaagagcctcat

SEQ ID NO: 309438 - DNA, 75 bp, synthetic construct
  source 1..75: mol_type = other DNA
catgaaagtacaacagcaggtccaaatgtactagattatgatagtacacgtaagaatgtaaaaatgccagagttg

SEQ ID NO: 309439 - DNA, 75 bp, synthetic construct
  source 1..75: mol_type = other DNA
gaatgagtggtgccgtaaaaatggtaatttaaccatgcatatgatggcaccatcagcagtaggtttgcctttcgg

SEQ ID NO: 309440 - DNA, 75 bp, synthetic construct
  source 1..75: mol_type = other DNA
ttctccgatggccttagatatatattgctgggcgacttatcgggtgagttatttaaagcgagtcacagttatccc

SEQ ID NO: 309441 - DNA, 75 bp, synthetic construct
  source 1..75: mol_type = other DNA
tgcagagtgcaagtgcaaatgctctcacaacccgtaattatccgacacaaacagccggatgtttacaagtatatc

SEQ ID NO: 309442 - DNA, 75 bp, synthetic construct
  source 1..75: mol_type = other DNA
cagcaaaaaggatttatgcgtattctcaatactactccaggtaacactactggtattactggttctggttttatt

SEQ ID NO: 309443 - DNA, 75 bp, synthetic construct
  source 1..75: mol_type = other DNA
taaatctggttataagttggtagtacgctcagatggctattggcggtgttatgaccgaagatggtgcaactacta

SEQ ID NO: 309444 - DNA, 75 bp, synthetic construct
  source 1..75: mol_type = other DNA
tccggcgatttgttgccgttcgccaatggtgcgcttgacctgaaaacgggggaattttccccgcacacgccggag

SEQ ID NO: 309445 - DNA, 75 bp, synthetic construct
  source 1..75: mol_type = other DNA
aacaattcaacacagtctgttgagtatcgtagttcaggggttttgttcagagtgaaaccatcaatcaaaatcaac

SEQ ID NO: 309446 - DNA, 75 bp, synthetic construct
  source 1..75: mol_type = other DNA
cgtagcaaaccggatgccggtgatttgcctggcgaccggagccacgccattactgacgtatcattatctggtaga

SEQ ID NO: 309447 - DNA, 75 bp, synthetic construct
  source 1..75: mol_type = other DNA
tctggggggcggggctgtgctggaatgcatcaccatgcgcgaaccgctggtgcgcgatcgcattgccttcaccaa

SEQ ID NO: 309448 - DNA, 75 bp, synthetic construct
  source 1..75: mol_type = other DNA
ggggatagacaaggtcagccagctaaagaaagaatcatggatcttaaaaataacactgtcggtattgcttgtggc

SEQ ID NO: 309449 - DNA, 75 bp, synthetic construct
  source 1..75: mol_type = other DNA
atgtgggtgtcgaatttcccatttacgacgctaaaagtagatcgtttaaatcgcaggtggctaacttaacccgcg

SEQ ID NO: 309450 - DNA, 75 bp, synthetic construct
  source 1..75: mol_type = other DNA
ttgataacaatttgagcaggcttaagtcagaagacagaactgtcttaaagatccaaaatgaaagtattgtgacaa

SEQ ID NO: 309451 - DNA, 75 bp, synthetic construct
  source 1..75: mol_type = other DNA
gtgcgtgatgtgaaattagctagaaaactatataaaacacatacaaaatatagttttgttgattttgaacacttg

SEQ ID NO: 309452 - DNA, 75 bp, synthetic construct
  source 1..75: mol_type = other DNA
gatatccgcttacagctacgcgatgatgcactggtactcaacgacaacggcggacggagcattcactttgagccg

SEQ ID NO: 309453 - DNA, 75 bp, synthetic construct
  source 1..75: mol_type = other DNA
tctggagtgatgggaaaaaacccgacagatgtgacgtacttcaggaactaattgattgtggtgatattagtgcta

SEQ ID NO: 309454 - DNA, 75 bp, synthetic construct
  source 1..75: mol_type = other DNA
tatatcatatcaatactatcgccatatagcagaggtgcttggtacttaaatgttacctcagtaattggaatatca

SEQ ID NO: 309455 - DNA, 75 bp, synthetic construct
  source 1..75: mol_type = other DNA
atattgtttcattgaagaggttgagtttttttgcatacaaagcgatagtataaatattaacatttttatagagat

SEQ ID NO: 309456 - DNA, 75 bp, synthetic construct
  source 1..75: mol_type = other DNA
tactcatatcgataaggagtcaggtattccacgtccggcactgtggctgacgtttggtttatctatcttctggac

SEQ ID NO: 309457 - DNA, 75 bp, synthetic construct
  source 1..75: mol_type = other DNA
acacttctatgagcaattcagacgttggcggagcagtcgggatcaggtgctgcatcgccagggaataacgcccct

SEQ ID NO: 309458 - DNA, 75 bp, synthetic construct
  source 1..75: mol_type = other DNA
atgctcagtctttttctgttcttatcactattgatactcctgataaggatattctccgccaggctaataattccg

SEQ ID NO: 309459 - DNA, 75 bp, synthetic construct
  source 1..75: mol_type = other DNA
ctggtcacgtcatgatacagtcatgtttctttttgcaagtggcctggcaattttcagtacgtggatgctggaaca

SEQ ID NO: 309460 - DNA, 75 bp, synthetic construct
  source 1..75: mol_type = other DNA
cctgtgaagccgactccctcggctcgcacgggtacatctatacagcgatttacccgaccccacctgaagcacaac

SEQ ID NO: 309461 - DNA, 75 bp, synthetic construct
  source 1..75: mol_type = other DNA
agcgggagattacactgcgcctgggagcccgtctggtgcaggaaggcaaccgactgcattatctggctgaccggg

SEQ ID NO: 309462 - DNA, 75 bp, synthetic construct
  source 1..75: mol_type = other DNA
aacctcccgaaaccgaagccgcaatggattttatgcaatgggatgctgaagtcgaatcggaacccgccgaagata

SEQ ID NO: 309463 - DNA, 75 bp, synthetic construct
  source 1..75: mol_type = other DNA
cttggaacttttcctaacctgcaaagcctaaatcaggtacgtgagggtatgaccaaagaccagttatattacttg

SEQ ID NO: 309464 - DNA, 75 bp, synthetic construct
  source 1..75: mol_type = other DNA
atatagaatcacttcgtagggctattaatgataatgattttttaaatcgtgatgttaatcaaaataaagtggtaa

SEQ ID NO: 309465 - DNA, 75 bp, synthetic construct
  source 1..75: mol_type = other DNA
gatgatgcgcaccgcagacaccctctggccggaaagcctgcaacagcaggaagccagcaggatgtggagcaacac

SEQ ID NO: 309466 - DNA, 75 bp, synthetic construct
  source 1..75: mol_type = other DNA
aaacctcggtcggtgaactgcctgcgccgggaagcctgtattttcaacgttttggcggtttgaatattgaacagg

SEQ ID NO: 309467 - DNA, 75 bp, synthetic construct
  source 1..75: mol_type = other DNA
atgatgacaggcaaagacgcaattctgaactacctgaaaacgcataaaacctgcagctctccagatgtcgccgcg

SEQ ID NO: 309468 - DNA, 75 bp, synthetic construct
  source 1..75: mol_type = other DNA
gtgtgtgtccacctcagaaatcatcggcatcacaaaaatttacacagcgatatacgctgaatgccgatgcacttt

SEQ ID NO: 309469 - DNA, 75 bp, synthetic construct
  source 1..75: mol_type = other DNA
ctttatccgcagaaggtaagacgacgcacggcctttcccccattctggccattctcgatgaaacagggcaggtta

SEQ ID NO: 309470 - DNA, 75 bp, synthetic construct
  source 1..75: mol_type = other DNA
cctgcggatcctggatgtacaggaaccgcaggaaatcccggacgctttggaagaaaaacgggattttctgtcgga

SEQ ID NO: 309471 - DNA, 75 bp, synthetic construct
  source 1..75: mol_type = other DNA
gatgattggcggccctgtcttcttctcgctgttagcgatggcgatttaccagaactattgcagcagagtggcaaa

SEQ ID NO: 309472 - DNA, 75 bp, synthetic construct
  source 1..75: mol_type = other DNA
tacgtgcagcagtggccaaagttggtggaaagaaagagttaaccggaaaaaacgatatagaaacgggaacagtaa

SEQ ID NO: 309473 - DNA, 75 bp, synthetic construct
  source 1..75: mol_type = other DNA
caactatttaaagagagagcaagagttaatgtgatatttatttatactgacaggtttctacatagtagaaaaaaa

SEQ ID NO: 309474 - DNA, 75 bp, synthetic construct
  source 1..75: mol_type = other DNA
ccagaaaggagcgctggtacaggaatcacagtatccagcgaggccgaagtactgctgtcaaagaaaactggcaat

SEQ ID NO: 309475 - DNA, 75 bp, synthetic construct
  source 1..75: mol_type = other DNA
attgaagggtatataaacacgcttgctttttatgcaagcaactatagtgctgggtatgttagaagaattaatgtc

SEQ ID NO: 309476 - DNA, 75 bp, synthetic construct
  source 1..75: mol_type = other DNA
tcccgatgtctggcgggcagacggaaaaacaagcgcaactgatccgtgattttcaaccagatatgatcatggtta

SEQ ID NO: 309477 - DNA, 75 bp, synthetic construct
  source 1..75: mol_type = other DNA
tcttgattcactttctgtgaaagtggagttgaaagaaagtagcctgacattgacgcatgagcagcgttgccaggt

SEQ ID NO: 309478 - DNA, 75 bp, synthetic construct
  source 1..75: mol_type = other DNA
cgatggcttttgaccgctggcgcattgaccagttcaggaaggatgccgatgccattgggctgagcctcccgctgg

SEQ ID NO: 309479 - DNA, 75 bp, synthetic construct
  source 1..75: mol_type = other DNA
ccctttacggcgctgtggatgggcagaaatttggtgttgaacgaccaacagtgaaagcccgacactcacggaaat

SEQ ID NO: 309480 - DNA, 75 bp, synthetic construct
  source 1..75: mol_type = other DNA
gtcgcaattgacgtgagaaggcaagcgctgacacttgaaagtgtcagattaaaacttgagaaaacaaacgttcgc

SEQ ID NO: 309481 - DNA, 75 bp, synthetic construct
  source 1..75: mol_type = other DNA
aagtgaagtattctttttgagaatccccagggtgaaacaaggttttggattcaggcagattttcagagaattgag

SEQ ID NO: 309482 - DNA, 75 bp, synthetic construct
  source 1..75: mol_type = other DNA
gtcagggataccacacagggagccgccaccgtctggttggcatccccggtactgaaagaatatgaacagtacctg

SEQ ID NO: 309483 - DNA, 75 bp, synthetic construct
  source 1..75: mol_type = other DNA
ctggtccataagcttggcgatatgctggaagatattggtggaaaggatgctgatggtcgtatgacgatgccagca

SEQ ID NO: 309484 - DNA, 75 bp, synthetic construct
  source 1..75: mol_type = other DNA
agccgtcatgggcgtaccgacgtggtttacggggatatctatttttacctgccgcccggtacccgcttttacagg

SEQ ID NO: 309485 - DNA, 75 bp, synthetic construct
  source 1..75: mol_type = other DNA
tatctcttgtagaggcttacattgatagacatcttctattggaagaaaaaaatgaagtaccggtttttcttgata

SEQ ID NO: 309486 - DNA, 75 bp, synthetic construct
  source 1..75: mol_type = other DNA
tttggcgcagtggagtagcaacgcgcaggatcgctggcatctcggcgtcatggctggctatgccaatcagcacag

SEQ ID NO: 309487 - DNA, 75 bp, synthetic construct
  source 1..75: mol_type = other DNA
ttagccatcgattacacgatcgccttggggagccgcaatacacagagtccctgcgagttcaggattcggcaacca

SEQ ID NO: 309488 - DNA, 75 bp, synthetic construct
  source 1..75: mol_type = other DNA
ataattcacccacggataaaatgaacgtgaaaggcgatacccaagggaacactcgcgttcgggttgataacattg

SEQ ID NO: 309489 - DNA, 75 bp, synthetic construct
  source 1..75: mol_type = other DNA
ttcaacaaagcctgcaagacaatcaccaaaccattcgtggcgaaggcgattcgggcaactacgagccggtgaaac

SEQ ID NO: 309490 - DNA, 75 bp, synthetic construct
  source 1..75: mol_type = other DNA
ttgcgtttaccttatggcaaacgtacaggtgttgaagccgtcgatacgctgagcattgttgcgcacgacaaattc

SEQ ID NO: 309491 - DNA, 75 bp, synthetic construct
  source 1..75: mol_type = other DNA
atggacggtattcgtttacatgagcaaaccaaggtggatttaatcacttatgcacatgaaaacgatgctaagtta

SEQ ID NO: 309492 - DNA, 75 bp, synthetic construct
  source 1..75: mol_type = other DNA
ccgaccatgtttccgcatggagtaaggggggtgaaagtaagcctgataattgcgaaatgctttgcgttacgcata

SEQ ID NO: 309493 - DNA, 75 bp, synthetic construct
  source 1..75: mol_type = other DNA
cttggaaatacttactcattccgcatgatgccgtaaaagaagctaattcattggcttacttcacccagcagtttg

SEQ ID NO: 309494 - DNA, 75 bp, synthetic construct
  source 1..75: mol_type = other DNA
tgcgcaactgaacaaccacttctttgaagaagcaaccgagtacgtcgtcgatgtacgcagtggctttagtacctt

SEQ ID NO: 309495 - DNA, 75 bp, synthetic construct
  source 1..75: mol_type = other DNA
gtggatccggaaggcccatcagtttatcgcccggaggccggaagctatatcagcaacattgccgcagccaactcg

SEQ ID NO: 309496 - DNA, 75 bp, synthetic construct
  source 1..75: mol_type = other DNA
aaaacagttacaaatagatgagtttgaacgtattcagagagaacaaaatgaaattttacagagcattattaaaaa

SEQ ID NO: 309497 - DNA, 75 bp, synthetic construct
  source 1..75: mol_type = other DNA
actgtcgaaacttgaggctgtcgcaaggcgtgagctggcttatctgcgtgccgtcggcgatttaccgcgcgatta

SEQ ID NO: 309498 - DNA, 75 bp, synthetic construct
  source 1..75: mol_type = other DNA
atcatttaggactctctcacgtcgatttgatgagtaacccgtcatctggaacagtcttagcgatgttaaatcttg

SEQ ID NO: 309499 - DNA, 75 bp, synthetic construct
  source 1..75: mol_type = other DNA
atatatatattaaaaaaacacttggaccatagtttcttatcactagttattttgactatcatatgtttcgtcgtg

SEQ ID NO: 309500 - DNA, 75 bp, synthetic construct
  source 1..75: mol_type = other DNA
cacaactggcagcagaagtgatgccgtggttaagtactcaaccccagtcagtgctgaagagttatttatcggcac

SEQ ID NO: 309501 - DNA, 75 bp, synthetic construct
  source 1..75: mol_type = other DNA
atacggattggcgtaatattacgctgacgcagtttgatgttcttatcgttgtggagaatcaggattgtttctacc

SEQ ID NO: 309502 - DNA, 75 bp, synthetic construct
  source 1..75: mol_type = other DNA
cgctgggaatgcccggatgttgtgacccccggttggctggccgcccagccattaattctgaatgacaaaactact

SEQ ID NO: 309503 - DNA, 75 bp, synthetic construct
  source 1..75: mol_type = other DNA
acttggtattgcccaccgtggtggggacgtcgagcggcctacgcaacatgtgctggatgtgttgtgggggttgag

SEQ ID NO: 309504 - DNA, 75 bp, synthetic construct
  source 1..75: mol_type = other DNA
gcgcatcagcggttacagcgctgggctgtacgcgacctggtatcagaacgatgcgaataagaccggcgcttatct

SEQ ID NO: 309505 - DNA, 75 bp, synthetic construct
  source 1..75: mol_type = other DNA
tagtaaagcagagtatacgttgggatatatgtattataaaggaacagagatccctcaagatatgacaatggcaat

SEQ ID NO: 309506 - DNA, 75 bp, synthetic construct
  source 1..75: mol_type = other DNA
acccgcttctggtgtctgctcacagcggcctgacgataatcatcggcatcttttctgctaataatacggatatgt

SEQ ID NO: 309507 - DNA, 75 bp, synthetic construct
  source 1..75: mol_type = other DNA
aaaccgcgcctgatggcgcggcagtctcctcttctgccgccacctctgcggcctgtttcccgctgtggactttcc

SEQ ID NO: 309508 - DNA, 75 bp, synthetic construct
  source 1..75: mol_type = other DNA
tatccgttgaatcccatacaagtgatagacccaatggggttagatgcgattgagaatatgacatcaggtggacta

SEQ ID NO: 309509 - DNA, 75 bp, synthetic construct
  source 1..75: mol_type = other DNA
cacccgaatggcaatatcggcaggacttgatcgtgaaggtgcgaaagacgcttacagcaatatttgtcgctttat

SEQ ID NO: 309510 - DNA, 75 bp, synthetic construct
  source 1..75: mol_type = other DNA
cttttactcgtaattcattcgtgacattctttaaacgtacaccaacgggaattaatgttactattaagttgaagg

SEQ ID NO: 309511 - DNA, 75 bp, synthetic construct
  source 1..75: mol_type = other DNA
tgcgctgtagcgtaaatgctgcccacagtcgtgagcaaatcgatgccatcattcaggcatttgctactctgaagc

SEQ ID NO: 309512 - DNA, 75 bp, synthetic construct
  source 1..75: mol_type = other DNA
tcatcttatggtctttggcgcaccattaattgagcgggatccaccaactaggcccccatcatctgtggctcccat

SEQ ID NO: 309513 - DNA, 75 bp, synthetic construct
  source 1..75: mol_type = other DNA
agagtaaagaaaggtgctgtttcggtagttcaaatcgccaaagatgaaacgattaaagatgttggcctgggtgat

SEQ ID NO: 309514 - DNA, 75 bp, synthetic construct
  source 1..75: mol_type = other DNA
aaaagtggtgttgaagaaacatccgttttgtggtgtttttttaatctttttggggttttaattcctatcgatcaa

SEQ ID NO: 309515 - DNA, 75 bp, synthetic construct
  source 1..75: mol_type = other DNA
gctgaaggtctgtcagctattttcccgatggcgatccagcaggtcaccacgtttgtgaaagcaagggtggagcag

SEQ ID NO: 309516 - DNA, 75 bp, synthetic construct
  source 1..75: mol_type = other DNA
tgggaatccgcccaccttgccgcgcgccggtgctgtgtggaaatccgcccaccttaccgggcgccggtgctgtgt

SEQ ID NO: 309517 - DNA, 75 bp, synthetic construct
  source 1..75: mol_type = other DNA
gtataatgcattagtacaggataatccgtacaaaggttttgtaccaacgtcaaatgcacgattaactaaacagcg

SEQ ID NO: 309518 - DNA, 75 bp, synthetic construct
  source 1..75: mol_type = other DNA
tgaataacgcagtcagcatcgacaacgtgaaacctggtgtcactacagactggaaagaaaccgcagatggcgtct

SEQ ID NO: 309519 - DNA, 75 bp, synthetic construct
  source 1..75: mol_type = other DNA
gcgcaggttgatctgcagaagtcgaaaaatgaagtggtcgctgacggcaatgatagcgccacaatggtgatgctg

SEQ ID NO: 309520 - DNA, 75 bp, synthetic construct
  source 1..75: mol_type = other DNA
ctaaaggttccacagcccatcaacggcacaccgatgatggcgattaatctcgaacaactgctggcaataaatctc

SEQ ID NO: 309521 - DNA, 75 bp, synthetic construct
  source 1..75: mol_type = other DNA
tcacgttccgtttccattaatggatttagcattttttatcattgatagattagtcaaaagaaaaaatatattatt

SEQ ID NO: 309522 - DNA, 75 bp, synthetic construct
  source 1..75: mol_type = other DNA
cttccgttagggcctgatttaaatatcgccagctttagtaactgctttggcgatgctaatgcgctgatcagaaaa

SEQ ID NO: 309523 - DNA, 75 bp, synthetic construct
  source 1..75: mol_type = other DNA
atctgtcgagagtttgaagattggcttcatgaaaatgcgattcatcgtttggatcgaataaaccttgatagctta

SEQ ID NO: 309524 - DNA, 75 bp, synthetic construct
  source 1..75: mol_type = other DNA
atatctaaatatgcctttataatacctatagtttttgtttgcatatatagaatgtatgcttctctaatgaaaaga

SEQ ID NO: 309525 - DNA, 75 bp, synthetic construct
  source 1..75: mol_type = other DNA
aggaaaaatatcattatctttcaatttcaaaatgttttcttttcccatccgttgctgcatccgaagcatttggta

SEQ ID NO: 309526 - DNA, 75 bp, synthetic construct
  source 1..75: mol_type = other DNA
cgttcattataaatactattaatcgaagcactcagattttaactacatctccaaatctcaaagctaattcagaag

SEQ ID NO: 309527 - DNA, 75 bp, synthetic construct
  source 1..75: mol_type = other DNA
cgcggtattgcgtacttattagatacattgtcaaggcagtacaatgtgctctttgttgtttctgcagggaatttt

SEQ ID NO: 309528 - DNA, 75 bp, synthetic construct
  source 1..75: mol_type = other DNA
ttcagcatctctgcccggcaacagaaaatcaaccttcaccttttacccgacatggtccatcaataaaaggggcgt

SEQ ID NO: 309529 - DNA, 75 bp, synthetic construct
  source 1..75: mol_type = other DNA
acaggtctgtatcgttttcactaatgagcagggtctgacaaccttcgaaacccatctggcgcaactggggcttcc

SEQ ID NO: 309530 - DNA, 75 bp, synthetic construct
  source 1..75: mol_type = other DNA
acgtgatcatggtacagtacaatcctctagttggacttttaagcaaaggtctccagatgaaaagtggtttgtggt

SEQ ID NO: 309531 - DNA, 75 bp, synthetic construct
  source 1..75: mol_type = other DNA
aaatcgtagtgttattcgagatgtcgttggatatggaattgttgaggaagatggtttatatcgctcgtccgagga

SEQ ID NO: 309532 - DNA, 75 bp, synthetic construct
  source 1..75: mol_type = other DNA
tcgccagcggaaaatgcgaccaggatatgtattctggatagtggtattaataccaaccatcctttgttaagcgct

SEQ ID NO: 309533 - DNA, 75 bp, synthetic construct
  source 1..75: mol_type = other DNA
caccttgccgggcgccggtgctgtgtggaaatccgcccaccttgccgcgcgccggtgccgtgtgggaatccgccc

SEQ ID NO: 309534 - DNA, 75 bp, synthetic construct
  source 1..75: mol_type = other DNA
gatgattgcaaaggaaggaagaaaatatggcctaaatatttgtctaacaactcaaaggcccagagatataaccga

SEQ ID NO: 309535 - DNA, 75 bp, synthetic construct
  source 1..75: mol_type = other DNA
tttcattaatacccgagctaataaacagaagcttaagtgatgatggtgaaaaccgaataggtatagtattaggta

SEQ ID NO: 309536 - DNA, 75 bp, synthetic construct
  source 1..75: mol_type = other DNA
tgaatatattgatacaccgaaagaagatgtgttaacgaagcagtttactaacgataaatggggattagtgaatat

SEQ ID NO: 309537 - DNA, 75 bp, synthetic construct
  source 1..75: mol_type = other DNA
tcaatgtttacggagcatggatgaaagacaacaatcacgaacagatagaactccttaacaaaagactatctgaaa

SEQ ID NO: 309538 - DNA, 75 bp, synthetic construct
  source 1..75: mol_type = other DNA
cacaggtctgagacacagaaaatcgtaccaatccaggcatacttatgcatgctggtcacttgccgcaggagctaa

SEQ ID NO: 309539 - DNA, 75 bp, synthetic construct
  source 1..75: mol_type = other DNA
acccggggcggttcaccggaaggacaattcatctggttcaaccagctattgatgctcttaaaagccaggcggaaa

SEQ ID NO: 309540 - DNA, 75 bp, synthetic construct
  source 1..75: mol_type = other DNA
gacgggatccgtaacgggctgggaattgggcgcttgtttgagcctgtctggcagttacagccggacagggagcgc

SEQ ID NO: 309541 - DNA, 75 bp, synthetic construct
  source 1..75: mol_type = other DNA
ttcgacgccgaagaattggctgtagctgactgcgggaaaattcccaagtcagcaaaatcaaaggagttcttccct

SEQ ID NO: 309542 - DNA, 75 bp, synthetic construct
  source 1..75: mol_type = other DNA
cctgtcagcgccccggtgatcccgccgttgaaagtctggcgcgcactccatgtgttagccgtgctcaacaggggg

SEQ ID NO: 309543 - DNA, 75 bp, synthetic construct
  source 1..75: mol_type = other DNA
aagttagcaggtatgtgcatggtaatcagggaaaaactgatgtgccaatatttaatactaaagatatgaggcttg

SEQ ID NO: 309544 - DNA, 75 bp, synthetic construct
  source 1..75: mol_type = other DNA
caatgaaaagcaaagattcaaaaacaattgattttttattaaaaaatggagcggtatcaggcaaacgatttggga

SEQ ID NO: 309545 - DNA, 75 bp, synthetic construct
  source 1..75: mol_type = other DNA
ttccgagagttttgttataataaaaacattgatcctgttagtctggatagaattataaactttgtgtttcagctt

SEQ ID NO: 309546 - DNA, 75 bp, synthetic construct
  source 1..75: mol_type = other DNA
ttcggtcgtcattgtgctatcttaggagctacaggcggtggaaaaagttggacaacttccaagttaattgaagag

SEQ ID NO: 309547 - DNA, 75 bp, synthetic construct
  source 1..75: mol_type = other DNA
ggtgacctgcaggatcgtgtggatgcactggacggtatccaggtaccggaagtgaacgatcaggacggtaacggc

SEQ ID NO: 309548 - DNA, 75 bp, synthetic construct
  source 1..75: mol_type = other DNA
acaggcgatgatttaattctgcgtaaaaaggaagatgatacagaaatccggattgagggattctgggaaaaatgc

SEQ ID NO: 309549 - DNA, 75 bp, synthetic construct
  source 1..75: mol_type = other DNA
gggacttataccctaatgcaccgagattttcttggagtactgagtcaaataaaatatctacagttaacaaaaact

SEQ ID NO: 309550 - DNA, 75 bp, synthetic construct
  source 1..75: mol_type = other DNA
gataagtctcttgaggccatgggaacttatatagcctgtaacgaagcctcctcaccagaccatggatttcatgtt

SEQ ID NO: 309551 - DNA, 75 bp, synthetic construct
  source 1..75: mol_type = other DNA
tattcacaggagaagggaatgatttaatcgttacaggaagagattatggacgtaataccagtgcaggatacacgg

SEQ ID NO: 309552 - DNA, 75 bp, synthetic construct
  source 1..75: mol_type = other DNA
gatggacctccgacagtctctacgaagccggtaaatgggaattctttcggacaggtaccggaagtgaacgatcag

SEQ ID NO: 309553 - DNA, 75 bp, synthetic construct
  source 1..75: mol_type = other DNA
atgcaaatggactggtatttatcgactcatattacgataatccgtctacgattaagggaagtattaatgcgcgtg

SEQ ID NO: 309554 - DNA, 75 bp, synthetic construct
  source 1..75: mol_type = other DNA
ttgaacagattttctatccaggctggttgatggccagccagctacgcggcgggcaagaagttcgggacggggaag

SEQ ID NO: 309555 - DNA, 75 bp, synthetic construct
  source 1..75: mol_type = other DNA
gcagaacgaacaaaaagattatgcctggggctatcgcgaagggaagcccgtacacgtttctccggtttataccaa

SEQ ID NO: 309556 - DNA, 75 bp, synthetic construct
  source 1..75: mol_type = other DNA
aatttaagtgatatagggagtctggagattcagggggccagcctaggaacattggttacatttttagtttccaaa

SEQ ID NO: 309557 - DNA, 75 bp, synthetic construct
  source 1..75: mol_type = other DNA
gcaggttgtgcctttatatggtgaattatctaaagctaagcatggtgtattaaagagcaaagctattctttatat

SEQ ID NO: 309558 - DNA, 75 bp, synthetic construct
  source 1..75: mol_type = other DNA
gactaacttgttaaaaattcaggaaggcgatgggtatgcttccggcatggctataaaattatactccgatgatgg

SEQ ID NO: 309559 - DNA, 75 bp, synthetic construct
  source 1..75: mol_type = other DNA
ttactgcgatccgccttacgaaccgatgccgggaacaaccggattcaccgcctacgccgctggtggttttagctg

SEQ ID NO: 309560 - DNA, 75 bp, synthetic construct
  source 1..75: mol_type = other DNA
caggcgaacaagttcaatgtgggatggggaggctacaaggcgccgtattacccgctggtcgaaatgaaatccttc

SEQ ID NO: 309561 - DNA, 75 bp, synthetic construct
  source 1..75: mol_type = other DNA
ttccgcgcagcaaatgggcgttacggcaggcctgacgctacccattttcgatagtggtcgtcttaacgccaatct

SEQ ID NO: 309562 - DNA, 75 bp, synthetic construct
  source 1..75: mol_type = other DNA
tgtacaaaaccagacggaacgaaagcgccaacagtcaggaagatgcggtatgacgcaaacacggcctggaaaacg

SEQ ID NO: 309563 - DNA, 75 bp, synthetic construct
  source 1..75: mol_type = other DNA
taaatatgaaaggtggggttggtaaaacaactttatgcgtcggcattgctgaatatcttgcaaacttcatggata

SEQ ID NO: 309564 - DNA, 75 bp, synthetic construct
  source 1..75: mol_type = other DNA
ttcgccggactaccacggcccacggatttacttctccatgagtgacggacaacagaatacactccatcgccccct

SEQ ID NO: 309565 - DNA, 75 bp, synthetic construct
  source 1..75: mol_type = other DNA
agatttaccgtcagctgactgacgaggtactggccctgcgattgcctgaaaacggctcacaactgcaccattcat

SEQ ID NO: 309566 - DNA, 75 bp, synthetic construct
  source 1..75: mol_type = other DNA
gatggaacccttttcaataccttctaccgcagcagcgacgatccacttgaaggtgtgatgaaaacgctctgggaa

SEQ ID NO: 309567 - DNA, 75 bp, synthetic construct
  source 1..75: mol_type = other DNA
cctttgcccgtagtgaaggtggcatcaatacatttggcctcacctttgcgatgcaagcgaataaaacggcggaca

SEQ ID NO: 309568 - DNA, 75 bp, synthetic construct
  source 1..75: mol_type = other DNA
acatcgggagtcagcaattcagtaggtgtaacggttggcggcggagttgggggggcattttgcgtatacttatgt

SEQ ID NO: 309569 - DNA, 75 bp, synthetic construct
  source 1..75: mol_type = other DNA
agcaggatgccagggatgccaagccacagccagatgatgcggtggcagtgggagcacattgattttcgcgaaggt

SEQ ID NO: 309570 - DNA, 75 bp, synthetic construct
  source 1..75: mol_type = other DNA
ttgcgaggcagtggatttgaatacgaagaaattcccataacaataaatgagtataactcattcatggatttcaaa

SEQ ID NO: 309571 - DNA, 75 bp, synthetic construct
  source 1..75: mol_type = other DNA
gcaatatgcggttagttatggaggccttagcattatggagcccacgagagaaagatataatcacactcgtcgagc

SEQ ID NO: 309572 - DNA, 75 bp, synthetic construct
  source 1..75: mol_type = other DNA
cggaaaaccggtgccgtttggatcactggtacgggaaaacagtatcggaataaccagtatgtgggtgatgacggg

SEQ ID NO: 309573 - DNA, 75 bp, synthetic construct
  source 1..75: mol_type = other DNA
ataaccagtatggtgggtgatgacgggcaagtttatttaagtggtgcgccattgtctggtgaattactggtttag

SEQ ID NO: 309574 - DNA, 75 bp, synthetic construct
  source 1..75: mol_type = other DNA
tatttacaccggtccaccgctggcagcagatcgtgagtctctgttctggatgaatgttaagacgattccttcggt

SEQ ID NO: 309575 - DNA, 75 bp, synthetic construct
  source 1..75: mol_type = other DNA
ggcattgcacttcagctcaccacagcccgttttctgggaacatttctgacggatttaactcaggttctgcctggt

SEQ ID NO: 309576 - DNA, 75 bp, synthetic construct
  source 1..75: mol_type = other DNA
gggtttgccccaacggtacgtgggattgcccgtacggcggcccagctaacgattcggcaaaatggttttattatc

SEQ ID NO: 309577 - DNA, 75 bp, synthetic construct
  source 1..75: mol_type = other DNA
tcgctggatgtgacccatgcgcgcagtcagttagccgacgatagtcgtcatgagggggattcggtaatgactcca

SEQ ID NO: 309578 - DNA, 75 bp, synthetic construct
  source 1..75: mol_type = other DNA
acagaaccgacttggaatattaacacgggcgtggttggatggctttatatattaaggtatgaatccatacttttt

SEQ ID NO: 309579 - DNA, 75 bp, synthetic construct
  source 1..75: mol_type = other DNA
gtgaatgaagataatatctacgccttgctttctaccctggcagagggacgggtatacccctatgttgcgccatta

SEQ ID NO: 309580 - DNA, 75 bp, synthetic construct
  source 1..75: mol_type = other DNA
accacagaaacactgtttgccctggacaggcagccgcccgcgttattgcaacccggcatgcaagtgcagtttgtc

SEQ ID NO: 309581 - DNA, 75 bp, synthetic construct
  source 1..75: mol_type = other DNA
gatgagttcattggttcacaggatatcgtatttgaatcgacaacagaaaatacaggtgataaatcaggtgggtta

SEQ ID NO: 309582 - DNA, 75 bp, synthetic construct
  source 1..75: mol_type = other DNA
atccgcgccagcggtatggcgcgccacgccagtgaatggctgctcaacgctgtaccacaaccctgtcagcttagc

SEQ ID NO: 309583 - DNA, 75 bp, synthetic construct
  source 1..75: mol_type = other DNA
ttaaggatctcactaaaaacttttttggtatccttatgttctctattgcttcttttctccattttgcctgcactc

SEQ ID NO: 309584 - DNA, 75 bp, synthetic construct
  source 1..75: mol_type = other DNA
aggtaagacgacggttgagaataatgcgttgtctgagcttgtgccgcctcgcgtacagcaggatacttctctggc

SEQ ID NO: 309585 - DNA, 75 bp, synthetic construct
  source 1..75: mol_type = other DNA
gactgatgctgttaaaagcgcatacgaagaacacggtggaaatgatgtttgcccgcagtgctttaaacgcgtgga

SEQ ID NO: 309586 - DNA, 75 bp, synthetic construct
  source 1..75: mol_type = other DNA
gctgctcaaggctggcattgagaataacaccatggtcaatgtctccagcatcaacactacgggcggcggtcagta

SEQ ID NO: 309587 - DNA, 75 bp, synthetic construct
  source 1..75: mol_type = other DNA
gtcggtacaataatgttataggctacgatggggcagttggtgcgtcaactactaatgtaaccattaaccttacca

SEQ ID NO: 309588 - DNA, 75 bp, synthetic construct
  source 1..75: mol_type = other DNA
cgtaaggcgctacgggccggagacaccctcgtggtgtggcggctggatcgactagggcgcagcctccccgagctg

SEQ ID NO: 309589 - DNA, 75 bp, synthetic construct
  source 1..75: mol_type = other DNA
acatccgcgacgaaacctattcggcggctcttgcggatttagtcaacgctcaattccgccaccccttcgcagcct

SEQ ID NO: 309590 - DNA, 75 bp, synthetic construct
  source 1..75: mol_type = other DNA
ttttcaccctctccatctggcgctccaccttcctggatgtgctgcagtggaccgtggtatggacgctgctggcga

SEQ ID NO: 309591 - DNA, 75 bp, synthetic construct
  source 1..75: mol_type = other DNA
tgtaaggagctcgttgtcttgcattgcgtaagtggatatccggctccaccagaggattacaatcttgccacaatc

SEQ ID NO: 309592 - DNA, 75 bp, synthetic construct
  source 1..75: mol_type = other DNA
ggaatggcataaaccattatttgaaaaagcgaaagaactaggtattaccattttcagtagtccatttgactttac

SEQ ID NO: 309593 - DNA, 75 bp, synthetic construct
  source 1..75: mol_type = other DNA
gtcggaaaattggtaaagaatactcaccatatgtcattgctgaattgtccgcaaatcacaatggtgatataaatc

SEQ ID NO: 309594 - DNA, 75 bp, synthetic construct
  source 1..75: mol_type = other DNA
tagattatccgattctgtttaaagtcacgcaaaaaaccaccccagcgacgttcatagaatggcgcaatatgttcg

SEQ ID NO: 309595 - DNA, 75 bp, synthetic construct
  source 1..75: mol_type = other DNA
atgctggaacgaggatatgatcctaaacttgtcgatgatgcaataaaacaacttaaggaaaggaactctcaaata

SEQ ID NO: 309596 - DNA, 75 bp, synthetic construct
  source 1..75: mol_type = other DNA
gtgtttttaattgggcaaagcccgcgtgtggcggtttatagcgcgattccagttaaccgcaccttgtgtgcgctc

SEQ ID NO: 309597 - DNA, 75 bp, synthetic construct
  source 1..75: mol_type = other DNA
atccagatattcaggtggccgaggtagctcgccgttatggcgtgtcccgaaccaccctttacaaacacgttggcg

SEQ ID NO: 309598 - DNA, 75 bp, synthetic construct
  source 1..75: mol_type = other DNA
cttcaattttcacattttacaaacctactaaaagtttctttttcagtgacatacaaagaaaaaaagctatgagat

SEQ ID NO: 309599 - DNA, 75 bp, synthetic construct
  source 1..75: mol_type = other DNA
aaaatttcctgtataaatgtggctatgagattgaaaaactggctaagtttttatctgaatatcattttgtgaagt

SEQ ID NO: 309600 - DNA, 75 bp, synthetic construct
  source 1..75: mol_type = other DNA
cattatggtgccgatagatgggttgctcactacgaagaagtgttgtccattttagacaaaaagatcccgaaaaaa

SEQ ID NO: 309601 - DNA, 75 bp, synthetic construct
  source 1..75: mol_type = other DNA
ttacatgtccgccctgtgcggaaaaatctacaataagcgaatgcgtaatatttacgatgagatgtgcctgcgggg

SEQ ID NO: 309602 - DNA, 75 bp, synthetic construct
  source 1..75: mol_type = other DNA
atatgagatgctggagaatgagtaccctcagagggtggctgaccggctgaaagcatcaggtctgagcggtgatgc

SEQ ID NO: 309603 - DNA, 75 bp, synthetic construct
  source 1..75: mol_type = other DNA
atgttagataaaatcaaagctattaaattgaataggagtaattactgtcaaagggagtcaatacccacaaatgaa

SEQ ID NO: 309604 - DNA, 75 bp, synthetic construct
  source 1..75: mol_type = other DNA
attatcattttcggtgtcggtttattttacttaatctctttagttacttcttttatgtttattaaacaaccagga

SEQ ID NO: 309605 - DNA, 75 bp, synthetic construct
  source 1..75: mol_type = other DNA
ccatgagtgatgcggatgacatcatcctggatacgatggggacggaaatcagcatatatccgggcggcacggaaa

SEQ ID NO: 309606 - DNA, 75 bp, synthetic construct
  source 1..75: mol_type = other DNA
ataagctggctatcatcaccggaacctggagcatcaatgaatatgtgactgaccatccggttatcgacgaagatc

SEQ ID NO: 309607 - DNA, 75 bp, synthetic construct
  source 1..75: mol_type = other DNA
gcaagtcagtttcagcaacgaacacacgccgcccccgtcattacacgagatacccaacgtcaggcagcggcacag

SEQ ID NO: 309608 - DNA, 75 bp, synthetic construct
  source 1..75: mol_type = other DNA
ctcccaggagtaaaatggggacatattgaagcattcccgtcaccagcatactgggcctaccaagtattggctcgt

SEQ ID NO: 309609 - DNA, 75 bp, synthetic construct
  source 1..75: mol_type = other DNA
cgtttatcatcactgctgtgttggtggttctgggcgcttttggcctcggcagcatgcgtggacgggagaaggccg

SEQ ID NO: 309610 - DNA, 75 bp, synthetic construct
  source 1..75: mol_type = other DNA
aactttattactgatggtgttgttcagcttaatgaggaaaacgtacaagtcaggaatgcggatcctatccagggc

SEQ ID NO: 309611 - DNA, 75 bp, synthetic construct
  source 1..75: mol_type = other DNA
aatcggcatatatcgccggggagccattaaccgtcacagtaacgttacgggatgagtttggtaaccctgctttcg

SEQ ID NO: 309612 - DNA, 75 bp, synthetic construct
  source 1..75: mol_type = other DNA
gcagatcgcggatctggtggtcattaaggatggttcagaggcggacggttcgacggagaacacgctgcgggcgag

SEQ ID NO: 309613 - DNA, 75 bp, synthetic construct
  source 1..75: mol_type = other DNA
tgaagaaattgattccgattctggaaatagtgctgacagtggcgaagatgtggaagaaccgcaagaagtaacgcc

SEQ ID NO: 309614 - DNA, 75 bp, synthetic construct
  source 1..75: mol_type = other DNA
acatttatcgccgatgtcaggacggcgcagatcgcgagtctggaggtgacgcaggataacgccgtggctgacggc

SEQ ID NO: 309615 - DNA, 75 bp, synthetic construct
  source 1..75: mol_type = other DNA
gccagaacgtcacctttgtaccgggtgatgcatcgcagctcacttcaaccgttgaaacaaataagtcgaactata

SEQ ID NO: 309616 - DNA, 75 bp, synthetic construct
  source 1..75: mol_type = other DNA
cgataaagccattaccgcccaaatcaatgcctgggccttcaacaatcaattcatcctgaaagaacgcgcgcggca

SEQ ID NO: 309617 - DNA, 75 bp, synthetic construct
  source 1..75: mol_type = other DNA
cttgcgccattgctggatgccattaattcagttcccggcttttggtcgaccgtttctcttgcctgtttattgaac

SEQ ID NO: 309618 - DNA, 75 bp, synthetic construct
  source 1..75: mol_type = other DNA
aaattagtcatgcagtttctaagaaactggcctttcttgctaatgtttttcttgggaaagtgcagggggatagag

SEQ ID NO: 309619 - DNA, 75 bp, synthetic construct
  source 1..75: mol_type = other DNA
tacctgggatatcataaatacttcatgtagctatggtcaaatgccgtcatctttagaattagcgcagcggccaag

SEQ ID NO: 309620 - DNA, 75 bp, synthetic construct
  source 1..75: mol_type = other DNA
cgcctcgctgcaactgcgttatacaccgggtaaagttgtttttaacggacaggagatgagcgaagaagaatttat

SEQ ID NO: 309621 - DNA, 75 bp, synthetic construct
  source 1..75: mol_type = other DNA
atagagtgtttttaaaagcaaaacagtctgactattcattttgtatcaatgatggaaagtggagattaaacagaa

SEQ ID NO: 309622 - DNA, 75 bp, synthetic construct
  source 1..75: mol_type = other DNA
acttccgtgtatgggctgatctggattgggctgttatggaccatagcgcactgaccgtagttcagaaaaaagttg

SEQ ID NO: 309623 - DNA, 75 bp, synthetic construct
  source 1..75: mol_type = other DNA
gatatgtatgaaacattaggtaataaagatctcaacatcaccgataaagagtaccaaagtaaaaactcaaaggtt

SEQ ID NO: 309624 - DNA, 75 bp, synthetic construct
  source 1..75: mol_type = other DNA
gagaccacatgttaaaattaaagtctcactatgatattcttcgcgtttggaatatgtctgttcatccagataaaa

SEQ ID NO: 309625 - DNA, 75 bp, synthetic construct
  source 1..75: mol_type = other DNA
taagcaggtcatttcttcccaagctgactcgctgattaaaatttctcggatctgggccgatttttttcccgcaaa

SEQ ID NO: 309626 - DNA, 75 bp, synthetic construct
  source 1..75: mol_type = other DNA
cgcagtattacgcaaccgggacagcaactgctggtgatgtaacaacaactgtcaattataccatcgcttacgaat

SEQ ID NO: 309627 - DNA, 75 bp, synthetic construct
  source 1..75: mol_type = other DNA
acttacgctaacattgcaagacaagtacggtaacccgatagtgacgtctgatcatctggaatttgtccagtcagg

SEQ ID NO: 309628 - DNA, 75 bp, synthetic construct
  source 1..75: mol_type = other DNA
gcgctgaatgtgttactgcctgacgcgaccgactggcaagtgtatgaagccggttcggtgtttaatgttcccggt

SEQ ID NO: 309629 - DNA, 75 bp, synthetic construct
  source 1..75: mol_type = other DNA
cgacgacatgaagcgcgaatacccgaccattccggccgaggcgttccagcagtcggtcgagggtgcgtactacgc

SEQ ID NO: 309630 - DNA, 75 bp, synthetic construct
  source 1..75: mol_type = other DNA
cgactactacgaaaactcaggcgagggcctgcggcactacatgaaggtgctgaaagaccgcgggtatacctacgg

SEQ ID NO: 309631 - DNA, 75 bp, synthetic construct
  source 1..75: mol_type = other DNA
aagattctcgtgtgaaagaacgtatcgcgcgggcgggtcaatggtttggcgaaacgttaattgccgatgatgcct

SEQ ID NO: 309632 - DNA, 75 bp, synthetic construct
  source 1..75: mol_type = other DNA
acgctcagtctttcatttggcttcatccagtcacttagggaaggtgcgaataagcaggtcatttcttcccaagct

SEQ ID NO: 309633 - DNA, 75 bp, synthetic construct
  source 1..75: mol_type = other DNA
atgaaacctgagcacctcaagctgctggccgacaaagactggcggcttaacaatctctactggatcaccgacaaa

SEQ ID NO: 309634 - DNA, 75 bp, synthetic construct
  source 1..75: mol_type = other DNA
cgactactacgaaaactccggcgaggggctcaggcactacatgaaggtgctgaaagaccgcggctatgagtacgg

SEQ ID NO: 309635 - DNA, 75 bp, synthetic construct
  source 1..75: mol_type = other DNA
tttattgacggcaaaatgtggctcaccgaaattgccgacgggtgtgatttagccaccgtgcgtgccaaaacagaa

SEQ ID NO: 309636 - DNA, 75 bp, synthetic construct
  source 1..75: mol_type = other DNA
cgaaaggtagtgattattcaggatttaaatacaaccattactcacgatttcaaaccgattatttcaatgtctcgt

SEQ ID NO: 309637 - DNA, 75 bp, synthetic construct
  source 1..75: mol_type = other DNA
tgcgggccgttgctggcgcaacgttctctcgcttcgctcgagtcgaacctccctgcccccggaggttctcatcct

SEQ ID NO: 309638 - DNA, 75 bp, synthetic construct
  source 1..75: mol_type = other DNA
gaacctccctgcccccggaggttctcatcctcatgagctgcagatgcaaaaaagcctgctcgttgagcaggcttt

SEQ ID NO: 309639 - DNA, 75 bp, synthetic construct
  source 1..75: mol_type = other DNA
ccgcgttctcgccagaaaactacaccagtactgtggatgagaatgcttttaataaagcagcagaattcttaaatc

SEQ ID NO: 309640 - DNA, 75 bp, synthetic construct
  source 1..75: mol_type = other DNA
agacaggatggtttatcgcgggcctgatggcgggcttacccgccagtgccgcgcccacagaaacatcgtcagtgg

SEQ ID NO: 309641 - DNA, 75 bp, synthetic construct
  source 1..75: mol_type = other DNA
aatgttttatcgcggtggtataaagattgaacccttacttgacgccattatgtccatttccggttactggccgac

SEQ ID NO: 309642 - DNA, 75 bp, synthetic construct
  source 1..75: mol_type = other DNA
gcccaggccgcctgccagcctggcgaaacgatgcataacgaaccttttgagatcacgccagaaagcgtcgtcgcg

SEQ ID NO: 309643 - DNA, 75 bp, synthetic construct
  source 1..75: mol_type = other DNA
acgaaatggttgagcagtacggtcgggttaaacgttttcttccggcggtgttgcggaacctgcatttccgtgcgg

SEQ ID NO: 309644 - DNA, 75 bp, synthetic construct
  source 1..75: mol_type = other DNA
ggatgataatacagatgttccagatctcaggcaggttatcttcaagtgcgtacccaaaaacagactggcagaatc

SEQ ID NO: 309645 - DNA, 75 bp, synthetic construct
  source 1..75: mol_type = other DNA
gttttctgtgtgtttatgatttttataatccggattacatcatgggatatgcggccgtctgccagagaaaaaatg

SEQ ID NO: 309646 - DNA, 75 bp, synthetic construct
  source 1..75: mol_type = other DNA
gattagtgagggcggtacgttacaggaattatatgctattccccaggatatcatggattgcttatatgcgcatgc

SEQ ID NO: 309647 - DNA, 75 bp, synthetic construct
  source 1..75: mol_type = other DNA
cgtcggtgctactcttaatttgccgatcatcgtcatccctacgctggcgtctaccgatgcgccatgcagctcgct

SEQ ID NO: 309648 - DNA, 75 bp, synthetic construct
  source 1..75: mol_type = other DNA
atcctaaatttaaacctggaatgtcagtaagactgttatcctgtaatacaggaaaaggaaataactcttatgcac

SEQ ID NO: 309649 - DNA, 75 bp, synthetic construct
  source 1..75: mol_type = other DNA
ctgctatgtaccgtgcttaatttactattttttctattgtcgattcctctggcataacgattttatgatggcatg

SEQ ID NO: 309650 - DNA, 75 bp, synthetic construct
  source 1..75: mol_type = other DNA
tgtcacgcattgaactggcacggcaggacggcatactgacggaatcaatgagaaactgggctcaccgaatccgta

SEQ ID NO: 309651 - DNA, 75 bp, synthetic construct
  source 1..75: mol_type = other DNA
aacaaaatggcatgagcctagagttcgctgactggttctttgataacaaaaaagatggctgtggaaacgcttggt

SEQ ID NO: 309652 - DNA, 75 bp, synthetic construct
  source 1..75: mol_type = other DNA
tacgctccgggttctgcgcgctgtccgtgttcaaactggctgcaacaattacgccagatgggcctggtttgaacc

SEQ ID NO: 309653 - DNA, 75 bp, synthetic construct
  source 1..75: mol_type = other DNA
ggaacgccgaacggtcagaaagtaacgattatgcttgaggagctgctggcactgggcgttactggtgcagagtac

SEQ ID NO: 309654 - DNA, 75 bp, synthetic construct
  source 1..75: mol_type = other DNA
gatggtttaaataattttgaattattgcttaaattgcagtttaaaatattggtgtgcgtgatgagatgtgagcgg

SEQ ID NO: 309655 - DNA, 75 bp, synthetic construct
  source 1..75: mol_type = other DNA
gaacaggccaccgaacaggaacaggctaccgaacaggcacaggccacagagcaggcacaggccacagagcaggca

SEQ ID NO: 309656 - DNA, 75 bp, synthetic construct
  source 1..75: mol_type = other DNA
catgctgactggcataaggataaagatgaaatgaaagcccttgaacgtctcaaaagctatctcaacttcgatgaa

SEQ ID NO: 309657 - DNA, 75 bp, synthetic construct
  source 1..75: mol_type = other DNA
tgatttcctgcaagagaggataaaagaatatgactcaagagaaaaacttaacgaaagaaattctcagcaaacgtc

SEQ ID NO: 309658 - DNA, 75 bp, synthetic construct
  source 1..75: mol_type = other DNA
tgtataaactttagtcgcttccatgatttgaatgaaggtatcgtctttcattctaaagatgcggctattcagtgt

SEQ ID NO: 309659 - DNA, 75 bp, synthetic construct
  source 1..75: mol_type = other DNA
aacagaaggattatgtctatttctcaacacatgaaggtctgaatgctgaaataaaagatttcagctctctcaagg

SEQ ID NO: 309660 - DNA, 75 bp, synthetic construct
  source 1..75: mol_type = other DNA
cacaggccacagagcaggcacaggccacagagcaggcacaggccacagagcaggcacaggccacatcttcatatc

SEQ ID NO: 309661 - DNA, 75 bp, synthetic construct
  source 1..75: mol_type = other DNA
ctgccttcctgaatgccaaacccaaagaacgcgcggaattgctcgaggagttaaccggcactgaaatctacgggc

SEQ ID NO: 309662 - DNA, 75 bp, synthetic construct
  source 1..75: mol_type = other DNA
ctcaaatgatttacatagtgcgctttgtttatgccggatgcggcgtgaacgccttatccggcctacaaattctca

SEQ ID NO: 309663 - DNA, 75 bp, synthetic construct
  source 1..75: mol_type = other DNA
ccagttttcattcgctcacgaagagataacacagatgcggcatggtcgccgtgggcgcagctttacacctcggct

SEQ ID NO: 309664 - DNA, 75 bp, synthetic construct
  source 1..75: mol_type = other DNA
tgccgcctttgttaaagtatcgacgccattagtggtcacagcgggcgctgctcatgtgaatgttcaaaccgatct

SEQ ID NO: 309665 - DNA, 75 bp, synthetic construct
  source 1..75: mol_type = other DNA
tgcgcaccccaagctttttacatttcctcttgggctggcaattgcgatggaagagaataaagaaaaaccagaaac

SEQ ID NO: 309666 - DNA, 75 bp, synthetic construct
  source 1..75: mol_type = other DNA
ccagcacatctgcccgtgaggcggcaacccatgcgactgatgctgcagactcagcacgcgcagccagcacgtcag

SEQ ID NO: 309667 - DNA, 75 bp, synthetic construct
  source 1..75: mol_type = other DNA
gacagggtttacaaattttgcctgggtcaatacatctggtgatacttacgatatttacgttgcaatcggaaatta

SEQ ID NO: 309668 - DNA, 75 bp, synthetic construct
  source 1..75: mol_type = other DNA
atgccacaggcgagttctgttgtttcaattacgttgattggtggtgcgggatttaacgtggggtcacctcaacag

SEQ ID NO: 309669 - DNA, 75 bp, synthetic construct
  source 1..75: mol_type = other DNA
attgtctcaggaacaggacggcattaaatcgcacacccacagcgccagcgcatccagtacggatttgggtacgaa

SEQ ID NO: 309670 - DNA, 75 bp, synthetic construct
  source 1..75: mol_type = other DNA
ttgtcggtaggtaatcattttacggatggctaccgtaaaatgaatctggcagctttccaggatgatgccgccacc

SEQ ID NO: 309671 - DNA, 75 bp, synthetic construct
  source 1..75: mol_type = other DNA
tgtagccgcaaaaaaggttctgctcaccggtagtgactccaacttactgatagtgttttatgttcagataatgcc

SEQ ID NO: 309672 - DNA, 75 bp, synthetic construct
  source 1..75: mol_type = other DNA
gttaccttctgcccgtaaggtgaatggtaaggcgctttcagcggatataacactgacgccgaaagatattggtac

SEQ ID NO: 309673 - DNA, 75 bp, synthetic construct
  source 1..75: mol_type = other DNA
ctagccgaagactgggacgaaatgcgtgctgctcaccgggcgcatgaaaatttgatgcgcaagcaagccagggaa

SEQ ID NO: 309674 - DNA, 75 bp, synthetic construct
  source 1..75: mol_type = other DNA
cgtaaccctgatactgaagcaatggcaaaggctcaaagcattatgaatacctgggggtatcataaatctaatgca

SEQ ID NO: 309675 - DNA, 75 bp, synthetic construct
  source 1..75: mol_type = other DNA
acgcttctcaccttacgttcggtgcgctgctgatagctatgtccagctttggacagacctattttgtgtcacttt

SEQ ID NO: 309676 - DNA, 75 bp, synthetic construct
  source 1..75: mol_type = other DNA
agatcttttaactgcgtatgcgcttaatatacttgcgccggtaggcggtttaactatatattcatacgcaagtaa

SEQ ID NO: 309677 - DNA, 75 bp, synthetic construct
  source 1..75: mol_type = other DNA
agcgacggtcacaaacgtcacggcgacgccgctgtggccattttcctgggcttccttgccagcaaggatgactgc

SEQ ID NO: 309678 - DNA, 75 bp, synthetic construct
  source 1..75: mol_type = other DNA
tttaaatcagcctttgaggatgacgagctgattctgcctaaacatgaagatgtcattagtgacctcgggcagatc

SEQ ID NO: 309679 - DNA, 75 bp, synthetic construct
  source 1..75: mol_type = other DNA
gggcagttacgggggctgtctcaggagaagttactggcaaccaagtaaaagataaactggacaaggtagggaata

SEQ ID NO: 309680 - DNA, 75 bp, synthetic construct
  source 1..75: mol_type = other DNA
cagaaagaaaagctacaaagagagcaggctccatcactaagtaaagggaatggtctgagccttacaagaacaata

SEQ ID NO: 309681 - DNA, 75 bp, synthetic construct
  source 1..75: mol_type = other DNA
gatggcgatcagattttcccgctgggatgggcaatggttttacagcgtgctggtggcgtgctggtggcactcact

SEQ ID NO: 309682 - DNA, 75 bp, synthetic construct
  source 1..75: mol_type = other DNA
cctgacgtcgaggatgtggacaacgccgatatcaaccaacgcctgctggaggtcattgaacagatcggcagttat

SEQ ID NO: 309683 - DNA, 75 bp, synthetic construct
  source 1..75: mol_type = other DNA
ttaggtattatattagctcaattatgttcactagttacttattctttattttgcaagaggttgtttaggaatgat

SEQ ID NO: 309684 - DNA, 75 bp, synthetic construct
  source 1..75: mol_type = other DNA
accattggaactattcttcaaatttcttggtatggattgttacctcgtttgagttcgagttcaagcttaaaattt

SEQ ID NO: 309685 - DNA, 75 bp, synthetic construct
  source 1..75: mol_type = other DNA
taagaaacactattcttccttgtttcactctaggaacgtcgacgatttttttctttgcgataggtttcttctttg

SEQ ID NO: 309686 - DNA, 75 bp, synthetic construct
  source 1..75: mol_type = other DNA
tgatttagaaacattgaagtacgaaaaaatggatattgcagctttacttaaagcatcgccagagttgattaaggc

SEQ ID NO: 309687 - DNA, 75 bp, synthetic construct
  source 1..75: mol_type = other DNA
ggggaacgacactgagtaaccatatcacggtcatcccggcagaccggacctggcgctcacagcccctgccgaagc

SEQ ID NO: 309688 - DNA, 75 bp, synthetic construct
  source 1..75: mol_type = other DNA
ggctgccgctattgcgaaatgcgctgcccgtacggcgcgccgcagtttgatgctaaggccaaagtgatgcgtaag

SEQ ID NO: 309689 - DNA, 75 bp, synthetic construct
  source 1..75: mol_type = other DNA
cctactacctctctattgcctgtaaccactgtgatgaaccggtatgcgtgtctggctgcccgaccggggcgatgc

SEQ ID NO: 309690 - DNA, 75 bp, synthetic construct
  source 1..75: mol_type = other DNA
gagtgatccgctggggttgcaggggggtgagcagacttaccggtatgtgcctaatccactggggtatattgatcc

SEQ ID NO: 309691 - DNA, 75 bp, synthetic construct
  source 1..75: mol_type = other DNA
aaaaatatttacctttactaatgaaagaaatgggaatagataagttaataatctattctaaaaatggtaaagtgg

SEQ ID NO: 309692 - DNA, 75 bp, synthetic construct
  source 1..75: mol_type = other DNA
ggcgattatgttgatgaatttttttcaagtagcgataaaaatcttgtaagaagtaaagataataatcttgaagca

SEQ ID NO: 309693 - DNA, 75 bp, synthetic construct
  source 1..75: mol_type = other DNA
caaagaagagacgttacgtactcttattgcaaagagagtatcgccatttctgacaatgtcagataactgtacggg

SEQ ID NO: 309694 - DNA, 75 bp, synthetic construct
  source 1..75: mol_type = other DNA
ttgaacaccatgacggttttttcagcgctgaacatgttgcttgtgttgtcaggattttcaatgaagtagatgtga

SEQ ID NO: 309695 - DNA, 75 bp, synthetic construct
  source 1..75: mol_type = other DNA
ccagcgcaatatcctgcggcaaatttttggttactgcctgatggaaaacggctcccatctggtgctggcgcttct

SEQ ID NO: 309696 - DNA, 75 bp, synthetic construct
  source 1..75: mol_type = other DNA
tctcagaatttctggctgtgaaatattcagatgtggttattaccgataaccaagctatatctgattacgtgttgg

SEQ ID NO: 309697 - DNA, 75 bp, synthetic construct
  source 1..75: mol_type = other DNA
tgttccaaacctgaagaatgaaaaagcttttattgtaaataatataaaacttatcaactatgatagacttattaa

SEQ ID NO: 309698 - DNA, 75 bp, synthetic construct
  source 1..75: mol_type = other DNA
ccgcaggtcgtcattaatcaggacgacttgattgaaatgggcagtcagggtgtgtcgatgaagttagtgcataac

SEQ ID NO: 309699 - DNA, 75 bp, synthetic construct
  source 1..75: mol_type = other DNA
gagatattctgcgacgagcatggccgggtacgggtgaagtttcactgggaccgttatcacgggatgacggaggag

SEQ ID NO: 309700 - DNA, 75 bp, synthetic construct
  source 1..75: mol_type = other DNA
tatgtgacacgacaaccaaagcgtgtctgggggttgaggcgttaatgcgttggcaacgcgaagatggtaaaatat

SEQ ID NO: 309701 - DNA, 75 bp, synthetic construct
  source 1..75: mol_type = other DNA
ccaccttatatgaggtgtatcatgaagtgattcatgctaagcaatttgcgaaaattggacgagaagcatacgaag

SEQ ID NO: 309702 - DNA, 75 bp, synthetic construct
  source 1..75: mol_type = other DNA
atgagcgcggcctgctcagcaacatcaccgaccctgccgggcagacgtggacacagcagtgtgatgaacgcggcc

SEQ ID NO: 309703 - DNA, 75 bp, synthetic construct
  source 1..75: mol_type = other DNA
ggctcccggcaaaagctggtattttgtgatcgcgtggtctgcctgccggaggcatttcctgtccccttcaatccg

SEQ ID NO: 309704 - DNA, 75 bp, synthetic construct
  source 1..75: mol_type = other DNA
gctgtcattggataaagctattcctgaccgtactaccatcatgaactttcggcacttgctggaaaaatacaaact

SEQ ID NO: 309705 - DNA, 72 bp, synthetic construct
  source 1..72: mol_type = other DNA
atggcgcatcatgaagtcatcagtcggtcaggaaatgcgtttttgctgaatatacgcgagagcgtactgttg

SEQ ID NO: 309706 - DNA, 75 bp, synthetic construct
  source 1..75: mol_type = other DNA
ggtaacgtatcaggcgtcaccagccgggaagattacggacgggaaacacaccgggagtaccggcttgaccggaac

SEQ ID NO: 309707 - DNA, 75 bp, synthetic construct
  source 1..75: mol_type = other DNA
tacaacgccgcacacggtcagttaagccgttacacggcggcagacggcgcggagtggcagtaccgctatgatgag

SEQ ID NO: 309708 - DNA, 75 bp, synthetic construct
  source 1..75: mol_type = other DNA
tgtcagttagcccgctggacgaaatgggggagtgagcaaagcaacatatctgatgttttgaactcattagggaat

SEQ ID NO: 309709 - DNA, 75 bp, synthetic construct
  source 1..75: mol_type = other DNA
atttaaaaaatggaactaatttatatgcagccagttttggtaaggctgttgaacgtagggttgcacagttagtta

SEQ ID NO: 309710 - DNA, 75 bp, synthetic construct
  source 1..75: mol_type = other DNA
aatgcttgaacattttggagccgaagcttcggtattagacatgacgattattgttcgttcaaatccgagtaaagc

SEQ ID NO: 309711 - DNA, 75 bp, synthetic construct
  source 1..75: mol_type = other DNA
gctgttcgaccgtgatgccctgagctgccgcttcttttatgacgcctttccgggaatgcgtctgcgccacccggt

SEQ ID NO: 309712 - DNA, 75 bp, synthetic construct
  source 1..75: mol_type = other DNA
ttgggatatcctgttgcgtactatatgcagggttagctgccctcaagaaacaggttaaggaattagatcgctcac

SEQ ID NO: 309713 - DNA, 75 bp, synthetic construct
  source 1..75: mol_type = other DNA
tgctgatgtggcgaaagcattggcaaaaaaaaatcacctcaaaccagaaagtcagggccactacaaaaaacgtcc

SEQ ID NO: 309714 - DNA, 75 bp, synthetic construct
  source 1..75: mol_type = other DNA
acagcgaatgcgcttgagaaaaacctgagtcggtattcagggatattagcctgtattgatgagttgggtgcttac

SEQ ID NO: 309715 - DNA, 75 bp, synthetic construct
  source 1..75: mol_type = other DNA
caatccagcaaacagtggaccgtcaagaggcaatgacggttctcagggttatattattgtgtgggagtatcagtg

SEQ ID NO: 309716 - DNA, 75 bp, synthetic construct
  source 1..75: mol_type = other DNA
caaccgagcaggaagcgcgtaaccgttgcccgtccggctgtgttgctgtattcgctgcccgtattcgtcaggggg

SEQ ID NO: 309717 - DNA, 75 bp, synthetic construct
  source 1..75: mol_type = other DNA
gcgcgtaaccgttgtccgtccggttgtgttgccgtattcgctgcccgtattcgtcagggggtaagtcatgcttaa

SEQ ID NO: 309718 - DNA, 75 bp, synthetic construct
  source 1..75: mol_type = other DNA
tcgcccctgtcgtccgtgggatcgcccgtaccgctgcgcaattaactatccggcagaatggttatattatctatc

SEQ ID NO: 309719 - DNA, 75 bp, synthetic construct
  source 1..75: mol_type = other DNA
ctttattctatcaaaaatcgctcatttttactttttttaccataatgttacttagtagcatcggcaatttacata

SEQ ID NO: 309720 - DNA, 75 bp, synthetic construct
  source 1..75: mol_type = other DNA
gaaacaattgaatatgtcggatggaaaagtctattttcttggttcttcagagttagttctggagaaaataaaatg

SEQ ID NO: 309721 - DNA, 75 bp, synthetic construct
  source 1..75: mol_type = other DNA
cattgcgcactatgtattgccgaagcaaagcttacagcaagccgtcactgttatttcggcagtttgcacacattc

SEQ ID NO: 309722 - DNA, 75 bp, synthetic construct
  source 1..75: mol_type = other DNA
gggtgactatcgcagtggtaatagccaacaatcttcaccattcttttttcagggaacggtaattagtgggttgcc

SEQ ID NO: 309723 - DNA, 75 bp, synthetic construct
  source 1..75: mol_type = other DNA
tctgccagtggtgaccttgacgtcaccattgatgagcgagatggtaatcagcagaattacactattccttattct

SEQ ID NO: 309724 - DNA, 75 bp, synthetic construct
  source 1..75: mol_type = other DNA
tgaagaggctttatggcccactattgaagcttcataagcccatagaagaacaaaattatactgttgagctgaaac

SEQ ID NO: 309725 - DNA, 75 bp, synthetic construct
  source 1..75: mol_type = other DNA
atttaatagtgctgtcgatggatcgtggatttattctaaagttatcgtttccggtagttcaaaccatgcaaatac

SEQ ID NO: 309726 - DNA, 75 bp, synthetic construct
  source 1..75: mol_type = other DNA
acaaagcggggcgttacgccaacagacgccggaaaaattctctatacccatgcgcgggccattttacgtcagtgt

SEQ ID NO: 309727 - DNA, 75 bp, synthetic construct
  source 1..75: mol_type = other DNA
atttgcgcccggaccaggccgcagggataaaactctgcggcctttttcgtaagaaaaatgcaacggttgcaagcg

SEQ ID NO: 309728 - DNA, 75 bp, synthetic construct
  source 1..75: mol_type = other DNA
ccatcctcatatgctcaggcacggctgtggttatgctctggcggataactgcattgacacgcgactgattcagga

SEQ ID NO: 309729 - DNA, 75 bp, synthetic construct
  source 1..75: mol_type = other DNA
aagtaaccttaccttcagcattatttttttcatctatatctgagagtagtgtttctaagacgaattctcctctgt

SEQ ID NO: 309730 - DNA, 75 bp, synthetic construct
  source 1..75: mol_type = other DNA
ttacagccggacagggagcgctttattccggtgatggagagctactggaaaaccctccccgccagtgtatctcta

SEQ ID NO: 309731 - DNA, 75 bp, synthetic construct
  source 1..75: mol_type = other DNA
gtattgccggactggagcctacgcaggtggttggtctactggcagtagcatggatgattctggtcaccgtcgttg

SEQ ID NO: 309732 - DNA, 75 bp, synthetic construct
  source 1..75: mol_type = other DNA
caaactgcgtagtgcactggcaaccgattatgttgtgcaacaggacgcattacagaaagagggtgatgcggtttc

SEQ ID NO: 309733 - DNA, 75 bp, synthetic construct
  source 1..75: mol_type = other DNA
ctggtgatttacgacgcgtatcgcccacaacaagcacaggcgatgttgtggcaagcctgcccagacccgcaataa

SEQ ID NO: 309734 - DNA, 75 bp, synthetic construct
  source 1..75: mol_type = other DNA
tggatggctgacagcagcgcagagcagatcgcaatgctgaatcagaagctggcagattttgccccattgatgccc

SEQ ID NO: 309735 - DNA, 75 bp, synthetic construct
  source 1..75: mol_type = other DNA
ggtgaaaagttacaggccgcgtggcagtggtttaaaaacctgattgccccggtcaaagccacccaggacaccctg

SEQ ID NO: 309736 - DNA, 75 bp, synthetic construct
  source 1..75: mol_type = other DNA
gcggcgaggtgacgccgaacgtcagaaacaataccgtgacggtgaatgactggcctgataactacgtgatcccgt

SEQ ID NO: 309737 - DNA, 75 bp, synthetic construct
  source 1..75: mol_type = other DNA
cgacgtggaaattctggaacattaccgaaagaagtgtcgttggcccattaaaaaccttccctggggcacatcctc

SEQ ID NO: 309738 - DNA, 75 bp, synthetic construct
  source 1..75: mol_type = other DNA
tgatattggcaaatatgttgttatggcaatggcaagttcgcttattatgccagcggctttacttttagtacgaaa

SEQ ID NO: 309739 - DNA, 75 bp, synthetic construct
  source 1..75: mol_type = other DNA
gaattatgcctatcttctaagttatagtttatatggtgtagtaattataacaaatgtccgaagatttctaaaata

SEQ ID NO: 309740 - DNA, 75 bp, synthetic construct
  source 1..75: mol_type = other DNA
gcaatcgacttgtcctcgggttagagaatattcctctggatatccgacaaaataacagtagtggcgacgatgata

SEQ ID NO: 309741 - DNA, 75 bp, synthetic construct
  source 1..75: mol_type = other DNA
gactgattcgagactaccaccctcgactccgtatgattattagttacacccctacatctattaaagcaaacaacc

SEQ ID NO: 309742 - DNA, 75 bp, synthetic construct
  source 1..75: mol_type = other DNA
ggtggttattacgtttcggaaggaagatctctcagtaacggcaaagttgtaaagcaagcacactttgcatttcga

SEQ ID NO: 309743 - DNA, 75 bp, synthetic construct
  source 1..75: mol_type = other DNA
cccaaacgaaacattaaaaacagcagttaagcaagaatggtttgaacgaaacaaagtagaattaggctattggta

SEQ ID NO: 309744 - DNA, 75 bp, synthetic construct
  source 1..75: mol_type = other DNA
agcaatccccgttagcgcgtaaggcatgcgacatagcactggccactcatgcagaacgttacggcgactatggcc

SEQ ID NO: 309745 - DNA, 75 bp, synthetic construct
  source 1..75: mol_type = other DNA
tgggtagaagtagtgaaccgcaaggccagctacgtggccacggcgatgacaggtatgcgccggctgcgcgcactg

SEQ ID NO: 309746 - DNA, 75 bp, synthetic construct
  source 1..75: mol_type = other DNA
caattatcatgagattaaaaaaataagggatgataattttaaattccttcaccatgccctcgaaaagataaatgg

SEQ ID NO: 309747 - DNA, 75 bp, synthetic construct
  source 1..75: mol_type = other DNA
gtgtgtctaccagcgaacagtcaacagaaaaccagattatggcgattcgtcaggctggttatgaagtgcctgaga

SEQ ID NO: 309748 - DNA, 75 bp, synthetic construct
  source 1..75: mol_type = other DNA
tatatgatgaggtaattattattaataaaatcccccccaaaaaaattgatactaaaggagttgctactgaagaag

SEQ ID NO: 309749 - DNA, 75 bp, synthetic construct
  source 1..75: mol_type = other DNA
ccgtgcattctggagccagaatcgggcgcgtaaccaacccgacggtaatttgcaggtgccacgcgtagagctggc

SEQ ID NO: 309750 - DNA, 75 bp, synthetic construct
  source 1..75: mol_type = other DNA
gttttttctgtgcttctccaagcggtacgcttttactgggcaggctttttttgcaggaaatcgatctgtttttct

SEQ ID NO: 309751 - DNA, 75 bp, synthetic construct
  source 1..75: mol_type = other DNA
tccgaaaccggatccaaaaccagacccaaaaccggatccgaaaccagacccgactcccgctccaacgccgacacc

SEQ ID NO: 309752 - DNA, 75 bp, synthetic construct
  source 1..75: mol_type = other DNA
taatgatggggctggttattcgcgttctgtggcgtgtcatatctccaccgcgggtccgctgccgagttattcgcc

SEQ ID NO: 309753 - DNA, 75 bp, synthetic construct
  source 1..75: mol_type = other DNA
gctatggtgttatatctgcggccttccattggctaagcgcaattattgtctacggcatgtttgctttaggtctgt

SEQ ID NO: 309754 - DNA, 75 bp, synthetic construct
  source 1..75: mol_type = other DNA
atgtcaaaaaattttgttcaggacggaaaaaacgtcgactgggtgaacgggaccgggaaggcggtgtcatctggc

SEQ ID NO: 309755 - DNA, 75 bp, synthetic construct
  source 1..75: mol_type = other DNA
atgaagaagagcatactgactgtattaaccggagtggtactgatggtcagcggtggtcacgctcaggcagaagag

SEQ ID NO: 309756 - DNA, 75 bp, synthetic construct
  source 1..75: mol_type = other DNA
cagcccgccccgccagggggacgcccggaaaaggcataagcaggagaacaacaaaacagacaataatcagggcag

SEQ ID NO: 309757 - DNA, 75 bp, synthetic construct
  source 1..75: mol_type = other DNA
tctgggtgatctgccgcaggaaaagaattgctttatcatcaatcgggttgaagtggaagataactttctgggggg

SEQ ID NO: 309758 - DNA, 75 bp, synthetic construct
  source 1..75: mol_type = other DNA
taccttgttgtacgcgattatcgccgccggcgtctccgtacttgccagtattatcctggattccctgggatttga

SEQ ID NO: 309759 - DNA, 75 bp, synthetic construct
  source 1..75: mol_type = other DNA
gatttttcgtggtttaagaaaaagcagaaccacaaaatagaattatttcttacacaacctctggtggcaggattt

SEQ ID NO: 309760 - DNA, 75 bp, synthetic construct
  source 1..75: mol_type = other DNA
agaccctcgatattcctatattttacctaaaacaggaagtgaccacagaggttctttaaatgctatctcggatat

SEQ ID NO: 309761 - DNA, 75 bp, synthetic construct
  source 1..75: mol_type = other DNA
aagcattgtgcttaatgcaggtgaagagactgacttttttgatggagaaatcaaaaatataattattgacgcact

SEQ ID NO: 309762 - DNA, 75 bp, synthetic construct
  source 1..75: mol_type = other DNA
gggctcgctttccgtctttgagagtaaaacactggctcatctgcaaaccctcccgctgcttccacacccaaacag

SEQ ID NO: 309763 - DNA, 75 bp, synthetic construct
  source 1..75: mol_type = other DNA
accaacagttcaatattactgctctcatagagttgatatcattatcgatttcaatcattgttgtttttatagtaa

SEQ ID NO: 309764 - DNA, 75 bp, synthetic construct
  source 1..75: mol_type = other DNA
aggtgctaactcttcttttggtggaatcattaaaagattaaaaatgattagatcaaaatggtatagaaaacaagt

SEQ ID NO: 309765 - DNA, 75 bp, synthetic construct
  source 1..75: mol_type = other DNA
cagtcacctggctgaagggcgggcgcgtatatccgcagctcgactgtttcggcattgtaaatgagatacgtcgcg

SEQ ID NO: 309766 - DNA, 75 bp, synthetic construct
  source 1..75: mol_type = other DNA
atcctgaacgttttctttctgcgactgcccgtgaatttaatattgtacctggagaacatgcaatcagtaaggcaa

SEQ ID NO: 309767 - DNA, 75 bp, synthetic construct
  source 1..75: mol_type = other DNA
agcgccaaagtgggtgccgttatatgctgctccaccagcatccggcaatcaggttagcgaattaacaatgtgggt

SEQ ID NO: 309768 - DNA, 75 bp, synthetic construct
  source 1..75: mol_type = other DNA
tttccgcacatacacaaatttcaacgctgcatggtgtggagcagcatgatggatttttgaacaagactcttgccg

SEQ ID NO: 309769 - DNA, 75 bp, synthetic construct
  source 1..75: mol_type = other DNA
gttccggtattacgaaccggagagcgggatgtacctggtgagtgatccactggggttgcaggggggtgagcagac

SEQ ID NO: 309770 - DNA, 75 bp, synthetic construct
  source 1..75: mol_type = other DNA
cagttattcatcatcgacagcctgatgaaatgtggcataggcgacgatgactataacgggcagaaggcgtttgtt

SEQ ID NO: 309771 - DNA, 75 bp, synthetic construct
  source 1..75: mol_type = other DNA
ttggtggcgggacgaaattttagcaaatagtgcgatcgccggtgtttatgcaaaatctgatgacggaaaatcagc

SEQ ID NO: 309772 - DNA, 75 bp, synthetic construct
  source 1..75: mol_type = other DNA
gatgaatagctccagtgatctcatggggttgagaaggcagccccagaacttctggcggctatatcgcggaaaaga

SEQ ID NO: 309773 - DNA, 75 bp, synthetic construct
  source 1..75: mol_type = other DNA
gatgctttccatgtattacacaatggtaaatatgttcagataaatcatcgaacacttgctaatctaataaaaaaa

SEQ ID NO: 309774 - DNA, 75 bp, synthetic construct
  source 1..75: mol_type = other DNA
gtaaaggtgcggttgcagctggtgtagatgtcgcactggtgggcaagggagatcctttacttaaggcgttacctt

SEQ ID NO: 309775 - DNA, 75 bp, synthetic construct
  source 1..75: mol_type = other DNA
tatttagttcatctttcatagaaaaacgtgaactaccgttagtaaaaccgaccccagcacagattaacaataacg

SEQ ID NO: 309776 - DNA, 75 bp, synthetic construct
  source 1..75: mol_type = other DNA
tgaaaacagtgaggtcgataagttactgcgcaatgcgcttgcgaccaccgaccagacgcagaatccggctcaggt

SEQ ID NO: 309777 - DNA, 75 bp, synthetic construct
  source 1..75: mol_type = other DNA
actctcttttgagcggttactaaaaatcggccaggggccagcagaagcatttcccaaagatttaaagattgatgc

SEQ ID NO: 309778 - DNA, 75 bp, synthetic construct
  source 1..75: mol_type = other DNA
acacaatccagcctcaacaagctgggcatcaatgtgaagctggaaaagctggcgaacgccaccatgcgcgacaga

SEQ ID NO: 309779 - DNA, 75 bp, synthetic construct
  source 1..75: mol_type = other DNA
gcatcagagtctgttaaagagaattgctctacgtttaccgttatttgtgcgcacacctttaagcgcgctttattt

SEQ ID NO: 309780 - DNA, 75 bp, synthetic construct
  source 1..75: mol_type = other DNA
gcgaaaagtatcagcatcgcccagctgtcagggttacggcagcgagttaccctctgctcgctgatcaattctctt

SEQ ID NO: 309781 - DNA, 75 bp, synthetic construct
  source 1..75: mol_type = other DNA
atgctgaaaagctggcaaaaaggtcagcaattagttctggtgccaaatccgcattaccctggcaataaaccgaac

SEQ ID NO: 309782 - DNA, 75 bp, synthetic construct
  source 1..75: mol_type = other DNA
cggaatttgaacaacagcaacataatcaagcggccgcgaaaaaacgcatcccggttatcgaagctctgttacgac

SEQ ID NO: 309783 - DNA, 75 bp, synthetic construct
  source 1..75: mol_type = other DNA
gtcatacttcttctgtaaaccctgataatctgctagaatctgataatagaaatggtcaaattggtttaaaaaatc

SEQ ID NO: 309784 - DNA, 75 bp, synthetic construct
  source 1..75: mol_type = other DNA
cgaggaataaaaaatatcggtatatcaacgccattacatgaagcattatttcagaagttaaataatgatgcagag

SEQ ID NO: 309785 - DNA, 75 bp, synthetic construct
  source 1..75: mol_type = other DNA
atttatgctgaaaagctggcaaaaaggtcagcaattagttctggtgccaaatccgcattaccccggcaataaacc

SEQ ID NO: 309786 - DNA, 75 bp, synthetic construct
  source 1..75: mol_type = other DNA
attaggggattcatcagtaccacgcttttttaccacctcggtttgtttatgcattttgaccgcctggagctgctg

SEQ ID NO: 309787 - DNA, 75 bp, synthetic construct
  source 1..75: mol_type = other DNA
gtagaggagaatactgccgcgcagattgtgctggatctgtttgaaggtctggtatggatggacggtgaaggctag

SEQ ID NO: 309788 - DNA, 75 bp, synthetic construct
  source 1..75: mol_type = other DNA
aactaaccagtgagattaaacttgatggtaatacaccagaggctaatagtatgcctattcataaatgctttcttg

SEQ ID NO: 309789 - DNA, 75 bp, synthetic construct
  source 1..75: mol_type = other DNA
ttatccaaaacatggggaaaacgatataaataaatggtttgttgtaaagtttatcccatctgtaacttcaaaaaa

SEQ ID NO: 309790 - DNA, 75 bp, synthetic construct
  source 1..75: mol_type = other DNA
agcgccaaagtgggtgccgttatatgcagctccaccagcacctggcaaccaggttggcgaattaacaatgtgggt

SEQ ID NO: 309791 - DNA, 75 bp, synthetic construct
  source 1..75: mol_type = other DNA
tgagaggagaaaaagtttccgaatatcgtttcgataataaacaaccgcttccaggaaactacgaacttgattttt

SEQ ID NO: 309792 - DNA, 75 bp, synthetic construct
  source 1..75: mol_type = other DNA
cttatgaaacattatggggtagatgtttttgaatcctgtctggcggatgggaatggaatatttctaaagcttata

SEQ ID NO: 309793 - DNA, 75 bp, synthetic construct
  source 1..75: mol_type = other DNA
tttgtggatatccctgaagcgttgacgcagggcgaaactgtcgctgaagcgatggaagcggcaaaagatgcttta

SEQ ID NO: 309794 - DNA, 75 bp, synthetic construct
  source 1..75: mol_type = other DNA
gcatctgtatcagatagttctaacaccgcagacatttttccaggaactccttttcctttgttgttcgaaattgaa

SEQ ID NO: 309795 - DNA, 75 bp, synthetic construct
  source 1..75: mol_type = other DNA
ccaaattagctattcagctttctatggttctggtcttgaaaacgtaggaatcccccttaatcagcctgctcgttc

SEQ ID NO: 309796 - DNA, 75 bp, synthetic construct
  source 1..75: mol_type = other DNA
cacctattcagctttctatgctgcaggtattctggataatgcagtgatctctatcacacttgatcgccctgctac

SEQ ID NO: 309797 - DNA, 75 bp, synthetic construct
  source 1..75: mol_type = other DNA
gggggtaggtaaatcgaatgataagattagccaggaatcttggcatatagctaatcgtctcggtgcggagtatac

SEQ ID NO: 309798 - DNA, 75 bp, synthetic construct
  source 1..75: mol_type = other DNA
ttcatcaacggcgatacctgggaaattacagttaatggaactaacagggctaataattatacaggaaggatttcc

SEQ ID NO: 309799 - DNA, 75 bp, synthetic construct
  source 1..75: mol_type = other DNA
gggacaagaaggtatcagcccacagataagctacggtaatgctattgatttaaatcagggtaaacaaagtgtttt

SEQ ID NO: 309800 - DNA, 75 bp, synthetic construct
  source 1..75: mol_type = other DNA
acgggtgatgcggtaactaaccttgatgcgcagattcagaaagggcaaacctctgtcactgtcggcgtaagcaag

SEQ ID NO: 309801 - DNA, 75 bp, synthetic construct
  source 1..75: mol_type = other DNA
tttttgaatcctgtctggcggatgggaatggaatatttctaaagcttatatctgtatcagatggaagtgatatac

SEQ ID NO: 309802 - DNA, 75 bp, synthetic construct
  source 1..75: mol_type = other DNA
tttgggtattcagcaaacagggtcaggagtatttcctttctgaacacccaaattttgccgccaaagagttaacag

SEQ ID NO: 309803 - DNA, 75 bp, synthetic construct
  source 1..75: mol_type = other DNA
tgctgcgagtcttttcgaatgataagattcaggctgccaatattattaacaccatgacgccgggcgatgtttatc

SEQ ID NO: 309804 - DNA, 75 bp, synthetic construct
  source 1..75: mol_type = other DNA
tgataagttcatctattataatgacgatacatttttgattaatccagtagatgaaagtttttacttcaaaaatgg

SEQ ID NO: 309805 - DNA, 75 bp, synthetic construct
  source 1..75: mol_type = other DNA
gccgcgctttcgtagctgaaagacatatcaatcacgcttatagccaggacgttgaagaattgcgccgtcagatcc

SEQ ID NO: 309806 - DNA, 75 bp, synthetic construct
  source 1..75: mol_type = other DNA
gaatttaatccgacacaggaagatcgggaccgtgccgaaatgatgtgccgggaacaggaaaaaagaattatggat

SEQ ID NO: 309807 - DNA, 75 bp, synthetic construct
  source 1..75: mol_type = other DNA
gactttaaccctacgcaggaagatcgggaccgtgccgaaatgatgtgcgaggaaaggtggaaaagagttattgat

SEQ ID NO: 309808 - DNA, 75 bp, synthetic construct
  source 1..75: mol_type = other DNA
taagggaattctcccgctcgaccgctggatgattgccccggtactgccccgccgcattaaagatatggggccgga

SEQ ID NO: 309809 - DNA, 75 bp, synthetic construct
  source 1..75: mol_type = other DNA
tggttatgagaattttattgcccgcgtagggatgcagacacctaaccagcactcagcatccacctaccgggctaa

SEQ ID NO: 309810 - DNA, 75 bp, synthetic construct
  source 1..75: mol_type = other DNA
acgtgaggggctttctcccataagcgctaacttaagggttgaaccatctgaagaatgcgacgcctcggtgcctcg

SEQ ID NO: 309811 - DNA, 75 bp, synthetic construct
  source 1..75: mol_type = other DNA
tggctatgagaactttattgcccgcgtagggatgcagacgcctaaccagcactcagcatcgacctaccgggctaa

SEQ ID NO: 309812 - DNA, 75 bp, synthetic construct
  source 1..75: mol_type = other DNA
ccgctctggcaaatgtctgatgtcgatcgctcaacggtggcgttaaacaccaccaacgcaatcagtacggcgctg

SEQ ID NO: 309813 - DNA, 75 bp, synthetic construct
  source 1..75: mol_type = other DNA
cagcctggcgcatccatcacagccgcctgattcgcttcgacggggtgacgctgccattccagcagaagatgaccg

SEQ ID NO: 309814 - DNA, 75 bp, synthetic construct
  source 1..75: mol_type = other DNA
ttacggatcggtaatcaatgaaacaggagcaaccattaatttgcatggtgcaggaacctatggtgtttccgcttc

SEQ ID NO: 309815 - DNA, 75 bp, synthetic construct
  source 1..75: mol_type = other DNA
tcaaaactctgtcggggcgaaaattgtcggcgatcgcgtttcgttgcaacagaaaggtgatattaccgttaacgg

SEQ ID NO: 309816 - DNA, 75 bp, synthetic construct
  source 1..75: mol_type = other DNA
agacaaaggcacgctgcaaattcgcaatgccacctttacctacagcaaaaacagtgatggaagttacaccctgac

SEQ ID NO: 309817 - DNA, 75 bp, synthetic construct
  source 1..75: mol_type = other DNA
gtgttattgacgccatgcgcgagctaaaaaaaaatgggctttgcgctggtggtagtaaccaaccagtctggcatt

SEQ ID NO: 309818 - DNA, 75 bp, synthetic construct
  source 1..75: mol_type = other DNA
tgatgaagtgctggcccgaatggttggtcgttctccggctgaaaacagcacggaaaatgagcctcaacccgtaga

SEQ ID NO: 309819 - DNA, 75 bp, synthetic construct
  source 1..75: mol_type = other DNA
accggcaccgtgaaaaaagttgtgcagaaatcaggcgtattcaataacagtggtgaagtgaccgaacgtattatt

SEQ ID NO: 309820 - DNA, 75 bp, synthetic construct
  source 1..75: mol_type = other DNA
cgtccactggcaattctggacttaggtgcaggctctaccgatgcctccatcatcaatcagagtggggaaatcgtt

SEQ ID NO: 309821 - DNA, 75 bp, synthetic construct
  source 1..75: mol_type = other DNA
atgacattgtctgtttttataacggtaatctcaggccatgacaagccgcagtcgccaggctgcctactcgagcga

SEQ ID NO: 309822 - DNA, 75 bp, synthetic construct
  source 1..75: mol_type = other DNA
tgccctgcagatggcgctgtggcggcgtaagagaccccggaacgttatcgttcatacggaccgcggaagccagta

SEQ ID NO: 309823 - DNA, 75 bp, synthetic construct
  source 1..75: mol_type = other DNA
gctgccttctttaccgtgaatacggaacctcaatcttatcatttcggtggtgtagcagatttacgcatggtaagt

SEQ ID NO: 309824 - DNA, 75 bp, synthetic construct
  source 1..75: mol_type = other DNA
tctttacatcaatgtacaatgcctctgccaaggccgaggctagcatgagcatcctatttgaagagcttgtccaat

SEQ ID NO: 309825 - DNA, 75 bp, synthetic construct
  source 1..75: mol_type = other DNA
catagcgacaaaatcatcctgtcagtctaccaagtcaacagagaaaaccataacatttaacattctcgatatgtt

SEQ ID NO: 309826 - DNA, 75 bp, synthetic construct
  source 1..75: mol_type = other DNA
atggagatatgagttagtggagcaagggcttttacctgaaaatgaaaagattacctccgttgatgttgaagactg

SEQ ID NO: 309827 - DNA, 75 bp, synthetic construct
  source 1..75: mol_type = other DNA
ttgattctgaactggcaaaagacctttcgcgctttgcttcattgcctatttatacatcgaaccgtcgtcagcttt

SEQ ID NO: 309828 - DNA, 75 bp, synthetic construct
  source 1..75: mol_type = other DNA
aaaagccaaggcagaagctgagaagaaagcggcagcagagaaagcggcagccgacaaaaaagcagcagaaaaagc

SEQ ID NO: 309829 - DNA, 75 bp, synthetic construct
  source 1..75: mol_type = other DNA
ggaaatttcctaggtttatagattttgtttcatcattcgttctaaaaaaaaacaatgtaatatatgataaaaaaa

SEQ ID NO: 309830 - DNA, 75 bp, synthetic construct
  source 1..75: mol_type = other DNA
ctggtggaaattggtatcgctaccgacgccatcttcgccgtcattgtgatggtgttactggcaagaaaaatatgg

SEQ ID NO: 309831 - DNA, 75 bp, synthetic construct
  source 1..75: mol_type = other DNA
ttttctatcgtctcctgaattatcacgtaaaaatcagaccttataatatcattattagtacacggttatttactt

SEQ ID NO: 309832 - DNA, 75 bp, synthetic construct
  source 1..75: mol_type = other DNA
tgatgttacgcaactctggagacaattaggtaaagcgatacttcaacacgatcttgcctggaaaccaggacataa

SEQ ID NO: 309833 - DNA, 75 bp, synthetic construct
  source 1..75: mol_type = other DNA
ggctgctggtcgtgaagatgaatggcttcctattcgcccgggcaccgatgccgcgctggttgcgggtattgcctg

SEQ ID NO: 309834 - DNA, 75 bp, synthetic construct
  source 1..75: mol_type = other DNA
cggcgcaacaattaatattcatggtcctggggtctatggtgttgccgcttctcgtggtactgcgactaacgcagg

SEQ ID NO: 309835 - DNA, 75 bp, synthetic construct
  source 1..75: mol_type = other DNA
ccaatggcggtaccggtagtctgattaatggcgatgacgccaaagtcgataataaaggtacaatgaacgttgatg

SEQ ID NO: 309836 - DNA, 75 bp, synthetic construct
  source 1..75: mol_type = other DNA
tattattctaataccatagtgatgttattttttggtaataaatataatgcggcatctcaggttttaaatgttttt

SEQ ID NO: 309837 - DNA, 75 bp, synthetic construct
  source 1..75: mol_type = other DNA
ggatgccaaatacacgaaggaattgtccgatgcgaaaaaaaccattaacgatttgcgtcgggatgtcgattctgg

SEQ ID NO: 309838 - DNA, 75 bp, synthetic construct
  source 1..75: mol_type = other DNA
gctgccgtggagtgcatttgctccggaacagtgtgagcaagattacatggttagaaatttagatgcctgcgattc

SEQ ID NO: 309839 - DNA, 75 bp, synthetic construct
  source 1..75: mol_type = other DNA
atgtgggggaataagccgccccctatcgtgctatcgtgcctgcgtaagctggataagacgcgccagcgtcgcatc

SEQ ID NO: 309840 - DNA, 75 bp, synthetic construct
  source 1..75: mol_type = other DNA
aggtataaattatgaacatttaacgtttcttgcaacctatgtaattccattaataacatttgatttcgaaaaaac

SEQ ID NO: 309841 - DNA, 75 bp, synthetic construct
  source 1..75: mol_type = other DNA
aattcattatcccaatatcaacctgaatggcagtgctggcaacctgatactgaatgggttcgacagccaccagaa

SEQ ID NO: 309842 - DNA, 75 bp, synthetic construct
  source 1..75: mol_type = other DNA
tgaatgggttcgtcagccgccagaagatgcgataaccgatccggcatttttctcgttttatcaatcaggcatgac

SEQ ID NO: 309843 - DNA, 75 bp, synthetic construct
  source 1..75: mol_type = other DNA
tctctagttctatttatattagaacttcagatgaacatcctattattgatattgaaagtggagagaggataaatc

SEQ ID NO: 309844 - DNA, 75 bp, synthetic construct
  source 1..75: mol_type = other DNA
agcgggaaagattacagcgtcacatcgttgaccttgtacgtaaaaacgggcgtatgacaatgccacaactggcat

SEQ ID NO: 309845 - DNA, 75 bp, synthetic construct
  source 1..75: mol_type = other DNA
ccagtagcgtggaaattgtgttgtccgtgccgtatgtcactgcgtccggccagaaaatcacgcacgtcaccatgc

SEQ ID NO: 309846 - DNA, 75 bp, synthetic construct
  source 1..75: mol_type = other DNA
aggtaaagtctggctgtcaccggtggtggactgcttcgatggaaaagttgtgagctggtctctcagtacacgccc

SEQ ID NO: 309847 - DNA, 75 bp, synthetic construct
  source 1..75: mol_type = other DNA
acgccacgatacgtacgatgctgacagatatatttaacagtaattaccagtgttatggctatcgtcacctgcatg

SEQ ID NO: 309848 - DNA, 75 bp, synthetic construct
  source 1..75: mol_type = other DNA
ccgaatgggctggtgtaagtaactatgataagattaaatcaagtgataaacgcaaagatgctttccgtaaagaat

SEQ ID NO: 309849 - DNA, 75 bp, synthetic construct
  source 1..75: mol_type = other DNA
tcgtcacatatcgaaagctacgtgatggcgcgacgggaaacaggcattacgccacgcacgctacaaaacgagatg

SEQ ID NO: 309850 - DNA, 75 bp, synthetic construct
  source 1..75: mol_type = other DNA
gcaccaatcaacgccaggactgggccagtcttgagatcagactcattcccggaactgacttcaggcgacatatat

SEQ ID NO: 309851 - DNA, 75 bp, synthetic construct
  source 1..75: mol_type = other DNA
acctgcttatccctgttcgtgctgcagaagcaaaacaaatttatgaaatcgccagtcgtctgcagcaaagaatat

SEQ ID NO: 309852 - DNA, 75 bp, synthetic construct
  source 1..75: mol_type = other DNA
aagcgttatctctatgctaatatggaagttaacggacaacgattttcttatggaattaccggtgggaatgttttt

SEQ ID NO: 309853 - DNA, 75 bp, synthetic construct
  source 1..75: mol_type = other DNA
ggaattttttaccttttaggcccggtttagtaggtggccactgtataggtgtagatccttattatcttacacata

SEQ ID NO: 309854 - DNA, 75 bp, synthetic construct
  source 1..75: mol_type = other DNA
aagatcctaaagttaatcattatgatgcaataattatcgctgttgcacacaatgagtttcgcgagatgggagaga

SEQ ID NO: 309855 - DNA, 75 bp, synthetic construct
  source 1..75: mol_type = other DNA
aaagtccgcgatacttatgaaaaaattattacagctggtgtttactgtgctaactctattaaagttgctgaagct

SEQ ID NO: 309856 - DNA, 75 bp, synthetic construct
  source 1..75: mol_type = other DNA
taataattgagttgttcttctatgcttcctgtgcgtttcttttcaaagtaaatttattaaagagtaaggtttctt

SEQ ID NO: 309857 - DNA, 75 bp, synthetic construct
  source 1..75: mol_type = other DNA
gaccagggtctggtagatattcatgaccgccgcccgctggttctgtcgccagaagctgcgcgggaatggatgcgg

SEQ ID NO: 309858 - DNA, 75 bp, synthetic construct
  source 1..75: mol_type = other DNA
ttggtctggcgcagtgggcgttggtcagcggaggtgcggggaaggtggccataagcgctaacttaagggttgtgg

SEQ ID NO: 309859 - DNA, 75 bp, synthetic construct
  source 1..75: mol_type = other DNA
acccgcgaagccacgggttacacaccttaccaccccgattatggatacagtggtcacagtcgaggtgtatgggtg

SEQ ID NO: 309860 - DNA, 75 bp, synthetic construct
  source 1..75: mol_type = other DNA
tacagcagtgaatctcattgcagcaatggcaccgcttcgtgatgaatacggctatcgtgattcatgcgatgaccc

SEQ ID NO: 309861 - DNA, 75 bp, synthetic construct
  source 1..75: mol_type = other DNA
ttacttttaaaaaaagtaacgtcaaacgtaatgcaaatcgagatgtaggtacgtggattaatgctcttttgaaga

SEQ ID NO: 309862 - DNA, 75 bp, synthetic construct
  source 1..75: mol_type = other DNA
ggctcaaatggaaagaagatttcaatgttggttatagtcctgagagaattaatccgggcgataaagaaaggacag

SEQ ID NO: 309863 - DNA, 75 bp, synthetic construct
  source 1..75: mol_type = other DNA
attgataaaatcttctgaaacagttggtaagaatttaaaaaggggagcgattgttgtatatgagtcaacagtata

SEQ ID NO: 309864 - DNA, 75 bp, synthetic construct
  source 1..75: mol_type = other DNA
tctgtaacgccgcttacctcgcttcacaagcgcgccagctggctgacagctacagcaagaatgttatcacccgcg

SEQ ID NO: 309865 - DNA, 75 bp, synthetic construct
  source 1..75: mol_type = other DNA
gcgaaaaaaccgtaccagattcgcctgctaaccggcgcgtcaattagcgccgccgccgatgacgtgctctctgaa

SEQ ID NO: 309866 - DNA, 75 bp, synthetic construct
  source 1..75: mol_type = other DNA
atagtaataacttagggaaaggatttcaaatactggaaataaaagcgggagttaaatttttattaatgactaata

SEQ ID NO: 309867 - DNA, 75 bp, synthetic construct
  source 1..75: mol_type = other DNA
ttcggtgagtttagcatggtagatgttattagtggaaaagtagtcaaagatgtaacattaggttttcaaaattgt

SEQ ID NO: 309868 - DNA, 75 bp, synthetic construct
  source 1..75: mol_type = other DNA
tcgaacgtaacgcttatctgtcgatctttatggcgccatctattgctaaagagggtaagatctcaaccgttgtgc

SEQ ID NO: 309869 - DNA, 75 bp, synthetic construct
  source 1..75: mol_type = other DNA
atgtattcggaagtgctacaggaatcggtggtgcatttactggaaaccggcaaatcagcggggccagcgcctcca

SEQ ID NO: 309870 - DNA, 75 bp, synthetic construct
  source 1..75: mol_type = other DNA
gtgactcccggcgcccctccacgccgcaatagcgttccgatctttcatgcgatggatcgcgttggtactcgctat

SEQ ID NO: 309871 - DNA, 75 bp, synthetic construct
  source 1..75: mol_type = other DNA
tgaccgtcacggcaggctgacggagaaaaccgacctcatcccggaagggggtatccgcacggatgatgagcgcac

SEQ ID NO: 309872 - DNA, 75 bp, synthetic construct
  source 1..75: mol_type = other DNA
aggtgttccggcagcgaaagccccgccaaaaggcattgttgctgaaaaaggtgattcacgtccggctggttttac

SEQ ID NO: 309873 - DNA, 75 bp, synthetic construct
  source 1..75: mol_type = other DNA
ccaccgcaggattacgccttcctgcaagagcgcggcgtggcgcgatttatggtccaggtacacctatgctcgaca

SEQ ID NO: 309874 - DNA, 75 bp, synthetic construct
  source 1..75: mol_type = other DNA
acaatccgtaatatggggtgttgtattgtcactggagaaggtgcagggactgccgctgctattgccattaaaaat

SEQ ID NO: 309875 - DNA, 75 bp, synthetic construct
  source 1..75: mol_type = other DNA
tgtgccgttctctcgcatcatttacccaacttatgcaggatgttattggtcaagccgttgaatacgcctggcagc

SEQ ID NO: 309876 - DNA, 75 bp, synthetic construct
  source 1..75: mol_type = other DNA
tttttttcttttgttaccgtttaaaaaagaaacatgggatgcattaaacgcttcatttgatgattttcctttcga

SEQ ID NO: 309877 - DNA, 75 bp, synthetic construct
  source 1..75: mol_type = other DNA
gtaacttgcttggtaaactattacgtaccgaggtttcgattattcgtagttaccgtgcattcctaatgttattgc

SEQ ID NO: 309878 - DNA, 75 bp, synthetic construct
  source 1..75: mol_type = other DNA
atcaaggaaggtgtgcttctccagcgaagtgatggcgtggtttaccgtatcaccacctccctgaccggtaaggcc

SEQ ID NO: 309879 - DNA, 75 bp, synthetic construct
  source 1..75: mol_type = other DNA
ccctgaatgccattgcttacgctcaggcagggttatctgctcaggagcatgagcatctggcctggattgcgcgtc

SEQ ID NO: 309880 - DNA, 75 bp, synthetic construct
  source 1..75: mol_type = other DNA
aggtgctgaaactcctcttgttcttactgatatgactggaggagtgactatttattatgatcctgaaacaggtga

SEQ ID NO: 309881 - DNA, 75 bp, synthetic construct
  source 1..75: mol_type = other DNA
aagcgcagcaccagactgcggcaatgtatgctcaggggacgggcactaaaattgataataaacaagcatggatgt

SEQ ID NO: 309882 - DNA, 75 bp, synthetic construct
  source 1..75: mol_type = other DNA
accggagcaatatttttccacaaccggcagacgtggaacgcgtggcagattatatcgccggtcatactgacccga

SEQ ID NO: 309883 - DNA, 75 bp, synthetic construct
  source 1..75: mol_type = other DNA
cgaccggccagcctgtcggacagcctctggggccgacggtgaccgtgtttaaactgaccaataagccggtgccct

SEQ ID NO: 309884 - DNA, 75 bp, synthetic construct
  source 1..75: mol_type = other DNA
atgcaactttacctgtgcgaaaaaccctctcaggcgcgcgatattgcccgcgtacttgacgcccgtaaccgcagc

SEQ ID NO: 309885 - DNA, 75 bp, synthetic construct
  source 1..75: mol_type = other DNA
gtcgctgatgatggagtctggcaatattccgacaagatggtcgcatatgctaaaaaaaatgggtggttaaaatga

SEQ ID NO: 309886 - DNA, 75 bp, synthetic construct
  source 1..75: mol_type = other DNA
gtggttgctgcggatgggatgtggagctattcagatgaacagattgagcgtgcaaagcaaaacgggtggcttgga

SEQ ID NO: 309887 - DNA, 75 bp, synthetic construct
  source 1..75: mol_type = other DNA
ccgctgtaccaggccggactggcgcgcgcccgcgccgactggctggtcggcatcaacatgacccgcgcctgcacg

SEQ ID NO: 309888 - DNA, 75 bp, synthetic construct
  source 1..75: mol_type = other DNA
cagacgcaaccgccggagcactacacggaaaggacgctgattgccgcgatgaaaaatgccgcccgttttgtcagc

SEQ ID NO: 309889 - DNA, 75 bp, synthetic construct
  source 1..75: mol_type = other DNA
gtcacgcaagagaaagaggtggatatgaggggggtgtatcatgttttcagttggttaacgcaatgtaatcaggca

SEQ ID NO: 309890 - DNA, 75 bp, synthetic construct
  source 1..75: mol_type = other DNA
acatcattaacgccgccgaaagcgggcaggatctgcccatcaccggcaccaccgacgctcagccggggcagacgg

SEQ ID NO: 309891 - DNA, 75 bp, synthetic construct
  source 1..75: mol_type = other DNA
cgttaaccttaccgcaccgaccattggcattaacaccatcgccaccgatgacgtgattaacgccaccgaaaaagg

SEQ ID NO: 309892 - DNA, 75 bp, synthetic construct
  source 1..75: mol_type = other DNA
tttgatcaaaataactctcatgattatgcaggaattagacatgaaacgtcagattcattttattctaacgttata

SEQ ID NO: 309893 - DNA, 75 bp, synthetic construct
  source 1..75: mol_type = other DNA
gaataccgcgctgcctggtgtcaccattaatccggtagcgactgacgatattattaacgccgccgaatcaggcgt

SEQ ID NO: 309894 - DNA, 75 bp, synthetic construct
  source 1..75: mol_type = other DNA
gcattacgcatccggtgacggtggatctcactccggcagcgatcaccatcaacaccatcgccacggacgatgtga

SEQ ID NO: 309895 - DNA, 75 bp, synthetic construct
  source 1..75: mol_type = other DNA
tgacggtggtgatcaataacgtcacctacggcgcgacggtattagccgatggtacatggagcgttggcgttccgg

SEQ ID NO: 309896 - DNA, 75 bp, synthetic construct
  source 1..75: mol_type = other DNA
cggtaacggcaaacgtcaccgacacggcaggcaacagtaattccgccagccataatgtgctggtcaacagcgcct

SEQ ID NO: 309897 - DNA, 75 bp, synthetic construct
  source 1..75: mol_type = other DNA
ctgccaccacagatgcttccggcaactggagcactacagtgccagcttccgctgtcggtgcgctgggcgaagcca

SEQ ID NO: 309898 - DNA, 75 bp, synthetic construct
  source 1..75: mol_type = other DNA
cgctggtgatttccggctccagcactggcggggaagcgggggatgtcgttagcgtcacgctaaacagtaaaacct

SEQ ID NO: 309899 - DNA, 75 bp, synthetic construct
  source 1..75: mol_type = other DNA
aacgtcagcgttggttgtggtatgcatgggagcctcgcttaaagcggattatcgctcatgtatttggttcccgaa

SEQ ID NO: 309900 - DNA, 75 bp, synthetic construct
  source 1..75: mol_type = other DNA
attaacaacgttacttatggcgcgacggtattagccgacggcacgtggagcctcggtgttccggcggtagacgtc

SEQ ID NO: 309901 - DNA, 75 bp, synthetic construct
  source 1..75: mol_type = other DNA
cggcgtgcctgccagcgtcatttccgcgctggcgcagggcgatgtgaccattaccgccacggttactgactccgc

SEQ ID NO: 309902 - DNA, 75 bp, synthetic construct
  source 1..75: mol_type = other DNA
ccgtcacccttaatggcgtgacttacaccggcaccgtccaggcggacgggagctggagcgtcagcgtaccgacaa

SEQ ID NO: 309903 - DNA, 75 bp, synthetic construct
  source 1..75: mol_type = other DNA
agtcatgacatttattcaccaaaccgtctggaaaatcgcctgttgaaaaccgcactcaattatgtgttggcaact

SEQ ID NO: 309904 - DNA, 75 bp, synthetic construct
  source 1..75: mol_type = other DNA
gcaaagcgcaaagcggctcgcacgaggcgcgttatgccacgattgccagcgccaaaaagcatatcccggaaagta

SEQ ID NO: 309905 - DNA, 75 bp, synthetic construct
  source 1..75: mol_type = other DNA
gcaacacttgcagagctgcatggcataactccggatacccttgaaggcgtttatgcttacgcttataacttttat

SEQ ID NO: 309906 - DNA, 75 bp, synthetic construct
  source 1..75: mol_type = other DNA
tgatgatgagcctgatgaagaatacgagcgtaatttccagcggggattgcagttgctcgaagcgaaattaaaaga

SEQ ID NO: 309907 - DNA, 75 bp, synthetic construct
  source 1..75: mol_type = other DNA
tgctttgtactcagcatcaaatatattttttgcacaaagcgttggttatttcgatacatcatcagaaataaatcc

SEQ ID NO: 309908 - DNA, 75 bp, synthetic construct
  source 1..75: mol_type = other DNA
agtatcatctgcgttgctttactcatcatcaactcagttccctggtttacatgccatgattcccgtattgggtac

SEQ ID NO: 309909 - DNA, 75 bp, synthetic construct
  source 1..75: mol_type = other DNA
tgcggcgacgaccgatgcctccggcaactggagcgtcaccgttccggcatcggcggtgacagcattaggccaggc

SEQ ID NO: 309910 - DNA, 75 bp, synthetic construct
  source 1..75: mol_type = other DNA
aacactatcgccagcgatgacgtgattaacgccacggaaaaaggcgcagatctgcaaattaccggcaccagcgat

SEQ ID NO: 309911 - DNA, 75 bp, synthetic construct
  source 1..75: mol_type = other DNA
gaataccgcgctgcctggcgtcacccttaatccggtagcgagcgacgatattatcaacgctgccgaatcgggcgt

SEQ ID NO: 309912 - DNA, 75 bp, synthetic construct
  source 1..75: mol_type = other DNA
gcgagtttgtgatcccggaactgctcggtggcccggacagcatcatgatcgggcgcgtgctgtggcaggagttct

SEQ ID NO: 309913 - DNA, 75 bp, synthetic construct
  source 1..75: mol_type = other DNA
tacatgctgttaatcgcggagcaagtgacctccatattacacgtggtgatgttatggctaaaatcgaactacgta

SEQ ID NO: 309914 - DNA, 75 bp, synthetic construct
  source 1..75: mol_type = other DNA
tttttatactatatatgtactctaatgagtatagagtaagaaatttatttaagcaactctcaaaaccaatatttc

SEQ ID NO: 309915 - DNA, 75 bp, synthetic construct
  source 1..75: mol_type = other DNA
ccgttgggattagcgacctgtttatacagcataactttaagtatgctttcatgcgtttcagatacgcaaaatgat

SEQ ID NO: 309916 - DNA, 75 bp, synthetic construct
  source 1..75: mol_type = other DNA
ccgcgcattatgagcggtgcagaagatatgagcgcctatattacgctcccgctttgccgtatcagcgatcgccgc

SEQ ID NO: 309917 - DNA, 75 bp, synthetic construct
  source 1..75: mol_type = other DNA
gtgtctaacccggttgttcgtctgtatgaacaagacgcgctgcggatgggtaaaaaagagcagttcccgtatgtg

SEQ ID NO: 309918 - DNA, 75 bp, synthetic construct
  source 1..75: mol_type = other DNA
gacagatataaagcttgctgcggatctgagagatttgactgatatgtttgtcattgcagcgtacaataaagatgt

SEQ ID NO: 309919 - DNA, 75 bp, synthetic construct
  source 1..75: mol_type = other DNA
tttagatgcaaaacttaaaactgagtctagggatcatacaagtaccgctgatctgattgtcttttctgaattggc

SEQ ID NO: 309920 - DNA, 75 bp, synthetic construct
  source 1..75: mol_type = other DNA
cattgccaccagtcgtgtgaatatcccggcgctaggcagactgctctcgagtacagagaacctggataatagttc

SEQ ID NO: 309921 - DNA, 75 bp, synthetic construct
  source 1..75: mol_type = other DNA
atagagggggaaccattatcaagctggtcggtacgtgcaccgttcagaaatgacgcctttgatcgactgataggc

SEQ ID NO: 309922 - DNA, 75 bp, synthetic construct
  source 1..75: mol_type = other DNA
gagagccaaggtttgaaatcttaactggtatatggcatggagtaacccactggatgccgctaccggaaccgccgc

SEQ ID NO: 309923 - DNA, 75 bp, synthetic construct
  source 1..75: mol_type = other DNA
atacgtaaccttctccaatgccagcgttacgatcaccgtgcatttgtagacgagatacttagatatttattgaca

SEQ ID NO: 309924 - DNA, 75 bp, synthetic construct
  source 1..75: mol_type = other DNA
cttgcatgatgaaaaactggtactgctcagcgcggaatttgccaccagagagcaaattgaccactactgcgagaa

SEQ ID NO: 309925 - DNA, 75 bp, synthetic construct
  source 1..75: mol_type = other DNA
gggattgccttcgcgcctgtgcattcgccggagctggaggcaattcctttactgacagaaagtttagcgttagtc

SEQ ID NO: 309926 - DNA, 75 bp, synthetic construct
  source 1..75: mol_type = other DNA
atgcaaaatgtcagaagccgttcatatttgtcatattgcgatttttcttcacggagcgtgatatggcgcaccccg

SEQ ID NO: 309927 - DNA, 75 bp, synthetic construct
  source 1..75: mol_type = other DNA
aaacccataccctggcaaccggtccggttaatgaccttgaactggccctgttcccggatgaacacggtgatttga

SEQ ID NO: 309928 - DNA, 75 bp, synthetic construct
  source 1..75: mol_type = other DNA
atgatcccgcacctgcaaatcgagaaagaactggccagcggtgaactgattgacttaacgccggggctatttcaa

SEQ ID NO: 309929 - DNA, 75 bp, synthetic construct
  source 1..75: mol_type = other DNA
atcagcaacaggcgcctggagttgaaggggatttcgcttcggctaaccctaaagcaagtcttcttgcaggtgagg

SEQ ID NO: 309930 - DNA, 75 bp, synthetic construct
  source 1..75: mol_type = other DNA
tgtctggacaagcaaaagtatctcatatcttatttgaacaggctaagatacactcaactgatatagcctctctct

SEQ ID NO: 309931 - DNA, 75 bp, synthetic construct
  source 1..75: mol_type = other DNA
ttcagcgggcaggttttcaaaactaaaattaatgaagataatacttcagactattccatagctatattccctttc

SEQ ID NO: 309932 - DNA, 75 bp, synthetic construct
  source 1..75: mol_type = other DNA
cgacttcacctggatttgcccctatatttccagacatctgttatcacttaacccattacaagcccgctgccgcag

SEQ ID NO: 309933 - DNA, 75 bp, synthetic construct
  source 1..75: mol_type = other DNA
gcggtatgtcgcaggcggtgaaaagccaggtatttgagccattctttaccaccaaacagacgggcagcggcagcg

SEQ ID NO: 309934 - DNA, 75 bp, synthetic construct
  source 1..75: mol_type = other DNA
agcagtccttacatccgcaagccgttgaactgaaaacattgctggaagagttaagcgaattaatgcgccactcct

SEQ ID NO: 309935 - DNA, 75 bp, synthetic construct
  source 1..75: mol_type = other DNA
acggagcgtgatatggcgcaccccggacgtcacttttttgccagcgcgcgggcgattgctgcttttgaatttgct

SEQ ID NO: 309936 - DNA, 75 bp, synthetic construct
  source 1..75: mol_type = other DNA
atctcaatgctttggatgatattaagtatcaattgagcactataggttcaaaattaagtaagcttaaattacgga

SEQ ID NO: 309937 - DNA, 75 bp, synthetic construct
  source 1..75: mol_type = other DNA
ttgaaggataaacttccaaaagaactgagcgatgagaaaaacttcattgtgaaattgtctcaagagaataaatta

SEQ ID NO: 309938 - DNA, 75 bp, synthetic construct
  source 1..75: mol_type = other DNA
atgccaaatattgccgttctcactaatgacctgcagtatgagtttacctacaaaataacacgctctccagaaatt

SEQ ID NO: 309939 - DNA, 75 bp, synthetic construct
  source 1..75: mol_type = other DNA
gcgacgggccgctttatacgggctggattccattcatgatcccaatattttaaaactggcagaatggggattatc

SEQ ID NO: 309940 - DNA, 75 bp, synthetic construct
  source 1..75: mol_type = other DNA
accccaggctgaagaagtcgagatcgccgcgcagacgacgcgatatcgagaccatgtcatcatttgcggcgcggg

SEQ ID NO: 309941 - DNA, 75 bp, synthetic construct
  source 1..75: mol_type = other DNA
atgcaggatttgctcggcactaccctgatcctgctggcggcgtgcagcctctcggtggtggcgacggcggcgttc

SEQ ID NO: 309942 - DNA, 75 bp, synthetic construct
  source 1..75: mol_type = other DNA
tcagcgattgtttcgccagtatggtcgccagttaaatatcgtgctggcgttgttgctggtctattgcgcggtgcg

SEQ ID NO: 309943 - DNA, 75 bp, synthetic construct
  source 1..75: mol_type = other DNA
ccgggataactgggatgctccggccagaatgaccatcacgttctacggtccggacgaacggccacaaatcgccgc

SEQ ID NO: 309944 - DNA, 75 bp, synthetic construct
  source 1..75: mol_type = other DNA
gatgccggaatatatggcaatactggcagagatggtcgcgcgcgtttttggcgtgaagttttacaccagccatgg

SEQ ID NO: 309945 - DNA, 75 bp, synthetic construct
  source 1..75: mol_type = other DNA
ctggtcgggtggcgttaatctggcaaaccgtctttctgaaacgtttgctgtgatgaatgcgccaggaattaaaga

SEQ ID NO: 309946 - DNA, 75 bp, synthetic construct
  source 1..75: mol_type = other DNA
tcctatgcatcatctaaagctgcggccagtcatctggtcagaaatatggcgtttgacctgggtgaaaaaaatatt

SEQ ID NO: 309947 - DNA, 75 bp, synthetic construct
  source 1..75: mol_type = other DNA
gcctcaattcatgttgggcaacgatggctattacgcctggatttaaaggatttcttccattcaataagttcggct

SEQ ID NO: 309948 - DNA, 75 bp, synthetic construct
  source 1..75: mol_type = other DNA
atggcagattggaatggttatattatggatatcagcaaacaatttgatcagggcgttgatgatctgaaccaacaa

SEQ ID NO: 309949 - DNA, 75 bp, synthetic construct
  source 1..75: mol_type = other DNA
acggatttcgtcagagtacccgcgtgctggcagggatgagtctgggatttttaatcgtcatgttgctgtgtgcgg

SEQ ID NO: 309950 - DNA, 75 bp, synthetic construct
  source 1..75: mol_type = other DNA
tttggacttacaccctgattaccgccatgacgccaggaccgaacaatattctcgcccttagctcagccacatcgc

SEQ ID NO: 309951 - DNA, 75 bp, synthetic construct
  source 1..75: mol_type = other DNA
tccacacacagataaatcaatacgttgtgatttctgacttccctcccgtttcggtagaaaaatcaacctctgttc

SEQ ID NO: 309952 - DNA, 75 bp, synthetic construct
  source 1..75: mol_type = other DNA
tatatgctattaatggtattgatggagtcttagaattctctctatctattgaaaggcctgagtttgttggtagta

SEQ ID NO: 309953 - DNA, 75 bp, synthetic construct
  source 1..75: mol_type = other DNA
gaccatgcttggaaaacagcattctgtagaggtaaagcagagggaatatgggagaagtactgtgcataaatgcac

SEQ ID NO: 309954 - DNA, 75 bp, synthetic construct
  source 1..75: mol_type = other DNA
gccaaatgaatgaatatggaattgaggctttcgggatcccgcttaccagtaggcatggagttgcgatggaactgt

SEQ ID NO: 309955 - DNA, 75 bp, synthetic construct
  source 1..75: mol_type = other DNA
tgggatgtattgaataaaataaaagataagcagcatcattattttggtagcggtaatgaaatgcgtgattggata

SEQ ID NO: 309956 - DNA, 75 bp, synthetic construct
  source 1..75: mol_type = other DNA
tatgaagacggtgagatgtggtctgcaatgtggaatggcaatcgctgggatgatggcaccgaatatccggatccg

SEQ ID NO: 309957 - DNA, 75 bp, synthetic construct
  source 1..75: mol_type = other DNA
ggcggcgcttggcatggtgatcatctttacctttttgctgttccaaaaaattcgtactgctgatagcgcccccgc

SEQ ID NO: 309958 - DNA, 75 bp, synthetic construct
  source 1..75: mol_type = other DNA
gattggcttgattttattactgggattcacctgttacgcctcacgcgggctgtattgggcctgccctggcgaagc

SEQ ID NO: 309959 - DNA, 75 bp, synthetic construct
  source 1..75: mol_type = other DNA
gagttttaaagatagaatacaaacatttcaaacggtatcgtcaagattattcgatgatcatttggatttgtttcg

SEQ ID NO: 309960 - DNA, 75 bp, synthetic construct
  source 1..75: mol_type = other DNA
ggtctcatcgtccatggaaacgacattcgtgctggatgcactggagcaggcagtatgggaccgtcgtccgtctgg

SEQ ID NO: 309961 - DNA, 75 bp, synthetic construct
  source 1..75: mol_type = other DNA
aaaaacggcgctggtgctgactgttgcacagaatgccctgcgtctggcagaaaaaccggtcttttttttcagtct

SEQ ID NO: 309962 - DNA, 75 bp, synthetic construct
  source 1..75: mol_type = other DNA
gaacttttaaaaacgcctcttgaattgggattgagaaatacagttgattggtttaaaaaccaggaggaacaatgt

SEQ ID NO: 309963 - DNA, 75 bp, synthetic construct
  source 1..75: mol_type = other DNA
atagctgactgtctgaaggaatttaacgccggtaacccatgggtaccaggtgaagttgctaaagcactgggttta

SEQ ID NO: 309964 - DNA, 75 bp, synthetic construct
  source 1..75: mol_type = other DNA
ttatttaagaaagtatatgattactatcaaggtggtaacctacctgagattgaatatttaaagaatactctaaaa

SEQ ID NO: 309965 - DNA, 75 bp, synthetic construct
  source 1..75: mol_type = other DNA
tggccgggggaatctcagcataaacgcgccactgtcgggctggatattcttgctgctatcggcagcgatatcgcc

SEQ ID NO: 309966 - DNA, 75 bp, synthetic construct
  source 1..75: mol_type = other DNA
gcgaacaacatccaattattactgatgtcgacacaccaccgtggattgcggaccttgaaccaatcattctcgaaa

SEQ ID NO: 309967 - DNA, 75 bp, synthetic construct
  source 1..75: mol_type = other DNA
agataattttatttatatcagcaatattttttttaaatataaaacaacggaacgaaaaaaatcatacaataaata

SEQ ID NO: 309968 - DNA, 75 bp, synthetic construct
  source 1..75: mol_type = other DNA
tggtcacgcgccgtcattggctggtctatgtcaccgcgaatgacagcacaactggcctgtgatgcactgcaaatg

SEQ ID NO: 309969 - DNA, 75 bp, synthetic construct
  source 1..75: mol_type = other DNA
ctctccttgaggtattgcttgtcatcggcataatggtgatggttatccctaaagtttatgaaaacattgaaaacc

SEQ ID NO: 309970 - DNA, 75 bp, synthetic construct
  source 1..75: mol_type = other DNA
tggggtgcaggcatatggcaggactatttaaaaaccaaaggttggcaggctgaagctcgtcttgtcagcaactgg

SEQ ID NO: 309971 - DNA, 75 bp, synthetic construct
  source 1..75: mol_type = other DNA
aacgcctcgcgtggccatacctccatggatatcggacagcgatcccatcattgttgataccgatagattttttag

SEQ ID NO: 309972 - DNA, 75 bp, synthetic construct
  source 1..75: mol_type = other DNA
caccggattttttatcttttaaaaatgccggtttgtcagacttacagtatcgaaatgcaaaacttacaatttcat

SEQ ID NO: 309973 - DNA, 75 bp, synthetic construct
  source 1..75: mol_type = other DNA
tcagtaagttggcatcatcacctaattggtgttctgtttcttgtcctctacatattcttcgcaaaagaaccgctg

SEQ ID NO: 309974 - DNA, 75 bp, synthetic construct
  source 1..75: mol_type = other DNA
gtttcgtgaagtctcaattagggaaggtgcgaataagcggggaaatacttctcggctgactcagtcatttcattt

SEQ ID NO: 309975 - DNA, 75 bp, synthetic construct
  source 1..75: mol_type = other DNA
agataactttatttatatcagcaatattttttcaaatataaaacaacggaacgaaaaatcatgcaataaatttgt

SEQ ID NO: 309976 - DNA, 75 bp, synthetic construct
  source 1..75: mol_type = other DNA
ggaatatatcactgaagtcgtattgttgttacagcaaatacaaatgtcagatgataaaaatgaggatccggaaaa

SEQ ID NO: 309977 - DNA, 75 bp, synthetic construct
  source 1..75: mol_type = other DNA
tgttttatctgagttaataacgtactttatttgtgaagctatgtatgttgaacccccagctttaaccaagaaggc

SEQ ID NO: 309978 - DNA, 75 bp, synthetic construct
  source 1..75: mol_type = other DNA
gcaacagcaacattttaaagaaaaagttaaaacctctaataaaattatagtcatcggtcttaagataaatccaga

SEQ ID NO: 309979 - DNA, 75 bp, synthetic construct
  source 1..75: mol_type = other DNA
gtattcccaacagcatgtctctgttaaaaatacacggctcatgtaattttattcctgcaggtatagctacaggag

SEQ ID NO: 309980 - DNA, 75 bp, synthetic construct
  source 1..75: mol_type = other DNA
tgatcttctccagcgatatccctcacccaaaaaactcgctttactgggtgagaaaaaactggcaacccagctctg

SEQ ID NO: 309981 - DNA, 75 bp, synthetic construct
  source 1..75: mol_type = other DNA
ctgcgcttcgacttctcacacaacgaagcgatgaaaccagaagagattcgtgcggtcgaagacctggtgaacaca

SEQ ID NO: 309982 - DNA, 75 bp, synthetic construct
  source 1..75: mol_type = other DNA
acaaaacagagcaggagcgcgaaacatcagtgcctaaaagaaaaatcatattcgtacccttgcagtcagaaaaaa

SEQ ID NO: 309983 - DNA, 75 bp, synthetic construct
  source 1..75: mol_type = other DNA
tttaaggtcacgttccagatcgagtgggcagatacacgctggccgcgcgtggcaaacgtgaaaatttacaacctt

SEQ ID NO: 309984 - DNA, 75 bp, synthetic construct
  source 1..75: mol_type = other DNA
atggatttgatgtgtttcgcgcgtggcagtcgtgaattatatagtcagtcgacgctcctaaaagtacaggtgtga

SEQ ID NO: 309985 - DNA, 75 bp, synthetic construct
  source 1..75: mol_type = other DNA
ggcttccgtgtaccgcaccgcgctgtcgaacaatgatattgcgatggctggtgggcagagcaccgaccagaacac

SEQ ID NO: 309986 - DNA, 75 bp, synthetic construct
  source 1..75: mol_type = other DNA
cgcggcggacgtgggccagagtgatggccggaactacggtctgatttttagcggcgaaattcgttactcggtcac

SEQ ID NO: 309987 - DNA, 75 bp, synthetic construct
  source 1..75: mol_type = other DNA
ggagttggggggcattttgcgtatacttatgtagtggatgttgataatccagaatcatcgacagaatctgttggt

SEQ ID NO: 309988 - DNA, 75 bp, synthetic construct
  source 1..75: mol_type = other DNA
atgacgtggagccgctacgggcagttgctggcgttcactgactgctcgggctaccagacccgctatgaatacgac

SEQ ID NO: 309989 - DNA, 75 bp, synthetic construct
  source 1..75: mol_type = other DNA
aggtatcagcctttaccgccactatgacaaccgtggccggttaacctcggtgaaagacgcacagggccgtgaaac

SEQ ID NO: 309990 - DNA, 75 bp, synthetic construct
  source 1..75: mol_type = other DNA
tgaaggcgtgccgcgtctgctggaaatcttgagtaagcataatattcaggccagcatttttttcagcgtcggccc

SEQ ID NO: 309991 - DNA, 75 bp, synthetic construct
  source 1..75: mol_type = other DNA
ggggttatccagggcaaaatcccactgaaaattatgtttttgtcgctgcaattaaagatggtgaaaaatctaaag

SEQ ID NO: 309992 - DNA, 75 bp, synthetic construct
  source 1..75: mol_type = other DNA
aggtaaatacagcgtgagtaacgtggctgtgttgtgtggttatgatagtgtttcttacttcattgcttgttttaa

SEQ ID NO: 309993 - DNA, 75 bp, synthetic construct
  source 1..75: mol_type = other DNA
gtatctacaaaaacagatagatgaaattataaagaatggattgcttgacgaggatgaaataatatcattcttaga

SEQ ID NO: 309994 - DNA, 75 bp, synthetic construct
  source 1..75: mol_type = other DNA
agtggcggcaaatcgtcaccgttgaggatgccatcaatcagggttatgacctgttcgaccttgagcaactcaggc

SEQ ID NO: 309995 - DNA, 75 bp, synthetic construct
  source 1..75: mol_type = other DNA
ggcgtcaaaatccatgttctcgatggcgagcgtttttctcttggtaatatggacgataaagaactctctgccggt

SEQ ID NO: 309996 - DNA, 75 bp, synthetic construct
  source 1..75: mol_type = other DNA
ttttgatttatttaagttcaatgaaggttttcagttaatatttaacgcatatattactcgttttattattcgtag

SEQ ID NO: 309997 - DNA, 75 bp, synthetic construct
  source 1..75: mol_type = other DNA
cgagattgcgagcagctttagaacgcctaatttctggcaagccacaaaatgtttcaccttcaggtaaattaaccc

SEQ ID NO: 309998 - DNA, 75 bp, synthetic construct
  source 1..75: mol_type = other DNA
aagaagtgctgcaggaagcgctaactgagcgtgatatgcagttgcaagaaaaagaacttccagagatcaacatcg

SEQ ID NO: 309999 - DNA, 75 bp, synthetic construct
  source 1..75: mol_type = other DNA
tataaaattgcctgcagcagaagaagagagggattggctatttatttccagatcagggcgtccgcttacccgtca

SEQ ID NO: 310000 - DNA, 75 bp, synthetic construct
  source 1..75: mol_type = other DNA
atctatgttctgactgatggtcaggtgaaaacccgctggtatcagtcccgagacgtggccggtaaaactattaaa

SEQ ID NO: 310001 - DNA, 75 bp, synthetic construct
  source 1..75: mol_type = other DNA
actgcattcaatttttgcagaagtgcgttgacggtaaattatcatctacgctcgatcagtccaatgatgcctggc

SEQ ID NO: 310002 - DNA, 75 bp, synthetic construct
  source 1..75: mol_type = other DNA
acagaagtgaatagccacgacgggatcgccacagctacgctgaccagtttgaaaaatggtgattatagggttacg

SEQ ID NO: 310003 - DNA, 75 bp, synthetic construct
  source 1..75: mol_type = other DNA
taatgcccgcaccgcccagacctatcatggcaacctgtatctggatgaatacttctggatacaccgctttctgga

SEQ ID NO: 310004 - DNA, 75 bp, synthetic construct
  source 1..75: mol_type = other DNA
tcgtggatggtcagcgccagatggtggcgaataacgaatatgttcatgaagcgattgtgctcaacagcgctaccg

SEQ ID NO: 310005 - DNA, 75 bp, synthetic construct
  source 1..75: mol_type = other DNA
gctgctgtactttcagggataccgcgtcgcccgcattgctgaaatgctgggcgaaaaagttgcaaccgttcacag

SEQ ID NO: 310006 - DNA, 75 bp, synthetic construct
  source 1..75: mol_type = other DNA
tcgagctacagctcatcgatgagaatggcaaaggaattagccttagtgatttcaaagttacctttgatatagagc

SEQ ID NO: 310007 - DNA, 75 bp, synthetic construct
  source 1..75: mol_type = other DNA
aggaaaagacagtccggttgatacctacgtcctgattcaggcagccgatactgatctggcttttgccaccagtat

SEQ ID NO: 310008 - DNA, 75 bp, synthetic construct
  source 1..75: mol_type = other DNA
ttgtggacggtcagcgccagatggtggcgaataacgagtatgttcacgacgcgattgtgctcaacagcgccaccg

SEQ ID NO: 310009 - DNA, 75 bp, synthetic construct
  source 1..75: mol_type = other DNA
acgggtgtcggtcacggggtttacgagaacgtgaaagcgttttttccagccgtccgggagtttgtctacaacccc

SEQ ID NO: 310010 - DNA, 75 bp, synthetic construct
  source 1..75: mol_type = other DNA
tcgcggcaatggcgaatatatcaaccaggacgctgagacgctggctgaaaaaaccatcaaccggagtgcctttac

SEQ ID NO: 310011 - DNA, 75 bp, synthetic construct
  source 1..75: mol_type = other DNA
tgcgctgaccgtgggcgtggcgtaccagacgacggtaggtggcattatgaacacttcggtggctctgatgcagtc

SEQ ID NO: 310012 - DNA, 75 bp, synthetic construct
  source 1..75: mol_type = other DNA
cgcccttacctcaacggaaaacagattaaaataacgttaggctcctaccctgcaatgacattgtctcaggcgcgt

SEQ ID NO: 310013 - DNA, 75 bp, synthetic construct
  source 1..75: mol_type = other DNA
aggtatcgaggcattcaaggggactcttgatccagccgctgcaatgtatgatttctgcatgaagtatgaccgcga

SEQ ID NO: 310014 - DNA, 75 bp, synthetic construct
  source 1..75: mol_type = other DNA
gacgaggatgttgatgtgggtcgcgcatactacttgaacaaggcgcttaagtatggacgcctgttcgcagcacag

SEQ ID NO: 310015 - DNA, 75 bp, synthetic construct
  source 1..75: mol_type = other DNA
tttaccccgcgtggtactcgtcaattattttgggaacacgaagtaaaggaatggttgtacagagcagaacgataa

SEQ ID NO: 310016 - DNA, 75 bp, synthetic construct
  source 1..75: mol_type = other DNA
aaacaggttccggcgatctggtacttaatgcagataacaatgactttactggtgagatgcagattgaaaacggtg

SEQ ID NO: 310017 - DNA, 75 bp, synthetic construct
  source 1..75: mol_type = other DNA
aatgaaacgaaccaatggtgagatggataatggctcaattatctatcgatatacctacctgaaagacgagcaact

SEQ ID NO: 310018 - DNA, 75 bp, synthetic construct
  source 1..75: mol_type = other DNA
ttcacaaatatacaggcatgaattgactcagcgcaacgtatcaggaagactaaccatttcttgtaatatcacaag

SEQ ID NO: 310019 - DNA, 75 bp, synthetic construct
  source 1..75: mol_type = other DNA
tatgcgcttgattctcttatcataattatatttacgtatggtgtatttagacgcattattaagaaagaaataaaa

SEQ ID NO: 310020 - DNA, 75 bp, synthetic construct
  source 1..75: mol_type = other DNA
ctatgctggtgtgttagctactattttgagtaatttatttatttgcatcgcatataattataaaagtattgtctt

SEQ ID NO: 310021 - DNA, 75 bp, synthetic construct
  source 1..75: mol_type = other DNA
cgcgtttaaccacgtcggccatgattgcctctatcgcggaagaagggcaggagacgcgcgccgcgccgtttggcc

SEQ ID NO: 310022 - DNA, 75 bp, synthetic construct
  source 1..75: mol_type = other DNA
cggtgcaacggtcgctccgactgccatcacagggccggacggtacggtggagatcagtgtcaccagtcagacggc

SEQ ID NO: 310023 - DNA, 75 bp, synthetic construct
  source 1..75: mol_type = other DNA
gaacgtgacatttattgcggatatcaggacggcgcagatcgcggatctggtggtcatccgggataactcggtggc

SEQ ID NO: 310024 - DNA, 75 bp, synthetic construct
  source 1..75: mol_type = other DNA
tgggatttcccctcactggtctttgcgcggctgatgaccggtgtcgggctggggggcggcgttgccgaatcttat

SEQ ID NO: 310025 - DNA, 75 bp, synthetic construct
  source 1..75: mol_type = other DNA
ttgctttttagttgccctgatggaagggctggatttacaggccgccggtatcgctgccgtcggtatcgcccacgc

SEQ ID NO: 310026 - DNA, 75 bp, synthetic construct
  source 1..75: mol_type = other DNA
acggtgttagcacaggaaggaaattgctggatttacgaccagaatgctattgcgttcggcggaacggtgatttcc

SEQ ID NO: 310027 - DNA, 75 bp, synthetic construct
  source 1..75: mol_type = other DNA
atcgcctggaatgaagatcaaaaaggaatttataccgcaacgtataccgcattactccctggcaccggtttaaaa

SEQ ID NO: 310028 - DNA, 75 bp, synthetic construct
  source 1..75: mol_type = other DNA
ggcttatgtcgatacctggatccagtacggatggtttaataataccgttaatggtgaaaaactggctgcggagtc

SEQ ID NO: 310029 - DNA, 75 bp, synthetic construct
  source 1..75: mol_type = other DNA
tgaggtaaaagacgacgcgtggagggatccttacaatgatggaataacggcaatagatacaggtgatagagttca

SEQ ID NO: 310030 - DNA, 75 bp, synthetic construct
  source 1..75: mol_type = other DNA
aatgtgccgtgtgctccgggtggcccgcaacggctggtatacgtggtgtcagcggcggacaaggataagcaagcg

SEQ ID NO: 310031 - DNA, 75 bp, synthetic construct
  source 1..75: mol_type = other DNA
aatcagcatcaacaccgttgccagcgacgacgtgattaacgccgcagaaaaaggcaccaatctgactctttccgg

SEQ ID NO: 310032 - DNA, 75 bp, synthetic construct
  source 1..75: mol_type = other DNA
ataccagctaacgaaacaatttaacatcaaatggctttatacagaggatgggaaaactggtatgaggaacaaaga

SEQ ID NO: 310033 - DNA, 75 bp, synthetic construct
  source 1..75: mol_type = other DNA
catcaaagcaatgtgccgcgtgctccgggtggcccgcagcggctggtatacgtggtgtcagcggcggacaaggat

SEQ ID NO: 310034 - DNA, 75 bp, synthetic construct
  source 1..75: mol_type = other DNA
aagttcagtccggtcagttaccgagcacacaacctgcctgtgtcagaaaatttgctggagcaggatttttacgcc

SEQ ID NO: 310035 - DNA, 75 bp, synthetic construct
  source 1..75: mol_type = other DNA
cattaccggcatcagcgatgacaccggaaccagcagcagcgattttattaccagcgacaccacgcttaccgtgcg

SEQ ID NO: 310036 - DNA, 75 bp, synthetic construct
  source 1..75: mol_type = other DNA
ccgtgcgcggcacgctcggcgcggcgcttgccgccgatgaacgggcgcaaatcagcctcgacggcggcgtcacct

SEQ ID NO: 310037 - DNA, 75 bp, synthetic construct
  source 1..75: mol_type = other DNA
accacctggcagaatctttcggtaagcggtttgacctggagctatcttgacgggcgtacgctgaccgatggcaac

SEQ ID NO: 310038 - DNA, 75 bp, synthetic construct
  source 1..75: mol_type = other DNA
aacggtgaccattaataccattgcgggcgatgatattcttaacgccgccgaagccggagcggctctgaccatcac

SEQ ID NO: 310039 - DNA, 75 bp, synthetic construct
  source 1..75: mol_type = other DNA
aacatcggtgattttgtcaaagtcacccagagcggcagcgacaccatcgtgcaaatcgaccgcgacggcacgggc

SEQ ID NO: 310040 - DNA, 75 bp, synthetic construct
  source 1..75: mol_type = other DNA
atttggcggggaatatcacctcctccagtgattttgtcctgacggtcgatacctctattccgaccacgctggcgc

SEQ ID NO: 310041 - DNA, 75 bp, synthetic construct
  source 1..75: mol_type = other DNA
gctttcgcactcgataaaatgcaaatgggctggatattcagcgccggaatactcggtttactacccggcgcgttg

SEQ ID NO: 310042 - DNA, 75 bp, synthetic construct
  source 1..75: mol_type = other DNA
aattcaataccaaagacacttaccccaaccagtcgctggataacgatctttgccaggcggttcgcgcaggcaata

SEQ ID NO: 310043 - DNA, 75 bp, synthetic construct
  source 1..75: mol_type = other DNA
cactgcccggtaccgaatacggccccgacaggggcatccgtctttcggcggtgtggctgatgcacgacccggcat

SEQ ID NO: 310044 - DNA, 75 bp, synthetic construct
  source 1..75: mol_type = other DNA
tatcgactatactggcgacaccagaggtcaggcgtggtacatggatttgatgtgttttgcgcgtggcgctcgtga

SEQ ID NO: 310045 - DNA, 75 bp, synthetic construct
  source 1..75: mol_type = other DNA
attaactagcgaaggtaaataccttgattacagttctgatgtggtgctggattttcctttcaaggattgtattct

SEQ ID NO: 310046 - DNA, 75 bp, synthetic construct
  source 1..75: mol_type = other DNA
cactcactttctttatatcaacgggtcaatgtgactgcgatgaaatagcagaatcaaacttcaatcgtatgattg

SEQ ID NO: 310047 - DNA, 75 bp, synthetic construct
  source 1..75: mol_type = other DNA
gatgggaaaaaacccgacagatgtgacgtacttcaggaactaattgattgtggtgatattagtgctaaagatgca

SEQ ID NO: 310048 - DNA, 75 bp, synthetic construct
  source 1..75: mol_type = other DNA
aaggtgttgaaacattaaaatatacggagtcactattttcaaaaacagttatattattccatgcgccattgtttt

SEQ ID NO: 310049 - DNA, 75 bp, synthetic construct
  source 1..75: mol_type = other DNA
aaacgtctgtttaatgcgctcgcaggtgcgcagaaccagtatcaggtcggcaaccatcttattatgttcattaac

SEQ ID NO: 310050 - DNA, 75 bp, synthetic construct
  source 1..75: mol_type = other DNA
ggcaatatgcaggcggcgcgtcttaccggcattaaagtctggctggtgctgctgtttgtttatggcatgagcggc

SEQ ID NO: 310051 - DNA, 75 bp, synthetic construct
  source 1..75: mol_type = other DNA
tggccgggatggtggtctaaaattgaactatttaatcctaatcacccagtccttggagaccaagatttactctat

SEQ ID NO: 310052 - DNA, 75 bp, synthetic construct
  source 1..75: mol_type = other DNA
ggtcaggcgtggtacatggatttgatgtgttttgcgcgtggcgctcgtgacctgattagccagtcgactatagct

SEQ ID NO: 310053 - DNA, 75 bp, synthetic construct
  source 1..75: mol_type = other DNA
ggagtcactattttcaaaaacagttatattattccatgcgccattgtttttgatcattattgttttttttgcaat

SEQ ID NO: 310054 - DNA, 75 bp, synthetic construct
  source 1..75: mol_type = other DNA
atgtaccgactgttactgtattccttcctgatactaccggtggcagcatctgccggtacaacaatttataccgat

SEQ ID NO: 310055 - DNA, 75 bp, synthetic construct
  source 1..75: mol_type = other DNA
taacggcgatggcacttacacccaggtcattactgccggaaaaacatcgggttctttgtcgctaatgccgcaatt

SEQ ID NO: 310056 - DNA, 75 bp, synthetic construct
  source 1..75: mol_type = other DNA
caacgggtaacccggatgtgctggcgaatggcagcgatcgacatacggtgaatgtccgggtggaagatcagtttg

SEQ ID NO: 310057 - DNA, 75 bp, synthetic construct
  source 1..75: mol_type = other DNA
ggacggtgcgacagcgaacacgctgcgggcgagggtgacggatgcgttcggtaatgcgcttgccggacagacggt

SEQ ID NO: 310058 - DNA, 75 bp, synthetic construct
  source 1..75: mol_type = other DNA
gtcaccgatgtgttcggtaatgcgcttgccgggcagacggtcagcgtgatggcggacaacggtgcagcggtcgct

SEQ ID NO: 310059 - DNA, 75 bp, synthetic construct
  source 1..75: mol_type = other DNA
tctggtactacgatgaatcggaccgtatcactcaccgcacggtgaacggcgaaccggcagagcagtggcagtatg

SEQ ID NO: 310060 - DNA, 75 bp, synthetic construct
  source 1..75: mol_type = other DNA
attacggcgatgaagtggcgctatttggtaaagatgagcgacaaaatgatcctcacgcgattaccgcaggattga

SEQ ID NO: 310061 - DNA, 75 bp, synthetic construct
  source 1..75: mol_type = other DNA
gcgagcgtcggggcgataacaccatatgtggattgggggatcgtttacgtcgtctgaccgccggtatttgcctga

SEQ ID NO: 310062 - DNA, 75 bp, synthetic construct
  source 1..75: mol_type = other DNA
cggtgactgtattacatagcttagggatcacactgctgctgattctggcactctgggtggtccaaactgccgctg

SEQ ID NO: 310063 - DNA, 75 bp, synthetic construct
  source 1..75: mol_type = other DNA
ccagcaatttgttctttaattatatttccatttattttcccagctataacttcttatggtgtgttggctgttacg

SEQ ID NO: 310064 - DNA, 75 bp, synthetic construct
  source 1..75: mol_type = other DNA
aggacggcgcagatcgctgatctggtggtcattaaggatggttcagaggcggacggtgcgacggcgaacacgctg

SEQ ID NO: 310065 - DNA, 75 bp, synthetic construct
  source 1..75: mol_type = other DNA
ggttgccccgacggtgaccacagagccggacggtacggtggaaatcagtgtcaccagccagacggcggggatcag

SEQ ID NO: 310066 - DNA, 75 bp, synthetic construct
  source 1..75: mol_type = other DNA
ggtatctcttggtgtggatgaagatttcagccttaaaagctcttcattcgaatttctccatccctggtacgaaac

SEQ ID NO: 310067 - DNA, 75 bp, synthetic construct
  source 1..75: mol_type = other DNA
tatgggagatccctgcagaaaggatgaaaatgcgcagacctcacattgttcctttatctactcaggttattgacc

SEQ ID NO: 310068 - DNA, 75 bp, synthetic construct
  source 1..75: mol_type = other DNA
aactggtctgtctggacaagcaaaagtatctcatatcttatttgaacaggctaagatacactcaactgatatagc

SEQ ID NO: 310069 - DNA, 75 bp, synthetic construct
  source 1..75: mol_type = other DNA
cgtttatcaaggaacagagaacgaatgtcatttggttattattaataacatccaaaagttaaagcaattgacaaa

SEQ ID NO: 310070 - DNA, 75 bp, synthetic construct
  source 1..75: mol_type = other DNA
aaaccttcaaattgatacgtgtgggcaggaatgcttagtgcttgatggtgctggtaattgcagaattataggtgc

SEQ ID NO: 310071 - DNA, 75 bp, synthetic construct
  source 1..75: mol_type = other DNA
tttggggccactggcgtggctgatgatacagcagcactgcaaaagatgcttgaatgtggcagggcggctgagctt

SEQ ID NO: 310072 - DNA, 75 bp, synthetic construct
  source 1..75: mol_type = other DNA
ctaacaaagctgaccgctggacagtggcctatcgcgaagaaatcattaagacatttgagcaagatgtgttcccgt

SEQ ID NO: 310073 - DNA, 75 bp, synthetic construct
  source 1..75: mol_type = other DNA
tggcagaaaaggccgtactgaaaatggatgccaatggctttgaagaatgcctgtctttgtgccaaaagctgcgtt

SEQ ID NO: 310074 - DNA, 75 bp, synthetic construct
  source 1..75: mol_type = other DNA
gaaaatgcgtaggccacacattgttcctttatctactcaggtaattgcccttttcgaacaactcaagcctattac

SEQ ID NO: 310075 - DNA, 75 bp, synthetic construct
  source 1..75: mol_type = other DNA
cagtgcgatggcattaactctgaatgaagccagaagtcaggggcgggtcggtgaaacgcttaatggttacctggt

SEQ ID NO: 310076 - DNA, 75 bp, synthetic construct
  source 1..75: mol_type = other DNA
ggagagggcgaccggcgttgatttgccgagttatggcggtgtcgtagcgaactcttatctgccatcaaactggct

SEQ ID NO: 310077 - DNA, 75 bp, synthetic construct
  source 1..75: mol_type = other DNA
gaaacgcctggtagctcaactgaaagcattacgcgccgatcttcaccatcagctggcttcagtcggttgcgacct

SEQ ID NO: 310078 - DNA, 75 bp, synthetic construct
  source 1..75: mol_type = other DNA
aggatgctggaatcggtcatcgatggcgacatgctaccgccgctctcgctgctgctgttgcagaaaatggcggct

SEQ ID NO: 310079 - DNA, 75 bp, synthetic construct
  source 1..75: mol_type = other DNA
atgccactaacagatatacaaattaaacgagcaaagccccaaaacaaaccctacacactgaacgatggacaaggc

SEQ ID NO: 310080 - DNA, 75 bp, synthetic construct
  source 1..75: mol_type = other DNA
ttaagacgtaagatgcgaaaagcagtcatggacagaaacagtctggcgtcagtccttgcggggagcgggctttcg

SEQ ID NO: 310081 - DNA, 75 bp, synthetic construct
  source 1..75: mol_type = other DNA
attgaagattataaaaaaagagaagaaaataatgaagagttttattttataataaaaagaactgataatgatgaa

SEQ ID NO: 310082 - DNA, 75 bp, synthetic construct
  source 1..75: mol_type = other DNA
catcataattctgccctccctgatacagaaaagtgtcagccttttagcgggattttatcccagcatgttgactca

SEQ ID NO: 310083 - DNA, 75 bp, synthetic construct
  source 1..75: mol_type = other DNA
gtgaccgtgcttccggcccgtcctcgtcctgaagatttctgggcgctggggcgtggttgtgatgaaaatgagaag

SEQ ID NO: 310084 - DNA, 75 bp, synthetic construct
  source 1..75: mol_type = other DNA
cgatagcggtaaggctgacgcggacgtcactgccggtgagttttccagccaggcagtatttgatattacctataa

SEQ ID NO: 310085 - DNA, 75 bp, synthetic construct
  source 1..75: mol_type = other DNA
ttcccggcggagtacggatgtgctgtcagccgtcacaacttaccgatgtcttcagggcgctcaaatatgctcagt

SEQ ID NO: 310086 - DNA, 75 bp, synthetic construct
  source 1..75: mol_type = other DNA
actgactcctcattaagattgctggaggattcattagcattattgacgaaatttgagaataatctattttctggg

SEQ ID NO: 310087 - DNA, 75 bp, synthetic construct
  source 1..75: mol_type = other DNA
gtactcaatatggcagcaacattaccgttggtatttgatgctgagctaaacagtattcgcgagcggttgaacata

SEQ ID NO: 310088 - DNA, 75 bp, synthetic construct
  source 1..75: mol_type = other DNA
gagctaaacagtattcgcgagcggttgaacataatgaaagcgagtccacacaacaataatgtctggggggcgacg

SEQ ID NO: 310089 - DNA, 75 bp, synthetic construct
  source 1..75: mol_type = other DNA
ggatatcaacagagaacttgaaataatacagcatcatattaataagttcaactgtgagattagtgaattaaaaat

SEQ ID NO: 310090 - DNA, 75 bp, synthetic construct
  source 1..75: mol_type = other DNA
agttatattaccatatctaggttaaaaacaattgcttatgatatgaagaatacttttctgaagtatgacactcct

SEQ ID NO: 310091 - DNA, 75 bp, synthetic construct
  source 1..75: mol_type = other DNA
aaacagattcatggagtcgtcttagaaaaaaaatggatggttttgaagaaactctaaatacaattgaaaagaatc

SEQ ID NO: 310092 - DNA, 75 bp, synthetic construct
  source 1..75: mol_type = other DNA
gtggttagctaaagtatttgaactctatatggaagatagcaatcctgttccgataaaaatactggatgatattct

SEQ ID NO: 310093 - DNA, 75 bp, synthetic construct
  source 1..75: mol_type = other DNA
acctgacctgctgtgggtggctgattttacttacggtgtgcccggagttcagggcgggcatggatgcttaaatga

SEQ ID NO: 310094 - DNA, 75 bp, synthetic construct
  source 1..75: mol_type = other DNA
ggacgcggctacccgattggcgcagcgttcttctctgttggccgtttttacccagcactggtcggcaatgatatc

SEQ ID NO: 310095 - DNA, 75 bp, synthetic construct
  source 1..75: mol_type = other DNA
atgcacaacatctgcaactgttggttcatagcggctcgcggggggtgcccctattaagttgtcaagcatgttatg

SEQ ID NO: 310096 - DNA, 75 bp, synthetic construct
  source 1..75: mol_type = other DNA
gccctacgcgcgggtggtggaaagcacctggctacgtgatgtgctctcctggattctgccggcggtggccttctt

SEQ ID NO: 310097 - DNA, 75 bp, synthetic construct
  source 1..75: mol_type = other DNA
ctggggcgttatcagcgggttcaggaacattatcaacgtaaggagactcaggaaaatggcgattatcgctggtaa

SEQ ID NO: 310098 - DNA, 75 bp, synthetic construct
  source 1..75: mol_type = other DNA
ccggtcatgcgttaagcaagatggatctccgggaactggctcgaccgcgtttgacgcaactgatggataccaccg

SEQ ID NO: 310099 - DNA, 75 bp, synthetic construct
  source 1..75: mol_type = other DNA
cagccgatggatctgcaaacgctggcaggattaccaaaagcgttgtcggcgcagattaaagcattgctaggtaac

SEQ ID NO: 310100 - DNA, 75 bp, synthetic construct
  source 1..75: mol_type = other DNA
atatcgcttggcgtttacccaacgatcacccttgccgatgctcgttcccgtcgtgatgaagctcgaaaacttgtg

SEQ ID NO: 310101 - DNA, 75 bp, synthetic construct
  source 1..75: mol_type = other DNA
ttttggcagctttgttagggaaaaaaataagatgctttgataataattataaaaaaatagtcgttatatttcttg

SEQ ID NO: 310102 - DNA, 75 bp, synthetic construct
  source 1..75: mol_type = other DNA
atgtattctgaagaaaaaatcaagtttgtcgaaagttgtttgaatgagcctggagacattaccgaagaacaatta

SEQ ID NO: 310103 - DNA, 75 bp, synthetic construct
  source 1..75: mol_type = other DNA
gtcgctccaggagtacaccggcgatcctaaaaatccacttttacctccggcgattaccacccaggagcctaacat

SEQ ID NO: 310104 - DNA, 75 bp, synthetic construct
  source 1..75: mol_type = other DNA
atgtatgccgttttaggagagattgaatttaaggttgtcgcattctgggacggctttaaaagcacaatgggcgtg

SEQ ID NO: 310105 - DNA, 75 bp, synthetic construct
  source 1..75: mol_type = other DNA
tggcgagcagctgcacagcgatttgctggtgctgctgcgcgtttatctgggctggcgctgtcaggcccgtctgca

SEQ ID NO: 310106 - DNA, 75 bp, synthetic construct
  source 1..75: mol_type = other DNA
gagtctatcgaaatggttcgtcgatatgctcaccttgcacctaatcaccttaccgaacacgcacggcaaatagac

SEQ ID NO: 310107 - DNA, 75 bp, synthetic construct
  source 1..75: mol_type = other DNA
ttcataaggccagcaacatcagagaacgccagaattatattttgattattgatgaagttaatcgcgggaatattt

SEQ ID NO: 310108 - DNA, 75 bp, synthetic construct
  source 1..75: mol_type = other DNA
taaagagaaatcagtaaaaactcacacatcactgaatcagattctttttggcccccctggtactggtaaaaccta

SEQ ID NO: 310109 - DNA, 75 bp, synthetic construct
  source 1..75: mol_type = other DNA
gctgaggatacatatcattacctgaagagtataaactctccaagtatagattttctatttcaggatggaaattat

SEQ ID NO: 310110 - DNA, 75 bp, synthetic construct
  source 1..75: mol_type = other DNA
cgaccaccggggactgccgctggcgcttatcagcgaagacggcaatacggcgtggagcgcggaatatgatgaatg

SEQ ID NO: 310111 - DNA, 75 bp, synthetic construct
  source 1..75: mol_type = other DNA
taccgaacacgcacggcaaatagactcgatcctgaacccatcggtcccaaatttgtcccagtcaaaaaataagga

SEQ ID NO: 310112 - DNA, 75 bp, synthetic construct
  source 1..75: mol_type = other DNA
aggacttcaccgcgaccatcgagcgcatcgtggcgggcctggaaaagaagagccgcgtgctcaatcccaaggagc

SEQ ID NO: 310113 - DNA, 75 bp, synthetic construct
  source 1..75: mol_type = other DNA
cgcttcgccgagaaacagggcatgggcgggtttctcaacatcggtaagagccgcgccaaggtgttcgtggaaaag

SEQ ID NO: 310114 - DNA, 75 bp, synthetic construct
  source 1..75: mol_type = other DNA
tatcccgacaattttctgcataaccaacctgaaatagaccttattcgtcctgagttttcaacagcctggtatccg

SEQ ID NO: 310115 - DNA, 75 bp, synthetic construct
  source 1..75: mol_type = other DNA
tactcagcacctggcaggggttcgcatatgtggccttcatcattgatgtgttcgccggtgttatcgtgggctggc

SEQ ID NO: 310116 - DNA, 75 bp, synthetic construct
  source 1..75: mol_type = other DNA
cagataagccaaaacttttcccacacccaagcctagcgcgcacggaagatgggcagagtgattcatcagaaatgt

SEQ ID NO: 310117 - DNA, 75 bp, synthetic construct
  source 1..75: mol_type = other DNA
ccggggcggcggacgatctggcgcgagccaccgacatcgcccgcgacatgatcacccgctttggcatggacgagg

SEQ ID NO: 310118 - DNA, 75 bp, synthetic construct
  source 1..75: mol_type = other DNA
agcagtacggggtcggtggatttgcccctatatttccagacacctgttatcacttaatccattactggcctgctg

SEQ ID NO: 310119 - DNA, 75 bp, synthetic construct
  source 1..75: mol_type = other DNA
gtaagattaatatcaatatactctactagcaatggtatcaaaacggcacaagtttacggtggaggagaaggtttt

SEQ ID NO: 310120 - DNA, 75 bp, synthetic construct
  source 1..75: mol_type = other DNA
cattttcggtgattgtgctggggaagaacagctctgtacatggcggcgcttgaggcaccccggtttaatctggtg

SEQ ID NO: 310121 - DNA, 75 bp, synthetic construct
  source 1..75: mol_type = other DNA
gtgccagccagcaacgcgtttttacaaggtctgcgtgaattgtgtgaccgccacaatgccttgctgatttttgat

SEQ ID NO: 310122 - DNA, 75 bp, synthetic construct
  source 1..75: mol_type = other DNA
gctcaatgtcagcgaagaagaggtgacgaccggactggatcgctttgcagctgcttgcgaacactttgttagccg

SEQ ID NO: 310123 - DNA, 75 bp, synthetic construct
  source 1..75: mol_type = other DNA
aagcagatccgtctggtgcatgaggtgtggcgacacactgttaatcgcgtcatcctggacgcaacacatcagaac

SEQ ID NO: 310124 - DNA, 75 bp, synthetic construct
  source 1..75: mol_type = other DNA
ctctaacagcacagaacaaaaacaggtggcagaagaattttccactcttggttatacatattcactgaaacgcgg

SEQ ID NO: 310125 - DNA, 75 bp, synthetic construct
  source 1..75: mol_type = other DNA
gccgctggcgctcatcagcgaagacggcaatacggcgtggcgcggggagtatgatgaatggggcaaccagcttaa

SEQ ID NO: 310126 - DNA, 75 bp, synthetic construct
  source 1..75: mol_type = other DNA
aaaccgcaaagccaaaagaaaagccctataagctgaccgatggcggcggcatgtatctactgattaacgctaatg

SEQ ID NO: 310127 - DNA, 75 bp, synthetic construct
  source 1..75: mol_type = other DNA
ggacgttaagatgtcggctatccacaattcgctggaagtcggtgtgactttccttggaacagatattgatccaac

SEQ ID NO: 310128 - DNA, 75 bp, synthetic construct
  source 1..75: mol_type = other DNA
gaaactctcgaaatggttcaaagatacgcccacctttcagccgggcatctcaccgagcacgcgagcaaaatcgat

SEQ ID NO: 310129 - DNA, 75 bp, synthetic construct
  source 1..75: mol_type = other DNA
acttctttgtctttaacaatggtgtatcaatcctaacaacaaaattcaacaaagaaaaagggttgttggaaggag

SEQ ID NO: 310130 - DNA, 75 bp, synthetic construct
  source 1..75: mol_type = other DNA
gcggtagacgactatctggcttactgcgaggaacggggccgggagccgttgcgtccggccagcggaaaaatcagc

SEQ ID NO: 310131 - DNA, 75 bp, synthetic construct
  source 1..75: mol_type = other DNA
tccggcttgccgctgattctacgactgtttttctgttccggaatccgtcacgtcttcactctgtgctgcgcattc

SEQ ID NO: 310132 - DNA, 75 bp, synthetic construct
  source 1..75: mol_type = other DNA
attttgcaacatttaggatacagtaatgaggataacagcatcgaatctggttcaggcgatttcgagcttacccaa

SEQ ID NO: 310133 - DNA, 75 bp, synthetic construct
  source 1..75: mol_type = other DNA
acatccttcatgaaaggttaataaattcgattgaatacggagtcccgcaagaccgtgaacgcattattctgttgg

SEQ ID NO: 310134 - DNA, 75 bp, synthetic construct
  source 1..75: mol_type = other DNA
ctgtgtcagaaggggccgatgaatcgccttattcaaacgacggtacaacaactggcggtgaccgcaatcaatgta

SEQ ID NO: 310135 - DNA, 75 bp, synthetic construct
  source 1..75: mol_type = other DNA
acaatgaaatcaaagggaactattcaattaatcaggcaagagatatggtcggtaagaccattgcgtctattgata

SEQ ID NO: 310136 - DNA, 75 bp, synthetic construct
  source 1..75: mol_type = other DNA
gcagaattattttcagggatacggcacatcgctattaatattttaacgaatgataaggtattcaaggcagggtta

SEQ ID NO: 310137 - DNA, 75 bp, synthetic construct
  source 1..75: mol_type = other DNA
tcagcatcagaacctacgcagtgaattgcaatgacgcatggctaaacaccgaaggtgatgacatctccggctcat

SEQ ID NO: 310138 - DNA, 75 bp, synthetic construct
  source 1..75: mol_type = other DNA
aactaagaatctaacagtatcacgtgatgcagatgtatttgaacagatagcatttgattactcattgtcttcaat

SEQ ID NO: 310139 - DNA, 75 bp, synthetic construct
  source 1..75: mol_type = other DNA
gtgcactacacgcggacacaatatgaagagccgctggtcgaaagtcgctatctttacgacccgctgggccgcagg

SEQ ID NO: 310140 - DNA, 75 bp, synthetic construct
  source 1..75: mol_type = other DNA
atgtccacacttaaacccgccatcttctctttcttttccggctcaggttttctagatcttggcttcgaaaactca

SEQ ID NO: 310141 - DNA, 75 bp, synthetic construct
  source 1..75: mol_type = other DNA
atattagagcatttagggataaaagatgaatttaacagcaatgaatcttgtgaatgcgatagcaaatcttcccaa

SEQ ID NO: 310142 - DNA, 75 bp, synthetic construct
  source 1..75: mol_type = other DNA
gataggcaacgaatcatattgattggtttccttgatgaaaaatatgcaagtcagttcaattgggggcaaagagtc

SEQ ID NO: 310143 - DNA, 75 bp, synthetic construct
  source 1..75: mol_type = other DNA
gcgatgacaccgggttaagcagcagcgattttgttactcgcgacaccacgctgaccgtgcgcggcacgctcggcg

SEQ ID NO: 310144 - DNA, 75 bp, synthetic construct
  source 1..75: mol_type = other DNA
gccattggcaacaccggtagcagcaatcacaccattactgtcgatctcagcgccccggcgatgggcattaatatc

SEQ ID NO: 310145 - DNA, 75 bp, synthetic construct
  source 1..75: mol_type = other DNA
cgctatgagcagcagcgtttccatgacctgggccgatttcgatggtgacggcgatatggatctcttcctgccagc

SEQ ID NO: 310146 - DNA, 75 bp, synthetic construct
  source 1..75: mol_type = other DNA
gctaacgctctccggcagcacgtccggcgtcgaagcggggcaaaccgtcaccgtcacctttggcggcaaaaccta

SEQ ID NO: 310147 - DNA, 75 bp, synthetic construct
  source 1..75: mol_type = other DNA
cgacacggcaggcaacagtaattccgccagtcataatgtgctggtcaacagcgccttgcctgccgtcaccattaa

SEQ ID NO: 310148 - DNA, 75 bp, synthetic construct
  source 1..75: mol_type = other DNA
caactggagcgtcggcgttccgctgtcagatgtcactgcgcttggcagcggcccgcaaactatcactgcggcaat

SEQ ID NO: 310149 - DNA, 75 bp, synthetic construct
  source 1..75: mol_type = other DNA
gctgaatgccggagaaacctacagcgccgtgctgatcaaatccaccggcaccaccgccagcaatatcgaccagac

SEQ ID NO: 310150 - DNA, 75 bp, synthetic construct
  source 1..75: mol_type = other DNA
tggctaatgttaattttaataatgccaatttaagcaactgccatttcaactgttctgttttaacaaaagcctgga

SEQ ID NO: 310151 - DNA, 75 bp, synthetic construct
  source 1..75: mol_type = other DNA
atgttatcaatgacctgcaattctttgatcagcagattcgttgggccaaagccgacctggtacaaaacaagtcag

SEQ ID NO: 310152 - DNA, 75 bp, synthetic construct
  source 1..75: mol_type = other DNA
taccgcaggccgcatccccggcagaactgccgctttcccgtgtctggcggctttccggtcatatgcgtgacggta

SEQ ID NO: 310153 - DNA, 75 bp, synthetic construct
  source 1..75: mol_type = other DNA
ctgcggcagatctggccgcgctcgggcagggcgcgcagaccattaccgccagcgtgaacgatcgcgccggtaacc

SEQ ID NO: 310154 - DNA, 75 bp, synthetic construct
  source 1..75: mol_type = other DNA
aaaccgtcaccgtcacctttggcggcaaaacctacacctccacggtggcggctaacggtagctggagcaccaccg

SEQ ID NO: 310155 - DNA, 75 bp, synthetic construct
  source 1..75: mol_type = other DNA
gggcttgccagcggcgaagtggcgcagattagccttgatggcggcgcgacctggactacgctcaccaccaacggc

SEQ ID NO: 310156 - DNA, 75 bp, synthetic construct
  source 1..75: mol_type = other DNA
accaccgcctgggggctgacctacggcctcgactcgcacgggatgtggacggtgctggcaaaccagcaggtaatg

SEQ ID NO: 310157 - DNA, 75 bp, synthetic construct
  source 1..75: mol_type = other DNA
aatgtggtggtcgacaccaccagcccggaagcggcgaaaagtatcaccattaccggtatcagcgatgacaccgga

SEQ ID NO: 310158 - DNA, 75 bp, synthetic construct
  source 1..75: mol_type = other DNA
cgttccagcggcagatctggcaactctgccagacggcgcggcgaacgtgcaggccagtgtcagcagcgcgagcgg

SEQ ID NO: 310159 - DNA, 75 bp, synthetic construct
  source 1..75: mol_type = other DNA
cgattttgtcaccagcgacacgacgcttgcggtgagcggcacgctgggcgcggcgctttctgctggtgagttcgc

SEQ ID NO: 310160 - DNA, 75 bp, synthetic construct
  source 1..75: mol_type = other DNA
taccagaccacggtgcaggcagacggcagctggagcttaacgctgcccgccagcgacttaaccgcgcttgccaat

SEQ ID NO: 310161 - DNA, 75 bp, synthetic construct
  source 1..75: mol_type = other DNA
tggcggatggctcatggagcgtcggcgttccggcggtggatgtcagcgcctggcctgcggggacggtcacgatta

SEQ ID NO: 310162 - DNA, 75 bp, synthetic construct
  source 1..75: mol_type = other DNA
aaccgggcggtgcggtggtggtcgatccggcgcacaacacctggtatgtacagttgccggataccgacgcgctgg

SEQ ID NO: 310163 - DNA, 75 bp, synthetic construct
  source 1..75: mol_type = other DNA
atcaccagcgatgatgtgattaacgccgccgaaaaaggcgcggcgctaacgctctccggcagcacgtccggcgtc

SEQ ID NO: 310164 - DNA, 75 bp, synthetic construct
  source 1..75: mol_type = other DNA
aacggttaatgccttggtgaccaacgccgttggcaacaccggtagcggcacgcgcgatatcaccatcgatgccag

SEQ ID NO: 310165 - DNA, 75 bp, synthetic construct
  source 1..75: mol_type = other DNA
accacctacgccagccagtttagcgtggcggtggactggaaccacgacggcctgatggatatcgcccgtatcgcc

SEQ ID NO: 310166 - DNA, 75 bp, synthetic construct
  source 1..75: mol_type = other DNA
ctatctctatcaggtgcgggtgattgacgcagcgggcaacgtcggtgccaccgacagccagaatgtggtgatcga

SEQ ID NO: 310167 - DNA, 75 bp, synthetic construct
  source 1..75: mol_type = other DNA
cggcagcggcggaagctggtcggtgtttattccggcgcagcagtttgccggattaagcgacggcagctacaccat

SEQ ID NO: 310168 - DNA, 75 bp, synthetic construct
  source 1..75: mol_type = other DNA
ccgcaacaccaacacggtgagctacggcacttcgctgcacctgcgcatcaccgatcctaacggcattaacgtcta

SEQ ID NO: 310169 - DNA, 75 bp, synthetic construct
  source 1..75: mol_type = other DNA
gcagcctggattcggcgactcaccgcaatgccgcgattcgactgctggccttaccgatcagcacgacgggtaaag

SEQ ID NO: 310170 - DNA, 75 bp, synthetic construct
  source 1..75: mol_type = other DNA
aaccaatgctgacgaccccagggcagtggatatgggcaaccccgatattggcgtgctggtgaaagattccagcgg

SEQ ID NO: 310171 - DNA, 75 bp, synthetic construct
  source 1..75: mol_type = other DNA
atgaaagcggcaatagcattatctttattaggatgcgtattcggattttctggcaaggcattggccggaggttcc

SEQ ID NO: 310172 - DNA, 75 bp, synthetic construct
  source 1..75: mol_type = other DNA
aaagctgaggccactctcaaagttgaacaggagtcaagatcccaagtgcagaatgaattgattattgaaaaagag

SEQ ID NO: 310173 - DNA, 75 bp, synthetic construct
  source 1..75: mol_type = other DNA
actcctctttccgccaagcatctcttgagcgggtgaaaagcccgttccttggggcatttgttttttcctggcttt

SEQ ID NO: 310174 - DNA, 75 bp, synthetic construct
  source 1..75: mol_type = other DNA
caccccaaatacatacttaaaaataaataaaaatgcatgggagcatttagttagtttaaatttaagtctaaagga

SEQ ID NO: 310175 - DNA, 75 bp, synthetic construct
  source 1..75: mol_type = other DNA
ggacgcaatgatcgcactaagccgatctcaaaggaaagcattaatcaggtgatcgagttattaggatacaaagga

SEQ ID NO: 310176 - DNA, 75 bp, synthetic construct
  source 1..75: mol_type = other DNA
gtcagcgccgtcagggtaatatttgctcctgatatcgcctcaccatcaggagatttcagcgtccccgaaacaaca

SEQ ID NO: 310177 - DNA, 75 bp, synthetic construct
  source 1..75: mol_type = other DNA
agctgttgactctattgctggtaccgggttaatcaccaaaacaggttccggcgatctggtacttaatgcagataa

SEQ ID NO: 310178 - DNA, 75 bp, synthetic construct
  source 1..75: mol_type = other DNA
tgtggatgtcggtgtttccgaagccgcaaaaaacgtcgcagggacggttttacaggatgtagtgaactggtctaa

SEQ ID NO: 310179 - DNA, 75 bp, synthetic construct
  source 1..75: mol_type = other DNA
tgtggatgttggtatacctgatgcggcaaaaaacgtcgcaggaacggttttaccggatgtccttaactggtctaa

SEQ ID NO: 310180 - DNA, 75 bp, synthetic construct
  source 1..75: mol_type = other DNA
acatcctcaaaggggccgcgaaagcggcgggctatgctggcggtcgtggcattaaatgcgaagagatagccgccg

SEQ ID NO: 310181 - DNA, 75 bp, synthetic construct
  source 1..75: mol_type = other DNA
taggtgtttgtatttttgtttgtttcaggttgcgaaacaacctttttcatggaccaaaatggcgttatttgcttg

SEQ ID NO: 310182 - DNA, 75 bp, synthetic construct
  source 1..75: mol_type = other DNA
ctgacttcgccgttgatgttgtccggcacattgatgttgctgactgcattgttggttactgcaaaggtgaaaatg

SEQ ID NO: 310183 - DNA, 75 bp, synthetic construct
  source 1..75: mol_type = other DNA
atgacagcgctcgcggcgtggtgtgtggcttaagccgtggcgtaaagcgcgcgcatttgattcgtgccgcactgg

SEQ ID NO: 310184 - DNA, 75 bp, synthetic construct
  source 1..75: mol_type = other DNA
ccccgctattttccgcttccaagatgcgttggctactggaatctacacctgagggtgtgcaacttgccgaccagg

SEQ ID NO: 310185 - DNA, 75 bp, synthetic construct
  source 1..75: mol_type = other DNA
cctgcacccggcacataaaacgccggataacgccattcttgccagcagcctggtactgtttaccggggtggttat

SEQ ID NO: 310186 - DNA, 75 bp, synthetic construct
  source 1..75: mol_type = other DNA
tgcgaatcctgttgctgtatgtcggctcattgaccgttctgctgctcgttctcccctggcagcaggcaggtgtca

SEQ ID NO: 310187 - DNA, 75 bp, synthetic construct
  source 1..75: mol_type = other DNA
gctttatcaccggctggacctactggctggccttcctgattggcccggcgtcggaagccatcgctgcaggcacct

SEQ ID NO: 310188 - DNA, 75 bp, synthetic construct
  source 1..75: mol_type = other DNA
tggttttctcccttatgtccgtattggtcgaactgacgcctataattcagaaagtaatgactatttttaccgcgc

SEQ ID NO: 310189 - DNA, 75 bp, synthetic construct
  source 1..75: mol_type = other DNA
gcatttctttgcttacgactatgcctacaatagtaaatgcaatgcaagtgggagggccaaaagattttaacctgg

SEQ ID NO: 310190 - DNA, 75 bp, synthetic construct
  source 1..75: mol_type = other DNA
cgcaggggatctaattcattcgattctgtcttgtgttcctaaggaggatggctgggcgtttcagaacatactcga

SEQ ID NO: 310191 - DNA, 75 bp, synthetic construct
  source 1..75: mol_type = other DNA
tggaattgctggttttattattcctgattcattattttcacatgacagatttttgttaagaaaacatttgctcaa

SEQ ID NO: 310192 - DNA, 75 bp, synthetic construct
  source 1..75: mol_type = other DNA
aaaaggttaagagtctttctagagaagagtgaaaaagtaccaaacgatttagacgctgagttggagcgtatggtt

SEQ ID NO: 310193 - DNA, 75 bp, synthetic construct
  source 1..75: mol_type = other DNA
ttacgcaattagtgaaaagagtcacggcagagaagaaatccgtcttcatattgtttgcgatgtccctgatgaact

SEQ ID NO: 310194 - DNA, 75 bp, synthetic construct
  source 1..75: mol_type = other DNA
gtgagcagcgatgactggaatatcacgatccgtgaagatgggaaagtaacaccggcatcgcaccagcacagtgag

SEQ ID NO: 310195 - DNA, 75 bp, synthetic construct
  source 1..75: mol_type = other DNA
aaagactttatgtatatttgcacgctttgctgttttgccgaggaggttaaaggtgattattctcattacaggacc

SEQ ID NO: 310196 - DNA, 75 bp, synthetic construct
  source 1..75: mol_type = other DNA
tatacatagaaacacagttaaaaattgcaaaagattttttagacctggagaagaagtatcaagttctattgcaag

SEQ ID NO: 310197 - DNA, 75 bp, synthetic construct
  source 1..75: mol_type = other DNA
acaaaacgacatctttacctgttgagctagatgcactaaataataaagatatctcttatgccaaagatttttctt

SEQ ID NO: 310198 - DNA, 75 bp, synthetic construct
  source 1..75: mol_type = other DNA
ctggaaaaagatatccagctggtttatgggaccgccaataatacgaaaatcaatcctggcggagaacagcatata

SEQ ID NO: 310199 - DNA, 75 bp, synthetic construct
  source 1..75: mol_type = other DNA
aaatcaaagacaagaaaaaatcaatggaagaaaccattgctcgatggttggcggcgcaaaaaatccgccgagcgt

SEQ ID NO: 310200 - DNA, 75 bp, synthetic construct
  source 1..75: mol_type = other DNA
atataagccatcagaacttgagtttgtgttgctgtcaggtttaggcagtgcgtggcctcttgtccgaggacatga

SEQ ID NO: 310201 - DNA, 75 bp, synthetic construct
  source 1..75: mol_type = other DNA
gaagtcattgctcgcgagtggcatcagtctaaagcagatcgctggtccctacgctaccgtgcagaaatcattgac

SEQ ID NO: 310202 - DNA, 75 bp, synthetic construct
  source 1..75: mol_type = other DNA
ctggaattaatggcagttgctctggctgtcgaaaacctcactatgcaaaaaaacgttgctttgttgtgccaacaa

SEQ ID NO: 310203 - DNA, 75 bp, synthetic construct
  source 1..75: mol_type = other DNA
tccttggactcagtgaacaaaaacaagcaataactacggcagtaacctccattgaaaaggctctggaaattaacc

SEQ ID NO: 310204 - DNA, 75 bp, synthetic construct
  source 1..75: mol_type = other DNA
cttgttttttatgtatattatactatgttctaaatctaactcacgatacgctaaattaaggaaaattatttttgg

SEQ ID NO: 310205 - DNA, 75 bp, synthetic construct
  source 1..75: mol_type = other DNA
aataagcattcattcccctgctggcgtgaagattaacgcctttgagcttctgcaatgcctgcccgtagaagaaca

SEQ ID NO: 310206 - DNA, 75 bp, synthetic construct
  source 1..75: mol_type = other DNA
gaactgctgcgctgggccgggaaaaccgactggcagaaggcgctactgcgcgcctggtatcacgccgtactgcgc

SEQ ID NO: 310207 - DNA, 75 bp, synthetic construct
  source 1..75: mol_type = other DNA
tttaagaacgcatggtgccgtggataccagcaaagcggatgtttcgctcgatggtagctcatggaccatcattgc

SEQ ID NO: 310208 - DNA, 75 bp, synthetic construct
  source 1..75: mol_type = other DNA
atggatgacaaaccattgcaggctctggctaataaattcaaaacaccggttcaagacagtcagcgtaatggcttc

SEQ ID NO: 310209 - DNA, 75 bp, synthetic construct
  source 1..75: mol_type = other DNA
gcaaaactgggacgggaaatcagttttacaattaggctctgttggacgcctgcatgaagttaaaaattacgctgg

SEQ ID NO: 310210 - DNA, 75 bp, synthetic construct
  source 1..75: mol_type = other DNA
tatgggcaaaatgtgcggcagtatgtattagcgaagttcagccatgaaaattttgtccagtctgcaatcaacatc

SEQ ID NO: 310211 - DNA, 75 bp, synthetic construct
  source 1..75: mol_type = other DNA
aatgacaataatcgttcagtcattaagttaacactcccgttgtcactgctgaaagaaactgatggaaagcagcgt

SEQ ID NO: 310212 - DNA, 75 bp, synthetic construct
  source 1..75: mol_type = other DNA
gtttgtatgacatgtataagataaagcataaactaaaagattatctaaatgaaaaagttggttttgaatgtggta

SEQ ID NO: 310213 - DNA, 75 bp, synthetic construct
  source 1..75: mol_type = other DNA
aagaaaaaaaaggaataaagaattagatgatttatttaagacttggtttgaactgtattttaacaatataaggcg

SEQ ID NO: 310214 - DNA, 75 bp, synthetic construct
  source 1..75: mol_type = other DNA
aaccggctttaaagataccctagtctggagcaaactctacaaattccagaaagacggagtgctgggtgcaataga

SEQ ID NO: 310215 - DNA, 75 bp, synthetic construct
  source 1..75: mol_type = other DNA
atgttggtgggtaaggtagtggtttctgagggcgcttcttttagaacgcatggtgccgtggataccagcaaagcg

SEQ ID NO: 310216 - DNA, 75 bp, synthetic construct
  source 1..75: mol_type = other DNA
cgacgctggaaccctggctgaaagccgccgtgcgtcaggaatacgccgattctaaccaggtgaaagttaatgacg

SEQ ID NO: 310217 - DNA, 75 bp, synthetic construct
  source 1..75: mol_type = other DNA
aataaccggggtaattaaaggaaaagcttacttcaggacatggtcgccaaatgtaaagtttgaagggaaatgcgt

SEQ ID NO: 310218 - DNA, 75 bp, synthetic construct
  source 1..75: mol_type = other DNA
gattggatatatgcccatgagttcgggcattgctttggtttacctgatgaatatgcttatgatccagcaggtgga

SEQ ID NO: 310219 - DNA, 75 bp, synthetic construct
  source 1..75: mol_type = other DNA
aaagacgtcaataaaaccatccggcggctatccctggcgggttattcgccgttgaaattcgtgcgcgaagccaaa

SEQ ID NO: 310220 - DNA, 75 bp, synthetic construct
  source 1..75: mol_type = other DNA
cacatcatttagataacaaacaggtgtataaaatcctgagtgccaaaagtagatcgtccagccatgttttatact

SEQ ID NO: 310221 - DNA, 75 bp, synthetic construct
  source 1..75: mol_type = other DNA
gctagttatgaaagcatattttgacaagatggaatcaaatggcatcagtgttatggcagccatattattggtgga

SEQ ID NO: 310222 - DNA, 75 bp, synthetic construct
  source 1..75: mol_type = other DNA
tatttttaacgcattacccactctgtttaatacgtttaaattcgataaaaaaaaatatgaagcccctcctcctgg

SEQ ID NO: 310223 - DNA, 75 bp, synthetic construct
  source 1..75: mol_type = other DNA
ggtgaaaaatttattaccggatatcgatattccggcggatgaagtgacggtgagcggttatgttctggaggtgca

SEQ ID NO: 310224 - DNA, 75 bp, synthetic construct
  source 1..75: mol_type = other DNA
aaaagagtgctgagtttttatctgacggataaacaggagccgcgccgtttttttaaaacctattttcagcacctg

SEQ ID NO: 310225 - DNA, 75 bp, synthetic construct
  source 1..75: mol_type = other DNA
gaagaagtcaatttagaaaaaggaatatgggaaataccagcagaacgcatgaaaatgcgtcgtcctcaccttgta

SEQ ID NO: 310226 - DNA, 75 bp, synthetic construct
  source 1..75: mol_type = other DNA
atgcatcccgaaaaccggccttatctgcgcgcactttatgcagcaattctcgcaaatgtgcacttacagcgtcat

SEQ ID NO: 310227 - DNA, 75 bp, synthetic construct
  source 1..75: mol_type = other DNA
gaaacgcagctagcacatgtggataagaacgcgatacgtgggacttacaaccatgcgcagtatttggaggggcgg

SEQ ID NO: 310228 - DNA, 75 bp, synthetic construct
  source 1..75: mol_type = other DNA
aatgaagtaggtattgatgtcgagactggtaaaactttggtccgcgttaatccgaaattctatcgtcctgctgag

SEQ ID NO: 310229 - DNA, 75 bp, synthetic construct
  source 1..75: mol_type = other DNA
tggtaatgcggatatcgttgagactattttcaattcattgtcagaaacaggatatgaagggttactctcgaaaaa

SEQ ID NO: 310230 - DNA, 75 bp, synthetic construct
  source 1..75: mol_type = other DNA
atggctacgatcctcgccccttcacatcctcaatttatatttgtttttgccgccattcgtcgtgcagaacgtaaa

SEQ ID NO: 310231 - DNA, 75 bp, synthetic construct
  source 1..75: mol_type = other DNA
gtcaaaaaataatggcgatcattaatccaataaaacatttgaatgaggagtctatgaatgttaccaattatcaga

SEQ ID NO: 310232 - DNA, 75 bp, synthetic construct
  source 1..75: mol_type = other DNA
caaaaacatcatccttttctcactgcagaagaattaccttacttcgtcagagatcttgaagcttacacgggcagt

SEQ ID NO: 310233 - DNA, 75 bp, synthetic construct
  source 1..75: mol_type = other DNA
actacataataactttcatttattagaacattttacaaatccttcagtggagttgcagtggttactgttacacag

SEQ ID NO: 310234 - DNA, 75 bp, synthetic construct
  source 1..75: mol_type = other DNA
tatggtggaactattgtttttaataatgattgggaaattgactgggatatttataacaaatccaaaaaagaacat

SEQ ID NO: 310235 - DNA, 75 bp, synthetic construct
  source 1..75: mol_type = other DNA
gcagccaaaaaatcagaaaccaacgcgaaaaatagcgaggcagcagcaaagagcagcgaaaccaacgctaaagcc

SEQ ID NO: 310236 - DNA, 75 bp, synthetic construct
  source 1..75: mol_type = other DNA
tgccgtatttatcaaataaacgcctacttgctgagatgagtatcgctcttgtcatggcgatcgttgccacgctga

SEQ ID NO: 310237 - DNA, 75 bp, synthetic construct
  source 1..75: mol_type = other DNA
tatgcaacattgcgtaggccagtttgatgatcgaaaaaatcttaccggtggttatggtgagtattatgcaaatca

SEQ ID NO: 310238 - DNA, 75 bp, synthetic construct
  source 1..75: mol_type = other DNA
tttctccagcctgtggaaacgctgtcgttatgcctggtatacctttcgtattccagctagcgaattacccggcca

SEQ ID NO: 310239 - DNA, 75 bp, synthetic construct
  source 1..75: mol_type = other DNA
gccaacctgtgccagaggtagttactcaactactcgaactggagttagcaggatggatcgcagctgtacccggcg

SEQ ID NO: 310240 - DNA, 75 bp, synthetic construct
  source 1..75: mol_type = other DNA
gttactggcagatatgagccgtattgcagcgaatgtgatactggaaatctgccgccaggcggatgtggatccggg

SEQ ID NO: 310241 - DNA, 75 bp, synthetic construct
  source 1..75: mol_type = other DNA
ctttatttcggcattaaagatctcgatcccattgaatccaattatattatattataaatatagtttgttattttt

SEQ ID NO: 310242 - DNA, 75 bp, synthetic construct
  source 1..75: mol_type = other DNA
tagcgccctcggtcatgcatatttactgccttttggtaataaaaacgaaaagagcggtaaaaaaacgttcagcta

SEQ ID NO: 310243 - DNA, 75 bp, synthetic construct
  source 1..75: mol_type = other DNA
ctggcggaggtgttgcaggaggacacgggtgtgacgctaccggcggagctgtcggtgatgctggggaggctggag

SEQ ID NO: 310244 - DNA, 75 bp, synthetic construct
  source 1..75: mol_type = other DNA
tcctgctctacgtacgttattccgccgccggatggcagggtgacatggatttaccgccgcagccgctgatacctt

SEQ ID NO: 310245 - DNA, 75 bp, synthetic construct
  source 1..75: mol_type = other DNA
atgcctatactattttagtgaataaccgaaaatacggcgatagtcgcgtacgttccccggcaaaagaacccttta

SEQ ID NO: 310246 - DNA, 75 bp, synthetic construct
  source 1..75: mol_type = other DNA
ttagtcattgaaaaactatcaccaattcactacggtcgttatgtcgatgatatgttccttgtaatacgcgataca

SEQ ID NO: 310247 - DNA, 75 bp, synthetic construct
  source 1..75: mol_type = other DNA
tggacacgtccacttttctaatcctaaacgagcagccgaccatttatttaataattttgatctgataccagagtt

SEQ ID NO: 310248 - DNA, 75 bp, synthetic construct
  source 1..75: mol_type = other DNA
tgaccgcaattcagatatcaaaggttgggttcggaccgatgatttgtcaccttatgaagcttgtctgattcgaac

SEQ ID NO: 310249 - DNA, 75 bp, synthetic construct
  source 1..75: mol_type = other DNA
ggcctgtttgaaaatgaaaaaatatcttctgtcgatggaaatgaatggacatcagagcgacgattttctgttgta

SEQ ID NO: 310250 - DNA, 75 bp, synthetic construct
  source 1..75: mol_type = other DNA
agtgcttatggcagccttgtttttttattagggatcactgcattaattgagttaaggaaaattagaacaaataat

SEQ ID NO: 310251 - DNA, 75 bp, synthetic construct
  source 1..75: mol_type = other DNA
gcccgtcactgaaaagcgtcgataacaccttattgttgattcagatggttgccgcgcggatgggtattgccgcgc

SEQ ID NO: 310252 - DNA, 75 bp, synthetic construct
  source 1..75: mol_type = other DNA
gacccgcagcccgcgttgcaacagggcgagctggatctggtgatgacctccgatatcctgccgcgcagtggcctg

SEQ ID NO: 310253 - DNA, 75 bp, synthetic construct
  source 1..75: mol_type = other DNA
acagcctgaactttaccagcttgccgcacagtaatttctggcagttctaccaagcctttatgtgccgtgtacaag

SEQ ID NO: 310254 - DNA, 75 bp, synthetic construct
  source 1..75: mol_type = other DNA
tcctggcactgggcatcaatatcgaaggtcagaaagaactgccaggtatgtggctggccgaaaatgaaggcgaag

SEQ ID NO: 310255 - DNA, 75 bp, synthetic construct
  source 1..75: mol_type = other DNA
aatggcattcagacaagtgcaaataaatactacattcataaagaaatcaaatctgaaaatggttttatttatttt

SEQ ID NO: 310256 - DNA, 75 bp, synthetic construct
  source 1..75: mol_type = other DNA
aaatctgcttataagcaattcgataaatactttttatttattgagcgttcaatacaaattcttaaagatcacggc

SEQ ID NO: 310257 - DNA, 75 bp, synthetic construct
  source 1..75: mol_type = other DNA
ccgtggagaagtttcatggtgctgtggttgatcatgtcggtcatctggagacgcgtaccgggcgcgaagtcatac

SEQ ID NO: 310258 - DNA, 75 bp, synthetic construct
  source 1..75: mol_type = other DNA
agatctagctgggtacactggtagcattattaccaagacggcaacccaaatcatcatgcttacaggtgtacgaac

SEQ ID NO: 310259 - DNA, 75 bp, synthetic construct
  source 1..75: mol_type = other DNA
attctgcaatttcgggacgttacactgtctccgcaccttataaagcgggtgccgggattggaaccccggaattgc

SEQ ID NO: 310260 - DNA, 75 bp, synthetic construct
  source 1..75: mol_type = other DNA
tgaacagccgttcaaagttgcacgaggaatctttatggatttgtggttgctcgcgaatgacgaaagctgtctgcg

SEQ ID NO: 310261 - DNA, 75 bp, synthetic construct
  source 1..75: mol_type = other DNA
tatcttgctttatctgaccatgcacgcctgtttggatttaccgctgaagatattatggatttttggcaacacaaa

SEQ ID NO: 310262 - DNA, 75 bp, synthetic construct
  source 1..75: mol_type = other DNA
tccagcacttccgaaagaacagctattgatgttaaaaggatctgtggatgaaataacccctccattatcacctgc

SEQ ID NO: 310263 - DNA, 75 bp, synthetic construct
  source 1..75: mol_type = other DNA
ggtggtgatgatatttccttgttgaaacagcaatttgatgcgggtgaaagttccggtaataaatattactcagtg

SEQ ID NO: 310264 - DNA, 75 bp, synthetic construct
  source 1..75: mol_type = other DNA
gctattgggctttttttattttaaaagaggcgtttagtgttgcagctttatctatgcttatcgtttcttatattc

SEQ ID NO: 310265 - DNA, 75 bp, synthetic construct
  source 1..75: mol_type = other DNA
atggggaaagagaaaatccttctccgctgatctatgacaagcataaaaagcactgtatttttcgtacaaagacat

SEQ ID NO: 310266 - DNA, 75 bp, synthetic construct
  source 1..75: mol_type = other DNA
gcccccatcccttgcgcagtttatgcttatcgatcaggacacacacgatatcaaacggaatgatgggcgcttatt

SEQ ID NO: 310267 - DNA, 75 bp, synthetic construct
  source 1..75: mol_type = other DNA
cctatgagcagatgtacctgctgaatcagcagctgatctgcaacgctgaccagttcaaacatgccgttatcacag

SEQ ID NO: 310268 - DNA, 75 bp, synthetic construct
  source 1..75: mol_type = other DNA
ggcaatactggctggcgcgatatcagacgccgcatcatcgtttacagtccggcattgatgccgtgcttcatgtac

SEQ ID NO: 310269 - DNA, 75 bp, synthetic construct
  source 1..75: mol_type = other DNA
aacggcaaaggtctggcgaaaaaatgggtcgagatgttcaacgaaacccgcgagcgcttccagacggaaattgca

SEQ ID NO: 310270 - DNA, 75 bp, synthetic construct
  source 1..75: mol_type = other DNA
cgaaaattataggtggccgtttcacgtttacgccgttccagtcattagaattaggtgcgtcacgcattatgcagt

SEQ ID NO: 310271 - DNA, 75 bp, synthetic construct
  source 1..75: mol_type = other DNA
tcgacctggccgctaagtcaggaagagatcgcccgggcgctaaaaaaggctaaaccttcctattcttctgagcaa

SEQ ID NO: 310272 - DNA, 75 bp, synthetic construct
  source 1..75: mol_type = other DNA
ctaaaggacgcggaaaatgggtgctacgctacgtcagccctgtcactcagaaacgacgtaatgccggtcttggct

SEQ ID NO: 310273 - DNA, 75 bp, synthetic construct
  source 1..75: mol_type = other DNA
cctgtatggcgtattgaccgccgcgctattccatgtctgggcgctgatcgctgccgatcttggtgctaaaaataa

SEQ ID NO: 310274 - DNA, 75 bp, synthetic construct
  source 1..75: mol_type = other DNA
taaaaaagccagtgcgccaaaagataccatttatcacgccaaagacgcggtacaagcaaccaagcctgatatgcg

SEQ ID NO: 310275 - DNA, 75 bp, synthetic construct
  source 1..75: mol_type = other DNA
catgatacgcgtactaatatgagccggaccaattacagctataaccatcacatctataaagatggttattaccaa

SEQ ID NO: 310276 - DNA, 75 bp, synthetic construct
  source 1..75: mol_type = other DNA
atttacaccgtttcagtcattagaattaggcgcatcgcgtattatgcagtggggaggggaagggcgccctgaatc

SEQ ID NO: 310277 - DNA, 75 bp, synthetic construct
  source 1..75: mol_type = other DNA
ttttggccaagtaccacagtggtgggggcctggctatgaaggtagcctgattcgcggggatgcaatgcgaccgat

SEQ ID NO: 310278 - DNA, 75 bp, synthetic construct
  source 1..75: mol_type = other DNA
tgagccgaaccaattacagctatacccatcatatctataccgatggttattaccagcagggctatccgctgggtg

SEQ ID NO: 310279 - DNA, 75 bp, synthetic construct
  source 1..75: mol_type = other DNA
gagcaggcggcgccggaaacctggtggttacgctgggtggggccatggcagtaccagatatccgccagccagatg

SEQ ID NO: 310280 - DNA, 75 bp, synthetic construct
  source 1..75: mol_type = other DNA
ggctgcgctgggtgggtccatggcagtaccagatctctgccagccagatgaatcagtacaccggtgtgccgcatg

SEQ ID NO: 310281 - DNA, 75 bp, synthetic construct
  source 1..75: mol_type = other DNA
catcgtacggacctgttgaatgaacgacggccgatgatgcaggcatgggcagattacgttatgtctgcggtctct

SEQ ID NO: 310282 - DNA, 75 bp, synthetic construct
  source 1..75: mol_type = other DNA
gacgccacgggataatgttacgccagttaaactcgaaggggcggtccggattaccgatagcgcgacattgactct

SEQ ID NO: 310283 - DNA, 75 bp, synthetic construct
  source 1..75: mol_type = other DNA
cggcggtttcgttgatcttgggacctatgagtatgtcctgaaaagtgacggcaacagcaactggaacctgaccaa

SEQ ID NO: 310284 - DNA, 75 bp, synthetic construct
  source 1..75: mol_type = other DNA
gttaacaataaagattttagtagagttgatgatgaaatccttttagagttttatggctttgaaaccgataataaa

SEQ ID NO: 310285 - DNA, 75 bp, synthetic construct
  source 1..75: mol_type = other DNA
gacagtcctgaggctgtgatagccaaaataaacctggtggcgcgctatattgaaacatttgttgttcgtcgttct

SEQ ID NO: 310286 - DNA, 75 bp, synthetic construct
  source 1..75: mol_type = other DNA
cgttatgcccattggcatatatgaataaccctaatttcaatcagttgagaaatgtattcggattgcctttcaaac

SEQ ID NO: 310287 - DNA, 75 bp, synthetic construct
  source 1..75: mol_type = other DNA
tggatctatcgtctcatcagtgatgggcgttttcctcagccagtgaagattggattgcgtgctgttgcctttgtc

SEQ ID NO: 310288 - DNA, 75 bp, synthetic construct
  source 1..75: mol_type = other DNA
accattgccccatgggggaattacaggactgactcttcatccttcttcagtaaaggggaggggtaaatgggtttt

SEQ ID NO: 310289 - DNA, 75 bp, synthetic construct
  source 1..75: mol_type = other DNA
ctggtacgccatcgtcggcgttgtcgcgttgatgccgcccgttgcggcgggtcttgcgacgttcattgcgcccaa

SEQ ID NO: 310290 - DNA, 75 bp, synthetic construct
  source 1..75: mol_type = other DNA
gtgcgccttggcaaagcattacaaccgctgctcggttcaatgctgatcccgttcgttactctgctggttttcggc

SEQ ID NO: 310291 - DNA, 75 bp, synthetic construct
  source 1..75: mol_type = other DNA
attatgagattatagaaagaaatctactaaaaacagagtcagataaaaacatccctgaaataaatcttgccctta

SEQ ID NO: 310292 - DNA, 75 bp, synthetic construct
  source 1..75: mol_type = other DNA
gatcctcaaaaaaagaggccacaccagacgatattcgccatgccgacgggatgccggaaatcaacatcaacgaaa

SEQ ID NO: 310293 - DNA, 75 bp, synthetic construct
  source 1..75: mol_type = other DNA
tccacatgctgaccgttgtgaacacagaaagccaggagacatggaaatggacggaaagaatcgggcagcatcctc

SEQ ID NO: 310294 - DNA, 75 bp, synthetic construct
  source 1..75: mol_type = other DNA
tgggcggggatggtcaactcatcgccggtaagattgggcttattacagaagataatcagcgctggagcacgcgtt

SEQ ID NO: 310295 - DNA, 75 bp, synthetic construct
  source 1..75: mol_type = other DNA
tttttgtactaagtaattcgcattttatgtttaaaaatttagatattcctcattacctgaagctgttttttattg

SEQ ID NO: 310296 - DNA, 75 bp, synthetic construct
  source 1..75: mol_type = other DNA
attctatttgagacattctaggcatgacagggcgttagaattgtcatttattgattcagcggcgaaatatataaa

SEQ ID NO: 310297 - DNA, 75 bp, synthetic construct
  source 1..75: mol_type = other DNA
gaagtctctggccttgggccagcctatgcttccctggaaaacagacaggcaacagttcgattacgtaaaagcgaa

SEQ ID NO: 310298 - DNA, 75 bp, synthetic construct
  source 1..75: mol_type = other DNA
atagtgaatgacctgtttgcctggcctgaagagcaggagccgtgctgtccgcccgacggaccactaaacaaagcg

SEQ ID NO: 310299 - DNA, 75 bp, synthetic construct
  source 1..75: mol_type = other DNA
taaaaaatgcgaatcgctggccgggatgcaacgttccctgtttgaagaggatgttgacgcggatatcgcagaaat

SEQ ID NO: 310300 - DNA, 75 bp, synthetic construct
  source 1..75: mol_type = other DNA
acacaccattaaaagttcacctaacgcctataaataaaatacaaaagcaatactataactacagtaaaatatgta

SEQ ID NO: 310301 - DNA, 75 bp, synthetic construct
  source 1..75: mol_type = other DNA
ggactgtttcagcatggtgatgccagtctgcatcagcacctgctgtttggtcatattggacgcttccgtcgcgta

SEQ ID NO: 310302 - DNA, 75 bp, synthetic construct
  source 1..75: mol_type = other DNA
agccgcaaagcaacaggaagcggatgttgcattccaaaaagaatatgcggcagccatccagtcaggtgatcgaca

SEQ ID NO: 310303 - DNA, 75 bp, synthetic construct
  source 1..75: mol_type = other DNA
cgacatgattataacttgggcagaaactggaaagttgaacgctcaagattttgcagcgacctttatacagtctgt

SEQ ID NO: 310304 - DNA, 75 bp, synthetic construct
  source 1..75: mol_type = other DNA
tgggggtggacatctctgaagagtcaatcgagcgtgcaaagaaactttttgggaaatatgatgtagaatatattg

SEQ ID NO: 310305 - DNA, 75 bp, synthetic construct
  source 1..75: mol_type = other DNA
cgcagggcgaacacgacatttttcagatacgactggatgaggcgcacgaggcacgattcctctgccgctatatca

SEQ ID NO: 310306 - DNA, 75 bp, synthetic construct
  source 1..75: mol_type = other DNA
ctgccgcagaaagcacaacaccgcccgcaggcggtgttgttcgtagtccgaataaggcgtttacgccgcatccgg

SEQ ID NO: 310307 - DNA, 75 bp, synthetic construct
  source 1..75: mol_type = other DNA
ttctggaaacggcaaaacgtaatggtctggagccacatgcctggctgacagacgtcctggcgcgtctgccggaat

SEQ ID NO: 310308 - DNA, 75 bp, synthetic construct
  source 1..75: mol_type = other DNA
agtgacaatactcagaagacgagatgatggggtaattgttagcgaaaaaccgagattgagtacttttggggcgaa

SEQ ID NO: 310309 - DNA, 75 bp, synthetic construct
  source 1..75: mol_type = other DNA
cattcctataatgtttgcccctcaggttgaaagtctcttggatagggattttataaagttaaattatcatattga

SEQ ID NO: 310310 - DNA, 75 bp, synthetic construct
  source 1..75: mol_type = other DNA
ctcttcgggttagatggtataaaagcagataatccaataaaagcaaagcaagggagttcagatgcttcaaattat

SEQ ID NO: 310311 - DNA, 75 bp, synthetic construct
  source 1..75: mol_type = other DNA
tataatttagataatatatcactatattcagttaaacccattgatggacggggaatacagaacagtaactgttga

SEQ ID NO: 310312 - DNA, 75 bp, synthetic construct
  source 1..75: mol_type = other DNA
ctgattttgttttggatgtagaagcgattaccaaaagtggtaaccagatttcaaagcggttagtcgtcgatgcaa

SEQ ID NO: 310313 - DNA, 75 bp, synthetic construct
  source 1..75: mol_type = other DNA
cgaaatgtatcttcctgtacatgcgaatatgtgatcaatacaaccaaaggcgggaaagtcatagctaaaacgctg

SEQ ID NO: 310314 - DNA, 75 bp, synthetic construct
  source 1..75: mol_type = other DNA
gctgccggtgagcacgctggccggatgggtgggcgcggcctgcgtctggctgatgccgctggcggagctgctgcg

SEQ ID NO: 310315 - DNA, 75 bp, synthetic construct
  source 1..75: mol_type = other DNA
taatacccggcatggatatcaccgcgcttctctccaccaacgaccccgacacgctgcgtaagctggcgttatccc

SEQ ID NO: 310316 - DNA, 75 bp, synthetic construct
  source 1..75: mol_type = other DNA
atctcgccgcaggaaacagaagtggcaagtatgatggagggaatgattaaagtcgttgccgaataccgtaataca

SEQ ID NO: 310317 - DNA, 75 bp, synthetic construct
  source 1..75: mol_type = other DNA
ttgggggaaggctctgcattgcctgttggtgtaccggttccatggcccaccctccgtcttcctgatttacgcggt

SEQ ID NO: 310318 - DNA, 75 bp, synthetic construct
  source 1..75: mol_type = other DNA
gaagaaatccggttacagattattccttacctcgtgagttttgcctttgctgattactccaggtctgcggcaagt

SEQ ID NO: 310319 - DNA, 75 bp, synthetic construct
  source 1..75: mol_type = other DNA
tggacgtccactgacagcatccctgaagagggtattgtggcaggggatacactgctcattacgtctttgcgtggc

SEQ ID NO: 310320 - DNA, 75 bp, synthetic construct
  source 1..75: mol_type = other DNA
ccgctgtgtgccgagattctggcagcgcagatgagcgacgaaccgattccgatggatagcaatacgctggcggcg

SEQ ID NO: 310321 - DNA, 75 bp, synthetic construct
  source 1..75: mol_type = other DNA
tatattgagcggcggatggtgccgctcaatatctggctggaacaagtggaaggtcagcagttgcgcgacgccatt

SEQ ID NO: 310322 - DNA, 75 bp, synthetic construct
  source 1..75: mol_type = other DNA
cgcggcgagaacggaagcgtacgcatggattcattgctggtcattcagcgggcattcactaaagtggagtttttc

SEQ ID NO: 310323 - DNA, 75 bp, synthetic construct
  source 1..75: mol_type = other DNA
ccggtgaggacttcttcacctgctaccaaggtgatgtcgttttctggcgcccggtggataagccggtcgagggtg

SEQ ID NO: 310324 - DNA, 75 bp, synthetic construct
  source 1..75: mol_type = other DNA
atgacccaacggaatataccggcctgcagtacctctgattttgtttggaaggtgatcggcttgccgtggtctaac

SEQ ID NO: 310325 - DNA, 75 bp, synthetic construct
  source 1..75: mol_type = other DNA
acgattcctcacttggggaaaactcaaacctctgaagggattatggttaataactcttctggttgtcgtgttaat

SEQ ID NO: 310326 - DNA, 75 bp, synthetic construct
  source 1..75: mol_type = other DNA
tggtactggaaaacgcgccggtggaggaaatcgaaaccgtagctgcacttagccatgcggtaggtttgccaataa

SEQ ID NO: 310327 - DNA, 75 bp, synthetic construct
  source 1..75: mol_type = other DNA
gcaagggaagccgctattacggtgttcccgtttctgtctgacgtgcaaaaaactgagtgcgaacagggcccggac

SEQ ID NO: 310328 - DNA, 75 bp, synthetic construct
  source 1..75: mol_type = other DNA
atatgtcattggcaatggtataagaaatatttttaattcggaattaaatagtgaaacagaaaattcccatgaaga

SEQ ID NO: 310329 - DNA, 75 bp, synthetic construct
  source 1..75: mol_type = other DNA
cgaaccattaaatttacaacattttcgacacgtcattcctatcgaacaaattgaagcgatctcgctctttgatga

SEQ ID NO: 310330 - DNA, 75 bp, synthetic construct
  source 1..75: mol_type = other DNA
ttatcacaacccgccgggaagcacttattcggataaatcatttcttgcacgctcaggagtttcttcgcagcctac

SEQ ID NO: 310331 - DNA, 75 bp, synthetic construct
  source 1..75: mol_type = other DNA
atgaaaaaaagtgtattgacggcgtttataactgtggtatgtgcaacgtccagcgttatggctgctgatgataat

SEQ ID NO: 310332 - DNA, 75 bp, synthetic construct
  source 1..75: mol_type = other DNA
acggctgccggagctttggctgcgataggtggagctcgctatcttggagggatgtttggcgatcttgggaaccag

SEQ ID NO: 310333 - DNA, 75 bp, synthetic construct
  source 1..75: mol_type = other DNA
cactggcggaagcacagctcagggggacgcagattgccacggcgcgggcaagggcagccgtgtaccgtgcacagc

SEQ ID NO: 310334 - DNA, 75 bp, synthetic construct
  source 1..75: mol_type = other DNA
ctggggaaaaacctaccgtataaatcatctcctggcggctctgcgctcgttctatcagcttttaatcgcgataca

SEQ ID NO: 310335 - DNA, 75 bp, synthetic construct
  source 1..75: mol_type = other DNA
gggcaaacctgccagtggtcgggccgtattgtctcaggaacaggacggcattaaatcgcacacccacagcgccag

SEQ ID NO: 310336 - DNA, 75 bp, synthetic construct
  source 1..75: mol_type = other DNA
ttaaattatttcctgatgacgtcaccagaggtgagaaaatggcttctgacgatctgcctgatgtttataaatgtg

SEQ ID NO: 310337 - DNA, 75 bp, synthetic construct
  source 1..75: mol_type = other DNA
gcatatattctctcatcaataaaataggttattttggtgcaaagacaatagctataatattaattactagaactt

SEQ ID NO: 310338 - DNA, 75 bp, synthetic construct
  source 1..75: mol_type = other DNA
cggtgaaagatccgtcgaatcatcctgtggcgggaataacggtgaacttcaccatgccacaggacgtggcagcaa

SEQ ID NO: 310339 - DNA, 75 bp, synthetic construct
  source 1..75: mol_type = other DNA
aacttagtcagagcacgagcaatactaacgacagtggtgttgctgaagttacccttaagggcacggttttgggtg

SEQ ID NO: 310340 - DNA, 75 bp, synthetic construct
  source 1..75: mol_type = other DNA
cgggaacattttgttgcaggatggagatcagacgttgacttttaaagttgattatatcgctacggggaaagcgac

SEQ ID NO: 310341 - DNA, 75 bp, synthetic construct
  source 1..75: mol_type = other DNA
gaagagagaaaaaaatttgatgatgatcttaataatatattcatttttgtagatgatcttagggagactgtattg

SEQ ID NO: 310342 - DNA, 75 bp, synthetic construct
  source 1..75: mol_type = other DNA
ccagacagccgagaactggatatcgcccgccaccagggcaagtatgtagcagagattgcgctgaagctcaagtcc

SEQ ID NO: 310343 - DNA, 75 bp, synthetic construct
  source 1..75: mol_type = other DNA
acggcagccgtatcgtccgccagttcggcggcgtcatcagcatcatcggcgtcagcttcaaaagatgaggcggca

SEQ ID NO: 310344 - DNA, 75 bp, synthetic construct
  source 1..75: mol_type = other DNA
tttaagcgcgagctgaccggcatcatcgcccgtcttgacctagctgaccagatcgacagcaaaaggaatgcggca

SEQ ID NO: 310345 - DNA, 75 bp, synthetic construct
  source 1..75: mol_type = other DNA
gcattccatgtcagccaatgtttctggatcgacaactgcagtaaacagcttcataaaagcttgcgaaattaactt

SEQ ID NO: 310346 - DNA, 75 bp, synthetic construct
  source 1..75: mol_type = other DNA
tatcacttatggtgtgcccggagttcagggcgggcatggatgcttaaatgaaccgcgagtctgtctggaatattg

SEQ ID NO: 310347 - DNA, 75 bp, synthetic construct
  source 1..75: mol_type = other DNA
atttacagcctgtgtttgcagacgatgtcggcatgtcggtaaatgcccaccatctggtaatgccgcataccagcg

SEQ ID NO: 310348 - DNA, 75 bp, synthetic construct
  source 1..75: mol_type = other DNA
catctggtaatgccgcataccagcgaacagaaagccaaagtcaaagccttcatcacctggatttctgaggaactg

SEQ ID NO: 310349 - DNA, 75 bp, synthetic construct
  source 1..75: mol_type = other DNA
tgcaatggaatggtttgattttggtgtttatggttttgttgcttacgcattaggtaaagtttttttccccggggg

SEQ ID NO: 310350 - DNA, 75 bp, synthetic construct
  source 1..75: mol_type = other DNA
cagcaaagccgaaagaaaaaccataccgccttctcgatggtaatggcctgtacctttatgtccctgtatccggga

SEQ ID NO: 310351 - DNA, 75 bp, synthetic construct
  source 1..75: mol_type = other DNA
catggccaaccgaggccaccatgtttgacgttaacaaaaagtagttccagacgcgccatcgttagatggcgcttt

SEQ ID NO: 310352 - DNA, 75 bp, synthetic construct
  source 1..75: mol_type = other DNA
tggatctataggcttatcagcaagggatgttttcctcaaccagtaaaaattggtcttcgtgcagtagcctttgta

SEQ ID NO: 310353 - DNA, 75 bp, synthetic construct
  source 1..75: mol_type = other DNA
ttccgccgcaggattacgccttcctgcaagagcgcggcgtggcggcgatttatggtccaggtacacctatgctcg

SEQ ID NO: 310354 - DNA, 75 bp, synthetic construct
  source 1..75: mol_type = other DNA
caaataatagttcatttagctacggagataaccgattcgagaagtctcaaggtagcaactggacatttcaggaat

SEQ ID NO: 310355 - DNA, 75 bp, synthetic construct
  source 1..75: mol_type = other DNA
atgccatatgccagcaatataagtattgcggtattagatgataatgtattggaaagtcaggctattgaaacgttg

SEQ ID NO: 310356 - DNA, 75 bp, synthetic construct
  source 1..75: mol_type = other DNA
agactgctataaaaacaaatcatttttcgaatgttcaacattagacgcaaccgagctacatagaatagcacaaag

SEQ ID NO: 310357 - DNA, 75 bp, synthetic construct
  source 1..75: mol_type = other DNA
tgccaccggaggcgggcgcggaagaacaagcccgacaggccagcgcatggacggtcacggtagtctgcgcggcat

SEQ ID NO: 310358 - DNA, 75 bp, synthetic construct
  source 1..75: mol_type = other DNA
cgcgcctggctgctccagcatggcgtatctagcgtgccggaaaacaataaccgcctgtttgacgaactgctgacg

SEQ ID NO: 310359 - DNA, 75 bp, synthetic construct
  source 1..75: mol_type = other DNA
cggagatgaaatattacgtattgaacatctgacggcatggcatccggttaatcgtcatattaaacgagttaatga

SEQ ID NO: 310360 - DNA, 75 bp, synthetic construct
  source 1..75: mol_type = other DNA
tctggctcctgtttctgaaaaagggaaacagctgttgtcacaatccacagccgaagagatgtgtgacgttctggg

SEQ ID NO: 310361 - DNA, 75 bp, synthetic construct
  source 1..75: mol_type = other DNA
atccggtggcgatgatgaaagccgtacaggcggtggttcaccataacgaaacggctgatcgggcatatgaactct

SEQ ID NO: 310362 - DNA, 75 bp, synthetic construct
  source 1..75: mol_type = other DNA
acggtcacggtagtctgcgcggcattgctgcacgatacgggaaaaatcgccgtggatatggagagttaccaactc

SEQ ID NO: 310363 - DNA, 75 bp, synthetic construct
  source 1..75: mol_type = other DNA
ataactaaaagtatcattgggaattacacatctattgcaaataatgtctcaattggtcaaggtgaacataaggtt

SEQ ID NO: 310364 - DNA, 75 bp, synthetic construct
  source 1..75: mol_type = other DNA
catatataagattgatggaaaaccgaaaaattggaatgtttgtactaattgtcaaactccggggaaaacactcgc

SEQ ID NO: 310365 - DNA, 75 bp, synthetic construct
  source 1..75: mol_type = other DNA
tgcgcaaagaaagaaataaagtaattcacttaggtaaaagtaataataaagaaatacgtaaagactttttaagtg

SEQ ID NO: 310366 - DNA, 75 bp, synthetic construct
  source 1..75: mol_type = other DNA
aaaaaaaaatttagccttgtttctgattttgcgaactatggtcttgctatatctagaggcccggtaccgaaaaaa

SEQ ID NO: 310367 - DNA, 75 bp, synthetic construct
  source 1..75: mol_type = other DNA
tgttatcaatgagataaaggataaagcgttttgtttttttgaatactttgattcattgaataaaatattcgatag

SEQ ID NO: 310368 - DNA, 75 bp, synthetic construct
  source 1..75: mol_type = other DNA
cgtgttggcggacaacggcgcaacggtcgccccgacggtcaccacgcagccggacggtacggtggagatctctgt

SEQ ID NO: 310369 - DNA, 75 bp, synthetic construct
  source 1..75: mol_type = other DNA
tataaatcatgcttcacagctttttcgatactttcatgtaacaaatgcaagaatatctattctaaccaatggaca

SEQ ID NO: 310370 - DNA, 75 bp, synthetic construct
  source 1..75: mol_type = other DNA
taatggcgatatgattatcgggcagggaacaggctcatcagccacaatggaaagtaacaacacgcttatttctgc

SEQ ID NO: 310371 - DNA, 75 bp, synthetic construct
  source 1..75: mol_type = other DNA
aatcaggccatgtaatcacggggcttggtattatcggtgaagtcgatggtgatgatccggcagtattcagaccaa

SEQ ID NO: 310372 - DNA, 75 bp, synthetic construct
  source 1..75: mol_type = other DNA
gtgaatgcgtcgttactgccgctaaaaaatcaatacgcaactggatatctaaactcagcttccgaaccggggaat

SEQ ID NO: 310373 - DNA, 75 bp, synthetic construct
  source 1..75: mol_type = other DNA
gtatgggccgttctgcataacgcacggcgagcgctgccactgtaatacgcgtgaatgcgtcgttactgccgctaa

SEQ ID NO: 310374 - DNA, 75 bp, synthetic construct
  source 1..75: mol_type = other DNA
ataaagaagaaaccgacattgccactaccatggaagaacttgaaggatttcatattgttaaagctatagttcgcg

SEQ ID NO: 310375 - DNA, 75 bp, synthetic construct
  source 1..75: mol_type = other DNA
aggacaaatatccttttcatcgcgacttatggcgaaaaccgactgcgtcgaatggctggagctgcacgccgcgca

SEQ ID NO: 310376 - DNA, 75 bp, synthetic construct
  source 1..75: mol_type = other DNA
ccgcatcccggcgggtgtgatacggacggacgacgagcggacccaccactaccactacgacagccagcaccgcct

SEQ ID NO: 310377 - DNA, 75 bp, synthetic construct
  source 1..75: mol_type = other DNA
tccatttatcggtggatttggcaagaagccacctgacgcccagagagaaggatgttgtagctaacccaacgagcc

SEQ ID NO: 310378 - DNA, 75 bp, synthetic construct
  source 1..75: mol_type = other DNA
ccttcagtgcggcgtaaaacccgcaaatcagaaaatgaccgaaattctgtctgatgagttttatgctgctgaaaa

SEQ ID NO: 310379 - DNA, 75 bp, synthetic construct
  source 1..75: mol_type = other DNA
ctgtggcgtgaatattcgcccgtcacgtatgccagaaccgatgccctgttgttctggctgggtattgacttctca

SEQ ID NO: 310380 - DNA, 75 bp, synthetic construct
  source 1..75: mol_type = other DNA
aaacccgcaaatcagaaaatgaccgaaattctgtctgatgagttttatgctgctgaaaagcgagtcagggggtga

SEQ ID NO: 310381 - DNA, 75 bp, synthetic construct
  source 1..75: mol_type = other DNA
ggcgaaacgcctgagcaccttacgcggatgatatggctatgccttgcgaagcttcgcggcgtagctgccgtatat

SEQ ID NO: 310382 - DNA, 75 bp, synthetic construct
  source 1..75: mol_type = other DNA
acaaggacgaaatgaaaggagttgctccggatgaggcacttcgtgctgtgaggacgctctggcaggcaatgagcg

SEQ ID NO: 310383 - DNA, 75 bp, synthetic construct
  source 1..75: mol_type = other DNA
gattaggtaatgcattatttcaagttgctttcgctttatatttaagtgatattgggcacaatgtgaaaatcgata

SEQ ID NO: 310384 - DNA, 75 bp, synthetic construct
  source 1..75: mol_type = other DNA
attgctgggaaggctggctcatatccctccggcagaagcagaaaaagcttattatgcttccatcagaaacgatga

SEQ ID NO: 310385 - DNA, 75 bp, synthetic construct
  source 1..75: mol_type = other DNA
ggatgcacgtcttttattaacatcctcatactcaataaataatgatcgcaacttgagttttattcttggtggcaa

SEQ ID NO: 310386 - DNA, 75 bp, synthetic construct
  source 1..75: mol_type = other DNA
tggttatctaaaaaatataggtggcatacaaccaagcgatttctacgttgaacctaagttatacctttcgcatac

SEQ ID NO: 310387 - DNA, 75 bp, synthetic construct
  source 1..75: mol_type = other DNA
gataacaattcaaaactagatgtaaaaaatgatgtggttgtatctacgggagtagatggtattcctaatgaaaaa

SEQ ID NO: 310388 - DNA, 75 bp, synthetic construct
  source 1..75: mol_type = other DNA
gttctgctacgccagaacaccagtccacccttgacacggttagcgctgcgcttgcgcaaccgggagtagggaaag

SEQ ID NO: 310389 - DNA, 75 bp, synthetic construct
  source 1..75: mol_type = other DNA
gtcatggctgggtgatgccgctgggtaaccgcaacgtgcagaccgtgctggcagaggaaatggcagacgcggcgc

SEQ ID NO: 310390 - DNA, 75 bp, synthetic construct
  source 1..75: mol_type = other DNA
cgcatacaaccgggaaaaatcacgccaaaaatgtgcgctgtgcatacgcgcgcatcgaggaggcatacaaaaaac

SEQ ID NO: 310391 - DNA, 75 bp, synthetic construct
  source 1..75: mol_type = other DNA
ggcgctgaaagcctaccggctgatgtataccgactgcgccgcccgacataacgccctggtgggcatcattcgaca

SEQ ID NO: 310392 - DNA, 75 bp, synthetic construct
  source 1..75: mol_type = other DNA
tatggtggctattgccaacgctgaagctggaagaacagcaggagatctggctggttgagggcatttttgacgcta

SEQ ID NO: 310393 - DNA, 75 bp, synthetic construct
  source 1..75: mol_type = other DNA
cccggatctgtttgaaagctggtcagacagatatcccccaaccccggaaaacccacaggccgccgccgatgccta

SEQ ID NO: 310394 - DNA, 75 bp, synthetic construct
  source 1..75: mol_type = other DNA
ttagcgtagcatcaggcactgaatgccggatgcggcgtaaaacgccttatccgtcctggggggctgtgctcggat

SEQ ID NO: 310395 - DNA, 75 bp, synthetic construct
  source 1..75: mol_type = other DNA
tcggcagggaatagccagccttcgaatacgcagactataacgtttgtagccgataaggctaccgcaaccgtctcc

SEQ ID NO: 310396 - DNA, 75 bp, synthetic construct
  source 1..75: mol_type = other DNA
ctattatgattaattttaaatatataataatcactgttgtgttatattccgtggcgtgtctatatggcttgataa

SEQ ID NO: 310397 - DNA, 75 bp, synthetic construct
  source 1..75: mol_type = other DNA
gtactgaaagatatgatcatcgaatcagtatggaaaaatattattgttagtgatgagtccctgacaagatgtatc

SEQ ID NO: 310398 - DNA, 75 bp, synthetic construct
  source 1..75: mol_type = other DNA
ggatgaatatgatgatctcatatcaggaacttgttcgcaccttccctaagtcaccggcggcttgcctgccacaca

SEQ ID NO: 310399 - DNA, 75 bp, synthetic construct
  source 1..75: mol_type = other DNA
cagttgaccccattgagccggtggcttacaaaatccgcttttcattcagcaaccctgatctcttactgaagtcgg

SEQ ID NO: 310400 - DNA, 75 bp, synthetic construct
  source 1..75: mol_type = other DNA
aatgcagtactcaccgcatcatctgatgtgacttctctggtggcggatgggatatcgactgcgaagctggaggtg

SEQ ID NO: 310401 - DNA, 75 bp, synthetic construct
  source 1..75: mol_type = other DNA
gttgcaggaggaactttgcagtgttgtggaggcatccggtgccagtctggagaaggggcggcacgatcagttgct

SEQ ID NO: 310402 - DNA, 75 bp, synthetic construct
  source 1..75: mol_type = other DNA
ggttcaggcggcggtggtgcatacgatgccggttatagcggaaccagtatgaagggcgggaaaggggctgctggg

SEQ ID NO: 310403 - DNA, 75 bp, synthetic construct
  source 1..75: mol_type = other DNA
gttggatttaagccaacagaagttggggtgattcctgaaaattgggaagtaattcaacttggtgattgcacatct

SEQ ID NO: 310404 - DNA, 75 bp, synthetic construct
  source 1..75: mol_type = other DNA
acgtactgtatgcacaagcactggaaatggctgatcccggcatggataaatcagatatttttcgtgaagcggtaa

SEQ ID NO: 310405 - DNA, 75 bp, synthetic construct
  source 1..75: mol_type = other DNA
cgatgccggttatagcggaaccagtatgacaggcgggaaaggtgctgctgggatttgtattatcgaggagtttgc

SEQ ID NO: 310406 - DNA, 75 bp, synthetic construct
  source 1..75: mol_type = other DNA
aaacggcggtaacggaggcgtaccgaatattggcgatatccgcatcactggtggagatggaggcgacggtcagtc

SEQ ID NO: 310407 - DNA, 75 bp, synthetic construct
  source 1..75: mol_type = other DNA
ggaacttgttcgcaccttccctaatatcaaatccttgtttacacagaatttcgcaacacacaaaaagataacggc

SEQ ID NO: 310408 - DNA, 75 bp, synthetic construct
  source 1..75: mol_type = other DNA
aagagattataaaaattaacaatatcagaatacatcagtacacagtactatatacatctaattgtacaatcgatg

SEQ ID NO: 310409 - DNA, 75 bp, synthetic construct
  source 1..75: mol_type = other DNA
tgatgcaatcaagaatgagcaaagcagcattgctgttgcttgataactcatatcagatatcacagatatctaata

SEQ ID NO: 310410 - DNA, 75 bp, synthetic construct
  source 1..75: mol_type = other DNA
cgcaggagaaagccgcccgtgagctggcggagcaggcccggcgtgagctgttgtcggtggcaccgcagaaagatg

SEQ ID NO: 310411 - DNA, 75 bp, synthetic construct
  source 1..75: mol_type = other DNA
tatccgtcctggggggctgggcttggatcttgtaggcctgataagacgcgttagcgtagcatcaggcactgaatg

SEQ ID NO: 310412 - DNA, 75 bp, synthetic construct
  source 1..75: mol_type = other DNA
ttctgaatgaagaagaaatgctaccattgttttataaagaaataagagggtttgaaccgttcaaatcatttgaag

SEQ ID NO: 310413 - DNA, 75 bp, synthetic construct
  source 1..75: mol_type = other DNA
ataattgcagatgtatttaatgtatcagaaataaccataagaaaaagactggaatctgagtgcgctaatttcaac

SEQ ID NO: 310414 - DNA, 75 bp, synthetic construct
  source 1..75: mol_type = other DNA
gaaaggaaaataaacctaacaaaagagggggataagcatattgagcatttcaagcgaaaaggtattcatcgcgaa

SEQ ID NO: 310415 - DNA, 75 bp, synthetic construct
  source 1..75: mol_type = other DNA
tggtgagccgcaaaggtgtgggttttataaggataagcaaaaatataacgatgatgatttaattaaagctgatag

SEQ ID NO: 310416 - DNA, 75 bp, synthetic construct
  source 1..75: mol_type = other DNA
atgatgatccccatgaaaatggcatcagcatcgaagatcaagactttgcagcaaatctcttccgtgttgctcgga

SEQ ID NO: 310417 - DNA, 75 bp, synthetic construct
  source 1..75: mol_type = other DNA
gcgattatatctggaaaaacaaccggataccgacttcaggtaagtttcgtcgtttgagaccagttaagatcgaca

SEQ ID NO: 310418 - DNA, 75 bp, synthetic construct
  source 1..75: mol_type = other DNA
atgtgtgatatctacaataccgagaggtaatatagttctaactatgcaagacctagagtcttatttattacaatg

SEQ ID NO: 310419 - DNA, 75 bp, synthetic construct
  source 1..75: mol_type = other DNA
atgaacgaaataaagtaatagctgaggttaccctgagggtattcaatcttaatcccgagaacggtggtgttaaag

SEQ ID NO: 310420 - DNA, 75 bp, synthetic construct
  source 1..75: mol_type = other DNA
tatgaaccatctacagctttggagtattttcgacgggcacttaaaatacttcaagatgacctaaatttccatagc

SEQ ID NO: 310421 - DNA, 75 bp, synthetic construct
  source 1..75: mol_type = other DNA
tcccgttcgtaatattgcaccacaggtaaaagaagttttaaaggactttattgatgcgctaagtacaataatatg

SEQ ID NO: 310422 - DNA, 75 bp, synthetic construct
  source 1..75: mol_type = other DNA
attacatatctcttcctgatgattttcccgtacgtaatattgcacctcaggtaaaagaagttttaaaggacttta

SEQ ID NO: 310423 - DNA, 75 bp, synthetic construct
  source 1..75: mol_type = other DNA
gatggcagcggcagaatcagaaattatggagacgcgtaatacaccgcgtggactgttgcgcatcgatgccgcaac

SEQ ID NO: 310424 - DNA, 75 bp, synthetic construct
  source 1..75: mol_type = other DNA
ctcgaccgcgaaattaccgggcgatcgcgaaacgctatttttctacaatatgcgtgaaattcctcccgccccgga

SEQ ID NO: 310425 - DNA, 75 bp, synthetic construct
  source 1..75: mol_type = other DNA
gcagccagttttatctcggttatatggatgattacggcgcgttacgcatgacgacgctcaactgcagcggacaat

SEQ ID NO: 310426 - DNA, 75 bp, synthetic construct
  source 1..75: mol_type = other DNA
ttcatccactgtcataaaggcacaataggtgcaatccggcgtgtggtggagccgctcggctatctcatcaatgtg

SEQ ID NO: 310427 - DNA, 75 bp, synthetic construct
  source 1..75: mol_type = other DNA
atcattcaggagatcccgggggatattttcgcggcggcagcaacttacgacggtgaagtcattaccatttatccg

SEQ ID NO: 310428 - DNA, 75 bp, synthetic construct
  source 1..75: mol_type = other DNA
tataccgtgaatgaactgacctatggccagttaagcccgaacaatattgtgtgtagcgcggttgttcctgatgac

SEQ ID NO: 310429 - DNA, 75 bp, synthetic construct
  source 1..75: mol_type = other DNA
gcgctgtctgtcgagcgctgggataaaaactggccggaggaaacaaagcgaaaagttatcagggaatcctggctc

SEQ ID NO: 310430 - DNA, 75 bp, synthetic construct
  source 1..75: mol_type = other DNA
ttctctgtggatcgctgggatgagggctggacagaaagcgtcaaacgccaggtagtgaaggatgctttttatatt

SEQ ID NO: 310431 - DNA, 75 bp, synthetic construct
  source 1..75: mol_type = other DNA
acatgatcttatttggggtgaagtcattaagaatattgatgtttttgagttaagttctcaagagaaatttaattt

SEQ ID NO: 310432 - DNA, 75 bp, synthetic construct
  source 1..75: mol_type = other DNA
ttgatcgaaagaaaagtggatgtcgcgatacgcgccggtacgttaacggattccagcttacgtgccaggccgtta

SEQ ID NO: 310433 - DNA, 75 bp, synthetic construct
  source 1..75: mol_type = other DNA
tgaacacggggcgacgctgtttgatggtcgccccgttgtttttgacgaagaggattttccggccgtcgcgtttat

SEQ ID NO: 310434 - DNA, 75 bp, synthetic construct
  source 1..75: mol_type = other DNA
ctccgtcatgtttagaagacgtgtatttgaacaaggaaaccggtatccaactcacacttgctttacagaagatat

SEQ ID NO: 310435 - DNA, 75 bp, synthetic construct
  source 1..75: mol_type = other DNA
acctttggcggcaacccgctggcctgtgcggcggcgctggcgaccatcaatgtgttgctggaacaaaacttaccg

SEQ ID NO: 310436 - DNA, 75 bp, synthetic construct
  source 1..75: mol_type = other DNA
aaaacgaacaattttcagttaccatttctcctgaatggatggctgatgatgaaaactggtctttggagttagagc

SEQ ID NO: 310437 - DNA, 75 bp, synthetic construct
  source 1..75: mol_type = other DNA
gattgaagacagtattcaggaagcgatgctggcatatgttgaccgcccgcttgatcgtcagaatgcggacgacat

SEQ ID NO: 310438 - DNA, 75 bp, synthetic construct
  source 1..75: mol_type = other DNA
agaagaaagttttttatttatatcgtttatccctaaaaataacgatgtgatattaacgcatcaagtaccaatcag

SEQ ID NO: 310439 - DNA, 75 bp, synthetic construct
  source 1..75: mol_type = other DNA
aggagaactgagacaggcttaccgtgaaggccaggaagatcaacttggagcgttaggtctggtgctcaatattat

SEQ ID NO: 310440 - DNA, 75 bp, synthetic construct
  source 1..75: mol_type = other DNA
tgcctttaatctcgctggcggccttactgctactgctgattggcaacatgtggtactgactcgccaaggtaaaga

SEQ ID NO: 310441 - DNA, 75 bp, synthetic construct
  source 1..75: mol_type = other DNA
ccgagtccgggcaccaaattcatatcaacggacctccacggaggtccgtttttcgtttcagaacaccatgattta

SEQ ID NO: 310442 - DNA, 75 bp, synthetic construct
  source 1..75: mol_type = other DNA
atggagccggactccggttttgtgaagctgtcgagttacttcatcccgccaatattttcccacgtcccgtcacca

SEQ ID NO: 310443 - DNA, 75 bp, synthetic construct
  source 1..75: mol_type = other DNA
agacgttgaaaaactgtcaccattgcagtgcgggcatattaatatgcaggggcgctattcatttacagtgccgga

SEQ ID NO: 310444 - DNA, 75 bp, synthetic construct
  source 1..75: mol_type = other DNA
gaaggccaggaagatcaacttggagcgttaggtctggtgctcaatattattgttctgtggaacactatttacatg

SEQ ID NO: 310445 - DNA, 75 bp, synthetic construct
  source 1..75: mol_type = other DNA
cgggtgaatattttgtaaatggttccgccagcattcttcctggcgtcgttttccagggaatgattcgcatccgct

SEQ ID NO: 310446 - DNA, 75 bp, synthetic construct
  source 1..75: mol_type = other DNA
tgctgtcggacttcttcaaacctgccctgctggcacgtatggaagtggtgccgtatctgccgctgtcgaaagaga

SEQ ID NO: 310447 - DNA, 75 bp, synthetic construct
  source 1..75: mol_type = other DNA
acttaatcagttcgatgaactcattgccgtaatatacaatcatgatttctcaattcgttacgctatttccatacc

SEQ ID NO: 310448 - DNA, 75 bp, synthetic construct
  source 1..75: mol_type = other DNA
tcgaattgatgcaactgaatcagttgacgcttgatgagttagaacgacgagaggttatcagaaccagaaacaatc

SEQ ID NO: 310449 - DNA, 75 bp, synthetic construct
  source 1..75: mol_type = other DNA
tttactggaactggatcaggaccatccggtaatacgaaaattcgttaacgaaacgtaccacattgaaaatgagtt

SEQ ID NO: 310450 - DNA, 75 bp, synthetic construct
  source 1..75: mol_type = other DNA
atttcttaccctcctgaatacacactgtaaatcatcagaagctgaacttgccatgctgagtacactctgctacga

SEQ ID NO: 310451 - DNA, 75 bp, synthetic construct
  source 1..75: mol_type = other DNA
gctgtcgaaagagacgctcgccaccatcattgccgggaaactggcccgcctggataacgtgctgcgcagccgctt

SEQ ID NO: 310452 - DNA, 75 bp, synthetic construct
  source 1..75: mol_type = other DNA
gtgtttttatccgtggctgggacaacggacgtgggctggatggagatcggaacagacatctcctgagttatcagg

SEQ ID NO: 310453 - DNA, 75 bp, synthetic construct
  source 1..75: mol_type = other DNA
gccacagcatctcttaagtataataacactgatatcacggtgggtggtgcagttcttggtgcaggtgaaggcgca

SEQ ID NO: 310454 - DNA, 75 bp, synthetic construct
  source 1..75: mol_type = other DNA
tggtgcaagcgttactattgtaggtgattcctcaaaaggggaattaaatatagatggtggtagcactctgtatac

SEQ ID NO: 310455 - DNA, 75 bp, synthetic construct
  source 1..75: mol_type = other DNA
ttgagttgatgcaactaaatcaactgacacttgacgagctggaacgaagagatgtgctcagaactcgtaacaatc

SEQ ID NO: 310456 - DNA, 75 bp, synthetic construct
  source 1..75: mol_type = other DNA
aaattaattctgaagaattcacagaaaacgaatggctgacagaaaccgatccgcgcgttctggcgctgacaatgg

SEQ ID NO: 310457 - DNA, 75 bp, synthetic construct
  source 1..75: mol_type = other DNA
ggcatacagggtgatatcaactcactttcagccgaggcacgtaaggcgatatcggacagatgttatctcgatgcg

SEQ ID NO: 310458 - DNA, 75 bp, synthetic construct
  source 1..75: mol_type = other DNA
ttaccaggaatgcgacttacccggtactgatagacagcattgtggtggaagtgaacagcacagacactgcggcat

SEQ ID NO: 310459 - DNA, 75 bp, synthetic construct
  source 1..75: mol_type = other DNA
gcgccactgaaattaaaacaggctgaggcattagcccgcactttgttaggtcgtgccaaattgcttgagagcaaa

SEQ ID NO: 310460 - DNA, 75 bp, synthetic construct
  source 1..75: mol_type = other DNA
cctgctgatagctgctgatacaggaagtcaatatggcaccaatattactattaatgatggtgacagaattactgg

SEQ ID NO: 310461 - DNA, 75 bp, synthetic construct
  source 1..75: mol_type = other DNA
ctcagccccccatagtctaccctgcgtgtaatccgcttcgagatagaatgtgtgctgtttgttattctgtgcact

SEQ ID NO: 310462 - DNA, 75 bp, synthetic construct
  source 1..75: mol_type = other DNA
tttgctgaatggctgaaagaggccacgccggggcgttatgcggtcagtattgcggactcttccacgctgctggct

SEQ ID NO: 310463 - DNA, 75 bp, synthetic construct
  source 1..75: mol_type = other DNA
gccgtttaccggggcaaactgataacgacatctggttctggcaggcgatatgcgccaacgcgcagggcgatgaaa

SEQ ID NO: 310464 - DNA, 75 bp, synthetic construct
  source 1..75: mol_type = other DNA
gatgtcttcccgcagtttgtccgtttcccgaatacgctggaagaagtggcggcgctggagagtattgaagagtgc

SEQ ID NO: 310465 - DNA, 75 bp, synthetic construct
  source 1..75: mol_type = other DNA
gttcaacctgtcccctactggttatgggttctattatagagccgcaaacccagcttacatacagccaccagaatg

SEQ ID NO: 310466 - DNA, 75 bp, synthetic construct
  source 1..75: mol_type = other DNA
gtcttctcaggttgagttgggaggatatctgtacgatgtgcgtaaaaatggcactaactgggagctttacgcttc

SEQ ID NO: 310467 - DNA, 75 bp, synthetic construct
  source 1..75: mol_type = other DNA
agcggaggcgacggtaccgcacgttcagactacatgggaatgtacgccagttacatggcacacaacggtttttac

SEQ ID NO: 310468 - DNA, 75 bp, synthetic construct
  source 1..75: mol_type = other DNA
ccaccacgaccgcagatgctggcggcaattatctcaatgtcggttacttattgaactatgttgaaaaccgtacgc

SEQ ID NO: 310469 - DNA, 75 bp, synthetic construct
  source 1..75: mol_type = other DNA
tggactccttcgccagtggcaaactgagcggctttgacatgggttacagcggtatccagtttggtggggataaac

SEQ ID NO: 310470 - DNA, 75 bp, synthetic construct
  source 1..75: mol_type = other DNA
gttatcaacatgcaaaataccgatattacggttgatcgtaatggcagtctggcgctgggtttgtgggcgctcagc

SEQ ID NO: 310471 - DNA, 75 bp, synthetic construct
  source 1..75: mol_type = other DNA
acgaacagtcctcaggggccgtggtggatactcggctggagtgagcgggtaccgggtgtggatgaggtgctgcct

SEQ ID NO: 310472 - DNA, 75 bp, synthetic construct
  source 1..75: mol_type = other DNA
aagagtgggcctctgtaaaagaggctgaaaataaatttttatctagtaaacattactttagaaaatcaaatgatt

SEQ ID NO: 310473 - DNA, 75 bp, synthetic construct
  source 1..75: mol_type = other DNA
taaatgatattgagaaaataacgacaacgtctcaaagagacaggcttcatagaacaagttatccgcatttacaca

SEQ ID NO: 310474 - DNA, 75 bp, synthetic construct
  source 1..75: mol_type = other DNA
gtccggttctggatgtggcgcataactttgttagcgcgtgtcaaatcggcgatcaacagggctggttgcatcgta

SEQ ID NO: 310475 - DNA, 75 bp, synthetic construct
  source 1..75: mol_type = other DNA
cgcaacggcgatatcacccgctacagttatgataatccgcacagtgaattaccctctgcaactgaagatgcgacg

SEQ ID NO: 310476 - DNA, 75 bp, synthetic construct
  source 1..75: mol_type = other DNA
ttaagctacacctatcagtatgagaaaaaccgcatcatcatcaccgacagcctgaaccggtgcgaggtgctgcat

SEQ ID NO: 310477 - DNA, 75 bp, synthetic construct
  source 1..75: mol_type = other DNA
cggaatccaatataaaccttggtatgaacctttgagctttataccggggttaaaacttttcactcttccggaaaa

SEQ ID NO: 310478 - DNA, 75 bp, synthetic construct
  source 1..75: mol_type = other DNA
gtttgtacgcagtaaaaaagaaccattaaatcatatccatacctactcagatttttatctctatgcgattggttt

SEQ ID NO: 310479 - DNA, 75 bp, synthetic construct
  source 1..75: mol_type = other DNA
ttttccatgccagctatgtaacggaagatgaccccgccgcccctaattttaccccttatgcgctgaaagcattta

SEQ ID NO: 310480 - DNA, 75 bp, synthetic construct
  source 1..75: mol_type = other DNA
ggcagcaaaccgcacacaggcggatatggggatagaaatcgcaaaatctgtctggcggaactaccagacagacaa

SEQ ID NO: 310481 - DNA, 75 bp, synthetic construct
  source 1..75: mol_type = other DNA
aaatgatattgagtactatcaatggcacagacctttcaccttttacccatcactgcatcctttcgaaatacctga

SEQ ID NO: 310482 - DNA, 75 bp, synthetic construct
  source 1..75: mol_type = other DNA
acgagataatggatttcatcttaaatgatatatattcaggtggtcgagaaatggtccaagagttagctaacagtt

SEQ ID NO: 310483 - DNA, 75 bp, synthetic construct
  source 1..75: mol_type = other DNA
actcaccctgcaactgactgtcagatttggcgggatgctcgtcgttgctgttggcgcactggcagccatcataaa

SEQ ID NO: 310484 - DNA, 75 bp, synthetic construct
  source 1..75: mol_type = other DNA
gaccactactacagacggatgcctggaaaagtaaaaccagttgcggtatcaatgccattagtctggactgccgaa

SEQ ID NO: 310485 - DNA, 75 bp, synthetic construct
  source 1..75: mol_type = other DNA
gtatcggtaaaacagaaactgcacatgctttagctgaacttgtttatggggggagtaacaatcttattacaatta

SEQ ID NO: 310486 - DNA, 75 bp, synthetic construct
  source 1..75: mol_type = other DNA
caaccccggttattgcttgtcatagccgtacaccggaagtgttccggctagccgccaaccacagcaagcagcaac

SEQ ID NO: 310487 - DNA, 75 bp, synthetic construct
  source 1..75: mol_type = other DNA
gatgaaaaccagcgaagccttaaaaggtttcagcagcacgacggtatggcttattgtcgccgcattcctgtacgc

SEQ ID NO: 310488 - DNA, 75 bp, synthetic construct
  source 1..75: mol_type = other DNA
tattatttaaaccagttaataatttgctcggggaagattaatgtatatttaacattgttgataatttgtgttttt

SEQ ID NO: 310489 - DNA, 75 bp, synthetic construct
  source 1..75: mol_type = other DNA
tccggttgtgttcaggatcttaccggacggtaaggagcaactggttaattaccatatggataaaaacatcatggt

SEQ ID NO: 310490 - DNA, 75 bp, synthetic construct
  source 1..75: mol_type = other DNA
ccgaacaatccggaaatgaagtttagcgcgcgttctgatgccgaaagattcatccagcaaatcgaagactccgtc

SEQ ID NO: 310491 - DNA, 75 bp, synthetic construct
  source 1..75: mol_type = other DNA
tgattttcaacatcgactgacaaacagaaattgttatttagataaatatggcgatgcaaatatcaatcattatta

SEQ ID NO: 310492 - DNA, 75 bp, synthetic construct
  source 1..75: mol_type = other DNA
acgcaggcgcagcgggcagaagaggcccggcagaaggccacttccggcgggacggaaccgtccgcttttcctgat

SEQ ID NO: 310493 - DNA, 75 bp, synthetic construct
  source 1..75: mol_type = other DNA
tttctgatgatcgttccaaccggaaatggctggagtctcgctcagctcattatgttatggggcgcatcgataatg

SEQ ID NO: 310494 - DNA, 75 bp, synthetic construct
  source 1..75: mol_type = other DNA
agcgatatgcagatgatatatggggggaaaatagacttcatattactaaaccaactatgaagggtaaacaagttt

SEQ ID NO: 310495 - DNA, 75 bp, synthetic construct
  source 1..75: mol_type = other DNA
cgtctgcggtactggcggtgctggattacacccaattaaattccgaagccgatcagcaggttcgcgcagaattga

SEQ ID NO: 310496 - DNA, 75 bp, synthetic construct
  source 1..75: mol_type = other DNA
ccgtttgtctttccgatgcgtttcatatgggttgccgggttgtcctttgaattacatcagtatccggatgcctat

SEQ ID NO: 310497 - DNA, 75 bp, synthetic construct
  source 1..75: mol_type = other DNA
cagcgcgcgctggctgtcggcatcctcaaccatgttgtggaagtggaagaactggaagatttcaccttacaaatg

SEQ ID NO: 310498 - DNA, 75 bp, synthetic construct
  source 1..75: mol_type = other DNA
tcccccaataattggctggtgtttatgcaaaatggtcaagaagtggtaattgatagcggtaaaagcgttagcctc

SEQ ID NO: 310499 - DNA, 75 bp, synthetic construct
  source 1..75: mol_type = other DNA
acttgatttatcttcggatctaaatcacaacgtcaaagtcgctgcaattaaagctcttggccgtattactcgacc

SEQ ID NO: 310500 - DNA, 75 bp, synthetic construct
  source 1..75: mol_type = other DNA
gggcggcgacttttgatgcagtcacgacggctatggcgtctgctgcccctgctcttggagcaatggctgtggtcg

SEQ ID NO: 310501 - DNA, 75 bp, synthetic construct
  source 1..75: mol_type = other DNA
agaaaaatttatcagtggatgctatctcctttctatgacatgaaacacagtgcgacaggaccagtaaatgatcgg

SEQ ID NO: 310502 - DNA, 75 bp, synthetic construct
  source 1..75: mol_type = other DNA
gttcattacctatgcatggattgggcggtatggaagttgtagcatgggatgttgctcaggcattatcatcattag

SEQ ID NO: 310503 - DNA, 75 bp, synthetic construct
  source 1..75: mol_type = other DNA
tggttgaaccggtaggtggcagaacaatcccgtatccccccagtaatccaggaagtgcagatactcacactcttt

SEQ ID NO: 310504 - DNA, 75 bp, synthetic construct
  source 1..75: mol_type = other DNA
atgcttaccgttgggaataaaccagagcacatcatgaaagctgccgggataagccgggcaacgttctaccgtatc

SEQ ID NO: 310505 - DNA, 75 bp, synthetic construct
  source 1..75: mol_type = other DNA
atgcttaccgttgggaataaaccagagcacatcatgaaagctgccgggataagccgggcaaccgtgcttgccagg

SEQ ID NO: 310506 - DNA, 75 bp, synthetic construct
  source 1..75: mol_type = other DNA
cgctggcccttatcagcacggaagggacaacagcgtggtacgcagaatacgatgaatggggtaacctgctgaatg

SEQ ID NO: 310507 - DNA, 75 bp, synthetic construct
  source 1..75: mol_type = other DNA
cacgccgcagcacctacaagatgctcgataaacgcagcgccctgtacaaagccaagcgcaagatcgagaaggcca

SEQ ID NO: 310508 - DNA, 75 bp, synthetic construct
  source 1..75: mol_type = other DNA
cgccgcagcctggcggatacccttcagcagtccggcggcgaagacggtggcagtgtggtgttcccgccggtgctg

SEQ ID NO: 310509 - DNA, 75 bp, synthetic construct
  source 1..75: mol_type = other DNA
taccgaattcagaagaggagtatgaaataattcagagagagttcagattaaaaaaggaaaaatatatagccttaa

SEQ ID NO: 310510 - DNA, 75 bp, synthetic construct
  source 1..75: mol_type = other DNA
cttacggtgaaatgctggttggttcacgacggatatcccaggacatcagcacccgtgatgagggcggtgacggga

SEQ ID NO: 310511 - DNA, 75 bp, synthetic construct
  source 1..75: mol_type = other DNA
ttgatattcgtgcgttgaaagagttctatccgcaggcaaccgccagcctggataaacttttgcgtaccatcatcg

SEQ ID NO: 310512 - DNA, 75 bp, synthetic construct
  source 1..75: mol_type = other DNA
cctattgaaaactcgatagttaaagaaattatcgtaaaagaaggagagtcagtccggaaaggggatgtgttatta

SEQ ID NO: 310513 - DNA, 75 bp, synthetic construct
  source 1..75: mol_type = other DNA
agataaccctgtcgccccaaattttaccccttatgcgctgaaagcgtttatcgcggattaccacccgttagggcc

SEQ ID NO: 310514 - DNA, 75 bp, synthetic construct
  source 1..75: mol_type = other DNA
tttacagcaatatcgcgttacccggcattaagaatggtgttatttaacgccgcttgcgcaatggaagactggaat

SEQ ID NO: 310515 - DNA, 75 bp, synthetic construct
  source 1..75: mol_type = other DNA
ttcatggagaggcagtacgcctgtttttacagcaatatcgcgttacccggcattaagaatggtgttatttaacgc

SEQ ID NO: 310516 - DNA, 75 bp, synthetic construct
  source 1..75: mol_type = other DNA
cattcagaaagaggttatgaattctcgcggaaggttactaggtcactagatgagctactttattggatcatgtca

SEQ ID NO: 310517 - DNA, 75 bp, synthetic construct
  source 1..75: mol_type = other DNA
gttaatctttgttctgctccaattggtgatggcacaccatatgttacatttgaaaacaatgtatataattacatt

SEQ ID NO: 310518 - DNA, 75 bp, synthetic construct
  source 1..75: mol_type = other DNA
tggtgagttcaggatcatgcgctacaggacgctaccgcatccttgcctggaaaaccctgagaatggaatgaggga

SEQ ID NO: 310519 - DNA, 75 bp, synthetic construct
  source 1..75: mol_type = other DNA
atagatagatatcgtgttgagataaaatatgatcctgtcacgacaaatctaaagaatagaaatatcagatatcgt

SEQ ID NO: 310520 - DNA, 75 bp, synthetic construct
  source 1..75: mol_type = other DNA
aaatgaatatgaaagtgccaaagatgctttcaatgaaggattgattgcacaaagtgaacttagtagtcttaatag

SEQ ID NO: 310521 - DNA, 75 bp, synthetic construct
  source 1..75: mol_type = other DNA
tatcattaaattatatcaatgaacttagtaatccgtatgtacaagggaggtttgtttgccaggaggtttttgtct

SEQ ID NO: 310522 - DNA, 75 bp, synthetic construct
  source 1..75: mol_type = other DNA
gatttcattcaagggtctttggcgaccttcacagggatccgggaaaaagggcaggatttcgatattgaccgtgca

SEQ ID NO: 310523 - DNA, 75 bp, synthetic construct
  source 1..75: mol_type = other DNA
ataaagcagcggccaaatttaaatacggtccggtttgggcgagggcaggttatatcagccaaccggtcagacgct

SEQ ID NO: 310524 - DNA, 75 bp, synthetic construct
  source 1..75: mol_type = other DNA
tgctgaacgagatcacgacgaacgtgaaacgagcttgaacggcagtatcagtttgaaccgccccgggtttcctgg

SEQ ID NO: 310525 - DNA, 75 bp, synthetic construct
  source 1..75: mol_type = other DNA
cgatcggtggtcattacgctatcgtgatgaaatcattgatacctttgaaaaagacatttttccctatattggcaa

SEQ ID NO: 310526 - DNA, 75 bp, synthetic construct
  source 1..75: mol_type = other DNA
atgttacgcttccagtgagcccctacagagatatttttcatagcagcagtatcgttacgggaacacagtttcgca

SEQ ID NO: 310527 - DNA, 75 bp, synthetic construct
  source 1..75: mol_type = other DNA
cttcgactcctccatcaacgatgaaggcttcccggatgacctcactgcactgagaaagacaatcaaccacatgct

SEQ ID NO: 310528 - DNA, 75 bp, synthetic construct
  source 1..75: mol_type = other DNA
aggttctagtggagtatctgacagagatggatcagtatcgcttataaatatagtgcttaaaccaaaagggattca

SEQ ID NO: 310529 - DNA, 75 bp, synthetic construct
  source 1..75: mol_type = other DNA
aacttcctagacaagaaaatcgctctaatcgacgaagcgatttcgatcaaagaaaagcaaattaatctgttaaaa

SEQ ID NO: 310530 - DNA, 75 bp, synthetic construct
  source 1..75: mol_type = other DNA
gttcgacgtggaagaaacacccagaactgttgggttgtcgccatttaatgggatgattactggtgcatataccgt

SEQ ID NO: 310531 - DNA, 75 bp, synthetic construct
  source 1..75: mol_type = other DNA
tcggtagagattgcccgcgcgctggtattgttgggcgctatcgagccgatgatcatcctctgcgctcgtgagttc

SEQ ID NO: 310532 - DNA, 75 bp, synthetic construct
  source 1..75: mol_type = other DNA
agagccgctggtcgaaagtcgctatctttacgacccgctgggccgcagggtggcaaaacgggtatggcgacgtga

SEQ ID NO: 310533 - DNA, 75 bp, synthetic construct
  source 1..75: mol_type = other DNA
aaaaccgctctaatcgacgaagcgatttcgatcaaagaaaagcaaattaatctgttaaaagaacataagcagatc

SEQ ID NO: 310534 - DNA, 75 bp, synthetic construct
  source 1..75: mol_type = other DNA
tacagaaacagttgaacgcaggactgccgaatcagggattgcagacagtaccacgtccggcacacttagggggaa

SEQ ID NO: 310535 - DNA, 75 bp, synthetic construct
  source 1..75: mol_type = other DNA
atgatcaaacaaggccgtggtgcagtagggaaagtcggattcagtgcgataacacaacgccgtgcattactcaat

SEQ ID NO: 310536 - DNA, 75 bp, synthetic construct
  source 1..75: mol_type = other DNA
aggatacgaaagactcactgcaaggacagaaatatcgtcttgacgcgaactacaatctcccattttcacttgggc

SEQ ID NO: 310537 - DNA, 75 bp, synthetic construct
  source 1..75: mol_type = other DNA
tctcgtgaaaactttcttgttaattttatgcgactaatccggattgtgcattgcgacctgattacgaaacgatta

SEQ ID NO: 310538 - DNA, 75 bp, synthetic construct
  source 1..75: mol_type = other DNA
taatgggagttcggactactcccaggctgcacttgaaggcgggattaatattaatgactggatgttacgcagcca

SEQ ID NO: 310539 - DNA, 75 bp, synthetic construct
  source 1..75: mol_type = other DNA
accccattggttttgccttttctcccccagccaatgcagatggtatagagattgccgctgttgattttgatcggg

SEQ ID NO: 310540 - DNA, 75 bp, synthetic construct
  source 1..75: mol_type = other DNA
tagtgaaggcaactatctgacaacatcagtggatgacggtgttgtattcctcaataacatcaaaccggacatggt

SEQ ID NO: 310541 - DNA, 75 bp, synthetic construct
  source 1..75: mol_type = other DNA
gtggtagcctggctgaaggttttaacagtatggtgttgaccataaattatcaggaaaaactaaaaagccagctaa

SEQ ID NO: 310542 - DNA, 75 bp, synthetic construct
  source 1..75: mol_type = other DNA
agcacggaaaatgagcctcaacccgtagagcaaccagagccggttcagcccggaactgacggtactatgatgtaa

SEQ ID NO: 310543 - DNA, 75 bp, synthetic construct
  source 1..75: mol_type = other DNA
atgggatacatcaagaaaacgaagaaggcgtccggcgctggtggcggtggcggtggcggtgagctatccatcatg

SEQ ID NO: 310544 - DNA, 75 bp, synthetic construct
  source 1..75: mol_type = other DNA
gcatggtacaagctggagaaacagaccaaagataaaaaaatggacagcgttagctgcatttcctggtggaccgag

SEQ ID NO: 310545 - DNA, 75 bp, synthetic construct
  source 1..75: mol_type = other DNA
tcaaggcttattaaagatggaacaattccttatcagaaggaaattatgtcaagaggacgtagagcaggtttgaca

SEQ ID NO: 310546 - DNA, 75 bp, synthetic construct
  source 1..75: mol_type = other DNA
caaagtctttatcaatttggtacggctctgtataatggattatggataactattctggtggttttcacactatcc

SEQ ID NO: 310547 - DNA, 75 bp, synthetic construct
  source 1..75: mol_type = other DNA
atttatgcggcgaacatcatgaagcattactcttgcaaatgcgcagcaaaaattatggtgtgcagtacgacgggt

SEQ ID NO: 310548 - DNA, 75 bp, synthetic construct
  source 1..75: mol_type = other DNA
tgtgaaaacgcaggagggagtgggttatatttatgtagtgatagagcaccaaagtaagccggaagaattaatggc

SEQ ID NO: 310549 - DNA, 75 bp, synthetic construct
  source 1..75: mol_type = other DNA
agaacaagcatatatgatagcttccgaatttgaacgaaaaaaaatcatgttatattatagttactacataagaag

SEQ ID NO: 310550 - DNA, 75 bp, synthetic construct
  source 1..75: mol_type = other DNA
gtgtatgaagatcagagcattggcgcggagctgaacgaaaaaagatatcaaccgcgtcgcctggcgttccatgct

SEQ ID NO: 310551 - DNA, 75 bp, synthetic construct
  source 1..75: mol_type = other DNA
gtgctcgggacgctgtacgacgcaccgataggctctgtccgctggcgctggacgtatggcggtcgtggtggcggc

SEQ ID NO: 310552 - DNA, 75 bp, synthetic construct
  source 1..75: mol_type = other DNA
attgggccgtgggtggaaaaggcagccaagcaatcccgggcgcagtctcaggccgtagtgatgttgttaccggct

SEQ ID NO: 310553 - DNA, 75 bp, synthetic construct
  source 1..75: mol_type = other DNA
aatattattccgatctcttgtggtctgtgaaaacgcaggagggagtgggttatatttatgtagtgatagagggtg

SEQ ID NO: 310554 - DNA, 75 bp, synthetic construct
  source 1..75: mol_type = other DNA
accaatactgccaatatcaccaccaacactaacagtatcaataccctgacggattccgttggcgaccttaaagac

SEQ ID NO: 310555 - DNA, 75 bp, synthetic construct
  source 1..75: mol_type = other DNA
gtcgggcatgaaaatggcataacgctgagccagcctttaggggataccaatgttttgattaaagcgcctggcgca

SEQ ID NO: 310556 - DNA, 75 bp, synthetic construct
  source 1..75: mol_type = other DNA
ctaacctgatgagcggcatttcgcattatggcaacggacccgcagtgatctattacggcgctggctatgtctcgc

SEQ ID NO: 310557 - DNA, 75 bp, synthetic construct
  source 1..75: mol_type = other DNA
ctgtggctgtttcggcagtatcaggtgcggcgcatgcgtggaccactggtgattttaatggttcatttgatatga

SEQ ID NO: 310558 - DNA, 75 bp, synthetic construct
  source 1..75: mol_type = other DNA
ccgcgctggctgcgtggcaaaaataccagcaggactgccagaaagttaaggatgaggcaaaacgcctcgaggccg

SEQ ID NO: 310559 - DNA, 75 bp, synthetic construct
  source 1..75: mol_type = other DNA
tgttgcctctgatgaactgaatattctgtggtttgaatattcgcccgtcacgtatgccagaaccgatgcgctgtt

SEQ ID NO: 310560 - DNA, 75 bp, synthetic construct
  source 1..75: mol_type = other DNA
gatgcgctggtgttagtgacgaatcatcttgatccacataacgaaggtaccacggtattcctccgtacgcttgat

SEQ ID NO: 310561 - DNA, 75 bp, synthetic construct
  source 1..75: mol_type = other DNA
gcggtgcaccgcgaggaagggctgagtcagtaccgcgcatacgacagccgtggacagttaattgccgtgaaagac

SEQ ID NO: 310562 - DNA, 75 bp, synthetic construct
  source 1..75: mol_type = other DNA
gtagatgccggtctggttattcgtaccaaacaggggctggaaattaagaacttagatgagttaaggcgattcttg

SEQ ID NO: 310563 - DNA, 75 bp, synthetic construct
  source 1..75: mol_type = other DNA
cggtagatagaaccaaggaacagttgttctatcgagaaacgacgtacgaaataactcctcatgaactagaggata

SEQ ID NO: 310564 - DNA, 75 bp, synthetic construct
  source 1..75: mol_type = other DNA
cgttggcatttgccctgataaatataaggaacactttaatcctattaggctataatatccctttcttccattttg

SEQ ID NO: 310565 - DNA, 75 bp, synthetic construct
  source 1..75: mol_type = other DNA
gtgtggctgacgcacgacccggaatacccggagaatttacctgccgcgccgctggtgcgctatggctggacgcca

SEQ ID NO: 310566 - DNA, 75 bp, synthetic construct
  source 1..75: mol_type = other DNA
catcagccatatcagcgaagggcaccgggtggcggtgtattacgggtatgatgagaaaggccgcctgaccggtga

SEQ ID NO: 310567 - DNA, 75 bp, synthetic construct
  source 1..75: mol_type = other DNA
atgccggactggctgatgaacttgtcaacagcaccgatgcgatcaccgttatgcgtgatgcactggatgcacgta

SEQ ID NO: 310568 - DNA, 75 bp, synthetic construct
  source 1..75: mol_type = other DNA
gtcgatgactttgagcgcaagatggaggcttatactggaacggcgagagctgttgcgacagtaaatggtactgcg

SEQ ID NO: 310569 - DNA, 75 bp, synthetic construct
  source 1..75: mol_type = other DNA
atgtccatcatcgcatccagtgcgtccggtttatccccgctgacgcggggaacacacatgaatgtcggttcagac

SEQ ID NO: 310570 - DNA, 75 bp, synthetic construct
  source 1..75: mol_type = other DNA
tcactataacaggagtggcaaaatttggtaagcacttagataattcagatcaaataagatcagtgtttaaactca

SEQ ID NO: 310571 - DNA, 75 bp, synthetic construct
  source 1..75: mol_type = other DNA
tatcactcaggcactgaccttcattgcaacctgcaatgcgctttatcatctgggagctgagccggtgtttaccga

SEQ ID NO: 310572 - DNA, 75 bp, synthetic construct
  source 1..75: mol_type = other DNA
gagtttgtaactgaacctgaatatgctcattctaattactggcttaattccattatttgtgtagatcagcagcag

SEQ ID NO: 310573 - DNA, 75 bp, synthetic construct
  source 1..75: mol_type = other DNA
ttagtgaggcgaagcaagcgctgatgctcgatgcaccaaagaaggaaaagctgaaggagttaggcgaggggattt

SEQ ID NO: 310574 - DNA, 75 bp, synthetic construct
  source 1..75: mol_type = other DNA
acgcattgcggtgcgagataccgggcacggcatcgatccaaaggtgattgagcgggtcgaagcgaacgaaatgcc

SEQ ID NO: 310575 - DNA, 75 bp, synthetic construct
  source 1..75: mol_type = other DNA
gcgtgtggcccggaatcattaatcaggctgcaggccaaattgattgctcgcgtaattttctcaatccaccgtata

SEQ ID NO: 310576 - DNA, 75 bp, synthetic construct
  source 1..75: mol_type = other DNA
ggatatttatcaatgacataattgcacctgttgttgcgtcttcgacaaatagtgaattcatggtccgtgcgagtg

SEQ ID NO: 310577 - DNA, 75 bp, synthetic construct
  source 1..75: mol_type = other DNA
ttttaagcgaagcaatattcgcatggcagggaatgtctgtaatcagatgaaaaagaagcgctgtttcgccctaag

SEQ ID NO: 310578 - DNA, 75 bp, synthetic construct
  source 1..75: mol_type = other DNA
gtatgacctgaccggaaaactcacgcagagtgaagatgaggggcttatcaccctctggcattacgatgcgtcaga

SEQ ID NO: 310579 - DNA, 75 bp, synthetic construct
  source 1..75: mol_type = other DNA
gtcgccggatctacctacagagaacctctgttgcaggaactccccgttataacctggatggtcaaccagaggggg

SEQ ID NO: 310580 - DNA, 75 bp, synthetic construct
  source 1..75: mol_type = other DNA
atgacatttttacagcttattttattgtatttctgtacggcggtgtgtgcactgtatctggtgagtggtgggtac

SEQ ID NO: 310581 - DNA, 75 bp, synthetic construct
  source 1..75: mol_type = other DNA
atgtcatttattcagcaaatacagctgtatttctgtacggctgtgtgtgcactgtatctggttagtggcggttat

SEQ ID NO: 310582 - DNA, 75 bp, synthetic construct
  source 1..75: mol_type = other DNA
gggctgcaggccaaattgattgccgcgtaattttctcaatccaccgtatatttttcttcgagactggttggggct

SEQ ID NO: 310583 - DNA, 75 bp, synthetic construct
  source 1..75: mol_type = other DNA
atgtggaatccatttaagaaaaataaagaggtagccattaaggttacaccacctaaaccagtacaggtacgtgat

SEQ ID NO: 310584 - DNA, 75 bp, synthetic construct
  source 1..75: mol_type = other DNA
ttccaagcgctggctggcggcgaaaaagcagaggtggctgagtatgaaggcccagcaggaaaatatttctgagaa

SEQ ID NO: 310585 - DNA, 75 bp, synthetic construct
  source 1..75: mol_type = other DNA
tttcgccctaagccttctcctgagttagtgcaggaattgcaaatgctggatgaaggcaacgttgctgcattttaa

SEQ ID NO: 310586 - DNA, 75 bp, synthetic construct
  source 1..75: mol_type = other DNA
agaggtgcgctttctggggctttttgacacagtggcagccatcgggagcctgctgaatttctacgatattaacgg

SEQ ID NO: 310587 - DNA, 75 bp, synthetic construct
  source 1..75: mol_type = other DNA
tgaacttcaccagcaacgcagcgacagccgaaatgacgaatggcggccaagccgtaacgaacgaacagggtaagg

SEQ ID NO: 310588 - DNA, 75 bp, synthetic construct
  source 1..75: mol_type = other DNA
gtcgttctgcaaacatcgaaagcggaaatcattgggaatggtgtggatgagacgactctgacagcaacagtgaaa

SEQ ID NO: 310589 - DNA, 75 bp, synthetic construct
  source 1..75: mol_type = other DNA
tgcaggtggcgggcaaaacgcttagccaagtacgccaggatatcgccagccgtttgaccacttatattgagagcc

SEQ ID NO: 310590 - DNA, 75 bp, synthetic construct
  source 1..75: mol_type = other DNA
atttaacacaaaatcatatgttatatcctggagatattctctttgtaccaaggaatgacgatcttaaagtgtttg

SEQ ID NO: 310591 - DNA, 75 bp, synthetic construct
  source 1..75: mol_type = other DNA
gagaagtttttctgcgaaataactatgctccgactgacgaacgctcgttcgtgtggccgatggcaccgggcaaag

SEQ ID NO: 310592 - DNA, 75 bp, synthetic construct
  source 1..75: mol_type = other DNA
gaataacagcgtctggaacgtaacaagtaattctaatctcgacacgctggcgctgagccattcaactgtcgattt

SEQ ID NO: 310593 - DNA, 75 bp, synthetic construct
  source 1..75: mol_type = other DNA
gtgatattggttgtctggagattcagggggccagtctatactccaatctcaaatgaatttctttataggttgcat

SEQ ID NO: 310594 - DNA, 75 bp, synthetic construct
  source 1..75: mol_type = other DNA
tccgcgcggccagctggtcagttggaaggacacgcagggccgtgaaacgcagtatgaatacaacgccgcaggcga

SEQ ID NO: 310595 - DNA, 75 bp, synthetic construct
  source 1..75: mol_type = other DNA
ctatcagatattggcaatcatcagcccaaacgctcatcagcaagctgattcgatgcttccccggctgataaaatt

SEQ ID NO: 310596 - DNA, 75 bp, synthetic construct
  source 1..75: mol_type = other DNA
agcacattatatggtacggcgtcatcttcttgtgtgggaaaatttcaaaaggttgtggtggcgacattaaaccct

SEQ ID NO: 310597 - DNA, 75 bp, synthetic construct
  source 1..75: mol_type = other DNA
ttcggctaatggaagagtatcttcagcaaaatttgattatgaatgtaacctggataccgccctgccaaaggtgat

SEQ ID NO: 310598 - DNA, 75 bp, synthetic construct
  source 1..75: mol_type = other DNA
ttatggcgatgtaatcgcgtcatacggagatacgctatcccctgaagcaattcaggagaaaatagcggatgcgat

SEQ ID NO: 310599 - DNA, 75 bp, synthetic construct
  source 1..75: mol_type = other DNA
tgaaagccgggcggcgtgaccgcctgcgtcaggaggttctgcaccgcatggccggaggtccgcccccgaaaccgc

SEQ ID NO: 310600 - DNA, 75 bp, synthetic construct
  source 1..75: mol_type = other DNA
tattgcaggtattatgggaattagttaccttgcatcatatattgatgcaagtgtggctgaaaaaataaataataa

SEQ ID NO: 310601 - DNA, 75 bp, synthetic construct
  source 1..75: mol_type = other DNA
tatcaatattcgaaccggctccattgatgccattttcaatctgctgaaaaccgacagtcgttttactgttgtcag

SEQ ID NO: 310602 - DNA, 75 bp, synthetic construct
  source 1..75: mol_type = other DNA
aagggggatgtttattatctcgcaaatgcaactacgcacgttaaaaatgcgcaaaagaaaccgcttctaatcacg

SEQ ID NO: 310603 - DNA, 75 bp, synthetic construct
  source 1..75: mol_type = other DNA
tttgttcatactcgattagctattattgatctctcagacgccggtcaacagccgatgcattctcactgcggtcgt

SEQ ID NO: 310604 - DNA, 75 bp, synthetic construct
  source 1..75: mol_type = other DNA
gtgctgttaacggggctaaagcgcaggcgctcactatcaacaaggatgaggttaactcaactgttgatttaactc

SEQ ID NO: 310605 - DNA, 75 bp, synthetic construct
  source 1..75: mol_type = other DNA
gctgggccgccggacgggaaaacgggtgtggcggcgggagcgtgacctgacggggtggatgtcgctgtcgcgtaa

SEQ ID NO: 310606 - DNA, 75 bp, synthetic construct
  source 1..75: mol_type = other DNA
acgcttatctggggctgattcgtcagtcgcagcgcgcgtttgatatggactactgcgtgcaactcgctttcgaga

SEQ ID NO: 310607 - DNA, 75 bp, synthetic construct
  source 1..75: mol_type = other DNA
gtgttgaccacgtaaaagtagcggaaggtttaggttgtaaagcgattcgcgtcttcaaaccggaagatattgcgc

SEQ ID NO: 310608 - DNA, 75 bp, synthetic construct
  source 1..75: mol_type = other DNA
cgatgattggtgcgataccacgggcgaacggctcagcaagggtttctggggcgaaccgcccgtaacggctgatga

SEQ ID NO: 310609 - DNA, 75 bp, synthetic construct
  source 1..75: mol_type = other DNA
gcccagcgtaactatcagtctaacgcccagaccatcaaaacccaggaccagatcctcaacacgctggttaactta

SEQ ID NO: 310610 - DNA, 75 bp, synthetic construct
  source 1..75: mol_type = other DNA
gatgacgaagggttgaaccgccccgggtttcctggagagtattttatctgtgaactcaggctgccagatcattat

SEQ ID NO: 310611 - DNA, 75 bp, synthetic construct
  source 1..75: mol_type = other DNA
gatgacaaaatgacaataacaaatacaatgagaacaccagaatcagcattatttccaactaaaatatatgctata

SEQ ID NO: 310612 - DNA, 75 bp, synthetic construct
  source 1..75: mol_type = other DNA
ttaatgctatgagaaatggagttgatatggataggattcagcttggcaaagaattgcaatacgaaagagataaaa

SEQ ID NO: 310613 - DNA, 75 bp, synthetic construct
  source 1..75: mol_type = other DNA
ttattgactggattgtcttctttcaggtggtgctcatctggttttttatggcttacaaggcagggcaatggattt

SEQ ID NO: 310614 - DNA, 75 bp, synthetic construct
  source 1..75: mol_type = other DNA
ctttgaacgaccttaagcagtatgttgcaatgggagtaactctagaagaccttaaaactcggctcaagtgctcga

SEQ ID NO: 310615 - DNA, 75 bp, synthetic construct
  source 1..75: mol_type = other DNA
cgctggggtagcgtccatcacacagaccgtacgttgttagcacattatcgcgcgtcgttgaaaagcgccattcag

SEQ ID NO: 310616 - DNA, 75 bp, synthetic construct
  source 1..75: mol_type = other DNA
gtgcacctccagccctttattacaaaatgtcgttcaataaacagcctcaggaacagcccaagatgcctgtttatg

SEQ ID NO: 310617 - DNA, 75 bp, synthetic construct
  source 1..75: mol_type = other DNA
gtgaaggacggcaagattgtttcttcgacaggcgcgctggcgaaaaccataccgaactccttacagtctacggcg

SEQ ID NO: 310618 - DNA, 75 bp, synthetic construct
  source 1..75: mol_type = other DNA
aaaagatttgaataataaaactgcaccagtaataaaaattaagcgtaaaattacatctgagactaataaaacgaa

SEQ ID NO: 310619 - DNA, 75 bp, synthetic construct
  source 1..75: mol_type = other DNA
atctctgataattgccttgtttgtgtacagcatcaccaggcttgtgggatgggtcattaaaggatttatgaaaga

SEQ ID NO: 310620 - DNA, 75 bp, synthetic construct
  source 1..75: mol_type = other DNA
aaatatcatcgtttattcctgatactatcgtttatgctgcaaacgcttcgaaggaagttcatgaacagtgcggtt

SEQ ID NO: 310621 - DNA, 75 bp, synthetic construct
  source 1..75: mol_type = other DNA
tcgaattattcattaaaaatcagcttgataacggacttactcgtggcgaacaaatggaactggcacgaattgcac

SEQ ID NO: 310622 - DNA, 75 bp, synthetic construct
  source 1..75: mol_type = other DNA
aagcagtacaacgtgaaggtcaatctgcaggagatgccttatgcccagcagctggaaaaactgcgtctcgacggg

SEQ ID NO: 310623 - DNA, 75 bp, synthetic construct
  source 1..75: mol_type = other DNA
tggcattaactatggcgtggcgccgctgccgaccctaccggacagtaagccgatgagctccttcctgggcgtcaa

SEQ ID NO: 310624 - DNA, 75 bp, synthetic construct
  source 1..75: mol_type = other DNA
actatcgctttgagtacgggcaggaccgtgtgaccatcacggacagcctgaaccggcgggaggtgctgtacacgg

SEQ ID NO: 310625 - DNA, 75 bp, synthetic construct
  source 1..75: mol_type = other DNA
tttcatgatacttgacgatgatacggaaatcccttcaagctattttgcttttaatgctaatcgttttgatttcga

SEQ ID NO: 310626 - DNA, 75 bp, synthetic construct
  source 1..75: mol_type = other DNA
caggtaaaacacctttttcctctcaactaaaaatggttatgggggttgagcctgatgatataatgtccgatatgg

SEQ ID NO: 310627 - DNA, 75 bp, synthetic construct
  source 1..75: mol_type = other DNA
ccggtgctgggtgcaaaggtgctgccgggcgagacggacattgcgctgcccggcccgctgccgttcatcctttcc

SEQ ID NO: 310628 - DNA, 75 bp, synthetic construct
  source 1..75: mol_type = other DNA
attaaatgatctgttaaaaaaaaatggagtggatgattatagcatcattagttttatcgatgcaaaaaaagccgt

SEQ ID NO: 310629 - DNA, 75 bp, synthetic construct
  source 1..75: mol_type = other DNA
gcgaacggcagactgacggagaagacggaccgcatcccgacgggtgtgatacggacggacgacgagcggacccac

SEQ ID NO: 310630 - DNA, 75 bp, synthetic construct
  source 1..75: mol_type = other DNA
cgtcgccgatctgtggggagtgtactttcatggtaaaggcaaaacccgtgtaatgaattacaaaaaaaggatggc

SEQ ID NO: 310631 - DNA, 75 bp, synthetic construct
  source 1..75: mol_type = other DNA
ttatccaatggcatggaatcgaaatcagtcgatacccgtagtatatatcgtgaactgggcgcaacgctgagttac

SEQ ID NO: 310632 - DNA, 75 bp, synthetic construct
  source 1..75: mol_type = other DNA
aatctgatatttcactgacctatggttctgtatgtagtggcatagaggccgctacggtagcctggcatgagcttg

SEQ ID NO: 310633 - DNA, 75 bp, synthetic construct
  source 1..75: mol_type = other DNA
tgtattacaaccgccaccgctattatgacccgctgcaggggaggtatatcactcaggatccgattgggctgaagg

SEQ ID NO: 310634 - DNA, 75 bp, synthetic construct
  source 1..75: mol_type = other DNA
ggaagggacaacagcgtggtacgcagaatacgatgaatggggtaaccagctgaatgaagagaacccgcaccagct

SEQ ID NO: 310635 - DNA, 75 bp, synthetic construct
  source 1..75: mol_type = other DNA
cagtatatggacagaaaaaaagaagctatgaactggtggtacgactatctgaataagcaaattagtggtgacagt

SEQ ID NO: 310636 - DNA, 75 bp, synthetic construct
  source 1..75: mol_type = other DNA
gcggggcggagtagcggcgcagcacagttcgcagccgctaagcgcgctctggcaggtgctgccggaagatgttcg

SEQ ID NO: 310637 - DNA, 75 bp, synthetic construct
  source 1..75: mol_type = other DNA
gagaagatacagcaggaagggagcgaggacgggcacggcgtggtatttccggctgaactggtggggctgctggac

SEQ ID NO: 310638 - DNA, 75 bp, synthetic construct
  source 1..75: mol_type = other DNA
ttttcttaacgtcagcccgacggtggagcggcaattacaacggattattttctctctcgagcgggaagcccggga

SEQ ID NO: 310639 - DNA, 75 bp, synthetic construct
  source 1..75: mol_type = other DNA
tcaccactccccgtctgagcttccgttttcttaacgtcagcccgacggtggagcggcaattacaacggattattt

SEQ ID NO: 310640 - DNA, 75 bp, synthetic construct
  source 1..75: mol_type = other DNA
tgttgaaagcatagacaggctaagccgcctgacacaaaaggaatgggcaacactgaaacagaggattcaggataa

SEQ ID NO: 310641 - DNA, 75 bp, synthetic construct
  source 1..75: mol_type = other DNA
atcagctcaaaattttaaacgtccagaattatctcaacaaaactgtgatacatgtaacattgatgatgctgacag

SEQ ID NO: 310642 - DNA, 75 bp, synthetic construct
  source 1..75: mol_type = other DNA
tttggataatagatacaacagatgaaaaagaacaatgtatgatgaataaggcaatagaccttaataaaaaactaa

SEQ ID NO: 310643 - DNA, 75 bp, synthetic construct
  source 1..75: mol_type = other DNA
attcacaattaccggagtcgattcaggttcaggcacagttgaaacagcctaaattacgtggaaacgttcagacgg

SEQ ID NO: 310644 - DNA, 75 bp, synthetic construct
  source 1..75: mol_type = other DNA
cggcgaccggctgaccacgatacagaacgacagaacccgcatccagacggtttatcagccggggagcttcacgcc

SEQ ID NO: 310645 - DNA, 75 bp, synthetic construct
  source 1..75: mol_type = other DNA
gatgcgatgccatggagtggcttgctgagcattatcctgtatttcctgcgtctatgcctgatgtgccgatgcgcg

SEQ ID NO: 310646 - DNA, 75 bp, synthetic construct
  source 1..75: mol_type = other DNA
atgttggcttcactgctggcgctgggtacggtgtcgtcattgagcggcatgctaatggcgggatttgtggcgggg

SEQ ID NO: 310647 - DNA, 75 bp, synthetic construct
  source 1..75: mol_type = other DNA
ctttctcagggagtttagtctccaggatttccggggcggttcagtgggtagaagcaagaaatcacgcaggcaaaa

SEQ ID NO: 310648 - DNA, 75 bp, synthetic construct
  source 1..75: mol_type = other DNA
gatgcgatgccatggaatggcttgctgagcactatcctgtatttcctgcgtcaatgcctgatgttccgatgcgta

SEQ ID NO: 310649 - DNA, 75 bp, synthetic construct
  source 1..75: mol_type = other DNA
taagacaatccttggctgtggtgtttttgctagtgagcataaagcatgcaatagaaaataaaatactgttgtctt

SEQ ID NO: 310650 - DNA, 75 bp, synthetic construct
  source 1..75: mol_type = other DNA
tactatgccaggctaatgtcaacccactatcccgttggggccggtgctgtcagcgctacggcaacctttacgctt

SEQ ID NO: 310651 - DNA, 75 bp, synthetic construct
  source 1..75: mol_type = other DNA
ggcgagggcgggcgtaacggcaagattgccaatatctaccagctggatatgtccgatgcgacgtcgctggtgatg

SEQ ID NO: 310652 - DNA, 75 bp, synthetic construct
  source 1..75: mol_type = other DNA
tcatgggcgaagttggtaagcaaagcactcttaagatggatcgaagtggtatgactttagctgaggccattggga

SEQ ID NO: 310653 - DNA, 75 bp, synthetic construct
  source 1..75: mol_type = other DNA
cccaggggatatcctttttgttccaagtaatgacgaattgaaaatttttgttatgggtgaagttggaaaacaatc

SEQ ID NO: 310654 - DNA, 75 bp, synthetic construct
  source 1..75: mol_type = other DNA
cgtttgactacctatattgaaagtccacaggttgatgttagcgttgctgcattccgttcgcaaaaagcatatgtt

SEQ ID NO: 310655 - DNA, 75 bp, synthetic construct
  source 1..75: mol_type = other DNA
ggtcagggattaaacagtctgcgtaagaacgtggttgaactcccagatagtgattacgatttggataagttggtc

SEQ ID NO: 310656 - DNA, 75 bp, synthetic construct
  source 1..75: mol_type = other DNA
atgcagaaggtatgtctcaggcttatagtgatgcgacaggagtttttgttattcgccaacttaagggtgataagc

SEQ ID NO: 310657 - DNA, 75 bp, synthetic construct
  source 1..75: mol_type = other DNA
actggagaggttgcaaaatcaggacagcagcctattaccaacattccattaactgtgatggatgcgattaatgct

SEQ ID NO: 310658 - DNA, 75 bp, synthetic construct
  source 1..75: mol_type = other DNA
acttatggtcactgtttgggatcatcccgaattgacaacgcctgcaggccaataccgtagcgctagcgacactgg

SEQ ID NO: 310659 - DNA, 75 bp, synthetic construct
  source 1..75: mol_type = other DNA
ccggaactgacgacacctgcaggccagtaccgtagcgctagcgacaccggtaactgggttaattccgatggtacc

SEQ ID NO: 310660 - DNA, 75 bp, synthetic construct
  source 1..75: mol_type = other DNA
cggcattagcattggcaattgggtttttatcgggttgtacaatcatccctggccagggattaaatagtctgcgca

SEQ ID NO: 310661 - DNA, 75 bp, synthetic construct
  source 1..75: mol_type = other DNA
attcgtcagttgaagggtgataagcaaggtaaaatagctaatatctatcagcttaacgcgcaagatgcttcggca

SEQ ID NO: 310662 - DNA, 75 bp, synthetic construct
  source 1..75: mol_type = other DNA
ccaagtacgccaggatatcgccagccgtttgaccacttatattgagagcccacaagttgatgtaagtgttgctgc

SEQ ID NO: 310663 - DNA, 75 bp, synthetic construct
  source 1..75: mol_type = other DNA
atgatcaggaagtacttgttccttatgctgcagatgggtcgtgttttcacccaggattggcaagtactcgcgatg

SEQ ID NO: 310664 - DNA, 75 bp, synthetic construct
  source 1..75: mol_type = other DNA
ctgtatgccctgatgcaaaaaggtgatttgaccgagaaccacctactttatcccggcgatattctgtttgttcca

SEQ ID NO: 310665 - DNA, 75 bp, synthetic construct
  source 1..75: mol_type = other DNA
cggcattagcgttggcaattgggtttttatcgggttgtacggttataccaggtcaagggttaaatactctgcgta

SEQ ID NO: 310666 - DNA, 75 bp, synthetic construct
  source 1..75: mol_type = other DNA
tcgaggccaaaattctcaccgagccagaagctgaagtcgagcgggtgatgcaggtgtgtaatgcctgtcgctatt

SEQ ID NO: 310667 - DNA, 75 bp, synthetic construct
  source 1..75: mol_type = other DNA
attgtcggcccggcaggcctgctgtggttaaaccttaagcgctcgccactgcatggcgacgcgcgacagaaaccg

SEQ ID NO: 310668 - DNA, 75 bp, synthetic construct
  source 1..75: mol_type = other DNA
ttgcaaaaaaataggaattcaagtcagtcagtttaataaattaacaatatgtaacaatcaagttttcaattgttc

SEQ ID NO: 310669 - DNA, 75 bp, synthetic construct
  source 1..75: mol_type = other DNA
aatgtttatccgatgactccaggactgatcgatcagcttcgtccggagattatactcgctcgtccaaacccacag

SEQ ID NO: 310670 - DNA, 75 bp, synthetic construct
  source 1..75: mol_type = other DNA
atggtgttgggcacagagttccaactgcagccttatgatattgtttatgtcactaccgcgccattggttcgttgg

SEQ ID NO: 310671 - DNA, 75 bp, synthetic construct
  source 1..75: mol_type = other DNA
cgtttaactacatatattgaaagcccacaggttgatgtaagtgttgcagcatttcgatcacaaaaagcatatgtt

SEQ ID NO: 310672 - DNA, 75 bp, synthetic construct
  source 1..75: mol_type = other DNA
actggtgaagttgcaaactctggaaaacaggccattacaaatattcccctaactgtgatggatgctatcaatgcg

SEQ ID NO: 310673 - DNA, 75 bp, synthetic construct
  source 1..75: mol_type = other DNA
actggcgaagttatgaagtcaggccagcagccgattacgaatattccattaactgtgatggatgcgatcaataat

SEQ ID NO: 310674 - DNA, 75 bp, synthetic construct
  source 1..75: mol_type = other DNA
taatggaaaagataccaaaatttctctttatgcgctgatgcaaaaaggtgatcttacccaaaatcatatgcttta

SEQ ID NO: 310675 - DNA, 75 bp, synthetic construct
  source 1..75: mol_type = other DNA
acttctcagaatcgcggtgacgtcaatagctgaagaatttctttcaggtccgctaattgaaccgccccgggtttc

SEQ ID NO: 310676 - DNA, 75 bp, synthetic construct
  source 1..75: mol_type = other DNA
gcatttatatttatttataactctttatttctttttttgagagaaaagaaaatcaagggggctttattagctgta

SEQ ID NO: 310677 - DNA, 75 bp, synthetic construct
  source 1..75: mol_type = other DNA
tacgggcatacaaattgagtatttcaataacacagtcagctctttatatattattttacttagtataacggcgat

SEQ ID NO: 310678 - DNA, 75 bp, synthetic construct
  source 1..75: mol_type = other DNA
aagacgtaacccaaacgcatcaacagttaagcaacacgcaaaaacgagtaacggataatagccagcagataacta

SEQ ID NO: 310679 - DNA, 75 bp, synthetic construct
  source 1..75: mol_type = other DNA
tcccgttcgtccggtttagttggtcactatctcttattgagttttatccttgcctgatactatttaatcagtatc

SEQ ID NO: 310680 - DNA, 75 bp, synthetic construct
  source 1..75: mol_type = other DNA
agcattgattagcgaagtttcttctatttctttatacgatgctagtgaagtacttgagcgcttattactgctgcc

SEQ ID NO: 310681 - DNA, 75 bp, synthetic construct
  source 1..75: mol_type = other DNA
ataatcaccactatcgcagttatgacaatgtgcagaaatctatcgttcaggagataaaaaatcgtagctggcaat

SEQ ID NO: 310682 - DNA, 75 bp, synthetic construct
  source 1..75: mol_type = other DNA
gtgccaatcggtaaacgagaccgcctgtctgcagtagtgattgatgtctcaggtgaggctaactcgactgttgaa

SEQ ID NO: 310683 - DNA, 75 bp, synthetic construct
  source 1..75: mol_type = other DNA
gggaaggggaatgacgagaaaaactggtatctgaccagtaaatgggacggcgtaacgccagcggatacgcccgac

SEQ ID NO: 310684 - DNA, 75 bp, synthetic construct
  source 1..75: mol_type = other DNA
ggtatttcaaagaaaaaaaccaggctctttacgtcatttttcatctggcactggaaacagcaatgcgacaaggtg

SEQ ID NO: 310685 - DNA, 75 bp, synthetic construct
  source 1..75: mol_type = other DNA
tactgctgaacagatatggatatgtctgtatgttcatcactggtataaagagcattatagtagttttgataataa

SEQ ID NO: 310686 - DNA, 75 bp, synthetic construct
  source 1..75: mol_type = other DNA
tcaatcttctttttaatccactaaatcttccgggaatgggaagtggtgtgcttgaagatattatgagtattccag

SEQ ID NO: 310687 - DNA, 75 bp, synthetic construct
  source 1..75: mol_type = other DNA
tatttttcgacatatcagactaatgagcgcgcaatccattccattgtaacaagcctgaaagaagatgatgtatgc

SEQ ID NO: 310688 - DNA, 75 bp, synthetic construct
  source 1..75: mol_type = other DNA
tggaaagtggtatccagttattttccggcgttccactggtagcactggcgaactggcttccagagtggttattac

SEQ ID NO: 310689 - DNA, 75 bp, synthetic construct
  source 1..75: mol_type = other DNA
ggacggaataaccgtaaaaagcctataagtaaggaaagcgtcaaccaagtgattgagttattgggctataaaggg

SEQ ID NO: 310690 - DNA, 75 bp, synthetic construct
  source 1..75: mol_type = other DNA
cgttccacaggcagcactggcgagctggcttccagagtgattataacgaccacatctgccggcggtaattacgaa

SEQ ID NO: 310691 - DNA, 75 bp, synthetic construct
  source 1..75: mol_type = other DNA
acgtcacccggatgcctcgctgaccgcaaaaggctttgttcaactcagtagcgccactaacagcgattctgaaac

SEQ ID NO: 310692 - DNA, 75 bp, synthetic construct
  source 1..75: mol_type = other DNA
atgttcggcttggctcacagcaatattatggtgtgaacaactggcaaacatggaactttcagtgcccttcaggtc

SEQ ID NO: 310693 - DNA, 75 bp, synthetic construct
  source 1..75: mol_type = other DNA
tataaatgctggtagctgcccggctgtacagtttcgtgtgaattataaaaatggcggtatatcttacaggtcagc

SEQ ID NO: 310694 - DNA, 75 bp, synthetic construct
  source 1..75: mol_type = other DNA
ggttcctttcatgttaacgccaccagtggcaaaaataggggcaaattccgggggtaatgaatccaacttactgat

SEQ ID NO: 310695 - DNA, 75 bp, synthetic construct
  source 1..75: mol_type = other DNA
ggcggcaaactgccgggaaaaccggtctgcaatgtgactaaagccttcagacgcattatccggcgggcaggtatc

SEQ ID NO: 310696 - DNA, 75 bp, synthetic construct
  source 1..75: mol_type = other DNA
tgacgggtatcaatgttcaggatgtcgggaaaaactctgccgataatattgcgggcgtttattacagacccgttc

SEQ ID NO: 310697 - DNA, 75 bp, synthetic construct
  source 1..75: mol_type = other DNA
atgtcagtttgactctgcaggttgagaacgacctgaaacatcagcttagtactgatgaatcccctaatgattttg

SEQ ID NO: 310698 - DNA, 75 bp, synthetic construct
  source 1..75: mol_type = other DNA
aaagcagggcacgtaattacagggcttggtattgtcggtgaagtcgatggtgatgaccccgcagtattcagacca

SEQ ID NO: 310699 - DNA, 75 bp, synthetic construct
  source 1..75: mol_type = other DNA
tacgcggctaacttcaggaatttatagctgcgacgaattagagtatcctgctggatcaatttgcgcgttgtgcat

SEQ ID NO: 310700 - DNA, 75 bp, synthetic construct
  source 1..75: mol_type = other DNA
gcaataataaaaaaagagctggtgtagcagaaaatggagttggatttattcatgtgtattattttgatgagcccg

SEQ ID NO: 310701 - DNA, 75 bp, synthetic construct
  source 1..75: mol_type = other DNA
gcctgccagaagcaacagactgaaaagaaacctgcgagcaagggtaaatatagtgaactccagtgggcggacagg

SEQ ID NO: 310702 - DNA, 75 bp, synthetic construct
  source 1..75: mol_type = other DNA
tacattgcaattccaacgaatatctaccaacaaatacttaatgatgctatctcaacagtagagtcactgcccccc

SEQ ID NO: 310703 - DNA, 75 bp, synthetic construct
  source 1..75: mol_type = other DNA
ccaaagatggtcttccgttatatccgtggatatcttgccagtgaaaaagccatggtaagctttatgcgtaatcat

SEQ ID NO: 310704 - DNA, 75 bp, synthetic construct
  source 1..75: mol_type = other DNA
tatcagctttagcgatatctttcgtggcccggcttccatctttggcggcattgagtatcaaacgccgtggaatcc

SEQ ID NO: 310705 - DNA, 75 bp, synthetic construct
  source 1..75: mol_type = other DNA
gctctatacttcacttgaagaaacatataattctgcaggccaagaaggattaagattatttctaaaaagaactag

SEQ ID NO: 310706 - DNA, 75 bp, synthetic construct
  source 1..75: mol_type = other DNA
atttcctgacaactactgcatctaaggtgacgttactcgctgacgttgatattcccttggtgggagataacctaa

SEQ ID NO: 310707 - DNA, 75 bp, synthetic construct
  source 1..75: mol_type = other DNA
agttttatcaaaaaaagattggtcacgaggattatttgatgtggctggaaataattaataaaacaaatggtgcta

SEQ ID NO: 310708 - DNA, 75 bp, synthetic construct
  source 1..75: mol_type = other DNA
aacgattaatcgaaggaacaagaaaacagagggagttgattttaaagtcaaagcaaaaaagaaataaagttgaca

SEQ ID NO: 310709 - DNA, 75 bp, synthetic construct
  source 1..75: mol_type = other DNA
ctcaaagaaggtcaattcttacctaagatcagtgctcatgactttagacgaacattcgcagtattctttaagcgt

SEQ ID NO: 310710 - DNA, 75 bp, synthetic construct
  source 1..75: mol_type = other DNA
taaacactatcatcatcctcaagcatatcttaaaaagacattacaatccgttgagcgtgagttcccagtggagtt

SEQ ID NO: 310711 - DNA, 75 bp, synthetic construct
  source 1..75: mol_type = other DNA
tgccggaaatctgcgaggctccacaccttcctgttttttccttcatccatcacagtgcacctcacttaatagggt

SEQ ID NO: 310712 - DNA, 75 bp, synthetic construct
  source 1..75: mol_type = other DNA
aagacatcgaactgaaacgacgtaacggcgttaaacgcgacaaagaagaaacattatcggacggcggcggacttt

SEQ ID NO: 310713 - DNA, 75 bp, synthetic construct
  source 1..75: mol_type = other DNA
ggcctccgctattgaggggaacggccaggttaaccaggtcggctccgggacaaccacattatccggctcgaataa

SEQ ID NO: 310714 - DNA, 75 bp, synthetic construct
  source 1..75: mol_type = other DNA
cagtacgaacgctttctggggcacagcacgagcaagctgcatattccggtcgaaaatgaacacctattccggttt

SEQ ID NO: 310715 - DNA, 75 bp, synthetic construct
  source 1..75: mol_type = other DNA
acaagaagcagccgctgcctcttcgtcagcaacgtgctcgcatagaggtgacattgcagggtgacgcgctacagc

SEQ ID NO: 310716 - DNA, 75 bp, synthetic construct
  source 1..75: mol_type = other DNA
tataactggtttgataacaccgtctccggcgagtatctgcccagtgaaaaatatcactctgacggtatcaccgcc

SEQ ID NO: 310717 - DNA, 75 bp, synthetic construct
  source 1..75: mol_type = other DNA
tcaggcggcaaatacgctgtttaatacccgactgcatgaccgtctgggggaaacacaatataccgacctgctgac

SEQ ID NO: 310718 - DNA, 75 bp, synthetic construct
  source 1..75: mol_type = other DNA
aggtgatacttccggtagtacccgcattatggtcaacaatgcgggcggtctgggcgcgaatactctggaagggat

SEQ ID NO: 310719 - DNA, 75 bp, synthetic construct
  source 1..75: mol_type = other DNA
agtggcttctgacagaacacagcaaccggacgatcggcggatttcactttggtgccggaacgctggtactgccgc

SEQ ID NO: 310720 - DNA, 75 bp, synthetic construct
  source 1..75: mol_type = other DNA
tgggatgaattttaccgtcactacggtgaatccatttcccggattgtgttcaaccagcagcttcctgcaaatctc

SEQ ID NO: 310721 - DNA, 75 bp, synthetic construct
  source 1..75: mol_type = other DNA
cctccggggcgcgtgaccgcgtactggataacgacgagcttatcgacctgtggaaggccaccagcgacggcagct

SEQ ID NO: 310722 - DNA, 75 bp, synthetic construct
  source 1..75: mol_type = other DNA
acttcaacgcttcccgtttgaaacgctcgccagcttattctcgttccgccatccaatacctgctgtgaagatggc

SEQ ID NO: 310723 - DNA, 75 bp, synthetic construct
  source 1..75: mol_type = other DNA
agcagcccggtgatgttactgacacattccgaattcgctttcatgacgagctggcgaacaattatcagctgctcc

SEQ ID NO: 310724 - DNA, 75 bp, synthetic construct
  source 1..75: mol_type = other DNA
aaagagagcagtcacctgacagcagacaaagaactgagtaaccgggttagagcagcattgcggaacctacacccg

SEQ ID NO: 310725 - DNA, 75 bp, synthetic construct
  source 1..75: mol_type = other DNA
tgggtgtggcttaccagacgacggtaggcggcattatgaatacctcggtggcgttgttgcagtcctcacaggtag

SEQ ID NO: 310726 - DNA, 75 bp, synthetic construct
  source 1..75: mol_type = other DNA
ggatgagatgcagaatctggtcgctggcgtgttacgcagcatgggatataaaactcaggtatcgcctgcgggtgc

SEQ ID NO: 310727 - DNA, 75 bp, synthetic construct
  source 1..75: mol_type = other DNA
ggaatgcggaagagattaagcgcgatagtctgactgatgcaaccagaaacacccttggctcaacgctgacagttt

SEQ ID NO: 310728 - DNA, 75 bp, synthetic construct
  source 1..75: mol_type = other DNA
ggtaagccagtggacaggccagaacggcgaaacgcggcggggctggcaggttatcgcagacagcgtaatcagtgc

SEQ ID NO: 310729 - DNA, 75 bp, synthetic construct
  source 1..75: mol_type = other DNA
gcaatggcgttggttaacaacctggctggtctggcgtcgtggtgcgaaaacacgtccgctcgaggcatttattca

SEQ ID NO: 310730 - DNA, 75 bp, synthetic construct
  source 1..75: mol_type = other DNA
ggaaggagcgcttgaaaaagccctggctattgcgtgccagcttcagaaaatggggatgacgccggagcagattaa

SEQ ID NO: 310731 - DNA, 75 bp, synthetic construct
  source 1..75: mol_type = other DNA
ggccttatcgatgattatcaacaatcagtgatgcttcagcttattgcagaagagtaccaagaatccagaaaatca

SEQ ID NO: 310732 - DNA, 75 bp, synthetic construct
  source 1..75: mol_type = other DNA
ttgcatccgtttaaggtcgatgcagaaaactggctctattgtatagataaggtcgtaaaccccggaaagaactcc

SEQ ID NO: 310733 - DNA, 75 bp, synthetic construct
  source 1..75: mol_type = other DNA
gtttttgataatcagcaagatgttcttgctgaaatgttcaaaatggatttccctacagatactgtctgtcaaata

SEQ ID NO: 310734 - DNA, 75 bp, synthetic construct
  source 1..75: mol_type = other DNA
ttgcaggattcagcaccgttgaccaggcaatgacccgtcgtaaggagcttggtttgcgagaagcacagcttgctc

SEQ ID NO: 310735 - DNA, 75 bp, synthetic construct
  source 1..75: mol_type = other DNA
ctgctgtgatggccagcatgttattcggtgccgctgcacacgctgctgatacccgcattggtgtaacaatctata

SEQ ID NO: 310736 - DNA, 75 bp, synthetic construct
  source 1..75: mol_type = other DNA
ctggctagtatctacagatacaaaggctgttttttataaaggcaatgacattaacttcatcagaaaactagccaa

SEQ ID NO: 310737 - DNA, 75 bp, synthetic construct
  source 1..75: mol_type = other DNA
aagcactggcaaggcaccgcaaaggtgaactcctgaccgtggcgggtaacatgcagatcagccagtggaccggac

SEQ ID NO: 310738 - DNA, 75 bp, synthetic construct
  source 1..75: mol_type = other DNA
gcaaaaagtatgatcgcgctttgttgcctggaaaaatgccggagaatcagttttggttattggttgaaatatccc

SEQ ID NO: 310739 - DNA, 75 bp, synthetic construct
  source 1..75: mol_type = other DNA
aacaggtgaactacgacacctttatttcgtatccgaagcttgatgcctgggcggctcacagtgattttcagtcgc

SEQ ID NO: 310740 - DNA, 75 bp, synthetic construct
  source 1..75: mol_type = other DNA
ttgatcagtacattgcgcgccaggcgcagttaaacggcgtatcgactgcggcagtcgctgcgaaatttgcggtag

SEQ ID NO: 310741 - DNA, 75 bp, synthetic construct
  source 1..75: mol_type = other DNA
atcaataaaacaggcccagaatattatattatgggtcaggtcgttcactatggtaaaaactggcgtttatttatt

SEQ ID NO: 310742 - DNA, 75 bp, synthetic construct
  source 1..75: mol_type = other DNA
cttaatgctgacggtgaaattgttagcaaagaagagattattgataaggtctggagcgcgagtgttgccagtgat

SEQ ID NO: 310743 - DNA, 75 bp, synthetic construct
  source 1..75: mol_type = other DNA
agaatgatttatggtcaaatgttttgcttcacgaccctcgtttgctcaatgtaaaaaatgaatttaatactatca

SEQ ID NO: 310744 - DNA, 75 bp, synthetic construct
  source 1..75: mol_type = other DNA
atgaaagcttcttatgcgatcgttgccgcacgcgatgccatttcagctaccagcggtgtggcttcccagctttcc

SEQ ID NO: 310745 - DNA, 75 bp, synthetic construct
  source 1..75: mol_type = other DNA
ggtgtgattacgggatacggtaaggagactgccttgttgtggccggtgaaccagagtgtggcagaagtgccggat

SEQ ID NO: 310746 - DNA, 75 bp, synthetic construct
  source 1..75: mol_type = other DNA
agtgcgcgaacagcgcgaccgggcggcaaaaaaggccagcaggggcaggccactgacgcactgaacagggcaaaa

SEQ ID NO: 310747 - DNA, 75 bp, synthetic construct
  source 1..75: mol_type = other DNA
caaacgcccgacaggttgcgctcgaccgtatcatgatcggtttcaacggtacgtcatacgctgaaaaatctgatc

SEQ ID NO: 310748 - DNA, 75 bp, synthetic construct
  source 1..75: mol_type = other DNA
agaaaaaaaagcattcacccaagtctaaaaatagcaaaactagtcgcaagctacactatgcaggatatagattat

SEQ ID NO: 310749 - DNA, 75 bp, synthetic construct
  source 1..75: mol_type = other DNA
aaggttttgcctggacagacggtgataacaatatcgtgcccgtcactgcggccgagctgctggctctgggggatg

SEQ ID NO: 310750 - DNA, 75 bp, synthetic construct
  source 1..75: mol_type = other DNA
ttgtggctgatgatagttacatttgtttttccggtgtcatgtcggctttacctttatgtaatgatccgtcgactt

SEQ ID NO: 310751 - DNA, 75 bp, synthetic construct
  source 1..75: mol_type = other DNA
cgtgtatcagcggtgaacgtaaaaccaatgccggcacctatctgccgaccctgtttgccctgacggcagcggcct

SEQ ID NO: 310752 - DNA, 75 bp, synthetic construct
  source 1..75: mol_type = other DNA
gctggcgaagcggcgttggggaaagccctctcaggtggcatgagtgagaccactgactgggttaagcagcgctac

SEQ ID NO: 310753 - DNA, 75 bp, synthetic construct
  source 1..75: mol_type = other DNA
gatgagcttaaggcgctcggagtggaaggtgatacgccggaagatactctgcgcacactgataggccggctgaac

SEQ ID NO: 310754 - DNA, 75 bp, synthetic construct
  source 1..75: mol_type = other DNA
ctttcttaaaattaagaatggactcacttaacgattcagatatttcacagttattccgcttcagatatgataaat

SEQ ID NO: 310755 - DNA, 75 bp, synthetic construct
  source 1..75: mol_type = other DNA
tcattgcccacagctttctagatatttcaactctaccccagaagtcaccatttctgctataacaaatggaattga

SEQ ID NO: 310756 - DNA, 75 bp, synthetic construct
  source 1..75: mol_type = other DNA
aaaaatccacataacaaatccagaagacatactgcgtatatctggattaattctagatgcgtttgagtatgtaaa

SEQ ID NO: 310757 - DNA, 75 bp, synthetic construct
  source 1..75: mol_type = other DNA
tggcctgtacgatgatgcgggaacgctaattgccgtggcgaacatggccgaaagttataagccagcccttgccga

SEQ ID NO: 310758 - DNA, 75 bp, synthetic construct
  source 1..75: mol_type = other DNA
ttcaggctggcatttctatagtcagcgaaatacagataactcggtgatatttgctgtaaacggtcagatacaacc

SEQ ID NO: 310759 - DNA, 75 bp, synthetic construct
  source 1..75: mol_type = other DNA
gctattctggattttaacaatgggcgagggttttattgttctcactcaatattcggtattaatgccatttttagc

SEQ ID NO: 310760 - DNA, 75 bp, synthetic construct
  source 1..75: mol_type = other DNA
atcaactgcacggataatccggaccagaacggtatttaccagcactcggtttttctgaccctcgcaggagataaa

SEQ ID NO: 310761 - DNA, 75 bp, synthetic construct
  source 1..75: mol_type = other DNA
atggtttctattgtaatttcaatcattttttcaagagttagagtacggatacaaaaacactttttattattacca

SEQ ID NO: 310762 - DNA, 75 bp, synthetic construct
  source 1..75: mol_type = other DNA
ccaaaactcgaggccggagactccgtctggtggcactgcgacgtcatccattccgttgcccccgttgaaaatcaa

SEQ ID NO: 310763 - DNA, 75 bp, synthetic construct
  source 1..75: mol_type = other DNA
tgtggacaatccctgaaagccgcatgaaaatgcgacgtaaacacgttgtaccactgtcacgacaggccactgaca

SEQ ID NO: 310764 - DNA, 75 bp, synthetic construct
  source 1..75: mol_type = other DNA
gaattatcgaagggaatctgaacagtcctctgtcagtaaacgttcttgctgaacgttcaggctattcagaacgct

SEQ ID NO: 310765 - DNA, 75 bp, synthetic construct
  source 1..75: mol_type = other DNA
ccaaatgctgatgatgtcattactcattcattctccggttgtcgctgattttatgcgacataccttagccgaggc

SEQ ID NO: 310766 - DNA, 75 bp, synthetic construct
  source 1..75: mol_type = other DNA
gttaatgaaagtgagttcgctagaaacaatgtctttctaaaaaacgttaacaatgaaacatttaatatattatct

SEQ ID NO: 310767 - DNA, 75 bp, synthetic construct
  source 1..75: mol_type = other DNA
aaactagagggtttaaccttgtcaccaattgttggtaatgctgacacatggttgtacagtgttgataaaatatta

SEQ ID NO: 310768 - DNA, 75 bp, synthetic construct
  source 1..75: mol_type = other DNA
gctgcgaacaagtcgctcgacttttttgtgtaagcaagcgcacgattctcaggtgggtagataaaatccccggct

SEQ ID NO: 310769 - DNA, 75 bp, synthetic construct
  source 1..75: mol_type = other DNA
atacgtcgcagaaaactaactcttgccgctttactcttgcgtcataccagtcgccgggtaacagacatatcacta

SEQ ID NO: 310770 - DNA, 75 bp, synthetic construct
  source 1..75: mol_type = other DNA
gcaaggccaaaaaggcggatgtgctggccattgccagggcgtgggggatcagtggtgaggccgagctggccgtca

SEQ ID NO: 310771 - DNA, 75 bp, synthetic construct
  source 1..75: mol_type = other DNA
ttctcatgaaccaaatgatgccgttttttcggtgttggtcgtgggtttattattggggatgtcatgttttctggt

SEQ ID NO: 310772 - DNA, 75 bp, synthetic construct
  source 1..75: mol_type = other DNA
aaatatttaggtaaaagattaatattatctgatataccagtacaccatgaacaaaatcctcctgattcattatat

SEQ ID NO: 310773 - DNA, 75 bp, synthetic construct
  source 1..75: mol_type = other DNA
tgttttacgcgtatgacaggatacggaggacggtgtggcgcacgtcttcggtgaacgcactctggccacactgga

SEQ ID NO: 310774 - DNA, 75 bp, synthetic construct
  source 1..75: mol_type = other DNA
ttggtatcaaaattacccctaccaccgcgaccggtattccggctgtgggtgcagagttgacgctggcagatatta

SEQ ID NO: 310775 - DNA, 75 bp, synthetic construct
  source 1..75: mol_type = other DNA
atgcgggctgacaagtcgacagccagttaaacatcactaccgggtaaacgaagacaaaagtccgccattgccaaa

SEQ ID NO: 310776 - DNA, 75 bp, synthetic construct
  source 1..75: mol_type = other DNA
acctcattaaaacgggtgccgggattggcctcccgcttaagtctaaggcgatacagacgccgctcgcgtcttttt

SEQ ID NO: 310777 - DNA, 75 bp, synthetic construct
  source 1..75: mol_type = other DNA
gagaattgcattaggcaacgagataagaaatcggtcggttttaattgggttaattgagaaaaagatccacttcta

SEQ ID NO: 310778 - DNA, 75 bp, synthetic construct
  source 1..75: mol_type = other DNA
aaaagcgcgaacagctgattgaaagcttagaaggcaaactgaataaaaaaaccagccaagagaccctatttacca

SEQ ID NO: 310779 - DNA, 75 bp, synthetic construct
  source 1..75: mol_type = other DNA
aatgtgtagcattagacatgtttaatgatcctgctatagcgcaacgacttatacgcgagcttgggctatccgtta

SEQ ID NO: 310780 - DNA, 75 bp, synthetic construct
  source 1..75: mol_type = other DNA
cgtggcttgttgatcggcatgggaatgacggaaaagcagggcggttccgatgtcatgagcaacaccacccgcgca

SEQ ID NO: 310781 - DNA, 75 bp, synthetic construct
  source 1..75: mol_type = other DNA
cgtcagcagcagggattcggcaagctggcagatgaggtccgtatccgcgccggaaatttagataaagtattacaa

SEQ ID NO: 310782 - DNA, 75 bp, synthetic construct
  source 1..75: mol_type = other DNA
cgcacctacagcagctaccggactacgactcctgccccggtgggcgtttttggccccggctggaaagcgccttct

SEQ ID NO: 310783 - DNA, 75 bp, synthetic construct
  source 1..75: mol_type = other DNA
cgcacctacagcagctaccggactacgactcctgccccggtgggcgtattaggccccggctggaaagcgccttct

SEQ ID NO: 310784 - DNA, 75 bp, synthetic construct
  source 1..75: mol_type = other DNA
cgcacctacagcagctaccggactaagactcctgccccggtgggcgtattcggccccggctggaaagcgccttct

SEQ ID NO: 310785 - DNA, 75 bp, synthetic construct
  source 1..75: mol_type = other DNA
cgcacctacagcagctaccggactaggactcctgccccggtgggcgtgttcggccccggctggaaagcgccttct

SEQ ID NO: 310786 - DNA, 75 bp, synthetic construct
  source 1..75: mol_type = other DNA
cgcacctacagcagctaccggactacgactcctgccccggtgggcgtgttgggccccggctggaaagcgccttct

SEQ ID NO: 310787 - DNA, 75 bp, synthetic construct
  source 1..75: mol_type = other DNA
cgcacctacagcagctaccggactacgactcctgccccggtgggcgtcttcggccccggctggaaagcgccttct

SEQ ID NO: 310788 - DNA, 75 bp, synthetic construct
  source 1..75: mol_type = other DNA
cgctatgcaattgtcacaggtagggccgactacaaccccgctcccgatcttgccagcgcgttagcaacaccgaaa

SEQ ID NO: 310789 - DNA, 75 bp, synthetic construct
  source 1..75: mol_type = other DNA
cgttatattgctctcgggcagtcagtagctggtactgcaaacgcagatgcgaccttcaaagttcaatatctataa

SEQ ID NO: 310790 - DNA, 75 bp, synthetic construct
  source 1..75: mol_type = other DNA
gaggatatcgattttgagaagaaattatgggagatcccagcggaagtgatgaagatgaagcggccacatattgta

SEQ ID NO: 310791 - DNA, 75 bp, synthetic construct
  source 1..75: mol_type = other DNA
agagattatcaaggcctaactcaaaaatagtgttagttggtgacagcttaagtgccccatataatataagcacag

SEQ ID NO: 310792 - DNA, 75 bp, synthetic construct
  source 1..75: mol_type = other DNA
gaatacattaaccgctccaatagcacaaaagcatttaaacaaaaaaaatggtgatggatattttagccatgaaaa

SEQ ID NO: 310793 - DNA, 75 bp, synthetic construct
  source 1..75: mol_type = other DNA
gtttacgcgtctggagcacatcgaggccacggaaaccgaaggtattacccgcttccgggggcaatcgccttactc

SEQ ID NO: 310794 - DNA, 75 bp, synthetic construct
  source 1..75: mol_type = other DNA
aaaccgcaaaaccaaaagaaaagccctataaacttgctgatggcggtggtatgtatctactgattaacactaatg

SEQ ID NO: 310795 - DNA, 75 bp, synthetic construct
  source 1..75: mol_type = other DNA
atccgataagttcaaatgataatgatagtgtagacttgcgaaatataaaatgccctgaaggttcagagagagtag

SEQ ID NO: 310796 - DNA, 75 bp, synthetic construct
  source 1..75: mol_type = other DNA
actggaattgtgggagatgagggcgaggtttacatgagtggtttgaacaaaacaggcaaattatatgctaagtgg

SEQ ID NO: 310797 - DNA, 75 bp, synthetic construct
  source 1..75: mol_type = other DNA
atggtggtgaactattacgcacctgcgaaagtgtttaaattcctgatagacagctccggtgctatcgccctgctg

SEQ ID NO: 310798 - DNA, 75 bp, synthetic construct
  source 1..75: mol_type = other DNA
ccttcttcaaaatggggcgcccggcgtaatgatttatggcatcccacaatgtcatccgtatctgcaggaaataaa

SEQ ID NO: 310799 - DNA, 75 bp, synthetic construct
  source 1..75: mol_type = other DNA
cgatgaaattgccaggcgtgtgactgaggatggcggaccgaatgatgcagaggaggataaacagggggacgaata

SEQ ID NO: 310800 - DNA, 75 bp, synthetic construct
  source 1..75: mol_type = other DNA
atcatgggtgaggatggtaaacgctggcatccgtgccgttcgcaagatgaattgttggcagaactatcaacgaaa

SEQ ID NO: 310801 - DNA, 75 bp, synthetic construct
  source 1..75: mol_type = other DNA
gaagatgaaacggcctcacattgtgccgctctcagagcaggttattacgctgtttaaacagcttgaaccgatatc

SEQ ID NO: 310802 - DNA, 75 bp, synthetic construct
  source 1..75: mol_type = other DNA
aaaacgctatcagaggtacctataatcatgcccagtatctggatggtcgccgtgaaatgatgcagtggtatgctg

SEQ ID NO: 310803 - DNA, 75 bp, synthetic construct
  source 1..75: mol_type = other DNA
tgaacttccccacttccttactgatctggcgggttataccggaagtatcatcactaagacagctactcagatcat

SEQ ID NO: 310804 - DNA, 75 bp, synthetic construct
  source 1..75: mol_type = other DNA
tttcttttgctatcattttatgcttttatatgtaatgccagtaatgatccgcagctgagacatatcgataaaatt

SEQ ID NO: 310805 - DNA, 75 bp, synthetic construct
  source 1..75: mol_type = other DNA
aatgttgattcatatgatggtggtcgttatatctactataacggctgtgaatatgaggctactggtgtcattgtt

SEQ ID NO: 310806 - DNA, 75 bp, synthetic construct
  source 1..75: mol_type = other DNA
tgtttttactggtgattgtacttacagcgattcaccagggcagaaggataaatattggtctttaacggcttatat

SEQ ID NO: 310807 - DNA, 75 bp, synthetic construct
  source 1..75: mol_type = other DNA
gattatggttacaaaaaaatcaccacaggaatactcactttcatttataaaacaattaccaaatacggtgaactt

SEQ ID NO: 310808 - DNA, 75 bp, synthetic construct
  source 1..75: mol_type = other DNA
tggataaggcaggcaaagagggcccgaaccggatactgtattttcacacggatgtgaacggcgcgccggaagaga

SEQ ID NO: 310809 - DNA, 75 bp, synthetic construct
  source 1..75: mol_type = other DNA
tcagcggttcttcaattgcttaccgggccttccgattcatcgtacgacgctgcgctgaagcgtctggtgcaatcc

SEQ ID NO: 310810 - DNA, 75 bp, synthetic construct
  source 1..75: mol_type = other DNA
gaagatagattccatgtcattaaatttaataattataaaggacttatttttcaacatggcttaatgagattagca

SEQ ID NO: 310811 - DNA, 75 bp, synthetic construct
  source 1..75: mol_type = other DNA
gtgtggcggcgtgaacgggacctgacgggctggatgtcgctgtcacggaaaccgcaagtgacctggtacggctgg

SEQ ID NO: 310812 - DNA, 75 bp, synthetic construct
  source 1..75: mol_type = other DNA
aaatcagtataggtcacgagtctaaagactactcgaaaacaatggagagagattttactcgttacaaagaaaaat

SEQ ID NO: 310813 - DNA, 75 bp, synthetic construct
  source 1..75: mol_type = other DNA
aaaggtataacaataacagttacactcatagaaaaaacttgcatcagcgaaaatccagattgtcccgcaggagta

SEQ ID NO: 310814 - DNA, 75 bp, synthetic construct
  source 1..75: mol_type = other DNA
gacaaataatatctgcaagtatattgttctttacgatttatttctataacaggccccctaaaatattggggatta

SEQ ID NO: 310815 - DNA, 75 bp, synthetic construct
  source 1..75: mol_type = other DNA
ccagcttagatctggagtgtgaggtaaaatatataaatgatgtaacatctttgtatgcaaaagactggttgtcgg

SEQ ID NO: 310816 - DNA, 75 bp, synthetic construct
  source 1..75: mol_type = other DNA
gaggggggatagataaaaaactggcatcaaaaatattcaggcaatatcatcatgaacttatgtctgaagtaaaaa

SEQ ID NO: 310817 - DNA, 75 bp, synthetic construct
  source 1..75: mol_type = other DNA
tggcctggcgatatctccaggacagccattggtggtgtttatatgttcaagccacgatgttgcagcatcggcata

SEQ ID NO: 310818 - DNA, 75 bp, synthetic construct
  source 1..75: mol_type = other DNA
ggggcgtcgcgattggcataccctggtttattaaaacgggtcgtctgcggcacgctggttgattccccgccgctg

SEQ ID NO: 310819 - DNA, 75 bp, synthetic construct
  source 1..75: mol_type = other DNA
ctggtgcggggcatgctacgccagaggcattgctggaagcgctggagcgtcgttatcaggtgcagaattcccccc

SEQ ID NO: 310820 - DNA, 75 bp, synthetic construct
  source 1..75: mol_type = other DNA
aataaggttagatgagtacagtaaaacagggaaaatagctgaatttcatggaggggggatagataaaaaactggc

SEQ ID NO: 310821 - DNA, 75 bp, synthetic construct
  source 1..75: mol_type = other DNA
aatgcagtcagggaaagcaaaaacagtcgcaacggcaggtcagaaagtcatgaaagccacgcagctgtgtccacg

SEQ ID NO: 310822 - DNA, 75 bp, synthetic construct
  source 1..75: mol_type = other DNA
atgaaattatataacacccctggattaagtcagatttatttcaggcggtccccctcaccgccatatttaaagaag

SEQ ID NO: 310823 - DNA, 75 bp, synthetic construct
  source 1..75: mol_type = other DNA
tttctggctgatcagatagcttccggagtcctgcaactgggtgaggctattgggcgctcgatacattccacagtg

SEQ ID NO: 310824 - DNA, 75 bp, synthetic construct
  source 1..75: mol_type = other DNA
cgtggcatattaaaggccagacctacactgcggttatgcattttgctggcgactgcgaaacggtattagctttag

SEQ ID NO: 310825 - DNA, 75 bp, synthetic construct
  source 1..75: mol_type = other DNA
gtaggactgtcttgtgcaattgcaactggctatctgaaagataatagcatcataaagaaagataccattataggt

SEQ ID NO: 310826 - DNA, 75 bp, synthetic construct
  source 1..75: mol_type = other DNA
tagttctagcctggattataggtatgccgctgggaattggtgcatttattgtaggactgtcttgtgcaattgcaa

SEQ ID NO: 310827 - DNA, 75 bp, synthetic construct
  source 1..75: mol_type = other DNA
ttccatgaaaattcaggttggtgcgaatgacggccagactatcacgattgatctgaagaaaattgactcagatac

SEQ ID NO: 310828 - DNA, 75 bp, synthetic construct
  source 1..75: mol_type = other DNA
tcaggcatatgatgttgcgacttctggcaacaaagattcttacaccaacactgacggtacactgactactgataa

SEQ ID NO: 310829 - DNA, 75 bp, synthetic construct
  source 1..75: mol_type = other DNA
gcgtgaacgtactgtcaaaagatggctcgatgaaaattcaggtcggcgcgaacgatggtgaaaccatcacgattg

SEQ ID NO: 310830 - DNA, 75 bp, synthetic construct
  source 1..75: mol_type = other DNA
aatggcaaaggcactattgcgaacaaagctgctacagtcagcgatctgaccgctgctggtgcaacgggaacaggt

SEQ ID NO: 310831 - DNA, 75 bp, synthetic construct
  source 1..75: mol_type = other DNA
taccgccggttttacacaaggcgttgtggattcaaatggtaatagtacttggactaaatcaactacgactaattt

SEQ ID NO: 310832 - DNA, 75 bp, synthetic construct
  source 1..75: mol_type = other DNA
gatgctgaaactaaagctgcaaccaccgccgatccactgaaagctctggacgaagccatcagctccatcgacaaa

SEQ ID NO: 310833 - DNA, 75 bp, synthetic construct
  source 1..75: mol_type = other DNA
tctcctatacggctgacggtgtaaaccaaacgaatgctgcagcaaatctcatacctgcagcagggaaaacgacag

SEQ ID NO: 310834 - DNA, 75 bp, synthetic construct
  source 1..75: mol_type = other DNA
ggttctgcaccggacccgcaggtgtcacgacggtgcaaatagtggttcttccgcaatttgggtggaagaaaatgg

SEQ ID NO: 310835 - DNA, 75 bp, synthetic construct
  source 1..75: mol_type = other DNA
tatgtgtcagttaatgatgtagttgattgtattattaagttaagtatgatggataaggctattggaaaaactatc

SEQ ID NO: 310836 - DNA, 75 bp, synthetic construct
  source 1..75: mol_type = other DNA
tgatggggtagatatttctgttgatgcttcaacgtttgctaacgccgttaaaaatgagacttacactgcaactgt

SEQ ID NO: 310837 - DNA, 75 bp, synthetic construct
  source 1..75: mol_type = other DNA
atgtatctactcattaacactaatggttctaaatattggcgtatgaagtaccgctttgctggcaaagaaaagatg

SEQ ID NO: 310838 - DNA, 75 bp, synthetic construct
  source 1..75: mol_type = other DNA
acaccatgagtacaattctgcatgaacaaggctttaattccgcctggattgaaatgcagttagctcatgtggata

SEQ ID NO: 310839 - DNA, 75 bp, synthetic construct
  source 1..75: mol_type = other DNA
ccggtacagtaactgtagcttcaaatggcgcaggtgcaactggtaaatttgcagctactgttggggcacaggctt

SEQ ID NO: 310840 - DNA, 75 bp, synthetic construct
  source 1..75: mol_type = other DNA
tattccgtagacaaagacacgggggctgtaagtgttacaggggggagcggtacgggtaaatacgccgcaaacgtg

SEQ ID NO: 310841 - DNA, 75 bp, synthetic construct
  source 1..75: mol_type = other DNA
ggcattaagtaagctgagtgatggcgatactgtagatattgcaacctatgctggtggtacaagttcaacagttag

SEQ ID NO: 310842 - DNA, 75 bp, synthetic construct
  source 1..75: mol_type = other DNA
ctgacaattggcggacagcaagcctacctgactactgatggtaaccttacaacaaacaactccggtggtgcggct

SEQ ID NO: 310843 - DNA, 75 bp, synthetic construct
  source 1..75: mol_type = other DNA
taaaattgacactataaaaaaagatctagacctttttgcagccaacataaaagctatccttgatgaaaaaagcct

SEQ ID NO: 310844 - DNA, 75 bp, synthetic construct
  source 1..75: mol_type = other DNA
tgcatcagtcgatagaccagacgagattattgatgaagttttgtcattatctataaagaaaaaagaagttgaaga

SEQ ID NO: 310845 - DNA, 75 bp, synthetic construct
  source 1..75: mol_type = other DNA
aagcgcagatcatccagcaggccggtaactccgtgctggcaaaagctaaccaggtaccgcagcaggttctgtctc

SEQ ID NO: 310846 - DNA, 75 bp, synthetic construct
  source 1..75: mol_type = other DNA
caattacactgaacaaggttcgtatcagtgctgatgctctgcagtctgctgcgaaaggtactgttatcaatgttg

SEQ ID NO: 310847 - DNA, 75 bp, synthetic construct
  source 1..75: mol_type = other DNA
atggcggtaatctgcaaacaggtttgactgctggtggtgaggctctgactgctgttgcaaatggtaaaaccacgg

SEQ ID NO: 310848 - DNA, 75 bp, synthetic construct
  source 1..75: mol_type = other DNA
gctggggctgagtgggtttaatgtgaatggtggcggggctgtggctaatactgcagcgactaaatctgatttggc

SEQ ID NO: 310849 - DNA, 75 bp, synthetic construct
  source 1..75: mol_type = other DNA
aagtcatttaatgttattttaaaaaatctttcggcgaaagatataaatctatctaattactgtataaaaggtatt

SEQ ID NO: 310850 - DNA, 75 bp, synthetic construct
  source 1..75: mol_type = other DNA
aaatggaaaaacgcggagccttggagaaaatgcgcaaggtccgccagcgttgtggcgaggtgttccgctatgcaa

SEQ ID NO: 310851 - DNA, 75 bp, synthetic construct
  source 1..75: mol_type = other DNA
tatgatgcagcaagtaaatcttatagttttgctgcagatggtgccgattcagcgaagacgttaagcatcattaat

SEQ ID NO: 310852 - DNA, 75 bp, synthetic construct
  source 1..75: mol_type = other DNA
gcgaaagaccaattgcgaagttatttggcatgatgttaatattcaagagaagttccccgtaacggatataacaaa

SEQ ID NO: 310853 - DNA, 75 bp, synthetic construct
  source 1..75: mol_type = other DNA
cgcgattttatatatagacaatcatactttgtcagtaaggctacgaataaagcagtcagcgtatgggcaattaaa

SEQ ID NO: 310854 - DNA, 75 bp, synthetic construct
  source 1..75: mol_type = other DNA
gatggtgagccaggattatacgccgcaatggaaaataatcaccctttgtgtgtcacacggttcctctctaaaatt

SEQ ID NO: 310855 - DNA, 75 bp, synthetic construct
  source 1..75: mol_type = other DNA
caattaaactatgttgtgtccgtttacgacccgaacgataccaacgttgccgtcagaggcacccacaggacagca

SEQ ID NO: 310856 - DNA, 75 bp, synthetic construct
  source 1..75: mol_type = other DNA
ggaagatggtgcatcaggattgatgatcgtcatgatggacaggtggtcaaaacggagaacagtaaacgtacaata

SEQ ID NO: 310857 - DNA, 75 bp, synthetic construct
  source 1..75: mol_type = other DNA
tcagttattcacactgttggccgctaaaaatcatgacaacatgtcagctgttcatatagccattcatcataatca

SEQ ID NO: 310858 - DNA, 75 bp, synthetic construct
  source 1..75: mol_type = other DNA
gcatcgcctttaaatacaagttgagcaaagctagcacatggaacccctgctttatacatcgccatgagcaagggt

SEQ ID NO: 310859 - DNA, 75 bp, synthetic construct
  source 1..75: mol_type = other DNA
cgtcctctggcccaggccgatgccgctgaactggatgcgttgattgtgccggggggtttggcgcggcgaagaatt

SEQ ID NO: 310860 - DNA, 75 bp, synthetic construct
  source 1..75: mol_type = other DNA
atttatgcaagaaattcagtcactggtaaatagtcgcatcattcataaaaataatctagttaagttactgcaaac

SEQ ID NO: 310861 - DNA, 75 bp, synthetic construct
  source 1..75: mol_type = other DNA
gaatgcattaaccactccaataacacaagtgcttttaagcaaaaaaaatggtgatggatattttagcaatgaaaa

SEQ ID NO: 310862 - DNA, 75 bp, synthetic construct
  source 1..75: mol_type = other DNA
caagaaattcagtcactggtagataatcacatcattcatgaagataatctggttaaattactgcaaactaaaagt

SEQ ID NO: 310863 - DNA, 75 bp, synthetic construct
  source 1..75: mol_type = other DNA
gtgaaccagggttatttgctgcaatggaaaataatcaccctttgtgtgtcacacggttcctctctaaagtttatg

SEQ ID NO: 310864 - DNA, 75 bp, synthetic construct
  source 1..75: mol_type = other DNA
gaacaaataataatcaagatgattataaaggtgattacctatatgtaaagttggcagaaggagattattttattt

SEQ ID NO: 310865 - DNA, 75 bp, synthetic construct
  source 1..75: mol_type = other DNA
atagcagcctcccggctggcacattacaacggaggggcgagcctgagcttccgttacctggaccacaaaacggga

SEQ ID NO: 310866 - DNA, 75 bp, synthetic construct
  source 1..75: mol_type = other DNA
caatgaccagagatgcatccagagcagttctgcgttttgtcactgtcacagcagaagccttacgcttcaggcaga

SEQ ID NO: 310867 - DNA, 75 bp, synthetic construct
  source 1..75: mol_type = other DNA
ggcaaacaataatagttatttgggcacaacacaaatcgcctccggtacgctgatggtgagcgacaactcgcagct

SEQ ID NO: 310868 - DNA, 75 bp, synthetic construct
  source 1..75: mol_type = other DNA
aaagatggcgtctacgtggtggtcgatgcgagcgacgggcaggtaagtctggcaaacaataatagttatttgggc

SEQ ID NO: 310869 - DNA, 75 bp, synthetic construct
  source 1..75: mol_type = other DNA
agaaagctctaccaagaaatatacacattctatacgtattgctaaaggtcaaggctgttggcagcattacgatga

SEQ ID NO: 310870 - DNA, 75 bp, synthetic construct
  source 1..75: mol_type = other DNA
acaccactattaaatctaatcgctctggtaaaatctatcattacgtcggaaaaagaacaaccacaaatctagacg

SEQ ID NO: 310871 - DNA, 75 bp, synthetic construct
  source 1..75: mol_type = other DNA
gggagttgattaacaacggtattcgactgacaggtcgtgttggatacacggcgaactacgctgttttcgttcacg

SEQ ID NO: 310872 - DNA, 75 bp, synthetic construct
  source 1..75: mol_type = other DNA
tcgaggatgttgtgctggtcaccccgcaaggcgcagaagtgctctacgccatgccgaaaacagtgttgctcacgg

SEQ ID NO: 310873 - DNA, 75 bp, synthetic construct
  source 1..75: mol_type = other DNA
cacaagcgccccgctacaacaaagcgcttattatggcgagtgtaaggcggtcgctatggagctgaaagagaaaat

SEQ ID NO: 310874 - DNA, 75 bp, synthetic construct
  source 1..75: mol_type = other DNA
tcttttctggtggtggtggtctagaccttggattctctgccgctggatataatattattttatcttcagatattg

SEQ ID NO: 310875 - DNA, 75 bp, synthetic construct
  source 1..75: mol_type = other DNA
cagcatttcggcccattgatgatgcttctctggcgcgtaatcccttccgcgtttttactgatcttacccagcaat

SEQ ID NO: 310876 - DNA, 75 bp, synthetic construct
  source 1..75: mol_type = other DNA
atgagcaacggcccgaagggcgagacgaagtcgagtcatcctgcacgacccaccactaacatagttagttgtagt

SEQ ID NO: 310877 - DNA, 75 bp, synthetic construct
  source 1..75: mol_type = other DNA
gttctgcatggttacgaaaagatccgctggccctccgcaccggactgggcacagcgggaaacgtggctcgtcttc

SEQ ID NO: 310878 - DNA, 75 bp, synthetic construct
  source 1..75: mol_type = other DNA
acaccaaaatgaaccaaaaacgatacatccggagccagcagcgcaacatgcacagaaaaatccctgtaatgtttg

SEQ ID NO: 310879 - DNA, 75 bp, synthetic construct
  source 1..75: mol_type = other DNA
aacaaaaacgagtcaccatatctagttcaggctaccattaaaactctggatggaaaaaaaaacgaaaattttata

SEQ ID NO: 310880 - DNA, 75 bp, synthetic construct
  source 1..75: mol_type = other DNA
gcacagcgggtatgatgcggcaggaaggctcacggcgcagacggacgcggcgggacggcggacagagtacggtct

SEQ ID NO: 310881 - DNA, 75 bp, synthetic construct
  source 1..75: mol_type = other DNA
tgaggtactgcatacagaaggcggggccgggctgaagcgggtggtgaaaaaagaactggcggacggcagcgtcac

SEQ ID NO: 310882 - DNA, 75 bp, synthetic construct
  source 1..75: mol_type = other DNA
ctggcaccggagctgatggggattaaaaaccagcccgcgatgataaaaaatcgcgcgcttgaccgttcagtctct

SEQ ID NO: 310883 - DNA, 75 bp, synthetic construct
  source 1..75: mol_type = other DNA
atcaggaattattgctggatgacaacgcatcaggttcccgcggattacagtcgcagcgcgacctgattgacataa

SEQ ID NO: 310884 - DNA, 75 bp, synthetic construct
  source 1..75: mol_type = other DNA
ggctgcatgattttatgcagcagaacggtgcagaactggccgctgcactggcaccggagctgatggggattaaaa

SEQ ID NO: 310885 - DNA, 75 bp, synthetic construct
  source 1..75: mol_type = other DNA
atgccggatggcaatccggcattgatatttagcgatgatgtttgtcaggccccggacgatgatcgccacgatgat

SEQ ID NO: 310886 - DNA, 75 bp, synthetic construct
  source 1..75: mol_type = other DNA
ctcaggaaagcgtcggcgcttacgtcaacatcggttatatgtataaacacggacaaggcgttgagaaagattatc

SEQ ID NO: 310887 - DNA, 75 bp, synthetic construct
  source 1..75: mol_type = other DNA
cgatctccgacaggctctcgacctgtatcgtaaagttcagtcatccggaaccagagatgtcagtcaagaaattcg

SEQ ID NO: 310888 - DNA, 75 bp, synthetic construct
  source 1..75: mol_type = other DNA
atgatgcgaagatattgattccgcttaaccaggcgagtaaagactacagcctacatagcggtaaggtgccattaa

SEQ ID NO: 310889 - DNA, 75 bp, synthetic construct
  source 1..75: mol_type = other DNA
cgtaatacatgcgtgctggcacaggatagcaagcaaatcaatgtgcagttaggcgatgtctcgctgacacgtttt

SEQ ID NO: 310890 - DNA, 75 bp, synthetic construct
  source 1..75: mol_type = other DNA
gtgctttgcatcaggcatgggggcaatcagcgcagtgatggtcggtttgttaaacagcggtgaccatattttatt

SEQ ID NO: 310891 - DNA, 75 bp, synthetic construct
  source 1..75: mol_type = other DNA
gtgcgtgcccgattgcgtattctggtgcgccagacgctgcgtaagtataagtatccgccggacaaaacgccgggc

SEQ ID NO: 310892 - DNA, 75 bp, synthetic construct
  source 1..75: mol_type = other DNA
gattttccggaagctgtcgtaggcgacacagtcgccatttttgaagaccatctggaatcatttctcgtagccaac

SEQ ID NO: 310893 - DNA, 75 bp, synthetic construct
  source 1..75: mol_type = other DNA
ccggcaggcttaagctacacgtatcagtatgagaaagaccgcatcaccatcaccgacagcctgaaccgccgtgaa

SEQ ID NO: 310894 - DNA, 75 bp, synthetic construct
  source 1..75: mol_type = other DNA
aaaagtattcaacgtatactttgataataatgaagagttagttactgatggtgagcctgacgtagtatgtttaag

SEQ ID NO: 310895 - DNA, 75 bp, synthetic construct
  source 1..75: mol_type = other DNA
cgcgaaatcgctgcaggcgatggatttcagcaccatcactgataaatcctcatacaacgccattgaatggcccgc

SEQ ID NO: 310896 - DNA, 75 bp, synthetic construct
  source 1..75: mol_type = other DNA
gttggagaacaattaaaacgtattaaatatgaagttggtgaaaataacttaaaggtattcaacgtacactttaat

SEQ ID NO: 310897 - DNA, 75 bp, synthetic construct
  source 1..75: mol_type = other DNA
actcgcactatcggaagttcaccagccagtcgtagcacgttcttgcatacgacgtggctacgggtttcgagaccg

SEQ ID NO: 310898 - DNA, 75 bp, synthetic construct
  source 1..75: mol_type = other DNA
tgcggtacgggagctgggtgatgacgtccttaagaaactggctatcgaagtcacgttaaaattgcgccagtccac

SEQ ID NO: 310899 - DNA, 75 bp, synthetic construct
  source 1..75: mol_type = other DNA
gcgcaggtgattgaagaactgatccagatggcaaaagagtttcaggaagcgatggcgcgtgatgaagcgctgggg

SEQ ID NO: 310900 - DNA, 75 bp, synthetic construct
  source 1..75: mol_type = other DNA
tcgtggtgatttcggatgaagcgcaccgtagccagtatggcctgagcgccacgctggacagacaaactggcgtct

SEQ ID NO: 310901 - DNA, 75 bp, synthetic construct
  source 1..75: mol_type = other DNA
atgttatcagagatccgcttaaatgttattatccgatctcatggatgttattgggtgatctctttcaataaaaat

SEQ ID NO: 310902 - DNA, 75 bp, synthetic construct
  source 1..75: mol_type = other DNA
tcactttatgaacttaattatcataatttaaaagagcttatttgctatgaatacaaatgtgcagacgaagataaa

SEQ ID NO: 310903 - DNA, 75 bp, synthetic construct
  source 1..75: mol_type = other DNA
gatatttatgaagatgctatttcattcgttttttcacgtccagacattaagaatgttgccatatcaggcccatac

SEQ ID NO: 310904 - DNA, 75 bp, synthetic construct
  source 1..75: mol_type = other DNA
tgatgaccttgatgcagctaaacagcttatcctctcgcatctgcgttttgttatccacattgcccgacagtattc

SEQ ID NO: 310905 - DNA, 75 bp, synthetic construct
  source 1..75: mol_type = other DNA
ttcaatacacgcaaaccccacacatatatgaccctggaattcgttttaagatcgaacgtttcatcgtgccgcaga

SEQ ID NO: 310906 - DNA, 75 bp, synthetic construct
  source 1..75: mol_type = other DNA
tgaccgggcgcctgaagtcgccggacagccggggcaagacgacgatcgtggcaacgagggtcgaacccgatcttg

SEQ ID NO: 310907 - DNA, 75 bp, synthetic construct
  source 1..75: mol_type = other DNA
aggaacttgcgccaaaagcggctgtatgtgacgcgatagtcaaaaacgatatgcaccgcacggcttcagaggtag

SEQ ID NO: 310908 - DNA, 75 bp, synthetic construct
  source 1..75: mol_type = other DNA
ttgataacaataaaatcactgctgtaatttatgacggtaaacctgctttcgttgcaatggatgtggcgcgggcgt

SEQ ID NO: 310909 - DNA, 75 bp, synthetic construct
  source 1..75: mol_type = other DNA
gacgattacacgccaaaaacggttgactacggcaaaaaaattgacttggccaaagaccgttatgccagtgaaatt

SEQ ID NO: 310910 - DNA, 75 bp, synthetic construct
  source 1..75: mol_type = other DNA
gggacattcgcacaagctgtatgaaaaaaaccttgatggctgtcagcagatcatggcaaatattgacttgccacg

SEQ ID NO: 310911 - DNA, 75 bp, synthetic construct
  source 1..75: mol_type = other DNA
gatgttctcgtgccgacgttcatcgttcaggccggaaaactacccgctggagaatggcaagttactgaggccaat

SEQ ID NO: 310912 - DNA, 75 bp, synthetic construct
  source 1..75: mol_type = other DNA
atgaaaaaactcacgcttattttactgtgcgcatgcgggggcgcggctctggctgccgacgaggatatcactttc

SEQ ID NO: 310913 - DNA, 75 bp, synthetic construct
  source 1..75: mol_type = other DNA
cgatgacgccgccattgaaaccgacgtcccgggcctggggattgagcttcagcaaaacggccagccgtttaaagt

SEQ ID NO: 310914 - DNA, 75 bp, synthetic construct
  source 1..75: mol_type = other DNA
agccgtgttccggttctcgttcgcgacagtaagaaccctgacgatgtagacacacagcaggaagatcacgattgg

SEQ ID NO: 310915 - DNA, 75 bp, synthetic construct
  source 1..75: mol_type = other DNA
cacccagcaggaagaccatgactgggacagcactcgttatcgtgtactgcataatccatccagacctgcatactc

SEQ ID NO: 310916 - DNA, 75 bp, synthetic construct
  source 1..75: mol_type = other DNA
ttcctgagaagcctgctttttacgtgttggagcattgccgtggctggattagccgcatacccgtgctggttcgcg

SEQ ID NO: 310917 - DNA, 75 bp, synthetic construct
  source 1..75: mol_type = other DNA
tgaaatgagggtaactcacgatggatatgagcaggctgtattcactgctaaaggacaagtatggattactgagct

SEQ ID NO: 310918 - DNA, 75 bp, synthetic construct
  source 1..75: mol_type = other DNA
cttttatgaggagcacgcgcaaaaaaagtaccgaccagagcctggtcctgtgcgacaccgtgcgttatctgccgg

SEQ ID NO: 310919 - DNA, 75 bp, synthetic construct
  source 1..75: mol_type = other DNA
tgaaacgcggcgcggatggctatctgttaaaagatatggaaccggaagatctgctgaaagcattgcatcaggcag

SEQ ID NO: 310920 - DNA, 75 bp, synthetic construct
  source 1..75: mol_type = other DNA
gagggcgacggaaacgaagcacaaatcaacgctctgcttcagagcattaaatctttcccttctaatttaggtaat

SEQ ID NO: 310921 - DNA, 75 bp, synthetic construct
  source 1..75: mol_type = other DNA
tcgataatactcaggggttaggcagaggaaatattgccaatgacggtctgttaacgctaaaaaacgtgactggcg

SEQ ID NO: 310922 - DNA, 75 bp, synthetic construct
  source 1..75: mol_type = other DNA
ccggtacgctcgacattctcgcatcaacgaacagtgcaggagattacacgctgaccaatgcgctcaaaggcgatg

SEQ ID NO: 310923 - DNA, 75 bp, synthetic construct
  source 1..75: mol_type = other DNA
gaacagaccaattttgcattcgccgtccaggagtttgaggggaaagtagtcagtgttgtacactcagccaaggaa

SEQ ID NO: 310924 - DNA, 75 bp, synthetic construct
  source 1..75: mol_type = other DNA
cgggacacgctacccggtgtggcgctgtatgcatggcttcaggccgaacaacgacaaccgaacgcctggcaacat

SEQ ID NO: 310925 - DNA, 75 bp, synthetic construct
  source 1..75: mol_type = other DNA
aaaacaacaggactcgcagcctgttaatcaacaatctgaacatgaacccgaatctgcatcaagggtgaagcgtga

SEQ ID NO: 310926 - DNA, 75 bp, synthetic construct
  source 1..75: mol_type = other DNA
gcgcgaatgaagtgttaacaatgtcatcgcgtgagattgcagatttaactggtaagaaacatcttaatgtatgcc

SEQ ID NO: 310927 - DNA, 75 bp, synthetic construct
  source 1..75: mol_type = other DNA
gatgtttctcgctggcaggagcggatcgactggcagcgggtggcaaaaatgcgcgacaacggtatccgcttataa

SEQ ID NO: 310928 - DNA, 75 bp, synthetic construct
  source 1..75: mol_type = other DNA
caaaggcatcattgaaaggaaggggtgtccttgaatcaccagaactggaagagttattgggtaatgggttttaca

SEQ ID NO: 310929 - DNA, 75 bp, synthetic construct
  source 1..75: mol_type = other DNA
ttatctacgcgttaatgggtgctgaaaggatcctgttctccgtcgattatccctatcagaccctggacggtgtaa

SEQ ID NO: 310930 - DNA, 75 bp, synthetic construct
  source 1..75: mol_type = other DNA
ctttaattattcgtgatattcctgtatttaaagaaattgcagagtctaacgctttctattttcatgggcaaaaac

SEQ ID NO: 310931 - DNA, 75 bp, synthetic construct
  source 1..75: mol_type = other DNA
aacccagcgctttcaattgccagaaaaatttattctatcgttagcgatgattgaatcgcgaaaaaatattgaaac

SEQ ID NO: 310932 - DNA, 75 bp, synthetic construct
  source 1..75: mol_type = other DNA
tctctggctacgccgtgcgcttcaacgcactgacccgtgaacagcaacaggatgttatttcacgtacctttaccc

SEQ ID NO: 310933 - DNA, 75 bp, synthetic construct
  source 1..75: mol_type = other DNA
tgggagccgacctcgatgccagcgtaccgtccactggcatgccggataatgcacaggcgctgttagcagcgatgg

SEQ ID NO: 310934 - DNA, 75 bp, synthetic construct
  source 1..75: mol_type = other DNA
aatattaatgatgtcaaaatggcctatcgggacctgcttacggatgaggatatgttcatcttctctgccgtcgcg

SEQ ID NO: 310935 - DNA, 75 bp, synthetic construct
  source 1..75: mol_type = other DNA
taagtttttattcattttgtaagtgtggggttttcttaacgattctcttaatgatgtgtgataatgaaaaagtga

SEQ ID NO: 310936 - DNA, 75 bp, synthetic construct
  source 1..75: mol_type = other DNA
ccagcgtgtttggaaatgatgattcatcaaaagagaatccaaatgtcgggaaggatttgaccagggaaagatcat

SEQ ID NO: 310937 - DNA, 75 bp, synthetic construct
  source 1..75: mol_type = other DNA
agatgcggggtgaagccgaattattaaatgcacaaagtcaaatggaattctggcgagatccctatggtgcttttt

SEQ ID NO: 310938 - DNA, 75 bp, synthetic construct
  source 1..75: mol_type = other DNA
tttcaggccgatccgtttcttcttgagaaagaggataagctgtatattttttatgaggcatttaattttcgcaac

SEQ ID NO: 310939 - DNA, 75 bp, synthetic construct
  source 1..75: mol_type = other DNA
tatacctctgaagctttgcaacaacctacctgaaaaagcctgtattataaatcttactgaaataggtagagccat

SEQ ID NO: 310940 - DNA, 75 bp, synthetic construct
  source 1..75: mol_type = other DNA
tctttggacgtgctccattaataatttatgcgcttattcttatttctctcttggctatatatagaaaactattac

SEQ ID NO: 310941 - DNA, 75 bp, synthetic construct
  source 1..75: mol_type = other DNA
attggtattttcatagttataacagggtttctttactaccataaaaagaaattcgaattctatgattacattaaa

SEQ ID NO: 310942 - DNA, 75 bp, synthetic construct
  source 1..75: mol_type = other DNA
atgtaccgcatctacacccgaactggcgataaaggcacgaccgcgctgtttggcggcagccgtatcgacaaagat

SEQ ID NO: 310943 - DNA, 75 bp, synthetic construct
  source 1..75: mol_type = other DNA
gctggggaggcgactattcgcgagggtgggctgattacggctgaaaacacgattatcggtggcaatgccaccggt

SEQ ID NO: 310944 - DNA, 75 bp, synthetic construct
  source 1..75: mol_type = other DNA
tgttgtggatccggaaggcccatcagtttatcgcccggaggccggaagctatatcagcaacattgccgcagccaa

SEQ ID NO: 310945 - DNA, 75 bp, synthetic construct
  source 1..75: mol_type = other DNA
tgacctggtacggctgggacggcgaccggctgaccacaatacagaacgacagaacccgcatccagacgatttatc

SEQ ID NO: 310946 - DNA, 75 bp, synthetic construct
  source 1..75: mol_type = other DNA
cgagccctgacttcaccactaaaggtaaaggcgtgttcgacgttacaacaaataaagcactccaagcgcatatat

SEQ ID NO: 310947 - DNA, 75 bp, synthetic construct
  source 1..75: mol_type = other DNA
gaaaaaattaacaccgactgcgataaaaccgacggcttcgtcattacccacggtaccgacacgatggaagaaacc

SEQ ID NO: 310948 - DNA, 75 bp, synthetic construct
  source 1..75: mol_type = other DNA
gatgccatccataaggtttttgatgagttcatggctgctaattcagaattgctggctcttgttgaggaatacaac

SEQ ID NO: 310949 - DNA, 75 bp, synthetic construct
  source 1..75: mol_type = other DNA
atgagcacgaaatttaaaaccgctatcactactgccggagccgcgaagctggcagccgccactgtccccggcggg

SEQ ID NO: 310950 - DNA, 75 bp, synthetic construct
  source 1..75: mol_type = other DNA
gctggcacggctgatggggttgcgctctcaggaggcggttcgctgttcacgttcattgctgacgtggcggcagtc

SEQ ID NO: 310951 - DNA, 75 bp, synthetic construct
  source 1..75: mol_type = other DNA
caggcagaattacgccaggatctgcatgccatccagaagatgctgtttgtgctgggggcggaactcgccagcgat

SEQ ID NO: 310952 - DNA, 75 bp, synthetic construct
  source 1..75: mol_type = other DNA
ggtatatcactcaggatccgattggactgaaggggggatggaatttttatcagtatccgttgaatccggttcagt

SEQ ID NO: 310953 - DNA, 75 bp, synthetic construct
  source 1..75: mol_type = other DNA
tgaatacctatggcccggttgcggcaacactgggaacatggggaaaagcctcatcaaccaatgcaacgatcgcta

SEQ ID NO: 310954 - DNA, 75 bp, synthetic construct
  source 1..75: mol_type = other DNA
gctggatggttcatcaagtggcacggtggtggggaatggaactgtgccttcttctggcgcacatacccactcagt

SEQ ID NO: 310955 - DNA, 75 bp, synthetic construct
  source 1..75: mol_type = other DNA
tagtgcagatcatcgatcccgttaatcctgttaataatgttgctcgtttatatacgcagtctaatgtggacgcca

SEQ ID NO: 310956 - DNA, 75 bp, synthetic construct
  source 1..75: mol_type = other DNA
gatatggcgaataataaggttgtaggtgcggaggcgttatgccgttggttgtcagttgaaaatggcataatacca

SEQ ID NO: 310957 - DNA, 75 bp, synthetic construct
  source 1..75: mol_type = other DNA
atatcagaaaaatattctcgatactgtgacatactgaaagtctcaactgaaacatatttgttgctatgtcatact

SEQ ID NO: 310958 - DNA, 75 bp, synthetic construct
  source 1..75: mol_type = other DNA
ttattgaaaccaacaataaaacctacttagcagttggcatactttgtatctatggattagagtttgttgaggcga

SEQ ID NO: 310959 - DNA, 75 bp, synthetic construct
  source 1..75: mol_type = other DNA
ttttcgttatgacggcctgatacgaacactgaaaggtcagggcaaatatcaatttaaccgtactcagtttgaaga

SEQ ID NO: 310960 - DNA, 75 bp, synthetic construct
  source 1..75: mol_type = other DNA
tttctttgtcgggcagcaaacagactatatgggaacctgcgttttttacgagtatgactttaatcgtcaggtcca

SEQ ID NO: 310961 - DNA, 75 bp, synthetic construct
  source 1..75: mol_type = other DNA
atggtgaaattaacgataactactttgatcctgaatcccgtccctggaataaattaccaacagggacttattcaa

SEQ ID NO: 310962 - DNA, 75 bp, synthetic construct
  source 1..75: mol_type = other DNA
aagcccatcatatgtggattaaagctctacccgatactaactcactaaaggagtccatacatattgaggccaaag

SEQ ID NO: 310963 - DNA, 75 bp, synthetic construct
  source 1..75: mol_type = other DNA
ttatcgagctggtgctgcatctggcctatgagaaaggcgaaggcgagggaaatttcgagcagttggaagagctat

SEQ ID NO: 310964 - DNA, 75 bp, synthetic construct
  source 1..75: mol_type = other DNA
aatgatggggtcagacaggaattgagcgtgggtttcaccgctcaggcagttgcatcctacggtgaatccatcgcc

SEQ ID NO: 310965 - DNA, 75 bp, synthetic construct
  source 1..75: mol_type = other DNA
ccattagtatcttcgttattactggttgcaatgaagaaaaaagccgaaaagaacaaagtaaattagcttcgcaga

SEQ ID NO: 310966 - DNA, 75 bp, synthetic construct
  source 1..75: mol_type = other DNA
taatatttggttgaatttaaataaaaaagaatataataaatactataaaaaaataaagggtagaaaggttgaaga

SEQ ID NO: 310967 - DNA, 75 bp, synthetic construct
  source 1..75: mol_type = other DNA
aacagcacagagaaaaatcgaaactactctaattcattacaaatacaaaacagaggattacgaggaaaccagcga

SEQ ID NO: 310968 - DNA, 75 bp, synthetic construct
  source 1..75: mol_type = other DNA
aacgccggaacatacgtttgagtctgtggcacgtgaatgggtcaccagtaacgtgaactggtcggcggaacataa

SEQ ID NO: 310969 - DNA, 75 bp, synthetic construct
  source 1..75: mol_type = other DNA
ggaatgatttcggcggcaggcaacagcggccatgccgaaggcacgactcaggccgccgtggctgatggcactatc

SEQ ID NO: 310970 - DNA, 75 bp, synthetic construct
  source 1..75: mol_type = other DNA
gacgaaggagagcagtgacagccgtctgaaagccctgcaggccacaaagacagcgctgtctggtgtgcaggccgg

SEQ ID NO: 310971 - DNA, 75 bp, synthetic construct
  source 1..75: mol_type = other DNA
ttaattaaaatgcatggttcggtctcatggaaaagagatgagaatgaaacaataagcatcaactacccaagtgtt

SEQ ID NO: 310972 - DNA, 75 bp, synthetic construct
  source 1..75: mol_type = other DNA
acgacaaaaaccagatgctgtacagcatgaaggtgtgcccaccgctgtggcgcacagggctgcgccagaacttcc

SEQ ID NO: 310973 - DNA, 75 bp, synthetic construct
  source 1..75: mol_type = other DNA
gcgatccggcgaaaatctttcaattagatgattctcaagggccggaaaaaataaaattattttcaatgctaatca

SEQ ID NO: 310974 - DNA, 75 bp, synthetic construct
  source 1..75: mol_type = other DNA
atgaaagcagtttcaggaacccgaagaacaaaaaagggggatggagtgaaaatgatatcagtcactatgtgagca

SEQ ID NO: 310975 - DNA, 75 bp, synthetic construct
  source 1..75: mol_type = other DNA
agagcccctttatacgttcgagtccgtggcgcgcgaatgggtctccagcaacgtgaactggtcggcggaacataa

SEQ ID NO: 310976 - DNA, 75 bp, synthetic construct
  source 1..75: mol_type = other DNA
ttgcgcggtgggaagccgaaagatttgctgatttcgaagtcagagttggttctgatggcggcgcaggatgaggtg

SEQ ID NO: 310977 - DNA, 75 bp, synthetic construct
  source 1..75: mol_type = other DNA
acgtgaactggtcggcggaacataagaagcgggtgctgcgttatttcgagctttacgtattccccacgaacggca

SEQ ID NO: 310978 - DNA, 75 bp, synthetic construct
  source 1..75: mol_type = other DNA
tgtatcgatgttaaggattttatcttatgttcttatttcaataaaatcattagaaaaacattttgcattgagcca

SEQ ID NO: 310979 - DNA, 75 bp, synthetic construct
  source 1..75: mol_type = other DNA
ttaataaaaatgcatggttctgtttcttggtgtagagatattaatgaaacgattagtattaattacactcaagaa

SEQ ID NO: 310980 - DNA, 75 bp, synthetic construct
  source 1..75: mol_type = other DNA
ttttgtattatttgaaggtgtatcaccaagacgatatcaaaaattcttcttggccactggagatagaaaagacaa

SEQ ID NO: 310981 - DNA, 75 bp, synthetic construct
  source 1..75: mol_type = other DNA
gtcagcgccgaccgcgccgccatgtaccgcgaccagcagccggtctctggtccgctgaccctgtcagacgccatg

SEQ ID NO: 310982 - DNA, 75 bp, synthetic construct
  source 1..75: mol_type = other DNA
atgttcagcaacggcggcacggacggcggagcggtgcacttaaccggcaccggcgtgcctacagtggtgatgggg

SEQ ID NO: 310983 - DNA, 75 bp, synthetic construct
  source 1..75: mol_type = other DNA
taagctataatatactaaagcaaggtaagcatgcttttattttgagtattggtaacagagcaatcatgcattgtg

SEQ ID NO: 310984 - DNA, 75 bp, synthetic construct
  source 1..75: mol_type = other DNA
tttttttttttttttgttttttctcttttattttttttattcttttcttctttattggtttttttttttttcttt

SEQ ID NO: 310985 - DNA, 75 bp, synthetic construct
  source 1..75: mol_type = other DNA
aacaaaaagcgcaattagcttcttggaaggtaaattcaaaattaattatgatcaggcaacaacttcagggaaaaa

SEQ ID NO: 310986 - DNA, 75 bp, synthetic construct
  source 1..75: mol_type = other DNA
cgactccaacagctacctctacaacaacagctgggtgcagggcggcgtgggcgtttccatgaacctgttcaagct

SEQ ID NO: 310987 - DNA, 75 bp, synthetic construct
  source 1..75: mol_type = other DNA
gcgcatgcaatcagcttgtatggtgatgaaccagaccctgagttagctgctaatgctgtctgcgatggaaaagat

SEQ ID NO: 310988 - DNA, 75 bp, synthetic construct
  source 1..75: mol_type = other DNA
aaccatagcaaacgccatttgctgaaggttggtgtgggtgtcgatggttcagttattggcgttgtcatgacaaat

SEQ ID NO: 310989 - DNA, 75 bp, synthetic construct
  source 1..75: mol_type = other DNA
cattatttaaacctaacacacctggcaattccaactatttccctgacaacttatctattacagatatggttttct

SEQ ID NO: 310990 - DNA, 75 bp, synthetic construct
  source 1..75: mol_type = other DNA
aatatactaaagcaaggtaagcatgcttttattttgagtattggtaacagagcaataatgcattgtgcaaggtaa

SEQ ID NO: 310991 - DNA, 75 bp, synthetic construct
  source 1..75: mol_type = other DNA
gaacagcctggtatatgaccgtgactacgggtggaatgacaacggcgacctggtgcgcatcagcggcccgcgaca

SEQ ID NO: 310992 - DNA, 75 bp, synthetic construct
  source 1..75: mol_type = other DNA
acagcccatttatgcgttctgttcccgggtatatcactgacggtaaaatggatatccgatatttcaggctgttgt

SEQ ID NO: 310993 - DNA, 75 bp, synthetic construct
  source 1..75: mol_type = other DNA
attgcagttcacttgagggctgcaccaaaggatgtcaacaagtaccagatggttcgcacggtacttgaacgcctc

SEQ ID NO: 310994 - DNA, 75 bp, synthetic construct
  source 1..75: mol_type = other DNA
gtactgtttttgccactatttatgcgacagacaacgatgccgggccagggacctatacagtgacaattggtagcg

SEQ ID NO: 310995 - DNA, 75 bp, synthetic construct
  source 1..75: mol_type = other DNA
ttcactgtcattgttctgaccaggtgagtggaggaaaacagttgtttctggtatttactgaatacaaaccgtatc

SEQ ID NO: 310996 - DNA, 75 bp, synthetic construct
  source 1..75: mol_type = other DNA
ctggattcagccgtagcgttaagtccgttatggattgtgcattctcttgcggaaatagctaaaagaagtgacaag

SEQ ID NO: 310997 - DNA, 75 bp, synthetic construct
  source 1..75: mol_type = other DNA
gtgagttccatccttgagatttttttcccgctttgcgcctccgatcccatccgttggcagcaccgtactaccgac

SEQ ID NO: 310998 - DNA, 75 bp, synthetic construct
  source 1..75: mol_type = other DNA
gtttgggagatggctcggggcgttacagcaaaactgtcgttttttcatcgtcgggttcatatacgtggccagctg

SEQ ID NO: 310999 - DNA, 75 bp, synthetic construct
  source 1..75: mol_type = other DNA
ggcggtttgccgccaaaaggccaggatatgaaccaaattttatacgaactttcggctcttggtagatggtcgagc

SEQ ID NO: 311000 - DNA, 75 bp, synthetic construct
  source 1..75: mol_type = other DNA
caatcaaaagcggtacacagcagtttgaacatttaggcaagtgggctactgtctgctattggggatacagccttg

SEQ ID NO: 311001 - DNA, 75 bp, synthetic construct
  source 1..75: mol_type = other DNA
cagatcctgagcgtgctggcgaaacattcgaggcatttgtcggcatgctgtcgacggggatcgcggcgaatcacc

SEQ ID NO: 311002 - DNA, 75 bp, synthetic construct
  source 1..75: mol_type = other DNA
ttgctggtggcggcggcgcgagtaccggcattgaactggcgatcgggcgtagcgtggatatcgctatcaaccacg

SEQ ID NO: 311003 - DNA, 75 bp, synthetic construct
  source 1..75: mol_type = other DNA
caacccgcaacagacctcagtatttggcaagggttgtggagttaatagcatcaaacacatgcgaaagtgaagtca

SEQ ID NO: 311004 - DNA, 75 bp, synthetic construct
  source 1..75: mol_type = other DNA
actcatcttgccgtagatgagtacgacgaagaacgcgcgcaacaaacgctggcgttcctgcgcaaatactgtggt

SEQ ID NO: 311005 - DNA, 75 bp, synthetic construct
  source 1..75: mol_type = other DNA
ttgccggcggcggcggggcgagcacgggcattgagctggcgatcggtcgtagtgtggatattgcgattaaccacg

SEQ ID NO: 311006 - DNA, 75 bp, synthetic construct
  source 1..75: mol_type = other DNA
tacagaacttcactgaagcggcactaaccgcaaagcgtgtgagtgcgtccagtatggcatttatcacgaacaaca

SEQ ID NO: 311007 - DNA, 75 bp, synthetic construct
  source 1..75: mol_type = other DNA
actaataatgacagtacagcctggggtgagatgacagttgcatcaggtgttgcttcgactgctttcgggtataaa

SEQ ID NO: 311008 - DNA, 75 bp, synthetic construct
  source 1..75: mol_type = other DNA
cgcttcggccagatgacggcggttcaccgcgaggaaggtatcagcctttaccgccactatgacaaccgtggccgg

SEQ ID NO: 311009 - DNA, 75 bp, synthetic construct
  source 1..75: mol_type = other DNA
ttggcatgatgattcatatggaacatcatcaattgatattactggcagtggagatctaatatcattaggtggtca

SEQ ID NO: 311010 - DNA, 75 bp, synthetic construct
  source 1..75: mol_type = other DNA
atcatggcgaaacaggttatgctattggatattcaacaatttctgataatggtcgttggatatttaaaggtacag

SEQ ID NO: 311011 - DNA, 75 bp, synthetic construct
  source 1..75: mol_type = other DNA
gaaggtattaatgcaggtaataatacgattactaatgtagctcctggtgtaaataatactgatgcggtaaatgtg

SEQ ID NO: 311012 - DNA, 75 bp, synthetic construct
  source 1..75: mol_type = other DNA
gttgatggagttgagcatcaattatctcttagtaagggaataaatatgctcgataacagtgacgtatataattat

SEQ ID NO: 311013 - DNA, 75 bp, synthetic construct
  source 1..75: mol_type = other DNA
ttctgaaatctgccccaccgagtcgctaaacagcgtgatccgccatgcgatcaaaaagcgtaaagtgttcccgac

SEQ ID NO: 311014 - DNA, 75 bp, synthetic construct
  source 1..75: mol_type = other DNA
aagtaccgtgaggatcattcatttcttattgatgttgttgggaatggtaacggtaaaattgttttagatccagcc

SEQ ID NO: 311015 - DNA, 75 bp, synthetic construct
  source 1..75: mol_type = other DNA
gatatttgtaagcaatatgctaacacaaaactggtcacgaaggaaaatgggggtgctgcttctgctaggaatttt

SEQ ID NO: 311016 - DNA, 75 bp, synthetic construct
  source 1..75: mol_type = other DNA
cactaccattacgacagcctgcaccgcctggtccattacatccgtatccaatatgaggagccgctggtcgagagc

SEQ ID NO: 311017 - DNA, 75 bp, synthetic construct
  source 1..75: mol_type = other DNA
caaaccgcgtcacgccggacagcctgccgccggtggagtggctgacctacggcagcggttatctggcgggcatga

SEQ ID NO: 311018 - DNA, 75 bp, synthetic construct
  source 1..75: mol_type = other DNA
aagaaataaattctctcacagctgggaaaacatttcaattgaggatcaggatatttctcagcaaattaaagcgtt

SEQ ID NO: 311019 - DNA, 75 bp, synthetic construct
  source 1..75: mol_type = other DNA
ggtcgttggatatttaaaggtacaggaagtggcaactcacgtggtaactttggtggaagtgttggcgtcggttat

SEQ ID NO: 311020 - DNA, 75 bp, synthetic construct
  source 1..75: mol_type = other DNA
tacggggtagaaaaaaccaaagcgcaatactggcccacgctcagtattcaggggggcaaaacgcgctaccagacc

SEQ ID NO: 311021 - DNA, 75 bp, synthetic construct
  source 1..75: mol_type = other DNA
gtcgcagagaaaacggcgaccgcctatatggaagttagccgttatcaggctttgtgtgacgcggcgcaacgcaat

SEQ ID NO: 311022 - DNA, 75 bp, synthetic construct
  source 1..75: mol_type = other DNA
tcaccggcagccagcgtgtattgctgctcgcggacggtgaacgttgtgacggactggccccgtaccgtctgatat

SEQ ID NO: 311023 - DNA, 75 bp, synthetic construct
  source 1..75: mol_type = other DNA
gaacaacaactactaaaggaaaaaaacaatgaaattaaatttgaagaaccagaagagggaagcggaagtacagaa

SEQ ID NO: 311024 - DNA, 75 bp, synthetic construct
  source 1..75: mol_type = other DNA
cggtcagtatttagcgttggtgtcatatggcttgcaaggttatgtcatcctgctcaatattaatgccgggcagat

SEQ ID NO: 311025 - DNA, 75 bp, synthetic construct
  source 1..75: mol_type = other DNA
taccgcgcacacggcctgcctgtgtcagaaaatctgttggagcaggatttttacgccagtggcccgaaccagaag

SEQ ID NO: 311026 - DNA, 75 bp, synthetic construct
  source 1..75: mol_type = other DNA
acattattaacaattgtgaggatgatagtgttaagagtaaagcgcaggcacatattgaactcttaaactataatt

SEQ ID NO: 311027 - DNA, 75 bp, synthetic construct
  source 1..75: mol_type = other DNA
actacgttgaagagcgcatatcgctcgacaagtgcatcataagcaggccagcggcaacgtacttcatgcgagcgg

SEQ ID NO: 311028 - DNA, 75 bp, synthetic construct
  source 1..75: mol_type = other DNA
ttaatctggagaacggaagaagggaagcactgccagtagatgatgacggttacagttctgcaccagctatattcg

SEQ ID NO: 311029 - DNA, 75 bp, synthetic construct
  source 1..75: mol_type = other DNA
accgggctggactggccgatatttttccggggctggaccggcgtctggcgggcatgctgctcactgcaggaggga

SEQ ID NO: 311030 - DNA, 75 bp, synthetic construct
  source 1..75: mol_type = other DNA
tgaactgatgcaggaaggtaaagtaaaaaagagattgtcgattatatggtggcgcgttacggcaacttcgtcact

SEQ ID NO: 311031 - DNA, 75 bp, synthetic construct
  source 1..75: mol_type = other DNA
accatattgtctactaatattattgataaatattcaatatttcctgtttggcttcccatagtatcaactatattt

SEQ ID NO: 311032 - DNA, 75 bp, synthetic construct
  source 1..75: mol_type = other DNA
tatcctcctcctatccattagtacgagatatatcccagcttcagtccgcagccaggcaagctggtacagttacag

SEQ ID NO: 311033 - DNA, 75 bp, synthetic construct
  source 1..75: mol_type = other DNA
tatcttcctcctatctattagtacgagatataccccagcttcagtccgcagccaggcaagccggtactgttaatg

SEQ ID NO: 311034 - DNA, 75 bp, synthetic construct
  source 1..75: mol_type = other DNA
gctctcgttatatgagaaatgtcattgagcggttaaatagaatggttccgggttctaatttttttgtgaaaagcg

SEQ ID NO: 311035 - DNA, 75 bp, synthetic construct
  source 1..75: mol_type = other DNA
cctcgtccggcaatcccccgacgttttccctgacgccggagggcaggctgacagccaggaacgcggatatcagcg

SEQ ID NO: 311036 - DNA, 75 bp, synthetic construct
  source 1..75: mol_type = other DNA
gcataccctatgttgccggtattggagcggggattgaggatactgatggccagcccctgagcaacatactgctgc

SEQ ID NO: 311037 - DNA, 75 bp, synthetic construct
  source 1..75: mol_type = other DNA
atgacgctggagttttcggtgtcagcatggctggtaaataactggtatcccacagcaagtatcagcgatttgctg

SEQ ID NO: 311038 - DNA, 75 bp, synthetic construct
  source 1..75: mol_type = other DNA
gactggcgaatgaaatgggcgacttacatcccggggcatcctaacgctaatgatgggtggataattcctggtgcg

SEQ ID NO: 311039 - DNA, 75 bp, synthetic construct
  source 1..75: mol_type = other DNA
gcagcgagcaatgcttcacgatatggatgtcgaaatcagtgctgagcttgaggaggaagaggaaatataccgtga

SEQ ID NO: 311040 - DNA, 75 bp, synthetic construct
  source 1..75: mol_type = other DNA
aaacgcagcgccgcagcctggcggatgcccttcagcagtccggcggcgaagacggtggcagtgtggtgttcccgc

SEQ ID NO: 311041 - DNA, 75 bp, synthetic construct
  source 1..75: mol_type = other DNA
ataaccaaaatctgcttgcggcatcactggaagcgggcatagaggtcattggattagctgatcatggttcagtag

SEQ ID NO: 311042 - DNA, 75 bp, synthetic construct
  source 1..75: mol_type = other DNA
ttattcatttctggcataatataccgtgttatttttaaccggttgtcgaccgtgtgcggtattcttttctgcgtg

SEQ ID NO: 311043 - DNA, 75 bp, synthetic construct
  source 1..75: mol_type = other DNA
tattgcgctcaaaaattccgatggtcaggagccgatagagatcacggtgaaagataaacctcttccgggaacctt

SEQ ID NO: 311044 - DNA, 75 bp, synthetic construct
  source 1..75: mol_type = other DNA
ttaatgagaactgtcagattaaggggaaactgtcagccaaccagattgaaggtgatattgtcaaaacggtcagca

SEQ ID NO: 311045 - DNA, 75 bp, synthetic construct
  source 1..75: mol_type = other DNA
gatgctaataactttacgttgaataaaggaactgctgaaaacgttggctttgcctttttcctcggtgatggaaat

SEQ ID NO: 311046 - DNA, 75 bp, synthetic construct
  source 1..75: mol_type = other DNA
tggaagctgttccggtaaaagcgactaatgcggtgttgaccgataccaactttaccgcgtacgcaacattacggg

SEQ ID NO: 311047 - DNA, 75 bp, synthetic construct
  source 1..75: mol_type = other DNA
atgaaacgactcgcacttttgctgatttgtggtgtatgcgggggcgttctggcctcacaggatatcacctttcac

SEQ ID NO: 311048 - DNA, 75 bp, synthetic construct
  source 1..75: mol_type = other DNA
atgagaaagactttcttaaccctgctttgtgtcagtagcgccatagctcatgctgctgatgaagacatcaccttt

SEQ ID NO: 311049 - DNA, 75 bp, synthetic construct
  source 1..75: mol_type = other DNA
gcatttcgattgtttaagcctatatcccaaaatgcttgactttgaactcccttcacgcccagcgctttactatga

SEQ ID NO: 311050 - DNA, 75 bp, synthetic construct
  source 1..75: mol_type = other DNA
cctgagctgtgactccgcagtacgcgatcccgactggaatatgacgctcacctggacggggacacagacctcgta

SEQ ID NO: 311051 - DNA, 75 bp, synthetic construct
  source 1..75: mol_type = other DNA
acaaaaccaagggccagccaacagaattagaaaacgatttttgcaaagctggtttatctctgccctcacaaaaaa

SEQ ID NO: 311052 - DNA, 75 bp, synthetic construct
  source 1..75: mol_type = other DNA
cggttccaagctcttggttggaaaataatggtcggagactagattgtgggccgtatctttctggtgctatggaag

SEQ ID NO: 311053 - DNA, 75 bp, synthetic construct
  source 1..75: mol_type = other DNA
ctctcgttatatggaaaatgtcattgagcggttaaatagaatggttccgggttctgaattttttgtgaaaagcgt

SEQ ID NO: 311054 - DNA, 75 bp, synthetic construct
  source 1..75: mol_type = other DNA
aataacttatgacgttgaaattggtaatgctaaaacagcaaaagagttaccattggttattggtgttatggggga

SEQ ID NO: 311055 - DNA, 75 bp, synthetic construct
  source 1..75: mol_type = other DNA
cagagcacttatttgataatactgagttagaaaaagtttggcatgagttcgagtctaactttaataaatatataa

SEQ ID NO: 311056 - DNA, 75 bp, synthetic construct
  source 1..75: mol_type = other DNA
tgcgaaatggctatttaaagatgtagatcttattagtcagcaaattgagttgggagaagagaatgttaaaagatt

SEQ ID NO: 311057 - DNA, 75 bp, synthetic construct
  source 1..75: mol_type = other DNA
gcttatcatactcatggtgcagatagtcatggagaatattgggacgaaatattttcaggtaaagatgagaaaata

SEQ ID NO: 311058 - DNA, 75 bp, synthetic construct
  source 1..75: mol_type = other DNA
ctggtcctgctatcctggagtctgctggtctggggactggtttgtttcgctgataaatccaccagaaaaaaaacc

SEQ ID NO: 311059 - DNA, 75 bp, synthetic construct
  source 1..75: mol_type = other DNA
tgggaaggttttggtctcgttgttgcagaagctatggcgtgtgaacgtcccgttgttgctaccgattctggtgga

SEQ ID NO: 311060 - DNA, 75 bp, synthetic construct
  source 1..75: mol_type = other DNA
ttgggtgcttgaagatggctctctcgaatggacctgataaacccttcacggaacaggatgtggttcagcgggcct

SEQ ID NO: 311061 - DNA, 75 bp, synthetic construct
  source 1..75: mol_type = other DNA
gggagccggcaggttgttgagaaagatggtacggcaactggcagcaatattagcgccggaggctcgctgattgtc

SEQ ID NO: 311062 - DNA, 75 bp, synthetic construct
  source 1..75: mol_type = other DNA
tgacacacgtgatccggtactggctgtcgcgctcaaacgtgatgcggttgctggcggtgtcactcatcccgccca

SEQ ID NO: 311063 - DNA, 75 bp, synthetic construct
  source 1..75: mol_type = other DNA
ctgcgcgctcgtcagcttattcaccgatacaatcattccctgcggaagagcacacattacgccagcaaattctcg

SEQ ID NO: 311064 - DNA, 75 bp, synthetic construct
  source 1..75: mol_type = other DNA
tcactgaaaacggctcattactagtcaacactaaacttgctcgtcttatcaaaggctcccctctggaagatgaaa

SEQ ID NO: 311065 - DNA, 75 bp, synthetic construct
  source 1..75: mol_type = other DNA
agaggtgtggatcaaccccattgatgctcaggcacgcggtatccgtcatggcgataccgtgcgggtatttaacaa

SEQ ID NO: 311066 - DNA, 75 bp, synthetic construct
  source 1..75: mol_type = other DNA
gcgttaccgccatcgggcaaggtgcttggcttaaagcggatatgtttggtgaccgggtcgatcacggcggcagta

SEQ ID NO: 311067 - DNA, 75 bp, synthetic construct
  source 1..75: mol_type = other DNA
atgaaatcaggaggttgaacttagtttttagttgtgggactggaggtatagttgatctatcctctctggacttac

SEQ ID NO: 311068 - DNA, 75 bp, synthetic construct
  source 1..75: mol_type = other DNA
ttataacgccctaattattcaacgatcagacaatacctgtgaacttacaattaatgaaccgttaaaaaaccagga

SEQ ID NO: 311069 - DNA, 75 bp, synthetic construct
  source 1..75: mol_type = other DNA
tagccggcgcacagtcaggtaagacgactgttgagaataactttctgggagcgacatcttctgacaaactggata

SEQ ID NO: 311070 - DNA, 75 bp, synthetic construct
  source 1..75: mol_type = other DNA
aaaagcatatttaacgctgacaccaagaggggtgggttgtgcgggtcccagttcaaatctcgcgtcttttgccaa

SEQ ID NO: 311071 - DNA, 75 bp, synthetic construct
  source 1..75: mol_type = other DNA
ggggggaatgtctggtgggcagttaaacattcaggattccagcgaggtcaatgtgactggaaacggtagtgtcac

SEQ ID NO: 311072 - DNA, 75 bp, synthetic construct
  source 1..75: mol_type = other DNA
aacaagtaattttgaagaagaattgagctggtgctgcaataaatccattcctcagttgatttattgtttttgcgg

SEQ ID NO: 311073 - DNA, 75 bp, synthetic construct
  source 1..75: mol_type = other DNA
tttacaagagatttacatgctgtattggagcctgttgcaagttttaagtcatctttttctaaacatttcaggtta

SEQ ID NO: 311074 - DNA, 75 bp, synthetic construct
  source 1..75: mol_type = other DNA
gtgaaaagtgcagacgtgatcgccatcctgaagcagcatggctgggaacatattcgaacccgtggcagtcatcat

SEQ ID NO: 311075 - DNA, 75 bp, synthetic construct
  source 1..75: mol_type = other DNA
tgggtagcacctatgaacgagatgtcatcaataatccacggctgattaaaggcgtgatagagtttagcgagaaca

SEQ ID NO: 311076 - DNA, 75 bp, synthetic construct
  source 1..75: mol_type = other DNA
gtgcaaagtactgagggacctcaacataatttacggattaggattggcggtaacggctggtcttcttttgttgaa

SEQ ID NO: 311077 - DNA, 75 bp, synthetic construct
  source 1..75: mol_type = other DNA
cctgtgccggtaactcagcgttggtgtatatcgaaaaatatacgggcaatgcaccgaagttaacggcgtttgatc

SEQ ID NO: 311078 - DNA, 75 bp, synthetic construct
  source 1..75: mol_type = other DNA
cactgtttaaccacgacaccagtcgcgatcaggaaccacagttacacacgcatgcggtggtgactaatgttacgc

SEQ ID NO: 311079 - DNA, 75 bp, synthetic construct
  source 1..75: mol_type = other DNA
tcagagtttttcccaaaaagcaaagccaaagtcaccagtatttatatgatgatgggtggactggctaactttgtt

SEQ ID NO: 311080 - DNA, 75 bp, synthetic construct
  source 1..75: mol_type = other DNA
ctgacgtaccgtcaggcgcaacaactgggtggccacgtccgtaaaggggaggtggccacgctggcggtgatttac

SEQ ID NO: 311081 - DNA, 75 bp, synthetic construct
  source 1..75: mol_type = other DNA
gtcaaatacgataatatttcagtagtactttcaaaacgcagagatattatcgctcaagctccaacaattgaaata

SEQ ID NO: 311082 - DNA, 75 bp, synthetic construct
  source 1..75: mol_type = other DNA
atatcgccagctacgtgcctattcgcgccgatgcaactattggtcgcgcagatgcaacggtcgactttactgtac

SEQ ID NO: 311083 - DNA, 75 bp, synthetic construct
  source 1..75: mol_type = other DNA
agccgtggctgtttgccattgtcggtcagggcggcggtaaagcgcggctggaaaaaatggtcgccgaacgcgggc

SEQ ID NO: 311084 - DNA, 75 bp, synthetic construct
  source 1..75: mol_type = other DNA
cgtgggctttaactttgccctcacgccaatcttctgggcggtaacgaccgagaaactggcgggcgtcgcagcggc

SEQ ID NO: 311085 - DNA, 75 bp, synthetic construct
  source 1..75: mol_type = other DNA
aggacgccaatccatctggacctgcaatgggtattaattgataaccaaactgcagtttgtctgactccagagtaa

SEQ ID NO: 311086 - DNA, 75 bp, synthetic construct
  source 1..75: mol_type = other DNA
gtatatactgctaaggattcaatccctggtgtgaatacaaccggtaatcagaatactactggtaatgccgcaaca

SEQ ID NO: 311087 - DNA, 75 bp, synthetic construct
  source 1..75: mol_type = other DNA
gtgtttttttgatcgtgggtgaaggtgctggtaaaaaacgtctcgaagaaaaagtactcagcagtcaattaacaa

SEQ ID NO: 311088 - DNA, 75 bp, synthetic construct
  source 1..75: mol_type = other DNA
attttagtccagagttgaccgctactgggaagtattcaggcgaaatggctgaatggatggctagagaaaaacaag

SEQ ID NO: 311089 - DNA, 75 bp, synthetic construct
  source 1..75: mol_type = other DNA
atcgttttgattatcacgacgagatgggttgtgcaattaacaatacacgtagttcatccattattaatccctaca

SEQ ID NO: 311090 - DNA, 75 bp, synthetic construct
  source 1..75: mol_type = other DNA
ctgcacaacaatacctttgaaaacgaagtttatcgcgcgaccggacaaacactggctttaagtgccatccccaga

SEQ ID NO: 311091 - DNA, 75 bp, synthetic construct
  source 1..75: mol_type = other DNA
aatgaaggaacaccgatctgggcctgcgccaatgtggatgccagagcggcacgcgaagttagcgaacttaaagaa

SEQ ID NO: 311092 - DNA, 75 bp, synthetic construct
  source 1..75: mol_type = other DNA
aagttgaacgcgaagaagttgaagcagtagaaaccgaagaaaaagcggttgaagttgaagaaacagaagtgcgtg

SEQ ID NO: 311093 - DNA, 75 bp, synthetic construct
  source 1..75: mol_type = other DNA
attttgaaggtaataatctaatggtaactaagattgaaccatatgaattaagtatggttagttgtcctgccgaca

SEQ ID NO: 311094 - DNA, 75 bp, synthetic construct
  source 1..75: mol_type = other DNA
acgtgggaaaacccgtttcgccacttcacagcaggctttatcgccagaattttcgcggcaaccgttgcggttatc

SEQ ID NO: 311095 - DNA, 75 bp, synthetic construct
  source 1..75: mol_type = other DNA
ctgccggattgcaggccagtgtgacactgacaaaccagggttatgacgtcacgatctatgagaaagaagcacaac

SEQ ID NO: 311096 - DNA, 75 bp, synthetic construct
  source 1..75: mol_type = other DNA
ataagttgcctgctctgcttggtgatgagccgtggtatgcaaaatggccggcggtgccaaaccacaattatcaat

SEQ ID NO: 311097 - DNA, 75 bp, synthetic construct
  source 1..75: mol_type = other DNA
tgcgtgcactaggccatgataaagaaaattcacttaagcgtattattaatagtttcaattctgaactcatgggag

SEQ ID NO: 311098 - DNA, 75 bp, synthetic construct
  source 1..75: mol_type = other DNA
cattttgtcgctggctggcaaatggttttctgttcaaacgcgacgatcggcaaaaaaaagatctctatattgaat

SEQ ID NO: 311099 - DNA, 75 bp, synthetic construct
  source 1..75: mol_type = other DNA
tatccgggcgtcagatgttccttgaacagcgcgcccgtttgcagtcgagcatttcagtttcccgcaccaatgaca

SEQ ID NO: 311100 - DNA, 75 bp, synthetic construct
  source 1..75: mol_type = other DNA
ccgtgggaatttgaggactacgccgcaccacgcgccgaaattcaggcgatacgcgacaaaccacccgcgccagat

SEQ ID NO: 311101 - DNA, 75 bp, synthetic construct
  source 1..75: mol_type = other DNA
ctgactttcttgagccggtgttttgagtttattagccagagcctgcaatggtttgtcatccataatttaaccttc

SEQ ID NO: 311102 - DNA, 75 bp, synthetic construct
  source 1..75: mol_type = other DNA
gacaaaagcattgagatcttattactttcttgttttgcggcggcggaccaaaaagcaatccagcggtatatacct

SEQ ID NO: 311103 - DNA, 75 bp, synthetic construct
  source 1..75: mol_type = other DNA
cttccccccggtagccaatgatgaggtctacaagagcgtgctggagcaggcggagaactttaagaagtacttgca

SEQ ID NO: 311104 - DNA, 75 bp, synthetic construct
  source 1..75: mol_type = other DNA
ataagtgtggatacgctaaaaaatttaaatataggtgaaaaactacattcattatcgcaaagacaaaatatatct

SEQ ID NO: 311105 - DNA, 75 bp, synthetic construct
  source 1..75: mol_type = other DNA
gccgaaaacatcaccatggcaaccctggagcgcgatgcccgctgggaagcgcaaaccatttccgatgacgccatt

SEQ ID NO: 311106 - DNA, 75 bp, synthetic construct
  source 1..75: mol_type = other DNA
cgcgcaagggcgtggcgatcctgatgatctccagcgaactgccggagatagtcgggatgagcgatcgcatttatg

SEQ ID NO: 311107 - DNA, 75 bp, synthetic construct
  source 1..75: mol_type = other DNA
gccggtgagctaaacggcaacaacatcacccaggaaaacattatgaccttagcgaccggcgttaacgatgctcat

SEQ ID NO: 311108 - DNA, 75 bp, synthetic construct
  source 1..75: mol_type = other DNA
catcaccatgatcagcgactggctggcctatatgctcagcggcgaactggcggtggatccctctaacgctggcac

SEQ ID NO: 311109 - DNA, 75 bp, synthetic construct
  source 1..75: mol_type = other DNA
tggcactatcgttcacgacatgaaaagttgattgcatactctaaccgccatttttataacagtgatttggtgata

SEQ ID NO: 311110 - DNA, 75 bp, synthetic construct
  source 1..75: mol_type = other DNA
acaccgttatgcaagaagcaccgagatttacacccgcgttttttcgctggacgtccttacaggaagtggcctgtc

SEQ ID NO: 311111 - DNA, 75 bp, synthetic construct
  source 1..75: mol_type = other DNA
acctggtgcgcatcagcggcccgcgacagacgcgggaatacggctacagcgccacgggcaggctggagagcgtgc

SEQ ID NO: 311112 - DNA, 75 bp, synthetic construct
  source 1..75: mol_type = other DNA
cctataatggtggtagtgtttggaaggaagtagtagatgcaattaagaaaaatatctcctcagatgtttttatcc

SEQ ID NO: 311113 - DNA, 75 bp, synthetic construct
  source 1..75: mol_type = other DNA
gaattttatggattcctgttgcttttattaataatttcatgaaaatttgcggttataagttagggcttatttata

SEQ ID NO: 311114 - DNA, 75 bp, synthetic construct
  source 1..75: mol_type = other DNA
gtggatcactattgcaccgttcgtgacactaaggattgggcgcacgtcttaggaatccgtacagattttgattta

SEQ ID NO: 311115 - DNA, 75 bp, synthetic construct
  source 1..75: mol_type = other DNA
gaactgactttattgtcatcgagaaatgtcaagcctgtttcaggattgtggcggtggttattgcgtcgttgtatg

SEQ ID NO: 311116 - DNA, 75 bp, synthetic construct
  source 1..75: mol_type = other DNA
cagaacgtgaagcccgtaaggctccggtgattcaggctgcaataaaacttgcaggcgcggttcattacgctgacg

SEQ ID NO: 311117 - DNA, 75 bp, synthetic construct
  source 1..75: mol_type = other DNA
ggagctcgacggttatcccggtttctgagcgtattcgcctctactcatcccctgaagatatcggctctgatttcg

SEQ ID NO: 311118 - DNA, 75 bp, synthetic construct
  source 1..75: mol_type = other DNA
atgcactcacggcaattgctcgcaaaaacgctgaacagaaaatgagtagtcaaaagccaaagaaaagtgccgact

SEQ ID NO: 311119 - DNA, 75 bp, synthetic construct
  source 1..75: mol_type = other DNA
gtgtaaggcgttattcgttttaagatttcatagaaaacatcagtcaacgcccaatcagcgtaacttcataacagc

SEQ ID NO: 311120 - DNA, 75 bp, synthetic construct
  source 1..75: mol_type = other DNA
atgatgcttagggtgctgatgaacagtggtcagtttggttggctggtggtgctgggtgcttttattctggtcagc

SEQ ID NO: 311121 - DNA, 75 bp, synthetic construct
  source 1..75: mol_type = other DNA
atgccgatggcgtggctggtgttccggtagaaggaaacggtgcggcggtttacaccaatatgttcggtaaggccg

SEQ ID NO: 311122 - DNA, 75 bp, synthetic construct
  source 1..75: mol_type = other DNA
attctgtgaggcatttcccccgcttatatgactttattttatctttagtattaggtaagaataaaactaaaatag

SEQ ID NO: 311123 - DNA, 75 bp, synthetic construct
  source 1..75: mol_type = other DNA
catccagaagagatgcaaaccgatctcgaaaaagaagaagaacgtaaacgcgaacttacagctattggttcagta

SEQ ID NO: 311124 - DNA, 75 bp, synthetic construct
  source 1..75: mol_type = other DNA
tgcaaccctacgtattagtaacgtaggacttggtaatactatgtgggacatgattcaagagggggttctatcaca

SEQ ID NO: 311125 - DNA, 75 bp, synthetic construct
  source 1..75: mol_type = other DNA
agggtaaccaacagaaattcaatgatgaaaatgaatttattaattttagcatcaataatattaaaaataatatag

SEQ ID NO: 311126 - DNA, 75 bp, synthetic construct
  source 1..75: mol_type = other DNA
atcagctctctggtaaataaaacctccgggcgggtcagcgtatttggttacgatctcgagaaggatgtcgtgaac

SEQ ID NO: 311127 - DNA, 75 bp, synthetic construct
  source 1..75: mol_type = other DNA
atcaatccattcaaggatttgatacaggttattttatgtattgcgaggatatcgatctttgttttcgtttaaaga

SEQ ID NO: 311128 - DNA, 75 bp, synthetic construct
  source 1..75: mol_type = other DNA
cttgcaaagcataatattcaggttaatggtattggccctggttattttgatacggaaatgacaaaaacgctggtg

SEQ ID NO: 311129 - DNA, 75 bp, synthetic construct
  source 1..75: mol_type = other DNA
taatgcaggaatacaacgtcgacactcattaactgaatttcctgaaaaagactgggatgatattattaatatcaa

SEQ ID NO: 311130 - DNA, 75 bp, synthetic construct
  source 1..75: mol_type = other DNA
cgaggtggtactatatcacattcaaaactcaagacgatggcttctattggggtgggcatttacgtcaatgttata

SEQ ID NO: 311131 - DNA, 75 bp, synthetic construct
  source 1..75: mol_type = other DNA
atgctctcccactatttcaatatgggcagcattcgtaatatgagcgtttccctgactggctaccgctacgagtat

SEQ ID NO: 311132 - DNA, 75 bp, synthetic construct
  source 1..75: mol_type = other DNA
gcagtattcgtaatgtcagcatctcgatgactggctaccgttacgagtatgacaaccaggccgacaaaggcatgt

SEQ ID NO: 311133 - DNA, 75 bp, synthetic construct
  source 1..75: mol_type = other DNA
aacggcttgttactgccatgccagcataaaggcaacgtcgcgccggttgttcctgatgacataaagcctgtcatt

SEQ ID NO: 311134 - DNA, 75 bp, synthetic construct
  source 1..75: mol_type = other DNA
tttctgacgtagaagaacagctaggcaatgaaatttcgctatcagccttaatgcgattaaaacgcatgatggagg

SEQ ID NO: 311135 - DNA, 75 bp, synthetic construct
  source 1..75: mol_type = other DNA
agcgccatacagatcattgaaaaagttgaaggcctgggtgggtttatttttgctgcacatagcacgaatgataat

SEQ ID NO: 311136 - DNA, 75 bp, synthetic construct
  source 1..75: mol_type = other DNA
gcattcaggacattactggattcagaaagtgatcgttttcagtcctccgcctggcagaaatttattcagcaatta

SEQ ID NO: 311137 - DNA, 75 bp, synthetic construct
  source 1..75: mol_type = other DNA
gttgttccgtgcatccggagagggtcgtggtgcctccgtggcggaggagacctgtgctgacctgacagtgatacc

SEQ ID NO: 311138 - DNA, 75 bp, synthetic construct
  source 1..75: mol_type = other DNA
ggggtacctgaagtacaacgtcacggcgggtcagtaccgttcatcggatgatgcggttgagcacacgtcgctggg

SEQ ID NO: 311139 - DNA, 75 bp, synthetic construct
  source 1..75: mol_type = other DNA
aggtcttggtgcagccgatgccgttagaggtgctgccggagtactcggtgatcaactgtgccgatgcggtgttag

SEQ ID NO: 311140 - DNA, 75 bp, synthetic construct
  source 1..75: mol_type = other DNA
aaactctataatactgattgtgaaaaaattaacaattatgcgcaacatgtatatgaagtggaaaagcataaaaca

SEQ ID NO: 311141 - DNA, 75 bp, synthetic construct
  source 1..75: mol_type = other DNA
gataaggcagtaacatctatgccttatggattaaatactgttattggtcatggcggcataaagctttcatcagga

SEQ ID NO: 311142 - DNA, 75 bp, synthetic construct
  source 1..75: mol_type = other DNA
tattatatgtttttgctcgttatttttgtgttctacgacaaaaaaaattacagtctatcatagtaaacaacgaag

SEQ ID NO: 311143 - DNA, 75 bp, synthetic construct
  source 1..75: mol_type = other DNA
atgaatgagcaaacatcgaatcccaatgcgatgaacgaaggcatgaacgaacaagccgcggtaagcagccttcct

SEQ ID NO: 311144 - DNA, 75 bp, synthetic construct
  source 1..75: mol_type = other DNA
agcgctcagcacgctggtcgaggagcgcagcgtgcttccgctgcccgtcctgcgtgcgaagctgctcctgaagcg

SEQ ID NO: 311145 - DNA, 75 bp, synthetic construct
  source 1..75: mol_type = other DNA
acagaaatgctatataatatttcattgcaaaatgtaagtttttcatatggtacgtattctcaaccaatacttgag

SEQ ID NO: 311146 - DNA, 75 bp, synthetic construct
  source 1..75: mol_type = other DNA
aatatcggccatcggatagtgggggggaaaaagcatacttggcgcaatcgactgttatgtatggtttaccatggg

SEQ ID NO: 311147 - DNA, 75 bp, synthetic construct
  source 1..75: mol_type = other DNA
ggctgtttctatgtttacgacaaaccagtttattctcctttgtcctaaggatattataaagttttatcgggaaag

SEQ ID NO: 311148 - DNA, 75 bp, synthetic construct
  source 1..75: mol_type = other DNA
ggcggcgcagattccaggaactgtcgatgacttgaaaggagttgaggatgatttttatcgcaaagctatcctgaa

SEQ ID NO: 311149 - DNA, 75 bp, synthetic construct
  source 1..75: mol_type = other DNA
gaacttattcaggctcgttctcaacgttctgctgcattggcaaaatccgtcaagcgcttaaatagaagactggat

SEQ ID NO: 311150 - DNA, 75 bp, synthetic construct
  source 1..75: mol_type = other DNA
ataacaactcaagagcattacatatcgcaatttacaaattgtttaacttatcttctcaatcatgaagatagcaac

SEQ ID NO: 311151 - DNA, 75 bp, synthetic construct
  source 1..75: mol_type = other DNA
caatacggggttatgacattttcagatgttgaaaatataattgttataaacccagtatgcattggagataaaaca

SEQ ID NO: 311152 - DNA, 75 bp, synthetic construct
  source 1..75: mol_type = other DNA
gataagagtattaatttcaaagtgatagctgaactggctttcatgtcatattttatctttcttctgacaatgctt

SEQ ID NO: 311153 - DNA, 75 bp, synthetic construct
  source 1..75: mol_type = other DNA
tccgcctgaccagtgaaaacggcagccacaccaccttccgttacgatgtacttgaccggctgatacaggaaaccg

SEQ ID NO: 311154 - DNA, 75 bp, synthetic construct
  source 1..75: mol_type = other DNA
agtatctggtgattataattcatttgtttatatcattcgtttcgaaacaggtgaatcatatatccggtatgaaaa

SEQ ID NO: 311155 - DNA, 75 bp, synthetic construct
  source 1..75: mol_type = other DNA
ccgatacatgggaagaatcagatgtagtatctggtgattataattcatttgtttatatcattcgtttcgaaacag

SEQ ID NO: 311156 - DNA, 75 bp, synthetic construct
  source 1..75: mol_type = other DNA
aatgaaaaatgccgccagtgttgcagacctgaaaacggcaattgatggtgtgtccaccagtatgcagggtgcagg

SEQ ID NO: 311157 - DNA, 75 bp, synthetic construct
  source 1..75: mol_type = other DNA
caatggagataaggggttaaaaatatccctgaataatgacctgactgtgggggataaggctcccggcagcatcaa

SEQ ID NO: 311158 - DNA, 75 bp, synthetic construct
  source 1..75: mol_type = other DNA
gcacgtttcacgcgacggactccaggcattatacattgctcgggctgaagaactaccggctgttactgccctggc

SEQ ID NO: 311159 - DNA, 75 bp, synthetic construct
  source 1..75: mol_type = other DNA
cttcgatcaggtgaagtccattgagcaaaagtcggctggtggcaaaagcggcaagggatggttcgacgagttgaa

SEQ ID NO: 311160 - DNA, 75 bp, synthetic construct
  source 1..75: mol_type = other DNA
ccggagccagtattcattacggcgctgatacctggaacgtgctggatattgttcagcgttgggacagcctgtttg

SEQ ID NO: 311161 - DNA, 75 bp, synthetic construct
  source 1..75: mol_type = other DNA
gcgttttcagtaactctggtcgccgttattttatctcttggcggtaagtttattccctttatggaaccgttatcg

SEQ ID NO: 311162 - DNA, 75 bp, synthetic construct
  source 1..75: mol_type = other DNA
agatggggtttcgggtgctgaaaaaaatcctctatccggtaatcttctcttcggattattccgccgcagaaaaac

SEQ ID NO: 311163 - DNA, 75 bp, synthetic construct
  source 1..75: mol_type = other DNA
atggaaaacactccggcattcttatgacaagagtcgctgcaggggagcgattcatgtcattagtgcgttctcaac

SEQ ID NO: 311164 - DNA, 75 bp, synthetic construct
  source 1..75: mol_type = other DNA
caaattaatcttgatgaactgtacaccgcacctggcgattataaatattacgataacggttttaacctcaccgcg

SEQ ID NO: 311165 - DNA, 75 bp, synthetic construct
  source 1..75: mol_type = other DNA
catggtttgtcggcgtcatcgtcgcctttgcggcctacgccttattaaagaaacgtacaacagcagaaaaaacag

SEQ ID NO: 311166 - DNA, 75 bp, synthetic construct
  source 1..75: mol_type = other DNA
atgctggaacaattgagtgaagactacattcgtaccgcccgggccagcggcttgcccggctggtatatcgtttta

SEQ ID NO: 311167 - DNA, 75 bp, synthetic construct
  source 1..75: mol_type = other DNA
tttttaacttttttggcgtgttattgggcggacttagcgttgcctatgccattgtccatatgttgccaaccgatt

SEQ ID NO: 311168 - DNA, 75 bp, synthetic construct
  source 1..75: mol_type = other DNA
ccttgccgagctggctgcggcgttgccgtgggagtttcccgattatgccgcgccgcgccttgaaattcaggcgtt

SEQ ID NO: 311169 - DNA, 75 bp, synthetic construct
  source 1..75: mol_type = other DNA
tctttggaccaggacgatatgttcaatgcacttgtaaaacttcagacacgagctgaggagatttttggtgaacgc

SEQ ID NO: 311170 - DNA, 75 bp, synthetic construct
  source 1..75: mol_type = other DNA
atgcgtgttgccgacagtcgctggccggaaagcctgcaacagcaacaggcctcgacacaatggaatgaggcactc

SEQ ID NO: 311171 - DNA, 75 bp, synthetic construct
  source 1..75: mol_type = other DNA
agcagcggccaaccgaatttatccgtatccgctgggcgctggaatattaccaggctggcgacgccgataacgaac

SEQ ID NO: 311172 - DNA, 75 bp, synthetic construct
  source 1..75: mol_type = other DNA
gtgattgcttttgttaccgcccaggaaaaaatcattttgcagatccagtgtcggatcagcgacgaagaacgtcgc

SEQ ID NO: 311173 - DNA, 75 bp, synthetic construct
  source 1..75: mol_type = other DNA
atgaaaacacgtgatggtgaaccagggttgtttgctgcaatggaaaataatcaccctttgtgtgtcacacggttc

SEQ ID NO: 311174 - DNA, 75 bp, synthetic construct
  source 1..75: mol_type = other DNA
tacaaaccaccgtcgctcgcgcgaagctgctgttcaacccgtcaggcctgcgcaatctcaccaccaaactcacct

SEQ ID NO: 311175 - DNA, 75 bp, synthetic construct
  source 1..75: mol_type = other DNA
gccgggagctgaaaccgtctctgacctgatgcgcatgactgccaacaccgttgatatcggtatcggtaacaatct

SEQ ID NO: 311176 - DNA, 75 bp, synthetic construct
  source 1..75: mol_type = other DNA
gcaagaaggaggacttcaaacccatcttcgatcaggtgaagtccattgagcaaaagtcggctggtggcaaaagcg

SEQ ID NO: 311177 - DNA, 75 bp, synthetic construct
  source 1..75: mol_type = other DNA
ttcgttaacgaaacgtaccacattgaaaatgagttcatctgtcaactagatccgtccagattcgatctcatcccg

SEQ ID NO: 311178 - DNA, 75 bp, synthetic construct
  source 1..75: mol_type = other DNA
ccattcatcataatcattataaaactgtagaaacatattatgctgctataaatgtaatcagccaaagcctgagtt

SEQ ID NO: 311179 - DNA, 75 bp, synthetic construct
  source 1..75: mol_type = other DNA
gttgttccagcccgatttggcgatgccagtggcgtacgcggcgcggcctggcttccaggtcttaatgcgcgggaa

SEQ ID NO: 311180 - DNA, 75 bp, synthetic construct
  source 1..75: mol_type = other DNA
cgccgctgaacatgaaacacctcgtgcattcaggacattactggattccgaaagtgatcgttttcagccttccgc

SEQ ID NO: 311181 - DNA, 75 bp, synthetic construct
  source 1..75: mol_type = other DNA
cagtatcgaaaaactgctttcgtcttattgatgctgagacaggacaacctttcgatattgaagacgaactgggtg

SEQ ID NO: 311182 - DNA, 75 bp, synthetic construct
  source 1..75: mol_type = other DNA
cactgggttccacattaaccgctacgtcgccgacggcctgccaaaagccaaaatcgatggttctgaagtgcacgt

SEQ ID NO: 311183 - DNA, 75 bp, synthetic construct
  source 1..75: mol_type = other DNA
tcaggtgctgtatgcggaagataacgtggtggtatttgtccgcgtgctgaatcagcaacgtgtactggtggcaat

SEQ ID NO: 311184 - DNA, 75 bp, synthetic construct
  source 1..75: mol_type = other DNA
gcggctgtcaggtactgtatgcggaagataacgtggtggtatttgtccgcgtgctgtatcagcagcgtgtactgg

SEQ ID NO: 311185 - DNA, 75 bp, synthetic construct
  source 1..75: mol_type = other DNA
ataatgacctgcgcccggaggctggtggttacatcgcgaaccttgcggcagccaacacaatgtttacctcccgac

SEQ ID NO: 311186 - DNA, 75 bp, synthetic construct
  source 1..75: mol_type = other DNA
atgcgggcaatctgcaattgcaggataaaaatggacaaactctctccagcagtgcgcaacgtgatattcagcaga

SEQ ID NO: 311187 - DNA, 75 bp, synthetic construct
  source 1..75: mol_type = other DNA
agcactctggggttctccggcggaaccgttgattttggtgctctgacaactgatgcacagatgacagaaggaacc

SEQ ID NO: 311188 - DNA, 75 bp, synthetic construct
  source 1..75: mol_type = other DNA
agtggatcgtcggtgcggctgcaggcttcgctaaaggtgacatgaatgaccgttctggtcaggtagatcaagaca

SEQ ID NO: 311189 - DNA, 75 bp, synthetic construct
  source 1..75: mol_type = other DNA
cggcggcgcatgggtaagctacttcggtggtaacttcaacggcgacaacggcaccatcaactatgatcaggatgt

SEQ ID NO: 311190 - DNA, 75 bp, synthetic construct
  source 1..75: mol_type = other DNA
gcgtgatgcaagtggccagttgaaaacccaaagcaatcgctatgttctgcaactggggggcgatatcgcgcagtg

SEQ ID NO: 311191 - DNA, 75 bp, synthetic construct
  source 1..75: mol_type = other DNA
ttccggcaacggtacaataagtatcgacagtgggacagtggcgctgaccggcaataactatgcattcagcggata

SEQ ID NO: 311192 - DNA, 75 bp, synthetic construct
  source 1..75: mol_type = other DNA
aagtatctgcgccgactattagtttaagcaccaactctgagttggcgttaggtgcacaggaaggaaatgcagcga

SEQ ID NO: 311193 - DNA, 75 bp, synthetic construct
  source 1..75: mol_type = other DNA
cagttacggtggtaatcagtacctgtcagttaataacggcggtgaagttaatgccagtaagcaaattagcctggg

SEQ ID NO: 311194 - DNA, 75 bp, synthetic construct
  source 1..75: mol_type = other DNA
cgtttgctctgagctgggaagtagaataaaaggaaagaaggcaagagccgttttaattagcgcgataggtttata

SEQ ID NO: 311195 - DNA, 75 bp, synthetic construct
  source 1..75: mol_type = other DNA
gtcgctgtaagtgaagatcacacagctgtattcggtaaagataaccagactattgattaccgtatttcagtgacc

SEQ ID NO: 311196 - DNA, 75 bp, synthetic construct
  source 1..75: mol_type = other DNA
tgcagggattattgatgccgaaaaaattgagtttgtgtgggcaaagacatccgagaagaaaatcaccttaaacca

SEQ ID NO: 311197 - DNA, 75 bp, synthetic construct
  source 1..75: mol_type = other DNA
ttatctaggtgaacagttcatggcttttggttctgatggtgggccgatatgttttttactggattatcgtaatcc

SEQ ID NO: 311198 - DNA, 75 bp, synthetic construct
  source 1..75: mol_type = other DNA
cctaccccgtgacagttagcgtgaacaattatggtgtcagtgatacgaaacaggtgacgttgattgccgatgctg

SEQ ID NO: 311199 - DNA, 75 bp, synthetic construct
  source 1..75: mol_type = other DNA
cagcgacaacaaaactgtgcattttattggcgacacagcggcggcaaaaattatcgagttgacgcctgtcccaga

SEQ ID NO: 311200 - DNA, 75 bp, synthetic construct
  source 1..75: mol_type = other DNA
gagcggacaactggtggtgaactttactgcggatacgctcactgcgcaggttaatcttaacgttaccgaggacaa

SEQ ID NO: 311201 - DNA, 75 bp, synthetic construct
  source 1..75: mol_type = other DNA
aagatagcagtgggaacctggtcgaaggtgtcaatgtgaacttcgcattaaaaagaggctttgcctttgccacat

SEQ ID NO: 311202 - DNA, 75 bp, synthetic construct
  source 1..75: mol_type = other DNA
cactcacggcatcaagtccgcttatcggcgtcaatgacccatcgggagcaactctgactgtaaggttaactcatg

SEQ ID NO: 311203 - DNA, 75 bp, synthetic construct
  source 1..75: mol_type = other DNA
gaacccatagcggttaaagcacacgtcgacgaccagtttggcaatccagttgctgaccaacttgtgacattcagt

SEQ ID NO: 311204 - DNA, 75 bp, synthetic construct
  source 1..75: mol_type = other DNA
cagtgcagatgttaattctgcgacgtttaccagtctggagatacctgaaggtcaggtaatggtcgcacaagacgt

SEQ ID NO: 311205 - DNA, 75 bp, synthetic construct
  source 1..75: mol_type = other DNA
acgttgcggcaaactttacccttgaaaataacggcattgccattacccaggccaatggggaagcgcatgtcacgc

SEQ ID NO: 311206 - DNA, 75 bp, synthetic construct
  source 1..75: mol_type = other DNA
aattgttgaacactacattagtgcaaagacatccccgcaagatgagactatacctgcatacctgatagcacataa

SEQ ID NO: 311207 - DNA, 75 bp, synthetic construct
  source 1..75: mol_type = other DNA
atcaagcgggtctgagtaccacaatacaattcactcgcgcagaagacaaaataatgagcggtacagtgttggtca

SEQ ID NO: 311208 - DNA, 75 bp, synthetic construct
  source 1..75: mol_type = other DNA
tgatttttattcagaaatatattggtcttctaatacggcaggtggaggccgacaatacattgtttccctggaaaa

SEQ ID NO: 311209 - DNA, 75 bp, synthetic construct
  source 1..75: mol_type = other DNA
aaagcatccctggcgaatggagcctcaattgagaaacaactggaggctattgatgaaaaactgacactcacggcg

SEQ ID NO: 311210 - DNA, 75 bp, synthetic construct
  source 1..75: mol_type = other DNA
acatccgataagaaaatcaccttaaaccacacggataaaaacgcgactatttccgcggatattgtcagtggcagc

SEQ ID NO: 311211 - DNA, 75 bp, synthetic construct
  source 1..75: mol_type = other DNA
gacaggcgccgaagatctggtgctcgatctctacaagcagatcccgcccacgcgcatcaccgatctcctgctgga

SEQ ID NO: 311212 - DNA, 75 bp, synthetic construct
  source 1..75: mol_type = other DNA
agatattctgtgtcgttacggggaagtcatcttcacagcgattttcagtcagttagcattaccgacattcattca

SEQ ID NO: 311213 - DNA, 75 bp, synthetic construct
  source 1..75: mol_type = other DNA
agattctgggacatgcgagcatccagcagacgatggcctacgcgcatcttgcgccggactacctacagaatgccg

SEQ ID NO: 311214 - DNA, 75 bp, synthetic construct
  source 1..75: mol_type = other DNA
ggcacaggcagtgaaagagttgttaatgtcagtgattagttctccagtgatggaaaaaaggcagtggcaattggt

SEQ ID NO: 311215 - DNA, 75 bp, synthetic construct
  source 1..75: mol_type = other DNA
gccaaaatgtatagagccggttatgcatttaaaaaactcaatggcctggtgtctgaattttctatgggtggggta

SEQ ID NO: 311216 - DNA, 75 bp, synthetic construct
  source 1..75: mol_type = other DNA
tgcaaaccagaaacgcgatggaaagctgctatcgcccgatctcttggcccatgtttcgccgctcggatgggaaca

SEQ ID NO: 311217 - DNA, 75 bp, synthetic construct
  source 1..75: mol_type = other DNA
gatcattatgctgcttgtggctgtcagcggtgcagaagaacttgaagcctacggttatccactggctggcgaatt

SEQ ID NO: 311218 - DNA, 75 bp, synthetic construct
  source 1..75: mol_type = other DNA
tcgacctgaccactatgacaggcgagcagatcgctgatctcatcctgaacggcaaatacaccaaatcagccttgt

SEQ ID NO: 311219 - DNA, 75 bp, synthetic construct
  source 1..75: mol_type = other DNA
gaccagctgaccgggtattgcagcgcacagggtgagcagtgggaataccgccacgacgccagcggcagacgaaca

SEQ ID NO: 311220 - DNA, 75 bp, synthetic construct
  source 1..75: mol_type = other DNA
accattcgcgctgctggattattgaaagggctgatgcaaccgatgcgcgatccgattgtaccgcctggcaataaa

SEQ ID NO: 311221 - DNA, 75 bp, synthetic construct
  source 1..75: mol_type = other DNA
tcctctgcatccacggtggtatggttgcctgaatctgggacaacaggagtatgcttactggcgacttctggacat

SEQ ID NO: 311222 - DNA, 75 bp, synthetic construct
  source 1..75: mol_type = other DNA
cgacaagatccggagatggcaaacgtgattttagtcaacgatgacgaaagttgcgggtattcggctacggaagga

SEQ ID NO: 311223 - DNA, 75 bp, synthetic construct
  source 1..75: mol_type = other DNA
tgtggcaccgcgtaaccagtggaattctctaacggatataataataattgctattattgacttatcaaaaaactg

SEQ ID NO: 311224 - DNA, 75 bp, synthetic construct
  source 1..75: mol_type = other DNA
taaacgaaaacgcattgcttgaaaaaatggttatggggatgcgtgtaaaatcagatcagtctacgtgctcagtaa

SEQ ID NO: 311225 - DNA, 75 bp, synthetic construct
  source 1..75: mol_type = other DNA
tgcagcgccacgtgtttttgataccggcggtcatcaaaccggagcggctattattcttggcttcggttcttcagc

SEQ ID NO: 311226 - DNA, 75 bp, synthetic construct
  source 1..75: mol_type = other DNA
ttgttaccgccgcgcagttgggctatgccgcaggtctactgtttcttgttcccctcggtgatatgtttgaacgcc

SEQ ID NO: 311227 - DNA, 75 bp, synthetic construct
  source 1..75: mol_type = other DNA
ggccggatacgcctcactgcattatcccccaatatcacaatgcctggctggggagtggtcagattttcacccgcc

SEQ ID NO: 311228 - DNA, 75 bp, synthetic construct
  source 1..75: mol_type = other DNA
cgcggaatccgcaggcgggcattttgatccacaaaataccggtaaacatgaagggccagaaggtgccgggcattt

SEQ ID NO: 311229 - DNA, 75 bp, synthetic construct
  source 1..75: mol_type = other DNA
attgtaaaacatgagcaatcacgtaatcatcctgatgcaactttaacctcaaaaggcattgttcaactcagtagt

SEQ ID NO: 311230 - DNA, 75 bp, synthetic construct
  source 1..75: mol_type = other DNA
gacgagccacgatttgaacgtgatggcctgcttattgagggacaacgaacaaactacatgctcaattcggaaaac

SEQ ID NO: 311231 - DNA, 75 bp, synthetic construct
  source 1..75: mol_type = other DNA
tggagtgaacgccagactttcaacggcggactcaacggcgcactgacggggaacgccgacaccgcaacgaaatta

SEQ ID NO: 311232 - DNA, 75 bp, synthetic construct
  source 1..75: mol_type = other DNA
ctcaaataaggacgaacttattgatacaactcaggcaaggccggtgcagtattgtatcaatggtacatggtataa

SEQ ID NO: 311233 - DNA, 75 bp, synthetic construct
  source 1..75: mol_type = other DNA
aggagcattacagaaaaaccagaacggcgcggatattccaggaaaagataccttcaccaaaaatattggtgcatg

SEQ ID NO: 311234 - DNA, 75 bp, synthetic construct
  source 1..75: mol_type = other DNA
aaaaatggttatggggatgcgtgtaaaatcagatcagtctacgtgctcagtaagtaacgggcgcatatccagcga

SEQ ID NO: 311235 - DNA, 75 bp, synthetic construct
  source 1..75: mol_type = other DNA
ggggcctcgctcattaattttcgtctttatgatgaggcatttatttgtggtccggcggcgatgatggatgagacg

SEQ ID NO: 311236 - DNA, 75 bp, synthetic construct
  source 1..75: mol_type = other DNA
tggcaaaagtggagccggaaacccgtgatgcggtgaccattacctttgcggtgccccagcctttgcaggaggcgt

SEQ ID NO: 311237 - DNA, 75 bp, synthetic construct
  source 1..75: mol_type = other DNA
aggcaggcattgatgtccgccatatcagcgaagattgcaatgtgccgatgtaccgaaccaatcgcccctgccgtg

SEQ ID NO: 311238 - DNA, 75 bp, synthetic construct
  source 1..75: mol_type = other DNA
tcgaactttctgagatggtgttaacgactgatgtaattcctggcaactattcatgcttttcacgcaaagaaacca

SEQ ID NO: 311239 - DNA, 75 bp, synthetic construct
  source 1..75: mol_type = other DNA
tggcagagtattttagagatcgtggaaagagagttgtactttttatcgactcaatgacgcggtatgcacgagcac

SEQ ID NO: 311240 - DNA, 75 bp, synthetic construct
  source 1..75: mol_type = other DNA
aggagtcagatccggacggggaactacgcgttgtttcgggcgaaacgttgctctcttaccgaatgccgcaggtgt

SEQ ID NO: 311241 - DNA, 75 bp, synthetic construct
  source 1..75: mol_type = other DNA
gggcagcagtatgatgaggagtccggcctgtattacaaccgccaccgctattatgacccgctgcaggggcggtat

SEQ ID NO: 311242 - DNA, 75 bp, synthetic construct
  source 1..75: mol_type = other DNA
aaaacaatactgatgcagcaaggctactcaaccacccggatcgcaaatctgaaatcagctatttcgggtttgatg

SEQ ID NO: 311243 - DNA, 75 bp, synthetic construct
  source 1..75: mol_type = other DNA
acaacgcaagcctcccctctctactgaaaaccagtggaacacgggagcaacttctggagcaaattgaaactgtag

SEQ ID NO: 311244 - DNA, 75 bp, synthetic construct
  source 1..75: mol_type = other DNA
cattgtatcgaaactcatcagtaccggcgggcagtcaaagagctatttcatcagtattgccgcagcaatgggtta

SEQ ID NO: 311245 - DNA, 75 bp, synthetic construct
  source 1..75: mol_type = other DNA
gtgaaagtcatctccatcgagagcgggaactctaaaactgtcagctatgacagcgctacgggcttccttacctgg

SEQ ID NO: 311246 - DNA, 75 bp, synthetic construct
  source 1..75: mol_type = other DNA
aaaaaattatcactattgttcctagtattgggtggagtttgttacaaaatctccttcctcgctcccatgatacct

SEQ ID NO: 311247 - DNA, 75 bp, synthetic construct
  source 1..75: mol_type = other DNA
gacttttaccttcagtggtacggctgacggagtgcaacctacagcatttgccaaccaggcttccaccgatgcagc

SEQ ID NO: 311248 - DNA, 75 bp, synthetic construct
  source 1..75: mol_type = other DNA
ccttatgcagcagcttctgcgttcgggcgtgcgttcactgtcaatttcctgggcaataacaccaccattaccctg

SEQ ID NO: 311249 - DNA, 75 bp, synthetic construct
  source 1..75: mol_type = other DNA
tgtccctcctgttcagctactgaaggcgtggtgcgtaacggtaaaagtactgccggacatcagcgctatctctgc

SEQ ID NO: 311250 - DNA, 75 bp, synthetic construct
  source 1..75: mol_type = other DNA
gcaaccgcccgcattatgggcgttggcctcaacgcgattttccgccagttaaaaaactcaggccgcagtcggtaa

SEQ ID NO: 311251 - DNA, 75 bp, synthetic construct
  source 1..75: mol_type = other DNA
ggcaacggccggcaagctcactggtgctgtactgacctctgcagagcaggcaatcgcaaacttcaccgcggttga

SEQ ID NO: 311252 - DNA, 75 bp, synthetic construct
  source 1..75: mol_type = other DNA
agcaaccgcaggcacactcacgggtgcgcagctgaatgcctctgagcagcgtattgaaaacttcagcgctgtcac

SEQ ID NO: 311253 - DNA, 75 bp, synthetic construct
  source 1..75: mol_type = other DNA
attgaaagtgtggccgctgacttcggcaccacgtcagaagagtacaaggccgcaaacctttacttccagcagtcg

SEQ ID NO: 311254 - DNA, 75 bp, synthetic construct
  source 1..75: mol_type = other DNA
cggagaatgctgggctgaaacatgcaatggctgtaactcttgagcatgtgtcggtcacggatgcagggcaggccg

SEQ ID NO: 311255 - DNA, 75 bp, synthetic construct
  source 1..75: mol_type = other DNA
atgattatcaacgatgccctgcaccacagcgaaactccagccaccgatgcttttctggctgaaattcgtgcggcg

SEQ ID NO: 311256 - DNA, 75 bp, synthetic construct
  source 1..75: mol_type = other DNA
acgcgctgcaatctgtcttgcaaaactcgctgtaatagatcccggaggaacttactcagatcgccctcttaatag

SEQ ID NO: 311257 - DNA, 75 bp, synthetic construct
  source 1..75: mol_type = other DNA
ggcgttggcctccacacgattttacgtcccttaaaaaactcaggccgcagtcggtcacctcgcgcatacagccgg

SEQ ID NO: 311258 - DNA, 75 bp, synthetic construct
  source 1..75: mol_type = other DNA
atggggattggcctgattttactgctgggattcacctgttacgcctcacgcgggctgtactgggcctgccctggc

SEQ ID NO: 311259 - DNA, 75 bp, synthetic construct
  source 1..75: mol_type = other DNA
gtagtatttgaattttggaatcagttttcatctggaggtttattgagccaacttattggctttgggccatattcg

SEQ ID NO: 311260 - DNA, 75 bp, synthetic construct
  source 1..75: mol_type = other DNA
cgaagctgcggcgcgtgttgcgtacctgaaagctaaagccagataccatccctcaacgccagccgatttattgca

SEQ ID NO: 311261 - DNA, 75 bp, synthetic construct
  source 1..75: mol_type = other DNA
cgaagcggcggcacgtgctgcgtacctgaaagctaaagccagataccatccctcaacaccagccgatttgttgca

SEQ ID NO: 311262 - DNA, 75 bp, synthetic construct
  source 1..75: mol_type = other DNA
gtatacgtatgttatgtggcatgaaagttgatgtacgattgaaaattgtgtcattaatatttatggccataccga

SEQ ID NO: 311263 - DNA, 75 bp, synthetic construct
  source 1..75: mol_type = other DNA
tttgaaacgggaggcaaataccagcaggcgatacaggccgcaacggcagcggtacagggactggccggcggtaat

SEQ ID NO: 311264 - DNA, 75 bp, synthetic construct
  source 1..75: mol_type = other DNA
tagtaaagttgacaaagcctatgcttgttgcgtttacatcgtatcaattcttactttacccatagttaatgactt

SEQ ID NO: 311265 - DNA, 75 bp, synthetic construct
  source 1..75: mol_type = other DNA
tgataaaaatggtgatgagctggttaaaacaacaattattgttgatcctgttttgagcgctgtacaaaaacaaat

SEQ ID NO: 311266 - DNA, 75 bp, synthetic construct
  source 1..75: mol_type = other DNA
tgattagcgatattaggggttttataccagaacttgcaattcatgattttgacctcattgtcggtattccaagaa

SEQ ID NO: 311267 - DNA, 75 bp, synthetic construct
  source 1..75: mol_type = other DNA
caaacattgagtgcggattcccattcaaccgccacactgacttttattgctcatgatgcagctggtaatcctgtt

SEQ ID NO: 311268 - DNA, 75 bp, synthetic construct
  source 1..75: mol_type = other DNA
ctaccggcggcaacggctcagacgtggtgaatggctttacggtagggacatgggaaggcaccgccgacaccgatc

SEQ ID NO: 311269 - DNA, 75 bp, synthetic construct
  source 1..75: mol_type = other DNA
tgataaggatttattaattaacattggaatctctgatgaaaagaaaaaaagtctaagaactctatttactgaacc

SEQ ID NO: 311270 - DNA, 75 bp, synthetic construct
  source 1..75: mol_type = other DNA
ttttttactggggatttaacgttttctggaaccaaagagcaatttcaactatttgatgaacatttcctctctcca

SEQ ID NO: 311271 - DNA, 75 bp, synthetic construct
  source 1..75: mol_type = other DNA
gaagcgattgtccgagctaaggtggaatggcaatccgtgccgggggaaaaagaggcttacaccggtcttttgaag

SEQ ID NO: 311272 - DNA, 75 bp, synthetic construct
  source 1..75: mol_type = other DNA
catgccataatgcgtactgatattaagaaaaacatagaaataataaaacgagaatttgatggttgtattttcatg

SEQ ID NO: 311273 - DNA, 75 bp, synthetic construct
  source 1..75: mol_type = other DNA
tgcgttgggggataattttggttacgtaggttatgtatttgttctggcgttttttaccaacctcttactggtgct

SEQ ID NO: 311274 - DNA, 75 bp, synthetic construct
  source 1..75: mol_type = other DNA
attacagctcggtaatgccattgttaaaccttcccgttatgtacagaacagccagttttcaccgctgaaaaaata

SEQ ID NO: 311275 - DNA, 75 bp, synthetic construct
  source 1..75: mol_type = other DNA
gtagtctggcggagcaccggatgatggaatttctgaaaaagggccgcgtctggctggtaaaccgctttggtaagg

SEQ ID NO: 311276 - DNA, 75 bp, synthetic construct
  source 1..75: mol_type = other DNA
atggaagcctacggagcaccggcgtcgatcaccagcttcgtggtgccgaccggttactcttttaaccttgatggt

SEQ ID NO: 311277 - DNA, 75 bp, synthetic construct
  source 1..75: mol_type = other DNA
attgcgggtaatcctgagtttgactcattggattcctgggcatctgatttaataaaagacttacgtaaacaaatt

SEQ ID NO: 311278 - DNA, 75 bp, synthetic construct
  source 1..75: mol_type = other DNA
tatccaactcctgacggtacaggtgttcgtgattatatccatgtaatggatctggcagaagctcacgtcaaagct

SEQ ID NO: 311279 - DNA, 75 bp, synthetic construct
  source 1..75: mol_type = other DNA
caatcggtgcacatgagtcggggaatattggtgaacacccaaatggggttcctaataacttatttccttatttga

SEQ ID NO: 311280 - DNA, 75 bp, synthetic construct
  source 1..75: mol_type = other DNA
atgcagatacaatatagctatcgagctatcgacaaagagtttcatgaaccttggcagagagctttgggaaatgtg

SEQ ID NO: 311281 - DNA, 75 bp, synthetic construct
  source 1..75: mol_type = other DNA
tagactcgtaaagctaagtctgaatagtaatgctcttgagtcaataaattttcctcaaggcagaaatgtaagtat

SEQ ID NO: 311282 - DNA, 75 bp, synthetic construct
  source 1..75: mol_type = other DNA
gtgcaattagaatcttgcgaatgtctgcaatacctgaatctcagccataatcaattatctgatattgttgcaggt

SEQ ID NO: 311283 - DNA, 75 bp, synthetic construct
  source 1..75: mol_type = other DNA
gcctgcccaggctggagaagacgtgccagcgtcgcacccggcattttttgcaccagcgcaaaaaggcccagtctt

SEQ ID NO: 311284 - DNA, 75 bp, synthetic construct
  source 1..75: mol_type = other DNA
gccggaaggaagtgacagcgagcacattacgcgttacagcgacgggaccgagatccgttatgacaggaacgcgca

SEQ ID NO: 311285 - DNA, 75 bp, synthetic construct
  source 1..75: mol_type = other DNA
agcgcagactggcgaaccttgtccggcgcggtgttatccactccgtcaggcacgatcgcatcccaaaatgccggg

SEQ ID NO: 311286 - DNA, 75 bp, synthetic construct
  source 1..75: mol_type = other DNA
ttctgatgagtcggtgatgcgtaaaatctgtactgttaaaaccattcacagtaatgaatttaagcaactggtttc

SEQ ID NO: 311287 - DNA, 75 bp, synthetic construct
  source 1..75: mol_type = other DNA
ccattattagaaacagaacattctgttatgcgggcttatgatccaggtatcatgcaatttttactggatgattat

SEQ ID NO: 311288 - DNA, 75 bp, synthetic construct
  source 1..75: mol_type = other DNA
atgatatattaccctgaggataatatccagcagattggggagtttatttccgctaataatgataataaactagtt

SEQ ID NO: 311289 - DNA, 75 bp, synthetic construct
  source 1..75: mol_type = other DNA
ttcactgtcaacggaggctgccatcatggctactgtcctaacttccccattcctaaaaatcgaagtcgtcaacgg

SEQ ID NO: 311290 - DNA, 75 bp, synthetic construct
  source 1..75: mol_type = other DNA
attctgcaatttcgggacgttacactgttcaggcaccttataaagcgggtgccgggattggcgtcctggaattgc

SEQ ID NO: 311291 - DNA, 75 bp, synthetic construct
  source 1..75: mol_type = other DNA
gcaagaaaggatcagcctgacgaaagtgaaatcgtcatgaaagcgcaggcctccgttaatgcgtttatgaaactg

SEQ ID NO: 311292 - DNA, 75 bp, synthetic construct
  source 1..75: mol_type = other DNA
ggaagatgagtttatgcttttatctagactaccaagtatagagttacaaatgcaatatccatatcttttcccatt

SEQ ID NO: 311293 - DNA, 75 bp, synthetic construct
  source 1..75: mol_type = other DNA
ctgaggtgatccgtattgccttgccagaccgtattgaaggtaagggcgggcagacggtgtctcttggcctcgtgg

SEQ ID NO: 311294 - DNA, 75 bp, synthetic construct
  source 1..75: mol_type = other DNA
tgcctggccggcggcagtgcaggaagtccgggaggatggggtccagaggatgaggaaaaggctcgcagtcggggg

SEQ ID NO: 311295 - DNA, 75 bp, synthetic construct
  source 1..75: mol_type = other DNA
ctattgagtgtccttgctgtggaaaaatatgttctatagctatagggcagacgagtcacaatggtatactcgcat

SEQ ID NO: 311296 - DNA, 75 bp, synthetic construct
  source 1..75: mol_type = other DNA
cggatgttcaggctgtattcgcgcagaatgatgaaatggcgctgggcgcgctgcgcgcactgcaaactgccggta

SEQ ID NO: 311297 - DNA, 75 bp, synthetic construct
  source 1..75: mol_type = other DNA
tttagattcagatgattatttttgcatgggaaaaatagattggctattgaatattctgaaggatgaggatataga

SEQ ID NO: 311298 - DNA, 75 bp, synthetic construct
  source 1..75: mol_type = other DNA
ccgagacttgagcacccggcggtactcgatcttctccagcgatatccctcaccagaaaaactcgcttcgctgggc

SEQ ID NO: 311299 - DNA, 75 bp, synthetic construct
  source 1..75: mol_type = other DNA
tcgtcgtgaacgtcagtttcaaaaagtggttacgttgatagacgataatattcgcgaagagatatttgatcctac

SEQ ID NO: 311300 - DNA, 75 bp, synthetic construct
  source 1..75: mol_type = other DNA
ttatcattgtggggattgataatgcatcgtctcatggtaaattcagccgtatggatgagtattctccatggccgc

SEQ ID NO: 311301 - DNA, 75 bp, synthetic construct
  source 1..75: mol_type = other DNA
gtgtttcgcgaaggatgaacgtggtgttactgcaatagaatatgcattgattggtgttgctatggcaactctgct

SEQ ID NO: 311302 - DNA, 75 bp, synthetic construct
  source 1..75: mol_type = other DNA
cgctgtgcgggatgttagcagtgtcggctcatgcggcggacaacgtccacttcacgggtaacctgctggcgggtt

SEQ ID NO: 311303 - DNA, 75 bp, synthetic construct
  source 1..75: mol_type = other DNA
aatcatacgcttgtcatcagttacatacccataaccttatcgatgtgttggagggaagaacgaggcaaacagaca

SEQ ID NO: 311304 - DNA, 75 bp, synthetic construct
  source 1..75: mol_type = other DNA
gcgcaaaggagcagcacgctactcatggcaaacgtactctgccagccaaggcggtcaaacacgatgcctccagcc

SEQ ID NO: 311305 - DNA, 75 bp, synthetic construct
  source 1..75: mol_type = other DNA
atttgccagtgtaattgctaaagatgcattaatttccgcacatgcccatattatgaacggggcccaagttctgtc

SEQ ID NO: 311306 - DNA, 75 bp, synthetic construct
  source 1..75: mol_type = other DNA
cgcactgatgacgatatttttcagtactcaaataaagacattgaattagttaatggcatcggtatggttccgcga

SEQ ID NO: 311307 - DNA, 75 bp, synthetic construct
  source 1..75: mol_type = other DNA
gagaccgtcaacggcaaggccgttattttctctctgcatgttgcctgccacttcaagcgcatgcaccagaatatc

SEQ ID NO: 311308 - DNA, 75 bp, synthetic construct
  source 1..75: mol_type = other DNA
ttataaaagaattgatcttgtggtagatgcgtttgctcatttgcctgataagaagttagttgtcataggtgacgg

SEQ ID NO: 311309 - DNA, 75 bp, synthetic construct
  source 1..75: mol_type = other DNA
gcaagagaattaatgggaggaaagcatgcaacaactacttttattcaaaaaatgcccttttcaaaaaataaatat

SEQ ID NO: 311310 - DNA, 75 bp, synthetic construct
  source 1..75: mol_type = other DNA
aacaccaccgctgaatttgcagcggcgtgttaagaatgcgaaaaaagcagatagtgataaatatggaactatttg

SEQ ID NO: 311311 - DNA, 75 bp, synthetic construct
  source 1..75: mol_type = other DNA
gttatttgaacctgctaattgtagagctaatgctcttaaattttcagttgaacgctttaagaatgaaatgaataa

SEQ ID NO: 311312 - DNA, 75 bp, synthetic construct
  source 1..75: mol_type = other DNA
ttgtagcagattggttggtaacctatgccggtgctgaacgtgtattgagtgagatgtttgatatttttcctgatg

SEQ ID NO: 311313 - DNA, 75 bp, synthetic construct
  source 1..75: mol_type = other DNA
tagtcgctgattggttagtcacttatgctggggccgaaagagttatcaaggaaataatagacatatatccaaact

SEQ ID NO: 311314 - DNA, 75 bp, synthetic construct
  source 1..75: mol_type = other DNA
tctacacaataaagtgcggatgtgattactttggcttacttacatccctgcctgtaactatgctgggaacctgca

SEQ ID NO: 311315 - DNA, 75 bp, synthetic construct
  source 1..75: mol_type = other DNA
atggctttgaattacatccaaaaccggtacagggaagatattttagagtaaggaaacaaaaggaatggggaaaag

SEQ ID NO: 311316 - DNA, 75 bp, synthetic construct
  source 1..75: mol_type = other DNA
tgactttgagaaggcaaaaacacattcatcgaatttacgagcatcactacgttctcagcgtgaagaactggccgc

SEQ ID NO: 311317 - DNA, 75 bp, synthetic construct
  source 1..75: mol_type = other DNA
gccggcgcggatggctcaggcggacaacgaggtaaatacccatggaatgatgatcccacatggtcagattctctt

SEQ ID NO: 311318 - DNA, 75 bp, synthetic construct
  source 1..75: mol_type = other DNA
gggaaataacgctgttactaaactcagtgatccctttgccacgaccttctgtccacaggttgccatgcgtgaagc

SEQ ID NO: 311319 - DNA, 75 bp, synthetic construct
  source 1..75: mol_type = other DNA
attgaaaatgaactggagaatggcggtgaatacgcgaactggagagcaaacatgccgccagttacaccgcaaatt

SEQ ID NO: 311320 - DNA, 75 bp, synthetic construct
  source 1..75: mol_type = other DNA
aataataaaactattacgacgacatttattcagaaactacctaaagcaaagaaaaaatatcaaacataccttcca

SEQ ID NO: 311321 - DNA, 75 bp, synthetic construct
  source 1..75: mol_type = other DNA
gaattgttggcacagcaacaaaatgcgccacaaaaccgcgaaatgttatgggcgcaagcgagcgtctgcccggag

SEQ ID NO: 311322 - DNA, 75 bp, synthetic construct
  source 1..75: mol_type = other DNA
gattatttccgaccgtctggccacggcagttctgactcatgcggggcgaaccacagtaaaagccgatgttccatc

SEQ ID NO: 311323 - DNA, 75 bp, synthetic construct
  source 1..75: mol_type = other DNA
ggtggttcactgcgcggaaggcgcatggggagagacgccggaacagggcggcatgtggataccctcacggaaatt

SEQ ID NO: 311324 - DNA, 75 bp, synthetic construct
  source 1..75: mol_type = other DNA
tttttttgtgtctggtattgtcaggcacagtatatgcagaggaaaacgcaacctattcggtactggataagccgg

SEQ ID NO: 311325 - DNA, 75 bp, synthetic construct
  source 1..75: mol_type = other DNA
tatccgtatacatcagccccgatattatcgcggcacttaatgcgcgctttgaggagaacgcagaagcaggcaaaa

SEQ ID NO: 311326 - DNA, 75 bp, synthetic construct
  source 1..75: mol_type = other DNA
tccagaaattagtggcgcagccagcacagggacggagcaaccttcggcaggagcctggacggaacaaagtgatgg

SEQ ID NO: 311327 - DNA, 75 bp, synthetic construct
  source 1..75: mol_type = other DNA
aaaaaatcatgttccctatatcgatataaccccacaacagggtttccttgtgacaaaatctgaatgtgtgcttgt

SEQ ID NO: 311328 - DNA, 75 bp, synthetic construct
  source 1..75: mol_type = other DNA
gcctatgcgggcaacctcgacattatgacttccagtgcgctggcgacagcggaaaaaatggcccagtcactggcg

SEQ ID NO: 311329 - DNA, 75 bp, synthetic construct
  source 1..75: mol_type = other DNA
aattttacctattgactgtcgatctaatgcaataagattttctaatgagcgttttcaggcagagataaatgatta

SEQ ID NO: 311330 - DNA, 75 bp, synthetic construct
  source 1..75: mol_type = other DNA
tttgaggcgcttaataataaaggagaatatatttttatcagaaatagtgtcccgggattgagttcagtatgcata

SEQ ID NO: 311331 - DNA, 75 bp, synthetic construct
  source 1..75: mol_type = other DNA
ctaacattcacgatatttcagtgaatgttgataaccaactggctgatggacagtctgccaacaaggttactctga

SEQ ID NO: 311332 - DNA, 75 bp, synthetic construct
  source 1..75: mol_type = other DNA
ctgcggtgcgcctgaatgtgatgggcgaaaaaacgcacgatgccggacgcgacaaagtcaaaaatgagcgttacg

SEQ ID NO: 311333 - DNA, 75 bp, synthetic construct
  source 1..75: mol_type = other DNA
agcgagcggttcgcaaagaagaaaagaaagagcaggctgaggcaaaagctgccgacccgcaggctgccgccaaac

SEQ ID NO: 311334 - DNA, 75 bp, synthetic construct
  source 1..75: mol_type = other DNA
ccccagccgtaaattcccctgtaaacatagccttgcgttgcttttgctccaggtgcaacacaccgcaagtttcac

SEQ ID NO: 311335 - DNA, 75 bp, synthetic construct
  source 1..75: mol_type = other DNA
ggcggtcaccgatggcaaaacaactattaagtttcatccgtggtccattgaagagatcgttgccagcgagcagtc

SEQ ID NO: 311336 - DNA, 75 bp, synthetic construct
  source 1..75: mol_type = other DNA
tctcaaataattcagagctcgatgagtttgtgaaaagttggctatcggaaatggttaatagatgtatattctctt

SEQ ID NO: 311337 - DNA, 75 bp, synthetic construct
  source 1..75: mol_type = other DNA
gcgttagtgtattcttttgttcaaattcaatggccggagtcactacactgaagacgggaagtgttcggggagatt

SEQ ID NO: 311338 - DNA, 75 bp, synthetic construct
  source 1..75: mol_type = other DNA
taaatataaaggtggataatgtgagggatattcagtatggtgttaaaaatgattatggttctataaaggaatata

SEQ ID NO: 311339 - DNA, 75 bp, synthetic construct
  source 1..75: mol_type = other DNA
gatgatctcaaatatctgtctcaggcaccccgggcaaaaagagagaaacgtgatcatgtcatagaagtccctgtt

SEQ ID NO: 311340 - DNA, 75 bp, synthetic construct
  source 1..75: mol_type = other DNA
actggaatgaatacgatcatctgactattgagcttgaaaaaaatggagcagggagtaaattatacattacattta

SEQ ID NO: 311341 - DNA, 75 bp, synthetic construct
  source 1..75: mol_type = other DNA
tcaggggatatggaatccaagtctgctgatgacttcctgcgtaccgtctggtctgcaccagatgatgatcttccc

SEQ ID NO: 311342 - DNA, 75 bp, synthetic construct
  source 1..75: mol_type = other DNA
aaaatttcgcggatctgggccgatttttttcccgcaaatacatcgaatcagccggtgatgctgccaacttactga

SEQ ID NO: 311343 - DNA, 75 bp, synthetic construct
  source 1..75: mol_type = other DNA
atgattggtattgattcagccaccggcagatatctgcacggtaacgaacatctgcgccagtccgtcaccgatatt

SEQ ID NO: 311344 - DNA, 75 bp, synthetic construct
  source 1..75: mol_type = other DNA
ggatatcgaagggatcaaaaaagaagacggcttacccgtcagaacaggagaaataacgctaaatgcccaacagtt

SEQ ID NO: 311345 - DNA, 75 bp, synthetic construct
  source 1..75: mol_type = other DNA
ctgtagatgtctttaaagatccagttaatgttgatgagactacatcaatcgaaacagaaggattacatgcttatg

SEQ ID NO: 311346 - DNA, 75 bp, synthetic construct
  source 1..75: mol_type = other DNA
ttgatgagtacaatgagaagaaagcatccgcccagaaagacattctcattaaggtactggatgacggcatcacga

SEQ ID NO: 311347 - DNA, 75 bp, synthetic construct
  source 1..75: mol_type = other DNA
cgttactttcggaccttatctgggtgaaacgttcgccctggtcgaagctaaaggcgctgaaggtgcaaaagtcta

SEQ ID NO: 311348 - DNA, 75 bp, synthetic construct
  source 1..75: mol_type = other DNA
gtgattctggctcaacgtgcatttgattcacgagctattactgaacttgttacgaatacaaatactgtacgtgta

SEQ ID NO: 311349 - DNA, 75 bp, synthetic construct
  source 1..75: mol_type = other DNA
gagaaaaaacactatccaattgaagctcctgatcctgttgaagctattaaattcagaatggagcagcagggttta

SEQ ID NO: 311350 - DNA, 75 bp, synthetic construct
  source 1..75: mol_type = other DNA
gcagcgagtatgatgaggcggggaggctgaaggcacagacggatgcggcggggcggcggacggagtacagcctgc

SEQ ID NO: 311351 - DNA, 75 bp, synthetic construct
  source 1..75: mol_type = other DNA
gcggacgctgacgtaccggcgtgaggccgccggtgacctggccggggaaatcaccggcgtgacggatggtgccgg

SEQ ID NO: 311352 - DNA, 75 bp, synthetic construct
  source 1..75: mol_type = other DNA
atggtcaggaaacattgaccgcagagaaaatcttgggaacttgtaacgctactatcaactcaattattttaggta

SEQ ID NO: 311353 - DNA, 75 bp, synthetic construct
  source 1..75: mol_type = other DNA
gctattgaacttaatggcctaagtcaagaacagtgccgttcaattcttggacaggttggaaataactgggaatat

SEQ ID NO: 311354 - DNA, 75 bp, synthetic construct
  source 1..75: mol_type = other DNA
aggccgggggcgtgggagcgtacttgtcttgatatgatgggattggttgccaacaccgacgagcatcactactac

SEQ ID NO: 311355 - DNA, 75 bp, synthetic construct
  source 1..75: mol_type = other DNA
tacgttgaagttggtacttctgcttcaggtcagtacaacttgggaaccgcaagaaatatgagttccgaggtatcg

SEQ ID NO: 311356 - DNA, 75 bp, synthetic construct
  source 1..75: mol_type = other DNA
gtagttcttgctcaacgcgcttttgattctcgagctattactgaactagtcagcaatacaaacactattcgtgtc

SEQ ID NO: 311357 - DNA, 75 bp, synthetic construct
  source 1..75: mol_type = other DNA
atcctgcgtagtttaggaaataacggtcaggaaactttaaccgctgataaaattctgcaaacttgtaattccaca

SEQ ID NO: 311358 - DNA, 75 bp, synthetic construct
  source 1..75: mol_type = other DNA
aattagccagacaggtagtgaagctataaaagcaattattgctcaagctaattatctgacgcaatgccatcaata

SEQ ID NO: 311359 - DNA, 75 bp, synthetic construct
  source 1..75: mol_type = other DNA
cgtaaacagcattcgcctgaatttcgcagtgaagccctgaagcttgctgaacgcatcggtgttactgccgcagcc

SEQ ID NO: 311360 - DNA, 75 bp, synthetic construct
  source 1..75: mol_type = other DNA
aggaaaaccaaaattatcaccgaagcggcgggaatgcttggagagggcttaggcaatctctcgaaagaaatcact

SEQ ID NO: 311361 - DNA, 75 bp, synthetic construct
  source 1..75: mol_type = other DNA
caaccgtgcactggcagatggtaaagccaaacagacttataaagttacggttactgatgccaataacaaccttgt

SEQ ID NO: 311362 - DNA, 75 bp, synthetic construct
  source 1..75: mol_type = other DNA
acggggcatgcgtacagcgaacaggggctggcgacccgtcaggagccggacggtctgccgccggtggagtggctg

SEQ ID NO: 311363 - DNA, 75 bp, synthetic construct
  source 1..75: mol_type = other DNA
aagtgacacgctccatcaggtcaaaacgaaccgatgtcatcaggtcaaaatgcactgatgatcttacagagaata

SEQ ID NO: 311364 - DNA, 75 bp, synthetic construct
  source 1..75: mol_type = other DNA
ataccagaacaggaggagcatcatttatagaatttgcaacatcgttagcctataagcacaggttaaagctaccaa

SEQ ID NO: 311365 - DNA, 75 bp, synthetic construct
  source 1..75: mol_type = other DNA
taaccttggtttctttacacaaagtagacaaggtgtcacaaatatgctctctaagcttgatgagaattttatgag

SEQ ID NO: 311366 - DNA, 75 bp, synthetic construct
  source 1..75: mol_type = other DNA
ttagcgctctattctctttcattgcacttgttgtcagtataactgctctgtataacacctatcgatcaagaaaaa

SEQ ID NO: 311367 - DNA, 75 bp, synthetic construct
  source 1..75: mol_type = other DNA
atcatctgatgtaaaagaactggtagcagacggagtggcgaccgcaacgctggatgttactctgatgtcggctgg

SEQ ID NO: 311368 - DNA, 75 bp, synthetic construct
  source 1..75: mol_type = other DNA
ggcgacaacgccaacattgaagaaatccttaacaagtttggttggaacaagtcgcagctttcacagtacgaagac

SEQ ID NO: 311369 - DNA, 75 bp, synthetic construct
  source 1..75: mol_type = other DNA
acttccctgccggtctcgataggttataccaggccatcataaacacgccttttgacagtgacaaaggttgggggt

SEQ ID NO: 311370 - DNA, 75 bp, synthetic construct
  source 1..75: mol_type = other DNA
tgccacatgcgtttttcagatgtgtggaacgaacacttgcatatcacccagggaaaaaccggaatgcgtctggcg

SEQ ID NO: 311371 - DNA, 75 bp, synthetic construct
  source 1..75: mol_type = other DNA
gtaatggataatgccacccatgtggcggtgtactttggctcttacctgaaaaagccaccggtgccgatgagtcgt

SEQ ID NO: 311372 - DNA, 75 bp, synthetic construct
  source 1..75: mol_type = other DNA
catgtctcaatcgacgaacttgagaacgtctggccgctggtgccgcctggcgccagtaattcagaaatgttggag

SEQ ID NO: 311373 - DNA, 75 bp, synthetic construct
  source 1..75: mol_type = other DNA
gggctggctgaactgcgatataccgataatggtgctggcacaaagcggtccgatgaactgatgataacgctgttc

SEQ ID NO: 311374 - DNA, 75 bp, synthetic construct
  source 1..75: mol_type = other DNA
atttcagtctgacggtggaaggcgaggatatcacgaaagcaataaaacgcggactggctgaactgcgttataccg

SEQ ID NO: 311375 - DNA, 75 bp, synthetic construct
  source 1..75: mol_type = other DNA
tcagctatggttttcctgtaagtttcgcaacgctggcgcttttctataataaggatttgttaaacaccgcaccaa

SEQ ID NO: 311376 - DNA, 75 bp, synthetic construct
  source 1..75: mol_type = other DNA
acggccctgacccttgccaccgttgccgcactgctgacgggcggaggggcagccggtgcggccagtgtcgcactg

SEQ ID NO: 311377 - DNA, 75 bp, synthetic construct
  source 1..75: mol_type = other DNA
tttctctcttgctggctgcggtgacaaagaagaatcgaagaaattcagcgccaatctgaacggcagtaagcgtac

SEQ ID NO: 311378 - DNA, 75 bp, synthetic construct
  source 1..75: mol_type = other DNA
taataataaatgcaccatcttacatgagtggtgatacgcactggacttgtgatcctcttgatgattttatgaaac

SEQ ID NO: 311379 - DNA, 75 bp, synthetic construct
  source 1..75: mol_type = other DNA
gggtgaaaattaaccgtactatacataagttactgaaggagaaaacctcggctttggctgagcgtcaagatgccc

SEQ ID NO: 311380 - DNA, 75 bp, synthetic construct
  source 1..75: mol_type = other DNA
tgatatgggggaaaggcagaagctggttgttaaatttcttcttatgacggggtgcagaaccgcagagattagaac

SEQ ID NO: 311381 - DNA, 75 bp, synthetic construct
  source 1..75: mol_type = other DNA
cggcggaaaatggcctgactgcccgtgtggccgaaaagctgggcgggataaggattgctcacgttgatcaggttg

SEQ ID NO: 311382 - DNA, 75 bp, synthetic construct
  source 1..75: mol_type = other DNA
ctgaccgcagaggccggggtaatcacttccggattcgggaggaatgaagatcgccggtgggtcgttgagtcgctg

SEQ ID NO: 311383 - DNA, 75 bp, synthetic construct
  source 1..75: mol_type = other DNA
tgatactgtctgctgtttttgccatcattttcacactgatgagtcgtgaacgctcactggagttcgaaaaagagt

SEQ ID NO: 311384 - DNA, 75 bp, synthetic construct
  source 1..75: mol_type = other DNA
acaaaaacagcagcggtaaggaagatgagaaccgacagcaacaaggcatggaagggagcgttaaagcgggcaggc

SEQ ID NO: 311385 - DNA, 75 bp, synthetic construct
  source 1..75: mol_type = other DNA
gagctgcctaagggcacgtggggggattctcaaactcgagcattttgcagcagcttgtggctcgccgatagccat

SEQ ID NO: 311386 - DNA, 75 bp, synthetic construct
  source 1..75: mol_type = other DNA
tttcaaagctatcatatgagcaagtaatagaaataaagaaatcaaagggagttaatcaaagagagcttgctaaaa

SEQ ID NO: 311387 - DNA, 75 bp, synthetic construct
  source 1..75: mol_type = other DNA
tatttcatcctcagagaacggttgatgacaatgcagaagcagctggaaggggcacaggactatatccgcactcag

SEQ ID NO: 311388 - DNA, 75 bp, synthetic construct
  source 1..75: mol_type = other DNA
gcctgcgcgatgccggtgagtctgtcgacctttcctggctgcagaccactatcgacctgaccgacggcgctgacg

SEQ ID NO: 311389 - DNA, 75 bp, synthetic construct
  source 1..75: mol_type = other DNA
atctaggacgggtagattccgtgtgagagagagtcagcttccaacacttttatccatcttagaaactctcagaat

SEQ ID NO: 311390 - DNA, 75 bp, synthetic construct
  source 1..75: mol_type = other DNA
tgatgttgagcgtggccttggatatctaattgttaatgacattgatgggcccatcgatatttctcaaaatttatt

SEQ ID NO: 311391 - DNA, 75 bp, synthetic construct
  source 1..75: mol_type = other DNA
gcatttcctgtcgcgcttgataggggggatattaatgcaatacaggcaaacgattctgtttctgccgggcttgat

SEQ ID NO: 311392 - DNA, 75 bp, synthetic construct
  source 1..75: mol_type = other DNA
tcattactcgagaaaagccctgatgaactcgtcgctctgctcataaaacagcgcacagaagcggctcttgagttc

SEQ ID NO: 311393 - DNA, 75 bp, synthetic construct
  source 1..75: mol_type = other DNA
ggggcaacagaatggtgcgcagaatacgatgagtggggcaacctgctgaatgaagagaacccgcatcatctgcag

SEQ ID NO: 311394 - DNA, 75 bp, synthetic construct
  source 1..75: mol_type = other DNA
acacgcagggtgaagccgggctgaagcgggtggtgaaaaatcacccggagacggaagcactgctctggcagcatg

SEQ ID NO: 311395 - DNA, 75 bp, synthetic construct
  source 1..75: mol_type = other DNA
tgtagttgtgacaaactccctgtagatatatttttccacgtaacaatattttcctctgaaagcaggcagtatttg

SEQ ID NO: 311396 - DNA, 75 bp, synthetic construct
  source 1..75: mol_type = other DNA
ctaccacaggcatggatagctatataaaaattgagcagaccggcagtgataaatttaaagtcactgatgtgtatc

SEQ ID NO: 311397 - DNA, 75 bp, synthetic construct
  source 1..75: mol_type = other DNA
atctggcttttgttctttccaatcatctaacagtgttaaaatagcaactgtaacgatggtttgtaatggtcaaac

SEQ ID NO: 311398 - DNA, 75 bp, synthetic construct
  source 1..75: mol_type = other DNA
gaggcggtggacgcgcaggcgctggcggtggcgttagaggcagggcatttggttcaggcggaggtggtgcatacg

SEQ ID NO: 311399 - DNA, 75 bp, synthetic construct
  source 1..75: mol_type = other DNA
ggatcggtaatagcccctggtggtgaaggtggtggaaaatcaggagtcacaaacacgaacggtggtaacggcggt

SEQ ID NO: 311400 - DNA, 75 bp, synthetic construct
  source 1..75: mol_type = other DNA
ccgctacctgaaagcccgtgcagatgcttccggtgtgacggtgggttacagcggcgtggccgcacgtattgcacg

SEQ ID NO: 311401 - DNA, 75 bp, synthetic construct
  source 1..75: mol_type = other DNA
cgggcgaaccattaccgggtgggatgaggataaaaacagcatccgcacgttttaccgggatgacatcgaccgttt

SEQ ID NO: 311402 - DNA, 75 bp, synthetic construct
  source 1..75: mol_type = other DNA
tgccatgacagcgatttctgggaaagatgctgattctttagctgtatttcagcgagagtatcctgaaaaatatgc

SEQ ID NO: 311403 - DNA, 75 bp, synthetic construct
  source 1..75: mol_type = other DNA
aatttacacattgccgagttaaccaatgaaaatggtcaggtggtttggaaagcctcatatgttaccataatgatt

SEQ ID NO: 311404 - DNA, 75 bp, synthetic construct
  source 1..75: mol_type = other DNA
gacgatggatgaggggtcactgtctctgccaccatttaccggacacgacgaaaaaagccagcgcaactaccatct

SEQ ID NO: 311405 - DNA, 75 bp, synthetic construct
  source 1..75: mol_type = other DNA
gaatattctcgcctttctggcaacggtgatgatttcatatcgattagccaacagctatggcgaggatgggataac

SEQ ID NO: 311406 - DNA, 75 bp, synthetic construct
  source 1..75: mol_type = other DNA
ctggctaacgttgctcacaacacaaccgggtcaagtgcaatggcatcgaccaaaggtaccttaaatcacgctatc

SEQ ID NO: 311407 - DNA, 75 bp, synthetic construct
  source 1..75: mol_type = other DNA
gttgagcgttatctctcactactcactggcgagctgccgcgtttacgcgatgatagcgatggctacggtccccgc

SEQ ID NO: 311408 - DNA, 75 bp, synthetic construct
  source 1..75: mol_type = other DNA
tccgccgtatgactggggacaatcccgatgcaccacgctggttaagttatcccggattcgttcctcagttaggaa

SEQ ID NO: 311409 - DNA, 75 bp, synthetic construct
  source 1..75: mol_type = other DNA
caccattgaaattagttgggcacaattttcttcttaaggaggggttactggaaaaaaagtaccacgcgctaacaa

SEQ ID NO: 311410 - DNA, 75 bp, synthetic construct
  source 1..75: mol_type = other DNA
cagcaaatctggcaggtcctttgttcaagcattcgggaggcattgtcaaaagcggatgtctctgcacagagtgtc

SEQ ID NO: 311411 - DNA, 75 bp, synthetic construct
  source 1..75: mol_type = other DNA
tagatgatgaaaatatgagtatccagccagaacagataaatacgccgggaatatctgatttagatactggtttta

SEQ ID NO: 311412 - DNA, 75 bp, synthetic construct
  source 1..75: mol_type = other DNA
aacaccaggagcaatggttatctctgttaaagctgtagcaggtggtaccgggggggatacaccattaggttcagg

SEQ ID NO: 311413 - DNA, 75 bp, synthetic construct
  source 1..75: mol_type = other DNA
cgatagggataggggattttgatatgatgaagcttttgttgaaattaggtgctgatatttatttggagagtgaga

SEQ ID NO: 311414 - DNA, 75 bp, synthetic construct
  source 1..75: mol_type = other DNA
aattgttccatcttatgtttttttctaataccggcggcatcctgcgaaccgatccctcttactttttgagcatca

SEQ ID NO: 311415 - DNA, 75 bp, synthetic construct
  source 1..75: mol_type = other DNA
tggtatttctgttgatagtcataacaaagtattatatataagcgatagcgatattaagacctctggaagcgtatc

SEQ ID NO: 311416 - DNA, 75 bp, synthetic construct
  source 1..75: mol_type = other DNA
aatagctatggtgcttatgctaatggggaaaaagcatatattaatttagattatgtggcacttgaaaccgggtag

SEQ ID NO: 311417 - DNA, 75 bp, synthetic construct
  source 1..75: mol_type = other DNA
ctctggaacggtttaaattttatctggagcaacacgggtggatcgttgcccgtaaagagcaactggtggagcggt

SEQ ID NO: 311418 - DNA, 75 bp, synthetic construct
  source 1..75: mol_type = other DNA
ctggcatcgtgcggcctgacggtggcgcagatgcaaagccagatggacccggtatacacgccggcgcgaaaaatt

SEQ ID NO: 311419 - DNA, 75 bp, synthetic construct
  source 1..75: mol_type = other DNA
tgtggtgttcccgccggtgctggtgcagatgctcgaccggctggaaagtgaaatcctggctgaccgggtgagtga

SEQ ID NO: 311420 - DNA, 75 bp, synthetic construct
  source 1..75: mol_type = other DNA
taacctgctgaatgaagagaacccgcatcagctgcagcagcttatccgcctgccggggcagcagtatgatgagga

SEQ ID NO: 311421 - DNA, 75 bp, synthetic construct
  source 1..75: mol_type = other DNA
tgaagttcgaatttgtcgttgatgaagatgaattttctggcgataaagatgatgaagctttttttatgaatttat

SEQ ID NO: 311422 - DNA, 75 bp, synthetic construct
  source 1..75: mol_type = other DNA
attgctgcaaccagattggcatcgtggtctgcgatgaaaacgatagctactaccaactctgttgccgcaaatcgt

SEQ ID NO: 311423 - DNA, 75 bp, synthetic construct
  source 1..75: mol_type = other DNA
gtgcttccagctaaagtgaaagttgataataaagctaataaagaagcggcacagacatttggtgcggtactggga

SEQ ID NO: 311424 - DNA, 75 bp, synthetic construct
  source 1..75: mol_type = other DNA
gaggatgataatctgccgttattacgcgaaatcttagcccgtaaagaatacgacgattccggcaatgatatgttt

SEQ ID NO: 311425 - DNA, 75 bp, synthetic construct
  source 1..75: mol_type = other DNA
aagaggttttgaaccagaggcacgtgaagagttcctaaataaggctcatgaaaaattaaaaaatttaaatcgttc

SEQ ID NO: 311426 - DNA, 75 bp, synthetic construct
  source 1..75: mol_type = other DNA
taagtgcttttgtaaaagaagaacaagatataattgaaagcatcaacatgccacatatgccaacgttggggaaag

SEQ ID NO: 311427 - DNA, 75 bp, synthetic construct
  source 1..75: mol_type = other DNA
ggatcacctccgcgctttcccgtctgctgtggctggcctgcaagcacaacccgcaactggacgatgaaatgctgg

SEQ ID NO: 311428 - DNA, 75 bp, synthetic construct
  source 1..75: mol_type = other DNA
taaagataacaatatcaagtcattttatttaggtacgcccagtggtaattttaaagcaatagataaccacgggaa

SEQ ID NO: 311429 - DNA, 75 bp, synthetic construct
  source 1..75: mol_type = other DNA
tatctttaccggtatgaccgttacggcaggctgacggagaaaaccgacctcatcccggaagggggtatccgtacg

SEQ ID NO: 311430 - DNA, 75 bp, synthetic construct
  source 1..75: mol_type = other DNA
ctgtattacaaccgccaccgctattatgacccgctgcaggggcgatatatcactcaggatccgattggactgaag

SEQ ID NO: 311431 - DNA, 75 bp, synthetic construct
  source 1..75: mol_type = other DNA
tgctatccatcaaggccatcgccgcttagttgctgcggtgaattttgggcataaaaaaacccagccgaagctggg

SEQ ID NO: 311432 - DNA, 75 bp, synthetic construct
  source 1..75: mol_type = other DNA
aagctgcatacgcccttagtggtgaatgaaacatcccttccggtactaacggcagtacccgtaaaaaagagcggt

SEQ ID NO: 311433 - DNA, 75 bp, synthetic construct
  source 1..75: mol_type = other DNA
cgcgcccagaaagcgccggacggttcggtgtggacacgccgtaaacgccgtatatcacgccttcaggagcgcatc

SEQ ID NO: 311434 - DNA, 75 bp, synthetic construct
  source 1..75: mol_type = other DNA
atgatgggaacaccactatcgcgccagaaaaaaattcaggtcccatttattctcacaccgccagtaagtcgtgta

SEQ ID NO: 311435 - DNA, 75 bp, synthetic construct
  source 1..75: mol_type = other DNA
aaaatgccaaacaatttgcctcacaataaagaaagtttattttatctaaatgttctggatatccctccaaacaat

SEQ ID NO: 311436 - DNA, 75 bp, synthetic construct
  source 1..75: mol_type = other DNA
tatcttgcttattcctggatagaaaatgaaaaaggggagaaaagcgacgatcttctggtcgccctgccaccgatt

SEQ ID NO: 311437 - DNA, 75 bp, synthetic construct
  source 1..75: mol_type = other DNA
agaaaataaaaatacaattcgtaataaatataaaataaaagaaagtgatatattattacttactgtttcaagggt

SEQ ID NO: 311438 - DNA, 75 bp, synthetic construct
  source 1..75: mol_type = other DNA
ataaggctgataatccactgggacttaattgcgaaggaactcaacaacttgttgataatgaattggctaatccct

SEQ ID NO: 311439 - DNA, 75 bp, synthetic construct
  source 1..75: mol_type = other DNA
gaattaccaagaaaatctgtgaaagaggtgtggtgattgtaagcggcctagctattggtactgatacaaatgcac

SEQ ID NO: 311440 - DNA, 75 bp, synthetic construct
  source 1..75: mol_type = other DNA
gtaagtctgggggcggcattttcattaggcatgctggggacgttatcaacttcagtgacctcatcagtgactgaa

SEQ ID NO: 311441 - DNA, 75 bp, synthetic construct
  source 1..75: mol_type = other DNA
ttgttgagatttctaaaattgcgaaaaaaaataacctattgttaattgaagattgtaattctgcatttggaagca

SEQ ID NO: 311442 - DNA, 75 bp, synthetic construct
  source 1..75: mol_type = other DNA
tatatcagatacactagttgcaataccttgtgggtattggatatcagaagaagacatcgatattattggaaaata

SEQ ID NO: 311443 - DNA, 75 bp, synthetic construct
  source 1..75: mol_type = other DNA
tactttggcgtccaagcggaatcgctccagtagataaaaaaagcttttctcaattaaatatcaaaaagaaaaata

SEQ ID NO: 311444 - DNA, 75 bp, synthetic construct
  source 1..75: mol_type = other DNA
tactcgcagcaggcgtgctgttttttattttgttttcgataagcaaaaatttctggacgatgtatcttctcgcca

SEQ ID NO: 311445 - DNA, 75 bp, synthetic construct
  source 1..75: mol_type = other DNA
agaacgcctttaaagaagtggcagatgcgctggcattacgtcaaagcctgaacgatcaaattagcgcccagcagc

SEQ ID NO: 311446 - DNA, 75 bp, synthetic construct
  source 1..75: mol_type = other DNA
ataaaacactctccaggaaacccggggcggttcaatcaattgacgttaaggtgactctggaagctgcagcttgta

SEQ ID NO: 311447 - DNA, 75 bp, synthetic construct
  source 1..75: mol_type = other DNA
cattttcaaaatgttggtgctgaggataaggcaaggctgaaattacgcggtaaaaggtttcttaaggatatggtt

SEQ ID NO: 311448 - DNA, 75 bp, synthetic construct
  source 1..75: mol_type = other DNA
ctacgaccacaggttgtatgcagctctgcctcaggaagagaaaaacaagatcacctcattcattaacttcgtgtt

SEQ ID NO: 311449 - DNA, 75 bp, synthetic construct
  source 1..75: mol_type = other DNA
atgaagaactggaagctatcaaagctgagaataaataacttcaaggcttttgataaagtcgaattcgattttgag

SEQ ID NO: 311450 - DNA, 75 bp, synthetic construct
  source 1..75: mol_type = other DNA
tgatgtcgatcacgaactggacgcagtacaggctgatatctttattccggccactgaagatggcgaatggactgt

SEQ ID NO: 311451 - DNA, 75 bp, synthetic construct
  source 1..75: mol_type = other DNA
caaaggctttgaaaaagggcaatcaatattaaataatgccagcccacatgtaggagctaactatgtattaaatat

SEQ ID NO: 311452 - DNA, 75 bp, synthetic construct
  source 1..75: mol_type = other DNA
gacggagttgtgtctggttctaagattaaggaagtgctagacgatctagatcctgaaatcgcaaattccgcttgg

SEQ ID NO: 311453 - DNA, 75 bp, synthetic construct
  source 1..75: mol_type = other DNA
acttcataatgactataaagagagtaagcattcctatgagttgggatatatatccaaagatgaattacttgacat

SEQ ID NO: 311454 - DNA, 75 bp, synthetic construct
  source 1..75: mol_type = other DNA
tggtgtgcagaagaagatgaaattctgcggcaatattatccttcagaaggtgtgaaagtgagccgacgcctttcc

SEQ ID NO: 311455 - DNA, 75 bp, synthetic construct
  source 1..75: mol_type = other DNA
ctttgtgctggctggacgaatttgccgacccgactaccgcacggaaactttatactctaaataattcaagttgca

SEQ ID NO: 311456 - DNA, 75 bp, synthetic construct
  source 1..75: mol_type = other DNA
tacaactatgtgaaacaataatgccaggaggcattaaaaattatagtgataatcttttctggaacaaaactaatg

SEQ ID NO: 311457 - DNA, 75 bp, synthetic construct
  source 1..75: mol_type = other DNA
ttatcgctgcggcgtgtctgactgcatccggcgttgccatggctgctgataaagaagcagttaaatcaattactg

SEQ ID NO: 311458 - DNA, 75 bp, synthetic construct
  source 1..75: mol_type = other DNA
tcattcggatcagggcagtcagtacacaagcgtcggcatggttctagcgaacagatgtcaccgacagaatatgaa

SEQ ID NO: 311459 - DNA, 75 bp, synthetic construct
  source 1..75: mol_type = other DNA
gtaaatgacatgactaatggtataactttattattagatgtctttggacttaagaaaggagatgaagttttagta

SEQ ID NO: 311460 - DNA, 75 bp, synthetic construct
  source 1..75: mol_type = other DNA
atatagctagtgaaatagatactgataaagtgaatttcatgcataaaatctataataacctttattggtatagac

SEQ ID NO: 311461 - DNA, 75 bp, synthetic construct
  source 1..75: mol_type = other DNA
actataaaatatattatagataatgttttgtacaatagaaaaaaagatatagctagtgaaatagatactgataaa

SEQ ID NO: 311462 - DNA, 75 bp, synthetic construct
  source 1..75: mol_type = other DNA
aattgattggtatgaaaccacatcagatatgcttgagaaattgatgtcggaaattgaagagaattataaggataa

SEQ ID NO: 311463 - DNA, 75 bp, synthetic construct
  source 1..75: mol_type = other DNA
aatcatttattagaagtcataaaatgtggagcggcatttaatccattcggtgaaaatcttcagataagaaaccga

SEQ ID NO: 311464 - DNA, 75 bp, synthetic construct
  source 1..75: mol_type = other DNA
tactttaacggccagtagttcaagcgaatttaaaagtgataaatatatatgcagtgatattgctgatttgatgag

SEQ ID NO: 311465 - DNA, 75 bp, synthetic construct
  source 1..75: mol_type = other DNA
taaagaaaatagataaaaaaattgaagaaatagataatgcaatccgggatctttcctctgaaacagagaggttca

SEQ ID NO: 311466 - DNA, 75 bp, synthetic construct
  source 1..75: mol_type = other DNA
cgagagctgcattgaagcattccatgaggcagaaaacagcctcagtcataccgctttccgccgtaatcaatggga

SEQ ID NO: 311467 - DNA, 75 bp, synthetic construct
  source 1..75: mol_type = other DNA
aggcattcacccgcgtggatgaaacctttgaggccatccgcgacagcctgaatcagcaggccatcaataacatcg

SEQ ID NO: 311468 - DNA, 75 bp, synthetic construct
  source 1..75: mol_type = other DNA
ttgggtatcagccaggcagatgagcgcctgatttataacacggtgctgggccggattgcggaggctgtacggtga

SEQ ID NO: 311469 - DNA, 75 bp, synthetic construct
  source 1..75: mol_type = other DNA
gggattgtagctggtgaggaggttgcaaattggtggttaaaaaaaagggaaagactatttgccaaaaatattagg

SEQ ID NO: 311470 - DNA, 75 bp, synthetic construct
  source 1..75: mol_type = other DNA
aaggagtgagaatgttaagacatcggctagcataatcgatttatctgaagcgaccattgcattggcttgtgcgtc

SEQ ID NO: 311471 - DNA, 75 bp, synthetic construct
  source 1..75: mol_type = other DNA
cttgtctgcatgttccttggcggaaactcgtctgggcgcgcccagacgacgatttccccgaggctgctcaggcca

SEQ ID NO: 311472 - DNA, 75 bp, synthetic construct
  source 1..75: mol_type = other DNA
ttcagcggacggacacaaacgtgatctgccaggagtgccgcaacagcgcggcgatgaaaagaattttaagcgtat

SEQ ID NO: 311473 - DNA, 75 bp, synthetic construct
  source 1..75: mol_type = other DNA
tctctgagcaggtcattgccctatttaagcaacttgaacccatcacaaaacatcatcctctggtctttatcggta

SEQ ID NO: 311474 - DNA, 75 bp, synthetic construct
  source 1..75: mol_type = other DNA
aatatttccagatggagaaaatattttaatatataaagtaaatataattaatgctagttcaaaaaagatgtattt

SEQ ID NO: 311475 - DNA, 75 bp, synthetic construct
  source 1..75: mol_type = other DNA
ttgatgcgccgtttgaagtcggcaatattaagccgcatgccatctcgacatgcggcttatacggtttaccagcta

SEQ ID NO: 311476 - DNA, 75 bp, synthetic construct
  source 1..75: mol_type = other DNA
aggaataaggaatctttcatgaatgaaatgaaaaagaaaggagtgcatgtatcgtctttgcatttaaggaatgat

SEQ ID NO: 311477 - DNA, 75 bp, synthetic construct
  source 1..75: mol_type = other DNA
accgagcacaatgtgaagttcagcgagaagtccagcagtcggattgcatgggcccaggaatggagggcttcgcat

SEQ ID NO: 311478 - DNA, 75 bp, synthetic construct
  source 1..75: mol_type = other DNA
gccggaagactggaaagacctgttcactgccttgtggcttaagaccaaaaaaatggagcaaagaagtgcgcctgg

SEQ ID NO: 311479 - DNA, 75 bp, synthetic construct
  source 1..75: mol_type = other DNA
gttaaagctattgacgaacggcagccttttgccgcgcaactggcggcggtaatgaaaaaggggcggtttactcgt

SEQ ID NO: 311480 - DNA, 75 bp, synthetic construct
  source 1..75: mol_type = other DNA
cggttaatgatgtttgtctgacggatggatttcgcctgtttctgaagaacagacaaataaagtggcaggatgaac

SEQ ID NO: 311481 - DNA, 75 bp, synthetic construct
  source 1..75: mol_type = other DNA
gaaaaaaatatatctaaagaattcaccggctacgaaataagcacagctgaataccaggcatggctggcgggttat

SEQ ID NO: 311482 - DNA, 75 bp, synthetic construct
  source 1..75: mol_type = other DNA
gaatccagtcgttggcggtcatgattgtcatgctcattaacaatgaccaaaccccatatctcacttactaccgta

SEQ ID NO: 311483 - DNA, 75 bp, synthetic construct
  source 1..75: mol_type = other DNA
ttttgtagtcggaatgcatcttttttatgataggaaagagtatattaaaggagttctatgtcataaaaatgcttc

SEQ ID NO: 311484 - DNA, 75 bp, synthetic construct
  source 1..75: mol_type = other DNA
agaattgttcctcttaatgccacaaaaatttgtggacaaaagtacaggcacactatttatattgatgatactaaa

SEQ ID NO: 311485 - DNA, 75 bp, synthetic construct
  source 1..75: mol_type = other DNA
cctcctggatgtttaccgcaattattgccgtatgcattctgtttattattggaattattttcgccaggctctatc

SEQ ID NO: 311486 - DNA, 75 bp, synthetic construct
  source 1..75: mol_type = other DNA
gattcgaacgcaagaatagtaatagaaaaaaataatgattcacttgcgaaactaatcaaagctgcgaaaaataag

SEQ ID NO: 311487 - DNA, 75 bp, synthetic construct
  source 1..75: mol_type = other DNA
ctactcatgacaccggtcttggacaatacagtaaggataacgagtcgctggacaacaccgacgccgttgtctgga

SEQ ID NO: 311488 - DNA, 75 bp, synthetic construct
  source 1..75: mol_type = other DNA
ttgctctgtttaccgtctgcctgcatcccacattttatgtggtgataatatttgcttttgtcattggttttacct

SEQ ID NO: 311489 - DNA, 75 bp, synthetic construct
  source 1..75: mol_type = other DNA
tcttataaggttgtttttattatttatcttattgattttatatgcattttgtcgttcaatgaagttattgtgtag

SEQ ID NO: 311490 - DNA, 75 bp, synthetic construct
  source 1..75: mol_type = other DNA
caacaggatggcgcccctgtttgctgaggaactgattgagagggagcttgaggggcgaccagactatttccgggg

SEQ ID NO: 311491 - DNA, 75 bp, synthetic construct
  source 1..75: mol_type = other DNA
tttcgcacttgaggggagtagtggatctattaatgatattgacgtattggctgcaagaatctttgtaatggcaga

SEQ ID NO: 311492 - DNA, 75 bp, synthetic construct
  source 1..75: mol_type = other DNA
gtttgctttggtttattcaactgcaaaaactttaaatttaatggtataaagttaaaccagtcatgcacaaatttt

SEQ ID NO: 311493 - DNA, 75 bp, synthetic construct
  source 1..75: mol_type = other DNA
tgttatggacttgtgattgaaaacaaccagtttgatagaactgatgccgtaaaagtaacaatgcccacatggaga

SEQ ID NO: 311494 - DNA, 75 bp, synthetic construct
  source 1..75: mol_type = other DNA
ccgatatcattgccgcactgcgcaaacgtggtacaagtttggctgcggtctcgcgtgaggcagggttgtcttctt

SEQ ID NO: 311495 - DNA, 75 bp, synthetic construct
  source 1..75: mol_type = other DNA
catttggtctgcatgagattttcccgcgcatgatgggcgcggacgtcaccctggttgacgtgaataagcagcatc

SEQ ID NO: 311496 - DNA, 75 bp, synthetic construct
  source 1..75: mol_type = other DNA
aatatcatgactctgcaggtgttatacgtaaaacagcaattgtaattaatggtaaaaataatttatttgtttacg

SEQ ID NO: 311497 - DNA, 75 bp, synthetic construct
  source 1..75: mol_type = other DNA
atgaaaacgggcgacaagctggatatcaagggtgtaggtcaggttgaagtctcgccaaacagcgttcagggctat

SEQ ID NO: 311498 - DNA, 75 bp, synthetic construct
  source 1..75: mol_type = other DNA
attatcatccttttgacataaaggatagttctgcagctagttcagttcgacacagagtcgaccgagtttgcagat

SEQ ID NO: 311499 - DNA, 75 bp, synthetic construct
  source 1..75: mol_type = other DNA
ctttgccaatttctggtcagactacaaaattcttctgaaaggaatacgcggtactgtcagcagcttcaaaaatcg

SEQ ID NO: 311500 - DNA, 75 bp, synthetic construct
  source 1..75: mol_type = other DNA
caaaacacttaaagaaaacaatatgtctcctgaagtctgccttgggacacacattaaaacccgtgaactctggct

SEQ ID NO: 311501 - DNA, 75 bp, synthetic construct
  source 1..75: mol_type = other DNA
agcgcgaaggctgcgacaagcaaagcgacggagtctgcacaaaaagccagtgaggctgcagaggcggcgacccgg

SEQ ID NO: 311502 - DNA, 75 bp, synthetic construct
  source 1..75: mol_type = other DNA
ttaaatttaaaggatttcttagcgaagctgattatgattcattattatctagtgcaaaaattagtattaatccac

SEQ ID NO: 311503 - DNA, 75 bp, synthetic construct
  source 1..75: mol_type = other DNA
aaaattattaagcaaaaaaaagcaaaatcaatagttgattatgggtacaatacaaggaatagcaaggcttacaat

SEQ ID NO: 311504 - DNA, 75 bp, synthetic construct
  source 1..75: mol_type = other DNA
ggaattgaggcatgtacaggtgcacattactgggcaagagagttccagaaaatggggcatacagttcgaattatg

SEQ ID NO: 311505 - DNA, 75 bp, synthetic construct
  source 1..75: mol_type = other DNA
ccattgcggaggcagacggcgaaattgagccggaagagcgcaaggtgctggaagagattgccggtgttctgggtc

SEQ ID NO: 311506 - DNA, 75 bp, synthetic construct
  source 1..75: mol_type = other DNA
attacgaactttaaaactggtcgtcgtgcggcgttacgtgagatcgaggatgtgaaacacgatacgcgtgaagcg

SEQ ID NO: 311507 - DNA, 75 bp, synthetic construct
  source 1..75: mol_type = other DNA
ttagaaaccctcaagatattctttattatgtaaggcaagcaaaggaatgtgataaaccacaggttctctcgacta

SEQ ID NO: 311508 - DNA, 75 bp, synthetic construct
  source 1..75: mol_type = other DNA
ttgacggaaataataaggaacacatcggaaaagctaatgatattgaaataagacttctggatcttggactgctac

SEQ ID NO: 311509 - DNA, 75 bp, synthetic construct
  source 1..75: mol_type = other DNA
cgatataaaaatgactatgcgatatgctcatctcgccccggaccatcttgagactgcattaagatttaacccatt

SEQ ID NO: 311510 - DNA, 75 bp, synthetic construct
  source 1..75: mol_type = other DNA
tcgcaagcagctataggtagtggtggttgtgccgcagataaatacccgacagttgccgatttaagtgcgcttcgc

SEQ ID NO: 311511 - DNA, 75 bp, synthetic construct
  source 1..75: mol_type = other DNA
tccgattgggctgaaggggggatggaatttttatcagtatccgctgaatccggttcagtatatagattcaatggg

SEQ ID NO: 311512 - DNA, 75 bp, synthetic construct
  source 1..75: mol_type = other DNA
tatcgtcatcgatccgctgattgccctgcccgtcggtgggttagccggtgcgatccttatgggcaggtttaagca

SEQ ID NO: 311513 - DNA, 75 bp, synthetic construct
  source 1..75: mol_type = other DNA
ggcctgatggtgatgcccgacgaaatgatttcacacgacaaccacggcaagcagccgggatttcttgccgctatc

SEQ ID NO: 311514 - DNA, 75 bp, synthetic construct
  source 1..75: mol_type = other DNA
ctataaaagccctgttctcagaatggcgcgggctaaagagctggcacagaagaaaaaaacgcggggggttaagcc

SEQ ID NO: 311515 - DNA, 75 bp, synthetic construct
  source 1..75: mol_type = other DNA
gcctgccagccagaagacaaagcctctttgaaaagcatgttgcgtactgatgaatcccctaatgattttggtaaa

SEQ ID NO: 311516 - DNA, 75 bp, synthetic construct
  source 1..75: mol_type = other DNA
aggcttataaactcactgacggggctggcatgttcctgctggttcatcctaatggttcccgttactggcgtctcc

SEQ ID NO: 311517 - DNA, 75 bp, synthetic construct
  source 1..75: mol_type = other DNA
atggcacttactgatatcaaagttaggactaccaagccctccgacaaacctttcaaacttacagatgggcagggt

SEQ ID NO: 311518 - DNA, 75 bp, synthetic construct
  source 1..75: mol_type = other DNA
atgcatctgcttgtccatccaaatggttctaagtactggcgtttgcagtaccgttatgagggaaagcaaaagatg

SEQ ID NO: 311519 - DNA, 75 bp, synthetic construct
  source 1..75: mol_type = other DNA
tttctggatgtaaacagagaaagatttatcagtccatttgaatatgcaaagattaataatccattaaaacagtaa

SEQ ID NO: 311520 - DNA, 75 bp, synthetic construct
  source 1..75: mol_type = other DNA
ccatcatcgcactcgtggtggcgatcgttttaattttacgcaaagtctcgccggcttacggcatgattgtcggtg

SEQ ID NO: 311521 - DNA, 75 bp, synthetic construct
  source 1..75: mol_type = other DNA
tgagtctaattcgtcattaagaatatcactgttgcctatttcttacttggaaagagagcagatttctgttaactt

SEQ ID NO: 311522 - DNA, 75 bp, synthetic construct
  source 1..75: mol_type = other DNA
aggttgcttcacgattacaacagcgaaccacggcaattatgcgctatgccgtacagagtggtttactggactata

SEQ ID NO: 311523 - DNA, 75 bp, synthetic construct
  source 1..75: mol_type = other DNA
ggtcagtaggggcggggtgacggtccgtgaatgtgttggcagtgcccggtttcgcaccattgccgcggcaatggt

SEQ ID NO: 311524 - DNA, 75 bp, synthetic construct
  source 1..75: mol_type = other DNA
aaaaacaacgtatttttattgcccgtgcactttaccggaaaccggggattttgtttatggatgaggcaaccagtt

SEQ ID NO: 311525 - DNA, 75 bp, synthetic construct
  source 1..75: mol_type = other DNA
tcattagtaaacttgattccgggttacaccatcgcgttcccgttattcatcaaaccgaatcctcagaatgtgggt

SEQ ID NO: 311526 - DNA, 75 bp, synthetic construct
  source 1..75: mol_type = other DNA
gaccggaatcgaaaagtgaaccccgtctgcttcggcccgtctgacagcctgcttcagccagttgcgcatggtttc

SEQ ID NO: 311527 - DNA, 75 bp, synthetic construct
  source 1..75: mol_type = other DNA
tgaatggtcggacatttaatcgcccgaaactttttagtgaattaccaaatgcgggggattcatataagtttgcaa

SEQ ID NO: 311528 - DNA, 75 bp, synthetic construct
  source 1..75: mol_type = other DNA
tgaggtattattatgcgacagcggataagtctggtttctttgaatttacattggcacaaaatacaaacggtttgg

SEQ ID NO: 311529 - DNA, 75 bp, synthetic construct
  source 1..75: mol_type = other DNA
aatatcacccggatcatcatagcgcaccgggaaagcacaatagcctcggcagaccggatagttaccctggggaca

SEQ ID NO: 311530 - DNA, 75 bp, synthetic construct
  source 1..75: mol_type = other DNA
taatgttttatcaacgacatctttctcctcgtaaaggatatcgctgtgcttacagtgtgttgtaccaaacacagg

SEQ ID NO: 311531 - DNA, 75 bp, synthetic construct
  source 1..75: mol_type = other DNA
taacgtcattgaactctcaacgttaaatcacgtattaatcccccacatcaaccgtaacatcatcaacgattatct

SEQ ID NO: 311532 - DNA, 75 bp, synthetic construct
  source 1..75: mol_type = other DNA
ctgatgcttatctgcctgaacccgaagcccccggcgcgcggaaaaagaaaaaagccagagtacaggaggagccgt

SEQ ID NO: 311533 - DNA, 75 bp, synthetic construct
  source 1..75: mol_type = other DNA
caaaaactaaaaatatgtttaaaatgcaattacagagtttgaagtatattattttcccatggcgtttgattaatg

SEQ ID NO: 311534 - DNA, 75 bp, synthetic construct
  source 1..75: mol_type = other DNA
gactgccgctggcattttttgaacgccgtaaattaggtgatatccagtcgcgttttggctcccttgacactttga

SEQ ID NO: 311535 - DNA, 75 bp, synthetic construct
  source 1..75: mol_type = other DNA
ctggcgaaaattttctgtctgtcagctgtaattgaagcaatcaatctggtaatgccggtgggaactcagctggtt

SEQ ID NO: 311536 - DNA, 75 bp, synthetic construct
  source 1..75: mol_type = other DNA
aataatatggtcagaagaataagtcactggaatgacctttatcatgacggtgtttttccggagtctgtttatggg

SEQ ID NO: 311537 - DNA, 75 bp, synthetic construct
  source 1..75: mol_type = other DNA
cattgtctgatgccatatcttgaactgcatatggtgatacatttaatcagccatggagaaactgacgaagcttat

SEQ ID NO: 311538 - DNA, 75 bp, synthetic construct
  source 1..75: mol_type = other DNA
gggctgtgtgggggcaccgaaaggtgcgccgggttcctttgtagccggtaagaccaactctgcacagttcaccac

SEQ ID NO: 311539 - DNA, 75 bp, synthetic construct
  source 1..75: mol_type = other DNA
tcgataaatataaaacacggatactggattcggggattaactgtaaaaaacatccgtggttatactttcctcttg

SEQ ID NO: 311540 - DNA, 75 bp, synthetic construct
  source 1..75: mol_type = other DNA
tacactaaatcagtaagttggcagcatcacccatttgtcataggcgcatattctgcatattggctatggaataat

SEQ ID NO: 311541 - DNA, 75 bp, synthetic construct
  source 1..75: mol_type = other DNA
gactgagcagttgctgcagaacgtttataacgtttacggtaaatataccgctgaggatttatctgctttcacaca

SEQ ID NO: 311542 - DNA, 75 bp, synthetic construct
  source 1..75: mol_type = other DNA
acgtctgactcaacatttaaattcagtacctgagcttggggagaacagttactgggaaatcctgttgccgaaaga

SEQ ID NO: 311543 - DNA, 75 bp, synthetic construct
  source 1..75: mol_type = other DNA
cccatcgtcgctacgattatgttagcttcgaaaatatagatgagatcttgcgtcttctgctgtggcttgaagatg

SEQ ID NO: 311544 - DNA, 75 bp, synthetic construct
  source 1..75: mol_type = other DNA
ctatcgcaggcaaaggatagtaatggaacaaaaggctatgtttttgtaggggaatcgctggattaccttatcact

SEQ ID NO: 311545 - DNA, 75 bp, synthetic construct
  source 1..75: mol_type = other DNA
ctactgtatgagccagaaccccatgattttatccatcatgataccatgattaactcaattgcggattattatcat

SEQ ID NO: 311546 - DNA, 75 bp, synthetic construct
  source 1..75: mol_type = other DNA
aatcagtaaaggggaaacagaggaagcctatgagaaagtcaaaattatttctctggatgatttacctgtaggata

SEQ ID NO: 311547 - DNA, 75 bp, synthetic construct
  source 1..75: mol_type = other DNA
ttgaaaatatccgcactggtaacacacagaaaaaaggtgcgctggatacatcaattatagaatgccttgaggcgt

SEQ ID NO: 311548 - DNA, 75 bp, synthetic construct
  source 1..75: mol_type = other DNA
atgttgagcgcatttgtcataggcgcatattctgcatattggctatggaataataatcaaccgaaaccatttttc

SEQ ID NO: 311549 - DNA, 75 bp, synthetic construct
  source 1..75: mol_type = other DNA
atgactaaaacatctgccgcagtcaaaaccaacctttccccggcaatccgtaacgcatcatttcagatagcagac

SEQ ID NO: 311550 - DNA, 75 bp, synthetic construct
  source 1..75: mol_type = other DNA
tcaaggggcgcagcttgtcgctgcatttggtactggcggtgcggtcatgggtgcggtcatggctattggcggggc

SEQ ID NO: 311551 - DNA, 75 bp, synthetic construct
  source 1..75: mol_type = other DNA
taatacgccagtaccgccggacgatggcggtgatacaccagtaccaccggatgatggcggtgacacgccagtacc

SEQ ID NO: 311552 - DNA, 75 bp, synthetic construct
  source 1..75: mol_type = other DNA
ggaagctggcaaaatcagcacagaacaatataacgcagcgtgggccggactcctgagaacggaggcgcaacgcaa

SEQ ID NO: 311553 - DNA, 75 bp, synthetic construct
  source 1..75: mol_type = other DNA
tgcgcttgatatggcgctggctgagggcaagttaacgaaggcggatcacgataggcttgtccagatgcgagaaga

SEQ ID NO: 311554 - DNA, 75 bp, synthetic construct
  source 1..75: mol_type = other DNA
acagggcgctcagttattagctggtttcggtactatgggcgctgtagcgggcgcggtgctggctatcgctggcgc

SEQ ID NO: 311555 - DNA, 75 bp, synthetic construct
  source 1..75: mol_type = other DNA
tgttgatacaacaattgagacggataaggtaattactggttcaagtttcattcttacgccaagaatattgtctga

SEQ ID NO: 311556 - DNA, 75 bp, synthetic construct
  source 1..75: mol_type = other DNA
gatgacgattccgaagatgacggcgacgatgaccgcaaagaaagcaaagcggtgaaaaatgcccgcgccgccgag

SEQ ID NO: 311557 - DNA, 75 bp, synthetic construct
  source 1..75: mol_type = other DNA
accattaccgaagagattacatcaacgaaattgatgcgaaaaatcagacgctgctgcgtaccatcccgttgaaag

SEQ ID NO: 311558 - DNA, 75 bp, synthetic construct
  source 1..75: mol_type = other DNA
gatgttggtggtgttcgtggcgatattggtggtgttggctgccacggcatcgttagtggttttgagctgagagcc

SEQ ID NO: 311559 - DNA, 75 bp, synthetic construct
  source 1..75: mol_type = other DNA
tctttaacgttggtgatggtactggtagtatctgtaccatgtgccgcactatatgcctttttaagggagtcccat

SEQ ID NO: 311560 - DNA, 75 bp, synthetic construct
  source 1..75: mol_type = other DNA
aacttgattattatggtgaaaataataagtttgaaaccagtattgacctttctggtaacgaagcaaccacttcag

SEQ ID NO: 311561 - DNA, 75 bp, synthetic construct
  source 1..75: mol_type = other DNA
aagatcagctggcattactctccagaaatggcgattactacaaagtgctgcatgcaggcgagcatattttaccct

SEQ ID NO: 311562 - DNA, 75 bp, synthetic construct
  source 1..75: mol_type = other DNA
cacgctgaatgtgatgcaaaaaggcgggcggcagcccgccaggcccggatgttcatcagttacaacgaagtcagc

SEQ ID NO: 311563 - DNA, 75 bp, synthetic construct
  source 1..75: mol_type = other DNA
atgaaaattcataagatgctccattcagctctagatataagaataattactggaaatcgctatgaacgcgatgat

SEQ ID NO: 311564 - DNA, 75 bp, synthetic construct
  source 1..75: mol_type = other DNA
tcagagacagtacaccaacaacaaaaaatgaaatcaaacgtgccagtctgatgaaaattcataagatgctccatt

SEQ ID NO: 311565 - DNA, 75 bp, synthetic construct
  source 1..75: mol_type = other DNA
ccgctgacagatgttgaatgcaaagtccttgaattattgataaaaggatataacatcactcagatatcgaagtgt

SEQ ID NO: 311566 - DNA, 75 bp, synthetic construct
  source 1..75: mol_type = other DNA
aatttatgagagtcaggcatatattctcttagataatgcaatcgctcgagcaggtagttggttgaataaaaaatg

SEQ ID NO: 311567 - DNA, 75 bp, synthetic construct
  source 1..75: mol_type = other DNA
aataataaatcacaaaaagacacattgcttgctgacctgttacctaggttaacattacaaggatctagttattct

SEQ ID NO: 311568 - DNA, 75 bp, synthetic construct
  source 1..75: mol_type = other DNA
atgggagcacgaggtgagcgtggggagactggcccccgaggtgaacctggtcctgcaggtccgagaggcgaacga

SEQ ID NO: 311569 - DNA, 75 bp, synthetic construct
  source 1..75: mol_type = other DNA
tcagggttagtaaaagagaactgatttcacttgtggttaagtggatggaaaaagaaggtgagtttactatagagg

SEQ ID NO: 311570 - DNA, 75 bp, synthetic construct
  source 1..75: mol_type = other DNA
agggccatctggcccacgtggtgcgaccgggccacagggagcaatggggccgcgtggtgaaaccggggccagagg

SEQ ID NO: 311571 - DNA, 75 bp, synthetic construct
  source 1..75: mol_type = other DNA
ctgctgcccgccacggtgcgccgacgcgcgggtctcgtgttgctgcttctgctgctggttatgctgatcccgatt

SEQ ID NO: 311572 - DNA, 75 bp, synthetic construct
  source 1..75: mol_type = other DNA
tatttgatgcagctaacacatacaacgctgagcctggtgtactggaacagacggcccgggcttacattgaaatca

SEQ ID NO: 311573 - DNA, 75 bp, synthetic construct
  source 1..75: mol_type = other DNA
tgctcaggatgcacaaaaagccttgcctgaactggtaactgaagacgcagacgttatatctggtgaaaaacgtct

SEQ ID NO: 311574 - DNA, 75 bp, synthetic construct
  source 1..75: mol_type = other DNA
gagagcaggtttcgcagcgttaaaacagtttcattacagaaacatcagatttataagaagctggggatccgtaat

SEQ ID NO: 311575 - DNA, 75 bp, synthetic construct
  source 1..75: mol_type = other DNA
atggtcgatcttgatgtggtgaaacagcactgccgcattgataccgatttttccggagacgatgccctgctgact

SEQ ID NO: 311576 - DNA, 75 bp, synthetic construct
  source 1..75: mol_type = other DNA
tgaatatggcgcgccagttgagcgaagccagcgcctgggaacttttcgccgcgcagaacctgacaagtgccgata

SEQ ID NO: 311577 - DNA, 75 bp, synthetic construct
  source 1..75: mol_type = other DNA
gatataattaaaagcattcataggtttagatcagtaacacaggagacattctatggtttggcaaaagatttagct

SEQ ID NO: 311578 - DNA, 75 bp, synthetic construct
  source 1..75: mol_type = other DNA
tactggcgtgtagaggatgatttgacgctggtgcggatgaatacgcagcaagtccaggttcaaacggaggtgatg

SEQ ID NO: 311579 - DNA, 75 bp, synthetic construct
  source 1..75: mol_type = other DNA
ctggttgaggcggagaaatccgcgcaggccaatgtgattcgccgacgtgaagaaacggcagcgacgcgttcgtta

SEQ ID NO: 311580 - DNA, 75 bp, synthetic construct
  source 1..75: mol_type = other DNA
aaaatattgtgccggaggcgtctccggcacattgggcaattacggcagggaaaacacttcttgcagctcgctact

SEQ ID NO: 311581 - DNA, 75 bp, synthetic construct
  source 1..75: mol_type = other DNA
acatcttaaatgggatgaaaaagagctaaaatgtaaggatgatgaattttccgaatgggaagtaagaattactcc

SEQ ID NO: 311582 - DNA, 75 bp, synthetic construct
  source 1..75: mol_type = other DNA
agatataggcattggccaacaacatgccggttatgttgatgatagtgaatatattccagccgaagttttcagaga

SEQ ID NO: 311583 - DNA, 75 bp, synthetic construct
  source 1..75: mol_type = other DNA
aagatgcaagacgtaaagactggaataaatcagtatggatagttctgagggccatcaaaaatattgaagaagttg

SEQ ID NO: 311584 - DNA, 75 bp, synthetic construct
  source 1..75: mol_type = other DNA
tgatccagggagagcaaatgctccactatgttgtaaaaagccttttcacgatttttgagcttttcagaaaatggc

SEQ ID NO: 311585 - DNA, 75 bp, synthetic construct
  source 1..75: mol_type = other DNA
ttaatccttctttagcgagcccaattgttcgaggtgatgaagtagattcaagctcttattttattattgatcttg

SEQ ID NO: 311586 - DNA, 75 bp, synthetic construct
  source 1..75: mol_type = other DNA
tgtccagaactgacatagatgaagatgacgaacttcctgatatatctcagtttcctaccgatgaaaatacaaaaa

SEQ ID NO: 311587 - DNA, 75 bp, synthetic construct
  source 1..75: mol_type = other DNA
gttagttttaaaagatttgagcaaagtggtgtgattgttaaagggtgtattttgaatggtgtagttaaaaaagcc

SEQ ID NO: 311588 - DNA, 75 bp, synthetic construct
  source 1..75: mol_type = other DNA
cattccagtatcggaaactttttctaaaaaatcgaatcaaagttttaaaagaaataaaagtaaaggcgttaataa

SEQ ID NO: 311589 - DNA, 75 bp, synthetic construct
  source 1..75: mol_type = other DNA
gcccagacagataaaaaggtccttttaatcgatacagatatgcgtaagggatatacgcacaaattattcggcaaa

SEQ ID NO: 311590 - DNA, 75 bp, synthetic construct
  source 1..75: mol_type = other DNA
ttctgttaatgatcaggggaaagatactgggatattaactctatctatttctggttctgaaccgagtcttatcaa

SEQ ID NO: 311591 - DNA, 75 bp, synthetic construct
  source 1..75: mol_type = other DNA
ctatcgttagaggcaaagtctgttcttgagcagattgttaatgttgataatcagctaaacgagttgacgtttaaa

SEQ ID NO: 311592 - DNA, 75 bp, synthetic construct
  source 1..75: mol_type = other DNA
catcagtgaccaagggaaagacactggtatgctaactatatcgcttacaggtgaagatccagtattaataaaaaa

SEQ ID NO: 311593 - DNA, 75 bp, synthetic construct
  source 1..75: mol_type = other DNA
aaacaaaagataatgatgaaattgatttgggccggcttgtcggcgaatttattgatcatcgtaagctaatagtat

SEQ ID NO: 311594 - DNA, 75 bp, synthetic construct
  source 1..75: mol_type = other DNA
atgttgagaatatggttatacctgagaaaaagcttaatgagaataacaaagcaatagtaactgtcattaatgata

SEQ ID NO: 311595 - DNA, 75 bp, synthetic construct
  source 1..75: mol_type = other DNA
agtaaaagacgctttgaacaaagcggtgttgaaattaaaggttgtatactaaatggtgttgtcaaaaaggcgagc

SEQ ID NO: 311596 - DNA, 75 bp, synthetic construct
  source 1..75: mol_type = other DNA
gaatggtgttgtgagaaaagcaagtagctattatagttatggctataatcactatgactattcatatactgataa

SEQ ID NO: 311597 - DNA, 75 bp, synthetic construct
  source 1..75: mol_type = other DNA
agcagaaacgtttacagctaacgtaattcaaggcaaaactcagagaaataagaaaaatcatgaaagccaaggatt

SEQ ID NO: 311598 - DNA, 75 bp, synthetic construct
  source 1..75: mol_type = other DNA
ttgtagttgttgatactccgccaattttggctgtaacggatgctgcaataattggcaattatgttggaacaacac

SEQ ID NO: 311599 - DNA, 75 bp, synthetic construct
  source 1..75: mol_type = other DNA
tgaacaaacagccaacgcagctatcatccgaatggggttcggaggcgagcttgtagctcacggtatgcgttctat

SEQ ID NO: 311600 - DNA, 75 bp, synthetic construct
  source 1..75: mol_type = other DNA
acattgctagacaagctgcgcaggatgctaaaagtctcgagtttttaaatcaacaattacccaaagttcgtgccg

SEQ ID NO: 311601 - DNA, 75 bp, synthetic construct
  source 1..75: mol_type = other DNA
attgatgtaagtatgaagcggtttgagcaaagtggtgtggtagtcaaaggctgtatacttaacggtgttgtaaag

SEQ ID NO: 311602 - DNA, 75 bp, synthetic construct
  source 1..75: mol_type = other DNA
atagcaattacagggaaaaaagttttattcattgatgctgaccttcgtaagggatatgctcataaaatgtttggt

SEQ ID NO: 311603 - DNA, 75 bp, synthetic construct
  source 1..75: mol_type = other DNA
gacccgctatgcagaagatggctgggtggaggtggataataacattgccgaaaacgccctacgactggtcagtct

SEQ ID NO: 311604 - DNA, 75 bp, synthetic construct
  source 1..75: mol_type = other DNA
tatctgtttcgcggttatatatgcctggaaacggtgaagatgaacctaagatattattgaccgttagagataaaa

SEQ ID NO: 311605 - DNA, 75 bp, synthetic construct
  source 1..75: mol_type = other DNA
tctctggaggcaaaagccgttcttgaccaaattgttaatgttgataatcagctcaatgaattaaccttccgtgag

SEQ ID NO: 311606 - DNA, 75 bp, synthetic construct
  source 1..75: mol_type = other DNA
ttagttgtaataattgggtttatccttggtttatttatagctgtttctgcagtattaattaaagtttttttgcgt

SEQ ID NO: 311607 - DNA, 75 bp, synthetic construct
  source 1..75: mol_type = other DNA
aagcaataagaagtttaagaactagcttacattttgcaatgcttgaatctagcaataatatattaatgatatctg

SEQ ID NO: 311608 - DNA, 75 bp, synthetic construct
  source 1..75: mol_type = other DNA
aagaactatcagaaacagatgaattagacttaggtcgtttagttggagaatttattgatcatcgaaaacttatcc

SEQ ID NO: 311609 - DNA, 75 bp, synthetic construct
  source 1..75: mol_type = other DNA
gaattgtgtaatgaaaaaagcgagtagctattatagctatggctatagccaatatggctactcatatacagataa

SEQ ID NO: 311610 - DNA, 75 bp, synthetic construct
  source 1..75: mol_type = other DNA
cttgtgattgttttaggtattatcattgggttattcttttccgtaggttttgtgttcgtcagagtattcttgcgg

SEQ ID NO: 311611 - DNA, 75 bp, synthetic construct
  source 1..75: mol_type = other DNA
gttggtgaattgtttcaaaaagatggtgtaaagctcattgtaaatggttatgacgcaaaagaaggagatagattt

SEQ ID NO: 311612 - DNA, 75 bp, synthetic construct
  source 1..75: mol_type = other DNA
actgataaaaaagtgttattcattgacgctgaccttagaaaaggatacgtacataaaatgcttggcggaagtcag

SEQ ID NO: 311613 - DNA, 75 bp, synthetic construct
  source 1..75: mol_type = other DNA
tcattatatttccaaccgtaatatcacttaattttaatgtcacttcaattttcatatccacaatgattattggaa

SEQ ID NO: 311614 - DNA, 75 bp, synthetic construct
  source 1..75: mol_type = other DNA
ctcaggatatcagtgatacatcgctaaaccgttatcgtcacgctgtgacgcgcattgtcaacgacgaaatcgaca

SEQ ID NO: 311615 - DNA, 75 bp, synthetic construct
  source 1..75: mol_type = other DNA
ctgcaacctggcgatccgcaatataataaagtactgacgcaaaaaaatgcggctgaaaaaacactcacgctgtca

SEQ ID NO: 311616 - DNA, 75 bp, synthetic construct
  source 1..75: mol_type = other DNA
agccagcacggcaatgaatgaatttggattcaacccagatgtaattgaagctgcacttgctcatattgataaaaa

SEQ ID NO: 311617 - DNA, 75 bp, synthetic construct
  source 1..75: mol_type = other DNA
agatcgatctcgatacgaagctctggactattccagccgaacggatgaaagctaagcgggaacacattgttcctt

SEQ ID NO: 311618 - DNA, 75 bp, synthetic construct
  source 1..75: mol_type = other DNA
gaaatgcccctaaacagtcaatgaatagccaaactgctaatgcagcactcaaacgcattggttatggagggaaat

SEQ ID NO: 311619 - DNA, 75 bp, synthetic construct
  source 1..75: mol_type = other DNA
ctttatccgggtgatgatttcagcctgggaatattcaataagttgcttctagtaactgattacaaaccgattccc

SEQ ID NO: 311620 - DNA, 75 bp, synthetic construct
  source 1..75: mol_type = other DNA
tttttcacccttcaattccgccaatgtatgcagtggttaacaatcacaatagaaatattgattattggacggtaa

SEQ ID NO: 311621 - DNA, 75 bp, synthetic construct
  source 1..75: mol_type = other DNA
gatttggaacccgcaattgggaaaaaaaatcgggtttacgaggtgttgaatggcaccagaagccttacgttacca

SEQ ID NO: 311622 - DNA, 75 bp, synthetic construct
  source 1..75: mol_type = other DNA
tcctgacagaccttacgaacggcaagctcctgccacttataaaggaaagaaaaaagtgggtcatggggatagtta

SEQ ID NO: 311623 - DNA, 75 bp, synthetic construct
  source 1..75: mol_type = other DNA
acatttgattatattgagtttgatagttctaagggcaagaccgatcgtgaggtaattcttaaaacactttctgat

SEQ ID NO: 311624 - DNA, 75 bp, synthetic construct
  source 1..75: mol_type = other DNA
ggaagtgatgaacttcactcagcggaatccccaatataaagaaattttgatcagaaatattatcacaacgcatat

SEQ ID NO: 311625 - DNA, 75 bp, synthetic construct
  source 1..75: mol_type = other DNA
agccgccatcgtccgtgggtcttccccagcatccgcaaaccgctggagcacatgcaccagcagaccgcgaacgcc

SEQ ID NO: 311626 - DNA, 75 bp, synthetic construct
  source 1..75: mol_type = other DNA
acaccgatatatcaggctaatgcgctgattcaagttgagcagaaacaagctaatgcaattttaagtaatttgagt

SEQ ID NO: 311627 - DNA, 75 bp, synthetic construct
  source 1..75: mol_type = other DNA
tgattgtttcattgtcattagtgttttcacgaatatttctacgtagaggtattgaaagcccagaacagcttgaag

SEQ ID NO: 311628 - DNA, 75 bp, synthetic construct
  source 1..75: mol_type = other DNA
agagcttaatatagcaaaatcaagcgctatcgggaatgtaagaataatcgataatgcagtatcgcagcccaaacc

SEQ ID NO: 311629 - DNA, 75 bp, synthetic construct
  source 1..75: mol_type = other DNA
ctgtatatctacaattattgaatcgacagcaagaattgaatattgcaaaatccagcgctattggaaatgtaagaa

SEQ ID NO: 311630 - DNA, 75 bp, synthetic construct
  source 1..75: mol_type = other DNA
aaaactatgatattgtgatcttagatacacctcccattttagctgttacagatgcagcaataataggtaattatg

SEQ ID NO: 311631 - DNA, 75 bp, synthetic construct
  source 1..75: mol_type = other DNA
tcttttagagaaaagaaaaactttacaagatgaacggagtaagttaaataaaagagtttcagcaatgccagagac

SEQ ID NO: 311632 - DNA, 75 bp, synthetic construct
  source 1..75: mol_type = other DNA
ctcacaaagttccactgagcaaagaagctttgcgagttttggatttaatgaaagtcatcagcgggcatagagagt

SEQ ID NO: 311633 - DNA, 75 bp, synthetic construct
  source 1..75: mol_type = other DNA
aaagaaaaattggtatttcagatatgcagtgcctgtgaccaaaaagcgaactaaggtgagcttaggaacctatcc

SEQ ID NO: 311634 - DNA, 75 bp, synthetic construct
  source 1..75: mol_type = other DNA
ctgatactgaaatcaaaaataccaaacccggcgataaggaaatcaacctctttgatggagatggattactgctac

SEQ ID NO: 311635 - DNA, 75 bp, synthetic construct
  source 1..75: mol_type = other DNA
atcaaatcgttaatgtcgataatcaattaaatgaactaacattcagagaatcagaaatatcacaattatatacaa

SEQ ID NO: 311636 - DNA, 75 bp, synthetic construct
  source 1..75: mol_type = other DNA
ggcgtgatggatatgcccgccttcccacgcgagactctcgttgccatgacccaaaagtacctgcgccgtccactg

SEQ ID NO: 311637 - DNA, 75 bp, synthetic construct
  source 1..75: mol_type = other DNA
catcagtccgtatggagacacgattgctgattgaatggcaattgctaacttgggttcgtcctggtgaggctgttc

SEQ ID NO: 311638 - DNA, 75 bp, synthetic construct
  source 1..75: mol_type = other DNA
cttacgaaaagaaaattatcttagggcacattctaagtatccaagagagtatgtttgataattttctaagaaaaa

SEQ ID NO: 311639 - DNA, 75 bp, synthetic construct
  source 1..75: mol_type = other DNA
cctcgacggcatgtccgtacgcgttgcggatgaagttttcattctgccgctgaatgctgtcatggaatcactgca

SEQ ID NO: 311640 - DNA, 75 bp, synthetic construct
  source 1..75: mol_type = other DNA
ttgatggcgctttacccgatgtcgaccgcacatcggtactgatggcactgcgtgagcatgtccctggacttgaga

SEQ ID NO: 311641 - DNA, 75 bp, synthetic construct
  source 1..75: mol_type = other DNA
cggttccggtgggacagccgtgaccagctgaccgggtattgcagcgcacagggtgagcagtgggaataccgccac

SEQ ID NO: 311642 - DNA, 75 bp, synthetic construct
  source 1..75: mol_type = other DNA
tatgcgggtaagcctacaatagttagtaagcttgccatgaagaaacagatcagcggaaattttgatttaacagaa

SEQ ID NO: 311643 - DNA, 75 bp, synthetic construct
  source 1..75: mol_type = other DNA
aaccccgcaggtcattttcaaatgagtttaaacttcaaatggttaaactggctttacaaccaaggggttctgttg

SEQ ID NO: 311644 - DNA, 75 bp, synthetic construct
  source 1..75: mol_type = other DNA
ttttttacgcttactacattgtttgcgtaggactttttgcatttttctggtttatctacagcccgcaccgttggc

SEQ ID NO: 311645 - DNA, 75 bp, synthetic construct
  source 1..75: mol_type = other DNA
gggtggcgcgtatcaccggcgcttccgggcagatcccgattagcgccgcgcgtttctggtcgttggatttcctga

SEQ ID NO: 311646 - DNA, 75 bp, synthetic construct
  source 1..75: mol_type = other DNA
gcggcgaccagcctttgcagcgggcgctgaccgtgctgcgtgacagcacacagccaggcgtcttttctgaaaaac

SEQ ID NO: 311647 - DNA, 75 bp, synthetic construct
  source 1..75: mol_type = other DNA
gtttcggtaaaaataataaacacaccagaattatcaaaggggcgttcaggtattgtcaatgtaaaggttattgtt

SEQ ID NO: 311648 - DNA, 75 bp, synthetic construct
  source 1..75: mol_type = other DNA
gctgaattattgcattacagtagcagtcagaatttttcccgggcttatcatcgttttacaggtaagacgccttca

SEQ ID NO: 311649 - DNA, 75 bp, synthetic construct
  source 1..75: mol_type = other DNA
actgatcatcttcgtcacctggttttggtggaagtcggggtcgccgtcaacgcctggtatgcaccgttctatgat

SEQ ID NO: 311650 - DNA, 75 bp, synthetic construct
  source 1..75: mol_type = other DNA
ccagcggcagacgaacagagaaacgctgcgaccggaagaaaatccgcttcacgtatctgtgggacggcgacagta

SEQ ID NO: 311651 - DNA, 75 bp, synthetic construct
  source 1..75: mol_type = other DNA
cgtggttcgaagatgcggactccacatcttgtacccttatctcgacaagctctcaccattctggaaaaaaatcaa

SEQ ID NO: 311652 - DNA, 75 bp, synthetic construct
  source 1..75: mol_type = other DNA
atggataggatattatattcacatgtctgtgataaaagtggtagtgaatactggaaaacagaactgttagcgatt

SEQ ID NO: 311653 - DNA, 75 bp, synthetic construct
  source 1..75: mol_type = other DNA
atctcgaagagagaaaactcatgttacaatggtgggctgactaccttaatgccaacagaaaagaacacattacac

SEQ ID NO: 311654 - DNA, 75 bp, synthetic construct
  source 1..75: mol_type = other DNA
ctggcgcttgggaaataccctgaagtgtcgctggcggatgcccgggcacgccgggatgaagctcgtaagctgtta

SEQ ID NO: 311655 - DNA, 75 bp, synthetic construct
  source 1..75: mol_type = other DNA
gatgagtcatcaggaacgtagctcagtacgggcggcttatatccataaggcggaacatcttggggagcgaatgtt

SEQ ID NO: 311656 - DNA, 75 bp, synthetic construct
  source 1..75: mol_type = other DNA
tcttcgttggtgatcacgatccgcgtaagccaatgagtgagaatacgcttaacaaggccttgcgagtgatgggct

SEQ ID NO: 311657 - DNA, 75 bp, synthetic construct
  source 1..75: mol_type = other DNA
atcagcaaatcaacgcctttctgagattccatctacaacacttttatatcttctagatatagtcgttaaagaaat

SEQ ID NO: 311658 - DNA, 75 bp, synthetic construct
  source 1..75: mol_type = other DNA
gaaatatggctggtaaagttaataaagtagagcataaagaaccggcaaggctgcaaccacctgcgtttcctttag

SEQ ID NO: 311659 - DNA, 75 bp, synthetic construct
  source 1..75: mol_type = other DNA
gctgaaaataatgttgaagataaatttgatctgccatactccataggtggaacccttattcaatggaatgtaagt

SEQ ID NO: 311660 - DNA, 75 bp, synthetic construct
  source 1..75: mol_type = other DNA
tacgcgatatcaccaccctcagaactcccgatttacttgttcccgtaaaggctgccgaagccaaagagatatatg

SEQ ID NO: 311661 - DNA, 75 bp, synthetic construct
  source 1..75: mol_type = other DNA
atgtcccttaccgacgcgaaaatccgcactctcaagccttctgataaaccctttaaagtctccgattcccacggt

SEQ ID NO: 311662 - DNA, 75 bp, synthetic construct
  source 1..75: mol_type = other DNA
ggggccaaaatgcgaatgccgcatatcgtacccctctcagaacagtccatcgcaattctgaaacagattaaggat

SEQ ID NO: 311663 - DNA, 75 bp, synthetic construct
  source 1..75: mol_type = other DNA
aggatatgctacctttagcaatatccatggtcatattagctttatttataattcctcgaatcaacggctctggtg

SEQ ID NO: 311664 - DNA, 75 bp, synthetic construct
  source 1..75: mol_type = other DNA
aagcttttcatatgtcttttgatgaagtcactttcaacgctgacagaattcgctcaaaactggaactattatccg

SEQ ID NO: 311665 - DNA, 75 bp, synthetic construct
  source 1..75: mol_type = other DNA
atcagaattgtggtgtttggtattgtgcgccatcggttgtctctgctggcgcagcaggtgccagttgttcaggct

SEQ ID NO: 311666 - DNA, 75 bp, synthetic construct
  source 1..75: mol_type = other DNA
tctgctggcgcagcaggtgtcaggtgttcaggctgacgtgcgaattgtaaaccaggatgctcagaaaaaacaaaa

SEQ ID NO: 311667 - DNA, 75 bp, synthetic construct
  source 1..75: mol_type = other DNA
tgggtaatacgtactataccgacatggtgacgggtgagcagaaacaaaccactatgtggatgcgccatgaaggtg

SEQ ID NO: 311668 - DNA, 75 bp, synthetic construct
  source 1..75: mol_type = other DNA
cagaaagtgtatgacgcggtggtgtcatttgccttcaacgtggggacaggcaatgcctgcagctccacgctggtg

SEQ ID NO: 311669 - DNA, 75 bp, synthetic construct
  source 1..75: mol_type = other DNA
ctcatagacgacgagcagtttgatgaaatcaatattgtgcgcggccagctcgtttctggtgggcggctgggcgtg

SEQ ID NO: 311670 - DNA, 75 bp, synthetic construct
  source 1..75: mol_type = other DNA
cggtgaatgggaaagctggtacatgtggcgacgtattcataaccgtaacggggaacggtctgataatgacccggc

SEQ ID NO: 311671 - DNA, 75 bp, synthetic construct
  source 1..75: mol_type = other DNA
aataaagaagtattggaagaaaaagatagattactcagccgttatgacacaatcaaaaacagatataaagatctt

SEQ ID NO: 311672 - DNA, 75 bp, synthetic construct
  source 1..75: mol_type = other DNA
gaagtcatagctaacaatctagatattgaaattgactttaagtttgagacttgtgattcattcacccttcttatt

SEQ ID NO: 311673 - DNA, 75 bp, synthetic construct
  source 1..75: mol_type = other DNA
cgaagataaagttgaaaaaaggcttcaaaatcgccagacggaatatcaaaatgaaattaatcaactatctgcgcc

SEQ ID NO: 311674 - DNA, 75 bp, synthetic construct
  source 1..75: mol_type = other DNA
aaaaaagacttcaaaatcgccaggcgaaatatcaaaatgaaattaatcaactatctgcgccaggtgttaattttg

SEQ ID NO: 311675 - DNA, 75 bp, synthetic construct
  source 1..75: mol_type = other DNA
cggtcagtcttgatggttatatcgcccgacaggatggcgatatcgactggctgttaaagcgcgatgacccgacag

SEQ ID NO: 311676 - DNA, 75 bp, synthetic construct
  source 1..75: mol_type = other DNA
cagtgaaaggggatgacttacaaagtgaatcctataaatcaaaaggatttaccgcttcactggaagctggataca

SEQ ID NO: 311677 - DNA, 75 bp, synthetic construct
  source 1..75: mol_type = other DNA
tccggttatcctgatctccggtgctccgaacaacaatgatcacgctgctggtcacgtgttgcatcacgctcttgg

SEQ ID NO: 311678 - DNA, 75 bp, synthetic construct
  source 1..75: mol_type = other DNA
cctaagaaactggttctcgctgaaccgcgttctgtcgtcgttaacggcgttcgcttccccagcgttcatctgaaa

SEQ ID NO: 311679 - DNA, 75 bp, synthetic construct
  source 1..75: mol_type = other DNA
acgagcgagtttgttgcctggctgaaagaaaaaggggcatttgaccagccttactggatgatgaaggcatcactg

SEQ ID NO: 311680 - DNA, 75 bp, synthetic construct
  source 1..75: mol_type = other DNA
ttagcgatcgcactctttatctgtcttgttacgactgtttttggtagaatcggcctcagcgatctcctgaataac

SEQ ID NO: 311681 - DNA, 75 bp, synthetic construct
  source 1..75: mol_type = other DNA
aatatgacggttgcctgtatcaggaagacgtagttgattatttagtcaaactcgataatgagcagtttctgaaag

SEQ ID NO: 311682 - DNA, 75 bp, synthetic construct
  source 1..75: mol_type = other DNA
ggaggaacgcgagttaatcctcatgattgaagagcagagagaacgccagcgcaaacaggaggccacgcagccgga

SEQ ID NO: 311683 - DNA, 75 bp, synthetic construct
  source 1..75: mol_type = other DNA
gattaactggaactgtggtgccacacaacctgtaccggatgcgcctgtgccgaaagatttaccccccggaatgcc

SEQ ID NO: 311684 - DNA, 75 bp, synthetic construct
  source 1..75: mol_type = other DNA
agcagatatcactaaccgcgggaaattacatctgaaggctgatggtaacatgacctttgccaataaaatttctgg

SEQ ID NO: 311685 - DNA, 75 bp, synthetic construct
  source 1..75: mol_type = other DNA
gtcattgtgaaccaggataagactgttgattttggcaaagccgatcagaacatcgattaccgtattacagttacc

SEQ ID NO: 311686 - DNA, 75 bp, synthetic construct
  source 1..75: mol_type = other DNA
caatcagttggaaaaaataaaccttcatttcctgacttatctttcatctatcaaaagcttaaggctggacaataa

SEQ ID NO: 311687 - DNA, 75 bp, synthetic construct
  source 1..75: mol_type = other DNA
acaatacttactgtaataacgattattacaatgaggcgataagagaggaaccgatagactttctggacagatcgt

SEQ ID NO: 311688 - DNA, 75 bp, synthetic construct
  source 1..75: mol_type = other DNA
aaataaatccacaatccatacagcaacatccagaaaaaaatgaacttaactggatgctcgaattaaataaatgga

SEQ ID NO: 311689 - DNA, 75 bp, synthetic construct
  source 1..75: mol_type = other DNA
ctgcgccagtacgccggacaggttgccgactacgaacaggaaatcgaacggctgaaggcacagcttgataagctg

SEQ ID NO: 311690 - DNA, 75 bp, synthetic construct
  source 1..75: mol_type = other DNA
gacctgataaactccattaataaaagtgagttgaaccgccttgatggtggattccttgcttccaaacttataagt

SEQ ID NO: 311691 - DNA, 75 bp, synthetic construct
  source 1..75: mol_type = other DNA
caagtaatattgattatgacagatgtgctagtgcaactgataaactaattgggataacaaaagcattagaaagca

SEQ ID NO: 311692 - DNA, 75 bp, synthetic construct
  source 1..75: mol_type = other DNA
caaaaccaagtcggaacgatgtttaatactacagtcacaaatggagaaagttatcctgcacactgctattgtgat

SEQ ID NO: 311693 - DNA, 75 bp, synthetic construct
  source 1..75: mol_type = other DNA
ccagtaagcctgaattcccgggacgaaaatcttcacgaaaaccgctgccggcagaacttccccgggtgaaccgcc

SEQ ID NO: 311694 - DNA, 75 bp, synthetic construct
  source 1..75: mol_type = other DNA
atccgcagctcctttaaggtcatcgaaacggtgcgcccgaagctggcctgcagccgctgcgatgtgatagtccag

SEQ ID NO: 311695 - DNA, 75 bp, synthetic construct
  source 1..75: mol_type = other DNA
agatttttcatctgttgtcgggagtgctgtgtcagcgcataaaatcaccaaaactgtcaccattaagtgtgagta

SEQ ID NO: 311696 - DNA, 75 bp, synthetic construct
  source 1..75: mol_type = other DNA
aacgcataaaatcactaaaaccgtcactattgagtgtgaaaacttaggattactgaatacagacgatatcaccac

SEQ ID NO: 311697 - DNA, 75 bp, synthetic construct
  source 1..75: mol_type = other DNA
ctttgtgggaaagttaattattcctgaaacaaagatatctacgttgtatggaaccataagtcgtgatacgccggt

SEQ ID NO: 311698 - DNA, 75 bp, synthetic construct
  source 1..75: mol_type = other DNA
taaaaacattagatcgttttcaaaatcagatataattaaaattcaaaaagatgttattactgaagtttgggatga

SEQ ID NO: 311699 - DNA, 75 bp, synthetic construct
  source 1..75: mol_type = other DNA
cttacagctgctctcaatgaattggctaaagaactgcgttcaagccgcgctgaacttgctcattatgctgacact

SEQ ID NO: 311700 - DNA, 75 bp, synthetic construct
  source 1..75: mol_type = other DNA
gtttttctattgttgccattttttacacgagtacgacgcttgcggctcctaaaggtatctgtactcctgataatg

SEQ ID NO: 311701 - DNA, 75 bp, synthetic construct
  source 1..75: mol_type = other DNA
gatggtacgaatgaaatccagtatggtaaaagcaattactactcttttcagcatccccatgaaggaagtaatcag

SEQ ID NO: 311702 - DNA, 75 bp, synthetic construct
  source 1..75: mol_type = other DNA
atcaactgtacggaaaatcctgaccagaatggtttctaccagcattcagtttttctgacccagacggataacaga

SEQ ID NO: 311703 - DNA, 75 bp, synthetic construct
  source 1..75: mol_type = other DNA
tgggcaaacagtcaaatttggggccaattgatccgcagcttggtggtttatcatctcatgcgatcatagaagagt

SEQ ID NO: 311704 - DNA, 75 bp, synthetic construct
  source 1..75: mol_type = other DNA
agaatcaaaagcaacacatgtttgttcagagttaaacaaccatcacacaacctatacccactcgcgtcatattca

SEQ ID NO: 311705 - DNA, 75 bp, synthetic construct
  source 1..75: mol_type = other DNA
ttagccgcatgtattcaccacttaatactatcgaagaaatggtagaaaagtacgccgacgcaatgtataacttcc

SEQ ID NO: 311706 - DNA, 75 bp, synthetic construct
  source 1..75: mol_type = other DNA
ccggcctgcaccgacgccagtgattgtccccaacgcctgccccaaagtgagcctttgcccgatgccgggcagcga

SEQ ID NO: 311707 - DNA, 75 bp, synthetic construct
  source 1..75: mol_type = other DNA
cagggcgagcaacgtcgccagcgggcagcagacgaccatcaccatgctgaaaaatcagcttcatgttgcgctcac

SEQ ID NO: 311708 - DNA, 75 bp, synthetic construct
  source 1..75: mol_type = other DNA
tttcactaatgaaaatatattctcggtaacccctgagtttctgttgtttaagagccagaagagtcaagataacaa

SEQ ID NO: 311709 - DNA, 75 bp, synthetic construct
  source 1..75: mol_type = other DNA
gctgattatttttggcagtgagcgcgcatttggtgagtgggaaggaggagaacctgataaccgttatgcaggaaa

SEQ ID NO: 311710 - DNA, 75 bp, synthetic construct
  source 1..75: mol_type = other DNA
gtgggacagccgtgaccagctgaccgggtattgcagcgcacagggtgaacagtgggaataccgccacgacgccag

SEQ ID NO: 311711 - DNA, 75 bp, synthetic construct
  source 1..75: mol_type = other DNA
tggcagttcattcttcaaaagctaaacccgacgatcatcggcgagtgtgagaaagcaatcaaatgggcaaatgag

SEQ ID NO: 311712 - DNA, 75 bp, synthetic construct
  source 1..75: mol_type = other DNA
tgccgctttggaatcaatcgggcattacttaaggtcgaagtttggaactaacatcagagcaattgttcctatgat

SEQ ID NO: 311713 - DNA, 75 bp, synthetic construct
  source 1..75: mol_type = other DNA
aagaatatgggaatgtatttaataaaatattctctccatatgtaatctatgctaccgatacggtcagaactattc

SEQ ID NO: 311714 - DNA, 75 bp, synthetic construct
  source 1..75: mol_type = other DNA
cagaacagagtaggtacgatatttaacaccacggtgagtaatggtggctcttatccaggtcgctgtcattgtgat

SEQ ID NO: 311715 - DNA, 75 bp, synthetic construct
  source 1..75: mol_type = other DNA
gacgcgcgagcgctgaagatatattcatcgaccaaacaatctccagagatggcggaaccaaaagccggggtaatc

SEQ ID NO: 311716 - DNA, 75 bp, synthetic construct
  source 1..75: mol_type = other DNA
ttgctcaaggaattggatgatactaccgcaaaaagtctgctcatccagcaacgagactcagaggaatcgtttgac

SEQ ID NO: 311717 - DNA, 75 bp, synthetic construct
  source 1..75: mol_type = other DNA
actgccagcgcctacaggtatgcgcatgggtggtaagcctgcaacaacaaatgaggagcgcccacgagaatacct

SEQ ID NO: 311718 - DNA, 75 bp, synthetic construct
  source 1..75: mol_type = other DNA
ttctacggtactagtttgcatggaattattacagcaatgtcgtttggtgtaccacatttttgtattgataaacga

SEQ ID NO: 311719 - DNA, 75 bp, synthetic construct
  source 1..75: mol_type = other DNA
aaagatacgacgggaatcaagcttacggcgcaatccaggaaaaagcttatggctatacagcagttatcaggcgtt

SEQ ID NO: 311720 - DNA, 75 bp, synthetic construct
  source 1..75: mol_type = other DNA
agattgctatcaggggaagacggctcaaaggctacaaccttacacgcgctgcgcgactcaatggctctagaaaca

SEQ ID NO: 311721 - DNA, 75 bp, synthetic construct
  source 1..75: mol_type = other DNA
ttgctgccggtggagttgttggacgccaagcaagagggtgcggatcggacccgaggcaagggccatgccgcagcc

SEQ ID NO: 311722 - DNA, 75 bp, synthetic construct
  source 1..75: mol_type = other DNA
gctaatttatctgtttgcttacggttatcttggtgccgctgcagcaattggtggaatgctgcaagcttaccgtat

SEQ ID NO: 311723 - DNA, 75 bp, synthetic construct
  source 1..75: mol_type = other DNA
ccttgccctaatggtactgagaaagtatcagcttatcatactcatggtgcagatagtcatggagaatattgggac

SEQ ID NO: 311724 - DNA, 75 bp, synthetic construct
  source 1..75: mol_type = other DNA
cgattgtgcgaatttaaaagccattaccggcggtgactccattttcatcaatcccaagtacaagaaggggttcga

SEQ ID NO: 311725 - DNA, 75 bp, synthetic construct
  source 1..75: mol_type = other DNA
agcatcgatccgctgaccgctgataacatcatcaacgccgccgaaagtggtcaggatctgcaaatcactggcacc

SEQ ID NO: 311726 - DNA, 75 bp, synthetic construct
  source 1..75: mol_type = other DNA
cggtttcgtcgccaagatgactgaaaaagaagcgctgaaccatactgaccgcgtctacgaccgacagcctatcgg

SEQ ID NO: 311727 - DNA, 75 bp, synthetic construct
  source 1..75: mol_type = other DNA
cgccatgtatggacaggacaccaccgccggaggcaatctgaagaaagatagcccgctgggtaaactgtgggattt

SEQ ID NO: 311728 - DNA, 75 bp, synthetic construct
  source 1..75: mol_type = other DNA
attcaagtctggttggagtatctgcaggtacttatggtggcgaatcggcaattgctgtaggtgtttctcatatat

SEQ ID NO: 311729 - DNA, 75 bp, synthetic construct
  source 1..75: mol_type = other DNA
aaaaaggagatctttatcatggatgaaagagcctgtttgccctgcctgtaagactcccttacagctcatctatcg

SEQ ID NO: 311730 - DNA, 75 bp, synthetic construct
  source 1..75: mol_type = other DNA
atccctgagaccgaatgcccttacagaccgtataccatcgcctggcgtatatggtttcggaggggcaccagaggc

SEQ ID NO: 311731 - DNA, 75 bp, synthetic construct
  source 1..75: mol_type = other DNA
atctgaccggtattttcatgacctggcgtagagcgcgtggttttattaaacaagagaaagccgttctcgcagaat

SEQ ID NO: 311732 - DNA, 75 bp, synthetic construct
  source 1..75: mol_type = other DNA
tggataaagcgacggctgaaagctacgtcgaaacctatgacgggatgaagactcttgcggcgtcgatgacgccag

SEQ ID NO: 311733 - DNA, 75 bp, synthetic construct
  source 1..75: mol_type = other DNA
cagcggtactgatggtaatcggcaaataacaggagtgaaagaaggggtcaatgataatgatgcagtaactgtcag

SEQ ID NO: 311734 - DNA, 75 bp, synthetic construct
  source 1..75: mol_type = other DNA
taccatagagcgcctgccggtgctggataatccggtcaaaacgtcaatttcctgcttcagctggacagatgctat

SEQ ID NO: 311735 - DNA, 75 bp, synthetic construct
  source 1..75: mol_type = other DNA
aagaacgcatcccggcagacttatatattgtttatgaaacgcagcaggtgacgcccgcgctggttaaactgctgg

SEQ ID NO: 311736 - DNA, 75 bp, synthetic construct
  source 1..75: mol_type = other DNA
aagagaaacgcgtcaagatcaagcacaagctgaaatacagcaccccaacaccgcgcggcaaagtctctgaagaag

SEQ ID NO: 311737 - DNA, 75 bp, synthetic construct
  source 1..75: mol_type = other DNA
gcgtcggctatgacgaaaaaaccttacccgcagatgcacccaaaaatggtcactataaagcctatattcttggtg

SEQ ID NO: 311738 - DNA, 75 bp, synthetic construct
  source 1..75: mol_type = other DNA
catctggaactacaaggacttgaagcggttactcgttagagtcacgagagacattagtaggcctgaggtcctgca

SEQ ID NO: 311739 - DNA, 75 bp, synthetic construct
  source 1..75: mol_type = other DNA
gaagatattattcctaacgactacgccggtaacatgggcaaaatatgccgacattctgctgccagacctgatgac

SEQ ID NO: 311740 - DNA, 75 bp, synthetic construct
  source 1..75: mol_type = other DNA
acaaccggagtagaatggtcgattcaataattggttggattcagggcttttttgaaaacgatcaaaatccagatc

SEQ ID NO: 311741 - DNA, 75 bp, synthetic construct
  source 1..75: mol_type = other DNA
ggtccatttatggatttaatcaatgaattggctgctaatcaactgtttattaaactagcgcctgtttctgcaaag

SEQ ID NO: 311742 - DNA, 75 bp, synthetic construct
  source 1..75: mol_type = other DNA
cgtggtgcacttcgcggtgaatttatgaatatggtaattgaattagcaaactctgaactttttagaaaaatagct

SEQ ID NO: 311743 - DNA, 75 bp, synthetic construct
  source 1..75: mol_type = other DNA
acaggacggtgctcttatcttccagggacacccggttattcatgcagggcaaactgtttctgcatcgcagagtga

SEQ ID NO: 311744 - DNA, 75 bp, synthetic construct
  source 1..75: mol_type = other DNA
tcatcagtactgaaagccagagaccaggcatctgttgttggtgatattatgtctgataaacaggccacaatcagc

SEQ ID NO: 311745 - DNA, 75 bp, synthetic construct
  source 1..75: mol_type = other DNA
caagtggaagcattgatattggtgacgcttcccttctgcttaccggtacaccagtgaattcagatgatgctgctt

SEQ ID NO: 311746 - DNA, 75 bp, synthetic construct
  source 1..75: mol_type = other DNA
cttaccgcctgctgagttacctgatcagtgcgattatcgccgggcagccgttgttaccggctgtgggggccgtca

SEQ ID NO: 311747 - DNA, 75 bp, synthetic construct
  source 1..75: mol_type = other DNA
cttatcgagtcggaaacggcgttgtacaacactcgccgcgacgggttgaacaaagccaccaccgggctgacgcag

SEQ ID NO: 311748 - DNA, 75 bp, synthetic construct
  source 1..75: mol_type = other DNA
ccccgcgcgatgtggcgtttatccatccggggcaaaaatcgctggtgaaaataaccgcttacgattactccattt

SEQ ID NO: 311749 - DNA, 75 bp, synthetic construct
  source 1..75: mol_type = other DNA
atggcgcggggaaatccacattattgcaattattatcaggcatgcaaatgccgcagcaaggtaatatttatcttg

SEQ ID NO: 311750 - DNA, 75 bp, synthetic construct
  source 1..75: mol_type = other DNA
ggaaaattgtgatggatggtccacgcgatcagattttgagtcaatcaaataatcaaactcatccatccagtgggg

SEQ ID NO: 311751 - DNA, 75 bp, synthetic construct
  source 1..75: mol_type = other DNA
gtgactgcggcggtattatcaaaaagtacgaagagttgagtacggcacagcagaagcaactgatccgtgactgtg

SEQ ID NO: 311752 - DNA, 75 bp, synthetic construct
  source 1..75: mol_type = other DNA
ggatgtgggtaaatccttctctggtaaggattggaaagtgacagcccgtgccggtctgggctaccagttcgacct

SEQ ID NO: 311753 - DNA, 75 bp, synthetic construct
  source 1..75: mol_type = other DNA
taaactacgtgagtttcaaaaaagccataacgctcattcagagcaaatggaaaagttgaaaatggaattatcaaa

SEQ ID NO: 311754 - DNA, 75 bp, synthetic construct
  source 1..75: mol_type = other DNA
caggtcagacagagcaaccaccgagttttgcgtcatttttgaatacaatcaaagacaaagttaaagtaactggaa

SEQ ID NO: 311755 - DNA, 75 bp, synthetic construct
  source 1..75: mol_type = other DNA
gcgaaataaaaaaacacctattagaatttcttgattcacagtctgaaaatatagcaaaacacttctactctcata

SEQ ID NO: 311756 - DNA, 75 bp, synthetic construct
  source 1..75: mol_type = other DNA
tttaatgaaacccctgttgaccgtaagcaagtttttaaaactttcaaatgtaaactaactgatcaacaaaaagac

SEQ ID NO: 311757 - DNA, 75 bp, synthetic construct
  source 1..75: mol_type = other DNA
aatttcaatcaaatgtaaaagagtttattttagataagaatcagaatatttttgatataataaaccctcatctca

SEQ ID NO: 311758 - DNA, 75 bp, synthetic construct
  source 1..75: mol_type = other DNA
aattatcgtaaaaagaaaaaatagaaaagagaatgtgaaagattatatacaaccattactctcaagtttatcttc

SEQ ID NO: 311759 - DNA, 75 bp, synthetic construct
  source 1..75: mol_type = other DNA
gttctggcatcattgttaatgatggaagtgaagtatattggggaattaatggtgtaaaagatgataatcttcaca

SEQ ID NO: 311760 - DNA, 75 bp, synthetic construct
  source 1..75: mol_type = other DNA
ctctgaacgaaagtacttggattgaacctcaggctgaactggtatacggtgcaatgtccggtaaacagttcagct

SEQ ID NO: 311761 - DNA, 75 bp, synthetic construct
  source 1..75: mol_type = other DNA
gggaaaaatgaagggggactgaagattggggctggtactgtaatccttgaacaaaaagcgaaaaacaacgattca

SEQ ID NO: 311762 - DNA, 75 bp, synthetic construct
  source 1..75: mol_type = other DNA
tataaaaattttcttgctgaagtcaacaacctgaacaaacgtatgggtgacctgcgtgacatcaacggcgaagcc

SEQ ID NO: 311763 - DNA, 75 bp, synthetic construct
  source 1..75: mol_type = other DNA
tcactgccgatgacgccactgctgtcagagttaacctgggctcagagacatcaacactctctgaatttaatccta

SEQ ID NO: 311764 - DNA, 75 bp, synthetic construct
  source 1..75: mol_type = other DNA
tccttggggacgggggatataacaacagtaaaaaatatactacattttatagagcaggtgttggcgagcaatata

SEQ ID NO: 311765 - DNA, 75 bp, synthetic construct
  source 1..75: mol_type = other DNA
cgattctgtgctcattatttatggttcccggttcagtgacgaattacgggagctgagttaccagccggacaggca

SEQ ID NO: 311766 - DNA, 75 bp, synthetic construct
  source 1..75: mol_type = other DNA
ataactaggttatatccggaatctcgtggaaaaatattattatatgggcattggataaatcaaaaagaaatacca

SEQ ID NO: 311767 - DNA, 75 bp, synthetic construct
  source 1..75: mol_type = other DNA
ataagagaaataataagggataaatatttacgtgatacatccgttcttattttacttgttggaactgagactaaa

SEQ ID NO: 311768 - DNA, 75 bp, synthetic construct
  source 1..75: mol_type = other DNA
gttaccaccatgctaatgaccaatggtataaaaacgaacttgaaaaaatgaatgatatttttgatatttttgtga

SEQ ID NO: 311769 - DNA, 75 bp, synthetic construct
  source 1..75: mol_type = other DNA
tgataatatgcaggatggtgtccggattgcccgtgataatcccgacagcggtgtggtggtgagaattgccggtga

SEQ ID NO: 311770 - DNA, 75 bp, synthetic construct
  source 1..75: mol_type = other DNA
cggagacgggcagcttaaggggctcgctggtgaaggccgggtgatgggctgcggggacgcggcgtttgcgggtct

SEQ ID NO: 311771 - DNA, 75 bp, synthetic construct
  source 1..75: mol_type = other DNA
tagcgtgcagcgggaccgcctgcagcagatggagcgcgagacggtgcgcgaccttgagcgtgaaaagaccctggg

SEQ ID NO: 311772 - DNA, 75 bp, synthetic construct
  source 1..75: mol_type = other DNA
ttgagaatgagaatcgatcaaatagaaaatataaaactctcaggggactggaaaaagaactgaggtggttaaaaa

SEQ ID NO: 311773 - DNA, 75 bp, synthetic construct
  source 1..75: mol_type = other DNA
aggctggtgctacagagctggtggtgcatgggcggacgaaagagcagggttaccgcgcggagcatattgactggc

SEQ ID NO: 311774 - DNA, 75 bp, synthetic construct
  source 1..75: mol_type = other DNA
aagagttattcatatttttgaagaagatggagaaatagttcaatacttaccacctaattatataatctcatcaac

SEQ ID NO: 311775 - DNA, 75 bp, synthetic construct
  source 1..75: mol_type = other DNA
tggatagaccggatttcgccggatgatggcggaagctgtcatctctggcttgggcgtggcgtgccgcctgccgtt

SEQ ID NO: 311776 - DNA, 75 bp, synthetic construct
  source 1..75: mol_type = other DNA
gacggtcctggtacatataaggctggttatacaatttgccgttctgtggatttaaaatcatgggaatatgtgtca

SEQ ID NO: 311777 - DNA, 75 bp, synthetic construct
  source 1..75: mol_type = other DNA
ctgcttgatgagcttaaaagtgcatgggagcaaaaggaaagaagagtcagaagagcgaaggaaccagccgctgtg

SEQ ID NO: 311778 - DNA, 75 bp, synthetic construct
  source 1..75: mol_type = other DNA
tcacaggtaacagtttgaccaacggcggcaccttccaggccgcacagctgaacgtcaacatgcagaccatcacca

SEQ ID NO: 311779 - DNA, 75 bp, synthetic construct
  source 1..75: mol_type = other DNA
ccagtcgcagcgcggcgtgacctgcaagaacggtgatacctggtatctgataccgcaactggaacaggcatctgc

SEQ ID NO: 311780 - DNA, 75 bp, synthetic construct
  source 1..75: mol_type = other DNA
cgtttatatttgtctgtgtttgtggtttttttgtggctttggctggtggcgttgaatggggaacggagagctgcg

SEQ ID NO: 311781 - DNA, 75 bp, synthetic construct
  source 1..75: mol_type = other DNA
aacaaacctctcatcgcagccgtcaacggttacgcgcttggtgcgggttgcgaactggcattgttgtgcgatgtg

SEQ ID NO: 311782 - DNA, 75 bp, synthetic construct
  source 1..75: mol_type = other DNA
tgccatgccggttaaacaggcgtttgcgccagtgctgaaactgcgcaaatggctgaatccggtgtcgctggtgcc

SEQ ID NO: 311783 - DNA, 75 bp, synthetic construct
  source 1..75: mol_type = other DNA
gcgggcgcactggcgatcctacaattgcccgtcgctcagtatccaaccattgcaccgcctgcggtttctgtttag

SEQ ID NO: 311784 - DNA, 75 bp, synthetic construct
  source 1..75: mol_type = other DNA
gacaggcggtaaaagacgatcctgactactccgtggcgctgggtgctgacggtattgcgcaaaagctgcagattg

SEQ ID NO: 311785 - DNA, 75 bp, synthetic construct
  source 1..75: mol_type = other DNA
gctgatgtgtatattcgtggcgatattacagcgccgcaaagttgtgaaattaataatttacagccagtttatttt

SEQ ID NO: 311786 - DNA, 75 bp, synthetic construct
  source 1..75: mol_type = other DNA
gtggttggattatctggacgcactggaactggtcgatacttccagtgctccagatattgaatggcctacgcctcc

SEQ ID NO: 311787 - DNA, 75 bp, synthetic construct
  source 1..75: mol_type = other DNA
acagcgtggcggcgggcggcagcttcaccttcggcagcatgacgggctccggctacatcgctgcctcccaggaca

SEQ ID NO: 311788 - DNA, 75 bp, synthetic construct
  source 1..75: mol_type = other DNA
cagttattcaccttgctggcggcaacagaagatcgtcatgaaggcatctccgctttcttacaaaaacgcacgccc

SEQ ID NO: 311789 - DNA, 75 bp, synthetic construct
  source 1..75: mol_type = other DNA
gttcactacatacattttgtcgaagaagtgaacggaatggcggcaggaggatcgcctgagatggaacatcagcac

SEQ ID NO: 311790 - DNA, 75 bp, synthetic construct
  source 1..75: mol_type = other DNA
gtcacgttttctgccgttcccgcaagccttactggcgctcgccccgctccaggatcatttactgcgactgcaacg

SEQ ID NO: 311791 - DNA, 75 bp, synthetic construct
  source 1..75: mol_type = other DNA
atgcttaatacagaatttccatttttgtatgtagatttaccatcaccacacacagatttgtctattatgtcgcgt

SEQ ID NO: 311792 - DNA, 75 bp, synthetic construct
  source 1..75: mol_type = other DNA
acggcagccacggagctttccgcgattcatggtcactcaacatcgcaatatcgccttggcgaattttatcttcat

SEQ ID NO: 311793 - DNA, 75 bp, synthetic construct
  source 1..75: mol_type = other DNA
tcgcaatatttatagttgcagcaattacctgtattagccaacccaagaaaacaacgttgcgtgataaagccatgg

SEQ ID NO: 311794 - DNA, 75 bp, synthetic construct
  source 1..75: mol_type = other DNA
atcgccaccagctcgcaaaaaattggagacattatgagcgttatcgacggaattgctttcaagaccaatattctg

SEQ ID NO: 311795 - DNA, 75 bp, synthetic construct
  source 1..75: mol_type = other DNA
gtgtggttgttctgctgccagggaagaggactgctgagcaggaagtcattctggagaaaagggggacgtcatgat

SEQ ID NO: 311796 - DNA, 75 bp, synthetic construct
  source 1..75: mol_type = other DNA
ttgatgccggagagagcggacgtccttccgtaccggttcacttatctgcactggctgtttatgaacgtggtacgc

SEQ ID NO: 311797 - DNA, 75 bp, synthetic construct
  source 1..75: mol_type = other DNA
ccaccattgcaaaaaccattgcagacctgtttccccgtgatcgccgcattatcaccattgaagatgtgcacgaga

SEQ ID NO: 311798 - DNA, 75 bp, synthetic construct
  source 1..75: mol_type = other DNA
aagtactgaatacagggcacgaaggcagcgtgacaaccattcacgccaacagtgccttagacgccatttcccgtc

SEQ ID NO: 311799 - DNA, 75 bp, synthetic construct
  source 1..75: mol_type = other DNA
aaaggagcacgagcctgagcgttatgcacagattggttgtgtgatgatgacgcacgactacctgcgctggtgttt

SEQ ID NO: 311800 - DNA, 75 bp, synthetic construct
  source 1..75: mol_type = other DNA
cagctcttccctgcgtggcaatactgctgctatcttggccaaagattctgttggtcagattaacatgattaattc

SEQ ID NO: 311801 - DNA, 75 bp, synthetic construct
  source 1..75: mol_type = other DNA
acaaatcttctgctggataacgggaacctggttatttccggacctgatgccaccaggaatgtgggtaatgtcgtt

SEQ ID NO: 311802 - DNA, 75 bp, synthetic construct
  source 1..75: mol_type = other DNA
gtgtttatgaaatccgcgcgtgaggtactttatgttcttccctcaagtggtgttaattctaatcaaatcaatttc

SEQ ID NO: 311803 - DNA, 75 bp, synthetic construct
  source 1..75: mol_type = other DNA
cggaagaacaacggcgggggattgagcaggttgcacaggctgtcagccagatggatcaggtgacacagcagaacg

SEQ ID NO: 311804 - DNA, 75 bp, synthetic construct
  source 1..75: mol_type = other DNA
tttcactgcttcacaaaagactatgcacaccagactgaggaagagaaactggcgttaatgtaccacgcccctaaa

SEQ ID NO: 311805 - DNA, 75 bp, synthetic construct
  source 1..75: mol_type = other DNA
gcaatagattttgtcaccaaaccgcaactgggtattcgcgaaggaatgctggcgtacagcgaaatgattgctgaa

SEQ ID NO: 311806 - DNA, 75 bp, synthetic construct
  source 1..75: mol_type = other DNA
cagtcgtctttgctgattttgaaaccgtgcaagggcaatcagccattatgaacatcacacgaagtgatggtaaaa

SEQ ID NO: 311807 - DNA, 75 bp, synthetic construct
  source 1..75: mol_type = other DNA
acatgttcgctggcgcgccgccggcaaaagacccgctcgctgagtcaatgtccaaagttcacgatctctttgtcg

SEQ ID NO: 311808 - DNA, 75 bp, synthetic construct
  source 1..75: mol_type = other DNA
caccacgacggggagcgtagcggaagagctggaagcaaggtatcagattatgcagacgttctttgaccgctacgg

SEQ ID NO: 311809 - DNA, 75 bp, synthetic construct
  source 1..75: mol_type = other DNA
cttcaggattatgatttatggattagaatgtcattggtatcaagaattatcaatgatcacaaatacggagtttat

SEQ ID NO: 311810 - DNA, 75 bp, synthetic construct
  source 1..75: mol_type = other DNA
cgctgccgaaccggagagcggagatctgaataaaagcgccgagcaggtgttggctgatgccatcgagggatatct

SEQ ID NO: 311811 - DNA, 75 bp, synthetic construct
  source 1..75: mol_type = other DNA
attcctttcgttaaatcactcgctactccgttgccgcaatttaataagtttgtttcaaacttgatcgcttcgtca

SEQ ID NO: 311812 - DNA, 75 bp, synthetic construct
  source 1..75: mol_type = other DNA
gcctgacattcgccctggaaaccatcagggagcagggctggtgctggcggatactgagcgaccggaaatgggagg

SEQ ID NO: 311813 - DNA, 75 bp, synthetic construct
  source 1..75: mol_type = other DNA
tctgaattatatgaagatagagatacacatgacacgctgacgcctgcattcagacgttctgtcgatatcattgac

SEQ ID NO: 311814 - DNA, 75 bp, synthetic construct
  source 1..75: mol_type = other DNA
tctttggtgaggcttacgatgcgcttaacgataaaaatattagcgtcttcagaacagggattgaacgattaacag

SEQ ID NO: 311815 - DNA, 75 bp, synthetic construct
  source 1..75: mol_type = other DNA
atattcaggcgtggctgcgttacccgggggttcatgtaggtcaaaattacctcggtaatattaaaatactgcctt

SEQ ID NO: 311816 - DNA, 75 bp, synthetic construct
  source 1..75: mol_type = other DNA
ctttgatcgagcgactttgcgcagagaatggtcaagaaacagatcatgaggatttcgattcatggtactgctatg

SEQ ID NO: 311817 - DNA, 75 bp, synthetic construct
  source 1..75: mol_type = other DNA
atgttatggaagattccggagcatgggaagaagatgcccgattaaacacatcttccgttgcactggtgacctctg

SEQ ID NO: 311818 - DNA, 75 bp, synthetic construct
  source 1..75: mol_type = other DNA
acaaaatgaaataaagagccactataccaaagacgaaattcaaggattgctaacattaacagaaaacacacgaaa

SEQ ID NO: 311819 - DNA, 75 bp, synthetic construct
  source 1..75: mol_type = other DNA
aggagttcttttccctttacgttctgagtctgtattacaacgaagattacattaagcaggcgagtaatttcgaca

SEQ ID NO: 311820 - DNA, 75 bp, synthetic construct
  source 1..75: mol_type = other DNA
gcttaatgcatccagcgataataattattatcgagtaaaagaggtttctaagttatttaaggttagtgatttcgc

SEQ ID NO: 311821 - DNA, 75 bp, synthetic construct
  source 1..75: mol_type = other DNA
ttcaatgactctcatgttgaaagagatgtccaaccttatcaatgaaatagttttcataatgagttacagcacaac

SEQ ID NO: 311822 - DNA, 75 bp, synthetic construct
  source 1..75: mol_type = other DNA
tgaacctctttcaacaacgaggttgaaccacctcatagataaaggttatgaaagaataacgttacagcttgattt

SEQ ID NO: 311823 - DNA, 75 bp, synthetic construct
  source 1..75: mol_type = other DNA
tatcactcccaagaggaataacaattcgtcaatacaagaattgctctacattagttgtaaccttcacatataaag

SEQ ID NO: 311824 - DNA, 75 bp, synthetic construct
  source 1..75: mol_type = other DNA
aaactatttcagaaattcaaatacaccagaagcatggaataacacgggtagtgtgtctgttgagtcgttcgacag

SEQ ID NO: 311825 - DNA, 75 bp, synthetic construct
  source 1..75: mol_type = other DNA
ttgggtcgtacaggacgtcatttatcattactgaaggggctcctggcactcgctccagcgacatggtgacaatac

SEQ ID NO: 311826 - DNA, 75 bp, synthetic construct
  source 1..75: mol_type = other DNA
caagtatcaggaatggcagaatctgttccgcttcgccttcaatacagggctacgcagctctgagctatgcgcatt

SEQ ID NO: 311827 - DNA, 75 bp, synthetic construct
  source 1..75: mol_type = other DNA
gcgcgagtcggtaccacgtgatcgacagcagcccgaatagtgacgattacgaagttgatccgttcacaccagcgg

SEQ ID NO: 311828 - DNA, 75 bp, synthetic construct
  source 1..75: mol_type = other DNA
gtcaaatgggacacaaaggaccagaaatgctgtttagacactatggttcatatttatcagaatatgatggcaaga

SEQ ID NO: 311829 - DNA, 75 bp, synthetic construct
  source 1..75: mol_type = other DNA
ataagccttttcactcggtcattaatggcgaaaactatcatgtgctgaaagcattgacctacacgcatagaggca

SEQ ID NO: 311830 - DNA, 75 bp, synthetic construct
  source 1..75: mol_type = other DNA
atggaatgacacaaagtatgtcgcgcaagggaaactgtctggataacgcagtgatggagaacttcttcggcgcac

SEQ ID NO: 311831 - DNA, 75 bp, synthetic construct
  source 1..75: mol_type = other DNA
tcaatagacaggaaactattgaggctgcgattgagagttgtttgactcaagatttttcagattatgaagttgtaa

SEQ ID NO: 311832 - DNA, 75 bp, synthetic construct
  source 1..75: mol_type = other DNA
ttatgtaataatgtgaagtacttttatcaggaaaaccaaggtgctgcagcagctaaaaatagaggtgttgctgag

SEQ ID NO: 311833 - DNA, 75 bp, synthetic construct
  source 1..75: mol_type = other DNA
tgctagctcgaacgttacaatctgcgctggaacaacgcgcgtctgatattcatatcgaaccagcggacaatgcct

SEQ ID NO: 311834 - DNA, 75 bp, synthetic construct
  source 1..75: mol_type = other DNA
gagaatattttactcagcctgcgtgaagccgagcgtcagggagaagtgccgcctattgctgatgaatggtggggg

SEQ ID NO: 311835 - DNA, 75 bp, synthetic construct
  source 1..75: mol_type = other DNA
tgcaaatattgcagactctggtattttaaactttgatgcttgttttcccgatagtgtagttggctttactccata

SEQ ID NO: 311836 - DNA, 75 bp, synthetic construct
  source 1..75: mol_type = other DNA
cggttcagggaatctgactgttatttacggccataacgggtccggtaaatccagctatacgcgtgtgctcaaacg

SEQ ID NO: 311837 - DNA, 75 bp, synthetic construct
  source 1..75: mol_type = other DNA
caaaaggtgttgagtcagtacgtttgtacgaatcatacctgactaatttcagcttcacctgtggggaattaactg

SEQ ID NO: 311838 - DNA, 75 bp, synthetic construct
  source 1..75: mol_type = other DNA
tgtgcctgttcctgaggggactgtagcaatttttcctatcgatggaaatggccaagaactgatgtggcgtttaag

SEQ ID NO: 311839 - DNA, 75 bp, synthetic construct
  source 1..75: mol_type = other DNA
gctaccctttgtgcaagcgctgcgattcaggaagaatggaataaatacctaacgggaatatggagttccgcatcc

SEQ ID NO: 311840 - DNA, 75 bp, synthetic construct
  source 1..75: mol_type = other DNA
tgtatggcgtgccatgtgggaagctgctcgcgactattcaaggacgccctatccagacaaggcttttccggcaac

SEQ ID NO: 311841 - DNA, 75 bp, synthetic construct
  source 1..75: mol_type = other DNA
atgagcaagcgcttagtgccttgaatgaacgtctgaacgttaaagatccggctgagaacgcccgcaacaagcttg

SEQ ID NO: 311842 - DNA, 75 bp, synthetic construct
  source 1..75: mol_type = other DNA
aaagagatagaaatcacagaattgaaagacttgcaatatcagcttttgaacatttccttagtgattcgaatgatt

SEQ ID NO: 311843 - DNA, 75 bp, synthetic construct
  source 1..75: mol_type = other DNA
tcgggaagtcagttttcaaggcaaaggaactgttcgtacaacgctgcccactgatgcgtttttctatactggcga

SEQ ID NO: 311844 - DNA, 75 bp, synthetic construct
  source 1..75: mol_type = other DNA
atgactcctattcaacttcttcgccctgtgctatttcttgatttttttgttcgggaagtcagttttcaaggcaaa

SEQ ID NO: 311845 - DNA, 75 bp, synthetic construct
  source 1..75: mol_type = other DNA
attaatgcacccttattcgttctatgtgtgttttcatgcgccaagcgacactctaaaaataacattcgcggacag

SEQ ID NO: 311846 - DNA, 75 bp, synthetic construct
  source 1..75: mol_type = other DNA
cttaaacgaggctaatttagctgttggaataatccataatcataggggtaattatgaactagcattagaatattt

SEQ ID NO: 311847 - DNA, 75 bp, synthetic construct
  source 1..75: mol_type = other DNA
gagatcacaacaaacggtcaagcaactaacattagactgtttgttcaactaaaaggtactgaacaagagttaaat

SEQ ID NO: 311848 - DNA, 75 bp, synthetic construct
  source 1..75: mol_type = other DNA
gcatgtaactagcgcttatcccatttctgaaaaacagaaaggtaaatcagtgaaattttttaccatttgcctaca

SEQ ID NO: 311849 - DNA, 75 bp, synthetic construct
  source 1..75: mol_type = other DNA
gtttatccccgctggcgcggggaactcccccggagactggcgcaacaatcccgaccacgcggtttatccccgctg

SEQ ID NO: 311850 - DNA, 75 bp, synthetic construct
  source 1..75: mol_type = other DNA
gacggcaatacggcgtggcgcggggagtatgatgaatggggcaaccagcttaatgaagagaacccgtattacctg

SEQ ID NO: 311851 - DNA, 75 bp, synthetic construct
  source 1..75: mol_type = other DNA
aggggtagatcaggactataagcaagcgatgtattggtatctgaaggctgcggcccaggagagcatcagcgctta

SEQ ID NO: 311852 - DNA, 75 bp, synthetic construct
  source 1..75: mol_type = other DNA
ttccttgacggtcgcgacaccccgccgcgcagtgctgaatcctcgctgaaaaatttgaagagaaatttgctgcgc

SEQ ID NO: 311853 - DNA, 75 bp, synthetic construct
  source 1..75: mol_type = other DNA
ataatttatcaatagatgaaattatcgaacgtgctgaaaaaggcgattgcgaggctcaatatattgttgggtttt

SEQ ID NO: 311854 - DNA, 75 bp, synthetic construct
  source 1..75: mol_type = other DNA
aggatgaagacgagtgggaagatgctgagatgtattttcgtaaagcttatgaaatggcagggggtgaatatggat

SEQ ID NO: 311855 - DNA, 75 bp, synthetic construct
  source 1..75: mol_type = other DNA
ggcagtatgatggccacggctggctgacagacatcagccacctgagcgaaggccaccgtgttgccgtccactatg

SEQ ID NO: 311856 - DNA, 75 bp, synthetic construct
  source 1..75: mol_type = other DNA
ttgccctggtggagtggctgacctacggcagcggctatcttgcgggcatgaagctgggcgggacgccgctgctgg

SEQ ID NO: 311857 - DNA, 75 bp, synthetic construct
  source 1..75: mol_type = other DNA
aaccagccgcttaacgtgaacgtcaatgtgaaagtgcaggatgggcaggttagggatctggtccgctctgaagtt

SEQ ID NO: 311858 - DNA, 75 bp, synthetic construct
  source 1..75: mol_type = other DNA
acgacagaacccgcatccagacgatttatcagccggggagcttcacgccactcatcagagttgaaaccgccaccg

SEQ ID NO: 311859 - DNA, 75 bp, synthetic construct
  source 1..75: mol_type = other DNA
tgcccgccgtggaatggctgacctacggcagcggctggctggcaggcatgaagctcggcgacacaccgctggtgg

SEQ ID NO: 311860 - DNA, 75 bp, synthetic construct
  source 1..75: mol_type = other DNA
ggccgtccgtaccacgcagggcgggctgacgcgcagtatggaatacgatgctgccggacgggtcatccgcctgac

SEQ ID NO: 311861 - DNA, 75 bp, synthetic construct
  source 1..75: mol_type = other DNA
tgaacccggtcagtcacgaagtgtgtttgttggccagcggagagaactttttactttcgaagcgcgagtatgctc

SEQ ID NO: 311862 - DNA, 75 bp, synthetic construct
  source 1..75: mol_type = other DNA
gcaacagatgggagcgctcatagcggcagggaaatcacggcgttatgttgcacgtatctataacgttgggctatc

SEQ ID NO: 311863 - DNA, 75 bp, synthetic construct
  source 1..75: mol_type = other DNA
tgggattactgggaagtgcctcggcaggcattactggagcgctggctccaggtcgaaatatatggcagaacgcag

SEQ ID NO: 311864 - DNA, 75 bp, synthetic construct
  source 1..75: mol_type = other DNA
gcttgagtatcatataccaagaatgctaagtacagataacttcaaaaaaataaaactcagagacatatctttgga

SEQ ID NO: 311865 - DNA, 75 bp, synthetic construct
  source 1..75: mol_type = other DNA
aggtgtggaaggaatgtcccatctgcaggacaaatctattatgggagagatctttcccttaaaagacatttgtcc

SEQ ID NO: 311866 - DNA, 75 bp, synthetic construct
  source 1..75: mol_type = other DNA
tggctggtcgtgatgggggcgtcagatattacagatgcacagcgggagtggcttttacgacgacgggaatactgc

SEQ ID NO: 311867 - DNA, 75 bp, synthetic construct
  source 1..75: mol_type = other DNA
tcagtatttgcctttatattctctgaaataatggcaaggcgttacgctgggttctcatattatatgccaatcaca

SEQ ID NO: 311868 - DNA, 75 bp, synthetic construct
  source 1..75: mol_type = other DNA
acctgacgatatggcagggcgatggcaggcccaccgggatctgctgtcggaagtcggtcccaaacaaccccggct

SEQ ID NO: 311869 - DNA, 75 bp, synthetic construct
  source 1..75: mol_type = other DNA
ccggtgttaacggctgtgccagtaaaaaagagtggtgtcgttttgccagaggcggactttgaggcctgggccacg

SEQ ID NO: 311870 - DNA, 75 bp, synthetic construct
  source 1..75: mol_type = other DNA
aaaacagacacattcgtgtaacccaagaacatcttgaagaaacagtacgacatttattaaatggaatgaaaatta

SEQ ID NO: 311871 - DNA, 75 bp, synthetic construct
  source 1..75: mol_type = other DNA
gcttaaaccagaagagcagcgggagaaggtctctgaaatcgaagcggcaactgctggcacaaccggccatgaaaa

SEQ ID NO: 311872 - DNA, 75 bp, synthetic construct
  source 1..75: mol_type = other DNA
ggtgatgtcaaaacgttatcaatactgggggaaggagaaaggctggaatattcgtgcaaataataattttcttgc

SEQ ID NO: 311873 - DNA, 75 bp, synthetic construct
  source 1..75: mol_type = other DNA
tgcgtgaaaaggcagaaaaagcaacgcgtggtgagtggtcgctcgaatatggagagaaccgatttgatggtgatg

SEQ ID NO: 311874 - DNA, 75 bp, synthetic construct
  source 1..75: mol_type = other DNA
aacttacaagataaaatcgaaataaaagatgtctcaaatgaactgtcacactctacattaataaataaattagtt

SEQ ID NO: 311875 - DNA, 75 bp, synthetic construct
  source 1..75: mol_type = other DNA
aactcataaaggtagcaaagttacagagtttgtaatatcagggcaggataatgcatacaggcaactatttgacat

SEQ ID NO: 311876 - DNA, 75 bp, synthetic construct
  source 1..75: mol_type = other DNA
tatcggtaagaatgttttcatagggaataatgactccaatcactttatcattggaagtgcgtccactaaactcca

SEQ ID NO: 311877 - DNA, 75 bp, synthetic construct
  source 1..75: mol_type = other DNA
tgataaataaactatcgcaaagggtaaccgaggagtctttagattctcaagatattgaaaaagaagcattcaata

SEQ ID NO: 311878 - DNA, 75 bp, synthetic construct
  source 1..75: mol_type = other DNA
ttttttatacctagatgccccagtattgattccatatcttgttgcattaagatacgataaaatttctaacagtga

SEQ ID NO: 311879 - DNA, 75 bp, synthetic construct
  source 1..75: mol_type = other DNA
agaggtcgtgaaataagagaggtaatacaggtatctattataaaaaaaggtttagaagataaacttgaagaagac

SEQ ID NO: 311880 - DNA, 75 bp, synthetic construct
  source 1..75: mol_type = other DNA
gccggtgaactttgctaccagcaccgatccgatcgcgctgcgtaaaggtgctatccaactgcgtgatgttcttaa

SEQ ID NO: 311881 - DNA, 75 bp, synthetic construct
  source 1..75: mol_type = other DNA
gaaaatgtattttaacattagaactaatcaagttgtgattgatattgatgggagtgatgttcactcattgtacga

SEQ ID NO: 311882 - DNA, 75 bp, synthetic construct
  source 1..75: mol_type = other DNA
tctggagcactatgccggtcaggatgaaatcggtctgcgttacaacagccaccgtacaaaacgggaagaatatct

SEQ ID NO: 311883 - DNA, 75 bp, synthetic construct
  source 1..75: mol_type = other DNA
atgaaaaaacaacctattgtattagccataggctttttcccctttatggttcaggctgctacaacagttacttca

SEQ ID NO: 311884 - DNA, 75 bp, synthetic construct
  source 1..75: mol_type = other DNA
tgccactacttcatatgtggtcattggccgtagaggagcaatattactttatatggccaattattattttacttg

SEQ ID NO: 311885 - DNA, 75 bp, synthetic construct
  source 1..75: mol_type = other DNA
aaaatcaaaaatatcatttgttcgttcttttatttttattaacacattttttattgcaactgcttttattgtgtt

SEQ ID NO: 311886 - DNA, 75 bp, synthetic construct
  source 1..75: mol_type = other DNA
tgatggtcttatgtatggtcgcgattgccatcgcattccggcagacatggcgactggggcaggaaagcgcacgta

SEQ ID NO: 311887 - DNA, 75 bp, synthetic construct
  source 1..75: mol_type = other DNA
ctcagttcgcctggaagattccgtgtatgaatatgcgcgtaccggtggtcgtggctgggcgcacacctcaatgtc

SEQ ID NO: 311888 - DNA, 75 bp, synthetic construct
  source 1..75: mol_type = other DNA
acaacagcgactacatctggcgcacctggggtgcaatggggttgatggtcaagcaggacatcaacaacaaatact

SEQ ID NO: 311889 - DNA, 75 bp, synthetic construct
  source 1..75: mol_type = other DNA
accgttgcatctccgcgcccggagtacaacagcgactacatctggcgcacctggggtgcaatggggttgatggtc

SEQ ID NO: 311890 - DNA, 75 bp, synthetic construct
  source 1..75: mol_type = other DNA
gatgatctttcccgtgcgcctcgactggcgttcagccaggcggtttcagcgggagactggacgatttatgatgca

SEQ ID NO: 311891 - DNA, 75 bp, synthetic construct
  source 1..75: mol_type = other DNA
atgttgccatccgagttgggcgttttgaggatccgacactggttacgcggcggctggcaccttgcaggatggttt

SEQ ID NO: 311892 - DNA, 75 bp, synthetic construct
  source 1..75: mol_type = other DNA
cgatggtgccggtgcacgacagcggcttcaagttccactggcgtgacccgatcttcaacaaaggatctgcactgg

SEQ ID NO: 311893 - DNA, 75 bp, synthetic construct
  source 1..75: mol_type = other DNA
tacaacggtgttgttactcgacattgctttaattgaatcacttaagactatcaatagtgatcaagaacaaataaa

SEQ ID NO: 311894 - DNA, 75 bp, synthetic construct
  source 1..75: mol_type = other DNA
agttgaaaactattctgtcgacaggggcggattttgtaccagtggttggcgatatcaagagttttgcggaggcac

SEQ ID NO: 311895 - DNA, 75 bp, synthetic construct
  source 1..75: mol_type = other DNA
ccgattttacctacggtgtgcccggagttcagggcgggcatggatgcttaaatgaaccgcgagtctgtctggaat

SEQ ID NO: 311896 - DNA, 75 bp, synthetic construct
  source 1..75: mol_type = other DNA
acagaaactacctggcgtcagtccttacggggagcgggctttcgtaatcttgccctgggcattattgtcgtataa

SEQ ID NO: 311897 - DNA, 75 bp, synthetic construct
  source 1..75: mol_type = other DNA
gcaatgatgaggttattgcacaatatgtttccgaacaaaaattaaattcgatgactcttgaggacaatatacttg

SEQ ID NO: 311898 - DNA, 75 bp, synthetic construct
  source 1..75: mol_type = other DNA
gtgatttgtatcgttacatcaatgatcaaactctgcgtatggcaaatcaagggatgacccgtgatgaaattgccg

SEQ ID NO: 311899 - DNA, 75 bp, synthetic construct
  source 1..75: mol_type = other DNA
gcttctttcggatgtgctctggtgggttcgtaatccgccagcagtagagaacgtcaataacccatacagccgtaa

SEQ ID NO: 311900 - DNA, 75 bp, synthetic construct
  source 1..75: mol_type = other DNA
caggggcgcttccctccgcgctgtcactttggccgcaatagctgtgcttggcttctttcggatgtgctctggtgg

SEQ ID NO: 311901 - DNA, 75 bp, synthetic construct
  source 1..75: mol_type = other DNA
tcagggcggcgtcgccgtcagaccttgcggaaaagctgacacacaaactgaaagagggctggcagccgtttggca

SEQ ID NO: 311902 - DNA, 75 bp, synthetic construct
  source 1..75: mol_type = other DNA
tgcatatttatgggaatgtggtcgatcagggctgtgatgtcgccaccaaaagtgcattacaaaatattcatattg

SEQ ID NO: 311903 - DNA, 75 bp, synthetic construct
  source 1..75: mol_type = other DNA
aaaactcccgacgagtcttaatctgtgagcaattgctggatttgatccacggtgagagcactgaggtatttgatc

SEQ ID NO: 311904 - DNA, 75 bp, synthetic construct
  source 1..75: mol_type = other DNA
gcttttgtccgatgtgctctggtgggttcgtaatccccctgctgtacctaacgtcaataacccatatagccgtaa

SEQ ID NO: 311905 - DNA, 75 bp, synthetic construct
  source 1..75: mol_type = other DNA
acatgttatatagaagaagtgcttgcatcctgctcagagcttgggtttcgaactgacaaaatgaaaaatttaaca

SEQ ID NO: 311906 - DNA, 75 bp, synthetic construct
  source 1..75: mol_type = other DNA
gaaggaacactactaccagataatgagtaccaaattaccagtactaatatcatgaaagtacaatttaagtgcaaa

SEQ ID NO: 311907 - DNA, 75 bp, synthetic construct
  source 1..75: mol_type = other DNA
tccgagccggggccaacggcgagaaaagccggtgcgtttctgatgctctgcgtgtcgcagattgacgctatcgtt

SEQ ID NO: 311908 - DNA, 75 bp, synthetic construct
  source 1..75: mol_type = other DNA
ctggcccttggcgaaggtgcaactgctggcaattaatcgcccggtggatatggtcgctgaaggcattgatattgc

SEQ ID NO: 311909 - DNA, 75 bp, synthetic construct
  source 1..75: mol_type = other DNA
ctttacccggccatgcgggcatggccttatgggttttcagttatgtggcctcagcgccgtgtgcgggctgtgccg

SEQ ID NO: 311910 - DNA, 75 bp, synthetic construct
  source 1..75: mol_type = other DNA
cctacaactcccgccagccgtgtgcgtcaggctgcggcttcccttgcgcccctgcatccccgcctgttcgcccgg

SEQ ID NO: 311911 - DNA, 75 bp, synthetic construct
  source 1..75: mol_type = other DNA
atgccctggcaaaaatccggaaatgatgacactggcggggtaaatccccgcctttttcctgccggtccccggaca

SEQ ID NO: 311912 - DNA, 75 bp, synthetic construct
  source 1..75: mol_type = other DNA
agcatctggatgaacgcagattaatgctgcaatggtgggcagattttttagataaaagccaaaaagaaaaaattt

SEQ ID NO: 311913 - DNA, 75 bp, synthetic construct
  source 1..75: mol_type = other DNA
gaagaaaaaagcagaagcagaagccgccaaagccgcagccgaagcgcagaaaaaagccgaggcagccgctgcggc

SEQ ID NO: 311914 - DNA, 75 bp, synthetic construct
  source 1..75: mol_type = other DNA
gtgcgttttgaacagggcgatgcgtttaacccggaggaactcagcgcgttaactccgcggcctacgctggcgatt

SEQ ID NO: 311915 - DNA, 75 bp, synthetic construct
  source 1..75: mol_type = other DNA
cgtgctgcctacatacataaagcacagcaccttgatgagagaaagcttatgttgcagtggtgggccgattacctt

SEQ ID NO: 311916 - DNA, 75 bp, synthetic construct
  source 1..75: mol_type = other DNA
ttgttcctttgagttgtcaggcattggctgtgctgacgaaaatcaaagagatcagtggtgaccatgaactcgtat

SEQ ID NO: 311917 - DNA, 75 bp, synthetic construct
  source 1..75: mol_type = other DNA
ttgtacctctaagccgtcaggcactgaaaatattagaagagataaaacaaatcagtggggattacgagttggtct

SEQ ID NO: 311918 - DNA, 75 bp, synthetic construct
  source 1..75: mol_type = other DNA
cattgctccgcgaagcagcaaaacttgatcccgccaactatatggtgcatagggccagaagcatgctggcgcaac

SEQ ID NO: 311919 - DNA, 75 bp, synthetic construct
  source 1..75: mol_type = other DNA
gttgaatgtacagaagcacaacgggagtggttgttgttgcgcaggaattattgcctggcgcagatatcgtccccg

SEQ ID NO: 311920 - DNA, 75 bp, synthetic construct
  source 1..75: mol_type = other DNA
atcagtaatggcaacctaacaccagaagcaaggaaaagtatcaaggtacaggattttgattttcttgatgtgctt

SEQ ID NO: 311921 - DNA, 75 bp, synthetic construct
  source 1..75: mol_type = other DNA
tggctgcggcatccagtaccgcagctcgtcttgctggaccgggtaaagcaggcagagcggtggctgtggtatttg

SEQ ID NO: 311922 - DNA, 75 bp, synthetic construct
  source 1..75: mol_type = other DNA
cgctggactatctgcaaggacacaaagacggcctggagtgggctgcacaattggcagaagcaaataatccgcaaa

SEQ ID NO: 311923 - DNA, 75 bp, synthetic construct
  source 1..75: mol_type = other DNA
cggtacaactggggtagtagaccagtacaacctggtcgccaggcgaagaagttcagacaatgtgcccgatgtcgg

SEQ ID NO: 311924 - DNA, 75 bp, synthetic construct
  source 1..75: mol_type = other DNA
tttttaggtgattttttgccagccaaacgggaagttagcgagtcaggttttcaggcgcaatggcaaagcagctgg

SEQ ID NO: 311925 - DNA, 75 bp, synthetic construct
  source 1..75: mol_type = other DNA
atgaaacgtaaaacactgcctctgctggcgctggttgccaccactctgtttctcatcgcatgcgatgacagaagt

SEQ ID NO: 311926 - DNA, 75 bp, synthetic construct
  source 1..75: mol_type = other DNA
cccgtatacgaaagaaaaatacttcgaatattcccatgacggcaaactgatgggacggctgctgataccgtcaaa

SEQ ID NO: 311927 - DNA, 75 bp, synthetic construct
  source 1..75: mol_type = other DNA
gatggttgcgagggtggcagttactactatctggtggatatggaggagaaaaccgtccagccgctgatgaatgcg

SEQ ID NO: 311928 - DNA, 75 bp, synthetic construct
  source 1..75: mol_type = other DNA
tggttgtcgtcggccgtaaacagagcggcgttgatgacgccatggctgcgattgcggcacaaactcccacggcgt

SEQ ID NO: 311929 - DNA, 75 bp, synthetic construct
  source 1..75: mol_type = other DNA
cgcagccggtgctgccagtgtcgcgctgacaccgttcgtcggcgtgccggtgggtattttcgtgggcatttatgt

SEQ ID NO: 311930 - DNA, 75 bp, synthetic construct
  source 1..75: mol_type = other DNA
actactacctcgtggatatgcaggcaaaaaccgtccagccgctgatgaatgtgaatcgccacaggtttaacagac

SEQ ID NO: 311931 - DNA, 75 bp, synthetic construct
  source 1..75: mol_type = other DNA
ttgtatttgcctttttatctttttctgaagggttttaggcgcaataagaaagatattgtgcttcctgacgaaagt

SEQ ID NO: 311932 - DNA, 75 bp, synthetic construct
  source 1..75: mol_type = other DNA
aaaaaattctctaattagtatggaaatcgatgaaataaacaatacagtttatgaatacattaagacctataaaga

SEQ ID NO: 311933 - DNA, 75 bp, synthetic construct
  source 1..75: mol_type = other DNA
gtgatctatgggctgatattttattcaagggtgatgcaagtaatttaaagtcagcaactgatgaacttgtatatt

SEQ ID NO: 311934 - DNA, 75 bp, synthetic construct
  source 1..75: mol_type = other DNA
tgaagaaaaatttaaaaatgaagagtattcatcgcttttaatacgcgttttctttgccttatcattagaaatgaa

SEQ ID NO: 311935 - DNA, 75 bp, synthetic construct
  source 1..75: mol_type = other DNA
agacgatactcagccgccgtacacgcgctattgagggcaaacaacggcgtaagctggccgaattaccgttcgatg

SEQ ID NO: 311936 - DNA, 75 bp, synthetic construct
  source 1..75: mol_type = other DNA
actcatcagctggcgcattacgctatatgaatgttagctttgatacacaaaatgtcgtgagaacatcaacagaaa

SEQ ID NO: 311937 - DNA, 75 bp, synthetic construct
  source 1..75: mol_type = other DNA
aatctcggctggaacggccagcggtttccctcgctgtgcgccagttttgatccgacggacaatctcaccgtcacc

SEQ ID NO: 311938 - DNA, 75 bp, synthetic construct
  source 1..75: mol_type = other DNA
atatggcgaacatgccggctccggtcacagcgggcgcactgtatagcgccattgcgcgtgtggaacatcaggccg

SEQ ID NO: 311939 - DNA, 75 bp, synthetic construct
  source 1..75: mol_type = other DNA
ctggcccgcgcgtgcgctatcccgctcagcctgcgggaaattgctgaactggacagcacggaactggcggggatt

SEQ ID NO: 311940 - DNA, 75 bp, synthetic construct
  source 1..75: mol_type = other DNA
ttcgtaccattagaaaagaagcgcgtgaaatcagctttgagatctttgaagagattttagagaagatgaaacagg

SEQ ID NO: 311941 - DNA, 75 bp, synthetic construct
  source 1..75: mol_type = other DNA
ataatttaaattattacttaaatacaagcactccagaatatgctttcatgattactggcgggtggggagctggga

SEQ ID NO: 311942 - DNA, 75 bp, synthetic construct
  source 1..75: mol_type = other DNA
ggcataaacccaggatacctttcaataaagataagggagttccatgatctctataaaaaaatacatacaatcttc

SEQ ID NO: 311943 - DNA, 75 bp, synthetic construct
  source 1..75: mol_type = other DNA
ccgcaggtaaacgccttattgagccttttgtgggtggcggctcggtgttccttaactcagacaagcacgaacgct

SEQ ID NO: 311944 - DNA, 75 bp, synthetic construct
  source 1..75: mol_type = other DNA
acgcattcgttcagcctcagttttgaactggccgaacccctgcatatccgccaggtagatattaacccacaaatt

SEQ ID NO: 311945 - DNA, 75 bp, synthetic construct
  source 1..75: mol_type = other DNA
attacagcaggttataaccgttactatggcgggaatattcttgatatgggattacgtgatatccgcaatagctgg

SEQ ID NO: 311946 - DNA, 75 bp, synthetic construct
  source 1..75: mol_type = other DNA
cgggccgccgaatgggggggttttgttcgccgcgctgaccacgctgtgcatgttgtcactgatctccgcgtttta

SEQ ID NO: 311947 - DNA, 75 bp, synthetic construct
  source 1..75: mol_type = other DNA
atgagtggtcctgaggtacatacgcatattgatgagggggtgttccgccgtcttggtctgccggaatcactgata

SEQ ID NO: 311948 - DNA, 75 bp, synthetic construct
  source 1..75: mol_type = other DNA
gcccggagcgcgatattgccgccagccacggaaatgctgtattcatataccatgttgatgacgataaaatagcta

SEQ ID NO: 311949 - DNA, 75 bp, synthetic construct
  source 1..75: mol_type = other DNA
accgccttatgcctggcggcagataaaggtgacctgtgccgcctggtcatcacgggttcgcatgctgcgggttga

SEQ ID NO: 311950 - DNA, 75 bp, synthetic construct
  source 1..75: mol_type = other DNA
gaatcctggcggtacgacgggagtgataaatacccgtggccacagccggtgctgtaccacatttgcctcgagatg

SEQ ID NO: 311951 - DNA, 75 bp, synthetic construct
  source 1..75: mol_type = other DNA
cagctataccccgtcatgagagaactgaactctgattactacgggaaactgtttgatctggcctacgagactcgt

SEQ ID NO: 311952 - DNA, 75 bp, synthetic construct
  source 1..75: mol_type = other DNA
ttagtgataaaaaactcctgataaaaatgagggtaatgcatgatgcatttcttgatttcggcaataattcaattc

SEQ ID NO: 311953 - DNA, 75 bp, synthetic construct
  source 1..75: mol_type = other DNA
aattgatgctcttatcattgcacatactctggatgacgatccccgtatctctcatcttcataaagcaggtattcc

SEQ ID NO: 311954 - DNA, 75 bp, synthetic construct
  source 1..75: mol_type = other DNA
tcagcagggaacttgcttatcatgatattgacttactgctgatcgctgatgatgagcatacagactgccacaact

SEQ ID NO: 311955 - DNA, 75 bp, synthetic construct
  source 1..75: mol_type = other DNA
ttgccgcaggacagtattattgagctggatgtggctgctgttgttcagtcaacacgaagtctcgttggtcgtcag

SEQ ID NO: 311956 - DNA, 75 bp, synthetic construct
  source 1..75: mol_type = other DNA
cgcatatgccggtacaggcttatcaggcggcgctgaacagttgtgaactgtttgtgaatccgtttccgtttggta

SEQ ID NO: 311957 - DNA, 75 bp, synthetic construct
  source 1..75: mol_type = other DNA
aattcagcgaacccgtaaagcagttatgtaccggattcgttttttacgtaatcgtgggctgattggccgcaagag

SEQ ID NO: 311958 - DNA, 75 bp, synthetic construct
  source 1..75: mol_type = other DNA
gctggggcattacacgttcgcacttgcggagcaggtaacaaaaggccatctaaggccactgaagcaagcagaaga

SEQ ID NO: 311959 - DNA, 75 bp, synthetic construct
  source 1..75: mol_type = other DNA
ggactggcacgccagcagagtacaggtttatcgttcccttgtacactctctcaatgcaagtgaagctgtcagtgc

SEQ ID NO: 311960 - DNA, 75 bp, synthetic construct
  source 1..75: mol_type = other DNA
gggagataatacggtattctattcaatttttaagtggactttatcatatacactcaaaaggtcttatgcattttg

SEQ ID NO: 311961 - DNA, 75 bp, synthetic construct
  source 1..75: mol_type = other DNA
cgatctctcagctataagtgatggcgttcttgactggcgtctacagatgacaaaaccaactaatgatcctaccca

SEQ ID NO: 311962 - DNA, 75 bp, synthetic construct
  source 1..75: mol_type = other DNA
tgagaagtgccttgcccatgaacaaaaaggggtacgagctgtttataacaaggcagaatatcgcgagcagagggc

SEQ ID NO: 311963 - DNA, 75 bp, synthetic construct
  source 1..75: mol_type = other DNA
gcgccctgccgacgccggcggcgcaccagaagcgcgagcatctcctggcgtggctgccggagaggctgaaggaga

SEQ ID NO: 311964 - DNA, 75 bp, synthetic construct
  source 1..75: mol_type = other DNA
gacgtttcgtctggagacctttgaatggctggtgcaccaggggcttaacgaagaggcggcccggtccctgatatc

SEQ ID NO: 311965 - DNA, 75 bp, synthetic construct
  source 1..75: mol_type = other DNA
ccgcccgagcctgttcatgctgatattccggtcggtgcagtgggtaatgactccaacttattgatagtgttttat

SEQ ID NO: 311966 - DNA, 75 bp, synthetic construct
  source 1..75: mol_type = other DNA
ctcgagcaaaaacagtgggataagcgttaccgcgaagagctgattaatcagctgattttacgcgatccgccaccg

SEQ ID NO: 311967 - DNA, 75 bp, synthetic construct
  source 1..75: mol_type = other DNA
cgccatgaaggtgcggtactcgcattgaccgaaaaccgggtcgtcgaaattgattccgcgaccgccaataagctt

SEQ ID NO: 311968 - DNA, 75 bp, synthetic construct
  source 1..75: mol_type = other DNA
cactgctcctatgcagatttaccggaaaagcaccgcatcaagcaggaaatcaaccggctgacggcccgggcactg

SEQ ID NO: 311969 - DNA, 75 bp, synthetic construct
  source 1..75: mol_type = other DNA
aaataaaaactataataactaatgctataaatagttttgatattcagtttgcagaaaacatgcttaaagctcaaa

SEQ ID NO: 311970 - DNA, 75 bp, synthetic construct
  source 1..75: mol_type = other DNA
cgcggatctgcaaattaccggcaccagtaatcaacccgcaggcaccacaataacggtgacgctgaacgggcaaaa

SEQ ID NO: 311971 - DNA, 75 bp, synthetic construct
  source 1..75: mol_type = other DNA
atactggcagcggttcgcgcgatattgtgatagacgccaacctgccgggtctgcgcgtcgataccgtggcgggcg

SEQ ID NO: 311972 - DNA, 75 bp, synthetic construct
  source 1..75: mol_type = other DNA
caggccgacggcagctggagcattaatattccggcggcagatcttgaggcattgaccgatggcagccacaccctg

SEQ ID NO: 311973 - DNA, 75 bp, synthetic construct
  source 1..75: mol_type = other DNA
gcggcgggcgatgtggtaaccgtcacgctgaacggtaaaaactacaccaccacgctggacgcctccggtaactgg

SEQ ID NO: 311974 - DNA, 75 bp, synthetic construct
  source 1..75: mol_type = other DNA
gctaacggtgcctggagcgtgcaggtgccgaccgccgatgcacaggcgttaggcgaagggaatcaggcggtgctg

SEQ ID NO: 311975 - DNA, 75 bp, synthetic construct
  source 1..75: mol_type = other DNA
cggcggatattcaggcgctgggcaacggcgacctgacggttaacgcctcggtcaccaatagcgttggcaataccg

SEQ ID NO: 311976 - DNA, 75 bp, synthetic construct
  source 1..75: mol_type = other DNA
gcggccaacccgccaccgtgcgggtggaagccaatctcaacggtcgtcacagcaccatgctgttgtgcgacgacc

SEQ ID NO: 311977 - DNA, 75 bp, synthetic construct
  source 1..75: mol_type = other DNA
tttgggcatggtgctgcttgatacgcttacaggaagtggcttacaccccgcgtcacgggcgtttctccgccccgg

SEQ ID NO: 311978 - DNA, 75 bp, synthetic construct
  source 1..75: mol_type = other DNA
gaaaaccttagcgtacgattttttccgaattctgcgggctcccctactggcaacattccgccatcttaatgccag

SEQ ID NO: 311979 - DNA, 75 bp, synthetic construct
  source 1..75: mol_type = other DNA
cggtacctgccgccgcgatgggaaatctgcctgacggcgcggtggcgattaccgcttctgtgacggatctcagcg

SEQ ID NO: 311980 - DNA, 75 bp, synthetic construct
  source 1..75: mol_type = other DNA
tcgtctcgcgcctgaccggcattccggtcaacgagctgacggtggaagaacgcgagaagctgctgcatctggagc

SEQ ID NO: 311981 - DNA, 75 bp, synthetic construct
  source 1..75: mol_type = other DNA
gcgcgcgagggcaagctcgatccggtcatcggccgtgcgcaggagatcgagaccaccatcgaggtgctggcccgg

SEQ ID NO: 311982 - DNA, 75 bp, synthetic construct
  source 1..75: mol_type = other DNA
caggttgccaccaccgcaggcgataacatcattaacgccagcgaacaggccgccgggtttacgctttctggcacg

SEQ ID NO: 311983 - DNA, 75 bp, synthetic construct
  source 1..75: mol_type = other DNA
cccgcaaaccattactgccaccattacggatatcgcgggtaatagcgatgacgccagccgcacggtcactgtgaa

SEQ ID NO: 311984 - DNA, 75 bp, synthetic construct
  source 1..75: mol_type = other DNA
gcggcacgcgggatatcaccatcgacgccaatctgcccggtctgcgggtcgatacggtggcgggcgatgatgtgg

SEQ ID NO: 311985 - DNA, 75 bp, synthetic construct
  source 1..75: mol_type = other DNA
tacacggtgacggcgaacgtcaccgacagcgcaggcaacagcaattccgccagccataacgtgcaggtcaatacc

SEQ ID NO: 311986 - DNA, 75 bp, synthetic construct
  source 1..75: mol_type = other DNA
agcttcgattatctaccacctaatacctccccagattatgagtttgatataaccccaggtcaggccatatatctt

SEQ ID NO: 311987 - DNA, 75 bp, synthetic construct
  source 1..75: mol_type = other DNA
tataaatagttttgatattcagtttgcagaaaacatgcttaaagctcaaagcagaacttatcgctataaaaaaat

SEQ ID NO: 311988 - DNA, 75 bp, synthetic construct
  source 1..75: mol_type = other DNA
atcccagtcgccgatctcgcaaccttgcctgacggcgcagcaaacgtccaggccagcgtcagcaacgtcgcaggt

SEQ ID NO: 311989 - DNA, 75 bp, synthetic construct
  source 1..75: mol_type = other DNA
ggcactggtgataaccggtagcagcagcgggctggcggcgggcgcggcgctgacggtggtgattaacacggtcac

SEQ ID NO: 311990 - DNA, 75 bp, synthetic construct
  source 1..75: mol_type = other DNA
aatcagccaacaggcaccacaattacggtgacgcttaacgggcaaaattactccgccacgacggacgccgcaggc

SEQ ID NO: 311991 - DNA, 75 bp, synthetic construct
  source 1..75: mol_type = other DNA
ccgatctggcgtcattacccgagggcagcgcctccgcacaggccagcgtcagcaatatcaacggcaatagcgcct

SEQ ID NO: 311992 - DNA, 75 bp, synthetic construct
  source 1..75: mol_type = other DNA
tggcgggcgatgatgtggtcaatatcatcgagcacgggcaggcgctggtggtcaccggcagcagctcggggctgg

SEQ ID NO: 311993 - DNA, 75 bp, synthetic construct
  source 1..75: mol_type = other DNA
gtgaacgttccggcgacagatttaagcggattaaccgccagcagttataccgtgaccgccacggtgagcgacaaa

SEQ ID NO: 311994 - DNA, 75 bp, synthetic construct
  source 1..75: mol_type = other DNA
ggtgagcggcagtaccagcggtgtagaagccgggcagacggtgaccgtcacctttggcggcaaaaattacaccac

SEQ ID NO: 311995 - DNA, 75 bp, synthetic construct
  source 1..75: mol_type = other DNA
ctggtggataggataatcgtgatggatcaggggcggattgtgatggacggcgcgaaagaggccattttgcgtgaa

SEQ ID NO: 311996 - DNA, 75 bp, synthetic construct
  source 1..75: mol_type = other DNA
gcgcgttaaccctcagcggagcgctgccctttgtgcagaagcagaaaaacggcctcaactacatgattcaggaag

SEQ ID NO: 311997 - DNA, 75 bp, synthetic construct
  source 1..75: mol_type = other DNA
ccgtgtcatgtctcctggcggacgataaatgattacggcgggttgagtgcaaagaaggagcaaaatctgctctga

SEQ ID NO: 311998 - DNA, 75 bp, synthetic construct
  source 1..75: mol_type = other DNA
cctgaaatggtctatcgtgcatcggaagaagatgttgcacacgcgcagggggagtcgccgcatacacaacataca

SEQ ID NO: 311999 - DNA, 75 bp, synthetic construct
  source 1..75: mol_type = other DNA
ttcatttgggcccgcattttatgcttaattatgaactcctacaaccaggagatattattttggagagaggttatg

SEQ ID NO: 312000 - DNA, 75 bp, synthetic construct
  source 1..75: mol_type = other DNA
ccgtcaactgggagcgcgacagtaagcgggaggagttactcaccgacatggcgcggcagttggggatggggctgc

SEQ ID NO: 312001 - DNA, 75 bp, synthetic construct
  source 1..75: mol_type = other DNA
atgagccgtcgcggtaactgccatgataatgcggttgcagaaagttttttccagttgttgaaacgtgaacggata

SEQ ID NO: 312002 - DNA, 75 bp, synthetic construct
  source 1..75: mol_type = other DNA
agcgggatgcggtgcgtgattcgctggtgaatctcagaaaggctcgccgttactggcataacgagagcgataaga

SEQ ID NO: 312003 - DNA, 75 bp, synthetic construct
  source 1..75: mol_type = other DNA
attttagctgcgcctccacttctccttttacaacccggtgcaacagggacattacgcctgttgaaaataacaagt

SEQ ID NO: 312004 - DNA, 75 bp, synthetic construct
  source 1..75: mol_type = other DNA
ggctatacatatcttatattcaaaaagaaattaaaaagtaatcagggatgtaaaagtcaaactaggattgaagag

SEQ ID NO: 312005 - DNA, 75 bp, synthetic construct
  source 1..75: mol_type = other DNA
ctgatggcatcacctttggacagccgctgggcgacacaatggttctggttaaggctcctggcgctgataatgtca

SEQ ID NO: 312006 - DNA, 75 bp, synthetic construct
  source 1..75: mol_type = other DNA
tgtccctcctggcgagatgatcacatttatgtacagtggattttctggagtcaagctagagattagcaggacatt

SEQ ID NO: 312007 - DNA, 75 bp, synthetic construct
  source 1..75: mol_type = other DNA
gagggacaacagttggggcatctggatttgttggtgcatatgggcgaagagcaaaactttgtctatcagatttgg

SEQ ID NO: 312008 - DNA, 75 bp, synthetic construct
  source 1..75: mol_type = other DNA
tccactcagcgagaaattctccacactatcagcggcgcaggctgtttatccattcgtaacatcactaactcagtc

SEQ ID NO: 312009 - DNA, 75 bp, synthetic construct
  source 1..75: mol_type = other DNA
ggctggatgtcgctgtcacggaaaccgcaagtgacctggtacggctgggacggcgaccggctgaccacgatacag

SEQ ID NO: 312010 - DNA, 75 bp, synthetic construct
  source 1..75: mol_type = other DNA
ttctggatatgttcagccaccgcctgacccagtttgtctggcatatctggcgtaagtaccgctatcacatcagtt

SEQ ID NO: 312011 - DNA, 75 bp, synthetic construct
  source 1..75: mol_type = other DNA
ccggcttcagaccgcgccggaagatatcgatcctttctctgtcgaggcaatcaggctggcaaacccggccttcga

SEQ ID NO: 312012 - DNA, 75 bp, synthetic construct
  source 1..75: mol_type = other DNA
tctttaccttgatctccttatacaagcaatcaacactggtactattaacgctgaagattggcaaaaggtgaccga

SEQ ID NO: 312013 - DNA, 75 bp, synthetic construct
  source 1..75: mol_type = other DNA
tttggccccggctggaaagcgccttctgatatccgcttacagctacgcgatgatgcactggtactcaacgacaac

SEQ ID NO: 312014 - DNA, 75 bp, synthetic construct
  source 1..75: mol_type = other DNA
aaaccggcagcgcgtcagggcgacatgacgcagtatggcggtagcattgttcagggttcagccggggtgcgcatc

SEQ ID NO: 312015 - DNA, 75 bp, synthetic construct
  source 1..75: mol_type = other DNA
aatggggtaacctgctgaatgaagagaacccgcatcagctgcagcagcttatccgcctgccggggcagcagtatg

SEQ ID NO: 312016 - DNA, 75 bp, synthetic construct
  source 1..75: mol_type = other DNA
agcaccggctggtgcactacacgcggacacaatatgcagagccgctggtcgaaagtcgctatctttacgacccgc

SEQ ID NO: 312017 - DNA, 75 bp, synthetic construct
  source 1..75: mol_type = other DNA
ccgtgacgcgcactatctttaccggtatgaccgttacggcaggctgacggagaaaaccgacctcatcccggaagg

SEQ ID NO: 312018 - DNA, 75 bp, synthetic construct
  source 1..75: mol_type = other DNA
ttttaaagcaatagataaccacgggaaggaaataacaaatagaaaaggattacctaatgtctgcagagttcatgg

SEQ ID NO: 312019 - DNA, 75 bp, synthetic construct
  source 1..75: mol_type = other DNA
aatgaaaaaagaactggccggaatggataacgcgggggaaataatgaaattcactccgggctggaaaacaacatg

SEQ ID NO: 312020 - DNA, 75 bp, synthetic construct
  source 1..75: mol_type = other DNA
caaggctcacgccgacgcactggcagcagaaaccaaacgcgctgacgaagccgaagcagcactggcggaagcaat

SEQ ID NO: 312021 - DNA, 75 bp, synthetic construct
  source 1..75: mol_type = other DNA
gaaggacactgacaagaagaaaggcgaaaagttggtgtttgaggtggcaacgccgtcagcacccacaggtgattt

SEQ ID NO: 312022 - DNA, 75 bp, synthetic construct
  source 1..75: mol_type = other DNA
ctgggaacaggtgatccgcaaaaaggcggtggtttatatcggcctcgatgcgctcagtgacagtgaggtggccag

SEQ ID NO: 312023 - DNA, 75 bp, synthetic construct
  source 1..75: mol_type = other DNA
gctacctgaaaatacaacaacggcagccccgtcaacagccgcagacaagtttattgatggcgagtggagagaaga

SEQ ID NO: 312024 - DNA, 75 bp, synthetic construct
  source 1..75: mol_type = other DNA
ttatatggtatcgttgagccggagacattctgatattttacctaagcaacacatcatgccacatgaaaattataa

SEQ ID NO: 312025 - DNA, 75 bp, synthetic construct
  source 1..75: mol_type = other DNA
gccagacggttaactgaagatgttgttgaagagtactggcaatgggtggataaagctgctgagttgattgtagct

SEQ ID NO: 312026 - DNA, 75 bp, synthetic construct
  source 1..75: mol_type = other DNA
gtcagaacaacatatagaaatgtaacaatttcacatgagaatgttgagcgaaataattttgaaattcatgaacat

SEQ ID NO: 312027 - DNA, 75 bp, synthetic construct
  source 1..75: mol_type = other DNA
tcagatgaatctccatggtcacagatcttcaagagattacagcttaaaatcacttctcgtgaattcctggaaaaa

SEQ ID NO: 312028 - DNA, 75 bp, synthetic construct
  source 1..75: mol_type = other DNA
aggatccacgagcaaaagtacataatccatcttatgtacgcagtatccttaactatttaattaatcaacgttatc

SEQ ID NO: 312029 - DNA, 75 bp, synthetic construct
  source 1..75: mol_type = other DNA
gcactggcgctaccattgcctgaaggtagcccgctggtggtaaagcgcattacgccggtggtggaacgccagttg

SEQ ID NO: 312030 - DNA, 75 bp, synthetic construct
  source 1..75: mol_type = other DNA
atacaaggggccaggcgtggtacatggatatgatgtgcgaagcgcgcggtgcgcaggatatgccatccagcactg

SEQ ID NO: 312031 - DNA, 75 bp, synthetic construct
  source 1..75: mol_type = other DNA
actgaccacaggaaagacggcagagttgctggcaccggactacctggatatgagcgatacccggcccgtgtttga

SEQ ID NO: 312032 - DNA, 75 bp, synthetic construct
  source 1..75: mol_type = other DNA
tgtcccaggtgcgtgtgtacgatccggtgctcgatggtctacgttcggcagtgcgatacgaccggacctacttcg

SEQ ID NO: 312033 - DNA, 75 bp, synthetic construct
  source 1..75: mol_type = other DNA
gttcattggccgtggcttccgctgggatcagcgccacacgcaccggctgatgcagacctatcggccggaattccg

SEQ ID NO: 312034 - DNA, 75 bp, synthetic construct
  source 1..75: mol_type = other DNA
atcggaaatcgcgccaaagctggtcaggtcgtcggtaacttcaacaacctcttcatgctgcgtgtgcgtgaaacg

SEQ ID NO: 312035 - DNA, 75 bp, synthetic construct
  source 1..75: mol_type = other DNA
agcgtaaagaggcttaccgtcaaatcgtcgaaatgagtaccaaaccgcaggatgtggatctggtcaggccagaga

SEQ ID NO: 312036 - DNA, 75 bp, synthetic construct
  source 1..75: mol_type = other DNA
ccgtctgattcaggaaactgcccctgacggcgatatcacccgctaccgttatgataatccacacagtgacttacc

SEQ ID NO: 312037 - DNA, 75 bp, synthetic construct
  source 1..75: mol_type = other DNA
atccgcttacagctgcgcgataacacactgatactcagtgataacggcggcagaagcctgtattttgagcacctg

SEQ ID NO: 312038 - DNA, 75 bp, synthetic construct
  source 1..75: mol_type = other DNA
gcattatctgctgccgggaggattttaccgggctgcgcgctggcttgaaatgaaaacggaacaccggctgcccgg

SEQ ID NO: 312039 - DNA, 75 bp, synthetic construct
  source 1..75: mol_type = other DNA
ctgccggcaggtgatacggatgatgtgctgatgccggagagtatttcccgggtggcggaggcgatgcgacagaat

SEQ ID NO: 312040 - DNA, 75 bp, synthetic construct
  source 1..75: mol_type = other DNA
ctgaagcacaccgtgccggcaggggcgatgagctttatatctttcatctgggctggccggaaatctctgcgcgtt

SEQ ID NO: 312041 - DNA, 75 bp, synthetic construct
  source 1..75: mol_type = other DNA
tcgctgccgccgtcggcaattcgatgtttgccgatctggtgagcgtcgccgggcatctgtataaatttggcctca

SEQ ID NO: 312042 - DNA, 75 bp, synthetic construct
  source 1..75: mol_type = other DNA
cgcgcccaaggcaggccaggttgtgggcaactttaataacctgattatgctgcgagtgcgtgaaaccgctaccgc

SEQ ID NO: 312043 - DNA, 75 bp, synthetic construct
  source 1..75: mol_type = other DNA
atgaatttaatgaactgatgggggatgaatttattccgttactgaacaagagcggcggcgcggggattgaagtga

SEQ ID NO: 312044 - DNA, 75 bp, synthetic construct
  source 1..75: mol_type = other DNA
ttccagctccctgcaggtaaagtctggctatcaccggtggtggactgcttcgatggaaaagttgtgagctggtct

SEQ ID NO: 312045 - DNA, 75 bp, synthetic construct
  source 1..75: mol_type = other DNA
tggtgaacacgctggcctcagaaaatccggatgaagccgggcgttacagcctggacgttgagtacgggcagtaca

SEQ ID NO: 312046 - DNA, 75 bp, synthetic construct
  source 1..75: mol_type = other DNA
attgtccgcgactataccggcaggacaccggaagcacgggagcagacgctgattgtcacgcacctgaatgaggac

SEQ ID NO: 312047 - DNA, 75 bp, synthetic construct
  source 1..75: mol_type = other DNA
gtggcacaggtcagcggggtacgggaacaggccatactgacacaggccattcgcagtgagctgaaaagacagggc

SEQ ID NO: 312048 - DNA, 75 bp, synthetic construct
  source 1..75: mol_type = other DNA
aggaaatcgtccgcatccccctgctgccctcaaaattagccaatagtgcaatcaagatttattgtgcacaattgc

SEQ ID NO: 312049 - DNA, 75 bp, synthetic construct
  source 1..75: mol_type = other DNA
gtgcagcttcctcggcaacggcggcaggaaattccgcaacggcggcaaaaacgtccgagacgaaagccaggtcat

SEQ ID NO: 312050 - DNA, 75 bp, synthetic construct
  source 1..75: mol_type = other DNA
gtgcagcttcctcggcaacggcggcagcaaattccgccacggcggcaaaaacgtccgagacgaaggccaggtcat

SEQ ID NO: 312051 - DNA, 75 bp, synthetic construct
  source 1..75: mol_type = other DNA
gtgcagcttcctcggcaacggcggcaggaaattccgcgacggcggcaaaaacgtccgagacgaaggccaggtcat

SEQ ID NO: 312052 - DNA, 75 bp, synthetic construct
  source 1..75: mol_type = other DNA
gtgcagcttcctcggcaacggcggcaggaaattccgccacggcggcaaaaacgtccgagacgaacgccaggtcat

SEQ ID NO: 312053 - DNA, 75 bp, synthetic construct
  source 1..75: mol_type = other DNA
aagcttttgtttctcttgtatacagaaccaaagacgggcaacagaaaacaattaattccggcaaactacttgccg

SEQ ID NO: 312054 - DNA, 75 bp, synthetic construct
  source 1..75: mol_type = other DNA
gccaggggggcggggtaaggtgctgtatcgatatgctttggcaattgcgtgtgccgcagatggagatgaaatgcc

SEQ ID NO: 312055 - DNA, 75 bp, synthetic construct
  source 1..75: mol_type = other DNA
gaaggcgtgaagggcgtcattttgaccagcgaccaggtgcaggtcgtttttgggcctggtaaagcgcatcgtgcc

SEQ ID NO: 312056 - DNA, 75 bp, synthetic construct
  source 1..75: mol_type = other DNA
aacccggctttcaaaccggacaacgttgaccgttttaaggaatcactgtcggctgagcaaaaacggcaagcgctt

SEQ ID NO: 312057 - DNA, 75 bp, synthetic construct
  source 1..75: mol_type = other DNA
ggagcaaaatccaggctttgatcggttgttcaagagctactatcgcaaaggtggctaaaaactcgtctcttacag

SEQ ID NO: 312058 - DNA, 75 bp, synthetic construct
  source 1..75: mol_type = other DNA
cttgtttccggagagccagttgatattgcagtcagtgttcacaggacaatgcaggagtgtatgactgcagcaacc

SEQ ID NO: 312059 - DNA, 75 bp, synthetic construct
  source 1..75: mol_type = other DNA
aatgctgggcaacttcagcttcggcgactatttcaaacacgatgccattcagtttgcatgggaactgctgaccag

SEQ ID NO: 312060 - DNA, 75 bp, synthetic construct
  source 1..75: mol_type = other DNA
cgtccaaacaagaaatacgtcgtaaaaccctaaaagcactctgtctacctggacgtcaaatacctttctcagctc

SEQ ID NO: 312061 - DNA, 75 bp, synthetic construct
  source 1..75: mol_type = other DNA
atggcacttcccgaaagctataactatatccacaagtcgggaactttgcatgaagcgccaagccctatcattccg

SEQ ID NO: 312062 - DNA, 75 bp, synthetic construct
  source 1..75: mol_type = other DNA
aaagcggaaatcgacacagttaaacaaactgcaaaaatatataagggagtagataatacaaatgaacctgaacta

SEQ ID NO: 312063 - DNA, 75 bp, synthetic construct
  source 1..75: mol_type = other DNA
tggcttcatcgaaaaaacaccgccacaatttctctaccacggtacggcaagccgttttcttgacgagataaaaaa

SEQ ID NO: 312064 - DNA, 75 bp, synthetic construct
  source 1..75: mol_type = other DNA
cagacccgtgcctgaatctatacagccatttattttacagctacgccaaaatcatcttgatagcggaatgctgct

SEQ ID NO: 312065 - DNA, 75 bp, synthetic construct
  source 1..75: mol_type = other DNA
gtcgcagagcagctcggagtaacggcaaacaagattggtcgcattgctaacgcaaacaacctcaaaactgagcag

SEQ ID NO: 312066 - DNA, 75 bp, synthetic construct
  source 1..75: mol_type = other DNA
ggaggctttttccagcgcaggaacggcatcagcaaaggccactgaagcatcaaaaagtgctgccgcagcagagtc

SEQ ID NO: 312067 - DNA, 75 bp, synthetic construct
  source 1..75: mol_type = other DNA
ggtttgtcgcttcgacattcccgactggcgcgaatattctgaccatcattttttataacgtcggcggtattgtta

SEQ ID NO: 312068 - DNA, 75 bp, synthetic construct
  source 1..75: mol_type = other DNA
atttccttaacaacatactggcccctttgcatctttaccgtcaaaaatcactgattgacgcaactaatgctgtaa

SEQ ID NO: 312069 - DNA, 75 bp, synthetic construct
  source 1..75: mol_type = other DNA
atggacgttgagtacggtcagtacagcgttgttctgttggtggaagggttcccgccgtcacatgccgggaccatc

SEQ ID NO: 312070 - DNA, 75 bp, synthetic construct
  source 1..75: mol_type = other DNA
agcattaccggggacattgggttttggagcactgacttcgacgattaaatattttagtgccagtgatggtcagtc

SEQ ID NO: 312071 - DNA, 75 bp, synthetic construct
  source 1..75: mol_type = other DNA
gccacgaaagcttcagaggcggcaacctcagcccgcgatgcggaggcctcaaaagacgcggcaaaatcatcagaa

SEQ ID NO: 312072 - DNA, 75 bp, synthetic construct
  source 1..75: mol_type = other DNA
gccacgaaggcttcagaggcggcgacctcagcccgggatgcggaggcctcaaaagacgcggcaaaatcatcagaa

SEQ ID NO: 312073 - DNA, 75 bp, synthetic construct
  source 1..75: mol_type = other DNA
gccacgaacgcttcagaggcggcaacctcagcccgagatgcggaggcctcaaaagacgcggcaaaatcatcagaa

SEQ ID NO: 312074 - DNA, 75 bp, synthetic construct
  source 1..75: mol_type = other DNA
gccacgaaagcttcagaggcggccacctcagcccgagatgcggaggcctcaaaagacgcggcaaaatcatcagaa

SEQ ID NO: 312075 - DNA, 75 bp, synthetic construct
  source 1..75: mol_type = other DNA
cccgcgtacatatggaaataatgtctcaagcgggcaaataatgagccgagtcaaatcgtggttatgtacaactaa

SEQ ID NO: 312076 - DNA, 75 bp, synthetic construct
  source 1..75: mol_type = other DNA
taacgtagccggtaaaatgagcagcggtggagccgccaatggcagttaccacagcaacgggctgggcggtcacat

SEQ ID NO: 312077 - DNA, 75 bp, synthetic construct
  source 1..75: mol_type = other DNA
cagttaaactcgaaggggcgatccggattaccgatagcgcgacattaactatcggcaatggcgttgatacgacgc

SEQ ID NO: 312078 - DNA, 75 bp, synthetic construct
  source 1..75: mol_type = other DNA
gagtacattgcccggcaggcacactatgcaaaagatgacactgaccctgtttttcactacatcctttcctggcag

SEQ ID NO: 312079 - DNA, 75 bp, synthetic construct
  source 1..75: mol_type = other DNA
tgtatgcagaactcccgttatacatttcattatactggctttccccctggcgatatcgatgaatttccaggagtg

SEQ ID NO: 312080 - DNA, 75 bp, synthetic construct
  source 1..75: mol_type = other DNA
aatggctggttgcggtaaataaaccctccggctggctggttcaccgcagctggctggatcgcgacgagaaagtag

SEQ ID NO: 312081 - DNA, 75 bp, synthetic construct
  source 1..75: mol_type = other DNA
gaataacaactgtgttcacaacgttgttgttcagtacggctacgttctccagcatgccggattatccggcatcag

SEQ ID NO: 312082 - DNA, 75 bp, synthetic construct
  source 1..75: mol_type = other DNA
cacgggtttgttcagcctgtttttgcgaactcatcgacacttgcttattctggcaggattggaaaaataccatat

SEQ ID NO: 312083 - DNA, 75 bp, synthetic construct
  source 1..75: mol_type = other DNA
gctgaccacgatacagaacgacaggagccgcatccagacgatttatcagccggggagcttcacaccactcatcag

SEQ ID NO: 312084 - DNA, 75 bp, synthetic construct
  source 1..75: mol_type = other DNA
ctattgagtcaatacacgcctgcctaccaactggtaaagctattgtttacaatccctacatgaacaaaaaagatc

SEQ ID NO: 312085 - DNA, 75 bp, synthetic construct
  source 1..75: mol_type = other DNA
tgctccgcatttttgcgcttcgcctgaaagagttagatgagctgtacgagaagtacatgaagggtcggattcgat

SEQ ID NO: 312086 - DNA, 75 bp, synthetic construct
  source 1..75: mol_type = other DNA
catcagggggctggagttgtgctggagtcttccataaatggtcaggaagcaacagtagatattttatctggtagc

SEQ ID NO: 312087 - DNA, 75 bp, synthetic construct
  source 1..75: mol_type = other DNA
ccatgactacgccaaagtgatggacaaagagcagcttatcgatcgcaaagcggttgccacagtcatcagcaacgt

SEQ ID NO: 312088 - DNA, 75 bp, synthetic construct
  source 1..75: mol_type = other DNA
taccgttatataaattatgtcagttttctaaagaagaactttcgaataccacggaattactttgtaatactcaat

SEQ ID NO: 312089 - DNA, 75 bp, synthetic construct
  source 1..75: mol_type = other DNA
cagaaatgaattgtatattcatttttttaggttggtgagcgagttatcacctgtttgtttcttggcagagaatgt

SEQ ID NO: 312090 - DNA, 75 bp, synthetic construct
  source 1..75: mol_type = other DNA
tcagggttgggcggcagatatcacagaggtagaaaccaccacaggtgaaaagaaaaataccaatgttgatcctac

SEQ ID NO: 312091 - DNA, 75 bp, synthetic construct
  source 1..75: mol_type = other DNA
acggtcatcacgttatcacatccaccagcaggacgtgtgaccatctaatgatcgaccttgaaaccatgggaaaaa

SEQ ID NO: 312092 - DNA, 75 bp, synthetic construct
  source 1..75: mol_type = other DNA
caggaaccggaaaaagtctgcaccgcctgcggtcagaccggcggcggcaactgccctgattgtggcgcggtgatg

SEQ ID NO: 312093 - DNA, 75 bp, synthetic construct
  source 1..75: mol_type = other DNA
aactgacgcagattcagcgcaaattcaataacaacgggaagctggagcttatgactaaggtcgaaatgaagcaga

SEQ ID NO: 312094 - DNA, 75 bp, synthetic construct
  source 1..75: mol_type = other DNA
acagaagagcttcttgcacggtttatggagaaactttctcctctccacgagcaggcccggcgtctgggtattgac

SEQ ID NO: 312095 - DNA, 75 bp, synthetic construct
  source 1..75: mol_type = other DNA
gaaaaattcccatttcaactaagacaagatttcgcatcaagaataacagaagatgaaagtgatttttttaaatga

SEQ ID NO: 312096 - DNA, 75 bp, synthetic construct
  source 1..75: mol_type = other DNA
gaagtagaatttgaggtggttgttacggcagattatcgattctcagattatgaccgttcaccttgggaccctgaa

SEQ ID NO: 312097 - DNA, 75 bp, synthetic construct
  source 1..75: mol_type = other DNA
ctgacaggtcactgatgcaactggtcaccgcattatgggcagtactggcactggtatatgtttcactggcgctgt

SEQ ID NO: 312098 - DNA, 75 bp, synthetic construct
  source 1..75: mol_type = other DNA
gtctgaccaatggtggctctgttccgtggaactgggcgtgtaaatctttgggtcttgccccgatgaaactgaaag

SEQ ID NO: 312099 - DNA, 75 bp, synthetic construct
  source 1..75: mol_type = other DNA
ataaaggtgggcttattaacaccaatacagatgaagttgatgccattgaacagttactgaataaacttgaagatt

SEQ ID NO: 312100 - DNA, 75 bp, synthetic construct
  source 1..75: mol_type = other DNA
tgaggctgtagaaagatacgttgcgggcttgtgtgcgcttgttgatgaaaacggtggagtaaagttttttgttaa

SEQ ID NO: 312101 - DNA, 75 bp, synthetic construct
  source 1..75: mol_type = other DNA
ggaccctgtacatctacatctggggtacatgactacccagtaaattttgatgttaaaatagcagattccagtaaa

SEQ ID NO: 312102 - DNA, 75 bp, synthetic construct
  source 1..75: mol_type = other DNA
agacatttggagctttatccagacagcgaagacgttgaagcaaagacagtatttcctgatgtgatcgtgcatcgg

SEQ ID NO: 312103 - DNA, 75 bp, synthetic construct
  source 1..75: mol_type = other DNA
ctgctgattgcgctttatccatccaccccggttaaggatattgctgtcagagtaaaaagaagtttctggggtgta

SEQ ID NO: 312104 - DNA, 75 bp, synthetic construct
  source 1..75: mol_type = other DNA
agatgccgtattgccgtcgaaactgaccaatattctggcggtaggcggtaacgcggtgattaccgcagaagccca

SEQ ID NO: 312105 - DNA, 75 bp, synthetic construct
  source 1..75: mol_type = other DNA
atgacagcacaaattgcagcttacgggcggctggtgggcgacccgctggtaaaacagagcagcaagggcacaccg

SEQ ID NO: 312106 - DNA, 75 bp, synthetic construct
  source 1..75: mol_type = other DNA
gcacccagctactgcaggactatccaccggcagttctcaaatccgccaacaccctctggttgctgcgttaccgcc

SEQ ID NO: 312107 - DNA, 75 bp, synthetic construct
  source 1..75: mol_type = other DNA
gaatgaatatatcaatgacactaaccattacacgaattatcagaatgaaaaagagagttatattgtcacgtttaa

SEQ ID NO: 312108 - DNA, 75 bp, synthetic construct
  source 1..75: mol_type = other DNA
atggtcagctttgtgatggcagtaaaatagatgagcgcggtgcgtattgccgctttgtcagtcagcaaatcacgt

SEQ ID NO: 312109 - DNA, 75 bp, synthetic construct
  source 1..75: mol_type = other DNA
acgtcatgctggcgctgtgctttagccagggagccctggcgaaactggggacaacctataataacgtgtacatct

SEQ ID NO: 312110 - DNA, 75 bp, synthetic construct
  source 1..75: mol_type = other DNA
cggtgagttacgccccggcacacgtatatctgatgaggatgttcgtcttatacgtgcactacgggattccgatta

SEQ ID NO: 312111 - DNA, 75 bp, synthetic construct
  source 1..75: mol_type = other DNA
gagaaagtatcagcttatcatactcatggtgcagatagtcatggagaatattgggacgaaatattttcaggtaaa

SEQ ID NO: 312112 - DNA, 75 bp, synthetic construct
  source 1..75: mol_type = other DNA
agatgaaaccagccacaaagaattaggactggttgctgatggcggctttgtatacctcaacggcattcaggatga

SEQ ID NO: 312113 - DNA, 75 bp, synthetic construct
  source 1..75: mol_type = other DNA
atgaaaattctggtctacggcattaactactcgccagagctaaccggtatcggcaaatacactggcgagatggtg

SEQ ID NO: 312114 - DNA, 75 bp, synthetic construct
  source 1..75: mol_type = other DNA
gttcaagtttaggctatagaaagttaagtgcaaccataattgaagatatgatgacaggaaaagccagtgccccaa

SEQ ID NO: 312115 - DNA, 75 bp, synthetic construct
  source 1..75: mol_type = other DNA
accatccatgcaatagaggaaataaaacagaaaacaaaaaatattgaaataatatatttacctacataccgacgc

SEQ ID NO: 312116 - DNA, 75 bp, synthetic construct
  source 1..75: mol_type = other DNA
ctgggcgacgggcatctcggtctggcggcgaacgtggcggatgaagcccaggtgagtgccgcaatggaacaggtg

SEQ ID NO: 312117 - DNA, 75 bp, synthetic construct
  source 1..75: mol_type = other DNA
agggttaatttcagggccgatcgcggttggatattttgttgcggctgataaattaagaatggcattacaaggact

SEQ ID NO: 312118 - DNA, 75 bp, synthetic construct
  source 1..75: mol_type = other DNA
agcagaagctgagctttttgcttgcaatctatattggcctttttatgaatggcgcggttttttatcgccgcttcg

SEQ ID NO: 312119 - DNA, 75 bp, synthetic construct
  source 1..75: mol_type = other DNA
atgggtggggtggctcctgtcgaatttattgttagaatggctaacagatttgatgggtatgcttacattgatgat

SEQ ID NO: 312120 - DNA, 75 bp, synthetic construct
  source 1..75: mol_type = other DNA
aacgggaagagggcgcagccacggtgtggcgctgcccgctgtatgtgccagaacagcccagtaccctgaaacgcc

SEQ ID NO: 312121 - DNA, 75 bp, synthetic construct
  source 1..75: mol_type = other DNA
ctaactttgcaacagtgccattttaagcgttatgctaagcccaggaagccgcaggatcttttgaaccacaactgc

SEQ ID NO: 312122 - DNA, 75 bp, synthetic construct
  source 1..75: mol_type = other DNA
tcaccggatggtggaattaacgaaaacaacaactggtgtcacatcccgcagacaaaagaggcagcggctaactaa

SEQ ID NO: 312123 - DNA, 75 bp, synthetic construct
  source 1..75: mol_type = other DNA
cgtgtactgcagcaatggctgggtggaaatcgacaacaacatcgcagagaacgccttacggggtgtggccgtggg

SEQ ID NO: 312124 - DNA, 75 bp, synthetic construct
  source 1..75: mol_type = other DNA
gggtcagcagtatgatgaggagtccggcctgtattacaaccgccaccgctattatgacccgctgcaggggcgata

SEQ ID NO: 312125 - DNA, 75 bp, synthetic construct
  source 1..75: mol_type = other DNA
gatcagtcaaaggcggaaggagtgatgaagctggacagcgcgcccggagacatggtggctacggggattggcgtc

SEQ ID NO: 312126 - DNA, 75 bp, synthetic construct
  source 1..75: mol_type = other DNA
tatagtataaatttcaaaataattggagattttgtagctgatggtaatagtgagcaaaaaatagaatcgaaaggt

SEQ ID NO: 312127 - DNA, 75 bp, synthetic construct
  source 1..75: mol_type = other DNA
cagcgattgcggcaactggcgcaacaaaccggctcgctgaagtcatcaaccgaacagaaagttattaccacaacg

SEQ ID NO: 312128 - DNA, 75 bp, synthetic construct
  source 1..75: mol_type = other DNA
gtcctgacgccgccgtcagtacctcatgcgtttattacggagtctgacgccgacggtcatgtgttgacggtacgg

SEQ ID NO: 312129 - DNA, 75 bp, synthetic construct
  source 1..75: mol_type = other DNA
ggtatcaacaacggcgataaagtcaggatctttaacgatcgtggtgaggttcatattgaggcgaaagtgacgcca

SEQ ID NO: 312130 - DNA, 75 bp, synthetic construct
  source 1..75: mol_type = other DNA
gcgcgaaaaatccacctgtaccactgcgaccatcgcggcctgccgctggcccttatcagtaaggaaggggcaaca

SEQ ID NO: 312131 - DNA, 75 bp, synthetic construct
  source 1..75: mol_type = other DNA
acctgatgccaacagagcaagaagaccttatctctcatgaatctgcagggaatatgggctatgtgatcctcgccc

SEQ ID NO: 312132 - DNA, 75 bp, synthetic construct
  source 1..75: mol_type = other DNA
gcaaatcaccaccatcgcctgctcagtgatcacgcctgatgtcaatgtgccgctggggcagcatcaaaaagcgga

SEQ ID NO: 312133 - DNA, 75 bp, synthetic construct
  source 1..75: mol_type = other DNA
tatataaaacatgcgttgagatggcggatagaataagtgatcgaagacttaagtcaaatacatttttattagcct

SEQ ID NO: 312134 - DNA, 75 bp, synthetic construct
  source 1..75: mol_type = other DNA
actaagagaggcgagtattacgtttctcgtgacaaatcagggcacgtgtcgctactgattacaccgaaatattaa

SEQ ID NO: 312135 - DNA, 75 bp, synthetic construct
  source 1..75: mol_type = other DNA
gcaagcggacgttattcctgtttatgctgccgcgcctgcgtcggttgtgccggataatgcatcagagcctcttgc

SEQ ID NO: 312136 - DNA, 75 bp, synthetic construct
  source 1..75: mol_type = other DNA
cagaaagcgattgagtcaattaagcaggctgattcggctgttaagttggcacacgagaagttttcatcgctggcg

SEQ ID NO: 312137 - DNA, 75 bp, synthetic construct
  source 1..75: mol_type = other DNA
ggatggactcctgaacatgacaacgcatatcaaaatagcgaattagcagatgcagcggcttgttacgcaattcat

SEQ ID NO: 312138 - DNA, 75 bp, synthetic construct
  source 1..75: mol_type = other DNA
acgtttggcgatgaactgtcgacccggctggcctggcgtttacatggtgcaagcatctgccaggtgacttcgtga

SEQ ID NO: 312139 - DNA, 75 bp, synthetic construct
  source 1..75: mol_type = other DNA
cgcagcggctatatcgacgtgtcgattgtgccggaagagctgggatttgcggtgaacgtcggcgaactgctgatg

SEQ ID NO: 312140 - DNA, 75 bp, synthetic construct
  source 1..75: mol_type = other DNA
gttatcaggtgccgtttggcgggcgcgagatgccgatgccgtacggctggggaaccggcggcattcagcttaccg

SEQ ID NO: 312141 - DNA, 75 bp, synthetic construct
  source 1..75: mol_type = other DNA
gggcgtggagatgtttgctgagtgtgcatacacacttgaacatcatgatcacgcagtagccttcgccgctgagct

SEQ ID NO: 312142 - DNA, 75 bp, synthetic construct
  source 1..75: mol_type = other DNA
tcgctattggtctggccttaaccctgattcacttaattagtattccggtgactaacacttctgttaacccggcgc

SEQ ID NO: 312143 - DNA, 75 bp, synthetic construct
  source 1..75: mol_type = other DNA
ttcgcgccggcaggttttgcgccgatcgctattggtctggccttaaccctgattcacttaattagtattccggtg

SEQ ID NO: 312144 - DNA, 75 bp, synthetic construct
  source 1..75: mol_type = other DNA
agaaaagcgaagagcaactcattaacgagcgtgaccatgctgagtctgctttagctgatatgtattttgcagcaa

SEQ ID NO: 312145 - DNA, 75 bp, synthetic construct
  source 1..75: mol_type = other DNA
gtgaataccgacatgcagctattgtttccgcagctgtatatttcgctgcagagcttcgcaaaggaggcaaccagt

SEQ ID NO: 312146 - DNA, 75 bp, synthetic construct
  source 1..75: mol_type = other DNA
tctgggcgaacaggctattcttaacaaggagatttatgctcagggcagtgataaagatgatgaggtctttggata

SEQ ID NO: 312147 - DNA, 75 bp, synthetic construct
  source 1..75: mol_type = other DNA
cgagtatctcggttctggtacgttcgatatcaatgtgaatcccgttcttcagaactccgcgactactgacacaac

SEQ ID NO: 312148 - DNA, 75 bp, synthetic construct
  source 1..75: mol_type = other DNA
aacatttatggtgctacgtcggatcgtcattcgtccactgcaacatgccgcacaacggattgaaaaaatcgccag

SEQ ID NO: 312149 - DNA, 75 bp, synthetic construct
  source 1..75: mol_type = other DNA
atgggcttcgccgtatcggatacgttggtttaccatgacagtaatttgcgtcaggttgaaatgcttgactggaaa

SEQ ID NO: 312150 - DNA, 75 bp, synthetic construct
  source 1..75: mol_type = other DNA
taaaataactaatagaaatttcacgggacacagagaaactgacccaaataagccatcacctacaattcttgcaag

SEQ ID NO: 312151 - DNA, 75 bp, synthetic construct
  source 1..75: mol_type = other DNA
agcatttatagtttcaacatggatggcgtcttttcaaaatgatatgtattcagaagataatcctatctcacctta

SEQ ID NO: 312152 - DNA, 75 bp, synthetic construct
  source 1..75: mol_type = other DNA
tgatgcactgtatcttcagcagcagaactacagtctggaggcgctgtcccgtcgtgatgcccgtgaggatccgtt

SEQ ID NO: 312153 - DNA, 75 bp, synthetic construct
  source 1..75: mol_type = other DNA
gtgaagagaaagggtacggattcatcactgccgcgaataatatagattactattttcatgtcagtgatataaaag

SEQ ID NO: 312154 - DNA, 75 bp, synthetic construct
  source 1..75: mol_type = other DNA
atctgactatgagactgataaatgatatcggaatgatgcgtgatgcgatggtgacagctgtaatgcctctgttat

SEQ ID NO: 312155 - DNA, 75 bp, synthetic construct
  source 1..75: mol_type = other DNA
tgtctatacagtagaaaacaatcagttaggtctctacaaactgacggatctacagcaaaaagataaccttgccgc

SEQ ID NO: 312156 - DNA, 75 bp, synthetic construct
  source 1..75: mol_type = other DNA
acagctcttgatgcagccgatatcagcattccaaaagaccttaagctggatggcgtttccttgctgccctggttg

SEQ ID NO: 312157 - DNA, 75 bp, synthetic construct
  source 1..75: mol_type = other DNA
ttttattggcacgctggttgtttcggcatttctcaacagaaaattctaccccacgctgatggccatacccggact

SEQ ID NO: 312158 - DNA, 75 bp, synthetic construct
  source 1..75: mol_type = other DNA
agcaaaaactgcttactgatgttgaaggaacgatccaatctgacgatacgcattgggctcaagatttaagagaga

SEQ ID NO: 312159 - DNA, 75 bp, synthetic construct
  source 1..75: mol_type = other DNA
tgaaaggtgaaacgaatgcgcaaagggaaaaaattcagaagctgatcccagcaattctggcaatccttccgcgcg

SEQ ID NO: 312160 - DNA, 75 bp, synthetic construct
  source 1..75: mol_type = other DNA
tcacctcagtatttttgacactgttgagcgccgtgcattactggcggcgcaggaagcgttgagcacggcaattga

SEQ ID NO: 312161 - DNA, 75 bp, synthetic construct
  source 1..75: mol_type = other DNA
gccgcccgctgatgctctttaacagtgaaggtaaaaccgtctggcgaccggggcagaccagcctgtgggggctgg

SEQ ID NO: 312162 - DNA, 75 bp, synthetic construct
  source 1..75: mol_type = other DNA
cggtggacaataatctgacaccggaacaaacacaggctgggctggataagatagcgaaaggtgatatgccggaca

SEQ ID NO: 312163 - DNA, 75 bp, synthetic construct
  source 1..75: mol_type = other DNA
gcgcagccaccggcgaggtggtgggaatgatagccacacagatgtacggtaagccggtgagtgaactgagtgaga

SEQ ID NO: 312164 - DNA, 75 bp, synthetic construct
  source 1..75: mol_type = other DNA
ggcaaacaatctgctggtcggtgcaaatcatgaaggccatgcggacagtaccacacagtcggcagtgtctgcagg

SEQ ID NO: 312165 - DNA, 75 bp, synthetic construct
  source 1..75: mol_type = other DNA
cgccgccgcctcggatgaacaaagtagaggcataacgcaggttagccaggcgatttctgaaatggataaggtgac

SEQ ID NO: 312166 - DNA, 75 bp, synthetic construct
  source 1..75: mol_type = other DNA
cctgtaagcaaaaaaggtggagacaagggatttagatatgatgtcaattcaagcttcccattgtcattaaaagaa

SEQ ID NO: 312167 - DNA, 75 bp, synthetic construct
  source 1..75: mol_type = other DNA
catgccatggtgaatgccgcactggctgtggcacagggtaagaatgctcttgccggtgccgcaggcgcagccacc

SEQ ID NO: 312168 - DNA, 75 bp, synthetic construct
  source 1..75: mol_type = other DNA
agcccccgcaacattgcgcctcaccggaacccttccggcttgccgctgattttacgattgctttttactgtcagc

SEQ ID NO: 312169 - DNA, 75 bp, synthetic construct
  source 1..75: mol_type = other DNA
agcctgcccgcagacaccggctacccggacccgcgcggggagctggacccggaagccgaccccggcctgctgtat

SEQ ID NO: 312170 - DNA, 75 bp, synthetic construct
  source 1..75: mol_type = other DNA
gagcagacttaccggtatgtgccgaatccactggggtatattgatccgctggggctggcaaaaacttctgttccc

SEQ ID NO: 312171 - DNA, 75 bp, synthetic construct
  source 1..75: mol_type = other DNA
atattcagaagtttgaaaataaatttgcggaacaaaaccatgtgcaatatgcaactactgtaagtaatggaacgg

SEQ ID NO: 312172 - DNA, 75 bp, synthetic construct
  source 1..75: mol_type = other DNA
atgctttatccagacactggaagacgtagcctagtacaatatctgtcaggctccacaggagaaccggatggcaga

SEQ ID NO: 312173 - DNA, 75 bp, synthetic construct
  source 1..75: mol_type = other DNA
acggcgggttttgtggctgtttttgatgcacaggccagcaagtggtcgcagactgaagaccatcgcgggacaact

SEQ ID NO: 312174 - DNA, 75 bp, synthetic construct
  source 1..75: mol_type = other DNA
gattttgcgtttgttgtacccgttgccatttctattcctctgttggattggtgggggacagtatacacagaaaaa

SEQ ID NO: 312175 - DNA, 75 bp, synthetic construct
  source 1..75: mol_type = other DNA
cggtgggcaagacaatgaaggaaaacaccggacaaacagcagtttattctgccggtgagcatcttgaactctgct

SEQ ID NO: 312176 - DNA, 75 bp, synthetic construct
  source 1..75: mol_type = other DNA
tgcaacggttaaagatcagttcgacaatgaggtgaacaatcttccggtaacattcagctcagcctcttcaggact

SEQ ID NO: 312177 - DNA, 75 bp, synthetic construct
  source 1..75: mol_type = other DNA
gcgtaatgcgattcagtcattgcaggcacaaatcgatgaagaaaaaagcaaaatcacagcgccacagggtgacaa

SEQ ID NO: 312178 - DNA, 75 bp, synthetic construct
  source 1..75: mol_type = other DNA
caagcccaggcggaggccgcgagcacgttagtcaatacgctgatgggtcagaagatccagatggaagcagatctg

SEQ ID NO: 312179 - DNA, 75 bp, synthetic construct
  source 1..75: mol_type = other DNA
gtagaagcggctcgtaagctcaaggtgctgtcagtgatcagttcgccacagttgccgcaggaatcgtcttttcca

SEQ ID NO: 312180 - DNA, 75 bp, synthetic construct
  source 1..75: mol_type = other DNA
gtgacggtcagcgtggacagttatggtgtcagtgatacgaggccggtgactttgcttgccgatgcgagtaccgct

SEQ ID NO: 312181 - DNA, 75 bp, synthetic construct
  source 1..75: mol_type = other DNA
tgatctgaaaagtagtaagcaggaagacaacacggttgaagtcacccttgaaaatggcgtgaaacaaacgttaat

SEQ ID NO: 312182 - DNA, 75 bp, synthetic construct
  source 1..75: mol_type = other DNA
cagcataatcgctggtaccccgcagaatagcaccggcagcgtcatcaccgcgacagtcgttgataataatagctt

SEQ ID NO: 312183 - DNA, 75 bp, synthetic construct
  source 1..75: mol_type = other DNA
agctttatcgctgatccatcgactatcgccgccaccaacactgatttaagtaccttaaaggcaacggttgaggat

SEQ ID NO: 312184 - DNA, 75 bp, synthetic construct
  source 1..75: mol_type = other DNA
ggcaaaaattatcgagttgacgcctgtcccagacagcataatcgccggtaccccgcagaacagcaccggcagcgt

SEQ ID NO: 312185 - DNA, 75 bp, synthetic construct
  source 1..75: mol_type = other DNA
aagacaaaataatgagcggtacagtgttagtcaatggtgctaacctaccgacaactacattcccttcgcaggggt

SEQ ID NO: 312186 - DNA, 75 bp, synthetic construct
  source 1..75: mol_type = other DNA
gatggctctgggaagcctgactgggatgatgattccgatttggcttataactgggttttgttatcatcacaggat

SEQ ID NO: 312187 - DNA, 75 bp, synthetic construct
  source 1..75: mol_type = other DNA
gggaaatcatcaccgaagggaaaggttccactgctatttccctcaatggaggggctttttcttctacagatgcat

SEQ ID NO: 312188 - DNA, 75 bp, synthetic construct
  source 1..75: mol_type = other DNA
tggaataaatgtcccctttgaaattgatgggaaagtctatgttccattgggtatgggaatgactacggctgtaac

SEQ ID NO: 312189 - DNA, 75 bp, synthetic construct
  source 1..75: mol_type = other DNA
gatctcatgcgaacttttatacgaaactggccggaggaagccgaaagacatcagatgaaaggcgtagcggggctc

SEQ ID NO: 312190 - DNA, 75 bp, synthetic construct
  source 1..75: mol_type = other DNA
atgagccgctggtcactggcgtgcgggtgatagatggtctgctcacatgcggtgttggtcagcgaatggggatct

SEQ ID NO: 312191 - DNA, 75 bp, synthetic construct
  source 1..75: mol_type = other DNA
ttttggtagtgaatttcttggtggatatataaaagaagcaagtagtaataatcagttctcttctagcgcgaagaa

SEQ ID NO: 312192 - DNA, 75 bp, synthetic construct
  source 1..75: mol_type = other DNA
gggatctgtatttagcgatggtgctaatattaagtcccaatctggaactgctctcggggcatacgcaggtggata

SEQ ID NO: 312193 - DNA, 75 bp, synthetic construct
  source 1..75: mol_type = other DNA
atgatgacacggctatctgcgcactgttgcaggacgtgttaagtgaacatgtctttacggtttcagtctgccata

SEQ ID NO: 312194 - DNA, 75 bp, synthetic construct
  source 1..75: mol_type = other DNA
ttcggccctaccatcctctgcatagggcgtcagtgccagctactggttcagggcgtacacaaacgctttcgccag

SEQ ID NO: 312195 - DNA, 75 bp, synthetic construct
  source 1..75: mol_type = other DNA
cagcatacctgaaaatgtcattaatttatctttatgccattgtagttctttgaaacatatagaaggttcctttcc

SEQ ID NO: 312196 - DNA, 75 bp, synthetic construct
  source 1..75: mol_type = other DNA
gttttacagtaccaaaaacacaggcgggaaccaatcgtgtgattcaccttattaagcccgcaatcgacgctctcc

SEQ ID NO: 312197 - DNA, 75 bp, synthetic construct
  source 1..75: mol_type = other DNA
gcaataaaaactggcgctttcgactatgcaaaacagtttcccgcctcacacaatctggaaaaatttggtgaggcc

SEQ ID NO: 312198 - DNA, 75 bp, synthetic construct
  source 1..75: mol_type = other DNA
aaatcgaactgaacccgcatcagccaatgttgattaaaactctgcgcggtctgggttatgtcttcgctgccgacg

SEQ ID NO: 312199 - DNA, 75 bp, synthetic construct
  source 1..75: mol_type = other DNA
cgcaggcgacactaccaatctgtatattgaggtgaaggataattacggcaacggagtaccccagcaggaggtaac

SEQ ID NO: 312200 - DNA, 75 bp, synthetic construct
  source 1..75: mol_type = other DNA
tattgaggtgaaggataattacggcaacggtgtcccccagcaggaggtaaccctcagcgtttcaccaagtgaagg

SEQ ID NO: 312201 - DNA, 75 bp, synthetic construct
  source 1..75: mol_type = other DNA
ccgctacaaaagccggggtttatcaagtgacggcaaccctcgacaatggcgattcgatgcaacaaacagtgacct

SEQ ID NO: 312202 - DNA, 75 bp, synthetic construct
  source 1..75: mol_type = other DNA
acgagctatggtggggcgcaaacagtagatataacgctggtggcaggcccggcagacgcctcgcagtccgtcctt

SEQ ID NO: 312203 - DNA, 75 bp, synthetic construct
  source 1..75: mol_type = other DNA
atgttagctcgttcagggaaggtaagcatggctacgaaaaagagaagtggagaagaaataaatgaccgacaaatc

SEQ ID NO: 312204 - DNA, 75 bp, synthetic construct
  source 1..75: mol_type = other DNA
gcgtattatcagttgaataatgacatgaagctggttttcaatcaaatatgtattggtcatctagtcccgcaaact

SEQ ID NO: 312205 - DNA, 75 bp, synthetic construct
  source 1..75: mol_type = other DNA
accgcgagcacaaccgagggcgcgaccctgacggcaagcgtcactgacgcttacggcaacccgctagaaggcatc

SEQ ID NO: 312206 - DNA, 75 bp, synthetic construct
  source 1..75: mol_type = other DNA
gcaatctggggtatgaaaatcccgatgattgcatttccccttcaaggctcagcgccatacagattattgaaaaag

SEQ ID NO: 312207 - DNA, 75 bp, synthetic construct
  source 1..75: mol_type = other DNA
catggcctggcttgcccgaccgcattactgccagagggtactggcgttgaaagccttgagcgcttttctctggaa

SEQ ID NO: 312208 - DNA, 75 bp, synthetic construct
  source 1..75: mol_type = other DNA
catgcacaataagatcaatgactcaggataaaatttcgagttcgcctcaaactatttttagcattaaccctaaaa

SEQ ID NO: 312209 - DNA, 75 bp, synthetic construct
  source 1..75: mol_type = other DNA
cagaacagctccggcagcgtcatcaccgccacagtcgttgataataatggctttccggtgaaaggtgtgactgtg

SEQ ID NO: 312210 - DNA, 75 bp, synthetic construct
  source 1..75: mol_type = other DNA
atgaacgcatacctcacttacgaccgcatcgaagatcggcggtgggttgagcagcaactcaccgacgagaaagag

SEQ ID NO: 312211 - DNA, 75 bp, synthetic construct
  source 1..75: mol_type = other DNA
gcatcgaagatcggcgctgggctaaacagcagctcaccgacgagaaagaaaagtggatcgatgaccgggctcggg

SEQ ID NO: 312212 - DNA, 75 bp, synthetic construct
  source 1..75: mol_type = other DNA
gcaagcgtcactgacgctaacggcaacccggtagaaggcataaaagttaatttccgcggaacctccgtcacgcta

SEQ ID NO: 312213 - DNA, 75 bp, synthetic construct
  source 1..75: mol_type = other DNA
cgaaagaaacggtttgaaccgccccgggtttcctggagagtgttttatctgtgaactcaggctgccagatcatcg

SEQ ID NO: 312214 - DNA, 75 bp, synthetic construct
  source 1..75: mol_type = other DNA
aactggtggtgaactttactgcggatacgctcactgcgcaggttaatcttaacgttaccgaggacaatttcatcg

SEQ ID NO: 312215 - DNA, 75 bp, synthetic construct
  source 1..75: mol_type = other DNA
cggagagggtatcgcaacgctgatccctgaaccgccccgggaatcctggagactaaactccctgagaaagaggta

SEQ ID NO: 312216 - DNA, 75 bp, synthetic construct
  source 1..75: mol_type = other DNA
cgaaaaatgaagtggtcgctgacggcaatgacagcgccacaatgaccgcgacagttcgggatgcaaaaggcaacc

SEQ ID NO: 312217 - DNA, 75 bp, synthetic construct
  source 1..75: mol_type = other DNA
gttgaagtcacccttgaaaatggcgtgaaacaaacgttaatcgtcagttttgtcggtgactcgagtaccgcgcag

SEQ ID NO: 312218 - DNA, 75 bp, synthetic construct
  source 1..75: mol_type = other DNA
aacccgtcacattcagtgcggaaccatcctcgcaaatgatcatcagccagaatacggtgtctactaatacgcagg

SEQ ID NO: 312219 - DNA, 75 bp, synthetic construct
  source 1..75: mol_type = other DNA
cgctaagccagaaagattcctcggtatcgttaagtacccaaacattgaacgcggattcccattcaaccgccacac

SEQ ID NO: 312220 - DNA, 75 bp, synthetic construct
  source 1..75: mol_type = other DNA
tcaaggtcaatttccgcggccccgccaccacgctgagtaacaccagcgtcgaaacggatgctcagggtaaggcag

SEQ ID NO: 312221 - DNA, 75 bp, synthetic construct
  source 1..75: mol_type = other DNA
tatcggtgatcaaagtactgcagccctgaccctcagtgtgccttcaggtgatatcaccgtcaccaacacagctcc

SEQ ID NO: 312222 - DNA, 75 bp, synthetic construct
  source 1..75: mol_type = other DNA
gctggcagcctcgaaggatccggtgattgccgacaataacgatctcacgacactaacagcaacagtcgctgatac

SEQ ID NO: 312223 - DNA, 75 bp, synthetic construct
  source 1..75: mol_type = other DNA
aaaggagactttaccgatagtgctgagctacatcttgttttgcacgatatatcaggcaatccgatcaaagtttct

SEQ ID NO: 312224 - DNA, 75 bp, synthetic construct
  source 1..75: mol_type = other DNA
aacggcggctgattatgagttttcaagctctgcctcctgggtcgatgttgatgctaccggtaaagtgacatttaa

SEQ ID NO: 312225 - DNA, 75 bp, synthetic construct
  source 1..75: mol_type = other DNA
agcatgcagaacgtattgcattaacagcgctacagagcgaagagccggttggtattgacctgctggaagagatgg

SEQ ID NO: 312226 - DNA, 75 bp, synthetic construct
  source 1..75: mol_type = other DNA
taaagcgctgtctgatgcagctcttacacgcttagtgctggttgcccgtgcccaggcttcaacgctgaaagaagt

SEQ ID NO: 312227 - DNA, 75 bp, synthetic construct
  source 1..75: mol_type = other DNA
gacaaaggttattatcgtgacgcttgccgaaacgacaccggtacttgaagcggcgaacctacagcaggatttacg

SEQ ID NO: 312228 - DNA, 75 bp, synthetic construct
  source 1..75: mol_type = other DNA
ttctcccgcaccaccggcaggctgaccagcgttcacaccaccgcagcgaatctggatatccgcatcccgtatgcc

SEQ ID NO: 312229 - DNA, 75 bp, synthetic construct
  source 1..75: mol_type = other DNA
caggggcggtatatcactcaggatccgattgggctgaaggggggatggaacctgtatacatatccgctgagcccg

SEQ ID NO: 312230 - DNA, 75 bp, synthetic construct
  source 1..75: mol_type = other DNA
atactctggatttaccgaaacttgcctcgctggtggatgaactcagcctgacaggtaaaggtctggtaatgacga

SEQ ID NO: 312231 - DNA, 75 bp, synthetic construct
  source 1..75: mol_type = other DNA
cgctggcaagtcttcccgctggtctggacgctctccctactgacacattattccttcaaccagtgaatatggtcg

SEQ ID NO: 312232 - DNA, 75 bp, synthetic construct
  source 1..75: mol_type = other DNA
ggagcgcaataccgtgcgcatggcttatattcataaggcagagcacctagaagcccgcaaagcgatgatgcagtg

SEQ ID NO: 312233 - DNA, 75 bp, synthetic construct
  source 1..75: mol_type = other DNA
gtggtcgactatactcctaacgtgacccttgaaaactggactacctcccatagctgcccatattcagacgttagc

SEQ ID NO: 312234 - DNA, 75 bp, synthetic construct
  source 1..75: mol_type = other DNA
ggctcgctgcctgaccttcaggtcagccgtatcgatccgaaggtggagaccgagcgctatcgtcgctttgttctg

SEQ ID NO: 312235 - DNA, 75 bp, synthetic construct
  source 1..75: mol_type = other DNA
cagccgatcctcacggcaacgcctgattcgctggcgctaccgaaactggcctcactggtggatgaactgagccag

SEQ ID NO: 312236 - DNA, 75 bp, synthetic construct
  source 1..75: mol_type = other DNA
agtatgcaaagcgtattgcattaacagcgttacagagcgaagagccggttggtattgacctgctggaagaaatgg

SEQ ID NO: 312237 - DNA, 75 bp, synthetic construct
  source 1..75: mol_type = other DNA
cggcctttactgaagatccgggggctgatgggtacatttttccccctctcagagaacggttccttcatgcccgtc

SEQ ID NO: 312238 - DNA, 75 bp, synthetic construct
  source 1..75: mol_type = other DNA
gttctacagcaacaccatggctgacaacattgcctatcgcgaacagatcgctgccgagccgcgtaaccgtgggaa

SEQ ID NO: 312239 - DNA, 75 bp, synthetic construct
  source 1..75: mol_type = other DNA
gggtctactggtatggggacctatccgtttgatggacgtcgctcaaaagcgtgcagaccgcatggctggggtgga

SEQ ID NO: 312240 - DNA, 75 bp, synthetic construct
  source 1..75: mol_type = other DNA
cgtctgatggatgtagcgcaaaagcgtgccgatcgcatggctggggtggatatgcctagttatggcggggtgttg

SEQ ID NO: 312241 - DNA, 75 bp, synthetic construct
  source 1..75: mol_type = other DNA
ttaaccccagaaggtgcctatcacggcgaatattaccagaatggcaaaaaattcgtagctaatgcagatgttcca

SEQ ID NO: 312242 - DNA, 75 bp, synthetic construct
  source 1..75: mol_type = other DNA
gaaaagacaacacacagaccttgttctgtcagagcggtaaaatcccggttatgtccaccggaaaaaacagcgtcc

SEQ ID NO: 312243 - DNA, 75 bp, synthetic construct
  source 1..75: mol_type = other DNA
gtgagtttgcccagtggaagccagagtgttatgcaattgatcgcaaatgtccaagagcgccgatgattaactcat

SEQ ID NO: 312244 - DNA, 75 bp, synthetic construct
  source 1..75: mol_type = other DNA
gtaagggggttactaaacatccagatggatatgtttattacggtgatacaccagattttatcaaagggaaaattt

SEQ ID NO: 312245 - DNA, 75 bp, synthetic construct
  source 1..75: mol_type = other DNA
ttccagatacatcatcgtgttgcagttgaatatggcggcagcgtatacgatattgataatttacgaattgttacc

SEQ ID NO: 312246 - DNA, 75 bp, synthetic construct
  source 1..75: mol_type = other DNA
tgtttgctgctgccagacaagaacgttcgccctttattatcaacattgccgaagtacattttaaatatatctcgc

SEQ ID NO: 312247 - DNA, 75 bp, synthetic construct
  source 1..75: mol_type = other DNA
gaactggcagggacggttctggcaaccttcttctttttacgcttaatttcactctttggcagaacggcctggaaa

SEQ ID NO: 312248 - DNA, 75 bp, synthetic construct
  source 1..75: mol_type = other DNA
gaacgtgacttcttcgaatttctggatatggtgtcagggcagacagagcttatcgctcatgtctatcccgagatt

SEQ ID NO: 312249 - DNA, 75 bp, synthetic construct
  source 1..75: mol_type = other DNA
gtaagagtaatacgctttcaaacctcagcggttaccattcccgtggagtggtggaaggttacagcgccggtctgt

SEQ ID NO: 312250 - DNA, 75 bp, synthetic construct
  source 1..75: mol_type = other DNA
tgcctgagtttggtgaggcaattcgcccttacgtttatagttacgtaacagcaaacaaaaatgccaatgccaagc

SEQ ID NO: 312251 - DNA, 75 bp, synthetic construct
  source 1..75: mol_type = other DNA
ccaatcggggttgaaggtgcagatggtgagccgctgaacggtggtgggatagctaaaggcggtaaatctaaagat

SEQ ID NO: 312252 - DNA, 75 bp, synthetic construct
  source 1..75: mol_type = other DNA
tatattgctgaaattatcaaacagaccagcccggacggtgcgggacgtgtggccgcccatgccgtggtgaatgcc

SEQ ID NO: 312253 - DNA, 75 bp, synthetic construct
  source 1..75: mol_type = other DNA
aatttagcagcgctggcaataaacgaggcttttcggattctttataaggattcagacgagttattctcatacgcc

SEQ ID NO: 312254 - DNA, 75 bp, synthetic construct
  source 1..75: mol_type = other DNA
cattcctggggggatgagtcgggccggtttttatgaagatgcatttgatgagcgccttctaaggcttattcaaaa

SEQ ID NO: 312255 - DNA, 75 bp, synthetic construct
  source 1..75: mol_type = other DNA
cacaacttaatcttggccataacgttaatgcctcccgggaacttcggggggaaggtgcagagctgcgtacaaacg

SEQ ID NO: 312256 - DNA, 75 bp, synthetic construct
  source 1..75: mol_type = other DNA
ctcacttgttggcgtccattgatggccagtcggcggttatttcatcggcaaaatggggggagctagaaacggctc

SEQ ID NO: 312257 - DNA, 75 bp, synthetic construct
  source 1..75: mol_type = other DNA
tagacgccatcgccgccgtggaagtcggatccgctggaatgcacaaagatgtaccacgggaagacgtgaccatca

SEQ ID NO: 312258 - DNA, 75 bp, synthetic construct
  source 1..75: mol_type = other DNA
atgaaaaaattaaaattattaaataaatacagctacttacatagcataaacggctctctgattgaagcagaactt

SEQ ID NO: 312259 - DNA, 75 bp, synthetic construct
  source 1..75: mol_type = other DNA
agactactcctctgtcgatcgccggaatgcagcactgctggccaccaccgtggcggagttttttcgcgatcaggg

SEQ ID NO: 312260 - DNA, 75 bp, synthetic construct
  source 1..75: mol_type = other DNA
tctcaaccggaagcccaaatagtaattcaaacataaagtactctatagacatagctaacttaagattattaaacg

SEQ ID NO: 312261 - DNA, 75 bp, synthetic construct
  source 1..75: mol_type = other DNA
tggttttctacatcaaaagacggcatcccagatttatatttagtatctccgttaagatacacggactttgataac

SEQ ID NO: 312262 - DNA, 75 bp, synthetic construct
  source 1..75: mol_type = other DNA
gccagaacgcagcgccgcagcctggcggatgcgcttcagcagtccggcggcgaagacggtggcagtgtggtgttc

SEQ ID NO: 312263 - DNA, 75 bp, synthetic construct
  source 1..75: mol_type = other DNA
tgcgccgggaatgctgttgcatgctcctgatgggattggcatggttagtgcacgggcgttacgaattgcttcggg

SEQ ID NO: 312264 - DNA, 75 bp, synthetic construct
  source 1..75: mol_type = other DNA
ggcgggtgcgaaacaagcgctgaacattattttgcaggagatggatcgcacgctggcgcaactgggatgcacttc

SEQ ID NO: 312265 - DNA, 75 bp, synthetic construct
  source 1..75: mol_type = other DNA
cgcgacgcatcgccctgctggcgccgcgcgtggatgagtcatggctacgcgacgtggagggcgggcagacgcgcg

SEQ ID NO: 312266 - DNA, 75 bp, synthetic construct
  source 1..75: mol_type = other DNA
ggccacgtacgtaactacaccatcggtgacgtgatcgcccgctaccagcgtatgctgggcaaaaaacgtcctgca

SEQ ID NO: 312267 - DNA, 75 bp, synthetic construct
  source 1..75: mol_type = other DNA
tgaccacgatacagaacgacaggagccgcatccagacgatttatcagccggggagcttcacaccactcatcagag

SEQ ID NO: 312268 - DNA, 75 bp, synthetic construct
  source 1..75: mol_type = other DNA
aaagttgattttcaatttggttcagtatttctttggctttcgagattgttatatatagcatggttaattttatta

SEQ ID NO: 312269 - DNA, 75 bp, synthetic construct
  source 1..75: mol_type = other DNA
ccaagcagcgccacatcttcactttccgccagctggaaaccgggcgccttcgccagatccccattgagcacggct

SEQ ID NO: 312270 - DNA, 75 bp, synthetic construct
  source 1..75: mol_type = other DNA
aattaatgcaaatttgttaaattcaattggcaggtcagatttatatcttaaaattgacttaattaaactacctct

SEQ ID NO: 312271 - DNA, 75 bp, synthetic construct
  source 1..75: mol_type = other DNA
ttttgttgtggtttcagaacggtgagattcggggcccgcgcgttagcgtgggaggtgctcctgttcttggtactg

SEQ ID NO: 312272 - DNA, 75 bp, synthetic construct
  source 1..75: mol_type = other DNA
gtgcagagaaaatcggccagttttctctgcctgcagtccgcatgccgtatcgggccttgggttctaacctgttgc

SEQ ID NO: 312273 - DNA, 75 bp, synthetic construct
  source 1..75: mol_type = other DNA
taaaaaagtgttcaactgccctccttatatttacagaacgagagattactgggacctgtcctgtctgtgtcctcc

SEQ ID NO: 312274 - DNA, 75 bp, synthetic construct
  source 1..75: mol_type = other DNA
attcgttgctaatctagttggtgtgatttcagacaactcatacgctattcttatcggtaagttattttctagtaa

SEQ ID NO: 312275 - DNA, 75 bp, synthetic construct
  source 1..75: mol_type = other DNA
atctatcaaaccatactatattcaataattgtgaccgttctaatgtttttcattgccaaatggattccaaaacta

SEQ ID NO: 312276 - DNA, 75 bp, synthetic construct
  source 1..75: mol_type = other DNA
aagggggctggtttccactcaaggatggttctctttgttctacttattcagcaccctgtgaagaatctgaaacac

SEQ ID NO: 312277 - DNA, 75 bp, synthetic construct
  source 1..75: mol_type = other DNA
attggacctaacgacgagcgggaagtaacaaggacgttaggttatgacaattcaatgattatgcttactgctaag

SEQ ID NO: 312278 - DNA, 75 bp, synthetic construct
  source 1..75: mol_type = other DNA
caaccacacagcagcaaggagaaagattctgtatttcagagcattacgccgacgttaagtatggtaggcgagcgt

SEQ ID NO: 312279 - DNA, 75 bp, synthetic construct
  source 1..75: mol_type = other DNA
aagtgaaggcattaattactcggaaatatgcggctttaaatcaatggatgtaactcaggtaaacccctttaattt

SEQ ID NO: 312280 - DNA, 75 bp, synthetic construct
  source 1..75: mol_type = other DNA
agctaccggcgttccggtttatattcagcatgatatcagcgcatggacgatggcagaggccttgtttggtgcctc

SEQ ID NO: 312281 - DNA, 75 bp, synthetic construct
  source 1..75: mol_type = other DNA
atggatgcaaaaactttgaatatttcttacccatagagagaagtggcattaactatatacccaaaacaaaagaat

SEQ ID NO: 312282 - DNA, 75 bp, synthetic construct
  source 1..75: mol_type = other DNA
gacgaaaaggggcgaaactggacgaaatcgatctcaatggcaaatgagcgctttatagaagtgctgatgattgtt

SEQ ID NO: 312283 - DNA, 75 bp, synthetic construct
  source 1..75: mol_type = other DNA
aaagcagcggctgctgcactcgcaaaatctgatcctgatcgttacggcaatatcatcaagcagcagggggggggc

SEQ ID NO: 312284 - DNA, 75 bp, synthetic construct
  source 1..75: mol_type = other DNA
ggcgacacggtgattattttcgatccgaagggtgatgccgacctgctgcgtcgcgtgtgggcggaggcgcaccgc

SEQ ID NO: 312285 - DNA, 75 bp, synthetic construct
  source 1..75: mol_type = other DNA
gctgatgctggtcagtctaatcgctcacccggttccgctgctcgcatgggccatactgattgttggtcgtgtgct

SEQ ID NO: 312286 - DNA, 75 bp, synthetic construct
  source 1..75: mol_type = other DNA
aatatacaacaaagtttgaattattcaatttatagcagcacaaccaaaggccaaaaaaaaataataaccaagagc

SEQ ID NO: 312287 - DNA, 75 bp, synthetic construct
  source 1..75: mol_type = other DNA
aatatacaacaaagtttgaattattcaatttatagcagcacaaccaaaggccaaaaaaaaaataataaccaagag

SEQ ID NO: 312288 - DNA, 75 bp, synthetic construct
  source 1..75: mol_type = other DNA
accagccgtaccgtttgccggggcagcagtatgatgaggagtcgggactgtattacaaccgtcaccggtactacg

SEQ ID NO: 312289 - DNA, 75 bp, synthetic construct
  source 1..75: mol_type = other DNA
atgagaactcaggccataaaaaagtatttagcaatatcttttttcctcacaatactcactgtaatttcatacata

SEQ ID NO: 312290 - DNA, 75 bp, synthetic construct
  source 1..75: mol_type = other DNA
gcagccgatgggataaggcccgtctgcgttttctccagcagcacccactgtgtgtgatgtgcgagcagcaggggc

SEQ ID NO: 312291 - DNA, 75 bp, synthetic construct
  source 1..75: mol_type = other DNA
ctctcaagttacgccataccgtatcacttacaaaaatacgaaaagtagaaaggtacgttctatacctatctcaaa

SEQ ID NO: 312292 - DNA, 75 bp, synthetic construct
  source 1..75: mol_type = other DNA
caacatgcgcagtcggcgaggaaaaatctgacttccggtaatccagataaaaaatacagtcatcagataaaactt

SEQ ID NO: 312293 - DNA, 75 bp, synthetic construct
  source 1..75: mol_type = other DNA
gcctgagcagcgcgtgaaatgtcagttgctggctaaagtccaatctatctgtcctccttgcgtgaccatcattaa

SEQ ID NO: 312294 - DNA, 75 bp, synthetic construct
  source 1..75: mol_type = other DNA
ctcatcagacatggagagagatgcgatcgttctcaaaacaaatgtctgtcaggccacgaagggatcactgtaaac

SEQ ID NO: 312295 - DNA, 75 bp, synthetic construct
  source 1..75: mol_type = other DNA
aatgataccacgattaaaggcgggcgcttaatcgttgaaaaagatggggggggccgtctttgtcgctatcgaaaa

SEQ ID NO: 312296 - DNA, 75 bp, synthetic construct
  source 1..75: mol_type = other DNA
cgaaaatggataccttatttgatggcgcaggtttatctttggtttcagggtattaccggcaattatcttcgtcac

SEQ ID NO: 312297 - DNA, 75 bp, synthetic construct
  source 1..75: mol_type = other DNA
tgcaagccgccagagaagcgacgcgtcccgttgcagccacgacctatgcgcgattgctgctggaacgtcagggcg

SEQ ID NO: 312298 - DNA, 75 bp, synthetic construct
  source 1..75: mol_type = other DNA
tattcagaagaaatcaaaactcttttacaatatttatccgaatctaatagcccgcacgttctcatcatcactaag

SEQ ID NO: 312299 - DNA, 75 bp, synthetic construct
  source 1..75: mol_type = other DNA
atataaaaatgactatgatctatgctcactttgcgccaacgcatcttgaagatgtaataacaaaaaatcctttat

SEQ ID NO: 312300 - DNA, 75 bp, synthetic construct
  source 1..75: mol_type = other DNA
tgaagttgtcaaaatgctggggatgtatatcccttatctatgtgcctttgcttttttatcccttctttttttggc

SEQ ID NO: 312301 - DNA, 75 bp, synthetic construct
  source 1..75: mol_type = other DNA
tctgccctgcggctaaaacagggattacgcatcctgcgcttccgccgtcgcgtgcgtcatctgccactctggaca

SEQ ID NO: 312302 - DNA, 75 bp, synthetic construct
  source 1..75: mol_type = other DNA
cggaatgggctgcataaaatgcccaatacacaaggtaagtgtcgagtatgggggagctcctatacgttttccccc

SEQ ID NO: 312303 - DNA, 69 bp, synthetic construct
  source 1..69: mol_type = other DNA
atgcattgcccattctgtttcgccgtggacactaaggtaattgactctcgtctcgtgggcgagggttca

SEQ ID NO: 312304 - DNA, 75 bp, synthetic construct
  source 1..75: mol_type = other DNA
aatgcttggtgggtagcctcttctaactgtccgggtgatgcgaaaggcaatgatgccagcaacccatggcgggta

SEQ ID NO: 312305 - DNA, 75 bp, synthetic construct
  source 1..75: mol_type = other DNA
tgcatcgccggactatagcggaggcgacggtaccgcacgttcagactatatgggaatatacgccagttacatggc

SEQ ID NO: 312306 - DNA, 75 bp, synthetic construct
  source 1..75: mol_type = other DNA
ctgcccgcattgcgttaccagcggcgttaaaaaaccgcgtcattgcgctgagggggagcgactacgccagaacta

SEQ ID NO: 312307 - DNA, 75 bp, synthetic construct
  source 1..75: mol_type = other DNA
actgggaaattatgcgcgtctcggttaaaccttatccttgctgtcattttgctcatgctactgtcgattgcgctc

SEQ ID NO: 312308 - DNA, 75 bp, synthetic construct
  source 1..75: mol_type = other DNA
gggacaccactttcacatcattatcccagacaaaacagtaatctgcagaaaaacattcgcgacaaccacctgctt

SEQ ID NO: 312309 - DNA, 75 bp, synthetic construct
  source 1..75: mol_type = other DNA
tcgtaacccatcaattacatggcctgcccgttttgaagcgcaaggggccattcgggtcaggaattacgaagacat

SEQ ID NO: 312310 - DNA, 75 bp, synthetic construct
  source 1..75: mol_type = other DNA
accatcagcaagctgttccagattgacgttctgttgttgccaaatatcactctgaccagcctgctggaggttggg

SEQ ID NO: 312311 - DNA, 75 bp, synthetic construct
  source 1..75: mol_type = other DNA
agaacgtaaacattgcagttcataacatgaaaaacaaagctggcgctgctgaaattaagcaggtccatatgaaca

SEQ ID NO: 312312 - DNA, 75 bp, synthetic construct
  source 1..75: mol_type = other DNA
aactgtttatcctggaatcctgtttccagaatccatcgatcacctggcctgcacggtttgaagcgcagggtgcta

SEQ ID NO: 312313 - DNA, 75 bp, synthetic construct
  source 1..75: mol_type = other DNA
gttccttctgatttagtgtctggtggcaccattgaggctttcaaaactcgtctgaaagaaattatgtcccgttat

SEQ ID NO: 312314 - DNA, 75 bp, synthetic construct
  source 1..75: mol_type = other DNA
atttctattaaccccgattacagacaagcctggaaagtggtgcataaattgtcagatattctactgttgactatt

SEQ ID NO: 312315 - DNA, 75 bp, synthetic construct
  source 1..75: mol_type = other DNA
aattatgccaatacaaaatcaacaatcatcatcacctttattacggctcttattgcttttgtcggtgcgcatgca

SEQ ID NO: 312316 - DNA, 75 bp, synthetic construct
  source 1..75: mol_type = other DNA
tattattaatgtaggaaccttcaatgaggaaaacgcggcaggtggcagtgccatggtatccgaaacggcaccatt

SEQ ID NO: 312317 - DNA, 75 bp, synthetic construct
  source 1..75: mol_type = other DNA
aactggtggcgggcgtcatttatcgcgttaaacaactggatatctcaggacaccgtaaatacaattggtgggcat

SEQ ID NO: 312318 - DNA, 75 bp, synthetic construct
  source 1..75: mol_type = other DNA
cttaatgaagctaaagatttagtcttaaaaaatagttggattaagtatataaaagcatatgaggatgggctaagt

SEQ ID NO: 312319 - DNA, 75 bp, synthetic construct
  source 1..75: mol_type = other DNA
atgctcttaacgaagtacttaataacataacaattgatgattatgaaactattctagttggtaaaggtgcccttg

SEQ ID NO: 312320 - DNA, 75 bp, synthetic construct
  source 1..75: mol_type = other DNA
actatttcttcatggagccgggaatgctgaagctgagatcgtcagtcgagctacatatagtttaatatttaggcc

SEQ ID NO: 312321 - DNA, 75 bp, synthetic construct
  source 1..75: mol_type = other DNA
tccggcccgcaaatgctggccgtgatcgaaaaattggaagacgccatcaacttccacgatttcaaaacccgcgcc

SEQ ID NO: 312322 - DNA, 75 bp, synthetic construct
  source 1..75: mol_type = other DNA
cgaactttttcctgctctgaaagaacaaatcgacgccagccagagcccacagcacaaggtcctcaaacaggtttt

SEQ ID NO: 312323 - DNA, 75 bp, synthetic construct
  source 1..75: mol_type = other DNA
taatatcggcgtctgggttgataacggccgctttgaaaatacaggaagccgtattgcggtcaatggtgttgcttt

SEQ ID NO: 312324 - DNA, 75 bp, synthetic construct
  source 1..75: mol_type = other DNA
gtacaacttattgaactgcatgttatcaaaagcaacttctattaccgctaccatgatgatggcagcgatgtgacg

SEQ ID NO: 312325 - DNA, 75 bp, synthetic construct
  source 1..75: mol_type = other DNA
gctgccagcacctaagcaagcagaggtattcgctacaataaacttcaaccaacaaaaagttgacaaaagccttgc

SEQ ID NO: 312326 - DNA, 75 bp, synthetic construct
  source 1..75: mol_type = other DNA
cgcgccatcaccgccttcatggccgatcgcgttaatccacgtctggataaacgcgaaagcgtgatggacccggca

SEQ ID NO: 312327 - DNA, 75 bp, synthetic construct
  source 1..75: mol_type = other DNA
agtatgataaggctgatgtaaaaagaaatcaggaagcagctactctgaagctaaaatcctatgactggaattttg

SEQ ID NO: 312328 - DNA, 75 bp, synthetic construct
  source 1..75: mol_type = other DNA
gtggcgcgtattgatacggtaaaacagcagtggcgcgacgcagtgggtgaactggatgcgctgatcgaatcttct

SEQ ID NO: 312329 - DNA, 75 bp, synthetic construct
  source 1..75: mol_type = other DNA
ggggggaaaccccgcgacatccactgtttgaggcgatcgatcaactgcttgcagaaccattgtcgatccgcgatc

SEQ ID NO: 312330 - DNA, 75 bp, synthetic construct
  source 1..75: mol_type = other DNA
ccacggtactgaacaagctggcggagaagctggccaaagaccagaacggcgctgatattcctgacccggcgctgt

SEQ ID NO: 312331 - DNA, 75 bp, synthetic construct
  source 1..75: mol_type = other DNA
tccatcagatagatggcaatatatgaatttaactgtaagtgatatggttcttcctagtggggatgttattaaata

SEQ ID NO: 312332 - DNA, 75 bp, synthetic construct
  source 1..75: mol_type = other DNA
cgatttgcctttggttatcatgggaataagatccccactttatttgcctatatttccaatatgggctggaaaatc

SEQ ID NO: 312333 - DNA, 75 bp, synthetic construct
  source 1..75: mol_type = other DNA
actttccggcattggctggcatggtaatttatataatcaacttaaaaatagtttttctttatctttgtcaaaatc

SEQ ID NO: 312334 - DNA, 75 bp, synthetic construct
  source 1..75: mol_type = other DNA
acgcaccttaataaaacctccattacttcagattattggcaaattctctttttttcacccgatcattttaataat

SEQ ID NO: 312335 - DNA, 75 bp, synthetic construct
  source 1..75: mol_type = other DNA
gccagtggcttgcgcagtgcgggctgacggtggagcggctggcggcacagatagagccggtttatttgcctgagc

SEQ ID NO: 312336 - DNA, 75 bp, synthetic construct
  source 1..75: mol_type = other DNA
ccccgcccgctgaccgttgaagaactgctggtggtcacctttaccgaggctgccacggcagaattgcgcggtcgt

SEQ ID NO: 312337 - DNA, 75 bp, synthetic construct
  source 1..75: mol_type = other DNA
ttatcagaataatgtggatgaactctattacagccgtgccttgatagccgataataaaatactggttggcaggac

SEQ ID NO: 312338 - DNA, 75 bp, synthetic construct
  source 1..75: mol_type = other DNA
gttagcagaagtaattttaaggataaaaatggatataatattaatctacaacaaaacactcagttaagaccattc

SEQ ID NO: 312339 - DNA, 75 bp, synthetic construct
  source 1..75: mol_type = other DNA
agcgggtcgggaattacgagacgctatctgcatacgttcccgctaaattcagtttgctacgtaattgacggattg

SEQ ID NO: 312340 - DNA, 75 bp, synthetic construct
  source 1..75: mol_type = other DNA
tgtaaacacgaatgatgcttacacctgcccggcaggttcttatacgacgatatcgtgtctgacgaaaagtgataa

SEQ ID NO: 312341 - DNA, 75 bp, synthetic construct
  source 1..75: mol_type = other DNA
aggaaacaaagatattttaatgaagtcaccaactgatggtgtagttgctgcaccttctaaagcaaggtttggtgc

SEQ ID NO: 312342 - DNA, 75 bp, synthetic construct
  source 1..75: mol_type = other DNA
atgcgtaaccataatccgatgccgggaagccgttacaaggacagtcacggggctgtagtgaccgtacagcgcgtc

SEQ ID NO: 312343 - DNA, 75 bp, synthetic construct
  source 1..75: mol_type = other DNA
tgcaaagacaagcgagactgcagcggcgaactcggcgcaagcatcggcagcaagccagacagcagctaaagcaag

SEQ ID NO: 312344 - DNA, 75 bp, synthetic construct
  source 1..75: mol_type = other DNA
gcgtcaccctgctggttgaaggttttccgccttcacatgccggaaccattaccgtctatgaaggttccagaccag

SEQ ID NO: 312345 - DNA, 75 bp, synthetic construct
  source 1..75: mol_type = other DNA
cattactgaaggggctcctggcactcgctccagcgacatggtgacaatacctgtaagaaacaatattcaccgatt

SEQ ID NO: 312346 - DNA, 75 bp, synthetic construct
  source 1..75: mol_type = other DNA
agtgggaagacggcatctaccagattgaggtctccgaccccgtactgggtgggcctgatggaatttctaaccgtc

SEQ ID NO: 312347 - DNA, 75 bp, synthetic construct
  source 1..75: mol_type = other DNA
gcgggacagtgacaaaaacgccaggcgctcagataccggatatgggagcattcgcttctggttcgggatggttca

SEQ ID NO: 312348 - DNA, 75 bp, synthetic construct
  source 1..75: mol_type = other DNA
tatcttgatgactatgggcagcggcgattggtgcatagcttccgacataccatgatttcaacctgtttagctggc

SEQ ID NO: 312349 - DNA, 75 bp, synthetic construct
  source 1..75: mol_type = other DNA
tttcaaaaggatgaatatgctgttcttatatctggcaacggaacaaataaagaatttacaaaagcaatggaattg

SEQ ID NO: 312350 - DNA, 75 bp, synthetic construct
  source 1..75: mol_type = other DNA
aatgtacattcatgggaacctctcgctcggcacattcagataatggaagaatagctactatctatcttgaagtag

SEQ ID NO: 312351 - DNA, 75 bp, synthetic construct
  source 1..75: mol_type = other DNA
gctatcgatttcgattatcactgttgggattgtataataagacatggatatacatcaaataattcaaggaatgtc

SEQ ID NO: 312352 - DNA, 75 bp, synthetic construct
  source 1..75: mol_type = other DNA
gaatcatggatcttaaaaataacactgtcggtattgcttgtggcgatttttctgccaaatgtagcgatgcatgta

SEQ ID NO: 312353 - DNA, 75 bp, synthetic construct
  source 1..75: mol_type = other DNA
atggcgcacgaactacaactcattaagcagtcctcaggaattctgatccccgctacgccggagaccagcgatatt

SEQ ID NO: 312354 - DNA, 75 bp, synthetic construct
  source 1..75: mol_type = other DNA
cgcgctcgatgttctgtggcgctgggtattgtcccgggcattcaaggaccagcgtgaagcggaaaacgccgcatc

SEQ ID NO: 312355 - DNA, 75 bp, synthetic construct
  source 1..75: mol_type = other DNA
gtcttatcgcttccggttttggtcctatcctggcggggattttctgcaccatgacggaatcctggtatccgatcg

SEQ ID NO: 312356 - DNA, 75 bp, synthetic construct
  source 1..75: mol_type = other DNA
cagctaaggcattcatgttggatgagccggaagtctcactacagactcttacagcccacctccgggtcatggctg

SEQ ID NO: 312357 - DNA, 75 bp, synthetic construct
  source 1..75: mol_type = other DNA
tggaacgcagaaccagttattcacgcaaaacgatttaccgaaaaatcgccagaggcgagtttcccgcacaggtac

SEQ ID NO: 312358 - DNA, 75 bp, synthetic construct
  source 1..75: mol_type = other DNA
actttgatgccattcagctgccagacggaacactcaagaagcatcctcgcagcatctcgtttgccaatatggacg

SEQ ID NO: 312359 - DNA, 75 bp, synthetic construct
  source 1..75: mol_type = other DNA
tatcagtctggttctgtggttactcgatactgaacttgagggcaaatttaaagttaatatgaactcggtgatgaa

SEQ ID NO: 312360 - DNA, 75 bp, synthetic construct
  source 1..75: mol_type = other DNA
cggtatatcgctttggcgacctggaaaaaatcgcggtgatcctgtttccgatgaccggaggtgaaaacgacacct

SEQ ID NO: 312361 - DNA, 75 bp, synthetic construct
  source 1..75: mol_type = other DNA
tattacggctggcaaccttccctcaaaaaatatctgcttgccggacttgcggggactctgcttccgttcctgatt

SEQ ID NO: 312362 - DNA, 75 bp, synthetic construct
  source 1..75: mol_type = other DNA
tttatttagagagccaagatgtaataaaaaacacatctttagcattaattattgctatttcgtacatgcagattg

SEQ ID NO: 312363 - DNA, 75 bp, synthetic construct
  source 1..75: mol_type = other DNA
gatggactggatctgatcgttttccaggaactgatagagtttgcggaaaataacagttcactacgtaaattatta

SEQ ID NO: 312364 - DNA, 75 bp, synthetic construct
  source 1..75: mol_type = other DNA
agatcagaagccgaggtaatgaagttctcattaatcgctggaaagaataccatgctttaccggaagaagaaaaac

SEQ ID NO: 312365 - DNA, 75 bp, synthetic construct
  source 1..75: mol_type = other DNA
ggcgaagatgtgtctggactatggtctgatgaatgggcaacttaaaggccgcaacccgattgagcgcatgaagtt

SEQ ID NO: 312366 - DNA, 75 bp, synthetic construct
  source 1..75: mol_type = other DNA
tgctggctgagaaggtccagaccctgaagtcctccagctacaaggacctgtcgtcctcactgaataccgtctctc

SEQ ID NO: 312367 - DNA, 75 bp, synthetic construct
  source 1..75: mol_type = other DNA
tacgtcaattctgaagaatgagcagggggatagaccagcagttttcacacaggagccccaacctgaggtcactat

SEQ ID NO: 312368 - DNA, 75 bp, synthetic construct
  source 1..75: mol_type = other DNA
caatggtctggtgtgtatcgacatcaatgaagacggtgaaggcaaatcagttaagaacaaacattcagtccgact

SEQ ID NO: 312369 - DNA, 75 bp, synthetic construct
  source 1..75: mol_type = other DNA
agatgcgattgagaatatgacatcaggtggactaatttatgccgtatctggtgtacctggattgattgctgcaaa

SEQ ID NO: 312370 - DNA, 75 bp, synthetic construct
  source 1..75: mol_type = other DNA
acctgaaggagctagcagctacgcaggctctgagtctggaccagcagaagggcataaggttagcgcttgaagtcc

SEQ ID NO: 312371 - DNA, 75 bp, synthetic construct
  source 1..75: mol_type = other DNA
agcagttcctgacagacgctagtgatgactactggaatggacttgaggtcgctactctggtcgacgagaagtcca

SEQ ID NO: 312372 - DNA, 75 bp, synthetic construct
  source 1..75: mol_type = other DNA
tggttgatgctttggactacgccgctctgagtagcgctggaatgaatttttatgacagacgttgccaacttgaag

SEQ ID NO: 312373 - DNA, 75 bp, synthetic construct
  source 1..75: mol_type = other DNA
acctgaaggagctagccgctacgcaagccttaagtctggaccagcagaagggcataaggttagcgcttgaagtcc

SEQ ID NO: 312374 - DNA, 75 bp, synthetic construct
  source 1..75: mol_type = other DNA
ctgcatcgacatcaatgaagatggggacggtaagtctgtgaagaacaagcattcagtccgacttgtgccgttgac

SEQ ID NO: 312375 - DNA, 75 bp, synthetic construct
  source 1..75: mol_type = other DNA
ggagcgccagccatctgtagttttttcaagcctagtgtcctcgctgctggctgagaaggtccagaccctgaagtc

SEQ ID NO: 312376 - DNA, 75 bp, synthetic construct
  source 1..75: mol_type = other DNA
tgcgggtatcacggatggagagtttaaagtctctgttatcgatcgtaacggccgcgatcttaccagcgacagaat

SEQ ID NO: 312377 - DNA, 75 bp, synthetic construct
  source 1..75: mol_type = other DNA
cggtgctaaatcacgtcagcgctggtctgttttacgcgtatgacaggatacggaggacggttgtggcgcacgtct

SEQ ID NO: 312378 - DNA, 75 bp, synthetic construct
  source 1..75: mol_type = other DNA
gctggatgcttgaagaccgaccagaccagaaatccgggaagacctggcgccgcatgaaattcgataagttcctga

SEQ ID NO: 312379 - DNA, 75 bp, synthetic construct
  source 1..75: mol_type = other DNA
ctgtcaccacacaaatcatgccggagctggccgccattcagggcgtgatggcagagatggtccgtatgcagacag

SEQ ID NO: 312380 - DNA, 75 bp, synthetic construct
  source 1..75: mol_type = other DNA
ttattcagcgcgatgacctggttcagtacacggcaactgccgatgcaaccagctccggtggtgtcctgcgcgtgc

SEQ ID NO: 312381 - DNA, 75 bp, synthetic construct
  source 1..75: mol_type = other DNA
agccatcagttgcttgcaccggcagacaatatctccattgcaaaaaatgaactggcggtactggggacgatttca

SEQ ID NO: 312382 - DNA, 75 bp, synthetic construct
  source 1..75: mol_type = other DNA
cttcacctgaagggagccacatcaagaggtgaaggcgagttactcattggctggagtgctacaagtggtgctcat

SEQ ID NO: 312383 - DNA, 75 bp, synthetic construct
  source 1..75: mol_type = other DNA
tgtccgcattattggtgggcatggaggagacggtcagtccggaaatatcagcgtcagtggtgaaggaggatcatc

SEQ ID NO: 312384 - DNA, 75 bp, synthetic construct
  source 1..75: mol_type = other DNA
acagtgaaactggttgtggcattattccactggcgggtgctgtgatagaagtattcagcaataataccaacaatt

SEQ ID NO: 312385 - DNA, 75 bp, synthetic construct
  source 1..75: mol_type = other DNA
aggtggaaacgattggacttgttcgtgcgctgaccgtgggcgtggcgtaccagacgacggtaggtggcattatga

SEQ ID NO: 312386 - DNA, 75 bp, synthetic construct
  source 1..75: mol_type = other DNA
ccgctggcgcggggagctctacgtgaagaatatttgcaacacccgcaagaacggtttatccccgctggcgcgggg

SEQ ID NO: 312387 - DNA, 75 bp, synthetic construct
  source 1..75: mol_type = other DNA
gcgcaacaggagcgtcagccatcttcggcccgcaaaaaggagcaacaccagaaatggttgcctccttagaagctg

SEQ ID NO: 312388 - DNA, 75 bp, synthetic construct
  source 1..75: mol_type = other DNA
aggacctggacagttccgtgcgcggtcgtctggatgtggaagtgattgagcaaaatggccagaaaaaaacgttcc

SEQ ID NO: 312389 - DNA, 75 bp, synthetic construct
  source 1..75: mol_type = other DNA
cgttgccgaccggattgtggtgatgcgggaaggtgaaatcgccggtgaattgttacacgagcaggcagatgagcg

SEQ ID NO: 312390 - DNA, 75 bp, synthetic construct
  source 1..75: mol_type = other DNA
gaaacgtggcgcggtcgactttttgcaaaaaccggtgtcagccgtgccgcttcaggcagcattagaacatgcctt

SEQ ID NO: 312391 - DNA, 75 bp, synthetic construct
  source 1..75: mol_type = other DNA
atgtgggtatggacggggctttttatatttcgggtgcgacaacagcgcatatcgatgtggacatttttgccgggg

SEQ ID NO: 312392 - DNA, 75 bp, synthetic construct
  source 1..75: mol_type = other DNA
tgacaataaaagcaattctcgaatacatcgaagacaatattgaggttaaaagtatcgatattgaatcgatagtct

SEQ ID NO: 312393 - DNA, 75 bp, synthetic construct
  source 1..75: mol_type = other DNA
tattttgttttcgaacttatggagctttgctattccattaataattaagcttatcgactttttgtttcctagtgt

SEQ ID NO: 312394 - DNA, 75 bp, synthetic construct
  source 1..75: mol_type = other DNA
attcaaatagcagcacaatgattgtagcatcggaagataatgagtgggttgactcgttatggattacgattcagg

SEQ ID NO: 312395 - DNA, 75 bp, synthetic construct
  source 1..75: mol_type = other DNA
atggttaacggcattctgagtggtaacggaaaacagatgcgcggcccgattccggaaggcatgtggggctacgat

SEQ ID NO: 312396 - DNA, 75 bp, synthetic construct
  source 1..75: mol_type = other DNA
tgctgcctgtcccgcatgtcgtaatcgcagcggttatcgccgtagtagctacagttatgatagctacccttctta

SEQ ID NO: 312397 - DNA, 75 bp, synthetic construct
  source 1..75: mol_type = other DNA
tttacgggacgtgaaaaggagcagtatgacatttcactgaacaaaagccttgaggacggcaaaacatctgtcagc

SEQ ID NO: 312398 - DNA, 75 bp, synthetic construct
  source 1..75: mol_type = other DNA
ccggcggcaatcaaagagtggtggcaggattcaccgcgcaaaaaaccgtacacctttcgtgtggagctgtttttg

SEQ ID NO: 312399 - DNA, 75 bp, synthetic construct
  source 1..75: mol_type = other DNA
aggctattttgttgctcattgaagttaaagataatcgtattccaccattggttgatgaagctgcaactcgtttcc

SEQ ID NO: 312400 - DNA, 75 bp, synthetic construct
  source 1..75: mol_type = other DNA
ttccggcattagctgagctactcacactgaacggggatctcttacgcgtagaccggctgccgttcttctcagaga

SEQ ID NO: 312401 - DNA, 75 bp, synthetic construct
  source 1..75: mol_type = other DNA
taacgctgccgattcaaaagggatcggcccggcggtgaaacgggcgaaagacgccgggatcgtggtggtggcggt

SEQ ID NO: 312402 - DNA, 75 bp, synthetic construct
  source 1..75: mol_type = other DNA
aggaagacagaagaaaattacgtgcttccaaatgggtcgagcaggaaccggatacagccactcctgagaaggttt

SEQ ID NO: 312403 - DNA, 75 bp, synthetic construct
  source 1..75: mol_type = other DNA
aatcttttgattttttacagcctgcaattattcagaacaaaaaaaatgatatcagcggctcaagaaaatattgag

SEQ ID NO: 312404 - DNA, 75 bp, synthetic construct
  source 1..75: mol_type = other DNA
tccaggttatctgggaagtgataaacactaccgggaagcagacgcggcactactcaatattatttatcctgctaa

SEQ ID NO: 312405 - DNA, 75 bp, synthetic construct
  source 1..75: mol_type = other DNA
gccctgaaagagtatgaagattctgagctgactgcagcaaggatcgccgctgctctggggatgtacatccggaaa

SEQ ID NO: 312406 - DNA, 75 bp, synthetic construct
  source 1..75: mol_type = other DNA
gctttccgacggataacgactggacacctccagaacaaaaaaaccggtattttgatatttcgccgggcatgattt

SEQ ID NO: 312407 - DNA, 75 bp, synthetic construct
  source 1..75: mol_type = other DNA
atgggtttttttgataaagcacttggcgcaattgcgccagggtgggcggtatcgcgcgccagaaacaaaacgctg

SEQ ID NO: 312408 - DNA, 75 bp, synthetic construct
  source 1..75: mol_type = other DNA
acgcgaaaaaattcagaaaatgtgtgatgatatgagaagtaatgcttttatgtttgatcacacgacgaaaacagc

SEQ ID NO: 312409 - DNA, 75 bp, synthetic construct
  source 1..75: mol_type = other DNA
catgacaaaagtatcagtgacattacgattttatatgacactttagataacgttccctctgttgtcgcggaatgt

SEQ ID NO: 312410 - DNA, 75 bp, synthetic construct
  source 1..75: mol_type = other DNA
gataacgatacaggtataaaacaaaacggcgacggcattctggatgtttatgcgaatggacagcatgtatttcgt

SEQ ID NO: 312411 - DNA, 75 bp, synthetic construct
  source 1..75: mol_type = other DNA
tttttctcacaagtgtacttgcttgtatgccgacttatgcaatgtcatcagaaatgaagagtgaatctgttttta

SEQ ID NO: 312412 - DNA, 75 bp, synthetic construct
  source 1..75: mol_type = other DNA
ttatggtttaaagcctgtcttgattttcacttgtctaaaagtcctgaagtatgggggcaattcggtgattttgtt

SEQ ID NO: 312413 - DNA, 75 bp, synthetic construct
  source 1..75: mol_type = other DNA
aaacttaaagcggcagcggtcagagaatgcgccaacgtagcagaaaacaacggctttgttttggtaggtagagta

SEQ ID NO: 312414 - DNA, 75 bp, synthetic construct
  source 1..75: mol_type = other DNA
tttgatattgcgccaggcatgattttcgacgacctggcgccgggggaagatctgggcatggttgagtcaaaccgt

SEQ ID NO: 312415 - DNA, 75 bp, synthetic construct
  source 1..75: mol_type = other DNA
atcaaatagtgtcatgatgagtgatttcgatccgtattcccctataaataataaactccatactatactagttaa

SEQ ID NO: 312416 - DNA, 75 bp, synthetic construct
  source 1..75: mol_type = other DNA
gaagcctacgatgtaccgcaatttatctggtatagccaggctgctatcgccagtcaaccgcgtaaacttggacac

SEQ ID NO: 312417 - DNA, 75 bp, synthetic construct
  source 1..75: mol_type = other DNA
ctattattgaccattaattttatagtcgcgctttgtacatggcaaatttatcaaagtgaatttaatattatcttt

SEQ ID NO: 312418 - DNA, 75 bp, synthetic construct
  source 1..75: mol_type = other DNA
caacgctgccgattcaaaagggatcggcccggcggtgaaacgggcgaaagatgccgggatcgtggtcgtcgcggt

SEQ ID NO: 312419 - DNA, 75 bp, synthetic construct
  source 1..75: mol_type = other DNA
atgcggaaagtcagaaaatatcttaagacgcagattttaaaggcgtttttatgccagtctgccgggaatacacag

SEQ ID NO: 312420 - DNA, 75 bp, synthetic construct
  source 1..75: mol_type = other DNA
atgcaacatcatcaggcccgtattatgcgaaaagtatttctgactcgccggatatcgagatgataaaaaaacgca

SEQ ID NO: 312421 - DNA, 75 bp, synthetic construct
  source 1..75: mol_type = other DNA
tcatcctcattcagttgggttctggatcctgtagttctcacactctatccgtcctatatcgacggaatatccgga

SEQ ID NO: 312422 - DNA, 75 bp, synthetic construct
  source 1..75: mol_type = other DNA
taagtacaccagaaaagacacaactgattctcagcttaacctgaaatcagaaaccacaggcaatgcagataacta

SEQ ID NO: 312423 - DNA, 75 bp, synthetic construct
  source 1..75: mol_type = other DNA
gtccggtatcactaacgggagggcgtgcggtggcatggttgcaacacgacgttgaggcgtggattgcctccaggg

SEQ ID NO: 312424 - DNA, 75 bp, synthetic construct
  source 1..75: mol_type = other DNA
gatattggtatcaaaggcaattctcatttcctgatggcggaaaagaataatcaggagattgccgggatactggca

SEQ ID NO: 312425 - DNA, 75 bp, synthetic construct
  source 1..75: mol_type = other DNA
attacaactgaacagccacatatttccggaaaagatctttccatcgtacttacatccgcattcactacgcttatt

SEQ ID NO: 312426 - DNA, 75 bp, synthetic construct
  source 1..75: mol_type = other DNA
attttgatggctgccatgaaagcagctcagcatgagcttgataaccaacgtttgcgcatattaagtgaatatgag

SEQ ID NO: 312427 - DNA, 75 bp, synthetic construct
  source 1..75: mol_type = other DNA
agttacgcaattagtgaaaagagtcacggcagagaagaaacccgtcttcatattgtttgcgatgtccctgatgag

SEQ ID NO: 312428 - DNA, 75 bp, synthetic construct
  source 1..75: mol_type = other DNA
cgcaaaatcggacactggaaatcgcacaaaaattgcagacgccattatctgatgcgcagagactttattattcag

SEQ ID NO: 312429 - DNA, 75 bp, synthetic construct
  source 1..75: mol_type = other DNA
tgcgcggcttttacgtttcagtggtatcgaattggtggcttatgaaatgtatcccgataatgctatttccagtgg

SEQ ID NO: 312430 - DNA, 75 bp, synthetic construct
  source 1..75: mol_type = other DNA
gaagaggcctcagcagcggcggtgtcccttgaagaacaggcggcacgattaactgaggcggtggacgtattccgt

SEQ ID NO: 312431 - DNA, 75 bp, synthetic construct
  source 1..75: mol_type = other DNA
gaaaaatattctgcacctacagcaggttgtaggtcatgagaaaagtggtgggatcacgaaacgttatttgcatac

SEQ ID NO: 312432 - DNA, 75 bp, synthetic construct
  source 1..75: mol_type = other DNA
gcgaacacatcggccatcctgagtggaacgaacgtaaatggtagcttcagcattactaatggtagcgccagaaat

SEQ ID NO: 312433 - DNA, 75 bp, synthetic construct
  source 1..75: mol_type = other DNA
atctcgatcttataatcaataaaggcggctttaatcaggaacttgctgagcaggccatacagcgttatcagcaaa

SEQ ID NO: 312434 - DNA, 75 bp, synthetic construct
  source 1..75: mol_type = other DNA
cgctgattaatctgagaaaggtatcgacgaatgagtttaataattttttaaaaaaatcaggtctgtataactctc

SEQ ID NO: 312435 - DNA, 75 bp, synthetic construct
  source 1..75: mol_type = other DNA
ctggatgggacacagtttattgcaacaatacaggcacttgcgcaaaaaagaagagccgccgttgttgctcgtcct

SEQ ID NO: 312436 - DNA, 75 bp, synthetic construct
  source 1..75: mol_type = other DNA
cgatctcgatcttataattaataaaggtggatttaatcaacaacttgctgagcaggccgtacagcgttatcagca

SEQ ID NO: 312437 - DNA, 75 bp, synthetic construct
  source 1..75: mol_type = other DNA
taaaacgcgatgattatcttcaggccaccgcattattttaccaggccaaagatctctattgggctgatttagcct

SEQ ID NO: 312438 - DNA, 75 bp, synthetic construct
  source 1..75: mol_type = other DNA
gccagtctcggtcagattgggcattattatctgaaaaaaggtgatgtcgctgcggcagtaaaaatgtatgcccgg

SEQ ID NO: 312439 - DNA, 75 bp, synthetic construct
  source 1..75: mol_type = other DNA
gtaatcgtcgaaaacccaaaaaagaaaaaaaagatcagtcccaagacacttctaaagggagacagcaaatagaac

SEQ ID NO: 312440 - DNA, 75 bp, synthetic construct
  source 1..75: mol_type = other DNA
aaaaatggaaaacagattaatacgggtatcgttgacgatgatggcatgctttatatgtctggattatcaggggca

SEQ ID NO: 312441 - DNA, 75 bp, synthetic construct
  source 1..75: mol_type = other DNA
gacgtttgtggcggataaagacagagcggttgtcgttctgcaaacatcgaaagcggaaatcattgggaatggcgt

SEQ ID NO: 312442 - DNA, 75 bp, synthetic construct
  source 1..75: mol_type = other DNA
acagccgaagccatactgcttaacggtaaaagcgatacgaaaatcgtcaatattgtgcccgataccagcaacgcg

SEQ ID NO: 312443 - DNA, 75 bp, synthetic construct
  source 1..75: mol_type = other DNA
ctaccgccagcgcatcgacaccagcccggattgcggcgtgattctaatcgctcacggtgcgaccaccgcaacgag

SEQ ID NO: 312444 - DNA, 75 bp, synthetic construct
  source 1..75: mol_type = other DNA
agcaggtattaggatttacattgccagaaaacctggcgaacccgttacgtaaacactttcttgcgctgattggct

SEQ ID NO: 312445 - DNA, 75 bp, synthetic construct
  source 1..75: mol_type = other DNA
ccattatcaacgcactagaaggtaaaacttcctttgaaaaacctgatggtacggatcgtgataaagttcaaggtg

SEQ ID NO: 312446 - DNA, 75 bp, synthetic construct
  source 1..75: mol_type = other DNA
cagctaagagaattcatcacccacaatgtgttacttctgggcagaaagtatgtacagagctggtcgtttatcctg

SEQ ID NO: 312447 - DNA, 75 bp, synthetic construct
  source 1..75: mol_type = other DNA
ttcccacctggtcaccctggagtaaccttgatattgcctgtaactttctcaggcatctgggtataagtcttatga

SEQ ID NO: 312448 - DNA, 75 bp, synthetic construct
  source 1..75: mol_type = other DNA
gtttcctgtccgttgtatctccagtcgtggagtacgttgaccggaaatacgctgatgactaatgggcggttcttt

SEQ ID NO: 312449 - DNA, 75 bp, synthetic construct
  source 1..75: mol_type = other DNA
tcctccaccgctggataaatttgatgagaaattttgttctgttacctataaaaatggtgttttaattaaaaaaac

SEQ ID NO: 312450 - DNA, 75 bp, synthetic construct
  source 1..75: mol_type = other DNA
aaaggtgtttttaatcaggggctggataaccgccgtgcgcgggagatggcctggtgtttacagggagcaaactga

SEQ ID NO: 312451 - DNA, 75 bp, synthetic construct
  source 1..75: mol_type = other DNA
tcgcctgacaccttaccagtgcaacgcgggagtgtggacgtcaggtatcggccacactgccggggtggtcccgaa

SEQ ID NO: 312452 - DNA, 75 bp, synthetic construct
  source 1..75: mol_type = other DNA
gttgtaacagatgaagatgcatttgctagatcttatcaaataagtggtgcgtttaatgttggaagtggatatatt

SEQ ID NO: 312453 - DNA, 75 bp, synthetic construct
  source 1..75: mol_type = other DNA
gaccgtatgcgcgaaaatgtagaccgtttggcgctgcaacatcataaatcaattggttcaaaagaatatgttgaa

SEQ ID NO: 312454 - DNA, 75 bp, synthetic construct
  source 1..75: mol_type = other DNA
ttgcagaccagccgcatgttggtggaaatgaaagacggaaaaccggtgaagtgttatgcgttgccggatgcttaa

SEQ ID NO: 312455 - DNA, 75 bp, synthetic construct
  source 1..75: mol_type = other DNA
tggtacggcatgacattactgaaatttcacggttaggcccactcttacagacgcttccttcgctcgccaccgccg

SEQ ID NO: 312456 - DNA, 75 bp, synthetic construct
  source 1..75: mol_type = other DNA
atttaattaatacatttgaatattttagcaagttattttttatcaagatgaaaaaggctgtatcatgcttaaggt

SEQ ID NO: 312457 - DNA, 75 bp, synthetic construct
  source 1..75: mol_type = other DNA
gggtggctactgttgtagaacgtttattaaataatggtaaggctctgagtaacagacaagccaaaaatgatccga

SEQ ID NO: 312458 - DNA, 75 bp, synthetic construct
  source 1..75: mol_type = other DNA
caatagcgagagttccacaaggcaaaagtttgttgataggtggttatacgcatgaaacgaactctaacgaaatag

SEQ ID NO: 312459 - DNA, 75 bp, synthetic construct
  source 1..75: mol_type = other DNA
aaaaaaggtgaagtgctgattaaagtcacccataccggcgtttgccataccgacgcatttaccctctccggggat

SEQ ID NO: 312460 - DNA, 75 bp, synthetic construct
  source 1..75: mol_type = other DNA
tgggaggtcaataagaatgtctataccaccattggtgtagcgggcgtcggaaacctcaatatcagcgatggcggt

SEQ ID NO: 312461 - DNA, 75 bp, synthetic construct
  source 1..75: mol_type = other DNA
cagcaacggaggaagctcactcggttatggagaaaccggcgtcgggaaggttagcatcaccacggggggggggga

SEQ ID NO: 312462 - DNA, 75 bp, synthetic construct
  source 1..75: mol_type = other DNA
gaatgccgacaaaaacgatatcgatctgctgattgattacattaccccagacggaaaatttaatttttcccagtc

SEQ ID NO: 312463 - DNA, 75 bp, synthetic construct
  source 1..75: mol_type = other DNA
tttatagacattgtctgccttgttgaaggtgaatttttggatgagaaaaggctagaggctgatgccgagaagatc

SEQ ID NO: 312464 - DNA, 75 bp, synthetic construct
  source 1..75: mol_type = other DNA
ccacaacctccgcatctcttacatgtcatctctttaaagaaatgcaagaatgagataaaaaagatcttgccactg

SEQ ID NO: 312465 - DNA, 75 bp, synthetic construct
  source 1..75: mol_type = other DNA
ggaactggggattgataacacccgcgcaagtaaaggggcactatcccgcgccatccgccgtcgcctgatgggaac

SEQ ID NO: 312466 - DNA, 75 bp, synthetic construct
  source 1..75: mol_type = other DNA
ggcatactcgacggcgaaacactccttgcacaagttcaattcgacggcttcgatttctatattgtatataacgac

SEQ ID NO: 312467 - DNA, 75 bp, synthetic construct
  source 1..75: mol_type = other DNA
gaaaacgtcccggcgctaacagcgtatggtgacaacaaccaccgctgcgcctgttggtatcctcagcaggaggtc

SEQ ID NO: 312468 - DNA, 75 bp, synthetic construct
  source 1..75: mol_type = other DNA
ttttaacggtgatgttcacgcgctcaacaatgtgtccttgcagattaaccgcggtgaaattgtcggtctggtggg

SEQ ID NO: 312469 - DNA, 75 bp, synthetic construct
  source 1..75: mol_type = other DNA
ttattttatttgttatatgaaggctatgaaataaacaatttaattattttgtttgttttaatgttgatactagga

SEQ ID NO: 312470 - DNA, 75 bp, synthetic construct
  source 1..75: mol_type = other DNA
caaagaccaaaaggggcgtaactggacgaaatcgatctcgatggcgaatgatcgttacatgaaagtgttgctaac

SEQ ID NO: 312471 - DNA, 75 bp, synthetic construct
  source 1..75: mol_type = other DNA
atttttattcgcggtacaaatgccagtcatgtgttggtgttaattgatggcgtacgcctgaatctggcggggtga

SEQ ID NO: 312472 - DNA, 75 bp, synthetic construct
  source 1..75: mol_type = other DNA
gcggcgagtatgatgaagttggatatgcaacgattggtttgcatcaggtcttccaatcttgtttgccaaaacctg

SEQ ID NO: 312473 - DNA, 75 bp, synthetic construct
  source 1..75: mol_type = other DNA
ttccggttgttatcactggcccggcatatttttttgagtacccgaattccggggcggaagcataccaccctactt

SEQ ID NO: 312474 - DNA, 75 bp, synthetic construct
  source 1..75: mol_type = other DNA
atgcatgacaaattactgatgtggtatcaggcctggcagaaaagccaggaattaccaggcgcaccgcaacttgtg

SEQ ID NO: 312475 - DNA, 75 bp, synthetic construct
  source 1..75: mol_type = other DNA
ttaataaagtgcttcagaatactattcttgagtttgtccatgaaattaataatatatcatctgctcgctggatgt

SEQ ID NO: 312476 - DNA, 75 bp, synthetic construct
  source 1..75: mol_type = other DNA
ataatctctcttgataaaaatggaaatccttatttcgattcgggaattcagaaaaaaatttctgagcaatacaaa

SEQ ID NO: 312477 - DNA, 75 bp, synthetic construct
  source 1..75: mol_type = other DNA
tctgaactgcggtacagtcaataacattccattttaccagaaaatattttcccagtttaatattaaatatcatat

SEQ ID NO: 312478 - DNA, 75 bp, synthetic construct
  source 1..75: mol_type = other DNA
gtccagggttcagccggggtgcgcatcggtgcccccaccggcgtggcctgttcggtgtgccccggcggggtgacg

SEQ ID NO: 312479 - DNA, 75 bp, synthetic construct
  source 1..75: mol_type = other DNA
aaacgccattgctcacgccattctgggcggtacagtagcggcaatgcagggtaataatgttgctgctggtgcagc

SEQ ID NO: 312480 - DNA, 75 bp, synthetic construct
  source 1..75: mol_type = other DNA
agccaaaatatagatgaacatcaggagattattgattgtttgattaatgggaattataaagctgcattggctctt

SEQ ID NO: 312481 - DNA, 75 bp, synthetic construct
  source 1..75: mol_type = other DNA
cgacggtgaaagtgatacggcggttaacccgtatcacgcccagtacattctgcgccgccgtgatgattatctgga

SEQ ID NO: 312482 - DNA, 75 bp, synthetic construct
  source 1..75: mol_type = other DNA
attgaagttcctgcgtttgatgttcctaccgttaacattggcgaaaggcaaaaaggccggttggctgcccgaagc

SEQ ID NO: 312483 - DNA, 75 bp, synthetic construct
  source 1..75: mol_type = other DNA
tagctaagctgtacgcctactggatcaccgtcaactaccgcgagtcttacgggatgtatgcctgtaacggcattc

SEQ ID NO: 312484 - DNA, 75 bp, synthetic construct
  source 1..75: mol_type = other DNA
ccaaagttgaagcggcgattaaagaactcaattacgcgccatcagccctggcgcgtagcctcaaactcaatcaaa

SEQ ID NO: 312485 - DNA, 75 bp, synthetic construct
  source 1..75: mol_type = other DNA
ttgggttttctatcgctcttctgatgacgtctgcagcgtatgccgatatcgatggcgggtctggcgaacttcact

SEQ ID NO: 312486 - DNA, 75 bp, synthetic construct
  source 1..75: mol_type = other DNA
atgacggagtattatctcaatgaaactgttgtaacttttcccgggaatattattcaggacagcactattaatatg

SEQ ID NO: 312487 - DNA, 75 bp, synthetic construct
  source 1..75: mol_type = other DNA
gattttacctgggtaagcacatggcagggcttcgtttatgtggcgttcatcattgatgtgttcgccggatacatc

SEQ ID NO: 312488 - DNA, 75 bp, synthetic construct
  source 1..75: mol_type = other DNA
cagtagaggtttcttaggcgaggcggataccagcacacgaccgatgtcggatgcattgaagaacataccaacccc

SEQ ID NO: 312489 - DNA, 75 bp, synthetic construct
  source 1..75: mol_type = other DNA
aaactcatcagcaaactatttttaataaatgtaatgatgcacttaaatttttcatggaatgcgtcgaagaaaaaa

SEQ ID NO: 312490 - DNA, 75 bp, synthetic construct
  source 1..75: mol_type = other DNA
aggctggggtaaatgctctgggcgaatcaacggttaccttttatccaaaagaaggtgagtttgaagaagttaaac

SEQ ID NO: 312491 - DNA, 75 bp, synthetic construct
  source 1..75: mol_type = other DNA
aatgttggcgcaattgggctggatcatctcaagcgcggacaatttatgtctgttgaggaattaggtgtctcgctg

SEQ ID NO: 312492 - DNA, 75 bp, synthetic construct
  source 1..75: mol_type = other DNA
cttatctcaaaacccagagtaagcggctgaaactggccacacgccgggcgagagcggagcagttccgtgacggct

SEQ ID NO: 312493 - DNA, 75 bp, synthetic construct
  source 1..75: mol_type = other DNA
ggctgtttcatgttattaagtaatgtattattgcaaaaacttaacggttttgatgaacgatactttatgtatctg

SEQ ID NO: 312494 - DNA, 75 bp, synthetic construct
  source 1..75: mol_type = other DNA
tggaatccgcctcactggtgcaactcccaaaaggtcaggcgtttgccctgctggaaggcggtcagctctggaaac

SEQ ID NO: 312495 - DNA, 75 bp, synthetic construct
  source 1..75: mol_type = other DNA
tttgttggcttagttggtgcggtttacgccgttcttaacatggccttcaactacaacaatttaactcatgacaat

SEQ ID NO: 312496 - DNA, 75 bp, synthetic construct
  source 1..75: mol_type = other DNA
gtggttccggatttattggtgttaatctgattgatcattttttgaattgtggtcacgaggttattgtatatggga

SEQ ID NO: 312497 - DNA, 75 bp, synthetic construct
  source 1..75: mol_type = other DNA
tggatgtgaaggtagaacaaagtaaacaactctccgtcctgcgagaagtgtatgctgatgcctgtaaccgtcttg

SEQ ID NO: 312498 - DNA, 75 bp, synthetic construct
  source 1..75: mol_type = other DNA
ataaaaaatccatcaccttatacaaaacctttcccgttaagcgtcagatatatctcttatgaatgtcagaaaaag

SEQ ID NO: 312499 - DNA, 75 bp, synthetic construct
  source 1..75: mol_type = other DNA
actatgcaaacctgaaatccctgcaaaaacagctggatgaaatgtatacctgcatccgtaataatcagatgatgc

SEQ ID NO: 312500 - DNA, 75 bp, synthetic construct
  source 1..75: mol_type = other DNA
accagaaacgctgctttgccgctgcgaagacattcgctgtggcgatgtagagcaagcacaaagctggctgcaggc

SEQ ID NO: 312501 - DNA, 75 bp, synthetic construct
  source 1..75: mol_type = other DNA
attgatagtaagtatattatggcgataataatatggctttattttctgtcaggagggtatattcaatggtttgta

SEQ ID NO: 312502 - DNA, 75 bp, synthetic construct
  source 1..75: mol_type = other DNA
tcaattttgttgagatgacgccagagaagggggttgccgcctgcttgactactgaaagtctggatgcaatgggcg

SEQ ID NO: 312503 - DNA, 75 bp, synthetic construct
  source 1..75: mol_type = other DNA
gtggggaacgacctggtatggcggtggacaatatgctgaatattaccgtgccgctatgttggggctgggttttaa

SEQ ID NO: 312504 - DNA, 75 bp, synthetic construct
  source 1..75: mol_type = other DNA
ttctacttacgtcagcacatggcagggggtcgtctatgtggcgttcatcattgatgtgtttgccggatacatcgt

SEQ ID NO: 312505 - DNA, 75 bp, synthetic construct
  source 1..75: mol_type = other DNA
gaccgcccctggtcttaatcgaggactcagtaaaaaatgcccgagtcttcaattaagactcagtgatgtgacggg

SEQ ID NO: 312506 - DNA, 75 bp, synthetic construct
  source 1..75: mol_type = other DNA
atgatgcgccactgactcatgccgatgcctgtcggatggacagtgaatacctgtcgctgctcaccgcttgttccc

SEQ ID NO: 312507 - DNA, 75 bp, synthetic construct
  source 1..75: mol_type = other DNA
atgctgactactcattaattcaactaagtattagtggatttcttattgtatttgcatttagtcaactgatatcag

SEQ ID NO: 312508 - DNA, 75 bp, synthetic construct
  source 1..75: mol_type = other DNA
ttttcgatagtgtcagctttcgtggcgtacagctggcgtcagatgacaacatgctgccagacagcctgaaagggt

SEQ ID NO: 312509 - DNA, 75 bp, synthetic construct
  source 1..75: mol_type = other DNA
cactggcagaccaaagtgaacataaagggcagtcatatcgttttctgtatgccaaaacgctcaaccatttgggca

SEQ ID NO: 312510 - DNA, 75 bp, synthetic construct
  source 1..75: mol_type = other DNA
acgtattaccactgtcagcaacagcgacattatccggataaacgcagtgcccgtgctcagcgcgatgactggctg

SEQ ID NO: 312511 - DNA, 75 bp, synthetic construct
  source 1..75: mol_type = other DNA
actggccccgatgcccgggcacataacgcaacttcaccggttacccgaatcaaagaaatgcagtattataatggt

SEQ ID NO: 312512 - DNA, 75 bp, synthetic construct
  source 1..75: mol_type = other DNA
gctcattagctccaaaagatcatccctggcaaatagctgatagagatggtctgatgattgaaatacttccaacag

SEQ ID NO: 312513 - DNA, 75 bp, synthetic construct
  source 1..75: mol_type = other DNA
cctgaatcagcgccgggagaagcttcagtcctgggctgattttgttgatgcgcagattgaggaggggcggaaggt

SEQ ID NO: 312514 - DNA, 75 bp, synthetic construct
  source 1..75: mol_type = other DNA
cagtgttactggcgttagttatcagtgcgcaggtcaatgcaaattgcgttagggttaatcctgttgaccaagggt

SEQ ID NO: 312515 - DNA, 75 bp, synthetic construct
  source 1..75: mol_type = other DNA
gggcaggcctggcgcggtcagcgctccagcacatctcagccgctgtcgtggccgcgctccggcgtacgcttcgat

SEQ ID NO: 312516 - DNA, 75 bp, synthetic construct
  source 1..75: mol_type = other DNA
tcattcccatggttctattccgcactgcgcgggcttgtagtgggcggcaaccaggtccgggtcgaaagggggtag

SEQ ID NO: 312517 - DNA, 75 bp, synthetic construct
  source 1..75: mol_type = other DNA
tcgtggggtggcgagtctcatcgtccatggaaacgacattcgtgctggatgcactggagcaggcgttgtgggccc

SEQ ID NO: 312518 - DNA, 75 bp, synthetic construct
  source 1..75: mol_type = other DNA
aacacgaatgaaccagtcgatctgcgccctgcagaaataagttttttaacagatgccgccagaaagcagctcgat

SEQ ID NO: 312519 - DNA, 75 bp, synthetic construct
  source 1..75: mol_type = other DNA
gtctggaaaagctatagcgcatctgagcaagaacgtattctttgctggcttcaaggggtaaataactgtaaaacc

SEQ ID NO: 312520 - DNA, 75 bp, synthetic construct
  source 1..75: mol_type = other DNA
gtcattgtaacatttgctcatgatcagtatcctgatgttcctttcaaggatggcaaattaataatgcaaggatgg

SEQ ID NO: 312521 - DNA, 75 bp, synthetic construct
  source 1..75: mol_type = other DNA
cttagatattctgatgaattaatcagtaaatttgatgaagttacttttctagactcgaaaaggcaacttgaaaga

SEQ ID NO: 312522 - DNA, 75 bp, synthetic construct
  source 1..75: mol_type = other DNA
aaggtaaagcacaatagttacataagtaaggtgctacagatcactacatcagcgggctataagaagttgaatggt

SEQ ID NO: 312523 - DNA, 75 bp, synthetic construct
  source 1..75: mol_type = other DNA
acagcgcaatttgatagtcgtcacgattgggatacgttcatcgcattggtcaggctgatgaatgccgtatataac

SEQ ID NO: 312524 - DNA, 75 bp, synthetic construct
  source 1..75: mol_type = other DNA
ttattcattctgagaatgcattaaatcgggcactggaaatgaaagcggtattaattaaattaaccgaagttcatg

SEQ ID NO: 312525 - DNA, 75 bp, synthetic construct
  source 1..75: mol_type = other DNA
agacggttcaggctgtacgcttacgcaccatccatcacagcgataaaggctctcagtatgtatcgctggcctaca

SEQ ID NO: 312526 - DNA, 75 bp, synthetic construct
  source 1..75: mol_type = other DNA
tacgggaaggaatcagggtggccagatgtacagtggcgcgcctcatggcggttatgggacttgccggtgttctcc

SEQ ID NO: 312527 - DNA, 75 bp, synthetic construct
  source 1..75: mol_type = other DNA
gaaaaaaattacgcctggatgacctctaataccagcatcgataacgaagggcacacaacacaaaacctgggggta

SEQ ID NO: 312528 - DNA, 75 bp, synthetic construct
  source 1..75: mol_type = other DNA
tggcctgagaaacatcagtatctgaatcagatttggctcgagaaaaatattaaaaacgtaactcctgaaatattt

SEQ ID NO: 312529 - DNA, 75 bp, synthetic construct
  source 1..75: mol_type = other DNA
gtgtgcgctggtaatcctggtactggccttcctgatcaaaacgccctgccccagcttaccgggctgctgtttaat

SEQ ID NO: 312530 - DNA, 75 bp, synthetic construct
  source 1..75: mol_type = other DNA
tatgggaaataccggccgaacgaatgaaaatgcgccgaccacatcttgtaccactctccactcaagtagttgaaa

SEQ ID NO: 312531 - DNA, 75 bp, synthetic construct
  source 1..75: mol_type = other DNA
atgtttgatacaggaatagacaacccggagaaacaaataagttacttgttcaaggctatatggtggcgcgttgaa

SEQ ID NO: 312532 - DNA, 75 bp, synthetic construct
  source 1..75: mol_type = other DNA
aacgagcaaagccccaagacaagccctacacattgaacgatggacaaggcctgtcattactcatcaatccagacg

SEQ ID NO: 312533 - DNA, 75 bp, synthetic construct
  source 1..75: mol_type = other DNA
gaagctaggctttgaaaacacttttgaagcaattgcgagagaatggcatcaggtgagagctgaccgttggtcgtt

SEQ ID NO: 312534 - DNA, 75 bp, synthetic construct
  source 1..75: mol_type = other DNA
ctggcctttggtgtatatccagaagtctccttagctgaagcgcgtgataaacgtgaagctgccaaaaaggtactg

SEQ ID NO: 312535 - DNA, 75 bp, synthetic construct
  source 1..75: mol_type = other DNA
atactgctaaaccgaaagaaaagccttacaagttatctgatggcggtggtctctaccttgaggtagcgaccagcg

SEQ ID NO: 312536 - DNA, 75 bp, synthetic construct
  source 1..75: mol_type = other DNA
agccatcgctctggccgttcctaagcaaaaacatcatccatttctatctgccgaagaattgcctcattttattcg

SEQ ID NO: 312537 - DNA, 75 bp, synthetic construct
  source 1..75: mol_type = other DNA
atcattactaaaaatgctactaagatagttatgctgaccggcgttagaacgcaggaaatgcgtttggctacttgg

SEQ ID NO: 312538 - DNA, 75 bp, synthetic construct
  source 1..75: mol_type = other DNA
gcaaacggcatagacccagtgggagaacgtaaagcccaaaaactggcacagcaactctcaacagagaactcattc

SEQ ID NO: 312539 - DNA, 75 bp, synthetic construct
  source 1..75: mol_type = other DNA
cgtcactttcgtcagcatctggctgagaggtggcgtaaagtctgcggcggatggtttttactcatcgccatttcg

SEQ ID NO: 312540 - DNA, 75 bp, synthetic construct
  source 1..75: mol_type = other DNA
gaaatgcagctagctcatgctgataaaaatatcataagaggtgtatataaccatgcctcgtatcttgaaagcaga

SEQ ID NO: 312541 - DNA, 75 bp, synthetic construct
  source 1..75: mol_type = other DNA
aaaatagtattcgtggcacatataaccatgcattgtatttgaaaggtcgtaaggagatgctatgttggtatgcca

SEQ ID NO: 312542 - DNA, 75 bp, synthetic construct
  source 1..75: mol_type = other DNA
cgtcatgcgattgtgaccggacgtgctgaatacaatcctgcccccgatctcgctactgccctcgctacacctaag

SEQ ID NO: 312543 - DNA, 75 bp, synthetic construct
  source 1..75: mol_type = other DNA
tgcagcagggaacgttgtggctgcctgaaaccaaaaatggctcgggcagactggtgcacctcaatgactgggcga

SEQ ID NO: 312544 - DNA, 75 bp, synthetic construct
  source 1..75: mol_type = other DNA
cggtatgccattgttacaggtagggctcgatacaatccagcctctgatctggttatagcaatgaaaagccataaa

SEQ ID NO: 312545 - DNA, 75 bp, synthetic construct
  source 1..75: mol_type = other DNA
cgatatgccatcataacaggacgcgcggagtacaatcctgcacctgatttggctatcgcattggccgttcccaag

SEQ ID NO: 312546 - DNA, 75 bp, synthetic construct
  source 1..75: mol_type = other DNA
ttaccaacctctaccgcgtacttcagcaccatttagaagagtttgtccgccagtttaaatggtcgctggtcagcc

SEQ ID NO: 312547 - DNA, 75 bp, synthetic construct
  source 1..75: mol_type = other DNA
gaggccgttgctcgcgagtggcatcagacgaaagccgatcgctggtcactgcgctaccgcgatgaaataatcgac

SEQ ID NO: 312548 - DNA, 75 bp, synthetic construct
  source 1..75: mol_type = other DNA
ggttgcctgcggcttacaggggagcggcttacgcgttgccgtactggagcagcgcaccctcggttgggtggcgcg

SEQ ID NO: 312549 - DNA, 75 bp, synthetic construct
  source 1..75: mol_type = other DNA
aaaattctatacggggcacatacaatcatgctctttatttagaaaaaagaagaacaatgctccaatactatgcag

SEQ ID NO: 312550 - DNA, 75 bp, synthetic construct
  source 1..75: mol_type = other DNA
tgccggtgcattagccacaccaaagaaagtacatttcccattccttactgctaatgaacttccttacttccttaa

SEQ ID NO: 312551 - DNA, 75 bp, synthetic construct
  source 1..75: mol_type = other DNA
tttctcttgctgatgcccgtgaaaaacgtgatgtggctaagaagattctggcggcaggtggagaccccggagaag

SEQ ID NO: 312552 - DNA, 75 bp, synthetic construct
  source 1..75: mol_type = other DNA
cacagatgcagaagcacccatatggtcgccagatgcactgattgcacgtctccggcggtggttaaaagaatgtgg

SEQ ID NO: 312553 - DNA, 75 bp, synthetic construct
  source 1..75: mol_type = other DNA
attggcgcattaaaacctggcgcacgcctgattactaaaaatctggcggagcaattaggtatgagtattacacct

SEQ ID NO: 312554 - DNA, 75 bp, synthetic construct
  source 1..75: mol_type = other DNA
agatcttgaagcatataccggcagcatcatcacaagaaatgcgactaagattgttatgctaactggcgtaagaac

SEQ ID NO: 312555 - DNA, 75 bp, synthetic construct
  source 1..75: mol_type = other DNA
cggccattacccttacatctttattggcaggaacaaccgaagcaagccaatctcaaaagaaagtgtttcacaagt

SEQ ID NO: 312556 - DNA, 75 bp, synthetic construct
  source 1..75: mol_type = other DNA
gtgagcaactgcgaaattacgaagccaaccttgctgacagtaacgccagcgcccgcgcagccaatgaagcgcaac

SEQ ID NO: 312557 - DNA, 75 bp, synthetic construct
  source 1..75: mol_type = other DNA
atatgcggacacaatcgagcaggtacgagataatctgaaatcaatgtctcagacgcagatatccgccaaccttgg

SEQ ID NO: 312558 - DNA, 75 bp, synthetic construct
  source 1..75: mol_type = other DNA
tcgtaaagatctgaaggcaatggccgatcaggggatgctaaccgcagataaagttgtcccggccctgataagtca

SEQ ID NO: 312559 - DNA, 75 bp, synthetic construct
  source 1..75: mol_type = other DNA
gtggtgaccggatcgtacgtgcactggctgcgggtatgggcgtggcccgtaaagatctgaaggcaatggcggatg

SEQ ID NO: 312560 - DNA, 75 bp, synthetic construct
  source 1..75: mol_type = other DNA
ggcacttgcggggcagaatacagagctggcgaagctgaaataccagactgcgcagggcgaactgaaaaccctgac

SEQ ID NO: 312561 - DNA, 75 bp, synthetic construct
  source 1..75: mol_type = other DNA
acggcatgaagcaggccatgggtggcgcggtcaccacgatcaccgacatgctcaatggcaacgttgacagctgga

SEQ ID NO: 312562 - DNA, 75 bp, synthetic construct
  source 1..75: mol_type = other DNA
ctgatgggagaattattcgtggtgtaacagatgaacagggttacacgcaggcgcactacggtattgattctgaaa

SEQ ID NO: 312563 - DNA, 75 bp, synthetic construct
  source 1..75: mol_type = other DNA
aacttgatgactttgatgatagtgacgatgattttacttttacaccaagaaagaaaacccacatcgagccaaaga

SEQ ID NO: 312564 - DNA, 75 bp, synthetic construct
  source 1..75: mol_type = other DNA
aaagctgaatcactgcgtatagatgctgtatgcgatggttatcaaattggtatacagactgcttttgagcatatt

SEQ ID NO: 312565 - DNA, 75 bp, synthetic construct
  source 1..75: mol_type = other DNA
attgccgattatgagggggtttatacactgcttaatgataataatataggtttagcctctgctcaaaatgttggt

SEQ ID NO: 312566 - DNA, 75 bp, synthetic construct
  source 1..75: mol_type = other DNA
gtgtcatcagaagcttcatctgtaacggcgatccttgttacattcaacccggaaccaaatatattttataaagta

SEQ ID NO: 312567 - DNA, 75 bp, synthetic construct
  source 1..75: mol_type = other DNA
atgggggaagcgactattcgcgaggggggctggttacggctgaaaatacgattatcggtggcaatgccaccggtg

SEQ ID NO: 312568 - DNA, 75 bp, synthetic construct
  source 1..75: mol_type = other DNA
gatgcactggccggaaatgttgtggactggagaaactgggggagttcagttctccgggaagtttcaaaaattctg

SEQ ID NO: 312569 - DNA, 75 bp, synthetic construct
  source 1..75: mol_type = other DNA
ctttccattggcgtataccctgatgtttccctggcagacgcacgcgaaaagcgcagtgaggccagaaaaattctc

SEQ ID NO: 312570 - DNA, 75 bp, synthetic construct
  source 1..75: mol_type = other DNA
tataccgtgcgtcagctggaagagtggctgggggggggggggggggggggggggggggggggggggggggggggg

SEQ ID NO: 312571 - DNA, 75 bp, synthetic construct
  source 1..75: mol_type = other DNA
cggcgctgcgcctggcacaggagaacccggagagtggggtggtgatacgcctgcacggtgaagaacggttgctca

SEQ ID NO: 312572 - DNA, 75 bp, synthetic construct
  source 1..75: mol_type = other DNA
gcgtcaaagatgcggtgaggtttatcgctatgcaatcataactggccgtgctgagtacaatcctgcacctaattt

SEQ ID NO: 312573 - DNA, 75 bp, synthetic construct
  source 1..75: mol_type = other DNA
gaaactctcaacagagaactcattcgaagccatatgtagagaatggcacactaacaaagcggatcgctggacagt

SEQ ID NO: 312574 - DNA, 75 bp, synthetic construct
  source 1..75: mol_type = other DNA
tgtgggagatcccagcagaagtgatgaagatgaagcggcctcatattgtgccgctatcagagcaggttattgcac

SEQ ID NO: 312575 - DNA, 75 bp, synthetic construct
  source 1..75: mol_type = other DNA
ccacaccgccagcaggctggttaaagtgcgacgggcgcgcctttacaaaagaacaatatcctgttctggccagag

SEQ ID NO: 312576 - DNA, 75 bp, synthetic construct
  source 1..75: mol_type = other DNA
acggggtgagtttattcgtggctgggatgacgggcgcgggattgatcctggtcgccagttgcttgggtggcagaa

SEQ ID NO: 312577 - DNA, 75 bp, synthetic construct
  source 1..75: mol_type = other DNA
ttgcagccaccacgcctgagaatattcagctatctgcaggtcatacactgacagcaacggcaggtgaaaacgccg

SEQ ID NO: 312578 - DNA, 75 bp, synthetic construct
  source 1..75: mol_type = other DNA
cgtgaatcggggggaagtgtttttgttgatatgaatttccagccttattctgatcaatgggcttttcttgcatcg

SEQ ID NO: 312579 - DNA, 75 bp, synthetic construct
  source 1..75: mol_type = other DNA
actgggtggaacaaacagtcgcgcaaaagccgaattaaacggagcattctttaacataacccgcccccgcaatat

SEQ ID NO: 312580 - DNA, 75 bp, synthetic construct
  source 1..75: mol_type = other DNA
tttaaaagggaactcttcatccttctttatgaaggataatctcaacttcaaaatccaagaatgtgtatacaatta

SEQ ID NO: 312581 - DNA, 75 bp, synthetic construct
  source 1..75: mol_type = other DNA
atcaaaaagattattccattgcaaatggtattaatcttggcgttgcagcaacactcgcttatgcggatgataatg

SEQ ID NO: 312582 - DNA, 75 bp, synthetic construct
  source 1..75: mol_type = other DNA
ttctgcagcattaaaattagagaaacctctgctttatacttacggaatgcctcggacctttactcgaaatgccat

SEQ ID NO: 312583 - DNA, 75 bp, synthetic construct
  source 1..75: mol_type = other DNA
ttcaaaaatagctaatacggggttacttaatgccgttgggcagcctttaggtataagaacaaccaatgaccatcc

SEQ ID NO: 312584 - DNA, 75 bp, synthetic construct
  source 1..75: mol_type = other DNA
tatcgcatattgactcatttccgccaaaggctaagaaaatttttatttgtcacaataagctatcggaaataccag

SEQ ID NO: 312585 - DNA, 75 bp, synthetic construct
  source 1..75: mol_type = other DNA
atcttcacttggggtctttgccacctcttccagactggattgaggtgctttctcttcgtcataatggccttgcca

SEQ ID NO: 312586 - DNA, 75 bp, synthetic construct
  source 1..75: mol_type = other DNA
aaagaaggcgcatcgaatgacttcaaagaaaatgtggatatagcattggtgagattgtttaaatgtgttgaactc

SEQ ID NO: 312587 - DNA, 75 bp, synthetic construct
  source 1..75: mol_type = other DNA
ttgggttctgtaccgcctcttcccgagtggattgaaatgcttagccttattcataatgaacttgattcaatacat

SEQ ID NO: 312588 - DNA, 75 bp, synthetic construct
  source 1..75: mol_type = other DNA
cacaataatgaacttgacttatcatacctatttttgggttctgtaccgcctcttccagagtggattgaaatgctt

SEQ ID NO: 312589 - DNA, 75 bp, synthetic construct
  source 1..75: mol_type = other DNA
gaagggattaaacatcaaaactccacccaattggaaataatgaaaattgaaaatagctttcaaatagagtctttc

SEQ ID NO: 312590 - DNA, 75 bp, synthetic construct
  source 1..75: mol_type = other DNA
tgaacgcggcgcgctaactttgaagtatgtggagcttgcaaatgcaattgacgacaaacggtctgagtccttcct

SEQ ID NO: 312591 - DNA, 75 bp, synthetic construct
  source 1..75: mol_type = other DNA
ttactcatgattatgatagtattgatgaattttatgcggatttacagaaaaacaagctcaataaatatcttactg

SEQ ID NO: 312592 - DNA, 75 bp, synthetic construct
  source 1..75: mol_type = other DNA
cggacagtatacattttcatgtgcgtaattttaaaagtctattcgatttaatcgacaggcataaaattcaccata

SEQ ID NO: 312593 - DNA, 75 bp, synthetic construct
  source 1..75: mol_type = other DNA
cacaataatgaacttgacttatcatccctatttttgggttctgtaccgcctcttcccgagtggattgaaatgctt

SEQ ID NO: 312594 - DNA, 75 bp, synthetic construct
  source 1..75: mol_type = other DNA
ggggcgagtaatttgggggaaattaaacttggcgtaaatggcaacctgaatccagcggccagcgtctgggggaat

SEQ ID NO: 312595 - DNA, 75 bp, synthetic construct
  source 1..75: mol_type = other DNA
gactttggctacgtcaaattggcgggcataatgcctggcgtgacagcaacggacagttgagaacgacctcgcatc

SEQ ID NO: 312596 - DNA, 75 bp, synthetic construct
  source 1..75: mol_type = other DNA
tgaccattacggatagtgaggtatcatcggctgcagatgtttttatcaataatattaaaggtcatttgaccgtcg

SEQ ID NO: 312597 - DNA, 75 bp, synthetic construct
  source 1..75: mol_type = other DNA
cattctcagttgtaatatttaatttcaaaaagacaattttaaatatttcttttgccgccctgttaacattattta

SEQ ID NO: 312598 - DNA, 75 bp, synthetic construct
  source 1..75: mol_type = other DNA
ggatcttccagccacaggcacaggctatctggatgggcgtcgatcataatgcgcacacggaagccaatggctcac

SEQ ID NO: 312599 - DNA, 75 bp, synthetic construct
  source 1..75: mol_type = other DNA
cggacagacttattgttgagggtaatacttcgggttcaactaccgtctatgtgaaaaatgctggaggaagcggcg

SEQ ID NO: 312600 - DNA, 75 bp, synthetic construct
  source 1..75: mol_type = other DNA
tagatgtagtgattatattaatccagagcataaagaaacgataaaggctttacaagatgctggctatctcaagta

SEQ ID NO: 312601 - DNA, 75 bp, synthetic construct
  source 1..75: mol_type = other DNA
agtgaaagccgccagtggcttgcgcagtgcgggctgacggtggagcggctggcggcacagatagagccggtttat

SEQ ID NO: 312602 - DNA, 75 bp, synthetic construct
  source 1..75: mol_type = other DNA
gggctggaggggggatggagtctgtatgcgtatccgctgaatccggtgaatggtattgatccattagggttaagt

SEQ ID NO: 312603 - DNA, 75 bp, synthetic construct
  source 1..75: mol_type = other DNA
tcttccataaatggtcaggaagcaacggtagatattttatctggtagctcactacggtcagcaaatgaaatcctc

SEQ ID NO: 312604 - DNA, 75 bp, synthetic construct
  source 1..75: mol_type = other DNA
cggctggcaaacagctggtggcccggtgcggtgattagcgaagagctggcaacggcggcagcattgcgtcagcag

SEQ ID NO: 312605 - DNA, 75 bp, synthetic construct
  source 1..75: mol_type = other DNA
tgcaccagccataccgtctgccggggcagcagtatgatgaggagtcggggctgtattataaccggaaccggtact

SEQ ID NO: 312606 - DNA, 75 bp, synthetic construct
  source 1..75: mol_type = other DNA
tgatcaaaaaagatgtaagtgatgtaaagcaacaaggttcagaaaccatcccggtcgataatttacttcactatc

SEQ ID NO: 312607 - DNA, 75 bp, synthetic construct
  source 1..75: mol_type = other DNA
tacaacacgcaaattaaagatctctcgctggggggtcctggaactacagtaagtcccgtggtcaacctgatgctg

SEQ ID NO: 312608 - DNA, 75 bp, synthetic construct
  source 1..75: mol_type = other DNA
aaacttatgtatcgcctggtgcttttgaaattagtgatctctattccacgtcgtcgagcggtgatttgttagttg

SEQ ID NO: 312609 - DNA, 75 bp, synthetic construct
  source 1..75: mol_type = other DNA
ttgccgaataagttatcaactaaccgaacagcaaattaactcagcgattacgcgtatggaggccatatgcagata

SEQ ID NO: 312610 - DNA, 75 bp, synthetic construct
  source 1..75: mol_type = other DNA
atagcgacgctggaaggtgtacagaccaatagcggcataattgatgatgatggctcgctttatatgtccggttta

SEQ ID NO: 312611 - DNA, 75 bp, synthetic construct
  source 1..75: mol_type = other DNA
ttaattttgttgagataacgccagagaaggggattgccgcctgtttgacgactgaaagcctggatgcaatgggcg

SEQ ID NO: 312612 - DNA, 75 bp, synthetic construct
  source 1..75: mol_type = other DNA
ggtatggtggtggacaatatgctgaatattaccgtgccgccatgtttggtctgggatttaaccttggcgatttcg

SEQ ID NO: 312613 - DNA, 75 bp, synthetic construct
  source 1..75: mol_type = other DNA
gcaacctgccaacagcctttgtaaaaaagttacaaaactatgatgagcttaaaaaacgtcaggatgaatcagaga

SEQ ID NO: 312614 - DNA, 75 bp, synthetic construct
  source 1..75: mol_type = other DNA
tatagctcattatttattgtcttttttaaagccactttcaattagaacatttgatgatggtactgctaatattac

SEQ ID NO: 312615 - DNA, 75 bp, synthetic construct
  source 1..75: mol_type = other DNA
ccttccaactttttttgtcattagagattgtaaaactcgaaaatctcccccccagtagatgcattttttttcttt

SEQ ID NO: 312616 - DNA, 75 bp, synthetic construct
  source 1..75: mol_type = other DNA
ccgccacagtttatcgcctgaaatgcagaataaagccttagggaaggtgcgaataagcggggaaatacttctcgg

SEQ ID NO: 312617 - DNA, 75 bp, synthetic construct
  source 1..75: mol_type = other DNA
gccggcaccgttacaggagccggttttgctcacgcaggttctgttcaccggtagccggaaatctgcgctgcaggt

SEQ ID NO: 312618 - DNA, 75 bp, synthetic construct
  source 1..75: mol_type = other DNA
ttccgagagccgatgtttattctctcttgataaaatcaaaagctcttcttttcccaagtaaattagaaacttatg

SEQ ID NO: 312619 - DNA, 75 bp, synthetic construct
  source 1..75: mol_type = other DNA
ccctgggactatcgtggaactacagtaaatcacgtggccagcctgaagccgaccaggtatttgcgctgaattttt

SEQ ID NO: 312620 - DNA, 75 bp, synthetic construct
  source 1..75: mol_type = other DNA
caatacaggttcccgaatcatgcaaagaattagaactcgatttcaataaccttacagaatttccacaagtacctg

SEQ ID NO: 312621 - DNA, 75 bp, synthetic construct
  source 1..75: mol_type = other DNA
cacttggctggttaattctcaaaattagccccggttcagaagatgatgacgaagaaaatccggtcatcgtcggtg

SEQ ID NO: 312622 - DNA, 75 bp, synthetic construct
  source 1..75: mol_type = other DNA
ggtaaacgggtgtggcgtcgcgggcgtgacctgacaggatggatgtcgctgtcgcgtaaaccggaggagacgtgg

SEQ ID NO: 312623 - DNA, 75 bp, synthetic construct
  source 1..75: mol_type = other DNA
acctggcaatttaaaattactttttatggaatgcaatcccattaaagaggcatttttaatgccatgggctctgac

SEQ ID NO: 312624 - DNA, 75 bp, synthetic construct
  source 1..75: mol_type = other DNA
atgtttccattaaatgatctttcgttaaaaactcagccggttcaattgaataaaatcacatcaaatactgaatct

SEQ ID NO: 312625 - DNA, 75 bp, synthetic construct
  source 1..75: mol_type = other DNA
gataagtttacaccagttagtgaagactgcaacttactgaatatgctgtctgaatttaagttattgagagagcaa

SEQ ID NO: 312626 - DNA, 75 bp, synthetic construct
  source 1..75: mol_type = other DNA
gaagcggctatcgtgctcgggaaagagtcattgagaaattttctgctaaaaaaatcgtatctcaatgggaagata

SEQ ID NO: 312627 - DNA, 75 bp, synthetic construct
  source 1..75: mol_type = other DNA
tcctgacgtcggtgccggcggacatgacccgtggcgacggggaagggaacacctacggtgatgtgtaccattacc

SEQ ID NO: 312628 - DNA, 75 bp, synthetic construct
  source 1..75: mol_type = other DNA
tttattctctgactgatgaaaacgggaatattatctcacagactgagtataaagtgacgacagctgacgggcagg

SEQ ID NO: 312629 - DNA, 75 bp, synthetic construct
  source 1..75: mol_type = other DNA
tcaggaaaatggaaggactgtggtaaaggttgtcgaatccgaatagatggcgatgctgttggtgacggaagacat

SEQ ID NO: 312630 - DNA, 75 bp, synthetic construct
  source 1..75: mol_type = other DNA
agacggtctaccagccggggagcttcacgccgctcatccgcatcgaaacggagaacggcgaacgggagaaagcgc

SEQ ID NO: 312631 - DNA, 75 bp, synthetic construct
  source 1..75: mol_type = other DNA
gtgaagattgattatgtcattacaggcatggatgtcggaggcgctgagatgcaggttgtcgaattgcttcttgag

SEQ ID NO: 312632 - DNA, 75 bp, synthetic construct
  source 1..75: mol_type = other DNA
ggccgtagctcccgctggctgaaaagcgaagtggaagcctggctgcaggcgcgtattgcacagtcccgtccgtaa

SEQ ID NO: 312633 - DNA, 75 bp, synthetic construct
  source 1..75: mol_type = other DNA
ctgttgtggtgaagccgtcggatggagaaggcacagtaatcagcgccaccagagacccggagtattactttgttg

SEQ ID NO: 312634 - DNA, 75 bp, synthetic construct
  source 1..75: mol_type = other DNA
ggccggagagcggcttgacccggtacagtcaggaatatggatggcctgcggaaatgcagaagctgaagagaaaat

SEQ ID NO: 312635 - DNA, 75 bp, synthetic construct
  source 1..75: mol_type = other DNA
gaggttcactgacgctgcgtgactacgatggtcaggttgcagagggtatggtcatggtgcgtattttcatgaaag

SEQ ID NO: 312636 - DNA, 75 bp, synthetic construct
  source 1..75: mol_type = other DNA
tacggctacagtgccacgggcaggctggagagcgtgcgcaccctcgcaccggacctggacatccgcatcccgtat

SEQ ID NO: 312637 - DNA, 75 bp, synthetic construct
  source 1..75: mol_type = other DNA
cgcagtatgagtacaacgccgcaggcgacctgactgccgttatcaccccggacggcaaccggagcgagacacagt

SEQ ID NO: 312638 - DNA, 75 bp, synthetic construct
  source 1..75: mol_type = other DNA
accgtgagtaatgaacatggcttgtcggaatatctggcaggtaaagatgagctcaacaaagtgatccagcatttt

SEQ ID NO: 312639 - DNA, 75 bp, synthetic construct
  source 1..75: mol_type = other DNA
tctgtatatccttgtggatttaaagagtccacattggatcagttaagggaggattggaataattttgcagataaa

SEQ ID NO: 312640 - DNA, 75 bp, synthetic construct
  source 1..75: mol_type = other DNA
catcgacgcatcaagaattggcactccaggtacgaagttagttaataaagatgttaaccatccaataattgttta

SEQ ID NO: 312641 - DNA, 75 bp, synthetic construct
  source 1..75: mol_type = other DNA
taagcctcttcagaacgagcatggcggctggatttacgaagagaaggaggtcacccgcaaccagtgggaagcccg

SEQ ID NO: 312642 - DNA, 75 bp, synthetic construct
  source 1..75: mol_type = other DNA
gtgtggggaattggactccaggaggccatacggaacagtgggctgaaaaccggcgacatggccacactgaccatg

SEQ ID NO: 312643 - DNA, 75 bp, synthetic construct
  source 1..75: mol_type = other DNA
cccctgccgtttcagccaccaaagaaaaaacaggcgtctcctgacaccacagagccggacgggatccggatagaa

SEQ ID NO: 312644 - DNA, 75 bp, synthetic construct
  source 1..75: mol_type = other DNA
cgaagctacaaggtttattgataatgaaaagaaattttcaataacttttaatgatgagagggatttcaaggtttc

SEQ ID NO: 312645 - DNA, 75 bp, synthetic construct
  source 1..75: mol_type = other DNA
gattttggtgatttcagcagttggcaatattctctcgtcattttagccatatttatgacaggcacatggatctgt

SEQ ID NO: 312646 - DNA, 75 bp, synthetic construct
  source 1..75: mol_type = other DNA
ggtatgaccgtcacggcaggctgacagagaaaaccgacctcatcccggaaggggttatccgcacggatgatgagc

SEQ ID NO: 312647 - DNA, 75 bp, synthetic construct
  source 1..75: mol_type = other DNA
ctgaccacgatacagaacgacagaacccgcatccagacgatttatcagccggggagcttcacgccactcatcagg

SEQ ID NO: 312648 - DNA, 75 bp, synthetic construct
  source 1..75: mol_type = other DNA
tcgttaaaacgtaacgtggatcttgaaaatgcagtagtaaacgtggttcccaccaaaggggcgttggttctggcg

SEQ ID NO: 312649 - DNA, 75 bp, synthetic construct
  source 1..75: mol_type = other DNA
tatctgtcgcattacgagaaactttcatcgttggtttaacatggtatcaaagccaggctcgtctcaaattacctt

SEQ ID NO: 312650 - DNA, 75 bp, synthetic construct
  source 1..75: mol_type = other DNA
tgcctgctatttaccattatatgggtattagtaacatcgtcatcggtttagcagtagtttactccttcaatataa

SEQ ID NO: 312651 - DNA, 75 bp, synthetic construct
  source 1..75: mol_type = other DNA
gcgtttggcgtgtcctgccgtacgctttactggtggcgtcagttgctgaacaagggcgggcctgaaggtcttatc

SEQ ID NO: 312652 - DNA, 75 bp, synthetic construct
  source 1..75: mol_type = other DNA
cctattcatcctgtggaacaaccaagatatttttgtggtgaaaaacagcttgaattttcttacaggatattaaag

SEQ ID NO: 312653 - DNA, 75 bp, synthetic construct
  source 1..75: mol_type = other DNA
atttaagacaccaattggaggtttgggggcatctccacaaatttcattcagcgatgctgacggtaacccagtaac

SEQ ID NO: 312654 - DNA, 75 bp, synthetic construct
  source 1..75: mol_type = other DNA
tacgtctggccaaaccctacagtggtgatgcttatggttttcattttccgctgattcagggaacggaagtggcta

SEQ ID NO: 312655 - DNA, 75 bp, synthetic construct
  source 1..75: mol_type = other DNA
cgcttattgcaacactgtatgcctcaaagaaaaaaatacatacagggatccactttctacggtcagtattgcagg

SEQ ID NO: 312656 - DNA, 75 bp, synthetic construct
  source 1..75: mol_type = other DNA
gaaagatgcgctgaaagggcaggtggcggtggcgtttgtcattccgaaagagagcgatagtctggaagatcgtga

SEQ ID NO: 312657 - DNA, 75 bp, synthetic construct
  source 1..75: mol_type = other DNA
tcttatggttacggatgctatagtacaagcagcgaccggcaattccttcatggaacaagccctgaatccgatcat

SEQ ID NO: 312658 - DNA, 75 bp, synthetic construct
  source 1..75: mol_type = other DNA
ccctaactatctaatcgatacgagattttttatagataagtttgagttgtataccaattcaagttattgggcaaa

SEQ ID NO: 312659 - DNA, 75 bp, synthetic construct
  source 1..75: mol_type = other DNA
tctcttatggcctttgagcattatcgcgaccgatgcgaatctggaggaaaacgatgggacatctcctgagaaatc

SEQ ID NO: 312660 - DNA, 75 bp, synthetic construct
  source 1..75: mol_type = other DNA
aatattgatcatttttgtatcatcgatagacagggcaggaaacgatttcgctggataacagttgggcggcttgta

SEQ ID NO: 312661 - DNA, 75 bp, synthetic construct
  source 1..75: mol_type = other DNA
gctgggatgcccgggacagatcctgttaaaaagcacgaatatgcagaagatgggaccaacaagtcttgatattgc

SEQ ID NO: 312662 - DNA, 75 bp, synthetic construct
  source 1..75: mol_type = other DNA
aactaacgacgaagcgtggcaggccgccgagcggttaatctcgcatcttgatgatgaaactatcgccaaagcaca

SEQ ID NO: 312663 - DNA, 75 bp, synthetic construct
  source 1..75: mol_type = other DNA
ggtgttcatcagtatggtcctgctgaacatttcacccacattatatctgacaaaccgtccccaaaagatgagtat

SEQ ID NO: 312664 - DNA, 75 bp, synthetic construct
  source 1..75: mol_type = other DNA
tgtcgctgttgactgaggcaacggcgcagcaacgggagatcctctcctatttcacctatcacgatatcgagagcg

SEQ ID NO: 312665 - DNA, 75 bp, synthetic construct
  source 1..75: mol_type = other DNA
caaaagaatattcccgtggatatgggcgtagagtactttaacgaacgggttgcaccgaatgtttttaatttactg

SEQ ID NO: 312666 - DNA, 75 bp, synthetic construct
  source 1..75: mol_type = other DNA
gttaaattatctgtggatcatacatattcattatataaaaaaatattcacaaaatcctcaatctctgctggatat

SEQ ID NO: 312667 - DNA, 75 bp, synthetic construct
  source 1..75: mol_type = other DNA
gcactatcttactgataaaatagcaaataaaggtgacacccatttctggttttgcggcccacagagttttgccaa

SEQ ID NO: 312668 - DNA, 75 bp, synthetic construct
  source 1..75: mol_type = other DNA
tctggcatcctcgataaaaatcggccagtccgccttcgttgaagggccatggggaaagtttgattttactctccc

SEQ ID NO: 312669 - DNA, 75 bp, synthetic construct
  source 1..75: mol_type = other DNA
attgctgtgatgggaggacatattttgggtgcgaaagtgagcacagaaaatgtccatcgctggtcgcagtttgct

SEQ ID NO: 312670 - DNA, 75 bp, synthetic construct
  source 1..75: mol_type = other DNA
ccgtacaaccaaacacttctcaaaagaagacgagaaggagtttaatcgcaatcgtagcagtaaaacgaacgttga

SEQ ID NO: 312671 - DNA, 75 bp, synthetic construct
  source 1..75: mol_type = other DNA
cacggaggtatccaatactgcgtctcatacaggaagttattgatccagcagtagctgcttatgtaaattccctgc

SEQ ID NO: 312672 - DNA, 75 bp, synthetic construct
  source 1..75: mol_type = other DNA
aaacgcgttacatcgatcctgtaactgaacaggagcgttcaagccgactttggctacgtcaaattggcgggcata

SEQ ID NO: 312673 - DNA, 75 bp, synthetic construct
  source 1..75: mol_type = other DNA
taagcacattccgatgaataaatatttcctcaagcaacagctggcctgggtgccatttcttggcctggcgtgcta

SEQ ID NO: 312674 - DNA, 75 bp, synthetic construct
  source 1..75: mol_type = other DNA
gcttatcgatcgcttcggcctgctgccggatccggcgcgtaccctgctggatattgcccgtctgcgccagcaagc

SEQ ID NO: 312675 - DNA, 75 bp, synthetic construct
  source 1..75: mol_type = other DNA
atgaatgatttccatcatcaacgtttcaacgtgctggtttgtaccaccattatcgaaaccgggatcgacatcccg

SEQ ID NO: 312676 - DNA, 75 bp, synthetic construct
  source 1..75: mol_type = other DNA
atattttcatgagtggatgcagggtcaaactttaaccccagcagatctagataaacttaggaatatcgccagacg

SEQ ID NO: 312677 - DNA, 75 bp, synthetic construct
  source 1..75: mol_type = other DNA
agcgctgggtaatcagattgcgcgagacagtacaaagctacgcaccctcagcgacaaactgttaaaagcccggaa

SEQ ID NO: 312678 - DNA, 75 bp, synthetic construct
  source 1..75: mol_type = other DNA
atgcctgatttcctgaaaaaccaggacgggcgctatatcactgacggcctgtcctctaaggacttcacgcgttta

SEQ ID NO: 312679 - DNA, 75 bp, synthetic construct
  source 1..75: mol_type = other DNA
gaagaagcaggcgttcattgatgcgcttgtcatggcaggaacgtcacctgagcaagctgaaaaaatgtttataga

SEQ ID NO: 312680 - DNA, 75 bp, synthetic construct
  source 1..75: mol_type = other DNA
aaatgcgctacatcgatcctgtaactgaacaggagcgttcaagccgactttggctacgtcaaattggcgggcata

SEQ ID NO: 312681 - DNA, 75 bp, synthetic construct
  source 1..75: mol_type = other DNA
ctgtttgctgggattggaggtatacggaagggcttcgaaaccatcggtggccagtgcgtttttaccagtgaatgg

SEQ ID NO: 312682 - DNA, 75 bp, synthetic construct
  source 1..75: mol_type = other DNA
ttgatgcgatggtaatgactggtgtatcacgtcaggatgccgagaaacgcttcctggactacgtgaaaaacaaag

SEQ ID NO: 312683 - DNA, 75 bp, synthetic construct
  source 1..75: mol_type = other DNA
attgtaaaactataccccttaactgatttttacaaactcgaaagaagtattgatatgctatttgaatataaaaag

SEQ ID NO: 312684 - DNA, 75 bp, synthetic construct
  source 1..75: mol_type = other DNA
aggtgatatcaagtcagcatatgaccactttgataaaacattctctgataactcaacaatccaacacatacatcg

SEQ ID NO: 312685 - DNA, 75 bp, synthetic construct
  source 1..75: mol_type = other DNA
cactactatccagaaaaggcgctgagtggttttttcaaaaaataatagcgggagaaatcagcgcagatgaatttt

SEQ ID NO: 312686 - DNA, 75 bp, synthetic construct
  source 1..75: mol_type = other DNA
agtaaacactctataaatgtcgtattaccgccaaaagcatcgtataaacaatctattcaatatgagttttgtcca

SEQ ID NO: 312687 - DNA, 75 bp, synthetic construct
  source 1..75: mol_type = other DNA
ccggatgcgataaatggatcaaacaggaatggaacggaagatgtctgcggtatgcaggtgaacagttcccattac

SEQ ID NO: 312688 - DNA, 75 bp, synthetic construct
  source 1..75: mol_type = other DNA
ccagatgcgataaatggttcaaacaagaatgggacagaagatgtctgcgggatgcaggtgaacagctctcattac

SEQ ID NO: 312689 - DNA, 75 bp, synthetic construct
  source 1..75: mol_type = other DNA
ttgacgaggtattgggtgtcatttgccgcatggttggtgagcactcaacaggcagtttcgatgctatcaataaat

SEQ ID NO: 312690 - DNA, 75 bp, synthetic construct
  source 1..75: mol_type = other DNA
tcagcggtaacggcacggtgggggcgaacctcggcccgtggcgtctgcgcgccgactggcagacggactaccagc

SEQ ID NO: 312691 - DNA, 75 bp, synthetic construct
  source 1..75: mol_type = other DNA
tatttttgtattataggcggtaatattaatgacgctatgctacatttatttttcgaacacgaaaaaataaaaacc

SEQ ID NO: 312692 - DNA, 75 bp, synthetic construct
  source 1..75: mol_type = other DNA
aaataaaaaaatactactatccaggaaaggtgtcgagtggtttttccaaaaaatcagagcgggggaaatcagcgc

SEQ ID NO: 312693 - DNA, 75 bp, synthetic construct
  source 1..75: mol_type = other DNA
cctttgctgatacggcggctggccttgcagcgacgacgagcgggcaatacttccgcgttccccaggggacaggaa

SEQ ID NO: 312694 - DNA, 75 bp, synthetic construct
  source 1..75: mol_type = other DNA
ctgtcattcgacccctggatttatcgttaaccgtgttgcgcgtccttattattccgaggcctggcgggcactgga

SEQ ID NO: 312695 - DNA, 75 bp, synthetic construct
  source 1..75: mol_type = other DNA
agaattcatcatttacatctgagtacatcgttcccaatttactaatgcaatggataggtcgccgagttaaatccc

SEQ ID NO: 312696 - DNA, 75 bp, synthetic construct
  source 1..75: mol_type = other DNA
aagtgggttgtcgctggaactgtctgggggatttataattacgccaatggcaaaaaccacgcagcatacagtaaa

SEQ ID NO: 312697 - DNA, 75 bp, synthetic construct
  source 1..75: mol_type = other DNA
tggaataaatctgcccgtagtgatggatggaaaagcatatgccccattaggaatgggaataacaacagcgcgtac

SEQ ID NO: 312698 - DNA, 75 bp, synthetic construct
  source 1..75: mol_type = other DNA
accaacctgaaaacaggtgagggtcttgtcattcttggagctgaaaaaacattcaataatatctacataaccagt

SEQ ID NO: 312699 - DNA, 75 bp, synthetic construct
  source 1..75: mol_type = other DNA
cctgtctattcggtattgggtttttcatattattatttccctgtttcattttttattctgtttttcattattaga

SEQ ID NO: 312700 - DNA, 75 bp, synthetic construct
  source 1..75: mol_type = other DNA
agcaatgctgtaccagcagattaccagcaaattaccacagataaagaatataataatattatctctaatactgac

SEQ ID NO: 312701 - DNA, 75 bp, synthetic construct
  source 1..75: mol_type = other DNA
aacgggaatctggacgtacttcagcatcatgagacgaaaaaagagaaccgtcgtcttattcttgatgggggcgtg

SEQ ID NO: 312702 - DNA, 75 bp, synthetic construct
  source 1..75: mol_type = other DNA
aaaccaagaaatctcaagattatttttgctgctggtcaaggggatgcaggaacaaaagctgtcaatcatttatct

SEQ ID NO: 312703 - DNA, 75 bp, synthetic construct
  source 1..75: mol_type = other DNA
ggcataggggcacctgaagttatagctgaagtaacagatgaagaggggattacctccgaacttatcgcaactgtt

SEQ ID NO: 312704 - DNA, 75 bp, synthetic construct
  source 1..75: mol_type = other DNA
gaatacatttgtgataacaataatgctgcttccgaaagagttaagccaagaattaaaactattgaaaaaatacaa

SEQ ID NO: 312705 - DNA, 75 bp, synthetic construct
  source 1..75: mol_type = other DNA
tcgttgctggttgttggtgcctttagcaccgctttccgttgtgtatgtattattagcttatgccatctggattat

SEQ ID NO: 312706 - DNA, 75 bp, synthetic construct
  source 1..75: mol_type = other DNA
agccagttatttttacagtacgatgtcaccttctgaagagttagaaaatggcaaggcgctgttgtcttcttatca

SEQ ID NO: 312707 - DNA, 75 bp, synthetic construct
  source 1..75: mol_type = other DNA
atgttatctgatagaattaatcagatgcaggaatttgtaccatcttcagatgacattgcagtaattgatgcgctc

SEQ ID NO: 312708 - DNA, 75 bp, synthetic construct
  source 1..75: mol_type = other DNA
caactgctgaaagacgcaggcgacagcaacatgaaacgcgtctggctggaagcaggtggtaaaagcgccaacatc

SEQ ID NO: 312709 - DNA, 75 bp, synthetic construct
  source 1..75: mol_type = other DNA
gtctgaaaaatcaccgctcagtgcgattcgccttgcggggctggcgaaagaagcaggtctgccggatggcgtgct

SEQ ID NO: 312710 - DNA, 75 bp, synthetic construct
  source 1..75: mol_type = other DNA
aagcggggctgccggatggcgtgctgaacgtagtgagcggttatggtcatgaagccgggcaggcgctttcgcgtc

SEQ ID NO: 312711 - DNA, 75 bp, synthetic construct
  source 1..75: mol_type = other DNA
ctgtattgccggtgatggcgaaagtcgcgacattgctgttattcgctttgaagcctgcatatggaaattaaatgg

SEQ ID NO: 312712 - DNA, 75 bp, synthetic construct
  source 1..75: mol_type = other DNA
atgtcaaaaaattatcctggggatgactcgcgtgatcagcaaatggaagttctcgcgaagcagctgcctgacgat

SEQ ID NO: 312713 - DNA, 75 bp, synthetic construct
  source 1..75: mol_type = other DNA
ggcaccgctggcgaaaattgcccgcggcaagagcgtcgatatcgaccgtgcggtgagcgcagcacgcggcgtatt

SEQ ID NO: 312714 - DNA, 75 bp, synthetic construct
  source 1..75: mol_type = other DNA
atgaaacacgatagagcggaaattatcttcgatatggtgcgtgaaagagtgtgcgctatggatactaagattgcg

SEQ ID NO: 312715 - DNA, 75 bp, synthetic construct
  source 1..75: mol_type = other DNA
gtggcagcacaggatcagggggaatttgagcagatctaccgccgcctgtaccacgtcctgcataaactacgcggc

SEQ ID NO: 312716 - DNA, 75 bp, synthetic construct
  source 1..75: mol_type = other DNA
atggctgacccaatcacagcggcagacgtgcaggcgttcctcggtgaattgggttactccatcccgggcgcgctg

SEQ ID NO: 312717 - DNA, 75 bp, synthetic construct
  source 1..75: mol_type = other DNA
agcgccaccgccgcaggcatcttctacaaccagggccaggtgtgcatcgccggaacgcgtttgttgctggaagag

SEQ ID NO: 312718 - DNA, 75 bp, synthetic construct
  source 1..75: mol_type = other DNA
gccgaagggattgcgatggatgcctctggtaatatttatatcgttagcgaaccaaatcgtttttatcgctttacc

SEQ ID NO: 312719 - DNA, 75 bp, synthetic construct
  source 1..75: mol_type = other DNA
gtgctccttaagttttatctcggtggaggcattgaaagatgcgaggatctcattgataaatatgttgaagatatc

SEQ ID NO: 312720 - DNA, 75 bp, synthetic construct
  source 1..75: mol_type = other DNA
gcgaacggcgcaagcaactggcaaaggagcgttccaaagaatacaaagagcggatgattactgttcagcgttata

SEQ ID NO: 312721 - DNA, 75 bp, synthetic construct
  source 1..75: mol_type = other DNA
agaagctatagatgggtttattacccgttgctatgaaaatccacagtgcgcccagctcccctatacatttatgtt

SEQ ID NO: 312722 - DNA, 75 bp, synthetic construct
  source 1..75: mol_type = other DNA
tggcgcaaatgaaaaaacacaatctgcccagggaagtattctggtgctttgaccatgaacagtggagattcgcat

SEQ ID NO: 312723 - DNA, 75 bp, synthetic construct
  source 1..75: mol_type = other DNA
gcgactttaggcaattaatgaagtcgattccaaaggatatgcggcaggaagttgcgctcacctcaatgaataaag

SEQ ID NO: 312724 - DNA, 75 bp, synthetic construct
  source 1..75: mol_type = other DNA
gcctgcgctccggcgttaatcgccagtgaaggcagcatgattttcacactgtcaatggcggacatcagctcatcc

SEQ ID NO: 312725 - DNA, 75 bp, synthetic construct
  source 1..75: mol_type = other DNA
gatggaaatgaaagaagaaccggataacctggattatttacatccagtcagaggagtgacgattggcaacaatca

SEQ ID NO: 312726 - DNA, 75 bp, synthetic construct
  source 1..75: mol_type = other DNA
tggaaaagaaggcagtggagaggttacggcaggaaaagtggaagccagcgttacgttaagcatgacttattacta

SEQ ID NO: 312727 - DNA, 75 bp, synthetic construct
  source 1..75: mol_type = other DNA
atttccctgtgcctgacgtggcacctaaggagccgcgcgtggcagatcttgatgatggctatacgcgcatcgcca

SEQ ID NO: 312728 - DNA, 75 bp, synthetic construct
  source 1..75: mol_type = other DNA
tgactgggtcagtaacgagcagctctcggagctgaccggcattctcccgcataagtgctcagctgcaaaaagcgt

SEQ ID NO: 312729 - DNA, 75 bp, synthetic construct
  source 1..75: mol_type = other DNA
cgaatcaaatacgtaaacacaccgccgatcgtcagagtaaccacgaacaggatgagtttgagggtgatagtttaa

SEQ ID NO: 312730 - DNA, 75 bp, synthetic construct
  source 1..75: mol_type = other DNA
aagtacacatccttttcaatatggtcgctctgcttttactgattggcttaatgctgacggttttaacaacactaa

SEQ ID NO: 312731 - DNA, 75 bp, synthetic construct
  source 1..75: mol_type = other DNA
gaagattcaacgtagcgccaggaacaaaagttctgcttctgagcgaacgtgatgagcagttgcatcttgatccag

SEQ ID NO: 312732 - DNA, 75 bp, synthetic construct
  source 1..75: mol_type = other DNA
aaaagccagaaaccattcaaccacaatccaaaccatcatccgcaatcaccgtatcgaaaactggctacgtgtttt

SEQ ID NO: 312733 - DNA, 75 bp, synthetic construct
  source 1..75: mol_type = other DNA
ggatgatgaaaccttagttgagttaaagcttgaaattgaaaaaagaatttgggaggatgattttgaaaaggatca

SEQ ID NO: 312734 - DNA, 75 bp, synthetic construct
  source 1..75: mol_type = other DNA
aaataatggctgtgggaagtcgacgattctcgatgcaatccagaaggggttaacacatctatcctcgagattatc

SEQ ID NO: 312735 - DNA, 75 bp, synthetic construct
  source 1..75: mol_type = other DNA
tgccaaatgcctggaagcttcgccgcaagcattgattgtcgatgagccgacgcgcggcgtggatgtctcggcccg

SEQ ID NO: 312736 - DNA, 75 bp, synthetic construct
  source 1..75: mol_type = other DNA
aggtgactggcgaatgaaatgggcgacttacatcccggggcatcctgacgctaatgatgggtggataattcctgg

SEQ ID NO: 312737 - DNA, 75 bp, synthetic construct
  source 1..75: mol_type = other DNA
agagaagcggattgctgaattggagtcgctgacggctccacggttaacgcagcaagcggtgccggatgaaatgcc

SEQ ID NO: 312738 - DNA, 63 bp, synthetic construct
  source 1..63: mol_type = other DNA
atgcggcgtaaacgccttatccgacctacaaaatcacgctacatcaggctattgcgctgtctg

SEQ ID NO: 312739 - DNA, 75 bp, synthetic construct
  source 1..75: mol_type = other DNA
aatgttatatcagatttcggaattgcaaactatcttattcacaaaactaatattgagatagaagaactctctgct

SEQ ID NO: 312740 - DNA, 75 bp, synthetic construct
  source 1..75: mol_type = other DNA
tgtaaaagaaaagtcattcatcattacaccgccactgtttgttagtgaacccaaggtaatgctgccaacttactg

SEQ ID NO: 312741 - DNA, 75 bp, synthetic construct
  source 1..75: mol_type = other DNA
cgacaaagggcgtgtttgagaatgaagaaacagacctgggcactgttgatgttctccagtcatcagaaacacaaa

SEQ ID NO: 312742 - DNA, 75 bp, synthetic construct
  source 1..75: mol_type = other DNA
accgtttggtgggatgaagcagtcaggaacgggccgtgattttggccccgactggctggacggttggtgtgaaac

SEQ ID NO: 312743 - DNA, 75 bp, synthetic construct
  source 1..75: mol_type = other DNA
gcgcggccctgacgtcacatcctcatgttgcgaaaatcagttttaccggttcaaccgcgacgggaaaaggtattg

SEQ ID NO: 312744 - DNA, 75 bp, synthetic construct
  source 1..75: mol_type = other DNA
aaggcaagtcaattgccatttcccgtgcttttgaagtgggctgtacgctgaactggatgcgttataccgccgggt

SEQ ID NO: 312745 - DNA, 75 bp, synthetic construct
  source 1..75: mol_type = other DNA
aaaagaagcgagcgtactgacgaaatcataagaattctcgaatatattgataatacgttaattacctttagcaat

SEQ ID NO: 312746 - DNA, 75 bp, synthetic construct
  source 1..75: mol_type = other DNA
aaagtcgcacgtccggttcggaggggggctgacggaaaagtgccaatacagcaactcgtcggcagcctaccctac

SEQ ID NO: 312747 - DNA, 75 bp, synthetic construct
  source 1..75: mol_type = other DNA
cggcaattgatgcgcatgatgatgcagtccaggcagtttaccggaaagcacatttcagcggcggtgggtcgcccg

SEQ ID NO: 312748 - DNA, 75 bp, synthetic construct
  source 1..75: mol_type = other DNA
cgcgcaggtcaacaataaaggaaaagtcgggattatcgcgcatgtagcaggaacttcttccgccattgaacgctc

SEQ ID NO: 312749 - DNA, 75 bp, synthetic construct
  source 1..75: mol_type = other DNA
gaaaaaataaaatctgggatttcaacggcggcatccatccaccggagatgaaaacccagtccaacggtacacccc

SEQ ID NO: 312750 - DNA, 75 bp, synthetic construct
  source 1..75: mol_type = other DNA
accctgctccccaaactcatctccggcgagctatccctggaagatcttccggatctcaccaccgatacagaagct

SEQ ID NO: 312751 - DNA, 75 bp, synthetic construct
  source 1..75: mol_type = other DNA
aaggacaacatgctctgctttctaatgcctctcaggttggtgttccttcaattgctcggccttcaacacatttga

SEQ ID NO: 312752 - DNA, 75 bp, synthetic construct
  source 1..75: mol_type = other DNA
cttagcagcctgtatcttgctacaaatcacgacgttaccgtggttctaagcaaaacctatattaagagctgcaat

SEQ ID NO: 312753 - DNA, 75 bp, synthetic construct
  source 1..75: mol_type = other DNA
gcagcatgatgaggagtcggggctgtactataaccgtcaccggcactacgatccgttgcaggggcggtatatcac

SEQ ID NO: 312754 - DNA, 75 bp, synthetic construct
  source 1..75: mol_type = other DNA
accgccagttcttaatcatcctgctgaccaatgcagagtccagtgtcgattgctgtcgctataacttagacctgc

SEQ ID NO: 312755 - DNA, 75 bp, synthetic construct
  source 1..75: mol_type = other DNA
atgaaaaccaggcattttatctatgcgttatctctgctggcttgcgtaagttccagcgcactggcgaaggattta

SEQ ID NO: 312756 - DNA, 75 bp, synthetic construct
  source 1..75: mol_type = other DNA
ttgctgggtaagatcaaacatgttaaaaatgttagagaacactgcacaacggaagagacaaccaagcaggctttg

SEQ ID NO: 312757 - DNA, 75 bp, synthetic construct
  source 1..75: mol_type = other DNA
gaacggaaatccgttacgaccgtcaggctaatgccctgtccatcacgctggctgaaggcggcagctataaaatta

SEQ ID NO: 312758 - DNA, 75 bp, synthetic construct
  source 1..75: mol_type = other DNA
agatatcaaaaacagagtgtttgttcgaattacaaaattacttgagtcatatttgagtcaggcatgtaaacaaat

SEQ ID NO: 312759 - DNA, 75 bp, synthetic construct
  source 1..75: mol_type = other DNA
agcctgcggcttaacaactgccgaactcgccaggctgctcgatctcgatgaagaaattatcatccagtgggagag

SEQ ID NO: 312760 - DNA, 75 bp, synthetic construct
  source 1..75: mol_type = other DNA
cattctatccgatcaggcaacaagatagcctgcatacgcaccaaacgtgaagcctgcggcttgacgactaccgaa

SEQ ID NO: 312761 - DNA, 75 bp, synthetic construct
  source 1..75: mol_type = other DNA
aaacatgtagcctcaatacttacaacaaggtcttatgtgatgatttagacctcgattcttttgcattaaccatcg

SEQ ID NO: 312762 - DNA, 75 bp, synthetic construct
  source 1..75: mol_type = other DNA
gcactgatgccagagtgggctagtcctgttgtattacagttctgggaaaaaactcattgtaaaatggagggaatt

SEQ ID NO: 312763 - DNA, 75 bp, synthetic construct
  source 1..75: mol_type = other DNA
ggcgatgttgaaggcgggggatgtggtgtattgcgatccgccttatgacggtacgttttccggctatcacactga

SEQ ID NO: 312764 - DNA, 75 bp, synthetic construct
  source 1..75: mol_type = other DNA
ttatcagagtaaaacattaacattattcaatgacacaagcggtaaaaaggcgacgaaaagaacggataacctatg

SEQ ID NO: 312765 - DNA, 75 bp, synthetic construct
  source 1..75: mol_type = other DNA
caagtaaaaaatactcagatcgtgctgagtgggtattattcctgaaggtgtactcaaacgctgtgctttttattg

SEQ ID NO: 312766 - DNA, 75 bp, synthetic construct
  source 1..75: mol_type = other DNA
ctgccgattacgccgaagcattaaaacagccggttgatgcccccgttactttattcgtaccccttataatggggt

SEQ ID NO: 312767 - DNA, 75 bp, synthetic construct
  source 1..75: mol_type = other DNA
gcatcgtagggggtgcaacccgtttagcagaaaagctcaatgtatccccaatgacggtcagtcactggcgtcacc

SEQ ID NO: 312768 - DNA, 75 bp, synthetic construct
  source 1..75: mol_type = other DNA
gtcctgggatgcgatccgctttctctgctgagtgaaaacaataccgcagtacctgtgcgcgtaaatgctcctgaa

SEQ ID NO: 312769 - DNA, 75 bp, synthetic construct
  source 1..75: mol_type = other DNA
tggagagtacgagccaaccatcagcatgcttacccccctggcaaacgtcctgggatgcgatccgctttctctgct

SEQ ID NO: 312770 - DNA, 75 bp, synthetic construct
  source 1..75: mol_type = other DNA
attcacggttttttccagcttggcggcattagccagacagcccgtaatctgatgcaggatatttgtgggattgtt

SEQ ID NO: 312771 - DNA, 75 bp, synthetic construct
  source 1..75: mol_type = other DNA
atgatgaagcgtgcggaatggggatccgtgaagataacacactgatcaccaaagacacctcacgtttcgttccgc

SEQ ID NO: 312772 - DNA, 75 bp, synthetic construct
  source 1..75: mol_type = other DNA
tgctcgtggtggcatgtgctgggggggcggcggaaaaggaagtgtcgcttttgatatagatggtatagcgattat

SEQ ID NO: 312773 - DNA, 75 bp, synthetic construct
  source 1..75: mol_type = other DNA
agtctcgccctcgctgagtctaaaagcaaattaaccctgtcacttccggacatacatggtattacgatgacttat

SEQ ID NO: 312774 - DNA, 75 bp, synthetic construct
  source 1..75: mol_type = other DNA
ttatgcgctggacttatggggcaggtctgacggaagaattaaatccgtttgaagtagattttcgtaatcaaggta

SEQ ID NO: 312775 - DNA, 75 bp, synthetic construct
  source 1..75: mol_type = other DNA
cggaatatcaaaagtagatgcttgcagttgtccgaattggtcaaaaggaataattgtagctgatgctgacgattc

SEQ ID NO: 312776 - DNA, 75 bp, synthetic construct
  source 1..75: mol_type = other DNA
tcaaactatcagataaagttattcgtgagggagatttttatgcgttctgcgcacttccattattatccacaatgt

SEQ ID NO: 312777 - DNA, 75 bp, synthetic construct
  source 1..75: mol_type = other DNA
ggcacgtggcggtatgtgctgggggggaggaggtaaaggatgtgttgcttttgatattgatggtaaggcgataat

SEQ ID NO: 312778 - DNA, 75 bp, synthetic construct
  source 1..75: mol_type = other DNA
acgctgctagaggaggccgttcagactatcggcgctatgaccagtgccgtgcaagcaggagatacacaagcagca

SEQ ID NO: 312779 - DNA, 75 bp, synthetic construct
  source 1..75: mol_type = other DNA
agtctttccgtaagcgtgtcgaatatttacctaccgactcagagaatgcgacccgtagcaaggccttgaagcgcc

SEQ ID NO: 312780 - DNA, 75 bp, synthetic construct
  source 1..75: mol_type = other DNA
tcagagaagacaacagtcagtaagtataactagccagaagcttttttcctctcgctcaaacagagtaagggcctg

SEQ ID NO: 312781 - DNA, 75 bp, synthetic construct
  source 1..75: mol_type = other DNA
attgcataaattaaaagaagtttctccagtgctaatgcaaagttgtactcgtgtaattgtaggtagtcaggagtt

SEQ ID NO: 312782 - DNA, 75 bp, synthetic construct
  source 1..75: mol_type = other DNA
atggtatttatcttcctggtagtcccagcaatgtgcagccgcacctatatggtgaaaacggcgatgagcctgacg

SEQ ID NO: 312783 - DNA, 75 bp, synthetic construct
  source 1..75: mol_type = other DNA
gcgtcatcaatcatccttttgcgctgggcgtacagtggcacccggaatggaacagtagcgagtacgcgctttcgc

SEQ ID NO: 312784 - DNA, 75 bp, synthetic construct
  source 1..75: mol_type = other DNA
atttcccctggcagactgttcagaagaaaatccagttccataccgcgcgggcaacagagaccaccgtgtcacgga

SEQ ID NO: 312785 - DNA, 75 bp, synthetic construct
  source 1..75: mol_type = other DNA
ttagcggtgtgggaaaaatgtttagaagtttataacaaaaacaaaagattctcaggtgcttattgggcaatgcaa

SEQ ID NO: 312786 - DNA, 75 bp, synthetic construct
  source 1..75: mol_type = other DNA
atgctatgtgtagatctgtatttacagtcttgtgtggaggatggaaaggaacctgataccccgtttaaaggcgtg

SEQ ID NO: 312787 - DNA, 75 bp, synthetic construct
  source 1..75: mol_type = other DNA
accaggcgttccgtcgcctgtagcctaccgaagcatgcagagcgggtaactgttcggtatgaagccttcgggaca

SEQ ID NO: 312788 - DNA, 75 bp, synthetic construct
  source 1..75: mol_type = other DNA
ttacgattaacgattcaattaaaacatgggtgcagacacaatactccaaagatagtggcttaccgatggcagtta

SEQ ID NO: 312789 - DNA, 75 bp, synthetic construct
  source 1..75: mol_type = other DNA
taatcagccacagtaccaggtccagttcgagcagaatgtcacggtacagggcttcatactctgcatccctgtccc

SEQ ID NO: 312790 - DNA, 75 bp, synthetic construct
  source 1..75: mol_type = other DNA
gggtttgttcttgccacgaaggcgcttcagccccgactgtccgcgctggatccgacgaagggaataaaaaaaatc

SEQ ID NO: 312791 - DNA, 75 bp, synthetic construct
  source 1..75: mol_type = other DNA
ggctggagcaggtggaaaatgctggtatggcaacggggatgaatagccaggaggccactcacctgccggatacgg

SEQ ID NO: 312792 - DNA, 75 bp, synthetic construct
  source 1..75: mol_type = other DNA
ctgcccggcgagacggaccttgcgctgcccggcccgctgccgttcattctctcccgcacctacagcagctaccgg

SEQ ID NO: 312793 - DNA, 75 bp, synthetic construct
  source 1..75: mol_type = other DNA
ccaatcctgatggtggtgtcaaagggattattctgaccacactggctaacccggacgcctccgggcttcgattta

SEQ ID NO: 312794 - DNA, 75 bp, synthetic construct
  source 1..75: mol_type = other DNA
gttgtgtggagaactgtttaaaagggaagtttaaagaggtaaggccgcgttattctgtattgcctgatatattca

SEQ ID NO: 312795 - DNA, 75 bp, synthetic construct
  source 1..75: mol_type = other DNA
cagtagttacttgggaacaccaaataacacctatctaaaatataatcccaaagctaaagggaatggagttacaat

SEQ ID NO: 312796 - DNA, 75 bp, synthetic construct
  source 1..75: mol_type = other DNA
aatattcattagccatgagtgagtttcttgcaaagaaaaatatatcagctgttgcattcttcgctgatggagcgt

SEQ ID NO: 312797 - DNA, 75 bp, synthetic construct
  source 1..75: mol_type = other DNA
gccgtgttcctgacggcgttgcgatacagcgtgtgggggctgaagctgccgacgctgcgccagcgcctgttccgc

SEQ ID NO: 312798 - DNA, 75 bp, synthetic construct
  source 1..75: mol_type = other DNA
gagcgctaacaacattacaaacttctatagcgactcaccacacaagaaagattcaacacctgctagcgttactaa

SEQ ID NO: 312799 - DNA, 75 bp, synthetic construct
  source 1..75: mol_type = other DNA
gtagttggttatcctgtaggaatggaaattacaagcgaagcgaacgacatagtcaacacgcatgtatggggtttg

SEQ ID NO: 312800 - DNA, 75 bp, synthetic construct
  source 1..75: mol_type = other DNA
gcctgttattttaaccgcgccgaattcaccgacgatacctcgatggcctgtgtctggcggatgcgttactggaat

SEQ ID NO: 312801 - DNA, 75 bp, synthetic construct
  source 1..75: mol_type = other DNA
tcagaaataacattggctcaatttgaacagtcttcatcttcaatattgaaggctcattggttaagagttgctctt

SEQ ID NO: 312802 - DNA, 75 bp, synthetic construct
  source 1..75: mol_type = other DNA
taaatggtgttcttgtccttgacagtcagatgctttcgtcgaaatgtgatgaattaatatttgttttgtataacg

SEQ ID NO: 312803 - DNA, 75 bp, synthetic construct
  source 1..75: mol_type = other DNA
tcgcgacttgaactccagttctatccagcaggaattagaggctctgcttttaaatgccgttaacaggggagcgag

SEQ ID NO: 312804 - DNA, 75 bp, synthetic construct
  source 1..75: mol_type = other DNA
gatgcaaattaatcgatacgacgataaaggatgttttctcactgtcgaggatcctgttgaatatcagatctatgg

SEQ ID NO: 312805 - DNA, 75 bp, synthetic construct
  source 1..75: mol_type = other DNA
attggcttttcttctaaaatcattgccgattgttcttatatctccattacttgttaaaaataaaatttatcatgg

SEQ ID NO: 312806 - DNA, 75 bp, synthetic construct
  source 1..75: mol_type = other DNA
aaatcgcaaaagatttttcaataattgttttaggtgatgtatcctctggtattgcgttgtcatcttcaggattgt

SEQ ID NO: 312807 - DNA, 75 bp, synthetic construct
  source 1..75: mol_type = other DNA
tgtgcaataaaatacagtttaaacatctggctatatatttttctgtatttctttcactatcctcatgtttcttgt

SEQ ID NO: 312808 - DNA, 75 bp, synthetic construct
  source 1..75: mol_type = other DNA
gtgagcttcacgataacgtttggtcgcatggaaaatcaacgggtttttcttttgcacaacgttcggctgtacccc

SEQ ID NO: 312809 - DNA, 75 bp, synthetic construct
  source 1..75: mol_type = other DNA
cggttttgctaccaatacacttttttatgggctgggggatagtctgtatagcaagtttactctgcaaaaatgcac

SEQ ID NO: 312810 - DNA, 75 bp, synthetic construct
  source 1..75: mol_type = other DNA
aaggtgatacgtgggtgattggcggtgtgcgtaatggacagttatctacctctaacttcgaacaatatcaattta

SEQ ID NO: 312811 - DNA, 75 bp, synthetic construct
  source 1..75: mol_type = other DNA
cgtggataagcataaccacctgtgggatgccgtgcgctactcgctggatggatacatcacaagcgttggcgatct

SEQ ID NO: 312812 - DNA, 75 bp, synthetic construct
  source 1..75: mol_type = other DNA
cagttcggctacaccaaggtacgtttccgagggctggtgaggaacactgcacaactggtgacgctgtttgccctg

SEQ ID NO: 312813 - DNA, 75 bp, synthetic construct
  source 1..75: mol_type = other DNA
actgtggcactggaaattggtgggtatccgtcactgttgttgccagatgtggcgattagtcttgaccgtactgaa

SEQ ID NO: 312814 - DNA, 75 bp, synthetic construct
  source 1..75: mol_type = other DNA
ccacctatctggtgccttatgcagcggtaccaaatatgctgcaacccggcgtgtcgaaatatgattttgcggcgg

SEQ ID NO: 312815 - DNA, 75 bp, synthetic construct
  source 1..75: mol_type = other DNA
cgatctggcgggttataccggcagtatcatcacgaagacagccactcagatcattatgttaaccggtgtacgcac

SEQ ID NO: 312816 - DNA, 75 bp, synthetic construct
  source 1..75: mol_type = other DNA
tgtgggagatcccggcggaagtaatgaaaatgaagcggccccatattgtaccgctatcagagcaagtcattgcgc

SEQ ID NO: 312817 - DNA, 75 bp, synthetic construct
  source 1..75: mol_type = other DNA
atgacggtaaggacaacgccggttatgtgaagttcgggcatggcagtgcacaacatgtgcgtgccggtttccgtc

SEQ ID NO: 312818 - DNA, 75 bp, synthetic construct
  source 1..75: mol_type = other DNA
ggcattacctacctgaaagggttcgaagaaatcatcatccatgagcgctgtaagcacatggtcgatgaggcgcgc

SEQ ID NO: 312819 - DNA, 75 bp, synthetic construct
  source 1..75: mol_type = other DNA
aaaatacaagcggaatgtttataaaatgatgttggaatgtaaaaacgaggacaacaaatccggaaacaaaagcga

SEQ ID NO: 312820 - DNA, 75 bp, synthetic construct
  source 1..75: mol_type = other DNA
ctcgcgaatggcaccagtcaaaagccgatcggtggtcattacgctatcgtgatgaaatcattgatacctttgaaa

SEQ ID NO: 312821 - DNA, 75 bp, synthetic construct
  source 1..75: mol_type = other DNA
ggcataacctcaaagcatttaccgttgactggcagagggttgagcttaatttgacgttagatgaagcgcaaatgc

SEQ ID NO: 312822 - DNA, 75 bp, synthetic construct
  source 1..75: mol_type = other DNA
actgatgaggaactggagttctataaatcaggcaccatacaagatggcgaggtaattcactcgccagatggaaaa

SEQ ID NO: 312823 - DNA, 75 bp, synthetic construct
  source 1..75: mol_type = other DNA
attgaagcgggcgataaaacggatgagccaatcaggacgcgaggctggactcattggcaccatttattccatcca

SEQ ID NO: 312824 - DNA, 75 bp, synthetic construct
  source 1..75: mol_type = other DNA
agagggcgtctttgcgagccgctttccagaaacagaaaaaccattacccctgaaaaccgaaaaatgccacaatat

SEQ ID NO: 312825 - DNA, 75 bp, synthetic construct
  source 1..75: mol_type = other DNA
aaccaatgttgaagctgttgacgttgccactggtagtattaacagttgtgtaaggcagttaacattccctgatcg

SEQ ID NO: 312826 - DNA, 75 bp, synthetic construct
  source 1..75: mol_type = other DNA
gtggtggcatggcgggttaaccgcgattacgcggctatcgagtgttatcaggaacgccctttgcgccagtccggc

SEQ ID NO: 312827 - DNA, 75 bp, synthetic construct
  source 1..75: mol_type = other DNA
ttaaagcttttctacaaagtgacgaaatatgtattgtcggaggatcaatgttccaggacagtaaacattggttca

SEQ ID NO: 312828 - DNA, 75 bp, synthetic construct
  source 1..75: mol_type = other DNA
atgactcagcgtggagcagtatttgtagggccaactataatccacctcgattttcctgcgcccgatcaagacata

SEQ ID NO: 312829 - DNA, 75 bp, synthetic construct
  source 1..75: mol_type = other DNA
ggttatcttaaactacagagcttcactgcctaaatggaaaatgcagaatttagtgagtttgagatgttttttcat

SEQ ID NO: 312830 - DNA, 75 bp, synthetic construct
  source 1..75: mol_type = other DNA
cgcagcatggggtatgacgctgccgggcgcatcactgtgctgaccaacgagaacggcagccagtccacgttccgg

SEQ ID NO: 312831 - DNA, 75 bp, synthetic construct
  source 1..75: mol_type = other DNA
gcggtcagtatggcattttcatccgcttgagtttccggaaatattacgaagtgcagagtttcccaggactcctgt

SEQ ID NO: 312832 - DNA, 75 bp, synthetic construct
  source 1..75: mol_type = other DNA
ggacggtgcgctggcgcggcgcagagagcttaccgacgcgggcggctttcttgatatttctcttgattttcggtg

SEQ ID NO: 312833 - DNA, 75 bp, synthetic construct
  source 1..75: mol_type = other DNA
caaaaggagccagggatgtacaacagactgttaaccatatgcctgatgacgctgctgatcgcgagctgcgcaaaa

SEQ ID NO: 312834 - DNA, 75 bp, synthetic construct
  source 1..75: mol_type = other DNA
gaaaaatatagaaatacgtgtaaatggcgcgctaactggctatggcgaacttgttgaagtggatgataaattggg

SEQ ID NO: 312835 - DNA, 75 bp, synthetic construct
  source 1..75: mol_type = other DNA
atggttgccaatattaatctcattaaacaagaaagttattctgttgttaatttagaaaaacaacttcccgaactg

SEQ ID NO: 312836 - DNA, 75 bp, synthetic construct
  source 1..75: mol_type = other DNA
tgaatagggatgataatggttttcgaaaatttagcttggtcgaacaaggtgaatatttttattctgttaccttgc

SEQ ID NO: 312837 - DNA, 75 bp, synthetic construct
  source 1..75: mol_type = other DNA
tgatggtaattatcttgacttgcaaagagatacaaactcatggagaacttgcgacactgttaacaatgactatgg

SEQ ID NO: 312838 - DNA, 75 bp, synthetic construct
  source 1..75: mol_type = other DNA
gaaactttgagcagagaccttttaacactccgctggagtatggatttcgtgctctgttcatattggatgcagcgg

SEQ ID NO: 312839 - DNA, 75 bp, synthetic construct
  source 1..75: mol_type = other DNA
gattggttattattggtgtgattgtaattgccggctgtcaggcaaactatattcgtgatgtacaaggagggactg

SEQ ID NO: 312840 - DNA, 75 bp, synthetic construct
  source 1..75: mol_type = other DNA
gactttgagtctaaaatcattctctatcctaagcgaggttatagaccttcagattacaaggataattatttaacc

SEQ ID NO: 312841 - DNA, 75 bp, synthetic construct
  source 1..75: mol_type = other DNA
ttaatagactctggtatattcaccggtgtattaagagtttctgaaattctttataagaataatttattgtgtccc

SEQ ID NO: 312842 - DNA, 75 bp, synthetic construct
  source 1..75: mol_type = other DNA
tccgctggctccgttcacgacagcccgccccgcaagggggacgcccggaaaagctataaacaggagaggaacgga

SEQ ID NO: 312843 - DNA, 75 bp, synthetic construct
  source 1..75: mol_type = other DNA
tgatctttatcgggttggggctcttcgatacaaacgtgaagacgctggagagtttcttgataatcgcattgatgt

SEQ ID NO: 312844 - DNA, 75 bp, synthetic construct
  source 1..75: mol_type = other DNA
attattgaagtctacgccgcctcaccgatgacggtagtgctgaacgatgtatctggacctcttgctcttgcttac

SEQ ID NO: 312845 - DNA, 75 bp, synthetic construct
  source 1..75: mol_type = other DNA
taaatgggtggtcgaagcgcaaactaaaaacgacgcgaccgtggtggtggtagacccgcgctttaaccgtagcgc

SEQ ID NO: 312846 - DNA, 75 bp, synthetic construct
  source 1..75: mol_type = other DNA
caaccgccggatgcggcgtgaacgccttatccggcctacgggtgagcgcggttttgtaggcatgataagacgcgt

SEQ ID NO: 312847 - DNA, 75 bp, synthetic construct
  source 1..75: mol_type = other DNA
cttcacaaaaccggagtccggctccggtttttgttgtcatgtccggggaatatttgttagataaaaaagaggaga

SEQ ID NO: 312848 - DNA, 75 bp, synthetic construct
  source 1..75: mol_type = other DNA
aaaagcaaaagagacacgtaataactgcacatactgctcagtagggtgcggcatgctgatgtacagtcttggcga

SEQ ID NO: 312849 - DNA, 75 bp, synthetic construct
  source 1..75: mol_type = other DNA
agcgcagtgccgcagcctggcggagaagatacagcaggaagggagcgaagacggtcacggtgtggtgttcccggc

SEQ ID NO: 312850 - DNA, 75 bp, synthetic construct
  source 1..75: mol_type = other DNA
gataccagcggctgcaccggtgagttgccgatcagcgcaggtaatagcgtcggcctgttcatggtggtcgggggc

SEQ ID NO: 312851 - DNA, 75 bp, synthetic construct
  source 1..75: mol_type = other DNA
aatatgtcgatgacagcatcacctggctacgcgactcgctggcgaaactcgataccagcggctgcaccggtgagc

SEQ ID NO: 312852 - DNA, 75 bp, synthetic construct
  source 1..75: mol_type = other DNA
ataaaactaaacaatgaggaaattagacttaatgaaaacgttaaaaagtccttgtctatatttgaaccatatagc

SEQ ID NO: 312853 - DNA, 75 bp, synthetic construct
  source 1..75: mol_type = other DNA
attcatcagcgtttccgttggtggatattaccgtggtgccggatgacgagattatgcaacaccgcaaaatggcgc

SEQ ID NO: 312854 - DNA, 75 bp, synthetic construct
  source 1..75: mol_type = other DNA
cgagctgctgtcggtgacgctggacaccattatcgtggtggagtttgaaggggagcagacccgtctcaactatgg

SEQ ID NO: 312855 - DNA, 75 bp, synthetic construct
  source 1..75: mol_type = other DNA
cggcgtgaacgccttatccggcctacgggtgagcacggttttgtcggcatgataagacgcgtggcgtcgcatctg

SEQ ID NO: 312856 - DNA, 75 bp, synthetic construct
  source 1..75: mol_type = other DNA
attacggccatgtgcgcacaccatgctggaaaagcggttagcccggcgatgcacacttttattcagtgtgttgaa

SEQ ID NO: 312857 - DNA, 75 bp, synthetic construct
  source 1..75: mol_type = other DNA
ttgctgcttttttcattactgcctgtgaccagaaacccgatcctaaaagagaggattgcagcaaaccagtggcaa

SEQ ID NO: 312858 - DNA, 75 bp, synthetic construct
  source 1..75: mol_type = other DNA
ctcagacattgttgtaagtttcaaaaactacacatggattggagaggctaaaattcatagctcatacgactattt

SEQ ID NO: 312859 - DNA, 75 bp, synthetic construct
  source 1..75: mol_type = other DNA
acgctgcaaaagctgctgaaggtgtatggtctgtcactctcggaattcttttccgagccggaaaaacctgatgag

SEQ ID NO: 312860 - DNA, 75 bp, synthetic construct
  source 1..75: mol_type = other DNA
ttgagctgcaactgttggaccagaacgggcagggcgtttccctgtctgattttaaggtcacgttccagatcgagt

SEQ ID NO: 312861 - DNA, 75 bp, synthetic construct
  source 1..75: mol_type = other DNA
atatcagccggggagcttcgcgccgctcatccgcatcgaaacagacaacggcgagcgggagaaagcgcagcgccg

SEQ ID NO: 312862 - DNA, 75 bp, synthetic construct
  source 1..75: mol_type = other DNA
atgtctaccgctacgatgaatacggcaggctggcggagaagacggaccgcatcccggaaggggtgatacggatgc

SEQ ID NO: 312863 - DNA, 75 bp, synthetic construct
  source 1..75: mol_type = other DNA
aatgaagatcttcgtgcggtcaaatacgacgagaatggaaatatcataccctcaccaaagctgcaagagagcgac

SEQ ID NO: 312864 - DNA, 75 bp, synthetic construct
  source 1..75: mol_type = other DNA
ggtcaggcgtggtacatggatttgatgtgcttcgcgcgtggcagccgcgatttgcagagtaacgcatcacttaac

SEQ ID NO: 312865 - DNA, 75 bp, synthetic construct
  source 1..75: mol_type = other DNA
ggtcaggcgtggtacatggatttgatgtgttttgcgcgtggtgctcgtgaaatggttagtcaggacacgcttaaa

SEQ ID NO: 312866 - DNA, 75 bp, synthetic construct
  source 1..75: mol_type = other DNA
atgatagttgaattttctgatgtagatgatttagtgttcgctatggattctgctgagttaatcgataatcacaag

SEQ ID NO: 312867 - DNA, 75 bp, synthetic construct
  source 1..75: mol_type = other DNA
ttctccctctccctgtgggagagggccggggtgagggcatcagcgcgcacgttcaccctcaccctaaccctctcc

SEQ ID NO: 312868 - DNA, 75 bp, synthetic construct
  source 1..75: mol_type = other DNA
gaggggaccgatcgagcacaaattttgagagatatcttcttctgtcttgtaacagaagaacagaaaatcgggctt

SEQ ID NO: 312869 - DNA, 75 bp, synthetic construct
  source 1..75: mol_type = other DNA
gccacgggcaggctggagagcgtgcgtaccctcgcaccggacctggacatccgcatcccgtatgccaccgacccg

SEQ ID NO: 312870 - DNA, 75 bp, synthetic construct
  source 1..75: mol_type = other DNA
tgactaacgagaacggcagccacagcgacttcagctacgatgcgctggaccggttggtacagcagggcggctttg

SEQ ID NO: 312871 - DNA, 75 bp, synthetic construct
  source 1..75: mol_type = other DNA
gcgcacagtgagttaccggcgacgacaacggatgcgacgggcagcacccggcagatgacgtggagccgctacggg

SEQ ID NO: 312872 - DNA, 75 bp, synthetic construct
  source 1..75: mol_type = other DNA
gagcaatgcaaggctgactggatgtttgtcgacggcaagcgggaaatggtggcgaaaaatgaggttgttcacgaa

SEQ ID NO: 312873 - DNA, 75 bp, synthetic construct
  source 1..75: mol_type = other DNA
agtagccgtaccgttcgtcgcgccagtgaagcgggtattccggtgatttgctacaacacctgtattaatcaaaag

SEQ ID NO: 312874 - DNA, 75 bp, synthetic construct
  source 1..75: mol_type = other DNA
tttatcggcagtgtctgaaaatggcagtagccgtaccgttcgtcgcgccagtgaagcgggtattccgggtgatgc

SEQ ID NO: 312875 - DNA, 75 bp, synthetic construct
  source 1..75: mol_type = other DNA
aaaacttcgggtgaattttttggacaggtaatttatttaatatcctattataggaacgttcctggtggtgggggg

SEQ ID NO: 312876 - DNA, 75 bp, synthetic construct
  source 1..75: mol_type = other DNA
gcaccagcctgaccaaacggcattctgtggacaaggtacagggtaacagtgctgtcctggtggatgaaagccagg

SEQ ID NO: 312877 - DNA, 75 bp, synthetic construct
  source 1..75: mol_type = other DNA
cctgacggttcgccccccgctctggcgcagcagcctacggcagaattttcgtcattttcagcagcaggatatcca

SEQ ID NO: 312878 - DNA, 75 bp, synthetic construct
  source 1..75: mol_type = other DNA
cactatccgcacgcagacctaccggggcgagggttttaatgaactgcgttttgaagacgccacaaaccgggaaca

SEQ ID NO: 312879 - DNA, 75 bp, synthetic construct
  source 1..75: mol_type = other DNA
ggccgtaactacgggctgattttcagcggcgatattcgctactcggtcaccggtaaagacagccctattgattcc

SEQ ID NO: 312880 - DNA, 75 bp, synthetic construct
  source 1..75: mol_type = other DNA
gcgcttattaatccgaacatccgggttaacgggctcattcaactggatcaggcttcagtgtatcgtaccgcgttg

SEQ ID NO: 312881 - DNA, 75 bp, synthetic construct
  source 1..75: mol_type = other DNA
tcgagctgcagctcgtggataataacgggcaggggattgagctcagcgattttaaagtgacctttacgatcgact

SEQ ID NO: 312882 - DNA, 75 bp, synthetic construct
  source 1..75: mol_type = other DNA
cagagatacagcggcacatcaggccgtagtattaaactcaaatactgggctggtgggcatgcctcagcaaactat

SEQ ID NO: 312883 - DNA, 75 bp, synthetic construct
  source 1..75: mol_type = other DNA
aaccgcgccgcttaataccattcatgcggcgctgaaacgtattgctcaacgttgccaacgcggcggacctggtgc

SEQ ID NO: 312884 - DNA, 75 bp, synthetic construct
  source 1..75: mol_type = other DNA
ttaccgggcaggagttttcgaaagtgcggctgattgccggttacgacggtatcgcgccggaggtggcggcaagcg

SEQ ID NO: 312885 - DNA, 75 bp, synthetic construct
  source 1..75: mol_type = other DNA
ctgggtgggctggtggtgttcgcacctatgatttgtatgcgtcaggtaatcttactgctggaacgataaaatcca

SEQ ID NO: 312886 - DNA, 75 bp, synthetic construct
  source 1..75: mol_type = other DNA
aataacggtcccttgctcggaacattgatggccatagccctgtttggtcgtagtcgtgcgaagaaaacagcacca

SEQ ID NO: 312887 - DNA, 75 bp, synthetic construct
  source 1..75: mol_type = other DNA
gagaatgtttaaatgtgttgagctccacagtaatgaacttaacttatcaaatcttttcttgggttctgtgccgcc

SEQ ID NO: 312888 - DNA, 75 bp, synthetic construct
  source 1..75: mol_type = other DNA
tcttcaatgtattctgtttatctgcgtcgtgatggaacgttgccgatgacgggtgatctgaatcttggtggtaag

SEQ ID NO: 312889 - DNA, 75 bp, synthetic construct
  source 1..75: mol_type = other DNA
cagcaagtggtgatggcctgaaaggtatttttataacgataacagatcaaatctctggttataaatgcgttatac

SEQ ID NO: 312890 - DNA, 75 bp, synthetic construct
  source 1..75: mol_type = other DNA
taatcgctgaatacgatgaacgacgttgtagtggtagtaagaatgatcactgttatagtaattacagaaggttat

SEQ ID NO: 312891 - DNA, 75 bp, synthetic construct
  source 1..75: mol_type = other DNA
atcgatatggttcgtcaggatgtccccgccatgctcgaaaaagtgtttgaaattgtggattctggcgataccacc

SEQ ID NO: 312892 - DNA, 75 bp, synthetic construct
  source 1..75: mol_type = other DNA
ggcggttgctctgcgtcaggcgctggcaggcgttctgggtatctccgccgcagaactcggctattctgtacgtcc

SEQ ID NO: 312893 - DNA, 75 bp, synthetic construct
  source 1..75: mol_type = other DNA
atgaagaacgtcaccctgggcgcactggcgcgcaccgatgtctttgaaatggttctgcgcaaaccgcaaaacggc

SEQ ID NO: 312894 - DNA, 75 bp, synthetic construct
  source 1..75: mol_type = other DNA
agtaaagcgtgagggggcgatccacatcgtcagcctggaatgtgaagacggtggccacgactatatcaacgcttt

SEQ ID NO: 312895 - DNA, 75 bp, synthetic construct
  source 1..75: mol_type = other DNA
taatcgctgaatacgatgaacgacgttgtagtggtagtaagaacgagcactgttatagtaatataagaaggttat

SEQ ID NO: 312896 - DNA, 75 bp, synthetic construct
  source 1..75: mol_type = other DNA
tcaggcgattggattaactgttccggataatcataaactggttaccggctactcttccgcacgagtggaaggatt

SEQ ID NO: 312897 - DNA, 75 bp, synthetic construct
  source 1..75: mol_type = other DNA
gattacgtcattaatggcctgataacaacaaccagtccgtggacagaaggaaagaacattcgctatgacctgtta

SEQ ID NO: 312898 - DNA, 75 bp, synthetic construct
  source 1..75: mol_type = other DNA
ttagtttaggacttattgctctggcggtgggtaatgcatatgcaacacaattgttggatgattatagtataattt

SEQ ID NO: 312899 - DNA, 75 bp, synthetic construct
  source 1..75: mol_type = other DNA
gcgcgaggctcaggactatccggatgtgcgccaggagctgatgaaccgtttgctgtccggaaaaaaactgaccgg

SEQ ID NO: 312900 - DNA, 75 bp, synthetic construct
  source 1..75: mol_type = other DNA
tatcacttggtcaggcgaaagaaattatatctgtaaataaaaaactggctgacttgattttgcttgatctttata

SEQ ID NO: 312901 - DNA, 75 bp, synthetic construct
  source 1..75: mol_type = other DNA
agttaggggccgatctgttaaccggtggttttaccgacagtgacagttggcgtttgggagtgatggctggttatg

SEQ ID NO: 312902 - DNA, 75 bp, synthetic construct
  source 1..75: mol_type = other DNA
cacggaagccaatggctcacgtattgagaatgacgcaaataacaacatccagacccgactcggcttccgcacctt

SEQ ID NO: 312903 - DNA, 75 bp, synthetic construct
  source 1..75: mol_type = other DNA
acattgacgcctgggcgcaatatagctggtttaaaaactcggtgaaaggggatgaattagcctatgaatcctata

SEQ ID NO: 312904 - DNA, 75 bp, synthetic construct
  source 1..75: mol_type = other DNA
ttataaagactaacatatccggagcgtactctgccttttcaacaagttatgtaatgcactatgcttcaatgatta

SEQ ID NO: 312905 - DNA, 75 bp, synthetic construct
  source 1..75: mol_type = other DNA
aatgataaaaaagctgaagtaactgcaacctttgcagaaattggatcaactgactttttcaaaacattaatatca

SEQ ID NO: 312906 - DNA, 75 bp, synthetic construct
  source 1..75: mol_type = other DNA
aacggtcaggcaacattaaacgcaaaatgtacgcctaatggtctggtggggcgagacagtacaggtcgagtgtta

SEQ ID NO: 312907 - DNA, 75 bp, synthetic construct
  source 1..75: mol_type = other DNA
gctgcggggggaggggaaacctgcggtggatgcggagaaaaaaacaataatccagaattaacgaataaacctgta

SEQ ID NO: 312908 - DNA, 75 bp, synthetic construct
  source 1..75: mol_type = other DNA
attttgaacccaatgaggagcgttttagtgtagtctggcgtacaagtatacctcttaagcgacggattcaggaaa

SEQ ID NO: 312909 - DNA, 75 bp, synthetic construct
  source 1..75: mol_type = other DNA
tgttagatgcgctgaaagccgacccgcggaaaacctccgaactggcgcaaagtctctcctcttggccgaaatcat

SEQ ID NO: 312910 - DNA, 75 bp, synthetic construct
  source 1..75: mol_type = other DNA
aatataataaaaaactatattataagtgatccattttttgcaattatgagctatgcatacagaacgcatacaaag

SEQ ID NO: 312911 - DNA, 75 bp, synthetic construct
  source 1..75: mol_type = other DNA
ctgatcatcgaagagtaccaggcacagggtggtgatgacatcactttccctgacgatctctgccgaaagcgccag

SEQ ID NO: 312912 - DNA, 75 bp, synthetic construct
  source 1..75: mol_type = other DNA
atatgaagaaaacatttagccattgtccttatataaaagatccaattatacgtggttatatccattctggtgaag

SEQ ID NO: 312913 - DNA, 75 bp, synthetic construct
  source 1..75: mol_type = other DNA
tgattttctgatggataaagacgcgcaggggtatactgacctgtctgatttggatttaacaagttgtcattttaa

SEQ ID NO: 312914 - DNA, 75 bp, synthetic construct
  source 1..75: mol_type = other DNA
ggcgctggcggataacctcgcagccttactggaaccggcgttgctgatcataacgggaggaattattggtacgct

SEQ ID NO: 312915 - DNA, 75 bp, synthetic construct
  source 1..75: mol_type = other DNA
tggcagtagtgctgattgcccccgcgctgccctgcccggtgcgtaatcaggtatctgtcgaaaagcccgactggt

SEQ ID NO: 312916 - DNA, 75 bp, synthetic construct
  source 1..75: mol_type = other DNA
agcgaggggatcgtggagatgtaccgcgttgaccctggcttaaccggtccgctgatggagatggtgcagttgatg

SEQ ID NO: 312917 - DNA, 75 bp, synthetic construct
  source 1..75: mol_type = other DNA
tggtttcgcttcttcaggtacccgaaatattattatgggagacgggaatgacgttatttctgttgataattcatt

SEQ ID NO: 312918 - DNA, 75 bp, synthetic construct
  source 1..75: mol_type = other DNA
ctacagttttttctgctgtggtatcagttttagttgtggttttattatattttttcaactataaactatctgaga

SEQ ID NO: 312919 - DNA, 75 bp, synthetic construct
  source 1..75: mol_type = other DNA
gtggtttgtcattgatacattttatttttagtctcatactcagtttctgcgtaataactatcaatttccttgtgg

SEQ ID NO: 312920 - DNA, 75 bp, synthetic construct
  source 1..75: mol_type = other DNA
tttacatgccgacacataatagatctgaattgcttgcgagagcaattaaatctgttataactcaaagttattcta

SEQ ID NO: 312921 - DNA, 75 bp, synthetic construct
  source 1..75: mol_type = other DNA
tccgatttttttactcttcaattagcttaatattcacattacttacagcaaaattactgactcgagatgattaca

SEQ ID NO: 312922 - DNA, 75 bp, synthetic construct
  source 1..75: mol_type = other DNA
attcaggttggaggatacataaccaactcacataccattactgggaatagtggtgatgatattatctatgtcgct

SEQ ID NO: 312923 - DNA, 75 bp, synthetic construct
  source 1..75: mol_type = other DNA
actcggctgaggagtcggggaaaatgacgcttgacctcaatcctctgatgctcgatgcgctggcggcaatcaaag

SEQ ID NO: 312924 - DNA, 75 bp, synthetic construct
  source 1..75: mol_type = other DNA
caagcaaaaccctaaaagattttttattgactccaggtataaatcacttaattttttagcaaaaattttatttta

SEQ ID NO: 312925 - DNA, 75 bp, synthetic construct
  source 1..75: mol_type = other DNA
gatttgcggccggtgtccggtggagtccggcgcggtcgccttccatgccctgacgggcatatggcggcacatcgc

SEQ ID NO: 312926 - DNA, 75 bp, synthetic construct
  source 1..75: mol_type = other DNA
gcgatcgagggcgaagccctggacgatgttactgtcatcggcgtcgtgacgtttactatctgcgatgttcgttcc

SEQ ID NO: 312927 - DNA, 75 bp, synthetic construct
  source 1..75: mol_type = other DNA
tcatcgttgatgcagatcaatggctgttacagggacaggcctcctgtagtgtgcaaagcagcgatgttctgattg

SEQ ID NO: 312928 - DNA, 75 bp, synthetic construct
  source 1..75: mol_type = other DNA
tgcgctgggcaggccgatagaactaacggtgttcgactcgccgcgcgatatccctcaccatcgtaaactgacggt

SEQ ID NO: 312929 - DNA, 75 bp, synthetic construct
  source 1..75: mol_type = other DNA
ttatacctgcgggagtggatgacccggatctgttgtatgaactatcgcaatttactgcgctgggtgtgcggctgt

SEQ ID NO: 312930 - DNA, 75 bp, synthetic construct
  source 1..75: mol_type = other DNA
atgggctttccttcacccgcgacggattacgttgagcagcgactgtctgtcaactcgatctgcaatgttgggcct

SEQ ID NO: 312931 - DNA, 75 bp, synthetic construct
  source 1..75: mol_type = other DNA
actacacggaacagcgattaacggttaactcgatctgcagtgttgggccaaatacgcgcctcttcgagcgttcag

SEQ ID NO: 312932 - DNA, 75 bp, synthetic construct
  source 1..75: mol_type = other DNA
aactgcctaatgacagagaaacgctcttctattttaacgtgcgagaaataccgccaaaaacagataaaaaaaatg

SEQ ID NO: 312933 - DNA, 75 bp, synthetic construct
  source 1..75: mol_type = other DNA
ttattaaagcaaatcaatggagcgatggcatacgtaaaagagacaatctgccctcgctaaataaatacattttag

SEQ ID NO: 312934 - DNA, 75 bp, synthetic construct
  source 1..75: mol_type = other DNA
taataatttaaatcataacgaaacattcggcttaggtggatacgttaagaaaaaccatgtacccacgaccttcga

SEQ ID NO: 312935 - DNA, 75 bp, synthetic construct
  source 1..75: mol_type = other DNA
cgaacgttaaccattgctatcttgttggtctgggcaacgggagtcatgggaagccgcctgctgctcgggatgcat

SEQ ID NO: 312936 - DNA, 75 bp, synthetic construct
  source 1..75: mol_type = other DNA
gacggcgaagatcgctgatctggtggtcattaaggacggctcagtggctgacggcgcaatggcgaacacgctgcg

SEQ ID NO: 312937 - DNA, 75 bp, synthetic construct
  source 1..75: mol_type = other DNA
gccggacggcacggtggaaatcagtgtcaccagtcagacggcggggatcagtacagtcaccgcaaccatcaacag

SEQ ID NO: 312938 - DNA, 75 bp, synthetic construct
  source 1..75: mol_type = other DNA
cgggcagacggtcagcgtgactgcaggcaacagcgcaacggtcgcttcgacagtgaccacaaagccggacggcac

SEQ ID NO: 312939 - DNA, 75 bp, synthetic construct
  source 1..75: mol_type = other DNA
ttggtatggagttgacgttgcaacccggtcattcactgcaaaaacagctcgatccggctgaagttgcagcacgac

SEQ ID NO: 312940 - DNA, 75 bp, synthetic construct
  source 1..75: mol_type = other DNA
cagtcactgccagcatcaacagcagcagcctgagccggaacgtgacgtttgtcgccgatgtcagcacggcaaaaa

SEQ ID NO: 312941 - DNA, 75 bp, synthetic construct
  source 1..75: mol_type = other DNA
agccggacggcacggtggagatcagtgtcaccagccagacggcgggagccagtactgtcactgccagcatcaaca

SEQ ID NO: 312942 - DNA, 75 bp, synthetic construct
  source 1..75: mol_type = other DNA
ccccgacggtgattacagagccggacggtacggtggagatccctgtcaccagccagacggcgggagccagtgcgg

SEQ ID NO: 312943 - DNA, 75 bp, synthetic construct
  source 1..75: mol_type = other DNA
tcttgctgtcaggtcattaaccacatctaacccggtaaaatctggcggagggcgaattgatgtccttggaagcac

SEQ ID NO: 312944 - DNA, 75 bp, synthetic construct
  source 1..75: mol_type = other DNA
gaacaccagcgtatacaggtgtatttcagggatggactactcgctcgctttatacctatcgctggagtccgacaa

SEQ ID NO: 312945 - DNA, 75 bp, synthetic construct
  source 1..75: mol_type = other DNA
ggacggtacggtggagatctctgtcaccagccagacggcgggagtcagtgcggtcaccgccagtatcaacaacag

SEQ ID NO: 312946 - DNA, 75 bp, synthetic construct
  source 1..75: mol_type = other DNA
tggtaaagacgagcgacaaaatgatcctcacgcgattaccgcaggtttgagttacacccccgttcccctgatctc

SEQ ID NO: 312947 - DNA, 75 bp, synthetic construct
  source 1..75: mol_type = other DNA
gccgatgtcaggacggcgcagatcgcggacctggtggtcattaaggacggctcagtggcagacggcgcaatggcg

SEQ ID NO: 312948 - DNA, 75 bp, synthetic construct
  source 1..75: mol_type = other DNA
tgcgcttgccgggcagacggtcagcgtgttggcaggcaacggtgccacgactgctccgacggtcaccacgcagcc

SEQ ID NO: 312949 - DNA, 75 bp, synthetic construct
  source 1..75: mol_type = other DNA
cggggatcagtgcggtcacagccagcatcaacaacagcagtctgagccggaacgtgacatttatcgccgatgtca

SEQ ID NO: 312950 - DNA, 75 bp, synthetic construct
  source 1..75: mol_type = other DNA
tcctccatcgttaccgacaaaacgacctacaccgcgggcggtgcgataaaagttacggtaacactcaaggatagc

SEQ ID NO: 312951 - DNA, 75 bp, synthetic construct
  source 1..75: mol_type = other DNA
ggtggagatcagtgtcaccagccagacggcgggcaccagtgtggtcactgtcagcatcaacaacagcagcctgag

SEQ ID NO: 312952 - DNA, 75 bp, synthetic construct
  source 1..75: mol_type = other DNA
gaaggagccgtacgttcaggaggatggtctgaaactgccggtgtttatactgctacatggtcggcgcaaatggcg

SEQ ID NO: 312953 - DNA, 75 bp, synthetic construct
  source 1..75: mol_type = other DNA
ccggacggcacggtggagatctctgtcaccagtcagacagccggaatcagtgcggtcactgccagcatcaacagc

SEQ ID NO: 312954 - DNA, 75 bp, synthetic construct
  source 1..75: mol_type = other DNA
ggcagacggtcagcgtgacggcaggcaatggcgcaacggtcgctccgacggtcaccacgcaaccggacggcatgg

SEQ ID NO: 312955 - DNA, 75 bp, synthetic construct
  source 1..75: mol_type = other DNA
gagatcagtgtcaccagccagacggcgggcaccagtacagtcaccgccagcatcaacagcagcagcctgagccgg

SEQ ID NO: 312956 - DNA, 75 bp, synthetic construct
  source 1..75: mol_type = other DNA
ccgatgtcagcacggcgcagatcgcgagtctggaggtgacgcaggataactcagtggctgacggcgcaatggcga

SEQ ID NO: 312957 - DNA, 75 bp, synthetic construct
  source 1..75: mol_type = other DNA
gtcagcacggcaaaaatagcggatctggtcgttatccaggataactcagtggctgacggcgcaatggcgaacacg

SEQ ID NO: 312958 - DNA, 75 bp, synthetic construct
  source 1..75: mol_type = other DNA
tacgctgcaggtgaaagtcaccgatgctaacggtaatgcgctgggcggacagacggtcagcgtgttggcggacaa

SEQ ID NO: 312959 - DNA, 75 bp, synthetic construct
  source 1..75: mol_type = other DNA
gtcagcacggcgcagattgcggtgctggaagtgacgcaggataactcagtggcagacggttcgacggcgaacacg

SEQ ID NO: 312960 - DNA, 75 bp, synthetic construct
  source 1..75: mol_type = other DNA
gtggcagacggttcgacggcgaatacgctgcaggtgaaggtcaccgatgctaacggtaatacgcttgccggacag

SEQ ID NO: 312961 - DNA, 75 bp, synthetic construct
  source 1..75: mol_type = other DNA
ttgagactttatcaaatgagccaggtcaattaacaataaggtttacatacgatggttcaactggtgcttcaaaat

SEQ ID NO: 312962 - DNA, 75 bp, synthetic construct
  source 1..75: mol_type = other DNA
tattgattgcgctggttgtagtgggttatttcctgcatttgaaacgttattgtcgggcttttcgccaggatagag

SEQ ID NO: 312963 - DNA, 75 bp, synthetic construct
  source 1..75: mol_type = other DNA
cgtgtttggcgttgagtattactttcagagcgagggttattcgcgcgctgaacagcgtcagcagcgcgagttaat

SEQ ID NO: 312964 - DNA, 75 bp, synthetic construct
  source 1..75: mol_type = other DNA
tcattcccctggcgcgttaccaggagcagcagcttcctgagtatcaggacaatccgctcatcagcgcattgcctc

SEQ ID NO: 312965 - DNA, 75 bp, synthetic construct
  source 1..75: mol_type = other DNA
gtgaatccaaatgatgtcattcttggttactggacgggagtctttacagcaggaactcagtctggtggttccggt

SEQ ID NO: 312966 - DNA, 75 bp, synthetic construct
  source 1..75: mol_type = other DNA
ggtacgtgattaccactgcgacgataacccgtgccgggccgattgagtattacggccacgaactcgggttaaccg

SEQ ID NO: 312967 - DNA, 75 bp, synthetic construct
  source 1..75: mol_type = other DNA
aatggtgtgagaaatgggacgcgatgcatgaccgattcgttaaagaggttgatgcactgcaggccatcaaaccag

SEQ ID NO: 312968 - DNA, 75 bp, synthetic construct
  source 1..75: mol_type = other DNA
tacccccgtcctgcgccccgaagctggaagttacgtcgctaacctggcagccgctaacactctttttgttatgcg

SEQ ID NO: 312969 - DNA, 75 bp, synthetic construct
  source 1..75: mol_type = other DNA
tgaaaggggatgaattagcctatgaatcctatggaaggtgcgaacaagtccctgatatgagatcatgtttgtcat

SEQ ID NO: 312970 - DNA, 75 bp, synthetic construct
  source 1..75: mol_type = other DNA
caagcacaaagcaccgaagaaacaacggcacttcgccaggaagtagaagctcataaaaatacacttggtgctctc

SEQ ID NO: 312971 - DNA, 75 bp, synthetic construct
  source 1..75: mol_type = other DNA
atattaactctaatgttgcggttttcagccctcagtccctggctgcaattcagacattttctcaggtaatggctt

SEQ ID NO: 312972 - DNA, 75 bp, synthetic construct
  source 1..75: mol_type = other DNA
aatgaactggatccataacagtaaagattttgctgtctcaatgaacggtgtgaaagttgaacaagacggggcgcg

SEQ ID NO: 312973 - DNA, 75 bp, synthetic construct
  source 1..75: mol_type = other DNA
aagcctggctttcgactcttttaaagaaaggctgcagtctactatgacagcactcactttctttatatcaacggg

SEQ ID NO: 312974 - DNA, 75 bp, synthetic construct
  source 1..75: mol_type = other DNA
atatacttcaaacaaactgatgaattgtcctcacttccagatacagacaaaattggagggattctggtaaaaaaa

SEQ ID NO: 312975 - DNA, 75 bp, synthetic construct
  source 1..75: mol_type = other DNA
atcgaacgacaagaatctgacgatttattacgttcttcccgatgagcaatatcgcccggatttgctggcttaccg

SEQ ID NO: 312976 - DNA, 75 bp, synthetic construct
  source 1..75: mol_type = other DNA
aaacaccttttccatttgagaataataattctcatgctggcatagtaacggagcccattctcggtaagttaatag

SEQ ID NO: 312977 - DNA, 75 bp, synthetic construct
  source 1..75: mol_type = other DNA
agtcataatttactgccgttattatcagtatttatggctcctgcacaggtgcttttcctgaataacgtggtgaac

SEQ ID NO: 312978 - DNA, 75 bp, synthetic construct
  source 1..75: mol_type = other DNA
gtcagcgtcttccagcgcaggaacggcatcaacaaaggccactgaagcattaaaaagtgctgccgcagcagagtc

SEQ ID NO: 312979 - DNA, 75 bp, synthetic construct
  source 1..75: mol_type = other DNA
aggaagcaaatgagtttcttgaaatatctacttttatttatgagaatgatttcttgagagaaaagattgaagcag

SEQ ID NO: 312980 - DNA, 75 bp, synthetic construct
  source 1..75: mol_type = other DNA
tcataccactcaggggaatccgtatattggcgtcaattttggcgttaaaaaccctggaggaggaagagaatacgg

SEQ ID NO: 312981 - DNA, 75 bp, synthetic construct
  source 1..75: mol_type = other DNA
gattgggaagcttatgactattttttttatgagctgacaaattctaatttatttgaaataagcaaagcaaatgtt

SEQ ID NO: 312982 - DNA, 75 bp, synthetic construct
  source 1..75: mol_type = other DNA
caactagagcgcagctgttagagcatggctatctcaaagttgggccagatggtaaagatatacagttaagagctc

SEQ ID NO: 312983 - DNA, 75 bp, synthetic construct
  source 1..75: mol_type = other DNA
aaaaccctggatgaagaagaaaatacggccggagtagttaaagacaaattttatcagtggaacgaatcgaatgat

SEQ ID NO: 312984 - DNA, 75 bp, synthetic construct
  source 1..75: mol_type = other DNA
gtatattggcgtcaattttggcgttaaaaccctggatgaagaagaaaatacggccggagtagttaaagacaaatt

SEQ ID NO: 312985 - DNA, 75 bp, synthetic construct
  source 1..75: mol_type = other DNA
aacaggcacaccggttttggtgtattacctgtctggcacgatcaattcgcttggctcatgttccgttaatgccgg

SEQ ID NO: 312986 - DNA, 75 bp, synthetic construct
  source 1..75: mol_type = other DNA
aaacattatcaggatgtttgaagatttgggagttgtccacgtcgaggacaggaaagggcaaacgagcatttacac

SEQ ID NO: 312987 - DNA, 75 bp, synthetic construct
  source 1..75: mol_type = other DNA
acaccatgttttaccgcggggcatatggttctttgtaaaaatggttataaaccaatagaagatgtttgccctggc

SEQ ID NO: 312988 - DNA, 75 bp, synthetic construct
  source 1..75: mol_type = other DNA
caatgatgtcaaatcccagcccttccacctttttggataaaaatagaattattgctgctgagcttaatatcacaa

SEQ ID NO: 312989 - DNA, 75 bp, synthetic construct
  source 1..75: mol_type = other DNA
cttaacggaaaggttgaacgttcccaaaagacagacaaagcagagtcttacgctaccgtagatctttctgcggat

SEQ ID NO: 312990 - DNA, 75 bp, synthetic construct
  source 1..75: mol_type = other DNA
atgtgtatctaccttaacttaatgattttgataaaaatcattaggggattcatcagtgcgtggtcaccgttttta

SEQ ID NO: 312991 - DNA, 75 bp, synthetic construct
  source 1..75: mol_type = other DNA
tccggctccggtaagtcagtgactgcgttggcattgatgcgcctgttggaacaggcgggcggtttagtacagtgc

SEQ ID NO: 312992 - DNA, 75 bp, synthetic construct
  source 1..75: mol_type = other DNA
aaaaacagcatgcaacaggccgggtaccaggttcaggactttatcattcaggttcagggtggccagtccgcgctg

SEQ ID NO: 312993 - DNA, 75 bp, synthetic construct
  source 1..75: mol_type = other DNA
ttcagagcgactggcggcaacgcaccaggctaacctcgcgaaaatccaggctcaacaggccgtaacaccacatca

SEQ ID NO: 312994 - DNA, 75 bp, synthetic construct
  source 1..75: mol_type = other DNA
tgctgattacttcgctgaatggcggcaagaatgccatggatgcgctgaaagacgcagctgaagcgatggataagg

SEQ ID NO: 312995 - DNA, 75 bp, synthetic construct
  source 1..75: mol_type = other DNA
gccgcaatcactgccactacagcagcacaggttgccggtattaccacgcagaccgcagccagtacagcggcggcg

SEQ ID NO: 312996 - DNA, 75 bp, synthetic construct
  source 1..75: mol_type = other DNA
tcagccaggagcagtacaacgagacctctgaaaggctcgaagctactcaccaggccaaccttgccaaaattcgcg

SEQ ID NO: 312997 - DNA, 75 bp, synthetic construct
  source 1..75: mol_type = other DNA
ccgagcaaaaagctttcgagttcagcaagcagctttccgatattgcaaaaaatccatctccggaagccctgcagc

SEQ ID NO: 312998 - DNA, 75 bp, synthetic construct
  source 1..75: mol_type = other DNA
tactccttacggtggtgtgatttgggattttacgccgcaatggtcatggtatagcagctattcaacagtctatca

SEQ ID NO: 312999 - DNA, 75 bp, synthetic construct
  source 1..75: mol_type = other DNA
gctgtctgaatttaagttattgagagagcaatgtttcaggtggggtaattatactctattgtttgaaaattatgg

SEQ ID NO: 313000 - DNA, 75 bp, synthetic construct
  source 1..75: mol_type = other DNA
ccaaattactggctaactgaaggcgggcaaagcgccgcaggggcgctggtggagtggacgcttcaggagtccggg

SEQ ID NO: 313001 - DNA, 75 bp, synthetic construct
  source 1..75: mol_type = other DNA
tataaatctctggatgtaaatgtaaatattgagcaaaattttattccagatattgattccgctgttcgtataata

SEQ ID NO: 313002 - DNA, 75 bp, synthetic construct
  source 1..75: mol_type = other DNA
ccatttgcgccgctgtggctgcgtctgacgcttatcggcctgatcctgctgacttatgcgctgtatggcctgtac

SEQ ID NO: 313003 - DNA, 75 bp, synthetic construct
  source 1..75: mol_type = other DNA
ccagggtgattcttcactggccagagccgttgtgcgtgaagtctatgcgtgaactccatatgctatgtgttaagt

SEQ ID NO: 313004 - DNA, 75 bp, synthetic construct
  source 1..75: mol_type = other DNA
gtgatatggctgatggcctgagtggtggcgctacaaatgccgttgtcggcctgcttaatggtacgcagaacctgg

SEQ ID NO: 313005 - DNA, 75 bp, synthetic construct
  source 1..75: mol_type = other DNA
aacgaggaaacgctaaacgcgcttaaacaacagcacgcagaagaattgcttgcctcgcagtgggaacaattccgg

SEQ ID NO: 313006 - DNA, 75 bp, synthetic construct
  source 1..75: mol_type = other DNA
cccgagatcttcagatccaacagcggcgagcagtacatgattccgggtgacaacggtcgcgtgataagcaatcgc

SEQ ID NO: 313007 - DNA, 75 bp, synthetic construct
  source 1..75: mol_type = other DNA
cggcccgctgccgttcatcctctcccgcacctacagcagttaccggacaaaacgcccgcgccggtggggagcctc

SEQ ID NO: 313008 - DNA, 75 bp, synthetic construct
  source 1..75: mol_type = other DNA
actaccagacaggagtacataacggttgaggaatcatccccggaggactcggaagccgttatgaccaagtggctc

SEQ ID NO: 313009 - DNA, 75 bp, synthetic construct
  source 1..75: mol_type = other DNA
ctggtactagaacatttttttactggcaatgaatactatatggaggaaaaatacgatcctattcctaataacaca

SEQ ID NO: 313010 - DNA, 75 bp, synthetic construct
  source 1..75: mol_type = other DNA
gctccgaagttcaacaaagagaccgggcaaccggtactgacattgcgcggccacgacgtcgaagaatttgtcggt

SEQ ID NO: 313011 - DNA, 75 bp, synthetic construct
  source 1..75: mol_type = other DNA
atagtcaagaagtacaggatgaagtagcggcattaaatcagaagattgctgacgatgacaataagatacgttcta

SEQ ID NO: 313012 - DNA, 75 bp, synthetic construct
  source 1..75: mol_type = other DNA
agctataagtaaagaacaaatacctgatttcttaaaaaaggtaagtgctatcaatagagatgtgacatattttta

SEQ ID NO: 313013 - DNA, 75 bp, synthetic construct
  source 1..75: mol_type = other DNA
aaaacaaattaaagcactatcaaaccaactggaacatataaaatcgtttaagacagattacgactcaaggctcaa

SEQ ID NO: 313014 - DNA, 75 bp, synthetic construct
  source 1..75: mol_type = other DNA
gagaaggctgttaaaacttcatttagcaagcaaaattcagagattgataatatctcctttaattattgtgatttg

SEQ ID NO: 313015 - DNA, 75 bp, synthetic construct
  source 1..75: mol_type = other DNA
tgttgaaaataaatcgtacgaggagaaatatcattttaataatagtaggtctgaattttttattttcaaaggtat

SEQ ID NO: 313016 - DNA, 75 bp, synthetic construct
  source 1..75: mol_type = other DNA
tacgatgacttattgcgagaaattaaagagttaaccataagtcgtgataaatcagtagatgataaaaggactttg

SEQ ID NO: 313017 - DNA, 75 bp, synthetic construct
  source 1..75: mol_type = other DNA
cgattccagcagttcccatggaagctaatctggataatgagtggtacaaactttggggattgcttggtggtaccc

SEQ ID NO: 313018 - DNA, 75 bp, synthetic construct
  source 1..75: mol_type = other DNA
ggaacaaaactgatcgcggtgaagatttcgtccacgatcaggcttcgctggcacgcgatgttgcgactggcattc

SEQ ID NO: 313019 - DNA, 75 bp, synthetic construct
  source 1..75: mol_type = other DNA
caaatgcgttacaaaacgagccaaaaacaaaacaacctgaaccgccccggaaatcctggagactaaactccctga

SEQ ID NO: 313020 - DNA, 75 bp, synthetic construct
  source 1..75: mol_type = other DNA
acaatacttactgacaatccaaccgaatttatccaaaaaaaattaaggagtctcataaagaatctgttagaaatg

SEQ ID NO: 313021 - DNA, 75 bp, synthetic construct
  source 1..75: mol_type = other DNA
aaaaacatcagtgacgcgatgcgtaatattctggattggttcgaacagtattccgatattgtaaaaaatataacc

SEQ ID NO: 313022 - DNA, 75 bp, synthetic construct
  source 1..75: mol_type = other DNA
aaaggttgagctcgaaattgatgtactgaaagacggcgacaaggataacgcgatcgtcgtgcataactcgctgcc

SEQ ID NO: 313023 - DNA, 75 bp, synthetic construct
  source 1..75: mol_type = other DNA
gcgctggcagcggagaatgctgggcttaaacagtcggagaaggaatttaataacttctgtcgtcaggagtactac

SEQ ID NO: 313024 - DNA, 75 bp, synthetic construct
  source 1..75: mol_type = other DNA
agcacatcctgagcgatgagggtgacctctacaaccctgatcaccagcatttgcttgaagcggatctgtgctttc

SEQ ID NO: 313025 - DNA, 75 bp, synthetic construct
  source 1..75: mol_type = other DNA
ccaaagtcgccgcagatcaatatccgttccgaatcatcggggtaactgttaagccaaagaaagcaggtggtggct

SEQ ID NO: 313026 - DNA, 75 bp, synthetic construct
  source 1..75: mol_type = other DNA
atatgtggtggggatgggtgacggggggatatatgctgtatatgtcatgggattatgaggtaatgactccaactt

SEQ ID NO: 313027 - DNA, 75 bp, synthetic construct
  source 1..75: mol_type = other DNA
actttcagattctcacaattaataacggacaggctttttatattgaccggtagccctgtaagaccggtcagctta

SEQ ID NO: 313028 - DNA, 75 bp, synthetic construct
  source 1..75: mol_type = other DNA
agccagaatggagcagcagatgcatgaatggttcggacgcataccgaagttcatcatcaccctggctgctgacta

SEQ ID NO: 313029 - DNA, 75 bp, synthetic construct
  source 1..75: mol_type = other DNA
cacgcacacctcgctgatgctgatatagcgttcttgtgggcggcaaccgcattcaccaaaaaagggcgagccgtt

SEQ ID NO: 313030 - DNA, 75 bp, synthetic construct
  source 1..75: mol_type = other DNA
gcatttaataagcgtaagttgatggaaccagctgctaaacgaaatccatcggatgttcctgcaattcgcagctca

SEQ ID NO: 313031 - DNA, 75 bp, synthetic construct
  source 1..75: mol_type = other DNA
atcatgctaacgaacaagatctcaaagatgagattattgatttattcggaggagaatcgtttattgataagtcgg

SEQ ID NO: 313032 - DNA, 75 bp, synthetic construct
  source 1..75: mol_type = other DNA
aagtgcggttggctgggtagcaaaagatgggcgctttttctattacgaaaacagcaatggggagtcttattatca

SEQ ID NO: 313033 - DNA, 75 bp, synthetic construct
  source 1..75: mol_type = other DNA
cacagcatacgcagagcaccatgcagtcgctgcaacagcaggctggacggtgggggctgagtgaggaggactggg

SEQ ID NO: 313034 - DNA, 75 bp, synthetic construct
  source 1..75: mol_type = other DNA
cttatctggtacaaggtaatcatcgtcttcaaaaaacagttccgcattacaccgatgaggaagtgtattgtgcag

SEQ ID NO: 313035 - DNA, 75 bp, synthetic construct
  source 1..75: mol_type = other DNA
agatagtataatagagacgtatggtggggaatcttttatcgataaatccgtaagcgacggtgacattagtactga

SEQ ID NO: 313036 - DNA, 75 bp, synthetic construct
  source 1..75: mol_type = other DNA
ccgcactcaaaaccgcctttgatttagcaaaagatataaaaaatgccactggcgcatacaatgatgcagaaatga

SEQ ID NO: 313037 - DNA, 75 bp, synthetic construct
  source 1..75: mol_type = other DNA
actctcattcgaatgcttaccggcagcgaacgcccggatagcggtgatatctggattggcgagacacgactggaa

SEQ ID NO: 313038 - DNA, 75 bp, synthetic construct
  source 1..75: mol_type = other DNA
cggctatgtgatggcgacagaaaaaatcagaagtactggtgtgataacaaaaacagtgtccactgacgggcagag

SEQ ID NO: 313039 - DNA, 75 bp, synthetic construct
  source 1..75: mol_type = other DNA
cacctactgcaacttattcctacataaattcaaaatattacttaaatggtgttattggcgaagctaatgttgtta

SEQ ID NO: 313040 - DNA, 75 bp, synthetic construct
  source 1..75: mol_type = other DNA
atatcaaggttggtatgatcattgaaacagagacacagcccaagtggtctacatatgtagtatcagtagtgcccg

SEQ ID NO: 313041 - DNA, 75 bp, synthetic construct
  source 1..75: mol_type = other DNA
ctggctgatacacagctagaaatgtatgaactaaagctgaagatcgaagagttgcaagctaagcttgatgcatcg

SEQ ID NO: 313042 - DNA, 75 bp, synthetic construct
  source 1..75: mol_type = other DNA
gtgttggcggataacggcgcaacggttgccccgacggtcaccactcagccggacggtacggtggagatcagtgtc

SEQ ID NO: 313043 - DNA, 75 bp, synthetic construct
  source 1..75: mol_type = other DNA
gccgggcagacggtcagcgtgttggcggacaacggcgcaacggtcgccccgacggtcaccacgcagccggacggt

SEQ ID NO: 313044 - DNA, 75 bp, synthetic construct
  source 1..75: mol_type = other DNA
ccggacggcacggtggagatctcagtcaccagccagaccgccggaaccagtgtggtcaccgctagcatcaacaac

SEQ ID NO: 313045 - DNA, 75 bp, synthetic construct
  source 1..75: mol_type = other DNA
cggctatgtgatggcgacagaaaaaatcagaagtaccggtgtgataacaaagacagtgcccactgaagggcagag

SEQ ID NO: 313046 - DNA, 75 bp, synthetic construct
  source 1..75: mol_type = other DNA
cagcggcaaaaactcaatccacgattgtcgcggacaaaacgatatatatcgctggggatagcataacggtgaccg

SEQ ID NO: 313047 - DNA, 75 bp, synthetic construct
  source 1..75: mol_type = other DNA
gattgcagacaacagcgcaacggttgctccgacggtcaccacgcagccggatggcacggtggagatcagtgtcac

SEQ ID NO: 313048 - DNA, 75 bp, synthetic construct
  source 1..75: mol_type = other DNA
ttgggttctgtgccgcctcttccagagtggattgaaatacttagccttgtttataatgaacttgattcaatacag

SEQ ID NO: 313049 - DNA, 75 bp, synthetic construct
  source 1..75: mol_type = other DNA
ctggactcatcagatgaaggccaaaaattggcaggagtggacacagcaggcagcgaaacaagcactgaccatcaa

SEQ ID NO: 313050 - DNA, 75 bp, synthetic construct
  source 1..75: mol_type = other DNA
gcctgcgtatacttatggtattggtctgcacggtgctggttatgatgtcactggcaatacaccatttgcctatcc

SEQ ID NO: 313051 - DNA, 75 bp, synthetic construct
  source 1..75: mol_type = other DNA
atgattatgataaatattccgacatggttaaaaagtatgtaatagatggtgaggagctcataattaaatattata

SEQ ID NO: 313052 - DNA, 75 bp, synthetic construct
  source 1..75: mol_type = other DNA
acaactattatgcattagtttttttagcatcagccataattataatatcacaatcatttaatgtgtttccttttg

SEQ ID NO: 313053 - DNA, 75 bp, synthetic construct
  source 1..75: mol_type = other DNA
caatctgcaggctttgcagtctgcgatcctgccagcaaatattctttgcgagacgttacacaataatcacatgtg

SEQ ID NO: 313054 - DNA, 75 bp, synthetic construct
  source 1..75: mol_type = other DNA
tatgttgaagcgtaccgtagtggctgccgtacctatgccatttgataagtggtacagcgccagtggctacgaaac

SEQ ID NO: 313055 - DNA, 75 bp, synthetic construct
  source 1..75: mol_type = other DNA
gtattgcagataatgttaaaatccaacttaatgccggggatgacagtgtgtatgcaggtggattgttaaacaagg

SEQ ID NO: 313056 - DNA, 75 bp, synthetic construct
  source 1..75: mol_type = other DNA
atgcattcgaaaataaaaccattgccaaagactggcgatattgtttggtttcaaccatctgaagaatgggggggg

SEQ ID NO: 313057 - DNA, 75 bp, synthetic construct
  source 1..75: mol_type = other DNA
ggatgccaaatacaccggagaactggctgatgcgaaagaaaccattgagcgtctgcatagcgatgtcattgctgg

SEQ ID NO: 313058 - DNA, 75 bp, synthetic construct
  source 1..75: mol_type = other DNA
cgcgtttgtatgtggatatgaatacaaacaaagctataacgctggattcggcttataatataattggctctcaga

SEQ ID NO: 313059 - DNA, 75 bp, synthetic construct
  source 1..75: mol_type = other DNA
tgtggcagatgctccggtcctgaccattccagaagtggctgatagtgtggccaatgcggctgagctgaaagatgg

SEQ ID NO: 313060 - DNA, 75 bp, synthetic construct
  source 1..75: mol_type = other DNA
aggcagatacaacagcaccgtcagcaccggaattaacggccggagataatggttcagtttctgttgaactgccgg

SEQ ID NO: 313061 - DNA, 75 bp, synthetic construct
  source 1..75: mol_type = other DNA
acgactgctccgatggtcaccacgcagccggacggcacggtggaaatcagtgtcaccagccagacggcgggagtc

SEQ ID NO: 313062 - DNA, 75 bp, synthetic construct
  source 1..75: mol_type = other DNA
gacaacggcgcaacggtgtctccgacggtcatcacagggccggacggtacggtggagatctctgtcaccagccag

SEQ ID NO: 313063 - DNA, 75 bp, synthetic construct
  source 1..75: mol_type = other DNA
tcgcggacctggcggttattaaggacggctcagtggcggacggttcgacggcgaacacgctgcgtgcgagggtaa

SEQ ID NO: 313064 - DNA, 75 bp, synthetic construct
  source 1..75: mol_type = other DNA
ggcgcaatggcgaatatgctgcgggcgagggtcaccgatgcgttcggtaatgcgcttgccgggcagacggtcagc

SEQ ID NO: 313065 - DNA, 75 bp, synthetic construct
  source 1..75: mol_type = other DNA
aaagtcaccgacgcgttcggcaatgcgctggccggacagacggtcagcgtttcagcgggcaacggggcagcggtt

SEQ ID NO: 313066 - DNA, 75 bp, synthetic construct
  source 1..75: mol_type = other DNA
tggagatcagtgtcaccagccagacggcggggatcagtacagtcaccgcaaccatcaacagcagcagtcagagcc

SEQ ID NO: 313067 - DNA, 75 bp, synthetic construct
  source 1..75: mol_type = other DNA
tctccgacggtcatcacagggccggacggcacggtggagatcagtgtcaccagccagacggcgggagccagtaca

SEQ ID NO: 313068 - DNA, 75 bp, synthetic construct
  source 1..75: mol_type = other DNA
acgccactcttccagttatctctggaatgaaaactttatctgactttgatgtgtcaaactggtttattggcctgc

SEQ ID NO: 313069 - DNA, 75 bp, synthetic construct
  source 1..75: mol_type = other DNA
ggcagccgttctgcagtggacagctaggaacccggtagcaagagattttcgttatgcctgtgatgttaaatacac

SEQ ID NO: 313070 - DNA, 75 bp, synthetic construct
  source 1..75: mol_type = other DNA
ctggaaactgtttatcggagatacacagaaataccagaacgcgtcccttcatatcccaatggcagcgtcggtatc

SEQ ID NO: 313071 - DNA, 75 bp, synthetic construct
  source 1..75: mol_type = other DNA
atcgagatgaaagactacggcaccatgaacggacaggcagttcttgaatttgcgatgaaactactgcaagagtaa

SEQ ID NO: 313072 - DNA, 75 bp, synthetic construct
  source 1..75: mol_type = other DNA
tgcaactgtcaaagatcatggaagacattatcagttcgttagacccagatgctgacggatctcaaaagcctcaaa

SEQ ID NO: 313073 - DNA, 75 bp, synthetic construct
  source 1..75: mol_type = other DNA
attaagtcttgtctgttgatgaacggcattcttacctcagcagaaaaaatatctgtctctcagtttttactggcg

SEQ ID NO: 313074 - DNA, 75 bp, synthetic construct
  source 1..75: mol_type = other DNA
caaaacgatatatatcgctggggatagcataacggtgaccgttgttcttaaagatgcccagggtaactttattac

SEQ ID NO: 313075 - DNA, 75 bp, synthetic construct
  source 1..75: mol_type = other DNA
tcaccagccagacggcgggaatcagtgcagtcactgccagcatcaacagcagcagtcagagccgggacgtgacat

SEQ ID NO: 313076 - DNA, 75 bp, synthetic construct
  source 1..75: mol_type = other DNA
aagttactattaccgggaaacccaagaatggtaaagggaatgatgttgtatttaaattcaagattaaaaaatggt

SEQ ID NO: 313077 - DNA, 75 bp, synthetic construct
  source 1..75: mol_type = other DNA
ctgaaaccgccggtgtttatactgctacatggtcggcgcaaatggcgggagactctcaccacgcgacgctgaagt

SEQ ID NO: 313078 - DNA, 75 bp, synthetic construct
  source 1..75: mol_type = other DNA
tggtcattaaggatggttcagaggcggacggttcgacggcgaacacgctgcaggtgagggtgaccgatgcgttcg

SEQ ID NO: 313079 - DNA, 75 bp, synthetic construct
  source 1..75: mol_type = other DNA
tgtctgtgggtgaaggcagatatgagcgtacctatagggcctacaaagaaggagaaaacttaaactcatatctac

SEQ ID NO: 313080 - DNA, 75 bp, synthetic construct
  source 1..75: mol_type = other DNA
caatcagagagttattccatccacagtggtgctccggtgcaggcaaattctgctatcaggacagataaatcggca

SEQ ID NO: 313081 - DNA, 75 bp, synthetic construct
  source 1..75: mol_type = other DNA
gctggtggttattaaggatggttcagaggcagacggttcgacggcgaatacgttgcgggtgagggtcaccgatgc

SEQ ID NO: 313082 - DNA, 75 bp, synthetic construct
  source 1..75: mol_type = other DNA
acgttgtggggagaatatggtaatttgaaagcttatggcagtacatttagcagcgcggattactggacaagtact

SEQ ID NO: 313083 - DNA, 75 bp, synthetic construct
  source 1..75: mol_type = other DNA
aagatgcccagggtaactttattactgatggtgtcgttcagcttaatgaggaaaacgtacaagtcaggaacgctg

SEQ ID NO: 313084 - DNA, 75 bp, synthetic construct
  source 1..75: mol_type = other DNA
atcagtgcagtcactgccagcatcaacagcagcagtcagagccgggacgtgacatttatcgccgatgtcaggaca

SEQ ID NO: 313085 - DNA, 75 bp, synthetic construct
  source 1..75: mol_type = other DNA
catgaccatgaacggtggtcgatgggtgacgtttaactgggatagctggcgtccaaatgtcagcaatcagagggt

SEQ ID NO: 313086 - DNA, 75 bp, synthetic construct
  source 1..75: mol_type = other DNA
cgggagttagcgcagtcacagcaaccatcaacaatcatagcctgagccagaacgtcacctttgtaccgggtgacg

SEQ ID NO: 313087 - DNA, 75 bp, synthetic construct
  source 1..75: mol_type = other DNA
aggctatgccggtttctatcttacttgcattaatatccgtagcgacttgcggctgttatggaagtatagggccat

SEQ ID NO: 313088 - DNA, 75 bp, synthetic construct
  source 1..75: mol_type = other DNA
aaaataaatgatatcaagagatttattgttaatagctctgcaagcgtacaatatgaaaatatttctgttgtattg

SEQ ID NO: 313089 - DNA, 75 bp, synthetic construct
  source 1..75: mol_type = other DNA
ttagagcaatctctcaaaattatggatggcattatttcttcgagagtacatgttagttacgatgttgataatggc

SEQ ID NO: 313090 - DNA, 75 bp, synthetic construct
  source 1..75: mol_type = other DNA
ctcgcgctggagaactacagaacaaaattcatcaactcagcatcacgatctggtttcagcgagataatgaatgta

SEQ ID NO: 313091 - DNA, 75 bp, synthetic construct
  source 1..75: mol_type = other DNA
tacctgttcccttcatttccttttatttaaacgcggcgagcctggacgaaatcaatcaaaagctggatgaaggtt

SEQ ID NO: 313092 - DNA, 75 bp, synthetic construct
  source 1..75: mol_type = other DNA
gacagagttcgtgggcttggtgcagagaaagaaccaaagccaataaaactcaaacctgtaaataatattcatgtt

SEQ ID NO: 313093 - DNA, 75 bp, synthetic construct
  source 1..75: mol_type = other DNA
gagttgaaaccgccaccggtgagctggcgaaaacgcagcgccgcagcctggcggatgcgcttcagcagtccggcg

SEQ ID NO: 313094 - DNA, 75 bp, synthetic construct
  source 1..75: mol_type = other DNA
aatcgaagtgatgaaatggttaatataataaaagatttcaatgataaagatgataatgttgatcaactttattac

SEQ ID NO: 313095 - DNA, 75 bp, synthetic construct
  source 1..75: mol_type = other DNA
gatggcgcagcaccgccgaaaggcgaaactcatcgctacatttttaccgttcacgcgctggatatagaacgtatt

SEQ ID NO: 313096 - DNA, 75 bp, synthetic construct
  source 1..75: mol_type = other DNA
cgatgcatggcgggaacaacatgattatcaagctgtttcacgccgtctggttaatatgtgtcaaggcttagctaa

SEQ ID NO: 313097 - DNA, 75 bp, synthetic construct
  source 1..75: mol_type = other DNA
ccaggccagtagtgcgcctaatgttttcaaaacattcttcagagcattaagcccttacgactacacactgtattg

SEQ ID NO: 313098 - DNA, 75 bp, synthetic construct
  source 1..75: mol_type = other DNA
gtgtcaaccaggtggaaacggtgggcagtaaccagattatcaaagtgggatcaaaccaggttgaaaaggtgggga

SEQ ID NO: 313099 - DNA, 75 bp, synthetic construct
  source 1..75: mol_type = other DNA
ggtacgctggttctgtcttctgaaaatacttacacaggagtaacagatattcgcggtggcaatgtcctcatgaac

SEQ ID NO: 313100 - DNA, 75 bp, synthetic construct
  source 1..75: mol_type = other DNA
gtggcaatggaggtttcgctgtatccggaaataatatccacataaataattatggatatattactggcggtggtg

SEQ ID NO: 313101 - DNA, 75 bp, synthetic construct
  source 1..75: mol_type = other DNA
ctgccatttctggagattatattgagataacaaataatcagaatattactggtggtaggggaggtactggtggtc

SEQ ID NO: 313102 - DNA, 75 bp, synthetic construct
  source 1..75: mol_type = other DNA
atgataattgatgcacacactcatattggtgattttgtgaaaatcagcatgccagaagatgtttttctggtatct

SEQ ID NO: 313103 - DNA, 75 bp, synthetic construct
  source 1..75: mol_type = other DNA
taaacataagcccgaacatcatagcgatttgctggctggtgggcaatgtgttcagtgtgctggcttgctggtgga

SEQ ID NO: 313104 - DNA, 75 bp, synthetic construct
  source 1..75: mol_type = other DNA
gcgagctaagcagcttgaatcatattctgaacgatttaaaaaattgaattatgaaggggatgctttactcgcagc

SEQ ID NO: 313105 - DNA, 75 bp, synthetic construct
  source 1..75: mol_type = other DNA
accaccttcaacgctgccgttaagcattatacctgttacattaaaaagcgttttaaagggtttaaatggggaatt

SEQ ID NO: 313106 - DNA, 75 bp, synthetic construct
  source 1..75: mol_type = other DNA
gttgctgatttggttctgcctatatttggtaaggatgaggaagagcctcaagatgttacttcgaaaattatagag

SEQ ID NO: 313107 - DNA, 75 bp, synthetic construct
  source 1..75: mol_type = other DNA
caggacaatcatcacgcttttataaagcaggttatgatgttcctaagtataagttaaaaattaataacaaaagcg

SEQ ID NO: 313108 - DNA, 75 bp, synthetic construct
  source 1..75: mol_type = other DNA
ggggttccgttcgcggtggtgacggtggctggggaggaggagctgtttcggacagcaaaggttctaccgggggaa

SEQ ID NO: 313109 - DNA, 75 bp, synthetic construct
  source 1..75: mol_type = other DNA
tcaattcgtatatgaagaacagaaaatcactccagttaccaccaggtaaaacaaagactacaattttatttggga

SEQ ID NO: 313110 - DNA, 75 bp, synthetic construct
  source 1..75: mol_type = other DNA
ctgaatgcgacagtggccggctctgaaatcagcaataccacgctgacggccaccaacaacatcaacctggcggct

SEQ ID NO: 313111 - DNA, 75 bp, synthetic construct
  source 1..75: mol_type = other DNA
agataaattaattccagatgattgtagttataaatcagacataaaaaaactagatgttcaggagggagagtttag

SEQ ID NO: 313112 - DNA, 75 bp, synthetic construct
  source 1..75: mol_type = other DNA
tgctattcaggcatcctcaatttcactttgtcaacctgatgacatcgtcagagcttactgtgcaagcaactctac

SEQ ID NO: 313113 - DNA, 75 bp, synthetic construct
  source 1..75: mol_type = other DNA
aagagtcaattgaaaatgctggcggaattttttcttctgtcgaagaaatgcgaagtgaaaaacttagggaaatat

SEQ ID NO: 313114 - DNA, 75 bp, synthetic construct
  source 1..75: mol_type = other DNA
atgagttcatgctccagtctttctctgatagccgcacggagttagcccattcatattcttcaattaatctttcaa

SEQ ID NO: 313115 - DNA, 75 bp, synthetic construct
  source 1..75: mol_type = other DNA
gtcatctggtgagagattctttagtgcaggatggtataaagccagaaaaaatagcaaaaattatttcttgtttat

SEQ ID NO: 313116 - DNA, 75 bp, synthetic construct
  source 1..75: mol_type = other DNA
taaggttattatcagatcacgatcaatttgaaaaacatcaactctcagaattaacagttgctgcaaatgctctta

SEQ ID NO: 313117 - DNA, 75 bp, synthetic construct
  source 1..75: mol_type = other DNA
cattactgatggaacagaagaaaaaaataaaagattcccctacagcaaagatcgacatgcgatccaacctttatg

SEQ ID NO: 313118 - DNA, 75 bp, synthetic construct
  source 1..75: mol_type = other DNA
cgtaagagcccggaatatgcgttcgaagagctgattgctgagatgggcagtgcttttctgtgcgcacatctggga

SEQ ID NO: 313119 - DNA, 75 bp, synthetic construct
  source 1..75: mol_type = other DNA
aatcagcattccttaaactcattcagcaaaaccacgaagcagtaaaatccattcaggctgaaccgtatggacacc

SEQ ID NO: 313120 - DNA, 75 bp, synthetic construct
  source 1..75: mol_type = other DNA
taagtcacctgttttgtgttgtggtgagaatatcacctttcatcaggtggccaaatttagtgtgccactacaatt

SEQ ID NO: 313121 - DNA, 75 bp, synthetic construct
  source 1..75: mol_type = other DNA
tgaatggtagtggcgtcagtgtttcgtcatttccacaggacagggcattctaccggtctgacactgaccgtatcg

SEQ ID NO: 313122 - DNA, 75 bp, synthetic construct
  source 1..75: mol_type = other DNA
cggtgatttacaaagactggaaaaaacaggctgtggatgaacacggtaaccggctgacggacagtgagggggaac

SEQ ID NO: 313123 - DNA, 75 bp, synthetic construct
  source 1..75: mol_type = other DNA
gggcagtgtgacggtttacctgaacatctgatggtgaaggcggaaggcagcgcggatgcactgccggcagatacc

SEQ ID NO: 313124 - DNA, 75 bp, synthetic construct
  source 1..75: mol_type = other DNA
ccagtcgtaccgggattggaaatttgttttatgcctgttcacaagcatttcatgttgctaatgataacgctgcac

SEQ ID NO: 313125 - DNA, 75 bp, synthetic construct
  source 1..75: mol_type = other DNA
ggcctgctcgataattgtagaacattgtctaaaaatgcctcttttcgtgaaattttccgaagtttattgttatac

SEQ ID NO: 313126 - DNA, 75 bp, synthetic construct
  source 1..75: mol_type = other DNA
ctggctaacgttgctcacaacacaaccgggtcaagtgcaatggcaacgaccaaaggaaccttaactcacgctatc

SEQ ID NO: 313127 - DNA, 75 bp, synthetic construct
  source 1..75: mol_type = other DNA
gttcacgggaaacgggcgattacgtctctggacggcagaggagtggaatgtgttgtccggaaatatggcattggg

SEQ ID NO: 313128 - DNA, 75 bp, synthetic construct
  source 1..75: mol_type = other DNA
ggcctgctcgataattgtagaacattatctaaagatgccacttttcgtgaagttttccgaaatatattattatac

SEQ ID NO: 313129 - DNA, 75 bp, synthetic construct
  source 1..75: mol_type = other DNA
ttattattatacattttagattctttacatatctatcggcatgatatcagtggtaaattggtttcttattttcat

SEQ ID NO: 313130 - DNA, 75 bp, synthetic construct
  source 1..75: mol_type = other DNA
ggagttactgatgctgagcgccaattaaaaaaagcgttaaatgaacaagctcaattaactccagataaattaatt

SEQ ID NO: 313131 - DNA, 75 bp, synthetic construct
  source 1..75: mol_type = other DNA
gacataataaacaatttgcgggagtattcttctataccagtcatatataaatacctaaacgataataagggaata

SEQ ID NO: 313132 - DNA, 75 bp, synthetic construct
  source 1..75: mol_type = other DNA
tacgctataaaatgtttttattaactagattaccaccctttgtgttattacatttattattatcaaaaaataaga

SEQ ID NO: 313133 - DNA, 75 bp, synthetic construct
  source 1..75: mol_type = other DNA
agcttgaggaagagccccacagattgaagaagctggttgccgatctgagcctcgacaaagccatgctgcaggatg

SEQ ID NO: 313134 - DNA, 75 bp, synthetic construct
  source 1..75: mol_type = other DNA
tccgcgccaggctctgcaacacccgccgggcagtcgcaggataacgggctggcgcgcattaccggcgtgaagcgg

SEQ ID NO: 313135 - DNA, 75 bp, synthetic construct
  source 1..75: mol_type = other DNA
ctgaagtttgttgccggaccgcttgatgcagcgcgctcaaccatcactctgaacccggataaaccggtggttggc

SEQ ID NO: 313136 - DNA, 75 bp, synthetic construct
  source 1..75: mol_type = other DNA
cgtttaaacctgccggaaacatcgtaacgcgggcccttaagtccgctaaatcacaggcacagccaacactgggtg

SEQ ID NO: 313137 - DNA, 75 bp, synthetic construct
  source 1..75: mol_type = other DNA
taattaaaactttaattgctagatttaagattgtaagtgccagtgaaattatggaaagagctcgttccgatgcta

SEQ ID NO: 313138 - DNA, 75 bp, synthetic construct
  source 1..75: mol_type = other DNA
actatggatttattgttcaatatgaaaggtggtgctgcaattagacacacgatggctcatggcaggtatactgta

SEQ ID NO: 313139 - DNA, 75 bp, synthetic construct
  source 1..75: mol_type = other DNA
ggacacaccactccaacggggcacagattattcgcgccgctgctatgctccagttactactgggtaatataggta

SEQ ID NO: 313140 - DNA, 75 bp, synthetic construct
  source 1..75: mol_type = other DNA
gattatgttccagcgatattatttgaaaggcatcattttcataaatatacaaatgggaggtatgatcagttcgaa

SEQ ID NO: 313141 - DNA, 75 bp, synthetic construct
  source 1..75: mol_type = other DNA
tacatgcacatcgcgccattgtcagaattcccgaaacgtccgctttaccgggtcactcaaaaaggccacggggtg

SEQ ID NO: 313142 - DNA, 75 bp, synthetic construct
  source 1..75: mol_type = other DNA
cgggcgcgatattaatgtcgagactattatgcgcgttgccttcggcgatagtcagcgtcaggaggcatcatgctg

SEQ ID NO: 313143 - DNA, 75 bp, synthetic construct
  source 1..75: mol_type = other DNA
ttaatggcgagtcgtttctgattgttggccaggatgcccgagaaatgtttatttgcttcaatagagtaatgatgt

SEQ ID NO: 313144 - DNA, 75 bp, synthetic construct
  source 1..75: mol_type = other DNA
tggtgggcctgctgaaattattggaaatggacaggattttggcataacaatttcggttaatgatgtacatcactt

SEQ ID NO: 313145 - DNA, 75 bp, synthetic construct
  source 1..75: mol_type = other DNA
gggaatgggcagaaaaatgtactggcaggcattcagaaccagcctctgtagaaaatcgaattaagcaatactttt

SEQ ID NO: 313146 - DNA, 75 bp, synthetic construct
  source 1..75: mol_type = other DNA
atggagttcaatcggagacagttctttcgaatctgcgcgggcggtatggcaggaacaactgttgcatctctcgga

SEQ ID NO: 313147 - DNA, 75 bp, synthetic construct
  source 1..75: mol_type = other DNA
atattttaagatagataacaaaagaatattgcacaccctgctaaaaaaggatgtcaagtatattagtcactataa

SEQ ID NO: 313148 - DNA, 75 bp, synthetic construct
  source 1..75: mol_type = other DNA
attgtgagcattgatttagacggaaatgttcgccgtatgaatgacatctatttccgtccaattcatcgaaaccag

SEQ ID NO: 313149 - DNA, 75 bp, synthetic construct
  source 1..75: mol_type = other DNA
tttagcgtcgaactacgccacagcaggctacgctagccctgaggatttcgtttttgcattaagtaagtctgagaa

SEQ ID NO: 313150 - DNA, 75 bp, synthetic construct
  source 1..75: mol_type = other DNA
agcaatatgttgattctctgattaagctagattctattggaataaccggattatcctttatgtataaggtaagga

SEQ ID NO: 313151 - DNA, 75 bp, synthetic construct
  source 1..75: mol_type = other DNA
ggtgagctaccgttttaaagctatctggtggcgagtcgaatcaatccagtatgatgattatcatatacaagggag

SEQ ID NO: 313152 - DNA, 75 bp, synthetic construct
  source 1..75: mol_type = other DNA
caattaagcggcattttcagtatagcgtctgttttctgtgtacatagacgtgtacataatgaaaagaccgagtag

SEQ ID NO: 313153 - DNA, 75 bp, synthetic construct
  source 1..75: mol_type = other DNA
gaaaaaccagaagacgctggcgagacttcagcgacagttaagccgcaaggtcaaattcagcaacaactggcagaa

SEQ ID NO: 313154 - DNA, 75 bp, synthetic construct
  source 1..75: mol_type = other DNA
actgcgctcaccgtcagttgattcctgtatctgatctcgtcatctactaccatctggcaggtacccatactgtcg

SEQ ID NO: 313155 - DNA, 75 bp, synthetic construct
  source 1..75: mol_type = other DNA
ggtaggtatgttgattgactggatggtgcccgtcgaccgtcgttggaattatcagaaacctgataacgtcgaatc

SEQ ID NO: 313156 - DNA, 75 bp, synthetic construct
  source 1..75: mol_type = other DNA
gtgctcaaatcacttatgtatgccgcaatagcgggtggttgtgtggctgcctgtgaagcctgctaccaaattttc

SEQ ID NO: 313157 - DNA, 75 bp, synthetic construct
  source 1..75: mol_type = other DNA
cagaatttccgaaacgcccgctttaccgggttacacaaaaaggccacggtgtgcggatgcgtaaatattcccgcc

SEQ ID NO: 313158 - DNA, 75 bp, synthetic construct
  source 1..75: mol_type = other DNA
gccgctccagttcatgatggacggcgaagtggtggcatggcgggttaaccgcgattacgcggctatcgaatgtta

SEQ ID NO: 313159 - DNA, 75 bp, synthetic construct
  source 1..75: mol_type = other DNA
cgaaaagcgttattgatccgagggaagaagaaacactcacctgtactgttgcgaatagattattctccaataaat

SEQ ID NO: 313160 - DNA, 75 bp, synthetic construct
  source 1..75: mol_type = other DNA
cattcaaacggctgcaagtctattctaacggcttaggaaaggagttgcttacgagagggtgtcttactatcctcc

SEQ ID NO: 313161 - DNA, 75 bp, synthetic construct
  source 1..75: mol_type = other DNA
tttatccgccgcccatctgcggctggcgcgcgtctgcattgaaaatctggactgggccgactgtattcgccgcta

SEQ ID NO: 313162 - DNA, 75 bp, synthetic construct
  source 1..75: mol_type = other DNA
gattgggatgtgattcacccaggcagggaatgggcagaaaaatgtactggcaggcattcagaaccagcctctgta

SEQ ID NO: 313163 - DNA, 75 bp, synthetic construct
  source 1..75: mol_type = other DNA
cttaactacaatcctattgtagttgatactaaaggtataagagctattgattttgcaggcctcatccgcattacc

SEQ ID NO: 313164 - DNA, 75 bp, synthetic construct
  source 1..75: mol_type = other DNA
ctgggtattatctttactaccccagccgcaagcagcatccgccagcttttgcgttgttgatcgatgcgcttcgct

SEQ ID NO: 313165 - DNA, 75 bp, synthetic construct
  source 1..75: mol_type = other DNA
taacacctgtttgcgccttcctgttaaatcattccgagatccaccatgaaccagcatttttaaggttattcataa

SEQ ID NO: 313166 - DNA, 75 bp, synthetic construct
  source 1..75: mol_type = other DNA
aactcggttttgaatatccaccacgcgatccgctgaaaggattgaacgtatctatgccgaaggagctgaaattat

SEQ ID NO: 313167 - DNA, 75 bp, synthetic construct
  source 1..75: mol_type = other DNA
ctggcgcggggaactcgaggtcgcagtcctgctcaatctgccccgtgtcggtttatccccgctggcgcggggaac

SEQ ID NO: 313168 - DNA, 75 bp, synthetic construct
  source 1..75: mol_type = other DNA
ccccgctggcgcggggaactctttttatgcgtggcagtaaatccccacgtcggcggtttatccccgctggcgcgg

SEQ ID NO: 313169 - DNA, 75 bp, synthetic construct
  source 1..75: mol_type = other DNA
tttattattaataaataagcttttttctttgttggccattttaaaaggaggtgtattgcatgtttttaatcgcaa

SEQ ID NO: 313170 - DNA, 75 bp, synthetic construct
  source 1..75: mol_type = other DNA
taccgcatgaaagctatttgaatgaacaaaaaaaaacactttgcaactcagaactaaaattttccctctctgatt

SEQ ID NO: 313171 - DNA, 75 bp, synthetic construct
  source 1..75: mol_type = other DNA
caaaacttcctaatctctatggcgatactgcgtgggttagggcggatatggtttaccaggcgataaaaatctgtg

SEQ ID NO: 313172 - DNA, 75 bp, synthetic construct
  source 1..75: mol_type = other DNA
aagatattgaaccatggattaaatttagtacaatgagaaatttttggattaggcgattcttccgtattgctcctc

SEQ ID NO: 313173 - DNA, 75 bp, synthetic construct
  source 1..75: mol_type = other DNA
tacaaaatcatcgctgcatcaacatgcgtttgccaactgccggtgggctttaccactgggagttcgagcgagaag

SEQ ID NO: 313174 - DNA, 75 bp, synthetic construct
  source 1..75: mol_type = other DNA
tgctgaacgtcagcgtctgaaagagctggagcgtgaaaatcgtgaactgcgccgcagtaaacgatatccttcgcc

SEQ ID NO: 313175 - DNA, 75 bp, synthetic construct
  source 1..75: mol_type = other DNA
ggcgcggtttatccccgctggcgcggggaactctgccactggtttcatgcaggccgcgcaaaaatcggtttatcc

SEQ ID NO: 313176 - DNA, 75 bp, synthetic construct
  source 1..75: mol_type = other DNA
catgagctcgatagtaatagtgattcaggagttaaaaatgattacatcactaatatttcaaccccgacattaacg

SEQ ID NO: 313177 - DNA, 75 bp, synthetic construct
  source 1..75: mol_type = other DNA
gcaagactgaacctggtgtccgtcttacaatttctattgctgataatacatacaatgttattgttgatgacacag

SEQ ID NO: 313178 - DNA, 75 bp, synthetic construct
  source 1..75: mol_type = other DNA
ctggagcaactgttactataaaaataagcgatcatatttactcgacgattgcaaatacagatggcacctggactg

SEQ ID NO: 313179 - DNA, 75 bp, synthetic construct
  source 1..75: mol_type = other DNA
agtagcccgtatcgagggggatgcacaaacattaaaatcgagcaaaataccaatcaacagtttcgtcaattacga

SEQ ID NO: 313180 - DNA, 75 bp, synthetic construct
  source 1..75: mol_type = other DNA
ggctggatcaaccgtgtatattcagatcggtagccgacagtacagtgtcactgtaccatccaaccgtcaatggca

SEQ ID NO: 313181 - DNA, 75 bp, synthetic construct
  source 1..75: mol_type = other DNA
ggaagtactgaaccaggcctgacagtaacggttactgtcggagacaaaatttatcaggttgttgctgatgacgat

SEQ ID NO: 313182 - DNA, 75 bp, synthetic construct
  source 1..75: mol_type = other DNA
atgtaaacggccggtggaatattactgtcagtgatcctcttcctgaagggagtaatccttataccgttcaggcaa

SEQ ID NO: 313183 - DNA, 75 bp, synthetic construct
  source 1..75: mol_type = other DNA
ctcctcccaaaaggcacaatcggataagaaagaagatgataataaaagactcacagaattacttaacgaaaataa

SEQ ID NO: 313184 - DNA, 75 bp, synthetic construct
  source 1..75: mol_type = other DNA
cgtagggaggggactcattcctcgggttgaaatgacatcttatgatggtagtactattaatcctgctttcagttc

SEQ ID NO: 313185 - DNA, 75 bp, synthetic construct
  source 1..75: mol_type = other DNA
ttattcttatacagtcagtgtgactgacaatgcaggaaatgtttcgtcaagcacaggacaggttagtgtgttagc

SEQ ID NO: 313186 - DNA, 75 bp, synthetic construct
  source 1..75: mol_type = other DNA
gaaatatcagtacaggtacaggctctgtaactattgatacaactggaccggagttaacacagcagatcgatccgt

SEQ ID NO: 313187 - DNA, 75 bp, synthetic construct
  source 1..75: mol_type = other DNA
tacatttgtagaaacggatgtcgcgggtaacaaaactgaacaaaagattaagtttcagtttattacggaaaaacc

SEQ ID NO: 313188 - DNA, 75 bp, synthetic construct
  source 1..75: mol_type = other DNA
atctagtcattgacatcctgaatgatttgatctgtgaaggaaaaatgctggtaagcgtacagcgagggccgtatt

SEQ ID NO: 313189 - DNA, 75 bp, synthetic construct
  source 1..75: mol_type = other DNA
tcctgttaatggcattaatgagctatcacaacgtcggtaatgactccaacttattgatagtgttttatgttcaga

SEQ ID NO: 313190 - DNA, 75 bp, synthetic construct
  source 1..75: mol_type = other DNA
cggcgctgttctgggtattacaggtcatcatggtggcagataccgttgactacggtgaatataaattgcacatcc

SEQ ID NO: 313191 - DNA, 75 bp, synthetic construct
  source 1..75: mol_type = other DNA
gtctggtcgtggtcgtctgccgaagcctgtagaagaagctatgaagaaaggcgctaaaaaagaagacttcttgat

SEQ ID NO: 313192 - DNA, 75 bp, synthetic construct
  source 1..75: mol_type = other DNA
cagcaaaacttgatcccgccaactatatggtgcatagggccagaagtatgctggcgcaactaagagcaagacaat

SEQ ID NO: 313193 - DNA, 75 bp, synthetic construct
  source 1..75: mol_type = other DNA
atggcatgcataacagcagggttatccggtgaatcggacagacagccgggctgtattcgcggcaggataaaggaa

SEQ ID NO: 313194 - DNA, 75 bp, synthetic construct
  source 1..75: mol_type = other DNA
gtgaaaaacttcagcaagctgaataacaaagttactcaactgccggacaagaaattcagcaagggcaaaaaaggc

SEQ ID NO: 313195 - DNA, 75 bp, synthetic construct
  source 1..75: mol_type = other DNA
aaattatattggagtgacctggacacatcaagtagccgtgggtttgtatattgtacttcaaaaagtaattccagc

SEQ ID NO: 313196 - DNA, 75 bp, synthetic construct
  source 1..75: mol_type = other DNA
tggaatttataacccagattatcctaatgccaacggtcgtactacaacccaggacctgaaatttcaggcaacatt

SEQ ID NO: 313197 - DNA, 75 bp, synthetic construct
  source 1..75: mol_type = other DNA
tggctcttgcttataatgtagccagcaacattattaccggctttgctatctattatttctcatatgttatcggtg

SEQ ID NO: 313198 - DNA, 75 bp, synthetic construct
  source 1..75: mol_type = other DNA
ctgtaatcttatttctcctctttagtgcgcatctgtttgaaggtactactcagattgtctttgtttgcgtgacct

SEQ ID NO: 313199 - DNA, 75 bp, synthetic construct
  source 1..75: mol_type = other DNA
aactacgtgatgaacagtgtatgacattcgccgcgatagcaaaacacatcaatcacacactgcaaataaaagcga

SEQ ID NO: 313200 - DNA, 75 bp, synthetic construct
  source 1..75: mol_type = other DNA
gaagtgctgcgcctgcaacgccaggccaatgaactggaaaacaaactcagcgacgtgcgcacgcaatactacgtt

SEQ ID NO: 313201 - DNA, 75 bp, synthetic construct
  source 1..75: mol_type = other DNA
atggtcagttcgcacgatgacggcaccaagatcaccgtggtaatgaaccacaagcaatacgccattccctcaacc

SEQ ID NO: 313202 - DNA, 75 bp, synthetic construct
  source 1..75: mol_type = other DNA
cggcgagcgggaaaaagcgcagcggcgcagcctggcagagacgctccagcaggaagggagtgagaacggccacgg

SEQ ID NO: 313203 - DNA, 75 bp, synthetic construct
  source 1..75: mol_type = other DNA
caatggaccacgatgctcaggggcggtacgtataatgaaaaggcagcatcagccatcattttcagtaatgcctta

SEQ ID NO: 313204 - DNA, 75 bp, synthetic construct
  source 1..75: mol_type = other DNA
gaatcacgaaacgctatctgcataccttccctctatcgtcaatttattacgtaatcgatggaatttgttggattt

SEQ ID NO: 313205 - DNA, 75 bp, synthetic construct
  source 1..75: mol_type = other DNA
gctctgctgcgatgtctggatgggtaactaacatcttgcatttgcaacaaacggtaggtcatgaaaaaagtggag

SEQ ID NO: 313206 - DNA, 75 bp, synthetic construct
  source 1..75: mol_type = other DNA
ggctctggtggggcctttgagatgttcgggcatatcgccgggaaaatcgttgagggtgccacagatgcgtttaca

SEQ ID NO: 313207 - DNA, 75 bp, synthetic construct
  source 1..75: mol_type = other DNA
caactgctgatcgaggcaaaaatctccccgcgcgatgtggcgtttatccatccggggcaaaaatcgctggtgaaa

SEQ ID NO: 313208 - DNA, 75 bp, synthetic construct
  source 1..75: mol_type = other DNA
caaaactgaatccgacgtacaggaagcgatgtcgcggctgtacgcagcgctggcaacctcggcgcggttgcgggc

SEQ ID NO: 313209 - DNA, 75 bp, synthetic construct
  source 1..75: mol_type = other DNA
atgaacggacaactgcaatataaccgtggcctgactgaaccccggctgccgcgttcggcgctggcggtacgtgtt

SEQ ID NO: 313210 - DNA, 75 bp, synthetic construct
  source 1..75: mol_type = other DNA
acgggcatacctcggcaaaagaaagattataatgacatcccctatgatttttttggtgaggcctatgatgccctg

SEQ ID NO: 313211 - DNA, 75 bp, synthetic construct
  source 1..75: mol_type = other DNA
atgaaaaaatactatcaatcacagatggtgagccagtatatacagcaatccatgataagatcctggttgcagtat

SEQ ID NO: 313212 - DNA, 75 bp, synthetic construct
  source 1..75: mol_type = other DNA
ggtattgtgttcccgctggttgtcggtctgatcagtgttctttttcagaaaaaatcatcccggattcatatccag

SEQ ID NO: 313213 - DNA, 75 bp, synthetic construct
  source 1..75: mol_type = other DNA
taatgctcaatagattctggtcgtttgaacttagctcaagctcttcagatatgtacgttggagacgacggctggc

SEQ ID NO: 313214 - DNA, 75 bp, synthetic construct
  source 1..75: mol_type = other DNA
cgttgcctcaatgcttgagctaggcggcggttttcaccctgaattaaccgggcgagaaaatatttatctcaatgc

SEQ ID NO: 313215 - DNA, 75 bp, synthetic construct
  source 1..75: mol_type = other DNA
taacaacaaagagttagtggctcactgcattaatctttttttagagctttttgggttgtgcgaaactgttgacga

SEQ ID NO: 313216 - DNA, 75 bp, synthetic construct
  source 1..75: mol_type = other DNA
gctacacgtatcagtatgagaaggaccgcatcaccatcaccgacagcctgaaccgccgtgaagtgctgcacacgc

SEQ ID NO: 313217 - DNA, 75 bp, synthetic construct
  source 1..75: mol_type = other DNA
gtacgtgaaagtgaagcctggtgcgcaaacagcaattgttaatggtcagcctctggcactgcaagtaccggtagt

SEQ ID NO: 313218 - DNA, 75 bp, synthetic construct
  source 1..75: mol_type = other DNA
cctttgccggactcggaacccgtgattacagcacgcattcatggtatgccggtgctgaagcaggctaccgctgtc

SEQ ID NO: 313219 - DNA, 75 bp, synthetic construct
  source 1..75: mol_type = other DNA
cggttataccggagtccaaattacagataacgactatatgtctggccttttggggctagggatcaataccagtat

SEQ ID NO: 313220 - DNA, 75 bp, synthetic construct
  source 1..75: mol_type = other DNA
gtaattatggtgatttaaatattaaaagtctggcttttgactcttttaaagaaaggcttgagtctaccatggcgg

SEQ ID NO: 313221 - DNA, 75 bp, synthetic construct
  source 1..75: mol_type = other DNA
tgacggaatatttcgctctgaacattattggctcgacagcggtatgatattttatccaggagatggtcatctctc

SEQ ID NO: 313222 - DNA, 75 bp, synthetic construct
  source 1..75: mol_type = other DNA
agctgatgaatttggcaatcctgtgaatgacggtctggatttgctgacagatgatgcagtgtacttacaaaatgt

SEQ ID NO: 313223 - DNA, 75 bp, synthetic construct
  source 1..75: mol_type = other DNA
atcgcttatacccctgccgggcagttacagagccagcacctgaacagcctgctgtctgaccgcgattacacctgg

SEQ ID NO: 313224 - DNA, 75 bp, synthetic construct
  source 1..75: mol_type = other DNA
ctgactgttccggttatgtaacccgttatgaccatgaccgttttggtcaggtgacggcggtgcaccgcgaggaag

SEQ ID NO: 313225 - DNA, 75 bp, synthetic construct
  source 1..75: mol_type = other DNA
atgttaagtattatcacttcagccatatccgccctcattctgttgctcgccaccttcagtgccagtgccgctcag

SEQ ID NO: 313226 - DNA, 75 bp, synthetic construct
  source 1..75: mol_type = other DNA
gttccggcagctacacccgcgccagagataatgcccctgacacttaaggtgaacggcaaaaccgagcagttggac

SEQ ID NO: 313227 - DNA, 75 bp, synthetic construct
  source 1..75: mol_type = other DNA
tccctacaacttgcacaaaatgatctgctacgagaactgacagatgactgcgcccagtttatagaagaacttaaa

SEQ ID NO: 313228 - DNA, 75 bp, synthetic construct
  source 1..75: mol_type = other DNA
ttttcagtgatgcttttagcgatgcgatttcgatgggatatgtcgcggatcctgacaggccagagcatgctccgt

SEQ ID NO: 313229 - DNA, 75 bp, synthetic construct
  source 1..75: mol_type = other DNA
ttatattcgcactgattcagataagctgcgaaataaacagggtaagacttttgcgattacgcctggaatggtggc

SEQ ID NO: 313230 - DNA, 75 bp, synthetic construct
  source 1..75: mol_type = other DNA
agatgggcacagattatatgaaaccaatgttaccggtctatattatacgttaatgctcaatagattctggtcgtt

SEQ ID NO: 313231 - DNA, 75 bp, synthetic construct
  source 1..75: mol_type = other DNA
aaccggttaaagcgatgtatcgttgcttatcacgtagcctgattaaattacaatataatgtacacttacggaatg

SEQ ID NO: 313232 - DNA, 75 bp, synthetic construct
  source 1..75: mol_type = other DNA
atgctaaataattttataaaacaagctattgaagatcaccaatttataaaagttgaaagtacgctagaaaatatt

SEQ ID NO: 313233 - DNA, 75 bp, synthetic construct
  source 1..75: mol_type = other DNA
aattggcgcagggtatgttatatatagagtgattcgatttataccttcacttgcaccacctctttggtggtcaat

SEQ ID NO: 313234 - DNA, 75 bp, synthetic construct
  source 1..75: mol_type = other DNA
agcagatgtggggatggggtctggtgcgccagctatcggtgtcccattcttctggccctccgcagcaatgccgaa

SEQ ID NO: 313235 - DNA, 75 bp, synthetic construct
  source 1..75: mol_type = other DNA
tcgatttggtttccgctccagaaacaactgccgatgagatccgtgaacgtatgagcggcaacatctgtcgctgtg

SEQ ID NO: 313236 - DNA, 75 bp, synthetic construct
  source 1..75: mol_type = other DNA
aacgtcctgctaaagcttcatttcatgaaccacctttacctaaatcgagtatggtcatctggattattggcttag

SEQ ID NO: 313237 - DNA, 75 bp, synthetic construct
  source 1..75: mol_type = other DNA
ctgataagttattagaacaaaatcaggaaagaatgaattatgagttactcctaaatgagcaactactagcaggta

SEQ ID NO: 313238 - DNA, 75 bp, synthetic construct
  source 1..75: mol_type = other DNA
ggcaaccagcttaatgaggagaacccgcatcatgtgtatcagccgtaccgtctgccggggcagcagcatgatgag

SEQ ID NO: 313239 - DNA, 75 bp, synthetic construct
  source 1..75: mol_type = other DNA
gggagcttcgcgccgctcatccgcatcgaaacagacaacggtgagcgggagaaagcgcagcgccgcagcctggcg

SEQ ID NO: 313240 - DNA, 75 bp, synthetic construct
  source 1..75: mol_type = other DNA
accctccatattcagttagtacaaatgtttataattacatcgctgaaaatattgactcttggatcgaagaagcaa

SEQ ID NO: 313241 - DNA, 75 bp, synthetic construct
  source 1..75: mol_type = other DNA
cctgttccgccctgggtatggtgctcacggaaataatgatatttctgtggctattgagttctcattgaaatgcga

SEQ ID NO: 313242 - DNA, 75 bp, synthetic construct
  source 1..75: mol_type = other DNA
ctttaggtgagtgtaccagaggagctcatagtggactgcctttttatcgggtggatggaccgttgcagacgatga

SEQ ID NO: 313243 - DNA, 75 bp, synthetic construct
  source 1..75: mol_type = other DNA
ccgctcatccgcatcgagacagagaacggcgaactggataaagcgcagcggcgcagcctggtggagaagttacag

SEQ ID NO: 313244 - DNA, 75 bp, synthetic construct
  source 1..75: mol_type = other DNA
agccggaatacacaccggcgcgaaaagttcatttttaccactgcgaccaccggggcctgccgctggcgctcatca

SEQ ID NO: 313245 - DNA, 75 bp, synthetic construct
  source 1..75: mol_type = other DNA
tataaaagctcatcgaaaatcaataattgcttgaacagaattaaattaccagagatgatagatttctcatcagaa

SEQ ID NO: 313246 - DNA, 75 bp, synthetic construct
  source 1..75: mol_type = other DNA
gtgtgttgagtgtggaagaggggaaagggcgtatccttcctgaacagcaaggggcgattgatctacctgaaatcc

SEQ ID NO: 313247 - DNA, 75 bp, synthetic construct
  source 1..75: mol_type = other DNA
attaacgtccgctattctgatacgagtggattgtacgcctgggaattcgagaaagatgctcagaaattcagtctg

SEQ ID NO: 313248 - DNA, 75 bp, synthetic construct
  source 1..75: mol_type = other DNA
ctttcgcagcgatgacacagccctgtatgcaaaggaaaagcagcgggtatggtgtcataccgtgtacatgacgcc

SEQ ID NO: 313249 - DNA, 75 bp, synthetic construct
  source 1..75: mol_type = other DNA
gcactgctcatcggctggggtattactggcgctggcattttattgctggcctttgccatgctgatcctcacgcgc

SEQ ID NO: 313250 - DNA, 75 bp, synthetic construct
  source 1..75: mol_type = other DNA
tagattattacatcgatataatcattaaagattatgaaagcgtcaaagaaaatgcttatcttatcgatccaaaaa

SEQ ID NO: 313251 - DNA, 75 bp, synthetic construct
  source 1..75: mol_type = other DNA
aaaataaaagtgtattttaaacagtttaaaattacccctgatagggctgggaaaatcttagcatcgttaagagac

SEQ ID NO: 313252 - DNA, 75 bp, synthetic construct
  source 1..75: mol_type = other DNA
tatgtacggcagaaaagtaaagctatcccattctgaaatgattgaagataataaaaaagacttggctgtaaatga

SEQ ID NO: 313253 - DNA, 75 bp, synthetic construct
  source 1..75: mol_type = other DNA
cgggacccttcacccggaggcaagcccaagcagtcactaccacgtacagcaatatcactatcgaagacgaccagg

SEQ ID NO: 313254 - DNA, 75 bp, synthetic construct
  source 1..75: mol_type = other DNA
aggtaatcactgttaatgatgggagggagatgattgagagtttgtgtcatgctcttatcttggactggaaacaca

SEQ ID NO: 313255 - DNA, 75 bp, synthetic construct
  source 1..75: mol_type = other DNA
tcagatgataaagacgtcatcgcaattgatggaaaaacactccggcattcttatgacaagagtcgccgcaaggga

SEQ ID NO: 313256 - DNA, 75 bp, synthetic construct
  source 1..75: mol_type = other DNA
cagcagcatgatgaggaatcagggctgtactataaccggaaccggtactatgacccgctacaggggaggtatatt

SEQ ID NO: 313257 - DNA, 75 bp, synthetic construct
  source 1..75: mol_type = other DNA
atgtcgctgtcgcgtaaaccggagttgacttggtacggttgggacggcgactggctgacgacggtacagaccgac

SEQ ID NO: 313258 - DNA, 75 bp, synthetic construct
  source 1..75: mol_type = other DNA
cagagctatcaatggactgagactcaaaaagttcctgatcaattgcttgctatacatattgccagtgccagattg

SEQ ID NO: 313259 - DNA, 75 bp, synthetic construct
  source 1..75: mol_type = other DNA
ctaaatttaatccccctttaactgaagcagtcttgctggcggggagagaaaagcaaaaagagcgttttctgaatg

SEQ ID NO: 313260 - DNA, 75 bp, synthetic construct
  source 1..75: mol_type = other DNA
aaacaacgtaacgatgtttctgaaacagatttggcatttaaagaaatgacctacttgccttgttttccggatagc

SEQ ID NO: 313261 - DNA, 75 bp, synthetic construct
  source 1..75: mol_type = other DNA
tgtaattttcacgcataaccactgtctgtcgaaaattgcaaaaaagatgaacggctggagatttaaacctgatta

SEQ ID NO: 313262 - DNA, 75 bp, synthetic construct
  source 1..75: mol_type = other DNA
atgcattcagcaaaatgtttccggactacggtctctattcaacagatacagtccgaacgatacagacagcctctt

SEQ ID NO: 313263 - DNA, 75 bp, synthetic construct
  source 1..75: mol_type = other DNA
ttttgatatttcacttcaaaactgcgttcgtgtgactaatattgagacaaaattagtttcaacaaaggttggtac

SEQ ID NO: 313264 - DNA, 75 bp, synthetic construct
  source 1..75: mol_type = other DNA
atcagccgatgcgtaacttaaacaggtgcgttatgaccacaattcgtatcatcaaagtcccggaagttcttgaac

SEQ ID NO: 313265 - DNA, 75 bp, synthetic construct
  source 1..75: mol_type = other DNA
gtcttgatgattatgataatcccgcctggacgccagtaagagacgctgagtatgtggcagaattgcattacagtt

SEQ ID NO: 313266 - DNA, 75 bp, synthetic construct
  source 1..75: mol_type = other DNA
acgggtgtggcggcgggagcgtgacctgacggggtggatgtcgctgtcgcgtaaaccggagatgacatggtacgg

SEQ ID NO: 313267 - DNA, 75 bp, synthetic construct
  source 1..75: mol_type = other DNA
gacatagctcaaaagccattacgctggcatactgtgggatcatggaaaaagatattgagaatgtattccagacaa

SEQ ID NO: 313268 - DNA, 75 bp, synthetic construct
  source 1..75: mol_type = other DNA
tcctggtcatgtgtacctgtttgaagtggatagcaaccgggccaaaggcaaaccgatcagccgagtgacagtttc

SEQ ID NO: 313269 - DNA, 75 bp, synthetic construct
  source 1..75: mol_type = other DNA
gtttaaaggtagtgaatcgccattcgacgaagatgctccatatcaggctggggcatggactgatgaagttgtgca

SEQ ID NO: 313270 - DNA, 75 bp, synthetic construct
  source 1..75: mol_type = other DNA
atggggtacagaacacttccctacacgtttcagcgaaacggcaactactatctgcaaatccggctttcaaatggc

SEQ ID NO: 313271 - DNA, 75 bp, synthetic construct
  source 1..75: mol_type = other DNA
ttggtgcgtacagcgcgacggagatgagaaaatttgtgggttgggcgctcaagcagcctgacggctggcagaaat

SEQ ID NO: 313272 - DNA, 75 bp, synthetic construct
  source 1..75: mol_type = other DNA
tcctgcgccgacgattacagcgccacagcttaaagttgatatggcaggtaatccactgatgacgccgccagcgtg

SEQ ID NO: 313273 - DNA, 75 bp, synthetic construct
  source 1..75: mol_type = other DNA
cagagaacgctacaaggcaggtagtcatccaccctaagttaatcaaatggggtttcatggaatacgttgatcgcc

SEQ ID NO: 313274 - DNA, 75 bp, synthetic construct
  source 1..75: mol_type = other DNA
atcggtaaattttttgcggatctgcgtgatcagctcggtatcccttatcttgatgattatggacaacggcggctg

SEQ ID NO: 313275 - DNA, 75 bp, synthetic construct
  source 1..75: mol_type = other DNA
gattacggacagcgccgccttgtgcattcgtttagacacacaatgatttcaacctgtttagctggctgggttggt

SEQ ID NO: 313276 - DNA, 75 bp, synthetic construct
  source 1..75: mol_type = other DNA
atacagcctatttgggtaatcttaatctctctcgctggagtcgtaattaatatctattggataaatctaattact

SEQ ID NO: 313277 - DNA, 75 bp, synthetic construct
  source 1..75: mol_type = other DNA
tgacggaaagccagtaaagcgcggtatgactatcgaccagcaaaccgctgacaggcttctgaaaacagggcttgt

SEQ ID NO: 313278 - DNA, 75 bp, synthetic construct
  source 1..75: mol_type = other DNA
ccgttgcaggggaggtatatcacccaggacccgatagggctgatggggggatggaacccttacctttatccgtta

SEQ ID NO: 313279 - DNA, 75 bp, synthetic construct
  source 1..75: mol_type = other DNA
gcgcaagtgatatggcaatcatcaaacgtgaatggcttgaagctgcaaccgatgcgcacaagaaactcggatgga

SEQ ID NO: 313280 - DNA, 75 bp, synthetic construct
  source 1..75: mol_type = other DNA
tcagaaacggtgccacaccggttccttttgatatttcacttcaaaactgcgttcgtgtgactaatattgagacaa

SEQ ID NO: 313281 - DNA, 75 bp, synthetic construct
  source 1..75: mol_type = other DNA
aaggacaactttatctctgaaggatattgtgaatgtctttattgtggtaaggacttttttgttgatatctggata

SEQ ID NO: 313282 - DNA, 75 bp, synthetic construct
  source 1..75: mol_type = other DNA
tcagccaattaagttaatggatattaagcgcgaaaattatgatgcagttctggatgtcagcctgcgcggcactct

SEQ ID NO: 313283 - DNA, 75 bp, synthetic construct
  source 1..75: mol_type = other DNA
ctgaactgtttctcctataccggtggtttcgccgtatcggcactgatgggcggttgcagccaggttgtcagcgtt

SEQ ID NO: 313284 - DNA, 75 bp, synthetic construct
  source 1..75: mol_type = other DNA
ctgacctcgcagatttataatcacattgagcagattgcgccaaatatacatgttatgttcaagtcttcattaaat

SEQ ID NO: 313285 - DNA, 75 bp, synthetic construct
  source 1..75: mol_type = other DNA
gttctgggaaaagccagatatgatgacttttcttggttttcggtcgggaatgacactatccaagactatctgtta

SEQ ID NO: 313286 - DNA, 75 bp, synthetic construct
  source 1..75: mol_type = other DNA
aactgacgcagatccaacgcaaattcaacggtaacgggaagcttgagctgatgaccaaagtcgagatgaagcaaa

SEQ ID NO: 313287 - DNA, 75 bp, synthetic construct
  source 1..75: mol_type = other DNA
cggaagcattctccggtaagaaaatcaccgccacgatgttcaagggcagcgaatcgccattcgatgaagatgggc

SEQ ID NO: 313288 - DNA, 75 bp, synthetic construct
  source 1..75: mol_type = other DNA
ttgcttctgaatttatgcccgtcagcctgctcacgccgattgcccgcgatttaggcgtgacggaggggttggctg

SEQ ID NO: 313289 - DNA, 75 bp, synthetic construct
  source 1..75: mol_type = other DNA
ggctatatcgatcagaacccggagaacggcaagtatcgcctcggcatgaagctggtcgagcgcggccattttgtc

SEQ ID NO: 313290 - DNA, 75 bp, synthetic construct
  source 1..75: mol_type = other DNA
tttcattaatgacgtatttcagcccttgcgatacgagcgggatgttgaaagagccatcataaaggctggcggaaa

SEQ ID NO: 313291 - DNA, 75 bp, synthetic construct
  source 1..75: mol_type = other DNA
tcatagggtacatattatgaagaaactggggatgaataactcacggataatgaataaaaggatagtcaatatgta

SEQ ID NO: 313292 - DNA, 75 bp, synthetic construct
  source 1..75: mol_type = other DNA
atgtgcgaaaaatgcaaaaaaaataatgccaaagttgaaagcgtgattaaaaaagttggagcggccgaactggtt

SEQ ID NO: 313293 - DNA, 75 bp, synthetic construct
  source 1..75: mol_type = other DNA
gatcgtgaaaaaggttacaagacgacaagcttagtcttctacccacatggttctttgattttggcccaagatttc

SEQ ID NO: 313294 - DNA, 75 bp, synthetic construct
  source 1..75: mol_type = other DNA
tgcacgccaccgccatcggcaaggtgttgattgcctggctgggcgaggccgagctgaacgccctgctggagggct

SEQ ID NO: 313295 - DNA, 75 bp, synthetic construct
  source 1..75: mol_type = other DNA
tcaaagacaagaccaaatatgccggttctatgcaggctgaatatgaggcagccaccgccaaaacgtcggcgcagc

SEQ ID NO: 313296 - DNA, 75 bp, synthetic construct
  source 1..75: mol_type = other DNA
tgaagcggtagacaggagcgtgccgaaaacagccgcaagggatttgatgctaaggatgggcggcgagccgtggtc

SEQ ID NO: 313297 - DNA, 75 bp, synthetic construct
  source 1..75: mol_type = other DNA
tgcagaacaagcgaactaacaaacgcaaggcgcgagcatttcgatcttgataactgtgtgtggaccgtgccgggt

SEQ ID NO: 313298 - DNA, 75 bp, synthetic construct
  source 1..75: mol_type = other DNA
aggtggcgcagaagctgaaacagcagcaaggaatccgaaatcgtagcatgatgaatgacggattagcagcaccgt

SEQ ID NO: 313299 - DNA, 75 bp, synthetic construct
  source 1..75: mol_type = other DNA
gcggcgaggaactggataaggccggtaaaatggggatgacgttcggtaagaccctggcggctggcatcgagcttg

SEQ ID NO: 313300 - DNA, 75 bp, synthetic construct
  source 1..75: mol_type = other DNA
gtgctgctgccagcattcaacggcgttctggctaccgttggcccggttatcggcaaggttgccgaactggcgcgc

SEQ ID NO: 313301 - DNA, 75 bp, synthetic construct
  source 1..75: mol_type = other DNA
accgggtgctgacgggcgtggtggacggcttcgggcggacgctggccttccaccgggcggcagagggggaagcgg

SEQ ID NO: 313302 - DNA, 75 bp, synthetic construct
  source 1..75: mol_type = other DNA
gatattttaaacttaatgtttctacatcatgctaaaatattaccgagaaaatataattgtatttatactataaag

SEQ ID NO: 313303 - DNA, 75 bp, synthetic construct
  source 1..75: mol_type = other DNA
tatcttcagaagatcgccgctaatgcaaaaaaatactcaagtcaattatcctactggtctctacgtcccctactc

SEQ ID NO: 313304 - DNA, 75 bp, synthetic construct
  source 1..75: mol_type = other DNA
aacttcccccttaaaccaatggtccggataattcagatgttctcctgttcaaaaagctattctccccttcgaaat

SEQ ID NO: 313305 - DNA, 75 bp, synthetic construct
  source 1..75: mol_type = other DNA
cgccatggcaaacaagctggcacgaacagtgtgggcaatagctgctcacggacgtaaatacgacaagaatcacgt

SEQ ID NO: 313306 - DNA, 75 bp, synthetic construct
  source 1..75: mol_type = other DNA
ttcgcggcttatgttggtctggtgcccagacagactggctcaggaggaaaaatccgcctgctggggataagtaaa

SEQ ID NO: 313307 - DNA, 75 bp, synthetic construct
  source 1..75: mol_type = other DNA
caccataagctttctactgcggcgcaggcgttgatggaaacgttaaaaaaaactatgacgcataacgtttccgca

SEQ ID NO: 313308 - DNA, 75 bp, synthetic construct
  source 1..75: mol_type = other DNA
atgtgcttaattataatgtcgaggtttcattggtggaacattagcaagaaagattgtcgctgcagttgggacgtt

SEQ ID NO: 313309 - DNA, 75 bp, synthetic construct
  source 1..75: mol_type = other DNA
ccacgcgtatccagacggtataccagccggggagcttcacgccgctcatcagaatcgaaacagagaatggtgaac

SEQ ID NO: 313310 - DNA, 75 bp, synthetic construct
  source 1..75: mol_type = other DNA
ggacgggctgcgccgcagccggaaatatgaccgtcagggcaggctggcggaagaggtctcgcgcaacggtaacat

SEQ ID NO: 313311 - DNA, 75 bp, synthetic construct
  source 1..75: mol_type = other DNA
aaagttcaagtgacccaaatgtgttagcttttatgttatgcattggctcaatctatatgtttttcacattgccaa

SEQ ID NO: 313312 - DNA, 75 bp, synthetic construct
  source 1..75: mol_type = other DNA
gtgaaagaacgcgctgacgatctggtacgcaaagctgaggtacgcaaacaggtacgcagtgaagttacttttaac

SEQ ID NO: 313313 - DNA, 75 bp, synthetic construct
  source 1..75: mol_type = other DNA
agataaggaagattgttgaaaaaaacatcgagaagagatggcgtctttctgatatttcaaataacttgaatttat

SEQ ID NO: 313314 - DNA, 75 bp, synthetic construct
  source 1..75: mol_type = other DNA
gctatcaggcgcgggctaatgaccagtacagcgataaacaatatcagggttattgacgttggcgaaaattatgcg

SEQ ID NO: 313315 - DNA, 75 bp, synthetic construct
  source 1..75: mol_type = other DNA
tgggtatttgataacgatcttcaaggtagaggtattgttgaaataaacatggggaatcacgaattctctagactg

SEQ ID NO: 313316 - DNA, 75 bp, synthetic construct
  source 1..75: mol_type = other DNA
accctggggcaagtcgctgcgctggtcttttctatagatgctccgctgaaagtgttattaggcgatgccgatagc

SEQ ID NO: 313317 - DNA, 75 bp, synthetic construct
  source 1..75: mol_type = other DNA
atggctgggaatgttcaggaaaaacagttgcgatggtacaacattgcgctgatgtcttttatcactgtctggggt

SEQ ID NO: 313318 - DNA, 75 bp, synthetic construct
  source 1..75: mol_type = other DNA
cgtcatttacccttagattacaccccgttagagtttgtccttagtcatcatccagagctggttgaagccatagca

SEQ ID NO: 313319 - DNA, 75 bp, synthetic construct
  source 1..75: mol_type = other DNA
gactggccttgtctggcagttggcactgaggaaagcctggcctctattgttactgcttatcagaaaaatggattt

SEQ ID NO: 313320 - DNA, 75 bp, synthetic construct
  source 1..75: mol_type = other DNA
gggctgcagcggctatagcgcggcttgggcatatgaatttattggtagaacgcatttcccagctccctgtagaaa

SEQ ID NO: 313321 - DNA, 75 bp, synthetic construct
  source 1..75: mol_type = other DNA
aaagcatccctggcgaatggatcctcttatgagaaggatctggtggtaatcgatcaaaaactgacactctcggcg

SEQ ID NO: 313322 - DNA, 75 bp, synthetic construct
  source 1..75: mol_type = other DNA
gataaggaccgttatctctccgggaatcctatcgaggtgacggtagaactgagagatgaaaatgacaaacctgtt

SEQ ID NO: 313323 - DNA, 75 bp, synthetic construct
  source 1..75: mol_type = other DNA
ccctcagcgtttcaccaagtgaaggcgtgacccccagtaataacggtatatatactaccaactactacggcaatt

SEQ ID NO: 313324 - DNA, 75 bp, synthetic construct
  source 1..75: mol_type = other DNA
tcgtgaaaaattaaaatcaagagggaagctggataatttagaaaaaggcatgaaaaatactgttaaatttgaatg

SEQ ID NO: 313325 - DNA, 75 bp, synthetic construct
  source 1..75: mol_type = other DNA
atcagaaaatcctgcaacgcaggaacaccagcagaaacagccggaattaaaagcggaaaataaggcgaaaaaata

SEQ ID NO: 313326 - DNA, 75 bp, synthetic construct
  source 1..75: mol_type = other DNA
ggcacgcatacggttaccgcaacgctgggtaacaataatgccagcgatgcgcaaccagtcaccttcgtggcggat

SEQ ID NO: 313327 - DNA, 75 bp, synthetic construct
  source 1..75: mol_type = other DNA
ccagaagcacaatgatgaacctaacagagtatgcgagcaatgggctaatgaatgccatgaattcgctgcaattaa

SEQ ID NO: 313328 - DNA, 75 bp, synthetic construct
  source 1..75: mol_type = other DNA
aactatttgaatgcagtgaaaggacttagtgacttaattataagtggaataaatcctcatggttattgttccctt

SEQ ID NO: 313329 - DNA, 75 bp, synthetic construct
  source 1..75: mol_type = other DNA
gcctcaagtttgctggcgctagggggaggaaaaccgtggtatgtcgctctgtttttatttgctgtctcagttctt

SEQ ID NO: 313330 - DNA, 75 bp, synthetic construct
  source 1..75: mol_type = other DNA
tatctggtgtactgatggtaccgatgtcgaaatgcttagagagccatgggcagaaatgcagccgggtaaaattta

SEQ ID NO: 313331 - DNA, 75 bp, synthetic construct
  source 1..75: mol_type = other DNA
cttaaatacagtagccgtgtttcctgagctgttgagaaaagtccttaatgatattttagaagatataaaagattc

SEQ ID NO: 313332 - DNA, 75 bp, synthetic construct
  source 1..75: mol_type = other DNA
ttaactacgagtagtcaagaaagatctgcaaataactctctttctcggggacacaggcctctgaacatacagaac

SEQ ID NO: 313333 - DNA, 75 bp, synthetic construct
  source 1..75: mol_type = other DNA
gtgataatcttcggcggatcctaaaagattacggcaatgaggctgtacatgtcctgtacggaacaggtgtagatg

SEQ ID NO: 313334 - DNA, 75 bp, synthetic construct
  source 1..75: mol_type = other DNA
tgtttgtgtttattgttagtagtatacttgtaaccgtgcattttgtgtattctttattttttaaaagtggaaagg

SEQ ID NO: 313335 - DNA, 75 bp, synthetic construct
  source 1..75: mol_type = other DNA
ccagaaattaagtctaaacgcagagagcgcatcaggaaattctttctgagcaattgcagtctgatgtcagtaata

SEQ ID NO: 313336 - DNA, 75 bp, synthetic construct
  source 1..75: mol_type = other DNA
tttgcaagcgtacaatatgaaaatatttctgttgtattgtcaaaacgaagagacattattgagcaagcaccaaca

SEQ ID NO: 313337 - DNA, 75 bp, synthetic construct
  source 1..75: mol_type = other DNA
cggatgtgagcatctattcctttgggacgatgacgcctggcccatcgttgataactggcacctgccatacgtcga

SEQ ID NO: 313338 - DNA, 75 bp, synthetic construct
  source 1..75: mol_type = other DNA
ttgaagaacttcaaaaagagctagaaacagacattaacgacaagctcaaacaaactcaaagccagctgatggagc

SEQ ID NO: 313339 - DNA, 75 bp, synthetic construct
  source 1..75: mol_type = other DNA
ctgaaccgcgcaatcaacgtaacgctggcaataaccgcccgttagggatggtcatttcaaaattaaagccacttt

SEQ ID NO: 313340 - DNA, 75 bp, synthetic construct
  source 1..75: mol_type = other DNA
atgtctaaacttaattctattacgctggcgatcctgtcggtgttggctacttcgcctgcatgggcggaagatgaa

SEQ ID NO: 313341 - DNA, 75 bp, synthetic construct
  source 1..75: mol_type = other DNA
ctgacctggcgtgcgccattggcgactattggtggcagctatagccagtcgaaaagatatcaacaggttagcggt

SEQ ID NO: 313342 - DNA, 75 bp, synthetic construct
  source 1..75: mol_type = other DNA
ttgcaactttctaatggtggggcagatttggaagttatcgtcaaagaagctgatggttcaacgtcgtactatcgg

SEQ ID NO: 313343 - DNA, 75 bp, synthetic construct
  source 1..75: mol_type = other DNA
atgagtatcaatgaaaatgttcatgtattagctggaaatcatgaaacgaattgcaatggtaactatatgcagaac

SEQ ID NO: 313344 - DNA, 75 bp, synthetic construct
  source 1..75: mol_type = other DNA
gcaagcgctacaccatcaacagaacttattggctttgccgcctcggttaagcaaataccagtaaaacaggtagcc

SEQ ID NO: 313345 - DNA, 75 bp, synthetic construct
  source 1..75: mol_type = other DNA
cccaaaaagcgttactggcttctttcgtggcgtccttaatgatggtatcaccggcgcaagccggtgtaccaactc

SEQ ID NO: 313346 - DNA, 75 bp, synthetic construct
  source 1..75: mol_type = other DNA
gtttatgaaccggggcatctggagttactcgataaagtgttaaagttatgtgccaaaaatattcaggcgtcagaa

SEQ ID NO: 313347 - DNA, 75 bp, synthetic construct
  source 1..75: mol_type = other DNA
gatgatgtcgtaaaagaagactatgtttgctggttgagcttattaaaaagagttccttatgcttataatgttggc

SEQ ID NO: 313348 - DNA, 75 bp, synthetic construct
  source 1..75: mol_type = other DNA
cgatacgtcagaaagacggaatagaagaagccagacacgagctggaggaatgtcttaaaaatgaacctgtaaagc

SEQ ID NO: 313349 - DNA, 75 bp, synthetic construct
  source 1..75: mol_type = other DNA
cttattatgccagtcagtattacagtaattataagcacggaggagataataaaagtagctatttaaatctgaata

SEQ ID NO: 313350 - DNA, 75 bp, synthetic construct
  source 1..75: mol_type = other DNA
gacgatccggatgcaacatgtttatcctgggaacagttaaagcaaataggtatcctcactgaaggcattaatatc

SEQ ID NO: 313351 - DNA, 75 bp, synthetic construct
  source 1..75: mol_type = other DNA
tgatacccagggatacctctcgacgtatcatgttcagccagatttactcgattataagaacaaaataatcatcct

SEQ ID NO: 313352 - DNA, 75 bp, synthetic construct
  source 1..75: mol_type = other DNA
gacagcattcagcctaccggctccgcgggcgatttgctggtagtggtgcgtgaagcggacggttcacagcagtcc

SEQ ID NO: 313353 - DNA, 75 bp, synthetic construct
  source 1..75: mol_type = other DNA
aaagcactgatagcgacagcctttaaaacagctacggcaccacggaactgggaatacacaaaacgcgtagcgcca

SEQ ID NO: 313354 - DNA, 75 bp, synthetic construct
  source 1..75: mol_type = other DNA
tatcatgactggttacgtgacgcccacgcaatggaaaagcaagccgaatctatgcttgaatccatggccagtcgt

SEQ ID NO: 313355 - DNA, 75 bp, synthetic construct
  source 1..75: mol_type = other DNA
cgcattcagtttgccctgaagaaatccactgcgccgcgcaactggaactacacccgcagggtggcggcaggttcg

SEQ ID NO: 313356 - DNA, 75 bp, synthetic construct
  source 1..75: mol_type = other DNA
tcgtcatccaaatgcacaatcgttacttgcttccctgagtctgcataaccatctatggttcaaacgctcaaaaga

SEQ ID NO: 313357 - DNA, 75 bp, synthetic construct
  source 1..75: mol_type = other DNA
ggtataaactcgggaacggtgcatgcctttttaacaacggcaatgtcgcgcaatggtttgcagggcgtaaacgca

SEQ ID NO: 313358 - DNA, 75 bp, synthetic construct
  source 1..75: mol_type = other DNA
tgaagccaccggcacctccggcgtgggcaatgatgccgccgtcgaactctctccggttgctggacgaaacgttct

SEQ ID NO: 313359 - DNA, 75 bp, synthetic construct
  source 1..75: mol_type = other DNA
ccggcggtgactgcaccgatcaagccatcggctgggatgatgtcaaacatcttaaaactggtaccgtcagcgtca

SEQ ID NO: 313360 - DNA, 75 bp, synthetic construct
  source 1..75: mol_type = other DNA
atgttggaacaccgctttataaaacgccgagagaaatttgcacagagaaaggacattatgactgcctggacttgc

SEQ ID NO: 313361 - DNA, 75 bp, synthetic construct
  source 1..75: mol_type = other DNA
tacagcatcactgcgcaaacacgacacgaagaaaatggcggcgatgacagtaacgagatcagcggcaacgggacg

SEQ ID NO: 313362 - DNA, 75 bp, synthetic construct
  source 1..75: mol_type = other DNA
tggaaacgacattcgtgctggatgcactggagcaggcattatggtcccgtcgcccgtccggcacagtccatcaca

SEQ ID NO: 313363 - DNA, 75 bp, synthetic construct
  source 1..75: mol_type = other DNA
accatgtcatcgagcgcatcaactgtaccaacggcaaaatcaactggggaatcggcataggccttgcggggagta

SEQ ID NO: 313364 - DNA, 75 bp, synthetic construct
  source 1..75: mol_type = other DNA
ccaggcagtgaaaaactttgtcgtggcgaatatcaccggatcggattgtcggcagttgatccatgttgaaaatgg

SEQ ID NO: 313365 - DNA, 75 bp, synthetic construct
  source 1..75: mol_type = other DNA
tgatatcggaatggtaccttaaccattttatgataaaaatggatgctgtcatgggaccgtcctatactgaaatag

SEQ ID NO: 313366 - DNA, 75 bp, synthetic construct
  source 1..75: mol_type = other DNA
atcttccgggaatgggaagtggtgtgcttgaagatattatgagtattccagatagttcacttagaaaacgtctcg

SEQ ID NO: 313367 - DNA, 75 bp, synthetic construct
  source 1..75: mol_type = other DNA
tgggccattgttggaaggccttaggcataaatatggttcttttaagaatataagatttttaggagagattaaaaa

SEQ ID NO: 313368 - DNA, 75 bp, synthetic construct
  source 1..75: mol_type = other DNA
tattgtaaggtcgccaataaaatttcatgtcaatttaacttaaatagttttaaagaagattatattgtattgtat

SEQ ID NO: 313369 - DNA, 75 bp, synthetic construct
  source 1..75: mol_type = other DNA
cactcaatttattacagcaaataatacaaaccattattgatactgatagcgctatcgttcaaggcattcgctcat

SEQ ID NO: 313370 - DNA, 75 bp, synthetic construct
  source 1..75: mol_type = other DNA
aacaacttgtccagtatcagagaaaagaaaccgaacgcgccacagcagcaagttcgataggtgttattatcgggt

SEQ ID NO: 313371 - DNA, 75 bp, synthetic construct
  source 1..75: mol_type = other DNA
taataatctttatggtagtgaaattaggataagaggtattaatgagaattttgttgggatggattttacctgtga

SEQ ID NO: 313372 - DNA, 75 bp, synthetic construct
  source 1..75: mol_type = other DNA
aggcgctgattatttcagtgcaaaaaactggttgtatcatcatggcgcaaacggggtaattatatatcaccccat

SEQ ID NO: 313373 - DNA, 75 bp, synthetic construct
  source 1..75: mol_type = other DNA
attaacaagaattggctgctatacacgtacagctatggatgaaatgtataatcatttatctgtttgtcttgctca

SEQ ID NO: 313374 - DNA, 75 bp, synthetic construct
  source 1..75: mol_type = other DNA
ctggagcaggaaagccagctgtacggctcttttgacggggcgatgaagtttatcaagggcgatgccatcgcgggg

SEQ ID NO: 313375 - DNA, 75 bp, synthetic construct
  source 1..75: mol_type = other DNA
atgagaaagggcagagctcggtggatattgaccgggtggatcagcatgtggtgaatacggaacggctgaattttg

SEQ ID NO: 313376 - DNA, 75 bp, synthetic construct
  source 1..75: mol_type = other DNA
cggagtcagaaattatcaacaccatacagctctgtatccggccaaaagataaagcggatgatattacatttattc

SEQ ID NO: 313377 - DNA, 75 bp, synthetic construct
  source 1..75: mol_type = other DNA
cacaccgacgatatttctttcatcctctaccagggacgtcttgaacaacgaggacataactacaccataataaaa

SEQ ID NO: 313378 - DNA, 75 bp, synthetic construct
  source 1..75: mol_type = other DNA
atggccacctatgaaattaaaaatgcgtccagcacatctaatattaacagtcttgataaaacaatctttgataga

SEQ ID NO: 313379 - DNA, 75 bp, synthetic construct
  source 1..75: mol_type = other DNA
acatgacagcacactgaaatcactgggtaacacaatacgatctacgggaatttatgcgcgcacgttaaccatgga

SEQ ID NO: 313380 - DNA, 75 bp, synthetic construct
  source 1..75: mol_type = other DNA
aacacaaggctttgaaaggtataccagaatatcatgggggaggtagtgctatcagtagcgtccctctgagagaat

SEQ ID NO: 313381 - DNA, 75 bp, synthetic construct
  source 1..75: mol_type = other DNA
tgaatgtggcgttatgcacaattatcgtgctgacactttttttctaccgccggaaagacgccacatataaaccgc

SEQ ID NO: 313382 - DNA, 75 bp, synthetic construct
  source 1..75: mol_type = other DNA
ggcccaaattcaccagtttgagcaccaactggccgaggtattctcaattaggctgaaagaatacgaacgacaata

SEQ ID NO: 313383 - DNA, 75 bp, synthetic construct
  source 1..75: mol_type = other DNA
ttttattgtaaaaatggatgctgtccgagggccttcccattctgaaagagttatcaagtggcttgaaaataatct

SEQ ID NO: 313384 - DNA, 75 bp, synthetic construct
  source 1..75: mol_type = other DNA
ttttattgtaaaaatggatgtggtcagggggccttcccattctgaaagagtactcaggtggcttgaaaatcacct

SEQ ID NO: 313385 - DNA, 75 bp, synthetic construct
  source 1..75: mol_type = other DNA
taaatgaatacctagacaataaaaaaattgattttctatcagtcaagggaggtgttgaatttatctctggtgatg

SEQ ID NO: 313386 - DNA, 75 bp, synthetic construct
  source 1..75: mol_type = other DNA
tcgagttattcattaaaaatccgcttgaaaacgggcttaccagtggtgaacaaatggaactggcacgaattgctc

SEQ ID NO: 313387 - DNA, 75 bp, synthetic construct
  source 1..75: mol_type = other DNA
caatcaagcagttctacagagcagaccaccattaaaatatctaaatttaatatccttgatatgctagataatttg

SEQ ID NO: 313388 - DNA, 75 bp, synthetic construct
  source 1..75: mol_type = other DNA
ctgagttaactgctttacttcgtgatgaagtcgaagaaaataatgtgtttgtcaaattggatgctgatttttatc

SEQ ID NO: 313389 - DNA, 75 bp, synthetic construct
  source 1..75: mol_type = other DNA
aagaactgacagaggccacgggttcgccccaaaagtcactgcagaaagaggtattaacgcagaacgggatctttt

SEQ ID NO: 313390 - DNA, 75 bp, synthetic construct
  source 1..75: mol_type = other DNA
attgcatcttccttaagagctaataatccgcttgagcatcttgataaagagcatttgtttataaatagagtgttc

SEQ ID NO: 313391 - DNA, 75 bp, synthetic construct
  source 1..75: mol_type = other DNA
aggtgctactctgacggcaacgctaacctctgcaaatggcactccagtggagggtcaggtcatcaactttagcgt

SEQ ID NO: 313392 - DNA, 75 bp, synthetic construct
  source 1..75: mol_type = other DNA
tgctgcggcaacggttatctcatcgcacgcgtatttatggatgaccgccgggttaagtatttatgctttcggtat

SEQ ID NO: 313393 - DNA, 75 bp, synthetic construct
  source 1..75: mol_type = other DNA
tttttcaccagtatatgacagagacgaatgcgccgggagaggataaggcccggcttcagaaagcatttgagcggc

SEQ ID NO: 313394 - DNA, 75 bp, synthetic construct
  source 1..75: mol_type = other DNA
ctggcgtatttctaagggattttgtgtcgggctggacgggaaagtggatttacccgtggttggcagtcttgacgg

SEQ ID NO: 313395 - DNA, 75 bp, synthetic construct
  source 1..75: mol_type = other DNA
tccaaatgatgatatgctttatttttcgcaatgccagtccctagagacttacagatatttgcatcgatgtgttgg

SEQ ID NO: 313396 - DNA, 75 bp, synthetic construct
  source 1..75: mol_type = other DNA
ggaatttgtgcaatcaggtacaaacgtgccctatatgaaaattagcgcaattgattacactcaaaatatcaacgg

SEQ ID NO: 313397 - DNA, 75 bp, synthetic construct
  source 1..75: mol_type = other DNA
aagctagcctggaaaatggtagctccacgcttagcacgtccatacaagtcgacgctgatgcgtctacggcacatc

SEQ ID NO: 313398 - DNA, 75 bp, synthetic construct
  source 1..75: mol_type = other DNA
cggttttgggtgttcatacagtcgaagccacgctgcttaacggcaatggctatacgacgacagtcaatattgcgc

SEQ ID NO: 313399 - DNA, 75 bp, synthetic construct
  source 1..75: mol_type = other DNA
tcctgtggcgggaataacggtgaacttcaccatgccacaggacgttgcggcaaactttaccctcgaaaataacgg

SEQ ID NO: 313400 - DNA, 75 bp, synthetic construct
  source 1..75: mol_type = other DNA
ccgtcctggtgggatgattgactatatgctggaaacggtgtcgtatgcggcgcggttgtcgaaaagctacatgtt

SEQ ID NO: 313401 - DNA, 75 bp, synthetic construct
  source 1..75: mol_type = other DNA
gcaacgggactgcaatcgcctccctgaccggcacgttagcgggcacgcatatgatcacggctcgtctggctaaca

SEQ ID NO: 313402 - DNA, 75 bp, synthetic construct
  source 1..75: mol_type = other DNA
tctgagctgaagcacatgcggcagcttgaggaagagtatctcaggctgaagaagcttgagcctctacaaggccat

SEQ ID NO: 313403 - DNA, 75 bp, synthetic construct
  source 1..75: mol_type = other DNA
aatgtattttccggatggtgtgtcggagctaatactgcatcaacccagggactgtctgttcgtgtaacacctgta

SEQ ID NO: 313404 - DNA, 75 bp, synthetic construct
  source 1..75: mol_type = other DNA
gatcaggtgatttattgccaatacttttggatggtgatggtttgccgattccctctccaaatgaatttctgttga

SEQ ID NO: 313405 - DNA, 75 bp, synthetic construct
  source 1..75: mol_type = other DNA
ccaggggagcttcttagtcttcgggttgaagatattaatattggggcaatttcgtcggtaactattcaacgaaga

SEQ ID NO: 313406 - DNA, 75 bp, synthetic construct
  source 1..75: mol_type = other DNA
ggacgacccgcgctttacgcttgctgacggcaaagtgaccagtcactggcaaattctcgaacggttttgcgaata

SEQ ID NO: 313407 - DNA, 75 bp, synthetic construct
  source 1..75: mol_type = other DNA
ccaggctaggcttaaaagaaaggtaaaagaagatttatatttcaaattatctccatcattaagatcgctcttata

SEQ ID NO: 313408 - DNA, 75 bp, synthetic construct
  source 1..75: mol_type = other DNA
ttaaatgatatgaagtggtggatagaaaaacatataaaatatgcagacagagaagttgttgatttattaaacatt

SEQ ID NO: 313409 - DNA, 75 bp, synthetic construct
  source 1..75: mol_type = other DNA
tcaagaggttgaagagcaggctcgtcgggcactttctgactatcaaaagaaattgattacagggttcaataaatg

SEQ ID NO: 313410 - DNA, 75 bp, synthetic construct
  source 1..75: mol_type = other DNA
ttattaaatttaaaatcgatggtaaagagctcaagggggcatctgaagaagatacttataaagactggatggaag

SEQ ID NO: 313411 - DNA, 75 bp, synthetic construct
  source 1..75: mol_type = other DNA
ccgcagtcaatgtcagcctggctgcaatttctgccggacaactgccatcatccggtgatgaagttgtcgccggga

SEQ ID NO: 313412 - DNA, 75 bp, synthetic construct
  source 1..75: mol_type = other DNA
gaattggtcggcaatgtcaaattggtgcaggtgtgagttttatagctgaaaaccacagttttgatggcaatgctc

SEQ ID NO: 313413 - DNA, 75 bp, synthetic construct
  source 1..75: mol_type = other DNA
tcataaaaaaaattcctgaaatattatatcaatttccagaagcatcaataatagtagtaggtactaacatcctat

SEQ ID NO: 313414 - DNA, 75 bp, synthetic construct
  source 1..75: mol_type = other DNA
aggctgtcgcaaaagttctcgtatccatcagaaacgataaggatcttgaacaattcttttcggactatatgaaga

SEQ ID NO: 313415 - DNA, 75 bp, synthetic construct
  source 1..75: mol_type = other DNA
gttacccttaagggcacggttttgggtgttcatacagccgaagccacactgcctaacggcaacaacgatacgaag

SEQ ID NO: 313416 - DNA, 75 bp, synthetic construct
  source 1..75: mol_type = other DNA
gcgccctttgaaccagaagtcaaacgtcaggctgtcatggcactctgtacacgacaagtatcagccagtgaaatc

SEQ ID NO: 313417 - DNA, 75 bp, synthetic construct
  source 1..75: mol_type = other DNA
tgctcttactaatgcgcttaatgttatgtgccatttatacaatggctttgatgaaggaaatatcagcctgaaaag

SEQ ID NO: 313418 - DNA, 75 bp, synthetic construct
  source 1..75: mol_type = other DNA
aatactctgcaggatgcagcaattcatctttcaggctgcctgcaatatgcatatctggagtcagtaaagcatgat

SEQ ID NO: 313419 - DNA, 75 bp, synthetic construct
  source 1..75: mol_type = other DNA
ttcacaattttttaagtgaatactatatcaactccgaagaccctatatccccaccaggagtgaaagatgtgggat

SEQ ID NO: 313420 - DNA, 75 bp, synthetic construct
  source 1..75: mol_type = other DNA
tctggtttcacttttatttctattcttctttaaaaaggagttgatatatttatcaataccatttttaatagggaa

SEQ ID NO: 313421 - DNA, 75 bp, synthetic construct
  source 1..75: mol_type = other DNA
aattaaaaaagattatggggcagaacttagcaaaaccttattggcagcaattgttaatatagctttaacttccat

SEQ ID NO: 313422 - DNA, 75 bp, synthetic construct
  source 1..75: mol_type = other DNA
tgcacgacgctctccattaaaaccaaactacttcagtgctaagtctgtcgtagataacggtaatactaataaggg

SEQ ID NO: 313423 - DNA, 75 bp, synthetic construct
  source 1..75: mol_type = other DNA
acggcaaatatggctgcagcgaacaccatgttcgtgacccgtcttcatgaacgtctggggccggtgcagtacacc

SEQ ID NO: 313424 - DNA, 75 bp, synthetic construct
  source 1..75: mol_type = other DNA
cttccggtggctgaacaaggggtgcatttgtgggagatcgcccaggtggagcgggaactgaatcaagggggaagc

SEQ ID NO: 313425 - DNA, 75 bp, synthetic construct
  source 1..75: mol_type = other DNA
aattatgatgggcaaaatggagctgcgcacgctcctgatgtagaagatttttctgatggcgaagcaacttattca

SEQ ID NO: 313426 - DNA, 75 bp, synthetic construct
  source 1..75: mol_type = other DNA
tggatcaagaactcaaggagcgggctgcacaaactgacgttattcaatcagaagcggatgctcggcgtaatattt

SEQ ID NO: 313427 - DNA, 75 bp, synthetic construct
  source 1..75: mol_type = other DNA
cctttggttagaaagatgtaatgatgaggaaatgtttgaatttactcgtcaggttgccgctcatgaaatatgtga

SEQ ID NO: 313428 - DNA, 75 bp, synthetic construct
  source 1..75: mol_type = other DNA
ggcacgcatacggttaccgcaacgctgggtaacaataatgccagcgatgcgcaaccggtcaccttcgtggcagat

SEQ ID NO: 313429 - DNA, 75 bp, synthetic construct
  source 1..75: mol_type = other DNA
ggatgtggctgacgttatcgccagatttgacgacgtcgatatcgccattgtcggcatcggtatccttgaaccctc

SEQ ID NO: 313430 - DNA, 75 bp, synthetic construct
  source 1..75: mol_type = other DNA
atcgcgcaatccccgcaatcctcggggtccgggtaaccgcggaggaaaggcaggtaaaggcgctggcatcattgc

SEQ ID NO: 313431 - DNA, 75 bp, synthetic construct
  source 1..75: mol_type = other DNA
cgacaatacattgtttccctggaaaacggggcgcatggttctgttcaaacatctgaatattttcatgtagcatgc

SEQ ID NO: 313432 - DNA, 75 bp, synthetic construct
  source 1..75: mol_type = other DNA
atgatcacggctcgtctggctaacagcaatgtcagcgatacacagccaatgacgtttgtggcggataaagacaga

SEQ ID NO: 313433 - DNA, 75 bp, synthetic construct
  source 1..75: mol_type = other DNA
agagcttatcaggttgagaggattagtttatctaactatcttatgctgctccttttgatatatacaggtcggaga

SEQ ID NO: 313434 - DNA, 75 bp, synthetic construct
  source 1..75: mol_type = other DNA
tcctggtacatataccaataggggcaggcggttatgatctctcatggatcgaagcggtaggcacgatcgccgggt

SEQ ID NO: 313435 - DNA, 75 bp, synthetic construct
  source 1..75: mol_type = other DNA
gttgagaaagtgctaaaaaaagggaagcaaggaatgcaagaatatgatcaagcatatattgctgagcttcgaaag

SEQ ID NO: 313436 - DNA, 75 bp, synthetic construct
  source 1..75: mol_type = other DNA
ccccagacgtcctggcagcccacagggaatggtcggtctgaccatgctggcgtcaactattccatacctttatga
